United States Patent Application Publication US 2004/0123343 A1 - sequence listing, part 24

SEQ ID NO: 66663 - DNA, 2195 bp, Oryza sativa
  Clone ID: PAT_MRT4530_67593C.1
aagaccgatttaccctcggcgccggccgaccccgggctcgtggccccccctctttttttttttttttttttttttttttttttgtaacaaacaatagcactatattttatagcacctcaaatttgagcgttaatacattgtacaccatacaaccggttttttggtctcaaaatcccagcttagctagttctaatcctcagaaactgcagtaacagcagtatgcccctagtctgctaaacgaacactcctttttgtctcgaactagatcttttcatgaactgatctaacatggacaaaccaacccagaatatgcaacaatggcactatctgaactgcaaaaaaggcttgatctgcatcatctgctgtattggactattggtacgatgacagctttgcgggcgaccttttgtaccttctgttgaaaaatgataagcgaagaattgttcattaggacttaacttcatctccttcctggtcctgcaaacctcctcgccgtaccaaatatgagagcctttgttaacagtccatggtcaaacgtgcatgccagggcaactgcgccacctacaaggatgactttgggtatattgcctgtccagtgctttggtttctcagcttcagcgttgttggttgaactggcctctgtcttgtcctctgcagtgatgagctcatcaggatcaaccttcgtgttgacatgtgccatggcagcgcattttgaaaggggctcgccagcagtccttgcgatttggtatgccctcaagccaggctcaatccttttgacgcagccccacatcccctgccgaacaccgagctttgcaatttcccttggaatccccatttcctcatgatggaacaggagcacctcacatgcggtcattgagccatcaccgtttcttgattcaactggacggatgcaccaactagagtagtacacgtccacacgacgaggtttgttgcaccttggaacagaggggcgaggcacaccctttgttacacagtaatacgtctttccagatgcccatatcctgcgaccgataatgtactccctgtcactgcagaagaacgggaacttcctgacccaccggagaaccatcgttccagtctttgtgcactcctccaacgtatcgtgctgaagaagcatgtcgtcccaagtgttcttaatccggaactcgtcatcccagaagaaatccctgacaacttctggcgatgcatcctcaaagatagtgctactgcggtattgaggcgggccaccctcaggatctctcctccatgcttggtagcgcatcgtgggcagcgtcttgtccatcatgtgaatccacgccggcccgccgtccttctcctcgacaaggcggcggaggtgcatcaaatctccggtgtcgacggccaatccctcatcctcctccggcgcggcggcggccatcgcagttctaggaacggcggcaactagctcgttcttgcggcaggagtcctcggcggcggcacgcggcggcggcggcgcctccccgacgacgacgagggcccagcgcgggcgccacgcccagccgatgagtaggccgacgagggcggcgagccagagcggcgcggcgagggaggcgagctcgagggcgacgccgccgagggtcggctggcggaagacccccatgagcagatcgagcaacgccgacatctcgcttctatttttcttttttgaactaatcacacacacgcctcaggaattaatcaaggaggaagaaaagatccgatttatcctcgtcgtcgtccgcccaaattctgaatcctgaatacaactagtacaagagcagcagcagcaatctgacaatcctccttctggtgatgcaatctgagaagaattttccaagacgcggaagagtagaggtttttgggcctagatgatgatgaaatcagtgtgtgtctattggcaccaaaatctctctctggcgctcatggcgtctgtttttgctcgctggagctcactggaccactataagcaaacgcaacgcaacaacaagcacaaacaccaagcgatcgagaggaggggaaaaaatcagggaagaatccaaaacggcggaggcgagtaatgtgcggtggagaagcgtctgcgtgggggataaggaggctcccctctcctcccactcccagccaccgatcgattccgatggatttgatctgatggagaagaagaagacaatgcctcgtgc

SEQ ID NO: 66664 - DNA, 312 bp, Oryza sativa
  Clone ID: PAT_MRT4530_67594C.1
tatctcctaacaacagtccattactacgaatctgacgagcaagccaattcgatcaccgaaagcaaaggggaaataatggatcaccgacgcagcgagagcggagacgagcgaactcggcgtggcgttgtccgtatgcgcgtgccgtgtcagcgaaatggagaaaaacggaaaggaaaaaaaatcgaatttattttcgtggcggtccagcgtggcggcggtgtgtggccaggccgcatctgcggcgagatggagaaggaggtagaggaggaggaggaggaggaggaggcggaggcgagtagaaagaagggagaa

SEQ ID NO: 66665 - DNA, 1011 bp, Oryza sativa
  Clone ID: PAT_MRT4530_67595C.1
atggcaggcctgttgggcttttggaccctacactggtccaacgggcatgagatcgtcggcgccgacgtatctccctccacgtggcgccatgcgattccagcattaggctccctcctgcagccgtcggatcgccgatctacggtcaggttttcactgagttggttgggagtgcatagtatgttgctcatgaggtactgcacaaatgttatggaccataatctgaggtactacaaaaatattatggaccataatctgaggacacccttggattcacaagcagaactgcaatccctcatgaacacattggcaggacaacagttacagcagaatatcctggataaaagatctacagtgactggctccatggacatcacaacatcaacaaactacaacctactgacataccatggtatattatggcagccagcatcaatcatctggaacaaggcaacccccaacacttgccgcatcttcctttggttggccttcagggacagacttaacaccaatgcaaacagagttcacaaaaaatgggctattgatccacactgcagctcttgcccaactattgaaacagccaaccacatcattcttcactgcaagctagccgacgaagtttggaaaaagctaaaccttcatatgcaagcaatgagcagtgccaacattcaggccttcgtcgagctaatcttggataatatgccggaacaacagaagctaggttggccagcgtgcttcgcagcttgtgcacatggcctgtggaaggcgcgcaatcaacgggctgaagtcagtgaagataaatccaaagcctataatgttgctgatcttggagaggttgctcttgagtttctctacaaagaggatcgttgtaatgttactaatgttaaggaagttgtgcttagtgttattgagaacacaccggttctccacttgattgatccaaaacgaatcaagttcctggcagaaaaccttgctggcaaagaaagcgaagatgaacttgatgaaggaacctaa

SEQ ID NO: 66666 - DNA, 486 bp, Oryza sativa
  Clone ID: PAT_MRT4530_67596C.1
atggcgcgagcatcggagaggagactcgaagcgcaacctcccaacgggccgggccaagctagaggaaaggcccatgggctttcacctgctcgcgcatatggagagatcgagagaggggaaagcgagaagagaagacgcggccacgcaggcggaggcaggaggatgagggtgttgggcaagcacgtcttcccgaggcaggtggcgctgctcgccgcaggggtcgtgttcctcggggcgacgacgtacgacgtgcaccggtcgatcaagaacaacgagcagccgccgaccaaggagcagatggaagccctccaggactacatcaactccaagaagcaaaactagtagctagaaataatcatccatggttcccaataatccgatcaatgcggatcagcttgtgtgtgttcgtctgtaatctgaacagaattggagatgagaccaaaggtggatgggtggaggaggtggggcgcgcacgcatgtgttcgg

SEQ ID NO: 66667 - DNA, 3208 bp, Oryza sativa
  Clone ID: PAT_MRT4530_67597C.1
acaacccaaccgagccttccaagaattttattgatgaattttccccagacaaactgacacaaggatagtcatatgtaacagctgcaatatggctgattggttcatatctgtaagatgattatacatcagaaaccaaccacacacacacacaaatgaaagaagggaagcatcagaagcttcagtgaaatcagtgctggggagcaattcctctccaaacaagtcaacctcctgtactacgtgttcttctacctccatgttgtcattgtcatcgtatgggccatcgttttgccggtcacaatgtgcaattctttcaggtacctagaaggccgaaggatcgccgttcagatcggggagctagtgtgaagttcagtccaaacatctccttcagtgcctgtgctggctccagcagctcaatcagcttcgcaacaagggatgcactctccctgatgtgttccatatcggtctgcgtccagacgagacgagatagctgcaatcttcgctgtttcgagctcagatcgattccccatctagcgtaaacgcgctctttctccccattggtgagcttcttaagcatctgcttgtagagcatgtccctttcgcgtcgaagatttttcaggcttgatacgacggcagaattaagctcgcctcctgcagggctggcactgaaggacctcctaatgaaggacagtctcctgtgctccacctccatgtagatgttatctgctggatctcccttgaagaggaggaagaagtaagttctgtgtacgatgggagcgttgcattcgtgccacaactgaataatctcttgccgcatcttctcaaaatcaataggccaacgagaaggagaggcactcagtgatgaatctatgccaacatctttgacagttctcaaggttgtagatccatctctaatagactgctgatcctgatactcatcaagttcatcctcatggtcactatcagtcttcttcaacttggtgagacaactgatgtcactggtgagagtttcttgttctgcgtcgctggggcacatgtctttggctacttcatcaatggtgctcatgtccttcactacttcatcagaagaaacttcaccagaaaactcagaacggtctactgaagaagggttatcattttctggatacaagcttctcctaaccttgtcaaaccttcttggggtatgcttcaagatttcattaggtggtgtctggctggtgtactcggaatcatcaaaccaactatttggaataatcataaagctagccctgcagcttttacttctagacaacgccctatccttggagctcagtatacacctttttacagtcagacatccattagggtaaggtttctgaatgtcaaaagaaatgttagaatcacatgtatatagcttgacatcattgtctgtggtaccattagattcacatgtatctacgatctcatcttgttgctcctcctcgacagggcacatcctggtaggatcttccattctgtttgttatgctctcaagttcttggtcttcatcaggttgagggactgcttctttggagatctctaattcaggtgtttggaactcggtgtcctggggcagcaaaaggtcgaatttgtgacttgtgcttcttctatgctcatgtatatctatgcattggacttctctacaatgctcttcagagacttctgatgcagttctggaagccgcttctgtcatatgatatgactctatgcaatcagaagaactatggtggctgggagggtgccaaggtgacataaatttttcatgctttgtttcttcaggaagatccactgtttgaacagggaatacaatatcatcacggtcatcactgaagacataggatccattaaacacagcattatcttgatcctggtaaggaacaccagaagtatctgaaactgaaaatgcttcttcagacgcattccgtgcaaaagactctgaggatcgactatgctcatcccatcgcttcgcaacgcggccgtcactatggtcatcacaatcgcttttaagcaagcagtcaagttgagacttcacagtatctctttcttccatcaattcttttagctgtttctccagctttttaatttgtgcatccttctccctcaatgcttcagcatgagtagtgcaggaggctggcgccggaaatttaatctcactttgtaatctttcaagttctctttgtagatgcttcacgagtgccttatcagacatcactacattgacctgtgcatttgtaactacctcctttgcacaagtagcaaacaatagtgtattcctggattgctcaatatgactccgtgcagggctcattgtgcagataatagcagttcttgcattgcctcccaaggaagactgtaatatacgagtcagctttgaatctctgtaggggatatggccatttcttcccttactgagttgccgaacaacttttcccagtgtaagaagacttcgattgatatggctaccttcttttaacctcactccagctgaagcagtctgagatgcacgctcgcttcctgctaggtcaacaaagttcaatctgagtatttgatgggaccttgaactcgtttcattcaaagcagtttctccaatctgcctttgagcttcacacacagcaagaaggttcctaagatgatccttgtccctcaaggtttcctcagtgagtttctctacggtagttcctttctccggatcatcaagaagtctgaggggtgtggtgtcgtggctcaggaggtccctcacagcttcattgtatatctctattgccgaaaatctcaaaatgaattctctttcaggatgcttttcgatgtagtcatagatgtcgagaacactatactcggttatcccggtcatcgtgtaagtcttgccactgcttgtttgcccatacgcgaatatgcttgagttgattccactgacaactgatagagcaacttctttcgctccttcctcgtagacctgccttgtagaggaatcaggaccaaacaccctatcgtaggtgtaggcggtggggaacatggcgcgctcggggacggtgctgcggaacatgacggtggtggggctgatgcactcccagtcgcagctgtcgccggcctccctgccgttgagcggccgcagccgcaccgacaccattatcctctcctccttggcctccgccttgtcccatgccgccgccgcctcctcctccgccgcccccat

SEQ ID NO: 66668 - DNA, 352 bp, Oryza sativa
  Clone ID: PAT_MRT4530_67598C.1
ggacaaagtgcactacaacaagtattaataggggggatggagtacaaaggttactttccaagcttacagcaaaactttagtgcgcacgtttgtttggaggaatgcattagacttctttcagacttctatcacccatactaggtgcaaatgaaaagtcttatcggcaagattccgtcagagtgtaaattggaggattggaaaacagaccaagcttaaaggttgaaatttagcaatctatgttgtgtacaggttacaccttattctaactttcatctaaaatatgacatcattggcctcatctagattgaatctttcggatctatgtacatgaagatgagcgtttccaatggtt

SEQ ID NO: 66669 - DNA, 708 bp, Oryza sativa
  Clone ID: PAT_MRT4530_67599C.1
tcaaaactcaaaatagtccataaattcaaccttcgaaaagttatcatcttcaaattcctctcctgacaccctcccatctggaccagatagccacttgcctgcatggcccagccaagccaaggaccagccgagctgcagcctagccaagctaaggtaggcagccagctccctccatcccgtgtgccctgccatcaccgctgataccatgagcaccacgacgcgtagaggtaggcggcagatggtgacagccatgtccgtcctttgtaatcgttcacattcggagtctccttggaagataaggggtaagccggcgcccgaagcaattgatagagttttaccataactgccagcaaagaacgcatgaagagcatgttgtgaaaccctaatgatgttaagttgatgagatggcatcaacggtttcagcaatagtgaatcttcttcgccgccgtcgcccaaccttgtcatgtgaactcctttggccgccagcaaccccaaggcctccttgggtccacacaccgtcatcattgttccgacccacgcggcggcggccggcgagttcgctgaagccatgccaagctcgctgaaggtcttctcctcggcgaccaccttccgtcgcgccatgttttgcggcctcctctccaccctggccttctccaccgcctgcctcctctttggcctcgcgggcttcctcgccgccgcactctccat

SEQ ID NO: 66670 - DNA, 2562 bp, Oryza sativa
  Clone ID: PAT_MRT4530_6759C.1
ttaactggtctaaatatgacaaagtattctcaaacaacaaccagccccacggtgctgcatttcagcattcccattcataccaagatcacaaaagggaacatatacagtgtaagctgctgttactatcgcaggcggctaccacatcaacctcccccctcccctttccgtttcccacccccctcaccgccgtaatcccgacacccctcgccggcgcacgcgagaagagtagtgctatctccggggtcggaggcgcgggggacgtgtgaactgctttgcgatcgccggcggcggtgctggtggtgttccgggctaggctgcgtcggccgatcggcgggcgggcgcacgcacgcacgcgtcgccattggcggcgagcagcgcgtccccacctttgctgctccgcgcgactcttccgctcccaccccccgcacactccccgtatttcggaacacgtccccgacggcccgactgccgcacgcggcgaggaggccgcggtaattacgggcttagtccgagggggagaacgcaaaaagaccaggagaagacgaccagggagcgcacgcgcaccgcccacctcgccgccggcgaggtctcccgccgccgcctgccattgggagacgtgggccggagagaggcgggagcagcgcgtcagccgtttcccgttcccccccgtcgagaggctccccccgtgatcctcctcctcctcgctcgtcttcttcgccgccgccgccgccgccgcggggatggaggcgggcgggtactacaactgcaagaagacggacggcatctgcgaggacgtctgcgacagcagcgcatggttcaaaaggcatttttattatgtatgtcaaggctggaagtgcgcacttcgggggtttgatttgagagcgatttttgatcctcttgattggtctgccaactctgatattcgattatatcctacattcacagaaagtcacttacttcctcagaccgatctgggaaaaacccccaaagcccttcaaagtgcttcctcactactagaatgaaaatgtctcgatggcaaacctatgcaagttgacatggagggaagtaagtcgaacctgtttttgattttcagcaagcttgacattcttgatatccgttggcatgagcttagcccatatgtgtcagaatttgtgctgctcgagtccaactcaaccttcactggcctgaaaaaggatctccacttcaaggaaaaccgtcaacgctttgaatttgctgaatcacggttgacctatggtatgataggtggaagatttgtgaagggggagaacccatttgtcgaggagtcatatcaaagggttgctcttgaccagcttatcaaaattgctggaatcacagatgatgaccttttgatcatgtctgatgttgatgagatccccagtggccatacaatcaacctcttgaggtggtgtgatgacactcctgaagtgcttcatctccagctcaggaactatctttactcatttcagtttctccttgacgacaagagttggagggcttcaatacacagataccgggctggaaagacgaggtatgcgcatttccggcaaacagacgaccttctggccgactcagggtggcactgcagcttttgcttccggcacataaatgattttgtcttcaaaatgcaagcttacagccatgttgaccggattagatttaagtacttcttgaaccccaaaaggattcagcatgtgatatgccaaggagctgatctttttgacatgcttcccgaagagtatacattccaagagatcattgccaagttggggccaatccctagcacattttcagctgttcaccttcctgcttatctgttggagaaaatggaccagtaccgctatcttcttccgggcaactgcatgcgagaaagtggctagggatgatgatttgcattatgatctgatgcacaatgcccctttggaggaacatcgcgccacagcgtgtagctgatacgattgactagcttagttgagcgaccaattggtggttggtttgagttcatgattttgtactgtgtagttggaaggcctaacagcatagcgcatgcttgggcgtgctgcgtgcttgttttgcagaggagctcggcagagtgtgcttataccacccgagtttattcattgctcccatgattgatatatgaactcaaaactatttgtaaattgtgaactgagtgacactctagatctggtccctccatggtgtacatcgtcatttacttacagatgagatactagtaccatttttctcttcttgaccccgacaaatgttcatctccttgtaactgttgacagtgtccccctgtgttcctaattcgtttaccctttgattttgctgtagtaattaaaagaacacgcaggatatttccctttcgcgtttgtcgacgcgatggaagcggcgggctactacaactgcaagatgaacgacggcggcatttgcgggggcgtctgcggcggcagcgagcatggttcaaaggcaattctgagcatgtcaaggttgaaatgtgcgctttgggggtttgatttgagggcacttttgatcctt

SEQ ID NO: 66671 - DNA, 810 bp, Oryza sativa
  Clone ID: PAT_MRT4530_675C.1
atggagaccgcggcgatgccaagatctccgtgctgctccctcccctccgcccgtgtcctcccctcccgccttcccctcctgccccgccccgcgccggcggctctctcggccccggccgccaggccggtcgtggcccgggtttcctcccttcccggctgtgatggacatcaaccaaatccgcgatatcttgccgcacagattctgattagtgctctacaagatccattagttacatcagttatatgccgtgtgccgctttggaaaggtgatcttctggagtttccattccttctggttgatagagtgattgattacaagccaggggaatatgctgttgggatcaagaatgttacaataaatgataacttcttcccagggcattttccggagagacctataatgcctggtgttcttatggtggaggcaatggcccaggttggaggtctggttatgttgcaacctgaagttggtggatctcgagagaacttcttttttgcagggattgataaagtgagatttcgtaagcctgtgattgctggagacaccttgattataaggatgactctgatcaagttgcagaagaggtttggaatcgcaaagatggaaggaaaagcatatgttggaggcgacctatttttaaggggatgtattggttcaatcaggggtgtacggcgccacggcgggcaagggcagatgctccactacttatattggaattgggatccagaagaactccatgatgaacagtatcaacagcggattgcttggatccattggcatacctacagaccatctttgtgccactcctaa

SEQ ID NO: 66672 - DNA, 282 bp, Oryza sativa
  Clone ID: PAT_MRT4530_67600C.1
gtaagaggagaagagagcgcaatggaaagggcggccatcacggaggctggcactgtagtttcggcgcatggaagacaaagccaaacgaaaatccaaatcagcctgaattgcagcacacaacgaccatggcatgatagttctcgcttctcagatcctttcgtgatgcagccttgaagccatgacagttgagcagcgaaaatatctatgttgatgagacctcaatttagagaaaaaaggaaggcatagaaaggattcagaggagaagcatgctgtatcaagagg

SEQ ID NO: 66673 - DNA, 469 bp, Oryza sativa
  Clone ID: PAT_MRT4530_67601C.1
tcaaagatgattaaaaaaatcgccgtcataacctcctccctgctccgaacccacgcccattggtcttatccttttttcttctgcctcccttcttcttccacctccacccgtgctctcccttcttcttccgcccttctctctttctcccttcttcctcggccgggcggccagatgccgtcgggcgctgatgcggctagatgccgccgggcgccggccagatgtggctagatgtggccgggcgtcggcgtcccatccctgagtgtcggcgtggcgagatccggtggccgaggaagggcgagatccggtgaccactgcagccacctcgtcaggcagttcaggcaggaccggcggccgctgcagccacctcgtcaagtccatcggcaagccgaggcccggcaggaacgtcggcgagataggggatgccaaatccagcctctccaacaccagatccggctcctccaagggctag

SEQ ID NO: 66674 - DNA, 275 bp, Oryza sativa
  Clone ID: PAT_MRT4530_67602C.1
aacattacagcgaaagataacaactagaatcctaccacaattgaagatcatttttcttcttttgchyctcccttgctattgctgcatgtagcgcctctgcsagttttgatgctgttactcaagtttacaggcaatatcagctgcagccgcatctyatgctgcagcaacagatgcttagcccatgcggkgagttcgtaaggcagcagtgchgcacmartggvahhcccttctttcmamkcvmcccrtgrdttyhaactgaggaaacygycaagtta

SEQ ID NO: 66675 - DNA, 159 bp, Oryza sativa
  Clone ID: PAT_MRT4530_67603C.1
atgcggtttgtcgcggtcatcgcatggtttgacgcgtctagggtgctcaaagtctgggtccatccttttcggagaattaggtttttcccaaataagggtgaaaacggattagattatatcgatccaatttgctctgaatccgttcaaaacgaggataag

SEQ ID NO: 66676 - DNA, 334 bp, Oryza sativa
  unsure (1)..(334): unsure at all n locations
  Clone ID: PAT_MRT4530_67604C.1
gttgagcttgagaatgactttgatagggggagcggcgggctcggtgttgggggcagtaagggggcagcgacaggattcgatgcggccaccaatgcagacatgggtggtggtaccaccgccggaggtgccagcggtgctagcggtgaaggtgccggcagcaccaccaccggcgtaaatgcccgccgcgttggtgttgccggtcgctntagtcctatggcggctaggtggcggagctccggtgtggtgtggcgtggaatggatgggcagctaacatttgattgagtaaagagatactcagttttccagtcgtttcatttggttattcatgatataa

SEQ ID NO: 66677 - DNA, 537 bp, Oryza sativa
  Clone ID: PAT_MRT4530_67605C.1
atggcgccgccggccgccgccgcgacctcctcgtcgtcctcctacaccgacacctcgggctcctcctccgactcgtcctcgtcctcggggagcgaccgacgccgacgccgcgcccgccaccgcagcggccaccggaaggatgccgcggcggcggcgtcgtcctcgtcgtcggcgctgaaggcgcgcaaggaccggagtagctcaagctcttacgacagtgaacatgagggcaaatcacgcaagcacaagaagagcagatcatcaaggaagtctagggagagggagcgaagcaaggataggcattctaaacgagacaagagcaaacataaagagctctacacagaagaaaatagtgaacgtactagtggccccgtgcagctctccaagtttcttggacgtgacaaggatgaaggtgttcaaaggagtgcaatctctggtaaaaaggtgaggatggtccctgggaaatccaaggaagacaagcaggcagagagcaagcgcaatgaattgttgaagtttctgaatgcaagttatgattga

SEQ ID NO: 66678 - DNA, 831 bp, Oryza sativa
  Clone ID: PAT_MRT4530_67606C.1
atggcgccgccgcccgccgccgcgacctcctcgtcgtcctcctacaccgacacctcgggctcctcctcggactcgtcctcgtcctcggggagcgaccgacgccgacgccgcgcccgccaccgcagcggccaccggaaggatgccgcggcggcggcggcgtcctcgtcgtcggcgctgaaggcgcgcaaggaccggagtagctcaagctcttacgacagtgaacatgagggcaaatcatgcaagcacaagaagagcagatcatcaagaagattttttctccatgcgtcgaatatgtggcctcattgtatttacttacctgacagtctagggagagggagcgaagcaaggataggcattctaaacgagacaagagcaaacataaagagctctacacagaagaaaatagtgaacgtactagtggccccgtgcagctctccaagtttcttggacgtgacaaggatgaaggtgttcaaaggagtgcaatctctggtaaaaagataatgatgaagcttgagaaatccaaggaagacaagcaggcagagagcaagcgcaatgaattgttgaagtttctgaatgcaagttatgattgacagtttgttggaagtgctgtcatttgctgccttttggatttgtcttgatactaccgcttagtccaccagtgctgttggttatatttacaagttttttgttccctgttattctagttatggcatgaccgtctgtgttcatgccagcacttagatagttgtcgcatcaccgttgtcactaaaaactattacatttgatcctgggctgataatgttttcaattttcatattattactagcaaaa

SEQ ID NO: 66679 - DNA, 1482 bp, Oryza sativa
  Clone ID: PAT_MRT4530_67607C.1
atgggcagcggccacaggaagctcatccacttgctccgcgccgagcaggcggcggcggcggcctcggcggcgtcggcgtcgttctcgcccaagtctttctcgtcgtcctccgcctccgacgacgacgggtgtagctcgtcgtcgtggcagacgaacgacggcgccggtgggtacgggtccgcggcctcgtcgccgtcgcggtgcagcgcgtcgacgccgcccaagtcgccgtgggcggcgcacctgccggggcttggcggcggcggggtggggacgggcgccggcgccaccgggctcgtcgcgtcgctggtgaaggaggacgggcacgtgtactcgctggcggcggcgggggacgtgctctacaccggcacggactccgagaacgtgcgggtgtggcgcgaccgccgcgagctcgccgggtttaggaccgggagcgggctggtcaaggccatcgtcgtcgccgacgacgggcgcatcttcacggggcaccaggacggcaaggtccgggtgtggcgcgccgacgcgggggaccccgccgtgcaccgccgcgtcggctcgctcccgaggctcgccgactacgtccggagctccgtcaacccgtccagctacgtcgagacgccgcggcgccgccgcgggcggcgccgggaggtgtggctccggcactccgacgccgtgtcgtgcctcagcctcgacgagggcgccgggctgctctactccgcctcctgggacgggtccttcaaggtgtggcgcgtatcggactcgaggtgcctcgagtcggtgtgcgcccacgacgacgccatcaacaccgtcgccgccgccgggttcgacggcgtcgtgttcaccggctccgccgacggcaccgtcaaggtgtggcggcgggaggaggagccggcggcgagtggcggcgaggcgaagacgaggcacgtcctggagacggtgctgcgggaggacgagagcgcagtcaccgccatcgccgtctcggccgagggccgcgtcgtgtacgtcggttcgtcggacggggacgtgacctactggcactggatcgacggcgaggcgaggtacggcggcgcgctcagggcgcacgggacggcggtgatgtgcctcgccgtcgccgggaacgtcgtcgtgagcggctcggccgaccggacgctctgcgcgtggcggcgcggcggcggcgagcactcccggctcgccgtgctcgccggccacaccggccccgtcaagtgcgtggccgtggacgaggaggagacatcatcgtgcagctccgacggcgagcggcggttcgtggtgtacagcggcagcctcgacgggtcagtcaaggtgtggcgaatctccgacatcgaacctaccaatcctccgccgcggctgccgtcgccgcatgtatggaagagagaggatcagccggcggcggcgacggcggcggcggcgagggcgtggtcgccgtaccagacgtcggagatgaacagcgtggcagcggcgtga

SEQ ID NO: 66680 - DNA, 330 bp, Oryza sativa
  Clone ID: PAT_MRT4530_67608C.1
atggatagagtcctgagaaggcaattattaagagcccttgcaaaggttaccaaggataaagaacgagttgctcggcattacaacaagaaagtggtgcctaaagatttttcggagggagaacttgtatggaagttgattttgccagttggaactcgtgatagcaaattcggcaagtggtcgccgaattgggaaggaccgttccaaatctacaaagttgtatctaagggagcatacatgttgcaaggactcgatggagaagtttatggaagagcactaaatgtcaaatacttgaagaagaaatattacccaagtgtttgggttaatgcatga

SEQ ID NO: 66681 - DNA, 240 bp, Oryza sativa
  Clone ID: PAT_MRT4530_67609C.1
tgttgacgagggggtgcgaaatccacgaacgggggcttcacgttagagttcctggagaccactgagggaaacaagatcagtgcagcatatattgcgagatcactggtggacagagaggcggtgcctgactacgacagcaacgtctgcagcgagagcatgtaggggatcaggctgctgtgcttacaggtgggtgatgccaaaggacctggatagcacccgtctgtacgaatcgattgggac

SEQ ID NO: 66682 - DNA, 5043 bp, Oryza sativa
  Clone ID: PAT_MRT4530_6760C.1
atggccgagaaaccaccgctgtcaccatcgtcggctagcccaagcactgtcaaggaaaagatccagaagttaggattgaccgacgtcaatgaagcaaacgtcatgcctatcgatccggaaaaattcacacctgatcaaaagaaagattttgatgcgatgatgcagcaggcaagggatcaattcttgaactcattcatgcagactcgcaagggaacacttgttcagaagtataaagtaaaggtagtcgctgatgatcctaggactagttcttctagaggtcaagatgggaaacaagctctagacggctcggctcaaccgagtgacaagagtgccacagacggttctctaggaaatcaaggtgacaattctcaaggagtccatggagttcaaggtgatggggtgcatggaattcaaggccaattggtcaatccccgattgctgataagagaacagccacaacacactggacagaatgtggatcggctaacacaagaccaggttgcatctatatttttgcctcctcaaaacactgttaatccaacccagcagcagccgattcagcaaccaccaccaaggcagcaggttgtgcagcccatccagcaaacacccccaaggcagcaggttgtgcaaccagtgcagcaaacacccccaattcaacgagttgtacaaccgattcagcaaacgccattgagttgggctgatttagaaaagcagtttcatagctatttctatagtgggatccatgagatgaaattgtccgatctgacgtcgatcaagcaaaagcatgatgagccagtatatgagtatattcagagattcagggagatgagaaataagtgttacagcttgagtttgattgatgcccagttagccgatttggcttttcaggaaggtagcttgcatgaacaaaggtatgcagaggctaggaaaaattctgggaaggttaatcatgtttgcccttatatatatggatcggacgatgaggatgatgattctgagatagctacaatcgagtgggtaaggagtaagaaagttataccatgccaatgggtaaagagctcaggtaaagaggagaggtatgactttgatataaccaagactgataaaatttttgacttgctactccgagagaagcaaattcaacttcctgccggtcacacaattccaccggctgaagaattgggcaagaaaaggtattgcaaatggcataattctgggtctcatacgactaatgattgcaaggtcttcaggcagcagatccaagcggctattgaaggaggcaagatcagctggccaacagccgatgggggccgtgcaaggggttttcaggtgaattcggttaagattatcaagaaatatctgaggaagtatgacaagcagcaggataagtatcatgaagaagacgacgatggttttgatcctcattggggttgtatgaggctgccatctattgaagactgtcctgggtgtagtgatattgccgagagttcaagccgatcatatggtaggggcaatcggctaaggcagacaagagttcctgttcatcaaagattgggtccagtgaatcaagatcatggccaagaggacaatgaaatcaggaaaaatcagtggtgtccttctggtattttcacgaagaatcagaagagaagggttcaaagattgaggaacagggagcgatttcaggaggttgaacaggaaattaaccatcggctgaagagaacaaagccgaggcaggagtggcgcgttaagaatcagtttcctgtagccgatgaagccgcagctgatgaggtaaaaaggttagctaaaggaaaaagtgtcgtaactgcttcggtcaacatggtttttacgttgcctgccgagtttgggagcaagcaagccgatgtcgatgaagttgaagaagaatcggctaaattgattttgttgccagagcgggcggtttttgagaagccagaggggacagagaatcggcatcttaagccattgtatataaatggttatgtcaatgagaagccgatgtccaagatgatggtcgatggtggggctgcagtgaacttgatgccttacgctacattcagaatgttgggcagaaacgccgaagatctcatcaagacaaacatggtgcttaaagactttggtggcaatccatcagaaaccaaaggagttttgaatgtggagctgacagtcggcaacaaaactatccctacaacattttttgtcatcgatgggaagggttcttatagcttgttgcttggaagggattcgattcgtgctaattgttgcattccttcaactatgcatcaatgcttgattcagtggcaaggcgacaagattgagattgtgccagctgacagccaattgaagatggtgaacccaagttattattttgagggcgttgtggagggttcagatgtctacaacaaggatacagtagatgatctcgatgacaaacaaggacagggatttatgtcggccgatgatttggaagaaattgatataggtccaggtgatcgaccaaggccgacatttattagtaagaatttatctgcagaatttagaaccaagttgatagagctgttgaaagaattcagagattgcttcgcttgggagtattatgagatgcctggactcagccgatcgattgttgaacatcgcttacctatcaaaccagggattaggccacatcaacaacctccgagaagatgcaaagccgacatgcttgaacctgtcaaggctgagattaaacgattatatgatgccggtgttattcatccctgccgatatgctgagtgggtttctagtatagttcctgttatcaagaaaaacggcaaggtcagggtatgcattgattttcgaaatttgaataaggccaccccgaaagatgaatacccaatgccagtagccgatcaactagttgatgctgcttcgggacataagattttgagttttatggatggaaatgcgggatataatcaaatctttatggctgaagaagacatccatatgacagcttttatgtgtcctggtgcaatcggcttgtttgagtgggttgtgatgactttcggcttgaagagtgctggagctacatatcaaagagctatgaattacatttaccatgatctaatcggctggttggttgaggtctacattgatgatgtgattgttaagtctaaagaaatagaggaccacatagccgatttgaggaaggtttttaagagacccagaaaatatggcttgaagatgaatccgacaaaatgtgcttttggtgtatcggctggccagtttttaggatttcttgttcatgagagggggatcgaggtgactcaaaggagtgttaatgcgatcaagaagattcaacctccggagaacaagacagaactacaagagatgatcggcaagataaactttgttagaagatttatttctaatatgtctggaaggttagaaccttttacaccattgttgagattaaaagccgatcaacagtttacttggggggcagagcagcaaaaggctttggataatattaaggaatatcttagctctcctcctgttttgattcctccgcagaaaggaatacctttaagattgtatctatcggccggtgagaagtcaatcggctcagtcttgattcaggagctggaagggaaggaacgagttgtattctatctcagtcgtcggctcttggatgctgaaactagatatccacctgtggagaagttatgcttgtgcctatatttttcatgtacaaggttgaggcattatctactatccaacgagtgtactgtcatatgcaaggccgatgttgtcaaatacatgttatcggctccaattttaaaaggaagggttggaaagtggatattctctttaactgagtttgatcttcggtatgagtcgtcgaaggcgattaagggacaagctatagccgattttattgtggaacatcgtaatgattcaatcggctcggttgaaattgtgccatggactttattctttgatggatcggtgtgtactcatggttgtggtatcggcttagttataatttctcctaggggggcatgttttgagtttgtttatactattaaaccttatgcgactaataatcaagctgagtatgaggtagtgctcaaagggttgcaattactcaaggaaattgaagccgatgctattgaaatcatgggggattctttgctggtaatcagtcaattggcaggaaaatatgaatgcaagaatgatacgttaatggtttataatgagaagtgccaagaattgttgaaggagtttcggctggttactttgaagcattttgttcaagagcatataatttaccgatttggtattcctcaaactattacaactgatcaaggttcaatcttcgtgtccgatgagtttgctcaatttgtcgatagcatgggtatcaaattgttgaattcttcaccatattatgcacaagctaatgggcaggtcgaggcatctaacaaaagcttgatcaaattgattaagcggaagatttctgattatcctcggcaatggcatactcggttggccgaagcgttgtggtcttatcggatggcttgtcatggatcgatccaagtccctccttacaaacttgtttatggacatgaggctgttctaccacgggaagttagaatcggctcgaggagaactgagttgcaagatgatttaacagtcgataagtattataaccttatggccgatgaaagggaagacttggttcagtctagattaagagcccttgcaaaggttactagggataaggagcgaattgctcgacactataacaagaaagtggtacctaagaatttttcggaaggtgaacttgtatggaagttgattttgccgattgggacccgggatagaaaattcggcaagtggtcgccgaattgggaaggaccgttccagattcataaagtagtgtctaaaggggcttacatgctgcaaggactcgatggtgaggtttatggaagagcattgaatggcaaatacttgaagaaatattatccaagtgtttgggttaatgcatga

SEQ ID NO: 66683 - DNA, 245 bp, Oryza sativa
  Clone ID: PAT_MRT4530_67610C.1
tacatgaaagcggaataagacttgacgacactggggtactaatgcagtgagctggactcacattgagttgcgttgcgactcactgacaccgactttaccagtacgggaagacctgtacgtgccagactgcatgtaatgaagtacggaccaaacgacgacggggaggagcgacggtttgacgtatgtggggacgctacttacacgacttacctacgactacaactgcgactacgactgacgactac

SEQ ID NO: 66684 - DNA, 161 bp, Oryza sativa
  Clone ID: PAT_MRT4530_67611C.1
atctgaaccgaaaacatagtcaatagtagcttcataatatgtggtcaccatatatgatttttttttatcatccacactttactgttataatggctgaaaatttgtcgataaagcactacgtacacagccaattgagtttgcaattcagtttgttttgtcgt

SEQ ID NO: 66685 - DNA, 1314 bp, Oryza sativa
  Clone ID: PAT_MRT4530_67612C.1
atggagatcagcagcagcctcaacaagaggaaattaggggaagctcagcatgatggagatcgcgttgtcatcaagaagaggcagagtgtcagcatggacatggaggtcttgcactgccccgtctgctttcagatcctgaggcctccagttttccagtgtgatctggggcacttggtgtgttcgccttgccgtgacaatctgccggccggaggcaagtgcccgtcgccgtcgtgcttcggaactccctccgtgcgctgcgtcgccatggagcgcgtcgtcaactccgtcgaggtcgcctgcgcctacgccgagcacggctgccccgacaagatcgcctacgccaacatcacggagcacgagaagacgtgcccgcacgcgccgtgcttctgcccggagcccggctgcggcttcgccgccgcgtccgcggcggcgctcgcggaccacttcaccgcgcctcgtcacaactggccatcgcacaagctcagctacagccagccgttcgaactccgcgtccacccgggaaagaacgtcctcgtcggagaagaagacggcgccctcttcctgctgaacgtgtcgccggcggcggagcacgccgtcgtctctctcttctccgtgcagccgcaccacggggcgtccggcttcggacgctcggcgagccatttcggatgttcggtggagttctcatgcttcctggggcatctacagtgttcgacgctggttactgtcacgagctcgtcgctctcagatggaatgccggaagaatgtttcttctcggtgcccgagctgcaggattctgttgatggtgatgccggtgtcggtgtggatatccgcatcaccatagatgaagcagtgccgttgtttagctgtgtcgacggcatggaggacgacgacgacgaggattgtgacgatgatgtcgatgctaacaacggcgacgatgatgagaatgacggggatacctccgatgacgaagacgaggatgatgaggacggaactaaactaaattttcttgttttgagcggcacggcatggaatccggcttcagatgctcagtggaattctttttgcttcgaggggcattgcgaggcttcgacgctggaagctgtcaaaatctcgtcgctctctgacgggctgccgaaagatcgtttcttttcggtgcccaagcagcaggatggggacgccggtgtcgtgctcggcatcaccattgatgatgtcgaagacgtagaggacgaggactccgacgaggaatgtgaatgacggatccagtaattcatcgtgataatggttacgcggtttacggaaacccgataaagccat

SEQ ID NO: 66686 - DNA, 2608 bp, Oryza sativa
  Clone ID: PAT_MRT4530_67613C.1
gaaaaaaagaaggggagaaaaaataatataataacagaacaaggagatgaaaaaggagttccccggccaagcgccgacgagtcggttacactccgagatggacgcggcggcggccggcgggggcggggcggcaaagcggaagcgcagcttctccgaggacgacgcctacctcatcctgcacaggtaccagccggcgacgatcctgacgatgctgcaggagatggggaagcaggtgggcgcggggaaggggatcgactggagggcgctggtgcggaggacgagcaccgggatcacctccgcgcgcgagtaccagatgctgtggcgccacctcgcctacggccacgagttcgtcgagagcgtcgagcccgcctccctgccgctggacgatgggagtgatctagaatgtgagattgagattgtccctgctccgggtaatgaagcattagctgaggccacatcgtttgccaagactattatcaccggatcttcacgtgaacaaacctctggtcaacgtgtcaactcagaagctgctgcgctaaacactccaaatgaaaagatagtgcgtgttccatctgataaacagcttgtgcctggtcaccgtctaacaaacggtacaggtccggtttccagctcaaagcagccctcccacacaggctcatctcctgatcctttggaccctaatggacatcccaaaaagaaaaagaagcctaaaccatggtccagagaggaggacatggaactaggagcaggtgtacagaagcatggtgaaggaaattggatggaaattctgcataaatataaatttgatagttcaaggacgcatcttcaacttcaacagagatgggcgcttatttgcaagcgtcaggggtcaaccaagcctgctacccctaaaatacccaatgttatgtcggaggaactaaaggcagcacaaaaagcattttcattggccattgggacgaccagatcgtctacattaagaccaggaggtgtgccacatcacaatccaatggttactactacgaatcctgaggtgaaatctgttacagcaccttcaccattgccggtaccggtgcatgttgttccggtgcctgttccagtgcaaccagtacaagtgcagttaccaccacctcagttgcatcaagcacctgcgcaatctgcacctccacctccaaaagtatcaaatgcttcaaataagtcacgaaataattctaagaaacaagttgcccaatcaattcctgtgaatggccctttgtcgatacaagaggcagctcttgctgctggtgggcgaattgccgaaccaagtgttgccaccaattttttaaaagctgcacagtccacaaaagctgtgcacataagatctcgaggaacaggatcttcaaaatcttctacgggatctaaaacacctactgtggctggtgaacctgggacacagcttggcagtgatcaacacctagaattacaaagtactggtggtccatctcaagttttgactgcacatgcaactgaacaagttcataatgtttcagaagtcgctggggttaatcctctgggacaatccgctggagtgcatttatcagaaactaagaaagcactgaacaccacaccagtgtctggatcttctgacaaaatggaaatagatgacaactctaattattttgcagtcacaatggaggacttgttccctgaggatgtgaagcaggaagatgttcaagatcccaagattgaggaggccatagaccccaaggatgcagacatgttagaatttgatcgctttgtggcccaaggatgcttaaataaggataatgtggataagagcaaggctgccaagattgctccagaagctcaaagcgttattggcagccagaaaaaacagctgaagacgctgcccacagttggcaaaagcaaccctgtatttgctggacctccagcaactgcgaaaaagaccaaagctccagttccacagggtgggatgtctagcggcatagttggcgtgctgaatagatcattaggagggaaggcacctgctcctgctaccacaggcacccaaagtactgtccagaagcagcaaagcatgagctcaaagggcaacttgttagtgcccaagaatgtggcgcctggcaccgtaacaccagccaacaaccgggccaacacagcggtgaacggggctagcaaggtgaatccaccagccagccagaagccagcctaacatggtaaattccttgctataataacgccctaggacttttgtgcgcttagtttacttttgaaatgtaaatagggccacgtagataccatctattctttgcccccctttgcatttgtagctcaattcctttctgaaccaaagcactggtgaaaacattaggttagactggatacaccgtttaatcgctttgccttaactgtgatgtcttagactgatatgttccatttgttaagctggcctgagattatcatgccgccttcctgtacagcctcgcctctttctccgttggatagtttggttgattggccaaatattcagaaactatgtcattgtggcctgatcaaactgtgaagatggcacgccatgcaagttgtctctatcggctttaatttatggctttga

SEQ ID NO: 66687 - DNA, 1075 bp, Oryza sativa
  Clone ID: PAT_MRT4530_67614C.1
atggctacttccaccatcctgctcttcctcctcgccgtcggcggcctcgccgccgcccacggcgacaccatccgtctccccagcgaaggcgacgcaccaccgcagcccgccaaaccctgggactgctgcgacgatatcgagatgtccccgctaaagatcttcccgccgctttaccgctgcaacgacgaggtcaagcagtgctcggccgcctgcaaggagtgcgtggcggcgccggcggccggagactccccctgcggcggcggcgccgccctcgtctgccgcgactggtactcgacggaggaccccggcaagccgtgcacgccggagcgggaatggccggagcggacgacgaagaagaggccgtggaagtgctgcgacaacatccggcggctgccgccgaggatccacccgccgttctggcgctgcgacgacgagctcaagcccggccagtgcttcgccgcgtgcaaggcttgccgggaggcgccggggccattcccggggccgctcatctgcgacgacgtctactggggcgccgacccgggtcccttctgcacgccgcggccgtggggggattgctgcgacaacaccacctgcaccaagtcgatccctccaatctgccgctgcgacgacaaggtgaagaaatgcgccgccgcgtgcaaggattgcaagcgggtgaagtcgtcgaagcctcctcgctacgtctgccaggaccagttcaccggccagccagggcccaagtgcaaacactcgtgcgagaactagctgcagatcgatatgtatgatcgatcgatcgatctgtgtccgtcaataaaactcgccctagctagcagctagctgatcgttcgttcgatcattcagtgttgctagctagctccatattcagagctctgctatagcttgagagtgttttgctgcaactcgcttagcttaattacgtgtttaaattgtgtgttgtctcgtgtgaacgatggtctagccagtgaccaagagcaaaataaatgaataaatgttgccatgttgcgctgtcatcgtaaataataagttgaataatgagtgatctctagctactcagtat

SEQ ID NO: 66688 - DNA, 546 bp, Oryza sativa
  Clone ID: PAT_MRT4530_67615C.1
ctacgcgcacgagattattgttgacttgccggagatgaggaaggaggacatgcggatgaaggtggcgtagaaccggatgcgacagcttggcgagtgctcaatcgtgtggttccggaagctagcgtctgaccagatcaagaacaccctgctaccattgttgcagtcgtggccaccagcaacggcggttctgccaatatcccgatgaaccagcatcccaagcctaataacagataatccattgttcacaatctcatcctggcgctgaggggaagtagcacctgtatgctggattggggagaccgtgcactggacggatggccggtggtgcccggcgcagagtagaccgccgaggctgccgacggtgttcttgcggtggagataggggacggcgaggtgggcgacgattcgcggcggtcccgagcgggtggagacggcggagaaagacccgagcgacgaatacggtggtggcggcacgggacagcggtgcgtcggcccggcccacgacgactgcgcagttggggcaacggcccgccgtcgccgctccat

SEQ ID NO: 66689 - DNA, 440 bp, Oryza sativa
  unsure (1)..(440): unsure at all n locations
  Clone ID: PAT_MRT4530_67616C.1
acannccnagaggagcccgggcccagaccccttccccacttcccatcccccccaaaattcacatcaatgggggttacaaataggggcaaacaaacaatatctcacatttttttaccccccccacaccccacaacactactcatcacaacataccaaaacaactttatttttttcccccccccacccctccccacctgccaactccagaaacacatccaagcccccctaccccccagggaaggcaatgaagtcagaggcattacagacaatacaacatcacacagcaggaaagaacttcaacacgacgtcacacgcagaggcacactaccagacccgccatgacagacacacgatcggaaccctcaactatgagagcgacgcaccgacacccggcgcgccgcatcccagggacgagaaagcggacccccagaganaggana

SEQ ID NO: 66690 - DNA, 318 bp, Oryza sativa
  unsure (1)..(318): unsure at all n locations
  Clone ID: PAT_MRT4530_67617C.1
tggcaagtgcctgtcacttgtcaagtagagagactagagactaggctggactgccctcatcttctcttccatttctcctctgtccctgcctagctatcatctcccaaatcatccctagctgtggcagctcagagacttccccttgatggtggcgcggcgggcgatcgncttcgggacccaccgaggtgcgggaggctgaggtggaagaaggattgctccagtggaggtggaggtggaggcggaggcggaancggaggtaggcttaagaggagcgaggtgatcacttgatggatttttcttgtgttcctagtggtaagg

SEQ ID NO: 66691 - DNA, 348 bp, Oryza sativa
  Clone ID: PAT_MRT4530_67618C.1
atgtgagcaatggttgcatccgtgcggccaaaatggctctcgcgcggaaacagcctccatgcggctccgccccacaagctatatgacaaccatcactgcttccaagttcacttgcgaaggcgatcaacgaggccgcactaccagggcagtctccatgtcactgcatgctccacacaatcagagctgcatcagctcaccgtgtccgctacgaccggcggacggctccacagctggcaacgtcggctgaagcaagccatcgaggccaactcgtcactccacgcggcagaagctgccttgaccttgctagctttgcggacggacaaccccgctactgttgatatttcttaa

SEQ ID NO: 66692 - DNA, 291 bp, Oryza sativa
  Clone ID: PAT_MRT4530_67619C.1
cacggacccccaccataacatttatatttaaaaactaagtaggaaagggagttccaaaaaaacccctgacaaaaccctaacaatccagcaaatttttttttaaaacaacttttttctttttacaccaacagaaagtaaacgcatggggttgaattgcaggctaccaaccccactcagggggattcgggaaatcccgtcaccaaaaaatagaaattgggggggggctccttccttccaaaaaaaataaacgttactccaaaaaaaagttggtgccaatgttgggagtttttg

SEQ ID NO: 66693 - DNA, 1741 bp, Oryza sativa
  Clone ID: PAT_MRT4530_6761C.1
caacaacactcttccgctcccaccccccgcacactccccgtatttcggaacacgtccccgacggcccgactgccgcacgcggcgaggaggccgcggtaattacgggcttagtccgagggggagaacgcaaaaagaccaggagaagacgaccagggagcgcacgcgcaccgcctcccccccacctcgccgccggcgaggtctcccgccgccgcctgccattgggagacgtgggctggagagaggcgggagcagcgcgtcagccgtttcccgttcccccccgtcgagaggctccccccgtgatcctcctcctcctcgctcgtcttcttcgccgccgccgccgccgccgcggggatggaggccggcgggtactacaactgcaagaagacggacggcatctgcgaggacgtctgcgacagcgagcatggttcaaaggcagtttttagtatgtcaaggctgaagtgcgcacttcgggggtttgatttaagagcacttttgatcctcttgattggtctgccaattctgatctttgttatataccttcatggccagaaagtcacttacttcctcagaccaatctgggaaaagcccccaaagcccttcaaagtacttcctcactactacaacgaaaatgtctcaatggccaacttatgcaagttacatggaatggaaagtcagggaaaccccgcggcgtgtttttgatgctgtgcttttcagcaacgagcttgatattcttgatatccgttggcatgagcttagcccttatgtgtcagagtttgtgttgcttgagtccaactcaaccttcactggccttaaaaaggatctccacttcaaggaaaaccgtcaacgttttgaatttgctgaatcacggttgacctatggtatgataggtggtcggtttgtgaagggggagaacccatttgtcgaggagtcatatcagagggttgctcttgaccagcttattaaaattgccgggatcacagatgatgacctgttgatcatgtctgatgttgatgagattccaagtgggcatacgatcaacctcttgagatggtgtgatgacatacctgaagtactccatctccagctcaggaactatctgtactcatttgaatttttccttgatgacaaaagttggagggcttcaattcacagataccgggctggaaagacgaggtatgcacatttccggcaaacagatgaccttctggctgattcaggatggcactgcagcttttgttttcgctacattagtgattttgtcttcaaaatgcaagcttatagccatgttgatcggattagatttaagtacttcctgaaccccaaaagaattcagcatgtgatatgccgaggagccgatcttttcgacatgcttcctgaagaatacacattccaagaaatcattgccaagctgggtccaatcccaagcacattttctgccgttcatcttcctgcttatttgctagagaaaacgagttaccctgcattgattctccgggcaataatcatcctcctgtcatttgatatatttgctgtacactacagaaagcacatgtataatgcagttggtgtttggtctcagctaactgtttgcaaacaaccagagcaaacaaccagagtcgttgcagttattgtgagggttcgtctgttcgtgccgttaagcgacatgttaaggcggcattttgtgggacgaagtgggttggaacaggctgttcttgtcggacgtccgcttcagccagattga

SEQ ID NO: 66694 - DNA, 440 bp, Oryza sativa
  unsure (1)..(440): unsure at all n locations
  Clone ID: PAT_MRT4530_67620C.1
atgatcttttagtagaagtaacatttagcatcactacatcactatttgatatgcttgctgctttgtcttgtgcttcacctttgagccacactaacgtgttatatttgcaagcgcaaaacgctatttccatatcatgtgttattcagatgaaaaatagggtacaagtatcttggcatggtaactggtatttttggatgctagaaagtatagtatattggaataaatatnatctaagatgtagacgttgtatatctaatgagttttgagatgatggatactcaaatgtcagtttgggcgttatgttttgacatgtgatgcacagtggccattaccacatgatgcatgtgactgaatattgatatgcccatgggtccatcgccaagtactgttctctagaatgatatctagttacacataattgtccaactttggaatgtggn

SEQ ID NO: 66695 - DNA, 4056 bp, Oryza sativa
  unsure (1)..(4056): unsure at all n locations
  Clone ID: PAT_MRT4530_67621C.1
atgaacggtggcggcgccagcggcggcgatgggtacgacagcgacggctacagcttcgcgccacctaccccgacgactttgtctatgtccatacctccggaacttgctggagcaattccacttattgataggttccaggtagagggctttctgaaggcaatgcaaaaacagatccattcagctggaaaacgtggttttttttcgaagaaatctgtgggaccacatgttcgtgaaaagttcaccttggaagatatgttgtgcttccaaaaggatcctattccaacgtcattgctaaaaataagtagtgaccttgtaagccgttcaattaagttattccatgtcatactgaagtacatgggcatcgattccccagcaataataagtttggatgaaagaattgaacttgttgcaaagctttacaagcatactttgaaacgttctgaactgagagatgagctctttgcacagatttcaaaacaaacacgtaacaatcccgacagggcttggttaataagagcttgggagcttatgtatttatgtgcgtcatccatgccaccaagcaaagatattggagcatacttgtctgagtatgttcactacattgctcatggcgctacaactgattctgatgttcgagttctagcacttaacacactaaatgcactgaaacgctcagttaaggcaggccctagggttacaattcctgcacgggaggagatagaggctcttttatccagccgtaagcttacaacaattgtttttttcttggatgaaacttttgaagagatcacatatgacatggcaacaactgttgctgatgctgttgaggaacttgctggcattatcaaactttcagtatattctagtttcagcctttttgaatgccgaaaggttgttaatggatccaagtcttcagatgttggcaatgaggagtacattggtttagatgataacaaatatattggtgacctcctatctgaattcaaggcagccaaggatcggaacaaaggagaaattttacactgcaaacttgtatttaaaaaacgcctcttccgtgagtccgatgaggctataactgatccaatgtttgttcagctatcttatgtccagttacaacatgattatattttaggaaactatccagtaggtagggatgatgctgcacagctatctgctctgcaaatattggtcgaaattggctttgttgacaatcctgagtcttgtgttgaatggatatctcttttagagagatttctacccagacaagttgcaattacaagagcaaagcgagactgggagcttgacattgtctcacgctatcagttaatggaacatctgtcaaaagatgatgcaaggcaacagtttctcagaatcttaaggactcttccatatgggaactcagttttcttcagtgtccggaagattgatgatccaataggacttttacctggaagaatcattctgggaataaacaaacgaggggttcattttttccgtccggttcccaaggaatatcttcattctgcagaactgagagatatcatgcaatttgggagcagcaataccgctgttttctttaaaatgagagtcgctggtgttcttcatatctttcagtttgaaactaagcagggcgaggaaatatgtgtagcacttcagacgcatatcaatgatgtgatgctccgcagatattcaaaagcacgctctgctactagcgcggtttctcaaaacgatgtttctcaaacatataaaccaccgaatattgaaatatatgagaaacgtgtccaagaactgtcaaaagcagttgaggaatctgaaaggaaagcagatctgttgaatgaggagttacagaagaagacaaaacaagaaagagatatgcaaaaagaattagaaggtctgagggataccttgcaatctgaacggcaaagcattaaagaagtaacaaatgatcttgataaactaaaatccctttgtgatgaaaaggactcctctttgcaggcttcactgatggagaaaactagactggagaccagattaaaaagtggtcagggccaagaaagcagtaatagaacaggagtatcaggaaatcattttgagagagatactctcccaactgtaggcactgtcaataatagcattgagatgttagcaaagcttgaggaggagttaaaatcctgtaagaaggagcttgatgcatccaaggaattatcaaagaaattaacaatggaaaataatctgcttgaccagaaggttcaaaggcttgaaagagcaaaaagtgaagagaaaagtaatatggaaagagtttatgaggatgaatgttgcaagctgaaatctcgtattgctgaattggagcaaaaactggaaagcagaacacgttccctgaatgttactgaatcgactcttgccttaagaaatgctgaggtggatacattgcaaaacagtctcaaagaacttgacgagttacgagagttcaaagcggatgtggacagaaaaaaccaacagactgctgagattcttaaaaggcaaggagcacaattgattgagcttgaaaatctttataagcaagagcaggttctgagaaagcgttattataacacaattgaagatatgaagggaaaaataagagttttttgtcgtctgcgtcctctaaatgataaggagctcattgaaaaggacaagaatattgtttgcagccctgatgagtttacagttgcacatccatggaaagatgacaagtcaaaacaacatatatatgaccgtgtttttgatgctaacactacccaagaagaagtatttgaggacacgaagtatctagttcaatcggccgttgatggatataatgtttgtatatttgcttatgggcaaactggttctggaaaaacttttacaatttatggatctgaaaacaatcctggtcttaccccaagggctacctctgaactttttagggtgataaagcgtgatggtcacaaatattcattttctttgaaggcatatatggttgagctttatcaggataatcttgtggacctgttgttggccaaaaacgcaacacaccaaaaattggaaataaaaaaggattccaagggggttgttactgttgaaaatgtgacagttgtgaacatttcaagttttgaagaactgagggctataattttaagaggttccgagagaagacacaccgctggaacaaatatgaatgttgagagctcaaggtctcatttaattctttcaatcattattgaaagtaccaacctccagactcaatcttatgcaagaggaaagctaagtttcgtggaccttgctggttctgagagggtgaaaaagtccggctcagcaggaaaacaactgaaagaagctcaaagcatcaataagtctctttctgcattggctgatgtgattggggctttatcttctgatggacaacatataccttatcggaaccataagttgacaatgctgatgagtgattctcttggaggcaatgcgaaaaccttgatgtttgtgaatgtctcaccagcagagtccaacctggaggagacttacaattcactcatgtatgcttcacgagtgcgttgcattgtcaatgatacgagcaagcatgttgccccaaaggaaatcatgaggttgaagaagttaattgcttattggaaggagcaagctggcaagcgtagtgaagacgacgacctggaggaaatacaggaagagaggacaccaaaggagaaagcagataatcgcttgactagctgagaacaaggtaccatcagaattctatgcccctggngtgcatccntgcaccgtctgcagaggtgactgatgttgatgatcattttcgactcgccgacgccgacgtgttcaccaatcacccnctgatacagaaccttccggtatgacctaacaatgttgtacaccaattgtatagtaacagattatattatggcaatgatgcctcttgtacaaagggaaccgtagcacacattcataggagaatcagatggtggaagagttattagaactaagctcccccctgtccccctgcaaaaaaaaaaaaaaaaaaaa

SEQ ID NO: 66696 - DNA, 322 bp, Oryza sativa
  Clone ID: PAT_MRT4530_67622C.1
ggggcggatcagatgtcttgctgacaccgactgctttccgtccaaccatccaaagcatcgggggaggcatgatccagggattatcttatgatccatactatatactgagtaacaacacgctgaatgcctgtggatcaaccagcaagtggatgtcgacccccccaatgaagatctggatcatagggaagggggcggcttccgatcctgaaggcgatgcggtgagaatgccacggagacgagcacaagcgcaccatggtgagagccaggaacatctgcagcaagctttggcagtggctgagtgtgctcggactgtaacaccacc

SEQ ID NO: 66697 - DNA, 158 bp, Oryza sativa
  Clone ID: PAT_MRT4530_67623C.1
tttgcagaggtcactgaaatgtcaactaggctgacttctgacacaagaatctatgcagataaggctaaggatctcaatcgccaggtaatccatttacacaatgacatgcacaacttttagcagatgcatttgcctgctgtgcagagcttttttctatt

SEQ ID NO: 66698 - DNA, 491 bp, Oryza sativa
  Clone ID: PAT_MRT4530_67624C.1
cacccgctcgattggggtgatggtgatgacacacggagatgacaaaggtttagtgcttccaccaagggtggcacctctgcaggtcattgttattcctgttccatacaaagatgttgacacaacagctattgtaaacgaatgcaaaaagactgttgagacactggagaaagctggtattcgagcagacttggatacccgcgaaaactattctccaggatggaagtattcccactgggagatgaaaggcgttcctctaagaattgagataggtccaaaagatatggcaaacaatcaggcccgtgttgttaggcgagacaatggtgcaaaagctgatattcctacggctgacttggttgagaaagttaatgggttacttgatgaggttcagaaaaacttgtttgagacggcgaaacaaaagagagatgcctgccttaagagtgtaacacctgggatgaattcatagtggctctgaatgacaaaaaattgatcct

SEQ ID NO: 66699 - DNA, 470 bp, Oryza sativa
  Clone ID: PAT_MRT4530_67625C.1
cttgaatatataagctcgtgcctgtgttaattgagattccagaagaattgtcacaaaccgttgaggaacatgagcctagacgcttaagatacaataatttgaaatcacattaaacgcatgtgcaggatgtactgccaatccgagcagagagcaagatttgcaaagaaaacaaaaaaaaaatgtagctagcacatatactacttgtacaatcctcgagtgccatacatagaagagctacacttgaaaacaaacttctcgaaattactcaaattgagctacctttagaagaactatattggctttgcaactttactcaaccaaccatttcttgtcttgcaaaattcagcagcaccatcccttgttgattgaccgaaaatagcctgtgccccgatagtaaacctaatttaccaaccagcatcctccaatcccataaccaccgggagcaatcacatgcgtggctgcgggcgaag

SEQ ID NO: 66700 - DNA, 2026 bp, Oryza sativa
  Clone ID: PAT_MRT4530_67626C.1
gcacccccgcccctactaaaaccctagctgctcgcctcgcccacgccctcgctcgcctcgcctgatcccgccgcgtcgtagcagcagggcggagccatgtcgtccgggaagggaggtggaggcggcggcaagggaggcggagggaagaagaaggaggtgaagaaggagacgaagctcgggatggcgtacaagaaggatgacaacttcggggagtggtactccgaggttgtcgttaacagtgaaatgatcgagtactatgacatatccggttgttatatcttgaggccatgggcgatggagatctgggaattgcttaaagaattctttgatgcagaaataaaaaagctgaagctgaaaccttattatttcccattgtttgtcactgagaatgtcctacagaaggagaaagaccacattgagggctttgcaccagaggtagcatgggtcactaaatcaggaaaatctgatctggaagctcctatcgcaatccgtcctacaagtgagactgtcatgtatccatacttctccaaatggataagaagtcatcgggacttacctttgaggtgtaaccagtggtgtaacgtcgtgcgatgggagtttagcaatccaactccattcataaggagccgtgagttcctttggcaagaagggcatacagcttttgcaactaaagaggaggctgacgaagaggttctccaaattttggaactctaccgaaggatttatgaagaatttttagcagttccagtttctaaagggaggaaaagtgagatggaaaaatttgctggtggactgtatacaacaagtgttgaggccttcattccaaacacaggaccgtggtgtacaaggggcaacatcacattgtcttggtcaaaactttgcaaagatgtttgatatcacttttgagaatgataagggctcaagatccatggtgtggcagaactcttgggcatacaccacccgctcgattggggtgatggtgatgacacacggagatgacaaaggtttagtgcttccaccaagggtggcacctctgcaggtcattgttattcctgttccatacaaagatgttgacacaacagctattgtaaacgaatgcaaaaagactgttgagacactggagaaagctggtattcgagcagacttggatacccgcgaaaactattctccaggatggaagtattcccactgggagatgaaaggcgttcctctaagaattgagataggtccaaaagatatggcaaacaatcagggcacctttgttatcatgcattttcctgaaaactgctatatctttactgttagagaaaaagagctagtggtggtggtggtgatggcccgtgttgttaggcgagacaatggtgcaaaagctgatattcctacggctgacttggttgagaaagttaatgggttacttgatgaggttcagaaaaacttgtttgagacggcgaaacaaaagagagatgcctgccttaaggttgttaacacctgggatgaattcatagtggctctgaatgacaaaaaattgatcctggctccatggtgtgatgaagaggaagttgagaaggatgtgaaggctcggacaaaaggtgacctgggagctgccaagacattgtgtacaccatttgaacagccagatctcccagaaggaaccacatgctttgcttctggaaagcctgcgaagaaatggtcattctggggccgcagctattgatctgtaacggatctcggttgtgatcattcattcctgctggcgaagccgttgattcaccatagacatgtattgcagttttcatactagcaaagcatgatacacatacatctatttaccgtgcagttttgctgcttgtcagaaatcttgacattggaatgtttaagtaacatcttgtttggttcagaatcttgtttacccagcaacttaattgaactaatcgttgaaaaagtgttttcaaaaaaaaaaaaaaaaaacaaaatgcgcataaaaataaaaaaattaaaatataataaaaattatttaaaaaattta

SEQ ID NO: 66701 - DNA, 128 bp, Oryza sativa
  Clone ID: PAT_MRT4530_67627C.1
ggccaaaaaaagttgtccctctccaaataggggcgtaaaaagttaaaaaaccaccccaagagatatttcccgcaaattaatggttggaacaaactcttatttaaggtaacaaacactttctatttttg

SEQ ID NO: 66702 - DNA, 1254 bp, Oryza sativa
  Clone ID: PAT_MRT4530_67629C.1
ccagctttcccctctcttccgcttcgcgagattggttgattcatctcgcgattgatcgagctcgagcggcggtgaggtgaggtggaggaggaggaggaggaggagatcgggatggggagagggagggtgcacccgcgcaggatcgagaacaagatcaacaggcaggtgacgttcgcgaagcggaggaatgggctgctcaagaaggcgtacgagctctccgtgctctgcgacgccgaggtcgccctcatcatcttctccaaccgcggcaagctctacgagttctgcagcggccaaagcatgaccagaactttggaaagataccaaaaattcagttatggtgggccagatactgcaatacagaacaaggaaaatgagttagtgcaaagcagccgcaatgagtacctcaaactgaaggcacgggtggaaaatttacagaggacccaaaggaatcttcttggtgaagatcttgggacacttggcataaaagagctagagcagcttgagaaacaacttgattcatccttgaggcacattagatccacaaggacacagcatatgcttgatcagctcactgatctccagaggagggaacaaatgttgtgtgaagcaaataagtgcctcagaagaaaactggaggagagcaaccagttgcatggacaagtgtgggagcacggcgccaccctactcggctacgagcggcagtcgcctcatgccgtccagcaggtgccaccgcacggtggcaacggattcttccattccctggaagctgccgccgagcccaccttgcagatcgggtttactccagagcagatgaacaactcatgcgtgactgccttcatgccgacatggctaccctgaactcctgaaggccgatgcgacaaccaataaaaacggatgtgacgacacagatcaagtcgcaccattagattgatcttctcctacaagagtgagactagtaattccgtgtttgtgtgctagcgtgttgaaacttttctgatgtgatgcacgcacttttaattattattaagcgttcaaggactagtatgtggtataaaaggccgtacgtgacagcctatggttatatgctgcacaaaaactacgtatggtacagtgcagtgcctgtacatttcataatttgcggtaaagtttattgactatatatccagtgtgtcaaatataataaaatgtcgaggtttaattaccccataaaaccaaaaaatgcaccccacctaatgccgaattcctgcagcccgg

SEQ ID NO: 66703 - DNA, 2688 bp, Oryza sativa
  Clone ID: PAT_MRT4530_6762C.1
caccaaaggacgaatatccaatgccagtggccgatcagctggttgatgccgcatcagggaacaaaattttgagttttatggatgggaacgcaggatataatcatatctttatggctgaggaagatatccataagacggcttttaggtgctctggtgcaatcggcttatttgaataggtcgtcatgactttcggcttgaagagtgctggagcaacatatcaaagagtcatgaattatatatatcatgatttaatcggctggctggttgaagtttatattgacgatgtggttgtcaaatctaaagaagtggagtaccacatagccgatttaaggaaagttttcgagagaaccaggaaatatggcttgaagatgaatccgacaaaatgtgcttttggtgtgtcggccggccagtttttgggatttcttgttcatgaaagggggatcgaggtaacccaaaggagcgttaatgtgatcaagaagattcagcccccggaaaataagacagagctacaagaaatgatcggcaagataaattttgttagaaggtttatttctaatttgtccggaaggttggaaccttttacacccttattgaggttaaaagccaatcagcagtttacttgggggcagagcagcaaaaggctttggataatattaaggagtatctcagctctcctcctgttttgattcctccacagaaaggaataccgtttaggttatattaatcggctggtgaggagtcaatcggctcggttttgattcaagagttggaagggaaggaacgagttgtattttatctcagtcgacggctcttggatgctgagactcggtattctcctgtggaaaagttatgcttgtgtttgtatttttcgtgtacaaggttgaggcattatctattatctaacgagtgcactgttatatgcaaagccgacgtagtcaggtacatgctatcggctccaatattaaaaggaagagttggaaagtggatattttccttgactgagtttgatcttcggtatgaatcaccgaaagcgattaagggacaagctatagccatatgcttcgattaaggggggcatgtttcgagtttgcttatactattaaaccatatgcgactaataatcaagcagagtatgaggcagtgctcaaggggttgcaattactcaaggaagttgaagccaataccattgaaatcatgggggattcttttctagtaatcaatcaattggcaggagaatataaatgcaagaacgatacgttgatggtttataatgagaagtgcttgggactaatgaaagagtttcggctggttactttaaagcatgtatctcgagaacaaaatcttgaagctaatgatttagctcmaggggcgtcggggtataagccaatgatcaaagatgttaaagttgaaattgcagcgatgtcagccgatgattggaggtacgatgtgcatcagtatttgagtaatccatctcagtcggcttctaggaaattaagatataaggcattaaagtatacactgttggatgacgagctttattatcggacgattgatggagtattacttaagtgcttgagtgccgatcaggctaaggttgcaatcggcgaagttcatgaggggatctgtggtactcatcaatcggctcacaagatgaagtggttgcttcagcgtacaggatacttttggccgacaatgctagaggattgtttcagatattataaggggtgccagtattgtcagtagttcggagcaattcagcgagcaccggcgtcggctatgaatcctattattaagccatggctgttcagaggttggggaattgatatgatcggtatgataaacccaccatcgagtaaaggacataaatttatattggtggcaactgattattttaccaagtgggtagaggcgattcctttgaagaaagttgattctagggatgctattcaatttgttcaggagcatataatctaccgatttggtcttcctcaaactattactatggatcaaggttcaatctttgtgtccgatgagtttgttcagtttgccgatagtgtgggtatcaagttgttgaattcttcaccttattatgcacaagctaatgggcaagccgaggcatctaataaaagtttgatcaaattgattaagcggaaaatttctgattatcctcggcaatggcatactcagttggccgaagcattgtggtcttataggatggcttgtcattgatcgattcaagttcctgcttacaaacttgtttatggacatgaggctgttttactatgggaagttagaatcggctctcaatgaacggagttgcaaaacgatttaacagccgatgagtattacaaccttatggctgatgagagggaggatctggttcagtcgcgattgcgagcccttgcaaaggttaccaaggataaggaacgtgttgctcggcattataataagaaagtggtacctaaagatttttcggaaggtgaacttgtatggaagttgattttgccgattggtactcgtgatagtaaattcggcaaatggtcgccgaattgagaaggatcgttctagatttataaggttgtgtctaagggagcatatatgttgcaagggcttgatggcgaagtctatgggcgagcgctcaatggcaaatatttgaagaaatattacccaagtgtttgggttaacgca

SEQ ID NO: 66704 - DNA, 311 bp, Oryza sativa
  Clone ID: PAT_MRT4530_67630C.1
tcgttcgacgatacacaagcagaacgacttcaagcagcccggggagaggtacaggtcgtggtcgccggatagacaggagaggtttatcctctcgtttgtcggcgagcttgtgcaccccaaggttttccctgagctccgtgccatttgggtcaacttcctctttcagttgtgatgagtcgttgggggtgaagttattctatctatttcctttcttttttcttattcattctcatattattatcctcatttctttttatttcttttttttattttctttttttttcttctttttttctttatttttctttctt

SEQ ID NO: 66705 - DNA, 1061 bp, Oryza sativa
  Clone ID: PAT_MRT4530_67631C.1
aaataaataaagtttatttcactgatggatcctcgtaaactcatcccatcaggctctgggcacgatgaatagcgaaaacaaatcaaatctaggtaaccaaaagtctgctccactatctccacttttgttcacctccatcgtaaacctattactggaaacaacgctctcatcgactaaattttcaggagttgatttccttccaggaggtccacttatggacttagaatacgcagatgttatggtcttgtttggtgaagacactgataaaatgcataggcatttgatagcactgggcaacaataccaggatgtttgggatgtgtttctctccctctaaatacaatttgttgcttcaggactggcctgcgtcaacacctgaactaaggatagcgagtgacgtagtcgaacgcatcaacaacttcacttatctcggaagtctgatcagccctaatgggttggtttctgacgaaatctcagcacggattcagaaagtttgaattttggccaacttacatcatttatggagaaggcgagatatctgtctatcaatcaagggacgagtatactgcgcagcagttcgatctgttctactttacggctgcgaaacatgatcattaagagtagaagatactcgtaagttactagtatttgatcacaaatgtcttagaaatattgctcgcgtatgctgggatcaccgggtaagtaatagtgagtttagacacaggttattagggaatgatgataaatcagttaatgaggtgatgatctcatcaactgagatggttgggccacgtgttacgtatgcytgaacaccgattatcatgacgtgcaacgctgactactataggggatggttggaagagagttgggggcggctaaaccaaaacatggcatcagtgcctgaagtcactaaactctagtctgatccatgttgttagatgtggactacttggttggggtccgcgtgattatcgcaaccaatggttggagactctgtgtgacatggctcagaatcgatcacaatggtgtaggtgtatacactctttgtcttccctcaaaccg

SEQ ID NO: 66706 - DNA, 732 bp, Oryza sativa
  Clone ID: PAT_MRT4530_67632C.1
tgcaagggcaggtgatggggtcaccaccccgccccttgccccctcctcattttctcccaacgaacgatagggcgacgacaagctctacggagggaatggcacccgacgaatctgacttactgctgcatccccctcctcttcccaccatccccccctcaatttctggccaccgctgtgcccagacatcctcgctaatggcgtgagcactgccagatccagctagtgatgaggaggcaaaaagcttgacggcgacgagctcagcggagggcgcggcgacgaggacagcggatccaccgtgctgtcgcgtccctcctcctcttcccactgtgcccccatcttcaatcgccggccaccgtcgtctccctctgtcagccagatctgatggagcggaggagcggcgagcagcgagcagcggacggagaggagcatgagaagatgggcggaggagcagtggacgaagagaagcgccggaagacgggcggaggagcggcgaacggcgggcagatgggcgcacatgcggctgtgggcagagaggagttgatggtgacgaaggcagcaccgatccccttcctctatttctttcgtttctttttttttttgcccctcgttttgcgttttctctttctttctttcgtttttcactagcaacagagaagtctgtatgtagaattactagtagtagattagtttcaccggttcatccaccttaagaatttttttaattattttttt

SEQ ID NO: 66707 - DNA, 274 bp, Oryza sativa
  Clone ID: PAT_MRT4530_67633C.1
cactcaggaagttttaggttcaatttttatggcttaaagccatcaacaaatttttgttaatacagacattaacggcattttcagttaatttgatcctttggggagaaaaggtcaaaaagaaaaaaagcacccacgggtggttgcttgttttatggaacgatttggagttcattgatttcgagatataacaaagcaggttggtaaaacatgtcataatttaaaattggcagcattaactcttacgatcatttggttgcaacccagaacattaagc

SEQ ID NO: 66708 - DNA, 503 bp, Oryza sativa
  Clone ID: PAT_MRT4530_67634C.1
ggtttcctcgggccgccgccgccgccatgccgtcgcacaagacgttccagatcaagaagaagctggcgaagaagatgcgccagaaccgccccatcccgtactggatccgcatgcgcaccgacaacaccatcaggtacaacgcgaagcgcaggcactggcgccgcaccaagctcgggttctgagcttggggaggagaggaggacgaggcgccggacgccgctgccctgggaagaagaagaagaaggagaagctagggcttatgggttgcgtcgtgttcgtttcgaggttttgcctgtcctgaagagactatcagtagctgtgtgtatcttggagcatcataattttgctgattaaagaaccactttcttatcctgcctaaagttgtctgaattttatctcagctgcagtggattgatcagttgaactcccttgttagcataatctgaatatctgattatctgcatattgcctgaatccatttctgctttaaaaaaaaaaaaaaa

SEQ ID NO: 66709 - DNA, 198 bp, Oryza sativa
  Clone ID: PAT_MRT4530_67635C.1
atggcgtggctggacagcgacggcaatggtgacgcgcgggcgagggtgaggtctggcagcggtggcggcgggagggcaacagtgcccgaccagcagccccggccggacagcaggcgaggtgcgatgtccaccagcaaatatccaatttttgatagtgttttcccccaaaagtcacggcgttccgtgttctacagctaa

SEQ ID NO: 66710 - DNA, 858 bp, Oryza sativa
  Clone ID: PAT_MRT4530_67636C.1
tcagtgcttagcctccctgcggcgggagcttgggaggcccgtggtgatcgactcggtgacatcgctgccgtcgcctagctccttcccgtcggtcatcgcccttttcccgctggcctccgcccctcttcccgtcagccatcgtgccttcaaggctgtcacacacccgggtatgtgctcatggcgcggctcacacagctggcccaggagaataggaggagttggtgggggcccgtcatgtgcggcgtcatcatcgaagcgggtgaccgcctccgtatatcctccacgcggcgaggatggaggcggtggtaaatgggttgggaggagcgggggacggcagggtggttggttctcctccatgcaaaagtgtttgcgggacggcgatggtggagctggatctaagggggtggagatctggagggaaaggagagcggccgctctacccttgccgcccgccgcccgctgcccgctgcactcgttgtccttgctgcgctcctctccctcttcctcttgttgtcgctggtgttcttggagcccgcaaggcacaggtggtcggtggtcacccgcttcgatgttgccgttgtgggacaccaccaccgtgggagtaccggaggatggaggatggaggccgcggtggggcggcgggggggcctgctcctcttcctcgtcgtcgttctcgcctgacaccgagctcctcgggatgctaaactcgagcactagtaggaaagatggcgacgtcgagctggacccctcctccacaagcgcagtcgtgtcgaacgcctctacgttgggcagcgacgactccaacaccacctccgcgccgtgcagggcatcgacaaggctgaccaggatgacttccat

SEQ ID NO: 66711 - DNA, 225 bp, Oryza sativa
  Clone ID: PAT_MRT4530_67637C.1
attcaaaagaccattgaagttcaagggctattaacaatacgtatattagctacttgagattaaagagggacacattttttcatttatagtgatggatccactcagaatacgttataacagccgaaacacacggtactccgggttctaagatgacctattaggttttgtgacaccaactgaaccatttggggatgtacacattgaagtttgctcgaaggctaacca

SEQ ID NO: 66712 - DNA, 990 bp, Oryza sativa
  Clone ID: PAT_MRT4530_67638C.1
tttcaattctccttgctggaatattgtgcatatatataaactatgactgtgatcgtcagcgccaagaattccgtcggacaaatgggaaatgctcaatatggggcaaagctccatctaagattgttgcttcctatcagactacaaatggagaaacaaaaagcagtcttctcttgacttctggatggttaatatattcgtcatttcttctttacatagttcatcaaaagtgatttgtaccatgtttgtttcaatagaggcaatgaatggcttttgagcatgcaccctcattttccatttggacaggtggggcttgtctcgtcattttcactatgttccagagattctatctgcttttttctggacagttccagctctttttgatcatttcctgccgtacttctatgtgatctttctgaccatattgctgttcgaccgagctaaaagggatgatgaccgatgctcatcaaagtatggcaagtattggaagatgtactgcaacaaagtaccgtgcagggttattcctggcatttactgaggttgttgaccatgttcaacaacttctcgggataaaactcagccatgttgtgaattcctttctctgggacgatctactgctgtttgtgtaatatgtcattagcttgatgtatgcaggattagattcgggctgattggtttcaaccttttgagtttgctgtatccaaccctgacacagatgagtcaacgatgccgccaaatcgtgatttttcttgttagctcgctgataggagagatgattgcaggatcatagtttgtgtagtttgtaccttataatggatgtttcgacttcatttttctgctagaagcgattaggcagcacgaaaatgaaattgtttgaggttctgtactgctcgaataatgttgctgcaactgtattatccatgaactgtaataattcaaagtttggcaacaggcatggtgattggttctacacaaaaaaaaaaaaaaaaaaaa

SEQ ID NO: 66713 - DNA, 2264 bp, Oryza sativa
  Clone ID: PAT_MRT4530_67639C.1
atggcggtggctgcggcgctgctgcgccggagggcgctctattcggccctcgcgtcgccctcttggctccatgataccagttcctgctacatttgctccatttctggtacacattctttggtcaaccatcccaatttgagattacagaggggctaccacaactctgggaagtttgatttgaccgacttgacccatcctcatatatggtatccgaatgcccgagaaaagaagcgcaatgtatttttacatgtcggtcctacaaatagtgggaagacacataatgctctcaagagactagaagcaagttcttcagagctattgatgaattctgtaggagtatactgtggacctcttagattgttggcacgggaggtagctcaaagactaaacaaagctaatgtcccttgtaacttaattactggacaagaaagggaggaaattgaaggtgcaaagcatagctcagtgacagttgagatggccgacatgacaactgagtatcaatgtgccgttattgatgaaattcagatggttggctgtagatcgaggggtttttcattcactcgtgcacttctggggctttgttcagatgagcttcatgtttgtggtgacccagctgtggttcctctcattcagcgaattctcgaacctactggtgatgtggttacgataatattccaagtgaactcgagaaactgtttcttctcaatagaatttgttgagctgtctaatgtttattttggtgttagtactgatacacgcatcatgtcgtcaaatattccgatttgctggctgtatgtctctatgcaggtccaatattatgagaggctatctccattggttcctctgaagactactctcgggtctttctctaacattaaggcaggggattgcgttgtaacgttctcacgacgatctatctatatgcttaagagaagaattgaaatggggggtaagcatctttgttctgtagtctatggctcattgccaccagaaactcgaacaaaacaggcgacaatgttcaatgatcaagatagtaaccttaatgtgttagtggctagtgatgctattggaatgggtcttaatctgaacatttctagaatcattttctctacactggagaagtttgatggcatctgcaacagggaactaactgtggccgaaatcaaacagattgctggaagggctgggagatatggatctaaattcccagttggtgaagtgacctgtctaaattctgatcatcttccattactacactctgctctgaaatcaccttctcccattatagagcgcgctggacttttccccacattcgatgtattatctctgtactcacgattgcatggaactgatttttttcaacctatattggagcgtttcttggacaaggctaaactatctccagactatttcattgctgattgtgaagatatgctgtgctgtggccaggccaagcttggtagcaccttggtacagcctagatccaatgctgaactagttcaagaggaagctatgaggaataaaaaacctagccagttagcctgcatgcaatacaggaataaggaaacaatttcactgattttttttgagatgcagtttgcagaaaattatgcaaagaaaggtattgttcgactcaaagagatatttacacctgggacactccaagtgcctaaatcgcacaatcaactgaaggagcttgaatcgattcacaaggtgctagagttgtatgtgtggttgagcttcagattggaggattcctatccagaccgtgaattggcagcttcccaaaagtcaatctgtagcatgtcttattgctggcaatatcaggttgattgatggcagcaaaatggacgaaaggactttttgcagaagccaaaaagactacaccaagaatatgatgcatcacaattgcgcaaatattttcaagaaattgatgtgagatcaaaataagatgcttatgctagaaagtcgcctcacaatatctgcttccggacaacggatttgctccttctgtttgcatacgttatggtcgaggagaggcgacaagccgacaatacattttatggatgacaggagtcaaaagaatatcctttgccgacaatacattttatggatgacaggagtcaaaagaatcatcctttgccaaaaccatttaattggcctaagcagtaaatgtggcagcacctgtcctccatccaaacaattttgtagctattctttcattacactttattttaattatttctaacacagatggagctgta

SEQ ID NO: 66714 - DNA, 1880 bp, Oryza sativa
  Clone ID: PAT_MRT4530_6763C.1
cgttccgccgcccgcccgcttcgtcccggcccgttcgccccgccggcgcccggcccccggccatggcgccgccgcgagccaactccggcgacggtaacgacggcgccgtcggagggcagagcaagctctcgccgtcgggcctgctgatacgcgagattccgggcggctacggcgtgcccttcctctcgccgctgcgcgaccgcctcgactactattacttccagggcgccgacgagttcttccgctcacgcgtcgcccgccacggcggcgccaccgtgctccgcgtcaacatgccgcccggccccttcctcgccggcgacccccgcgtcgtcgccctcctcgacgcgcgcagcttccgcgtcctcctcgacgactccatggtggacaaggccgacacgctcgacggcaccttcatgccgtcgctcgcgctcttcggcggccaccgcccgctcgccttcctcgacgccgccgaccctcgccacgccaagatcaagcgcgtcgtgatgtcgctcgccgcggcgaggatgcaccacgtcgcgccggcgttccgcgccgccttcgccgccatgttcgacgaggtcgacgccggcctcgtcgccggcggccccgtcgagttcaacaagctcaacatgcggtacatgctcgacttcacctgcgccgcgctgttcggcggcgcgccgccgagcaaggccatgggcgacgctgccgtgacgaaggcggtgaagtggctcatcttccagcttcacccgctcgccagcaaggtcgtcaagccgtggccgctggaggacctcctcctccacaccttccgcctgccgccgttcctggtgcgccgcgagtacggcgagatcacggcgtacttcgccgccgccgccgcggccatcctcgacgacgccgagaagaaccacccgggaatcccgcgcgacgagctcctccacaacctcgtgttcgtcgccgtcttcaacgcctacggcggcttcaagatcttcctgccacacatcgtcaagtggctcgcccgcgccggcccggagctccacgccaagctagcctccgaggtccgcgccgccgcgcccgccggcggcggcgagatcaccatctccgccgtggagaaggagatgccgctggtgaagtcggtggtgtgggaggcgctgcgcatgaacccgccggtggagttccagtacgggcgcgcgcggcgcgacatggtcgtcgagagccacgacgcggcgtacgaggtccgcaagggggagctgctgttcgggtaccagccgctcgccacccgcgacgagaaggtgttcgaccgcgccggcgagttcgtccccgaccggttcgtctccggcgccggaagcgccgcccggccgctgctggagcacgtggtgtggtcgaacgggccggagaccgggacgccatcggaggggaacaagcagtgccccgggaaggacatggtggtggcggtggggcggctgatggtggcggggctgttccggcggtacgacacgttcgccgccgacgtggaggagctgccgcttgagccggtggtcacgttcacgtcgctgacccgcgccgccgacggcgacggcgccgcgcggcgcggagttccagtcgaggcggacgaggagcgacggcgaggccgcccccagccgcctccgaccccgcccgtctccggcctcgcctccacgccccccagccgcggcctcgacgcccgccgctggcctcgcctccgcgcccgccgccaccagccgcctccgacctcgcgcgccacccctagccgcctccgcctccgccaccagctgccccgacgagctcctccgctgccggccgcccgctccgcctccacctcagccgcccagggagctccgccggccgcccactccgcctccgactaa

SEQ ID NO: 66715 - DNA, 571 bp, Oryza sativa
  Clone ID: PAT_MRT4530_67640C.1
atcgacgaggctccttcccgggcagaggacggcgcgggtgggcggcggagcaggcgagctccgacagcggcggcggccatgggcggcgccggcccccgaccggagcgccgccggtcgcgtgaaggcgagcagcgcggcggcgccctggaagacgccatcgacgccgccatccgtgccgccgccgccgaccacccggacgccctccgcgcgcaccgggacgacatcaccgagcgcctctggccgcgctcgtcgtcctcccgccgccgctccacaagccgcctacgccgtctctcccctccctcatctctcgccgctgacgccgcgccgcgccgctccctcttctcccgccagcggccatcggggagaagggcggcggacggctaggcgagcggcgcgagagatggccgccgccgccccacaccgccatgaggctagcagccgacgccgcaatcctcctccccccgctccaagaaacgctcctcctcctcccacaggccgcgctccctcgcgctggccgtccttgccaccgacgcctcggcgaggaggggaggaggcggaggggagcgcggtc

SEQ ID NO: 66716 - DNA, 1215 bp, Oryza sativa
  Clone ID: PAT_MRT4530_67641C.1
atgcgcgaccctacgaagcttccggctccctccctacctccgtcctcctcctccccgcgcatctctccccattccacgccggtctccctcacttccgcaactcccagcggagttcatcgtccaccaggatgtgggcgcttggatacggtgggagagggttccgagttgctagatccgataccggaggtggctccggtggaaggatttggctcagtagcagcgttcgtggcagcaacggaacattttatggttttcattcaagagacgcgagccaaggcggaggaggcgtgtcggcttgcggttttgatgcaaaaggcggcggcggcagctgcgggagggggctcggatgtggcagtggcattggagatttgcaagaaggcggcggcggcaacggcggcagtgggtggaggcagttcagatgcagcagcgacatctgaggtttgcaaggtgacgaatgtgatgcacaaggaggtggcggctcccacggatctgatacaggagggtgcggccgaggaggaggcttaccagcctcagcctcctattctgattccggcgctaatagctagggactttggcggcaatatgcgtggattgactcaaagcacaatgttggcaaacgatagcgaccacatgaccctatttgagaagaaggcaagcgttgggcaaatcggcatcgaggagatgaggggaaaagctaaggatgtgagcagtgaggaggggagtagcgaggagatggaggcaagcgacgatgatgttagcatggtcattgggggagatgcgcaagatccatacgatgatagcggcatagaagaactcgtgcaagaccaaggcgcattggaaaaattgcacactaagcccaccaaactggccaaccctaactccctactgcggatcccgaaaggtatcaccgaatccccatcccctccaatctctcatggcgcggtgggtgcaagccgacttgcagaatcaccattgtcgaccttcgggaatggcatggtcttcaggcatggtgaggtgggatgcgcagttagggcgctaggcacatcgtcatgggaggagttggcagggtgcagcgacgggcgagcggcgacgcacagatgggggacatccagtctagctggaacgacgacagctgtgcgacaaggaccgtgtaggtcaaggggacaacaacttagaaaattacaaagatgcctccagcaagcctgcaacctgtaa

SEQ ID NO: 66717 - DNA, 850 bp, Oryza sativa
  Clone ID: PAT_MRT4530_67642C.1
ctgcaggaattcggacgaggagcagacacaccaatgctgatctgccaccagcttgcagctagctctctcagccatgggggccagcaacaagctgcaattcaccccgcgtagctcgctatttcagggcaacgagatcaacttcagcaagctctacctgcaccacacgccagctggcccaagacgagaccagtccgggcttacaggcaataacagagaaaccggcttgggccccttggtcgtcaacaactggccggtgtatgacggcatcggccgcgacgccaaggtcgttgcccgtgcacaaggcctgcacatttatgccggtaactggcataactcctttagccttgtgtttgaggatgaaaggttcaagggatccacgcttgaggtgatggggatagttgttgaacgaggtgagtgggctattgttgggggcacgggacagtttgctatggcaaatggtgttatcttcaaaaaattccacgaacagaaacaggaaggcaatattatggaactcactatccagggattttgtcctgtgttgaaagggtcacagcttaccttgcgcgactacatcgtgaacataatggtacttgatatcaatgtgctttgtcctctaatgaaacatctgatctttgattcgatatcgtttatttacttggaccaagctggacagaagcacagagcaggtccatggggtggtcctggtggggatccctacatgattgaatttggcagttcagagcttctcaaggaagtttctggaacgtatggcctatatgaaggatggaaagttataagatctattaaatttgtcaccaataagaaaccatatgggccatttggacggtag

SEQ ID NO: 66718 - DNA, 321 bp, Oryza sativa
  Clone ID: PAT_MRT4530_67643C.1
atgccgcccgtgcccgatcaccggcgccgcctccctcaatctcatacgctcgcggcggtagtggcggctagggacgacctcggctccggcggggacagcgatggagggcagtggcggctggggacaacctcggctacgtcagggggcagcggtggagtgcggtggcgggtggcggtggctacggccgggggcgaccacggctcggtcttcggtgggggtagctgtggagtgcggcaacagcggcgacagccgggggagacctcggttccggcggggcagcgatggagtgcggcggcggcaacacggctggggacgacctag

SEQ ID NO: 66719 - DNA, 445 bp, Oryza sativa
  Clone ID: PAT_MRT4530_67644C.1
ccaacattgttcttttttttggttggaccgtattaactgccacggcgcacaagaatttcggccagaaaaactgaggtgcaggtttaagaagccattatataacctcggcttatgatcgtatagacaagattaaaccacctctcaaccatgcataaatatataacatccctaaaacgacgaaaacagcttttgcagcgccccaaaataggttatgtaaccgaaccgtttcaaacccaatactgcaatgcagatgggttgagcaacgggcatattttcccaatactgccgtgcaaatgggttgatcaacgctcaaagcttgttcatgcctttatggattactacttcccagcagaatgaggggaaccatttccatacgaaaccaaaactttttttccttcacaactggcccaaggtgaccggaactttgcattactctctagctttt

SEQ ID NO: 66720 - DNA, 483 bp, Oryza sativa
  unsure (1)..(483): unsure at all n locations
  Clone ID: PAT_MRT4530_67645C.1
ntggcncaaccacttntgtagttngctcantcttngccgccccangcntnacgcttnntgcttccgtatcgtntattgtntgaaattgngannnantcgcntnttcangcagnnnncagttttttcnatngtnaccanaagcttgaatnttnaccctcactaaangtnagcaaaagntgcngttccgnncnggtgccgaccnctntagaantantggatcccccggagtncagagagttcggcnccangttngtnncactaatatgacatggaggcatgatcgcactccttgntctgggatnggacacggactacagtctgccatnntttatgttaattngttcagtnntgtacataattctttnganaacatgtatttgtatatgcangaatgaatagatggntctaatatgtatttccncccnnatgnattcatnnagctanccgggttnntnntnnnctatnaaaaaaaaaaaaaaaaaa

SEQ ID NO: 66721 - DNA, 150 bp, Oryza sativa
  Clone ID: PAT_MRT4530_67646C.1
atgacgcgcaacgaactgcatgtccctgtgggcggcgagagggaggcgttcgcgggcaacgctagcaacagcaaggatgtcgttggagaccaggaacgggaggagcagtacatcgacgagcttgttggttatctcatacgctacacctga

SEQ ID NO: 66722 - DNA, 818 bp, Oryza sativa
  Clone ID: PAT_MRT4530_67647C.1
ccggccggggtcgcatgttgaaggttgatcacttccgtacttccccaccttgttcctgacttcttgtcagaaactcaatcccatcttccccttttcctttctttcttgtctgttcaagggctgagccttgaacgatcttagtaattaaacatgtcggagaaaaacgacgtgacccagaccgaaaatggggttcctaaatccaagcgcacctgcgcgagacactgcaagcgcttctggtgggtgtatctcatcgtcctctgcatcatcaccgtcattgtggttcctgtgataattcttgttgctgtccccaagattgcacagagcaaaatcaacgaagccgagcttgagatccaaagtgttcaaattctcgaaactgaggagggtgcctatctcatgaagattgactcttccatcaccaccgatggcaagattcatgcatcagttgatccatttgaggccgaaatgtatctcgaggactggccagcacatgtaccattcgcgacagtgaacatgcccgagaccaacagcaacaaacaccaggtcgtgaacgtcactcaacacgtcaaaatcgccgacatggaagagtttactcgattcaacatctggttccacaacaacgaaacgctgcgtgtcactgtcaatggcaagacaaaggtcaagccaagtggtctgacgcgcaagtacggcgtcaccttcaagaagacagttgagctcaagggacttaaccacttcgctggaaaccgcgtcacggatggccacattggtttcggcgatggtacggatgagcccaactttacggtcaaccgttattcccacgc

SEQ ID NO: 66723 - DNA, 363 bp, Oryza sativa
  Clone ID: PAT_MRT4530_67648C.1
atggccatccaccaatctctacgcggcactgcattgacatggttcgcctccctcgacttgacgcgcttcgaccccgactacctcaccgggcgccgcacgcagagggagcagagcagcaggtgtggccgctatgtttcggcggccttcctggcttcctcagcgcccgcccgcgagcgacgcgggattctcgacccccttcggcggcgccgtacgcctggtgaaccgcgcttgtccgcctcctcggcctcggcgtcgtcgtcgccaagtagcgagtcgcgcgtggtggtggcgtgcttcccctccctcgacgcgcacccgcgaacgcacgcacgcgcctcggtcggcgaagaccggcggcagcag

SEQ ID NO: 66724 - DNA, 208 bp, Oryza sativa
  Clone ID: PAT_MRT4530_67649C.1
ataatcttcccacgagattaaataaatacgatacccttggaatactctcgggtgaaatgctacaatgatatatccgtgcgcttgcggatgaaatctataaccataatataccacaagtatttctgcgccattgctgggaattatatttctaggaatgtcgttaagaaatatcaacactccccttccaaactttgctctgaaagttcat

SEQ ID NO: 66725 - DNA, 271 bp, Oryza sativa
  Clone ID: PAT_MRT4530_6764C.1
atgtcctctgacatatgcaagacgtttccaatggcatcctctgacatctacaaggtgcaagatgctaccaattacagtttcgtcttcacaccatggcgtaaatatttttttcgctttcggctatatgcgggttacaacaactaccacgactacggctactacatgatcggctacattgacgaacgtggaatagaggagagtcaagcgacgacacagatggggacgcaggaatcaggtggaggcccgtccatcagagatgcaatcgatgatg

SEQ ID NO: 66726 - DNA, 963 bp, Oryza sativa
  Clone ID: PAT_MRT4530_67650C.1
atggcggctcgcgcgcgccgcgccgtcgccgtcgccgtcgccgtcctccacctgctgcttctcacggcctcccagctcgccgctcctgccttgtcggccatggcgccgccggccgcgccactgccaggcagcgccgacccgcggtgccacgcgagcccgccgcggcgcggcgctgtggcggtgtacccgagcgacatggcgcacatccagttcctcctcaacgccaagttcgtggaggcggagtggttcctccacggcgcgctcggccggggcatcgacttcatcgacggcgccctctccggcggcgggccgccccccaccggcgcgcgcaaggccaccctcgacttccgcgccaccgaggtcgccgccgagctcgggtaccaggaggtgggtcacatcagggcgatcacccagtccatgggcgggttcccccgccccgcgatcgacctcagcgacgccgtgttcgccgcggtgatggacgacgccatggccacccgcctcgacccccccttcgacccctacgccagcagcgtcaacttcctcctcgcctcctacatcctcccccacatcaccgcctccgccgccgcgagcatgctggcggtggaggcggggcaggacgcggtgataaggatgatgctgtacgagcgcgccgacgaggtggtggcgccgtacaaggggaggacggtggcggagttcacgcggcggatctccgagtggaggaacgcggcttcgaggtgcggcgccaaggacgagggggtgaaggtgctcgaccggaggcagggcgcggagcggcgcaccgtcagcaacatcctcggcgccggcgacgactcgctcgggttcgcgcgcacgccggcggaggtgctccgcatcctctacggctcgggcaacgagcaggtccccggcggcttcctcccccgcggcggcaatggcaccattgccaaaggattcttccagctcgcctaa

SEQ ID NO: 66727 - DNA, 302 bp, Oryza sativa
  Clone ID: PAT_MRT4530_67651C.1
gggaaataaaaaaaaaaaaacacccaaatttaaaatctctttaaaaagaatttaaactcacttcaaaaggtaccaaaaaacataattattaatttaccatttacgatgggtaaaattatactgaaatgtatttttccccccttcaaaataaatatttttttaccaaacttgtccttttggtggcccctttgttacaccccaaaatttcaatccgtacctcttgattataacaatttttctaaaaagaggttgatttaaagcttggctaaataattgtaaaaattattttcttggaaaaattg

SEQ ID NO: 66728 - DNA, 789 bp, Oryza sativa
  Clone ID: PAT_MRT4530_67652C.1
atgggagaagaggaagagaacaagagagctgacgagctatatctagatcaaaaatcgcattatgtgtgtatctttaaaatatgggtatacacctcgctagtagcgatcatgctgcctggctacacccagtccgtctctcgagctcatgtggcgtctttgcttagcctttatccactcctagccgtgcacaacttatcgctcccacagcacctacgcgcatacaagcaagaggagatgccctcttcttttctaggggtttgctgctcgagtccagttggcactatgtctacaaaaagagatgcatcttatgtctttatagcattgtgccaacagatcatgccttcaaagcacaaggttcttgcacccgaaatgaaagttttcaaaccgacgggtgagtcctcaagttcaattcacactggaggtaaatcagggcctatgaaacaaataagtaaattgctaacatgcaaaggaggaacacatcacctttgcaaggtgcatgggaataaaatgacaatcaaggagcagtgtacaataacttcaaacacttatgtcacgctccttggtcttatgggaaagagatgcacaaggaaccactcagaacaaatgaaaaactttttgcattcaattgagcatcctaggtacaaagacaagtgtgggggtgatcttgcacatcaactccataaccaaagcaagatcaccctagaagtgatgagccatggcaaaccacacaaggggaaattgatgcagtcagacctaatgaggggtcaaccaaacctccagttcggctga

SEQ ID NO: 66729 - DNA, 243 bp, Oryza sativa
  Clone ID: PAT_MRT4530_67653C.1
gcacgaggggtggcatccaatccaatcgaatcgcgcgaaatccaatccctaatccgcatcttgatctgtcccaaatcatcgccccgaggttggccccgcgatcttggggtgaattggtggcggtggtgatgtggaggagtccgtgatcttggttggtggggttgggaatttgggaggtgtttgatcgggtttgggaggagtccggcgagggatggcgacgccgacgcacttcacgccgtcgca

SEQ ID NO: 66730 - DNA, 479 bp, Oryza sativa
  Clone ID: PAT_MRT4530_67654C.1
ccatttccaacccgtcgtctcgccttcgcctcgcctcgtctgctccaccgcccgccgccgccccgctacgctttcctcctccccctccactccagattttgctcccctcgagaccaccaccaaaagcagcagcaccaccgaaagaggaagcaaagcaaagcaaagcaggcgaggtttcagtctcccaggaatccccttccaagaactcccacccgattcgaagcgctcgaggaggttctttgctcaatcagagtggatcttctgctgggaggattgggaagagcgggggagagatggggtccggatctttgctcaaggttcttgccaagaacttcgatgttcttgctgggcctttggttgcactagcttatccgttgtacgcttcagttaaggcaatagaaaccaaatcccctgtggatgatcaacaatggctcacatactgggtgatgtcctcattaataacactgtttgagctcaca

SEQ ID NO: 66731 - DNA, 267 bp, Oryza sativa
  Clone ID: PAT_MRT4530_67655C.1
atgagcgagcggaacgacggcgaaggcggtccggcgagctggtgtgcgcgtgtggtgacgcccgtcgagcagctcctgcttcgccggctgggggacgcaaccgagggcggcacaaagccgtgccacggcgtcggtgggatggtggaggggtgctccaggacaacgcatgcacaaggaacccaatgtgactgcgaggaggtgaaggtgcggcggtgccacttcccggaaaactccggtgagctttgggacttcaagtgcggtaagtaa

SEQ ID NO: 66732 - DNA, 855 bp, Oryza sativa
  Clone ID: PAT_MRT4530_67656C.1
gccgctggccggcacggtatagctctgctgcacgtacggtcggcaatttggaaaggtgattttccttagaaagggatcggattttttttaatagattagcaatagtgcacgtgcgttgcaacgggaaaaacactgtttgataatgtgacaccttgaaaactttcggcccaggtcttcccaagccggcccaaacttgggctggcccatcttcggcgagccgagtcagttcgacggcccgcaagctgagcagctgaccgcagcacatatgcggggatggtctgatgcacttccgcggcccattgggcgcagcgtaatctgctgcggcggcggtgacccaacgctgggtaaatctgaaccgtccgatctaatatggacggctctgatcgtccccttgccggatgaagtgccgaccaggagagaggagcaaaaccctagctcccaaatccctctttctcgatcacatttctcttcggcgatgagcgagcggaacgacggcgaaggcggtccggcgagctggtgtgcgcgtgtggtgacgcccgtcgagcagctcctgcttcgccggctgggggacgcaaccgagggcggcacaaagccgtgccacggcgtcggtggtccggctaggcgggcgcgcaaacggcgatgagcgccgagcggcatggagctctcggcgggaggggcgacgccaagccgacgcttcccgtcttcggcaagggatggtggaggggtgctccaggacaacgcatgcacaaggaacccaatgtgactgcgaggaggtgaaggtgcggcggtgccacttcccggaaaactccggtgagctttgggacttcaagtgcggtaagtaacccgaacccttag

SEQ ID NO: 66733 - DNA, 458 bp, Oryza sativa
  Clone ID: PAT_MRT4530_67657C.1
ggggaaaacaaggataccttggttgacacaaatttatttttttttaccctacttggaaaattacaatggtaaaaaaggacacacgggacaccctatccaaatgcagttggataacatgcaacagtctttaaaaagcacaaaggaggggccatttgaggattaccctttggcggaaaatcccatgagggagctcaaattggtcattggcaaaaggggcaaaaaagatcttttgtagttaggcaaaaagagggggcctgaagatcccccgccctttgtcgaggacaaaattgttgcccctgaagggggccctggaaaaaaacgggctcagggcaaaaatttcgaaccccggggccttgtttttcagggcctttactttaacctcgatgggagtcaggcgcgtcgttggtcctgaaacgatttttttgaagggcagcacatccttgaccagggggcgcaaa

SEQ ID NO: 66734 - DNA, 133 bp, Oryza sativa
  Clone ID: PAT_MRT4530_67658C.1
cttgctcgcgcttcctcgcaccccgtacctatgaaagcggacgctgtctacagaggcggttcaccccgcaaactcgaacgacgagcaattagtttcacacagcctacatatttgaggtggcaatcctgattgc

SEQ ID NO: 66735 - DNA, 262 bp, Oryza sativa
  unsure (1)..(262): unsure at all n locations
  Clone ID: PAT_MRT4530_67659C.1
tacaatccactggtgcatgtgccattttgcttcatactgagtaaacccggagaaacgttcgtgtaagctcatgtatttttttttcctcgcaaaaacaaatctcatcaatttaacatcagtgtagggaaaggtaaaaattatataacgacagtatatgaaaagtgtaagctcatgtattttttttctcgcaaaaacaaaatctcatcaatttaacatccanggaaatacacaaatgtatgtactatagtcgaagtgaaataac

SEQ ID NO: 66736 - DNA, 2746 bp, Oryza sativa
  Clone ID: PAT_MRT4530_6765C.1
actttagagcactgtaattccttcagttattacacaaaagatggcctattagatgccacagctatcacattacagaagtttcataccacatgttactctacaaaaggtggtgatcttctgcctattgctaatccagtaagcatgtccaaaagttttatgaacctaatatcctattcatcctttgtttagccgaggagatctcctaacttccaacttctttcttggctgctcaaccccaaccattccagctgcccttgcagatgttgaagctttcagctgcctctttcgagatgatgaagcatttgccatatgcttggctgcaacatgtgcctgatcctgtgtagagcttggctgagatccttgagcctgcacattgccctgctgttgctgtctcctcttgtgacatgaagccttgttgtgcccaaggagtttgcacaacctgcaagtcatcactgaccctacccttgacacccttgttgctttgggcttttcatgtagctctcttctcatttccttcttggaaggccttcctggcattctaacataacctggagcctttggccttggcctatcagatgtaggccagctttccattccctcaacaggttccaaacaacagctgtaggtctttttgaaggaataaattctgcatgaacaagttttcctctcaagatcaacagtgaacctatgattctgatgcttaacttcaaacttgtccatcccattgcagattgcatgacagtttcctgaatcgatgatgtatgcattaagtttcttatgtatgtttggacaaattgatcctagccacttgtccatcaaggttattttctcatgtatcctaaccatcaccttccttctaatagcttccaacatgctaataatgggtaggaacctagcctgaactatccacttgttgaaagtctcacaaatattattgtctacagaatcatagtttgagccaaacctgaaccaagccctgctccagtggctaggatctgtgttcatgatagcccttgcaccttcaacagtctcttgtgccagtcttgcctttgctaggttgaatagcatgacatttggagctttggcacacctccaaaacttcttctgccactccttcttgctgaatttcttcttccagttggcataaatatgccttgcacaatttctgtgctcagcacttggagcccagtgctgaactgcatttacaattccccaaccatcaccttcaccaactcccaagtccttgcatagcaaatcacagaaccaatcccatgagtcatttgtttccttttccaccacagcccatgcaattgggtacatggagttgttggcatctctgccaacagcacataatagctccccattgtttgaacctttgaaaaagcagccatccaaaccaacaacctttctacatcccaataagaacccattcttacaagcagctaggcaaacatatatccttttgaacactgggcttggctggtcagtatcaagcttgacaacaactgtactcccaggattactcctcaacaattccaattgatagtcaaaaattctggagtattcatcccttctagactcatatatcttcttcaggacatatgcttttgctctcttgcactgagatgcactgacatttgcaaacatttgctcagagacagttgactgcatgctctgaatactccaagttgggttatctgtgattatcttctcatatttctgagcaattctcttgtatgtgaccaggttgttatccttccttggaggacaattgtgctcattaacaagacttgctatttgccagctatttgtcctgctgttccttgatagcaaaaaactccatggataggttgcccagtcacactttgcccttgtcctgcaaccttcatctttggggaaccttatgaatcttttgttctgcaaggctagctggaccactacctccttaaactcttttttcccatcaaatttcatcctaagagcaagcctaacatggggctggttggcattaaatctggggtatttggacttctttctgacaaactcaccatcctttagcttcttcttaaactccttgtatgccttcctaatttcctcaacctcttgatcttctcctgatgaacaagagtccccaccaacgtaatcactgtgagaaccagacaagtctgcactcttcaccctctcttcacatagtaccacagctttccccttatcctttgggcttggggtactccaagctctcaatctatctaaatcactttttgtcttctctggtgttgactgaataagaagaataggcttcgcagtaggtaattcaaacacagcatcatcatttaaatcatcccattcatcatcagcaggagacatgtcctccaattcatcttcaaagtcactgtcatcactgctaccagactcattggactcccctcccactactgcctctacacatatctcagccacctcctccatccacaacacactttgacatatagtcacagaccttgtcatcaaccaacaccctcagcccatctgccagttctttcccaggaaaaagccagcgcaaaagcataccagggagcacttcgcagtgatcttttagatacccaattaactcaggcaaggatattttgtcacgttcaatgtaagacataccctcagatccaccaacataaaatgtttccctcccattgttaatgaattcaccgccaaagtgaaatctaacagataaatactctagaggatccat

SEQ ID NO: 66737 - DNA, 599 bp, Oryza sativa
  Clone ID: PAT_MRT4530_67660C.1
gcacgaggcaccacgaagtaccgtgagatgcagatcttcgtgaagaccctgacgggcaagaccatcacccttgaggtcgagtcctctgacaccatcgacaatgtcaagtccaagatccaggacaaggagggcattcccccggaccagcagcgcctgatcttcgccggcaagcagcttgaggacggccggactctgtccgactacaacatccagaaggagtccaccctccacctggtcctccgcctccgtggtggtatcatcgagccctcgctcaaggctcttgcctccaagttcaactgcgacaagatgatctgccgcaagtgctacgcccgtcttcccccgcgtgccaccaactgccgcaagcgcaagtgcggacacaccaaccagctccgccccaagaagaagctcaaataagcgactcgcccccattatgttttgggcagcccacgacaacgcgggcaatttgttactccatctcctcggcgtctggtttgggcatccacttttatgaagaagcaaaagacgagaaccatcgaaagggtagaggatatgatgcgacacacgacacacatgttttctatggtcaggtttacgcagcg

SEQ ID NO: 66738 - DNA, 381 bp, Oryza sativa
  Clone ID: PAT_MRT4530_67661C.1
tcagctatagtagcctatatcttgatgaagtggtgcagcatatcaaagtcatgcttgtgcatgaaatattctacttcgtactatttatctgttgagggtcatgcacttatcagtcaagtaagtctgcaagaagacactggaggctgaacatgctctactgaagattttaggagttggaagctaaaaacggatatcgagtatcatggaagaagcaaaacatcttcagctaaggaaaaggaggaagttaattgaaataaactagggcaaaatgctgtactacattatcaagcaaaaatattgtactcgagcagctacagtcagcttatggccacacctacacaacactctgtaatggctgagaggtatactaaataagagcct

SEQ ID NO: 66739 - DNA, 175 bp, Oryza sativa
  unsure (1)..(175): unsure at all n locations
  Clone ID: PAT_MRT4530_67662C.1
gctttatttcgaatgctcctgactcctcctcgggtgctgttcctctcagagcccttgagctgcagtagcatcattcaagctggaccctnccagatcaaatcaaacccgctgggttggcctttcgtgttgagggattctatatctatagggaagtccatggcatcagttacttatc

SEQ ID NO: 66740 - DNA, 789 bp, Oryza sativa
  unsure (1)..(789): unsure at all n locations
  Clone ID: PAT_MRT4530_67663C.1
cagcagcagcagcagtaaccncaaaagagacaggaaacctttcctaccgcaacaccgttggtgtgtaagcgtcggcagcagcagcagcagcagaaatactgatgctagtgctgctcaatatcgtgatctgtacagcagcagtggcggcaacagaatcgacattgctgttcctcaatacagcaagctatctccgttggtgccgtctgagagtgcaacatatcgtaatgtgtacaacagcactagcggcagcagaactgaccctaccgttcctcattgtagcaagctatctccgctggtgacatctgagagtgcatcacttgcagggaccgttcctgtgctgaagacattggagccgatcaaacgcagctccagctgctgcaaggagcagcctttgagctttctgtcacgccagtttgtggctgcaaagtacaaggggatgttctcactatggagtcacaaccagctagcttcttaatcatctgttgatacatccaactcgtaagctgttggttatcaacaaaatgcaaaacttttaccgcttatgcctttattattttgatttgtgaccacgtgtcttgttctttgttacactgtttgctccgtttgttgaacatccgaagagatgttatcgaaagttgtcgctcgaagtatgtatgcatactcgagctcattatcttcccttatttatttgttcaatcggcacggttctgtttgaggctttgaacatcatttcatcggttcaaaaaaaaaaaaaaagggcggcgctcgcgatctagaaccggacgcgtg

SEQ ID NO: 66741 - DNA, 563 bp, Oryza sativa
  Clone ID: PAT_MRT4530_67664C.1
tttttgctttgatgaacagagactgattcagcattgcaatcgtcagtccagttggagttcttgaagttgcaagttttcttgatgcgctcgtaaacttgatccgacacaattgcatggctccaggcatactcagccaaaccttttgaatcatagtaatcatcggtgagagggttgcctacctgcaagcagattttttgactgttatgttcatgcaggaaccaattttatgagtttaggatggtttaaatggaagttaatcgtgttccaattgggtgttcctgtgagcattacaactgagaaactattgttcaaaatactccctccgattcaaattacttgtcgttttagttttgtcctaagtcgaatatacctaactttgaccatcaatttctgtaaattcatatagcttaagaacatgtgaattatatattatgaaagtatttcttttgttcaatctaaaaacataaatcttatgagtaaaagtttatggcgtaagttgtaaggaatgtttgacttaagacaaagcttaaatgacaagcaatatgaaaacggtgagagtaaac

SEQ ID NO: 66742 - DNA, 861 bp, Oryza sativa
  Clone ID: PAT_MRT4530_67665C.1
atggatcatcaagtcggcacctcaagcccgagggagagggagagcatcagctacggtgcggcgaggcgcgggcctgggacatcgtctgaaggagaatgcgtcggctcatcgtcctcgtgcgagtacgccatgaaggtggtggactgccgcgcgctctccaagaagggcaagctgggccacgccgccgcggagaagcgcatcctgcgttggctcgaccaccctttcatgctcgccatgttcgacgacttcgacgccggccagatctactccctcactcacaacgccaaagcatgcccggtcgtcgattcccaatcccgttcgccagaaccagtgcacgcacggtcgagctcgttcgtcggcacacacgagtatgtggcgccggaggtggcgcgcggcggtgggcacggcgcaggcatggactggtggtcgtacggcatggagttcccctcggccgtcgacgcctcgctgcacgacgacgcgacgcgagacatgattgcacggcgaagagcctgccaccgccggcatgttctggctggccgacgcggcgctgtgccgggagagagaggggcttacatgtgggcccactgcaggggatgcgcggttcgccggctgtggcgaggccttcaggttgggcagcagcagatccggcccctccgctgccggatctacaacggcagtgtcgggaagtgcgttgcggaggcggttcggccggcgctcgcgaggcgccagtgcgacgggttggcggcatgtcatggcgcgaggccgctcgtgagatggcgggcggcggtaaccggctctgggtcggcggtgcatcgacctgctaggggtgtgcatcggctcgctgcccccctcaagcacccc

SEQ ID NO: 66743 - DNA, 366 bp, Oryza sativa
  Clone ID: PAT_MRT4530_67666C.1
cccgggtccccacctcttggtagccaattgcagaaaagttccatctcgtgctctcccactgtgttctagcaaatgcatatcgattagaagaggtaagctcagctaacagagaagagtcgggcatcactcctcaacaagactaccaaacttataatgggcggaatccttaatggatgcggtaaagataactaataataataataatgcagcattgcgttgctgctattctgaaaagtcttataattcatttgaatgctaagacatcctcagatggcctctattttggtcccgttccaagtctgcggttccttggagatatcacttgtgaacagaatggacaccctcctcactcaggaaaaaagaaaa

SEQ ID NO: 66744 - DNA, 437 bp, Oryza sativa
  Clone ID: PAT_MRT4530_67667C.1
gacgtccatgccgctcgtaagctggatccttaacggccgccttttttttttttttgtgaatgaactagtaaattaaattaaatgtcattatccacttaagcccgacatcttcaagggcttgcggtaaaaggggatcagactcgaccatggccgatcgacgaccacaataacatggaaataaaacaagaaatggactgtctagtaacactatgctgtgattttctgcaattgcacgatggtgcatgctgatgtactcgatcccatctcgactcatgcaatggatggatggaggatcgcggcaatggcgcggcggcggcgtaggaggtggcggcgcggcggcgcgcaagcctgacttgtgtcgagctagaccaatgaccggacgtctcgaggcgccgccatcactcgccgtcagctgcacgacctctataccacctctc

SEQ ID NO: 66745 - DNA, 297 bp, Oryza sativa
  Clone ID: PAT_MRT4530_67668C.1
atgcacacccctagcaggtcgatgcaccgccgacccagagccggttaccgccgcccgccatctcacgagcggcctcgcgccatgacatgccgccaacccgtcgcactggcgcctcgcgagcgccggccgaaccgcctccgcaacgcacttcccgacactgccgttgtagatccggcagcggaggggccggatctgctgctgcccaacctgaaggcctcgccacagccggcgaaccgcgcatcccctgcactgagaagcggcgccgccgcaagaaggccccttctgtcatgtttttga

SEQ ID NO: 66746 - DNA, 679 bp, Oryza sativa
  Clone ID: PAT_MRT4530_67669C.1
gggaaaataacattacgccgcacttttgaattgcacaaagtcaagaaaaagagaatgatatacacctaagtatttttattgcgttgttttcttgtattgcccagaccaatgtcaggggcatggcaggaacagagaaaatattgtggcatggcaaggattagccagtcttgttttgtaatttgtggaaacatcatttgtagaaaccctgttgtcatatttgaatattttatttgctagcagacacaaaatagaaatctcctccagtgcattcaaaatttgacaccacaaaaatgagaaatttgagagttatttttacacgctgatatttcttgacaattcaaatatataacctccagtttttgctaaacaggtgcggaaccgtacatcaagtgtacggctcaatctgacataaagatctgtgacctctccaacccccggtttgacatctgtgagctgtgcggcgatgctcgcaccattggacagtcctccactgttgtgtatgtcccacagaaccgtgcttccaatggtgaagagtggattatccgagcacagtcccgaaagcaccttccctggatcaagaaggtgaccatcaaatctgtgaattcctcagaaccagaaccaatatgtacctccaagcatcacatcccagccattgtcttcgcactaggtgggctacagc

SEQ ID NO: 66747 - DNA, 404 bp, Oryza sativa
  Clone ID: PAT_MRT4530_6766C.1
atctggtcgaccgcccataaccgtgggcacagctattcaaatagttttactctgatcagaggtgtacaactttacccacaagacacagccccacaacacgttcccgtgcgccgacatgccaccatgacatactggaaagaggccgtgataggacccttcgcataaccccctctaaccaatcgcaccacacctcaggtttcacctccactcctcgcaaggcatcgggcagtcccctctcgtgcctaggtgaatccggaagcgacaaaggccgttgcagggcccatcccgctccatcatgcccacccttgcctggatacgtcggctagaggaaagctacactacaaacccagccgttgcccacgctggcttgtggtaagtacgataagttcttccagggcatcccg

SEQ ID NO: 66748 - DNA, 540 bp, Oryza sativa
  Clone ID: PAT_MRT4530_67670C.1
atgggccgatacacagagatggttcatacagcccagtcaggtcccatgtacttcttgttccttcgccggatgcgttttccccttggtaaggcgtcttcctccaactcgccttcagactatacgtcgtcagccttgttgtcgtcttccccttcaggtccttccttctcttgggacttccagctgtatcccagcgttcctgctcccgtggatgttgatgacgacgccatgagagcaagcggggagcctcctgagatcagccgcagcggcgccagcagctgctgcagggtggttgtagcgctccggcagactcgccagaccagccgcagcactggccctcctgccgcggccacccacgcctcctgctgccctctaaccgccgcccttgtcgacgcgtcgtccactgccgaggagccaccggaggggatccggcctccctcgccggagaggccagatccggactgggggtgccggtgccgaactagggggaaccatagccggcggcgccgtgtgcagctaggcccatgcctctcccaccgttag

SEQ ID NO: 66749 - DNA, 415 bp, Oryza sativa
  Clone ID: PAT_MRT4530_67671C.1
ttgttttttttttttttttgggttttttttttttttggtttttatttttttttttttatgttgtttttttaaagggaaaaaatgtgggcgaaacaaaaggagagcataggccccctaaaaaaaaacccccggaaagaaaaggatcacaggataaggaaaattttaccccgggaaccaggggcacaagggggcgacaaaaagggggggcattaaaaaaaggaccccaagggggcaattaacaaggcagggaggcataaggggaaaaaaacctgcttgaaaaagggccccctcctacaaaataaacgggggggggggtagggcggggcctggggggcggccccgacgcggggggtctgggggccaatgaggggcgggaagggccagacgggcaccttaaccctgggggagggccttt

SEQ ID NO: 66750 - DNA, 231 bp, Oryza sativa
  Clone ID: PAT_MRT4530_67672C.1
atgacttcgactatagggagatctaacccgatcggagtatatcttccgacaagatcgaaatcatccccatcaacaattcaatctatcgagattgatcgaacttcaagacgtcgactgcccggtgatcgagatacgcctactcctgttcctcgaccagtcggttacagcaatctcatgacacctaacgcgacaatcaacattgtcgtgatagcgacaaccaagactggctag

SEQ ID NO: 66751 - DNA, 501 bp, Oryza sativa
  Clone ID: PAT_MRT4530_67673C.1
atgtggattcaaaaagcaggagtcatcaaaaaaccatccagccatcgtccgccgcggcagtcatcgttgtcatcgctgtgtcacggttcacgcacaagccgttgccaccgcaaaaggcgaaatcgtgacgcacacaatgaggaagacgaatcgcaagtcccaatcgattcctcccatgctgacggcggtggtgatggcgaggaggatgaccctttgttcgcggacctccagaagctcccgccggacgttgcccgtgacatggaggccgtagtcggcgcggctgaggggttccacgcggacactgcgtgggccgggggcctcctagagcggtgcggcgccatctacatcaccgctgccgctgccgccaatcatcgctgtgagcccccttgcctcgagcagcagcagcagccgccacgccatcacctgcgcatccaccagcgggtgggtggggaaaggaaaagagtggggaaatggaatgacgtgaagagagatgaagaatga

SEQ ID NO: 66752 - DNA, 357 bp, Oryza sativa
  Clone ID: PAT_MRT4530_67674C.1
ggtgttaaaaaaaaaagggtaccacattgtatatgaggatgaatgcatcctaacgcgaaactggctggattcccctaaaccccataggtgcgttatttggggcttataggcgaacttattggacaggtgacggtctatagattctacaacacggtttctaaaaattatactgcacttgacctgtgggagaacataggccctggtgtgtcctggacgattgacctcaaatctaaagaggctgtatatcacagtgttccctgccacagtataccccccgagagtcatactggtgatgaggcccttcgggctgccacctgtcctttaaaaagcataggggcctgatgcaccaggacacga

SEQ ID NO: 66753 - DNA, 220 bp, Oryza sativa
  unsure (1)..(220): unsure at all n locations
  Clone ID: PAT_MRT4530_67675C.1
ggatcnnctctgaacctcgtgtacatcntgcgagtgcaagtnggctcttccttgaggttgccagactacctggaagcaggtcatcaaggattaancgactatctcagaagagccggtttgtcaatccgtgttgttggcccttcatgtttcaactactgttctctggcatataagatttgtccgtctcttggcttttgctgttcaagaatggacactcggt

SEQ ID NO: 66754 - DNA, 643 bp, Oryza sativa
  Clone ID: PAT_MRT4530_67676C.1
caaacaaacaaaaataaagctcagttgtgacattcagaaggggcccaagttttacatttggaaacataagcacctggtggtagaaaccacactatggagttggcaagagtcggagagatacaaagctcttgggaatttcgttccaatttgatacaattgcataccatgccttgttcctgttttctggtattggaggagccgtggagcaggggtcctcagttatgtcttgttactgttttctggtattggagcagcataggtagcttgaggacagtggtctcagtctaagtatcagatgtaaacagtgttgtgttgatgaaatggttgcacgcttactgtgatgatcgccgatgtttagatcactgccaaaatgtaaacagtgtgtagatgctgcgaacctctgtgttagcatgtcctcagctagtctgatcagccaggcacaactttcgcaaacctgttgatagaagctgcatcttgaaatgagaacatgagcaaacaaaaagaattgcacactggagatgatgtaattaagttttgtaaacagaatacaaggcgggccctcagacatccaaggaaggatttaacagcataagctctcaagcctggcgaggcgaaagctcttaggcggcaactgcgaatgtta

SEQ ID NO: 66755 - DNA, 763 bp, Oryza sativa
  Clone ID: PAT_MRT4530_67677C.1
ccgggctgcaggatcgaatcggagcggatcgtagctggttgaaggtcgaagatggaggccgcgcttttgagcggattcatcaagggccatcctaccgaggctcttctccctcgtcccccgggcgcaggagcccccccggggcgtcaagggcgacatcgatttcctcatcaaggagctccgcatgatcgtcggcgccatcgacgacgacctctccctcgaccaccccgccgccgccgccgtacagacgctatgcatggaggacctacgcgagctcgcccacggcatcgaggactgcatcgacggcgtcctgtaccgcgcggccagggaccagcagcagtcaccggtccgccgcgccgtccaggcccccaagaagctccagagaaacctgcagcttgcccagcagctgcagcggctgaagaggatggcggcggaggcgaaccagcggaagcagaggtacacggcggcggcgcccggtcaacacggtcaggtctactcatcggctgcggcgcaggtggatgagccatggccgtcgtgctcatctgcctcagatccgcgcatccacgaggcggacctggtcggcgtcgacgcggaccgggaggagctcctggagcagctggcggagcggcagccggagcagctcaaggtgatcgccatcgtcgggttctgcgggctggggaagaccgccctcgccgcggaggcgtacaaccgagagaccggcggcgggagattcgagaggcacgcgtgggtttgcgccgggcaccgg

SEQ ID NO: 66756 - DNA, 483 bp, Oryza sativa
  Clone ID: PAT_MRT4530_67678C.1
atgctgctcaggatcgcccacatttggctcctccaccggcggaccaagtctgccacaattggcgcgcgcccagccatccccgtcgatcctcgtccggcgcgccgcaccctcgccgggtgcgccacccacgcgctccaggacgacgcacgcgccacgcgttacttgggctactacgacggtggctgggtcttcatctccttgggccacacgacgcgctcctcagtctccacaaccttcgccgccatcaaccactctgcacccatgtcctcccctatccgccgaagacgtccgcgcgcgttcagggtgcttggaatcgctgggtgggcggatgctgttcctgttcgtcgctgcagtgcagatcgtacaatgcggacgactatccggccgccgacttcaacgtggttgccagcggccaagttctttgccggagcaagtcccgtcgaactactcaccgccggcgtggcttctaccccgttatgttag

SEQ ID NO: 66757 - DNA, 1236 bp, Oryza sativa
  Clone ID: PAT_MRT4530_67679C.1
tcatctgcgctgaacagttgcctcctttcgatgtcccattgtattgactaggagtaatacaaactgcatgacgcatctccatgcctcgtgatattcagcaattatcacatgaaaaagtgccggtaagaaatttccagccctgagaaatcctggtccagtctttgcaccaggtacaccgccctcagcatttacggatagagacattcccacaacacgagcagggttcatttccatctttgcttcgatcacatttcctctccatgtgggtagatacgaatcaagagggatcttcatgatttgccatctgtcctggggtaagtacacaaaggcttgccacgaattatcttcctgttgtccaggtgaattcacccagttctctgtgtatatagtagatatgtagcatcttccatcccctctgagtttcatcgctatagtatcatatgcatcaagatcaatgaaaccattaaacttctttgatctcattccacagaaaccactacgccttatcttccatgttgatccctcagacatatccaaagagagattgccagaaaagagaccagttgatgaagtatccccaccagcaccaccatcagttatctccaatgatgcagatgataaacctccatactcggaatctgaatacaagtgccaccttttcagctcatcttttgaattaaaattgaagatgtacttttcacttggtgggattaggtcttctgaattccacacaatggctcgcctggtggcgttaacggaggcttgccacagcgcccgcagcctcgacatggcgaaagcaccccgttcagcagtggcggatctcccctgctgctgcgacgaccacctttggcccgacgacgatccccgtgcccttccgggcttccctgatgcctgctcgccaagatcgatgtctgaaggcgacggtcgcggggtagtccggtctcctcgtctcccgccctccatgccccactcgctggcctcatttcttttccgcccgctcgccagcctccctgcctcctcccttcccactcccctcgatggcgagaagggttggccactgccccccgccacctttttccctgttgctgcatctgcctccgcggcctcgcctgtgactgggttacgcgttgacgatgagcccatgtacaatgattgatccatctcgcttcttgattcttcccctgctgctcgaatcaaccgctcgattccaccgcttccaccgctgctcccctccat

SEQ ID NO: 66758 - DNA, 290 bp, Oryza sativa
  Clone ID: PAT_MRT4530_6767C.1
cacagccaaaccctaatcaccacataagctatatgtaggctctgccatcgaaattcgaaacccggctagctttggagcaagccgtatctgcaaccaatccatcatatttgaggtcgaggcacatggaaggcgatcgatataccagaaccatgcccaccaccgcagaggatcataaacagtgcaaggcggtggaagtccagcgtatcaatgcggagtcccatccgcctactcatcatgacgataggtgtgacgacctccacaacgacgaggagttccagcggagcatggac

SEQ ID NO: 66759 - DNA, 578 bp, Oryza sativa
  unsure (1)..(578): unsure at all n locations
  Clone ID: PAT_MRT4530_67680C.1
agcacgcganacgaaagcaaggttttctctaaagcggccgcccttggggttgttttttatgagctgaggaggccatttgggggtcgggctttcactctggcagtccgggggctttgttacagagcatgcgcagttgctgtcgtggtgctgggaagggtgtgaccacaacactgtggggtggtaacatggggccctgaatgggcgggaggggagcgccacctttgttcagaggcagggacaaggggtgcgtgggatggggggggggtgcggggcccggagttcgggggcccccagaggccggactggggggaggggtgggggactgaggggcgggggtaaacgcgcggggttgggggggggtgcgggcagggggctgggggggggctgggggggggggtgtgggggtggggcggggggggggtgggggggcggggcgcgcgggggggggggtggggtgcggtcggggggcgggggggcggggggggcggcagggggtaggtcggggcgggggccgccgccggcggtctgggcggcccccccggggggggccgggcggggcggccgccccgggggggggc

SEQ ID NO: 66760 - DNA, 317 bp, Oryza sativa
  Clone ID: PAT_MRT4530_67681C.1
ttcgaaaccagtcctccactaattcagttatagaccattcccactaggctagttcttaaagaagataatgctgcggcgactaccatttccctagcgacttctgtaaggaggggaaagaagtctgacttggtcaattgacgagctgagggtaagtcggaccgaagtgattagggacatgggtaattaatcgaagtttaatctaatcgtcagttaaattcagactctctatgaatcttgagatgataaacaataaattcaacacggtcgaatctttaccatagtctatctttaaaatgtaaaacacggttttttttttt

SEQ ID NO: 66761 - DNA, 1215 bp, Oryza sativa
  Clone ID: PAT_MRT4530_67682C.1
gtgtgctagcagaggcgccgtcgtggtcgccgtcgttcgtcctgctgcttccgccgcatgccggtgagcatccatcagttacgcgcatcctcttgctcatctctccctacccacgcgctttttcctccaatttgaacaccctttgtttctcttctagacctggaagctcttctcttaatttgccttaaacctcaatactaatagcagtttgtttgttcccccagatccgccactgctgaacggggtgctttcgccatgtcgaggctgcgggcgctgtggcaagcctccgttaacgccaccaggcgagccattgtgtggaattcagaagacctaatcccaccaagtgaaaagtacatcttcaattttaattcaaaagatgagctgaaaaggtggcacttgtattcagattccgagtatggaggtttatcatctgcatcattggagataactgatggtggtgctggtggggatacttcatcaactggtctcttttctggcaatctctctttggatatgtctgagggatcaacatggaagataaggcgtagcggtttctgtggaatgagatcaaagaagtttaatggtttcattgatcttgatgcatatgatactatagcgatgaaactcagaggggatggaagatgctacatatctactatatacacagagaactgggtgaattcacctggacaacaggaagataattcgtggcaagcctttgtgtacttaccccaggacagatggcaaatcatgaagatccctcttgattcgtatctacccacatggagaggaaatgtgatcgaagcaaagatggaaatgaaccctgctcgtgttgtgggaatgtctctatccgtaaatgctgagggcggtgtacctggtgcaaagactggaccaggtgattttaggctagaggttgattggatcaaggcattgaggacactctgaatttgtggtttccacaaatcggtctttttgtaggatttctcagggctggaaatttcttaccggcactttttcatgtgataattgctgaatatcacgaggcatggagatgcgtcatgcagtttgtattactcctagtcaatacaatgggacatcgaaaggaggcaactgttcagcgcagatgaataatgaggtctcttttgcttttgggggaaatgaatatacaaatgtatcacctgtttcttatggctgtctgaacatacgttacttcct

SEQ ID NO: 66762 - DNA, 449 bp, Oryza sativa
  unsure (1)..(449): unsure at all n locations
  Clone ID: PAT_MRT4530_67683C.1
gaatgaacaacccccngggnaantnagnttgattanaaatntncncagcgagggaantgcaatcccttcccaaaanccctgnanaagtctgcaggacngcaagtanaggnnanctacgttggtaagntncntgaggccatttgccccnggttnagaggnccatnaacccnactcacncggtncccagggtaanncanancnggttgcttgcttanantgcntttgtnacatcatggccactccttggttccntagcttttatcgcntttaggnaaaaagntcnggaataanntgctagctnantggctnagaagataaatnanttntgtncccaacagttttttttttncatttgcntcantntaaaacncagnattgtttnaaggcttnnaaagccattcgntctcnaaaanaaaaaaaaaaaaaaaaaaaaaaaaaaaaaaaaaaaa

SEQ ID NO: 66763 - DNA, 384 bp, Oryza sativa
  Clone ID: PAT_MRT4530_67684C.1
atggcgtggaaaacaaaggagcgacaccggcctcgttctatggttggttggcgatggcggcgcgagcacgtggaagctgcgtctgagttggcggcggaggaggagggtaaggcacggcgtcggcggaggcgcaagctgtgggcgacgatggacgacggcggtcggcggcgcgagtcgtgggcggcagcgcccatggcgcacggcaacagcgctcacagagaggagagaggcggctgcctctcgggctgggccgatttgggccgaggaaataaagaaagtacacgtaattgtatgtactgggtaatagaaagctgtatatcacttgattcaacctcatctgatttaaagttcggaaatccaacattcggtagcttttcccagtag

SEQ ID NO: 66764 - DNA, 542 bp, Oryza sativa
  Clone ID: PAT_MRT4530_67685C.1
tcacgttgaagtaccctatcgaacacggtatcgtaacgaattgggacgatatggaaaagatctggcatcacaccttctacaacgagcttcgcgttgcccccgaagagcatcccgtcctcttgactgaggcgccgctcaacccaaaggccaaccgcgagaagatgacccagatcatgttcgaaacgtttaacactcccgcgatgtacgttgcgattcaagctgtcttatctctatacgcctccggtcgtaccaccggtatcgtgatggactctggcgatggtgtcactcacaccgtacccatttacgagggttatgccttgcctcacgcgattcttcgtctcgatcttgcgggtcgcgatttgaccgattacttgatgaagatcttgactgaacgtggttattcgtttaccaccaccgccgaacgcgagatcgtacgtgacatcaaggagaagctcgcttatgtcgctctcgacttcgaacaagagatgcataccgctgcatcgtcttcgtctctcgagaaatcatacgaattgcccgacggc

SEQ ID NO: 66765 - DNA, 2107 bp, Oryza sativa
  Clone ID: PAT_MRT4530_67686C.1
ccggccccaacaccgcagaagcccactccaactccaacccgcaagcatccaaactgagctgatctcctcttcctcctccaactccaagcctacaaagttcagagaaatccaagaaagatacgagagagataggtccacgtcgttgacgatggcttcttcgggatgcagcagcaatcggttgcgacaaaccattgtcgttgcgttgctgctgccggcttcttcttcttgcttggcatccgcgaagcacaggggcaactggaacggcgacgacggtgccgttccatgtccaggcatgagctgcgcagctacaggaagatcatggcgcaggtggccaggtggtgcaacgcctccgtctagaagatgcagcgccccgacggcgacaccttcgtccccgtgccggtccgcctcttccccggcgtcggagtccccgccgccgcgtcgtcccgcaaccgcccggcggccggcgctcccccccgcgccaggagctgctccggcctccgagaggcagggcacagctcgccaggctccggagagcttcgctgcagccgctgcagagtcccgacggcgacgtgatcgactgcgtgccgtcgcacctgcagccggcgttcgagcacccgacgctgagaggccagaagccagaggcgccgccctcggcgacgccgacggagacgtcgaggaggaggaggaggaggcggcgccatgcaacacccgcccgcggtcccggcgtactccccctggggacggaggaggacgtgttcggattggggcagacatagcgggcgtagttggaagtccggcgagacgagcctatattggcggagggagtgagtagttctctaagtagtaattaattagctagatagctttagtagtggtttctgatgatgagtgtgtcaagcagccaaggaacagtgatggagccaaaagttttgagttgatacgacggtcccgttcgccatgtgctctgctctctcccggggcgccgccttcgctcgccgcgactccgatgtgatggggaacgagacgggggatcagttctagggggcgacggtgagcctgatggggtcgtcggcgatggtggctacggcggcggtgttcatcctctctcagttctgggtcatcaccggcacctccggcattgacctcaacaccatcgaagccggatggcaggtgagccctgaactgtatggagataacaacccaaggttcttcacatactggacatttacactcagtttttcttaccggtatctggattttgacattttgccattgaaaacctgcaagaaacaacagtacttaatactacaacagactgacgcgtaccaggcgaccgggtgctacgacctccactgctcccgctccgtgcagaccaacaccgccatccccattggcgccgcctccccccccagctccgttttcaatggccgccagttcgacaccagccttctcatctggaaggacggacgtcgggggcactgcggccgccagccgggagctggtccactggtggggtaccggccatcatatcccttcaccctccagctcctcctcgccaacatggtgcagttcggcggcgaggtggtgaacacgcggccgtcggggtcgcacaccccgacgcagatggggagcgggcacttcccccgcgagggcttcaaccgcgccgcctacttccgcaacctccaggtcgtcgactgggacaacaacctcctccccgccgccgccctccggctcgtcgccgaccacccttcctgctacgacatccagggcggctacaaccgcgactggggcaactacttctactacggcggccccgggagcaacgtcaaatgccctagaaaggatctcgctctctccatctcttgttgcttgatggccggtcactcttgtttttctttttttgttcgtttgtttgtttgttttctttcttctgtgttcttctttgtgatagagattggttagtgcattaatgctaggatattactctatttgttaggtcttagcttgagctgctgaatgcatatgggagcaattaaattgagagggatttgtaaatttgagaagcaccttgattttgggatcaatatatgcattcagttcccagagt

SEQ ID NO: 66766 - DNA, 794 bp, Oryza sativa
  unsure (1)..(794): unsure at all n locations
  Clone ID: PAT_MRT4530_67687C.1
ctccgaagcttctcatctcctctccactcctcctcctcctcctccccctcgccacctcccacgcgctgccacgccggcgacacgaccactgcctccccccgcgcgggcgcgccaagcgccgggatcccgctgctgcgttccagttcgcggccggggcgtagtaaccacaggtgcaatacaccttaaaatggggtctacacgatcaaagaatgaagatgacaaggccattgtcttatgccacgaaagaaaacgatatgttagagaagcacttgatggaagatgtgcattcgcagctgctcacttcgcttatattcaatcactgagacacacaggatttgctctgagaaaatttttggagcctgaagtgccaacagattcttcgctgtacacatcgacatctgcaacaccagaacctcctactattcggcagaaatcgaggaacttatctccatctatttcacatcaggccagtgactctttctccccagttccatcccctttatcttccggacggttccgtatcaatcatatgaaatctggggggaaccctgtcatgaccattgaggagaaggtgcctgttcctgtaacagcaactctacaaacatcatcccttgttcctaaagctgtacatgnacctggatgatagttccacatttgaagcacctccagggacaccaccgtgggactactttggcctttttaaccctggtgaggaccaattttcatttcatgacgagaaggagcctggtcatgactttgaaaacgctgatgatatcaggcgtcttcgggaaaag

SEQ ID NO: 66767 - DNA, 284 bp, Oryza sativa
  Clone ID: PAT_MRT4530_67688C.1
ccggccgggaacttcctctcattccctacttcccctatgctcgtcgagcgcttcctcctccttccgccgccgtgggatctcgtgggaacacccagaaacatctctcttctgtgggtgggtgataggatgggtcccgatctccaggtagactcgtcctggctacacggagaaggttaggatgaggcactccaagtacgacatgcacttcccctacaagtggcgcctcgctttcctatagcgcgacatgcatatcctcctcctcatcgcctatgctcccgttgccc

SEQ ID NO: 66768 - DNA, 344 bp, Oryza sativa
  Clone ID: PAT_MRT4530_67689C.1
cctgtttctgaacctagctcctttctatcgtggggggggtttgtgaggtatgtgcctgcgatcgatcgccgccgccagtagacgcattgagaccggggggaaagtggcttactttatcaatattaacatagtttgctatgtcgaagggccctaggggagcaaagttctcgcggtgaatgtgtcggacgaaaggaggtccctaagtgagactgtaagcaaggacctgcagcatgcacgtgctctacatgcagcatcagtactcagcaccaagcacgcatgtgccagctagacgaaacgttcagaagcagaggatgatgccgccataactatggaagctatgacat

SEQ ID NO: 66769 - DNA, 660 bp, Oryza sativa
  Clone ID: PAT_MRT4530_6768C.1
catgtgatggaagtagaagagcttagacgtcctttgatggttagtaccccaagtaaccaagcactctcatcacaacgtagcccctctgtcagaatagagatccaaggtgtaccctccctggccaaccttattctgttagaatccaaagatcttgatgtcatcctagggatggactggttagccagatataaaggtgtgatagattgtgccaatagaaaagtgactctcaccagcaatgatgggcgagttgtaactgttcatgcactgccctctgaacctctaaggtcaagtttaaaccgaataactttggaagaaattcctatagtacgggagtaccccgatgtgttccctgatgatttacctggtatgccgcctaaaagggatatagaattctgaatagatttggtaccaggaacaactccgatccataagagaccttatagaatggcagccaatgaattagcagaagtcatgtcgggtcccaaaactaatgattcggaaaccgacatgtttagactgtatcaagccctggatcagtagattgatacaggttcaacaatctagatcttcattgcatacattggtggataggagtatagtggataattgaactggttgagcagatatgtgactggtattggctgatagtaggtttgggta

SEQ ID NO: 66770 - DNA, 122 bp, Oryza sativa
  Clone ID: PAT_MRT4530_67690C.1
cgcaggcgccgcttaagtggtccgcctgcgaaaatcggacagcgaacttcacccgatttatattttttaggcgtgctgtgtcatttgttaatgacaacgacatcaaattcattaagtcctga

SEQ ID NO: 66771 - DNA, 588 bp, Oryza sativa
  Clone ID: PAT_MRT4530_67691C.1
atggatgactttgttaccgagttaaacaatcatttgataactgtttaccagacagcactcaagattagagaaatgattgaattgtgtgagttttacgcaaatatgtcaaactccaagaggaatgccattcctgcaaagatgctgaagaatgctcactgtcaggaagattttggtgtccttgatttaattgaccaggcgcagaaaaatgacaagtttttttttgctaacattgctgtgaaattgaagtgtttgctgggacgtctttgtactgcagatccgccccaggcaccagatctggagcggaacaagaggaagaaggtgaagaagatggtggagcgtgttatcgatggtggggatctagacttggtcttatcgtacgagaacgacgaagaatgtttgttaaatgagagcatgctcgaggatcaggaaacattccgtcaccaaatcgagaatttgggctatgcgttcatccatgtcatgagggaagtcatcctaaccgatgatgaggatcaagaggaaggcgaaattgtcacctatgctgaggaggaagatgatattgttaccgatgatgatgatgaggatgattag

SEQ ID NO: 66772 - DNA, 420 bp, Oryza sativa
  Clone ID: PAT_MRT4530_67692C.1
atgagcacaacacatgggagaaaaaagagtagcttcagggcagggctgttgaggcgccacagcggtgcaagtggagctcgagcatggggcatggaaggtggaggtagagctcaagcacgcagctggcaaaggtggccactgatggagctcgagctcaagcttaggggcaacatagatagagctcatctcttcaacgccattccccgcggctctcaatacctcaggagcaagcagtggctgagtggaaacaacgggatgtggaaatggatagggtggtctaatctgcaatccaaggggtgggggggggacggcgccaacgtcattggcgtcgtcatgttgaatcacggcgccaacgacattggcgccgcgaaaagaatcatttatagaataagtttttttaggagtttatttggaggataa

SEQ ID NO: 66773 - DNA, 810 bp, Oryza sativa
  Clone ID: PAT_MRT4530_67693C.1
atggtggtcgcgggcagatcccgcgacggtgcgaacgagcggatccagcggcggtcgtgggcagatcttcgacggtcgcgggtggatctccggagcgtccgcgctcccccagggggctcggggtatctcgccatatccctcggccccgaggggctgccttacctcgaggccctcgctcggcgccacgtggtgaccgcgagggggatcgagcaggcgggaacgcggggactgccaggcgcatttatgggcagcgccccaaccgcccaccggaagacgtataccccgtcccatcgacagcaggggatcgacgtgcaggcgaaggacttcgctagggaccacctgaggacgagcgcacacttcacttccggccaaaggattgggaagctgttcaacccagaccgatgtgggcccctctccaaggggaaatcccgcgcgtttgtgaaggagccgtttttcttccgccccaagtttccttccatcctcaacgaccatggtcgaggtagtggaggaagaagtggtggtgtacactcccactccgtccggaaacggcggaaggaccccaaccggttaggaggttcggccctttccctgccggctgatgggggaagggcgcgccgcgccggggtacaccgccgcctcacctacgacgacggcggcacgccccaaggcgcgctccaggccgtggaggctctcctacggcaccctcccgtcgttctagagccgaagaccccggtccagcgccatgatctcacggcgatcgacaaccccgacgtcgtcgaggccctcgaaaagccgagggcgttacgatag

SEQ ID NO: 66774 - DNA, 1163 bp, Oryza sativa
  Clone ID: PAT_MRT4530_67694C.1
cccaagcatcagcatcacaacccaccaatcgaatcgatcgaacaagacacgacaccatgcgccgccgcgtctcctcctcctcctcctcctcctcgtcctcgtcgccggcgaggcatcacaaggcgcggcgcagcaggaggaagctcgccgtcgacgaggactgggaggccgccttccgcgagttcctctcccgcgaccacgacgacgacgacgacgaccacgacggtcagcatgtcgttgttgcgccgttgatccgtggtagtgacaagtgcgtccacggccacgaggtggtggcgtcgacggtcggcggtggcgcaagcggcggacgacgacgagccgacgacgacgacggcgagcggcggcggcggcggcggagggagaagcggagctacccgtaccgcggcatccggcagcggccgtgggggaggtgggcgtcggagatccgcgaccccgtcaagggcatccgcgtctggctcggcaccttcgacaccgccgagggcgccgcgcgcgcctacgacgacgaggttcgccgcatctacggcggcaacgccaagaccaacttccccccatcgccgcccacgccgccgccgccggagaagccagcggcggagaggagcccctcgacgacgccgacgacgaccacggaggactccggcgactcgcgcatactcatcgagtgctgctccgacgacctgatggacagcctcctcgccgccttcgacatgaccaccggcgacatgcgcttctggagctaacgaacaacagagcagattcagggcaacataaacggcacgtttttgcaaccttgacatgcgactcgcctaataatcttgtcaaacaagggccgccagcttaattagctttttccaaaggtggggaacaattttgggggatgcaattaggacgcacagagatgaccccaacttgtcaatgggaattgaactctgatgacctttgtaatgataatcaaggcaccacattgtggggttaagcaaagttttggcaaattagctttgccttgcaggaataaatcagcatttctttttttttcctttcactggaccccaataaggtaatttgcatacatatgtcccatggatcgaacaatatgaaaagtaattgtatagtgttggttgcagaggttatcaacacttattcgggtt

SEQ ID NO: 66775 - DNA, 708 bp, Oryza sativa
  Clone ID: PAT_MRT4530_67695C.1
atggaggagtttgggaggcagccatgcaagagggagcaggaattaggttgggaaagttttcatccaagcagcgcccaccatctgttcgatgaaatgtcaagcccattggaggtgtttgaggaagacgttcttcttgtcatgagtgaggagaacatcacatgggatgaagcactccatctgttacaagaggaactgaaggatgcccaatgtagatttgatgagaagctagatcgttttttggaggtgttcggcttgatgggagacaagagcaatcaatctgagggagacaaaaggagcaatgaatttaaggaattcagtgcctccatcaaggagctcacccccaccaccgaggctgctgcatttcaatcaccccaagcatcaccttcttcagcgcccaccaagtgttcgatgatttgctttggcctcgacaccatgtccgacctcaacatggcagcagcggttgtgtgcgccaccacttctctagcctccgtggagttagtggctagagggaacgcaacctgtgaaccctacgtcaacacccctggtcatcccaaggagacgcacaccaagtgttcgatggttggctttgaggtcaagggtggcaccgaccacaccaaggtcacatgccataccatgatgggtgtgcctgatggcgttctagtacctgaagcatcattccatgaagcgtccaagtatccaatcctgtag

SEQ ID NO: 66776 - DNA, 283 bp, Oryza sativa
  unsure (1)..(283): unsure at all n locations
  Clone ID: PAT_MRT4530_67696C.1
gtagcctgacancctcccctccccttcgcctcgttcctatcgcctctagtncccaccaccaccccccaacncccccgccgctctcctgatatccactagtngccacgccgcgccaccccctaccccttgccacgccgcgccacgccacgcctcgcccatctcctncctataaacccntcngngcccccagctgctcgggcggcggcggcggcggcgcgaactcgaatctcttctgtnccctttcaccancgtnccccnacaggagatgctgcgctgtcacang

SEQ ID NO: 66777 - DNA, 243 bp, Oryza sativa
  Clone ID: PAT_MRT4530_67697C.1
atggctagaggcggcagcgtgcacgaccaccggcggcgaccggcggcggcagacggcgcgaaggcggcggcgcatagccggagcagcggcgtgaccaaaagcgacggcgcacgcgggatggggaaggaaaggaagggggagggagtccttaccggagggggcagcgacgaccagcggcggaaaatgagggaggcggcgaagaccggcgatgccaaggtgcggacgcgcgacggcgacacctag

SEQ ID NO: 66778 - DNA, 267 bp, Oryza sativa
  Clone ID: PAT_MRT4530_67698C.1
ttgagattcaaaaggcgttgtcatagcatctctaatttctctactgatgtacttcgtctggatcaagatttgaattgcccagatggaccggatcggacggctgggattgcgccgagattcgtgaggccgccgcgttaaaccatcctcgtctccctccccacgtcgcgccacgcgccacgccgagctcgctctcgccgcgccacgccgcgccgcgcgttcgaccggatcggatcggcggcgagggagaggagaggggtagggatggag

SEQ ID NO: 66779 - DNA, 683 bp, Oryza sativa
  Clone ID: PAT_MRT4530_67699C.1
ctccccttcttcttcaattccttcttccttcttccccgacgagcggcgcccaaccgccatgggcaactgcctcaacccggcctccaaggcgcgccgccacggcggcatgccgccgccggaggacatggacgaggaggaggggtggtgctacgcgacgcccgagccggcctccgccactgccaccgccacgacgacgatcggccacctgctgagggaagaagaaccggcagaggaggaggatgaagaggagacggctgcatcggcggcggcggcggcggcggcggcgggggtgaaggtgaaggtggtcctgaagcgcgccgagctggagtggctcatgtcccagctcaagaccggcgaccgccgcctcgaggacgtcctcaaccagatggccaccgcccgcgccctctcctccgccctctccgccgcgccgccaccccctccccaccgcgccggcgacgggtggcgcccgcggctcgagtgcatcctcgagtgccacgagctcgccgccacctgacctttctaattccatctcctcctcctcctccatatatatgtgtgtttcttgctcgccgctgcttggatcagcgtcggtggcatgcatgcgtccaagttgttttcctgacttgcttcaattctttcctccaggcaaatttaagggaagatgaagcagtcagtcagtgacc

SEQ ID NO: 66780 - DNA, 1236 bp, Oryza sativa
  Clone ID: PAT_MRT4530_6769C.1
acggaagcggaccccgtgtgtcaaccgaggcgagtggccgacaaacggactccactagacaccacacgggttgcacacgtggaaaccacgcggctaccgagcgggcacactaacacggacactacacggtcgccacccgcacacgtgaacgactaccgacaccggtacacgggtaccggggtcgacgaccgcacaacgggtacggggcgacaccggaaggacgagggcggggaagcgagaggacggatccttaccaccacgcgacgaggcgtgggaacgacaacgacgaacgggaccggcgaggacagctcggggacgacggaggcgaacggcgagggaacgacttcggcggcgatccttggacaaaggcgagacgcggccggcacgaggcttgacgacgcggagccgagcacggagacgaggacggggctgcagcggctcgcttgacgaacgcggacgacggacgagaacggctagacggagggacgaacgccacgacgaccgggaacgacgagaggacgacgacgacgacgacgaccgggaccggcgagggggcgacgaggggcagccagcagcagctgcacggggacgaggacgacgtggaacacgccgctacgatgttggtgaaggtggtggtgcagcggggcgacgagccgacgaggaggaaggagaggccggcgcggagatgacggcgttccggcgaaattcgggcgacgccgtggcctggccgggagagaggacggcactccggtgccgggagaggtggtggcgacgtcggccggcgcaccggggacgcggcagaggcggccggaggcggagaagtggtggcgacgccactggacgccggcgaggacgcgtctccggtgttttccccgcgaaacagagggctgaccgagggagaggaggtggctgcgaggccgagggagaagacggcgtgaccggacggcgcacgggcgaggcgggagaggcgactggaggcggccggcgcggagaaacgagaagggcgacggcggggaggcagctccgggggtcacctcgcgaaacggagggcaagccggggtggaggaggtggcggcgacgctggaggaggcgacggcgcggccggacgacgctccggcgaggcgggagaggcggctggaggccggccggcaacgtgggagagagagggcgacggtggggaggtggctagagaccacgggagagctcgggaagaggctaaaacggtagaacgtaaag

SEQ ID NO: 66781 - DNA, 1551 bp, Oryza sativa
  Clone ID: PAT_MRT4530_676C.1
atgtcggttctcatagtgaccagcgtgggggacatcgaggtggacctccacaccgacatgtgccccctcaccaccaagaacttcctcaagctctgcaaaggtaacgagggtctcgtggcgggtgggttagccttcaggaagcagttgagcgggcaattttggcgttgtagagcgggtgctactgggtctggattcgatgtgaagggaatgagctttcctggctacagcttcttccttgtcttcctctctcttcattattttgttcacatccaaaactatttgttctccagattcctgagtggtgctatggctacacgattttttgatgatgagatccatccggagcttaggcattctaaaatgggaactattgctatggcaagtgctggtgaaaattgcaacgcctcgcagttctacatcaccttgcgggatggcgtggactacctcgatgataaacacactgtgtttggcatggttgctgaaggctttgacacgattacaaagattaatgaaacatatgttgatgataaagggagaccatttaaggatatcaggattagacatacatatgtcttggatgacccttttgatgatcctcctcagctcagtaaacttattcctgagaattctcctgtagggaaaccacaggatgagattgcagaagagcgcttagaggataactgggtccctccagatgaaacagtggctcctgaagaactcgaggatactatccgctccaaagaagcacatacaaatgctgttattcttcagagcttaggagatattccagacgctgagatcaaaccacaagacaatgttttatttgttcgtgaactcaacaaagatgaagatttatatacaattttttctcattttggctctgtgacgtcagctgaaataattcgtgactataagactggtgatagcttatgctttgcttttattgaatttgagaaaaaggaggcatgtgagcgcgcattcttcatgatggacaattgtttgattgatgatcgaagaatacgtgttgacttcagccaaagtgtttcaaaacagtggcgtcagttcagacaaagcaaaagtaatgcaaataaagatgggtgcttcaagtgtggcgcacttgatctcatagccagagactgtgaccagagggctgagcagaaaaacaaagggccaaattatatcctgaaagacgaaaacactcagcgcagtgggaacaagcgtcgaagctacgatcttgtctttgaagatggtgaaaactataatggtcagcaagatctccgaagcgctgaccgaagaaagatccataagatagatgatcgaagatcagggttgccacctcggggtgaccgtgataggattagccgggagagaacgcacattgatgagaatgataaagaagcaagcacgagagcagaaagcaaatatagggatggcgatgacgattacagacgacaatcaggaggcagtcgatatggcagggataagtgcgatggtgaacgacgctacagaggagatgatgaccatggaaggagcaaccgccacacgagatga

SEQ ID NO: 66782 - DNA, 245 bp, Oryza sativa
  unsure (1)..(245): unsure at all n locations
  Clone ID: PAT_MRT4530_67700C.1
ncgaagggtctgggtttccgcaccttgccgccgcgcagggggccgcaggaaacgttaccacgccaaacattgccgccgccgggctcccttctccctcactcccgtcagccggttggggcgcccaccacaccaaagagcgaaagcgtggtcctggcaacgacagccaaatccggcgccgatcggtttgaatccggccccttggccaaatctgggttgggacacacgggtccgcagcagtgtgacgc

SEQ ID NO: 66783 - DNA, 4377 bp, Oryza sativa
  Clone ID: PAT_MRT4530_67701C.1
atggtctgctcgccggagaaggcgggggcggcgtgcccggagtgcctggagcgtcgaatcctttcgggcctcccgggctcctgcttctccttcgtgcacggcctccacgagtcccctctccccttcgcctccgccgccgtcgtccagattgcatctgatggggctgaggaatgtaatgggagccagcagagcactggttattttgtattggtgggactacagggtggcaaggaacttttggatattcaagaatgtgagagtaattccttggagaatggaagtcagatagatctgcagggcaaggaaagcacagatgctgatgacaaccacaggaagcaatcaatcataaacacaattactaagttaactcctactcgatatcttgctagagcagccacttctgaaattagagagcttatctcaagttacttgaatttgacaacagaagagagtgtgatgaattctttaaatcttttgtctgaaaataaaattgttggctcaggaggcttagattttctcaattttactggattttcagagttcaatgatatacatccttctggccatgtcagacatcccaacatcttacctgttttaggcattgtagaaacatatgattgttgctacatgttgcatccaaagtctccatataccttggaaaatatcatgcactacagtccagaggcattgtggtcagattggcatattagatttctcatctaccagataatatctgctttggtgtatcttcatgattctggagttcatcatggtaatctaaaaccttcagccatctttatgtcagattctttatggccttacctgagcataagtgatatatgtcctgtaaaacagaattgtggttttgctgagtcaaagcgtccagctcttaccctatgttgttttgaggaggattgttcttcgagggccatttattctggtttcaatctgtcatcatccttagattggcagtcttactctaagcgatggtggatgggtgaattgagcaactacgaatatattcttgtcttaaataagttagctggtagaagatggggtgatccagcttttcacacagtaatgccttgggtaatagatttcacagtgaggcctgatgaaaattctgatattggttggagggacctcaccaaaagtaaatggcggctggcaaaaggtgatgaacaacttgattttacttattcatcatctgaggttccacatcatgtttctgatgagtgtctctcagagctagcagtttgcagttataaagcaaggaggctaccaaagaacatcttgaggtctgctgtgcgttctgtttatgagcccaacgaatacccatctaacatgcaaaggctataccaatggactcctgatgagtgcattccagaattctatagcgatcctcggatatttgtctctcttcattctgaaatgagcaatttggctttaccttcctgggtgacttctgcagaggaatttatttgtctgcacaggaatgctttagagagtgatcgagtctcgcgacaactgcatcattggattgacataacctttgggtataaactttctggggagtcatctgttgaagccaagaatgggggatcaagtagcatgactactggtctactattaaaggaccacattcctccagctatgtcatcacaaattgattatctggaagagtttgagcaagcaaacgtgtttatgaagcttgaaaatcatttgtgtccaatatatgattatgctaatgattcttcttcttgttgctcttcagtcaaatataataagagcccttgttcaaatcagtatattgtgcctccagagagtgtgctatcagtggcgcctgattttgatttttgttcttttcttgaatgctttgaatccgatgatagttctccaacgggttatcaagagctgttgcgttggaagcaaaagtcttgttcagttaatgagtatcatgcaaatgatatattttctgttgggtgtatcttggcagaaatctatctgcacggaccactttttgatgctgatctcctatctgcatataaagaaactggcatactgccaggagcaattcaagaattgcctatccatgttgctgttattgttgagtcatgcatacagagggaatggaaaaggaggccactggcaaagcaccttttggaatcacaatactttcctccatccgttcgatctgcatacatgtttcttgctccacttcaacttatatgtacacctagggatcgccttaagtatgttgctaagcttgcaagtgaaggaacacttagagctatgggggaatgtgctgccgaaatgtgtgcaccctactgcctacctcttgtttcaccatctttgtcatatattgacactgaatttgccttggctctgcttaaagaatttgtgaagtgcttaagtgtccaagcaacaaaggatcttatacttcacatcattcagaagatcttacaggccggtggacttcttggagagagttttactgtcaagcaaattcttcccttgcttaggaatgttatactctcatgcattgaatcctcaaagatcaataagcctgagccacaacacagttggaattcttttgccctcatggatggcttatctgcattggaaggccttgtatcaattctacctgtcaaaacaattcttagagagcttcttcaggtggctgctagtgcatttgttgatctttgtcaacaaattggaccagaaaatacggctacatatgtgcttccacatctaaaagagctttttgctgaactagcattctctcatgagtcttctggtcttagcgttcctacaaaagggttaaagttcttcgatggaaacaaaacagagccagctaaaatggaatctaggattgatctcgtgtttctcttgtatcctttcttagcagcacttgttggaatagagaagctccgtgaatgttactctacatggtttctattagagcaagctcttcaaagattgtatggctggaagtggcagccttccactgaccattctggcagtagtgaaaacatgaaaggtcaaaggtttcggtctgggaactatacctcatctgagcctgctcctacaaagcttgttgcagagattggtaaaaatggtcggaatatgacagtctccaatcaaggatctaggcttgagcatgggtcatctagtgacaatttgtgtgcctcaacttctggaaatcaaccatggttttggttcccaagtcctgatcgtaattgttgggcaccagattttcttggacgtagtgctggtatgaaggatgaacttccatggaagatcaaagcttcagtcctttactcagctcgggcccaccctggggctttgcggtcattagctgttcatgatgatgagtgtacaatttttactggtggagttggtcctggttttaaaggaagtatccagaagtgggagttaccaaatatgaactgcagttctggatattatgggcatgaagaggttgtcaattctatctgcatcctgtcaattacgggaaaagtggcatcttgtgatggcactattcatatatggaatgcacagacaggaaaactcatagcagttcatacggagtcatctattagctttcctcagcaaactgcatctattgagcaggcaaacatgcttaatcaggatgccctctcaggtggaatattgtcaaatgcatttcgtggtagtttatatacaactatgcattacatggaatccaaagataaacttgttgctggtatgggaaatggttcaatcagatttattgatatttctcaagatcagaagctgcatttatggaagagtgactcagatgaaatctctttctcatcgcttgtatcagctatttgctcatgtgcctcagacaagctgaagaaagacagcactgtagcttcatcttcctggatagcagcaggtttaagttctggttattgtcgattgcttgatgaacgtagtggaaatattgttgcagtttggcgagcacatgatggtcacattacaaaactagcagcaccagaggatcacttgattgtatcaagctcccttgacaagactcttcgagtttgggacctaagagggaatctatcaacccagtcaaacatttacagaagtcactcagatgggatcattaacttttctgcgtggggtcaggatatggtatcagtttcaagaaacaaaattgcattaacttccctttcgaggccaacaagtgagattggacatcagcagctcacatttcagtacctctattcgtctgatcgaggagtgaaatacaaaaacatgtctgttctttcgactatttctgtgcttcctttgtcaagattgtttgttgttggaacagaagatggttttctcaaaatctgccactag

SEQ ID NO: 66784 - DNA, 1065 bp, Oryza sativa
  Clone ID: PAT_MRT4530_67702C.1
cgggctgccgccattcgcgcctccgccgcctcctctccgccggccgacgccgccgccgccgccatggactccggcggcgcctccgacccctcgcgccaggtgcgggtgcgcttcctgacgaagctccccgcgccgctgcgcgcgccgcccacctccatcgccgtccccgccgacctcacccgcatgggcctctctgagatcgtcaacagcctcctcctcgccgcctccccggatcaccaggcgcagcccttcgacttcctcgtcgacggcgagctcgtgcggctcccgctccaggagttcctcctcgccaagggcatctcagtggagagggtgcttgagcttgaatatgtaaaagctgtggcaccgaggaagcaggaggatccatgcccgcatgatgactgggttagcgcagttgatggatcgaacccgagtttcgtattaacaggttgctatgatggtcttgcaagaatatggagagatgcatctgaatgtacacatattttggaaggacatagtgacggaatcacttctgctcgcttcattaataaaggtgaaactgaagacaggctgcatgtagtcactgcatcaaaggataggtcattgcgcttattcaagatatgttctggttcctgggataactcaattaagctatggtcagtcgaagggtcggaagaagatggtgacactgtctcagtgaagaagagaaggacaaattctgattcatctggacctgaagaatctctgtttgagggttctgccacttcaacatttctgggacatacgcagtgcgtttctgctgttacctggcctgagcgacaaacaatatattcagcatcttgggaccattctgttcggcagtgggatgtccaaacagggaaagagacatggaatatggtatctgggaaggccttgaattgcttggattgtggtggtgagagctcttcactaatcgctgctggtggctctgaccctgtcttgaggtggccactggcttctgtggagtcacacaaagacaagatagttgaagcttttatagtgaaggttactgctaggttgtcgtactag

SEQ ID NO: 66785 - DNA, 451 bp, Oryza sativa
  Clone ID: PAT_MRT4530_67703C.1
ggggaatcccccctaaaacccctttaatttccttaaagccctttaaaaccgaacagggaagggggggggggtaatccttttggggcggaacaaatggggctaaactgggtggaacaactttaaatggggctttaaactccgcataaggaaaagggcttgcttggggcccaggtttagaactagtcctagaaaagggggtttttgtaagaactatgaagtcgtttcagcttagcatttccagcccagagatcgacagaagcaaaaccaaacgacacatggtctatgccttaacttcctccaaaaaaaaggagggggcttttttttctgagagctcgaggaagaggctgttggtaagagccatctgtttgctgttgttgatttgggagctcccaaccaaattgctgcatcgtgggaaatgcccagacgtgcactataaaatccataaagccct

SEQ ID NO: 66786 - DNA, 1076 bp, Oryza sativa
  Clone ID: PAT_MRT4530_67704C.1
aagctttagagcgcgcgtagcaaaacaaatacttgcaagttctctttttatttcgcttgctccaccacggaaccgccccctctacaaccggctgccccgccgtgctagaagcaatagacaatccttttttttttttttttttttttgaatgaaaaaggcatattaaatagcaaacagtcgatcttatcaaaggatgatataggccttgaagtttcgtaacactacctaccgctctcaagatagcataaccaaggaggagggttcatcctatcaatgcgccctcaacattaaaatttaacccacaagttccatccccaccacaacgtttcgtgattccactagttcgtcagctccatgatggcagtgacaatgtcaccgttagcagccttcagcgccttcaccgccctcgatctcgacacggtggcctgtgtcatcaccagttcaatgtccttcggctcgacgccagactcatcgacctcctcgtcatcctgagctgctgcagaaggctcggcctttgagatgacgttactcaggtcaggtgccttgaactgctctgcagcttgagtctgcagctgcgagctcagatcctcgatcttcgcctcaccgaagatgacgtaggtgtctgagtttgggctcttgaagacatctggtttagagatgacgaacagaatgttcttgctctttttgatagtgacacggctcacaccagtgatggtcttcatgccaagtttctgcatggctttcctgctctttttctcgctcctactctgcttagaccttccactagcatcacctcctgctccttctacatcatcatctttgtcatcctcgtcatcatcatcatcctcgtcatcatcgtcatcctcaaggataggctcatctccctcgatcttttgctcctcgaggtgcttgcggagcagctcctcctgcgtctcggcggccgtcatggtggcggagagcgagcggaaaaaccctagagttcgaggaggaggggaaagtaaaccctagggatcagagagcaacagcgacggcggagcgcccggccggcctcgagggtcccaatcgcccataggagt

SEQ ID NO: 66787 - DNA, 922 bp, Oryza sativa
  Clone ID: PAT_MRT4530_67705C.1
cacattcaacagtttttcgataatagaagccatggagcatgcaggcatgtgtagcgagaccagtgaatgaaaaaggcatattaaatagcaaacagtcgatcttatcaaaggatgatataggccttgaagtttcgtaacactacctaccgctctcaagatagcataaccaaggaggagggttcatcctatcaatgcgccctcaacattaaaatttaacccacaagttccatccccaccacaacgtttcgtgattccactagttcgtcagctccatgatggcagtgacaatgtcaccgttagcagccttcagcgccttcaccgccctcgatctcgacacggtggcctgtgtcatcaccagttcaatgtccttcggctcgacgccagactcatcgacctcctcgtcatcctgagctgctgcagaaggctcggcctttgagatgacgttactcaggtcaggtgccttgaactgctctgcagcttgagtctgcagctgcgagctcagatcctcgatcttcgcctcaccgaagatgacgtaggtgtctgagtttgggctcttgaagacatctggtttagagatgacgaacagaatctggtagtgcagggaaaagttaagcaaaatgcaatggtatataacaattctgtgagcgttcttgctctttttgatagtgacacggctcacaccagtgatggtcttcatgccaagtttctgcatggctttcctgctctttttctcgctcctactctgcttagaccttccactagcatcacctcctgctccttctacatcatcatctttgtcatcctcgtcatcatcatcatcctcgtcatcatcgtcatcctcaaggataggctcatctccctcgatcttttgctcctcgaggtgcttgcggagcagctcctcctgcgtctcggcggccgtcat

SEQ ID NO: 66788 - DNA, 602 bp, Oryza sativa
  Clone ID: PAT_MRT4530_67706C.1
cccacctagtgccgcccaggggtccggtcgagatcgtcgcttcggcgtaacaacaaataaggggagatccccaagtcctaacccgaatccatttccaataatccatttcgccacgatttgttcttggttgtctgagagagagagagagagagatccgtatacattgctgctacttgaggtcaagcccgttcgttcgcgcgcgcgcgcctgtctgtctctgtttgattgattcttctacgtcgtcgacgtacgcctgttcatgatgtcgctcaacctggctcaccagaccggagcggcggccgccgtggcaccggcggcgccacgtacggccgtggtcgcggcggctgcgggtacagtgtctgctccggcggtcgcgccggcggcggcgccgagcctgcagctgcagacgcagactgtggacccggcggcgccggcgcaggggccggacctccccatggccttccaggcgctggtcgagagcctgccggaggagcagcacccggacgtgggcggcgaggagcggcgcaaggtgggcgtgccggtgtacgtgatgatgccgctggacacggtgcgcaaggacggcaacgggctgaaccggcgga

SEQ ID NO: 66789 - DNA, 273 bp, Oryza sativa
  Clone ID: PAT_MRT4530_67707C.1
atggagaagagaaattccaatgaccgcttcttcatcgtcaatctccagccgccgctggccttcgtgaggcattttgccgcttcacccacagttgtccagcaggaactcaatggctgggtgctagcagccaggaggatggaggatctggcatgggcacagatcacttttcagtttgtcccatacattaagaacttggaaattaagacaactgtaacaccacgatgtgcatcagaaaccttttgggacagcaatagaatgcaaacccatcattga

SEQ ID NO: 66790 - DNA, 233 bp, Oryza sativa
  unsure (1)..(233): unsure at all n locations
  Clone ID: PAT_MRT4530_67708C.1
atttgttttggtccccttaattggcgtttgtttttgtttcncccccccntgggggttgaaaatgggaanaaaggngaaattttgtttngaaanccccatcccattttanggcgaaaaatgttttttgcattatacttgttntagnttccantggttnaagaaatgggcnaattactgacattgaatcaaagttaaccgttgggtgcttacgaantaataaccacccncnnact

SEQ ID NO: 66791 - DNA, 243 bp, Oryza sativa
  Clone ID: PAT_MRT4530_67709C.1
atggcgcagcagctgatcgtggcggccgatagattctgcctcgacaggttggagacgatgaggttgaggcttctctgcgaggagttgttgaccactggtaaagaagaactgatgatgatgcagaagcagtggcaaactggcaatggacaaaggaaagcagcccagctttgcttgccggctaatgctgtccgtgtccggctcacttcacttcagtgtgcagcggcagaattgcctaccaaatag

SEQ ID NO: 66792 - DNA, 1591 bp, Oryza sativa
  Clone ID: PAT_MRT4530_6770C.1
ggagagagagagagaagggggcgaggcgaggaggaggaggaggaggaggaggagaggagagctcggcgccgattcggccgtgggggggcgcgcggaggggagccgccgcctcgggtggccgaggccttggaagccgcaggtaggtagaacccccttgccgtcgccggccatggcagcggcgggggccggggcgggggcgccggatcgggcggcgctgacggtgggcccggggatggacatgccgatcatgcacgacagcgaccggtacgagctcgtgcgcgacatcggctccggcaacttcggcgtcgcccgcctcatgcgcgaccgccgcaccatggagctcgtcgccgtcaagtacatcgagcgcggcgagaagatagatgataatgtccagcgtgagattataaatcaccgatcgttgaaacatcctaacattattaggtttaaggaggttattttaaccccaactcatcttgctattgtcatggaatatgcctctggtggtgagcttttcgagagaatttgtaagaatgtacggttcagtgaagatgaggctcgctacttcttccagcagcttatctcgggagtcagctactgccattcaatgcaagtatgccaccgtgatttgaagttggagaatacactgctggatggaagccctgctccacgcttgaaaatatgtgactttggctattctaagtcttcagttctccattcacaaccaaaatccactgtaggaacccctgcttatattgcacctgaagttctgttgaagaaagaatacgatggcaagactgctgatgtatggtcctgtggtgtgactctatatgttatggtagttggtgcatatcctttcgaggatccagaagagcctaagaacttccgtaaaacaattcagcgtatcttgaatgttcagtactcaattccagaaaacgtggacatatctccagaatgtaggcatctaatttcgaggatttttgtcggggatccgtctttgaggataacaatcccagaaatacggagccatggctggttcttgaagaaccttcctgcagatttgatggacgatgatagtatgagcagccagtatgaggaacctgatcagccaatgcaaaccatggatcagatcatgcaaattttaactgaggccaccataccacctgcttgctctcgaataaaccacatcctaactgatggactcgacctagacgatgacatggatgacctcgattccgactcagatattgatgttgatagcagcggcgagatcgtctatgcgatgtaagtcatcgaccaacaagagaactgaaggggcagggtgccctgatgtgtaccttgtcaaagtactagcagccctttgtgaaaagaatcgttctgtattttgcttagtttcttgccgtggaaccccagcgatgttcccatgaactcatgatgctgttgtaattgaactggggttacttccctggaataacagctttcctcctccccccattgctgaggcctggttacctttaagcttcaaaaaaaaaaaaaaaaatgtgcaagttatttaatgtcagaaatttagagtcaaaaaaaaaaaaaaaaaaaa

SEQ ID NO: 66793 - DNA, 281 bp, Oryza sativa
  unsure (1)..(281): unsure at all n locations
  Clone ID: PAT_MRT4530_67710C.1
cccacacattatcatacccacattaactaatacccggggcacttttaacaaaaaggcatccccccaccccatcactctcanctttccacaaaaaacatccataaccacttacctacaatacatcatatattacttctataaaaattaatattcttattttcccaccccctacaattacaaaaccaatatctaattctttaattctctaccacttccaaacatctctctattttctctctatctatcaattaccactcccactattaattcccctaatatca

SEQ ID NO: 66794 - DNA, 535 bp, Oryza sativa
  Clone ID: PAT_MRT4530_67711C.1
tgacagcaaacaggtggcttagcccatataatgagttcgtaagcacaccgtatggcatatcggcaagccccttctgtgcaatcagctgcgtttcaactgagagaacaaccacagttctggcaacattctcgcgctggtggcgcaaccaatctcactatcaggacagttgaacacttgtgtcaggccatagcgcagcagctgacaactccagcagtttggtgatctctactgttgatgcggaatgctggctcaagctgcaagctgctattggctgtgttgaacagtggccatgctgagatgatgggtgatgctgaccctgaggtgactgatgggtgcaccccagtgacccattgaccaccctgtggcgggtggtgcattgtgaatgagtgtgtgtgaaccagtgatgagtgggtcggaagttgagaaaatgaagctcagatgatcaatcaatagatggtggacaatggtggaaactttgggtgatataaatagaaataaagttgtctttcatatttaaaaaaaaaaaaaaaaaaaa

SEQ ID NO: 66795 - DNA, 168 bp, Oryza sativa
  Clone ID: PAT_MRT4530_67712C.1
atgcccacccttgcctgggagcgtcggctagaggaaagctacactacaagcccagccgttgcccacgttggcttgtgggacctcggctacaacttcgaagtacaccggagcgtcgggagagccggattctacacgacatacaaggcaaacaatgcagacaggctataa

SEQ ID NO: 66796 - DNA, 274 bp, Oryza sativa
  Clone ID: PAT_MRT4530_67713C.1
gttcgcggtcggttggatgagttgtttggctggttttctttcgtctgtatcattgtatggctcaaaaacgtgacatgaaaaaggctcctgatggtccatctctcaagttgaaatctgaaaagttccggtgccgtgaaactgtaatcgtgcaatccgctatctatcacttgtttcattgatgattcaccctggctgtaatttcaattctaataaattgattatggtgcgcttatgtaaatgtccttgtctttaaaaagaaatgtaaatgtccttc

SEQ ID NO: 66797 - DNA, 761 bp, Oryza sativa
  Clone ID: PAT_MRT4530_67714C.1
gcacgaggctgatagcaatccatcaaattgtcagcataaagattctagaagaaagaaaaaaaatgcggttttagtattttattcagccaccatttgcatggagatgtgataaagcgtcaaaagaagatcttggcgcgcttgggagtgtccgaagcactttccattccggatgcaacacactttgtggcagatagttttttccgcacaaagaaagggctggaagcaatagctcttggcaaactagtagttacgtcgatgtggcttgaaaattgtggtcaagcaggctgtttcattgatgaaaagaagtatattctgagggatgccaaaaaggaaagggagataggtttcagcatgcctacatcacttggccgcagcttgcaagcatcctctgctgctgggaagaacgagtgtatgtaacattgaacgtgaagccaagtcgagaggtggtgattggctctggtgttagcatcttctgggcagccattagaaaggatcggaaggtccataacgaaggaagtaccagatgacctactggttatctcatgtgaggaggactacgaaatttgttctccgcttttaaagagaggtcaggatgagatataatctctcatcccagtgtgcatattgttttcaccaaagaattctgggcagccagctaatgatcatgaatcaacaggtgccagtgtttttgaatcagagcttctactaaacggcatagttattcagaagctggagtatgagaggcatcgtcttttctcgga

SEQ ID NO: 66798 - DNA, 402 bp, Oryza sativa
  Clone ID: PAT_MRT4530_67715C.1
gaactcagtgcaagttaccatgttgcatggccagattttccgcccacccggtaaaattttttctacccgggcactgggccacccggccgtggggccccttgcaaaaaaaaaacaaacctggttttacttgtttaaaacaaatttgccattttttttgagggggcgcggatttccccccccctattttttttttgaaccagaagggccccccaaaaaaaaaccgggaatccccaatattgaccttgggcccaaaaaaccgggggggggccctcccaaacgggggggttttttctatcccggttttaggaagccaaagaggacccccgtttttttatgttttaaaccaaatccgggaattttttggggcccgaggccccccccttgagcggaaagggttttttt

SEQ ID NO: 66799 - DNA, 672 bp, Oryza sativa
  Clone ID: PAT_MRT4530_67716C.1
tttgttttgaacccaataggaaattctatcagattagcagtagcaccatgaattccatttgatagacagtgttgcatcaactgctacaagaagacatccagatacatcctatacggatctatcataaatatctgtgaacaatcaagcattacaattcaaagaacgcagccgactcaatgagtggcacaccatgagatcagtatgatttctatcttcaaaacattgtgccacctagctctgcctctggatatgcagcgagagtttcttaactttgcagctcatctttcttagctcattgtttccgtttgcttgctatctttgtggcttctcttccgcttcctaactctctttcgctttgcctccccatcagctttgggcccctgattttgagcagctgacaattggggctttggtttctttttcttacaggagagtgggtttggtccctttggtcttttcttcttaaatttgcttttgtcggccaccccaagtgcattttctacaagagaactgataggccttctgttcttttcatcatcacttgcgttttcactggcagccgcctttccatccgatggaaccttcagtagcttctcatattctgatttacccatatgcagacgcttctcctcgtccaactgagcaaatttacgttgctgcacagagggttgt

SEQ ID NO: 66800 - DNA, 1293 bp, Oryza sativa
  Clone ID: PAT_MRT4530_67717C.1
gcggggtgccgcgtcgggggcgaccgccgccgttggcggggccgtggcgaggccgccggcgctccggccgttcgacgccaactcccgctccatctcggcccgcctcggcgccgccggcggctgcgtccccgccgctgccgctcggggcccaaaaccaaccaaatccaagaagctgcttctatggcgacggcggcggatggcgtggcggtagcgaggcaagcggagctccggcggatcgagggcaactcctgcttcaacaaggcccgcctcggcgccgccatcgactgctacaccgaggctatcgctctttgccccgacgtcgccgtctactggctcaaccggggcctctgccatttcaagcgcaaggaatgggctaaggtcgaagaggatagcaggagagctcttgcccttgatgacactctggtcaagggtcactatttgctgggatgtgccatgcttgagaaggaacaatgtgctcttgctatcaaggaattcaacaaggctttggatcttcttaagtcttcgaatttgggggacaaaatggcggaggacatttggcaggttcttgcgaaggcaaaataccaagattgggaaatacactccactaagagagtttggaagatgcaaagtttaaaggaagcatgtgaaaatgctttgcaggagcaccactttcttagtggcacacttgtgggagatggctcaaccaatgagtatacagaccaactgaaattgttatcagaagtcttcaccaaagctacaatcgacgatacaccaacagatgtgcctgactacctttgctgccaaataacctttgagatttttagagatccagtgatcacacccagtggtataacgtatgagaggtccataatccttgaacatctttgcaaggtgggcaatttcgacccggtgacacgagagcctctgaaagagcatcaattggttcctaacctggctataaaggaagcagtccaagcctacctcaagaatcacagttgggcctacaagttgaactgatgatgttgctctgtagttgcttagtgctaacaacaggtgttgataaaatgttgggttgtcaagggggaattctttgcttttctgatgtaatgtataagcaagttcattcgtgccctcatggaattgattgattcttgggcaacttctgacgaaccttggacaattgtacataaaacatcatagcagaaccttggacggtttcagacataccgtgccaaaatgacaattctcagtgacaaattattcttttgttcggtaaaaaaaaaaaaaaaaaaa

SEQ ID NO: 66801 - DNA, 1581 bp, Oryza sativa
  Clone ID: PAT_MRT4530_67718C.1
gaacccaataggaaattctatcagattagcagtagcaccatgaattccatttgatagacagtgttgcatcaactgctacaagaagacatccagatacatcctatacggatctatcataaatatctgtgaacaatcaagcattacaattcaaagaacgcagccgactcaatgagtggcacaccatgagatcagtatgatttctatcttcaaaacattgtgccacctagctctgcctctggatatgcagcgagagtttcttaactttgcagctcatctttcttagctcattgtttccgtttgcttgctatctttgtggcttctcttccgcttcctaactctctttcgctttgcctccccatcagctttgggcccctgtaggacacatgttctcatcagtcctcgtgttgcatcgacagcaaacagctcttctagacatgcttttccaacaacataatagatactaataatgggcatgttaatctgattttgagcagctgacaattggggctttggtttctttttcttacaggagagtgggtttggtccctttggtcttttcttcttaaatttgcttttgtcggccaccccaagtgcattttctacaagagaactgataggccttctgttcttttcatcatcacttgcgttttcactggcagccgcctttccatccgatggaaccttcagtagcttctgatattctgatttacccatatgcagacgcttctcctcgtccaactgagcaaatttacgttgctgcacagagggttgttcaatgaacaaggagctcttcagaccatatatcacaggaacaccaggaacctcccgtagctttgcacggagatcagaatcctgggtggcaacaaagaagtgttcgggattcttttcacctatcagtgacagaacacaatccactgcactgactactttgtcatgctcacacttggccgtggcgagcagggcggcggcgtcgaaggcgtcggcgtgggacttgccgaggcgcctgagctcggcgaggacgcacttggaggtgaagaggggagggggcctggaggcggagaggagggactggagggcgtcgtcggcggggaggaggctgtgactgaggaggtggtggacgaaggtgccgtcgacgagcaccctgtagggctcgcggaagccgaagcaggtggcgtagaacctgaccaccttgcggttcttggaccgcctcttcaccctcatccttctcgcgtctccctcgcgggcggcggcggcggcggcggcgaagggcggcgctagtggcacgaggcagggaaggaggggagggggctcggtcgcctcgccggcgcgggaggggcggacaacgacgtcgcggttcaagataaaggtggcaggcgcagcgcgacgtcggcgtggaggtcgaagagtcgaacggcgccggcggtctgtgacggtggaggttgtgcttgaaggagttagggttgatggatttgggctttgatgggccctaacgacaacgtcaacaaggcagacaagatggtaggcgaggctcagggtggcaaggtgaagcgagaggacgggtgtgcttggcgccagccccat

SEQ ID NO: 66802 - DNA, 492 bp, Oryza sativa
  Clone ID: PAT_MRT4530_67719C.1
aaaaaaaaaaaagaaactcccccccccaattttttttttttttttttctttttcacaaaaataaaaaaaccggccccaaacttgattccggttgcttggtctttcaaaatttggttttttttttaacaaagggcctttttttttatttatcccctaggaaaatttttatctaatccatgcccccccctttctttagggcggcaatagaacccgcccgggtctttatttttcccccgcccttttccctttagcccccccccttcccgggatttggtggggggttcccccccggggcccggggctggaaaattttcccggaaaaccgggccccctccggaaccgggggttatcccggatttttcgaaccgggtcccggagaggggcccaactttcccttatgggaggcctttttaaacttgggggttctatgggctttaggggttcccgagaaaaatagatttcccgtcaaaattcccaacaattttcaggccg

SEQ ID NO: 66803 - DNA, 6341 bp, Oryza sativa
  Clone ID: PAT_MRT4530_6771C.1
tacgtagaatttacgtagttggtcaatgttccaagaatttgccaactcgcggccgtcgccatctgctatcttgaatgcgcctggccgcaagacttgcgtgatcatgtaaggtccttcccatttgggtgagagcttgtttcgccctgcttggctttgaacccgtcgaaagtatgcgtgctcggatgcgcttctcgtgataacggtggagggcctgttggtaaccggctgctcggacggcaactcgttcgcgatgttcctcgagtagattcacatcgtcgtttcgctgttcctcctgatcctcgtcggagtacttctgtactcatgtactttgatgtcgtagctcactggggagcatggcctcagagccgtacatgaggaagaagggtgtttccttgttagacgttgtcggtgtggtgcgtacggcccatagtagggtcttgatcccttgtagcactatgccatttgccctctcgacttgcccgttgctttgaggatgagagactgaagcgaagcatatcttgactcccagcctgatgtaataatcttggaaatcggcgctgatgaactgggagccgttgtcagtgatgatgcgatgtggtagtccgtatctgcaaaatatccctttgataaatttgatggcgttgtcggccttgatttctcccgtgggcatcgcctcgatccattttgtgaatttgtctatcgccacgaataggaacctatagccgccctgtcctcatgggaaaggcccgagtatatctagcccctagcaccagaacggccaagtgagagggatagtctggagcgcttgcgcgggtagctttgtgtgcttacatgtcgcatgcatctttgagggaggttggccaaaagaatccttgtcgaaaagctttcccgaccaacgtccgaccgacggcgtgtgacccacagatgccttcgtgtatatcgtggaggaggtgtctgccgtcgtcggacggaactcatttgagaagtaccccgtttggcgctttcttgtatagatcattgccgatcgtgccatagatttttgctttacgggttattttcttggcctctgcatcgtcctcgagcaactcgtcgctgttgatgaatttgatcagtggggtgcgccagtcgtctgtggttttgatatcggcaacggcgcgttctgcctctgtggcctccgagctgatgtcgggggtgtctgggttaacttcgccgctgacctcttttaccgatggctttgccaggatgtccagaaaagtgccgggttcgagtggttctcgtctggacgtgcgtcgtgctagctcgtctggctcgacgttttctttgcggtatacgtgtcggaccttgatcccatcgaaccttttctcctgcttcctaacttctgcgagatacttggataactcggggttggagcatttataatctttgtgtacctggttcgcgactagttcggagtcccctttcacgatcagtcgtttgaccccaaatgcggttgcggctcttatcctggcgagtagtccttcttactcggccgtgttgttggttgccctgaagttgaggtggattgcgtgcttgaattgatctccagaaggagatgtcaagatgaatcctgcccctgctccttggctgttgagtgcaccatcgaacgccattgtccacgtttcgttgtcgatttggttgtctgatttgttgtcgggcatagtccaatcagctacgaagtcggcgagtatctgggacttgatggttgttcgtggcacaaagtggacatcaaactagcttagctcgactacccatttcgcaatgcggccgacaacgtctttgtttctcacgacttcaccgagagggaaggaggagacaactgtgactctgtgggcttgaaagtagtggtgtagctttcttgatgtcatgattactgcatagagcagcttttgaatctgcggatatcttgtctttgcgtcatggagagcttcgctgacgtagtagactggtcgttgtattttctctctctcgacaacaatgacggtgctaacggaatatggcgtggtgacaatataaagaaataattcttcattaggttggggagcaacaagtacaggggggtttgttaggtagcgcttgagtgcaacgaatgcctcttcggcttcctgtgtccatacaaatttgtctttcttcttcagcagagcgaagaagggttgtcctcgttctcccatcctagcgacgaacctgcttagtgctgccatgcatccggttagcttttgtacttctttgagtcttgtggcgacttcatgttctcgattgctttgatcttctcgggatttgcttctattcctctgccagagacgaggaaaccgagcagtttgcccgacggtactccgaacgtgcacttctctggattaagcatgaggcgatatcgtcgtaggttgtcgaatgtctcccgcagatcgtcaatcaatgagtcgcttgtcttggtcttgacaacaatgtcgtcgacgtatgcctcgacattgttgccgagctggtcactaagtgcgccctggaccgtgcgctggaaagtattccctgctgttatcagtccgaaaggcatcttaacgtagcaaaataccccgaacggcgtgatgaatgctgtcttctcttcgttctctttcaccatgctaatttggtgatagccggagtaagcgtcgagaaagctcaacagttcacagccggctgtcgagtccaccagttgatctattcgaggaagagggaagtgatccttgggacacgccttgttgaggtcgatgaaatcgacgcacatcctccatttcccgttggccttccgcaccatgactggattggctagccactctggatgaagaacttctctgataaagccagctttgagaagtttgtcgagctcttctcgtatggcttgttttcggtctggtgcaaatctccgcagtttttgctttactggcttggcatcgggtcgcaccatgagtttgtgctcaatcacctccctggggacccccggcatgtcggacagctgccaagcgaacacgtcagcattgtcgcggaggaaggtgatgagcgcgatttcggtcttgtcggggttggcactggagagtggaacgatcttgatggcgccgtctggtttcggcgtcttatttgtcttgctcactttcttgggaggctcagttgtggcgggtgggttgggcgtttgctcgaccatatcgaggctccgcttgtcgcattgtaccgccagctttgcgttcccttgaatggtgattattcccttcggtcccggcatcttgagcacttgatacgcgtagtgagatgcggccatgaacttcgcaagtgcagttctcccgatgatggcgttatacgctgtatcgaattcagcgacatcaaaggtgatctgctcctttcggaagttgtttgcttggccgaaagtcacaggcaacgtaattttgcccaatggtttggacgaggactggggagtaattccatggaagggttgattggtaggcgtcaactcgcttcgtgggacccccatcgcatccaaagtgctggcgaagagaaggttgattgagctgccaccgtcaatgagaacccgcgcgaccttgatgttccgaatagtgggctcgaccacgatcggatagcgtcgatgtggagcctccgaagatgtgtgaaacgtggaggtcagagtctggatatgctgagtccaattcctgagcagctgcctccgcgtccttctcgaccacgcgtactcgcttgcctttttccaatgccatgtgcttctcgagcgactttttaaaaacgaggcaatcttctaaagaatgtctgtccgtcttgtgtatggggcaccatgctttccttgcgtcgctaccctgtgggtctgggcgcttggatgggttagcgtattctgctgcgagaacttccgcttgagccttccttttcgcactcttgcggtttttcttcttgcttaactcaggtgcgtccgtggctgttttcttctcgcccccggtcttcggcttatcgttcttgcgcctcagcgcatcgtccacgtgggcgcatcgctcaacaatctcgaataatctccgagtagttgtgatgcgtcttgtcgctaactcctgggtagtatagtgatctctgacgccagacttgaaggcgcaaattacagaagcgtcggtgatcttggggattgtatttctgcactcgttgaagcgccgaacatattccctcaaggattcacccgagttctgtgtcaacgcatgtaggtcgtcttcgatcgcatggcgcttgtaagttccttggaagttggcgacgaattgctgccacaggtctgcccatgaagaaatcgagtagggcggtagatgcatcagccatgaacgtgcagagccttttaacgcagtcggcaaataatttgccaatgcgttgtcatctgctccggcagcgtaaagtactatggagtagacttgaagaaattcttctgggttagtactcccatcgtacttctctattgttccgggtcggaatctctcaggccatcggacatcacgcagggaacgaccgaaagctctacacccagcgctgggggcagtgggttgtcggcgatcgtgtgtccttcgtggatgtctatctgacgatgaggatgaagaagaggatgacgatgacgaagaatcgcttggttctggtgtaggattacgaggacatcggccgggttctcgagaatcccatcgtcgccctccgtcgttgtcccggggccgatctctgtcgtcttcgccattatggcggcgtcctcgactggtattgcccggcgcccgccgctcacgattgtcgcgatcatcacggtctcggtcttcgttcgagcggcctcctcgttcttcattatcgtgatgccgtgaagggatgtgatgtcgagagcggctcccgttgccctgtgtgcgacgtgcttctcgtcggccgttcaggtgatcgcggaggtcgccagtgccgcggggtgaaggggttgctcggtagggtgactcccgctgttcggggttttcgccatcgacgccgccagttggtggctgttccgggtgtgcatcagcagcagccccttcgaacgtgtggctgaggttggttactgattctcgtagccgttcctgccaccacgcaagatcgtcgttcagaacgggatcgtaaggtgcctccctcagtattgtgttaagggtactgatgcgctgagccggtgtaactacttgattctccgcctcggcattagcgcgtgctgacgtgctggtcccatcgatagccaatacctcgcatggtgtactcgttgatgacgagccatagtccttgagtagatgtagaactgatggttcgtgggagtcgatgtcaatcgcaccaacgaatcgatctgaggtcagcgtcgttccctgtctcttgtcttcctctctaagggatacgcttgatggctggaccttaggagatgacatctttatggcgctgagaaaaaccttgcagcttgagaggtcgtgattctttgtcttgtgaataggacaatagacatcacgagttggagaaacgcgctgaattccacgctctctacaggcgcgaatttcggcgtgggcattgaggaagacccagcaggcttgcaaagtatgtttcctggttttgtggataggacaccaggaccttgtcgcttcggaagctgttctcgtcggctcgtggttcttgtcggaaagacaaggttcggccgcattagaatccttctcaagctcgggtgttgtcgatgttccattccctgcttcggcgggagggtccttcgacatggagtcgccttgggttgcagccactgcgttctcgtttccggtcattgatggaccggctgagatcggcatcgtggtgtacaccgggaagacgatttcgccgacttgagtccacaccaacgttgttgaagcaggaaacccgtggttgaggttggtgttgacgctgttgtcgacgaagctggatgacatagtagtaaaaccttgagctccaagcccccctacctggcgcgccactgtcgacgggtgatacccgtagaccggatatagagggtattggggtacgttggtacaaggatttcgtaggctgtgggggttgtgttggctatcagattccatcctttaggtcctcccaggggatcccttttatatcgcaaatcaagtggtctccaagtcgaactcggagacatcggaccctacacgatatattgacgacccagtccgtagagacaggacatagtcgagaacaccatgtgaagcccaacggtcatgagtgagtttaaactgaagtccgaaaaactgccgcgcgtaacgaacccagaaatttccggtggccat

SEQ ID NO: 66804 - DNA, 682 bp, Oryza sativa
  Clone ID: PAT_MRT4530_67720C.1
gcacgaggtagagatggaccggttccgaccgctcaggcggatccaggtggaccccgagcccgccgccgccgccccgcccccgccggcggcggccgcggcgaacggcggcgcgggggaggacgtgtcggcggcccccgcggcggggctcctcatggcgtcaagggtgcggcgccgctcggcggtgtaccgcgactgcaagggcgactacatcggcgtccccaacgacccgtgcctcaccaagatcctctccaagcaaggggacaacaaagttctgtttgcagataaggtattgaagttcactcaatcaggaaagatgaaaaggcgcatccttgtgatcacagattttgctctctaccttgttgatcctgatgctgatatattgaagaggaggatagcgctcgcggctgtcgataagctatgtataagcaagctcagtgataacttctttgcaatcatcgtgccaactgagtatgattgtttaatggccagcactagaaagaaggaaatagtggatattataattaaggctattaagagcaattctgaatatcagcctcaagtggcttcttctaacaggtttgaataccatgctgctgctgaagtgattaaagaagttgagtttgaggaagctgaaggaggcgttaaaactaggatcacgcacaaggcgaaggcgaagtcatga

SEQ ID NO: 66805 - DNA, 2331 bp, Oryza sativa
  Clone ID: PAT_MRT4530_67721C.1
atggccggggcgatgcctggatggatgggtaccatgatgttcatcagagactttcttttttcgatccggggagtggtagccctcagcttcattgctcatgtcgtcctcgtcttgttcgccggagttcgccgccgccaagcgaccggtggggcgacattcctcctgtgggtggcaaacgagggtgcccgttgggccccgaccgccgcgctgggcataataaccatcggcagcacggtccaggagagacagcaggcgacgctctgggcggcgttcatgctgctgcatgctgccaggccggacaacatcgccgcctacgccttggaagacagcgtcctctcgctgcgacagaaggtagatgtgattgctcagtttggacccgtgtcgcctgcctatatcctgtacctgaatatgttcgccatgcctggcgactccatgctctggatttcctcctttgtctgcctcatggctatcgccaagtatttcgagggggcatactacgcgctgcagcgcggaaacctggagaacatgagaagctcaagaaaggaggaggagaagaagaaggagaacatgagaagacgaagcagcagcagcagcctccaaaatactagccggggaggcaggaagccggatgatgagcagatcctgctcattgctcatgatatgctatatattaccaagaatgccttcatggattttttggacaaaaggagtgatgacgagcaagaggcactctctggtacctgggatgagacactgtacaaggttgtcagcatggagctctccctcatgtacgacatcctctacaccaagaaagtcatggtacaaacttggggtggctacgccatccgtttcgcctctccattcctcggagcaactgcattcctgctgttttggttccacagcaagcaaggccaggcgacggcagacgttgtaatcacctacgtcttgctaggtggcgccgtcatcttggatatcaaatggctcctccgagcagtggtgtccacatggacctattcttacctgaatgataggccacgatcgtggcttcatcatgcacttctgtgctcagggaaatggcgcatgctccgtcgattcatcctctctttgaatctatttcggttccttgccaataataagaaaccaactaggtacaggatgtggttaggaaccattgggcagtataacttgttgagggagtgcactcgggaggaggacgagaagaccagcaacttctggagctcttggtggaagaagaatgcaccggaagaagcatggatggagtacgaataccacaactcgagaggcattcatatttcaagagatttcaggaacaagctgtttgaccgtgtttggaaaaacatggagttagcgtttcctgaacggataccgcctgtgcagttatcggatccaaaatggatacatgtggaggatccgtttccttctgcgacggttgctgcggaggctgctgcgaaagctactattggtattgatcaggaactaaacgatgccctggatttcactcctgatttacaagagaccattcttgtcctgcacgtcgccacggacatcttcctctttcacacggaatccggtcaaaatcaagatcaatcggagtgggggaaggcgatcaaggcgttgtcggattacatgatgttcctcgtcgcggtgcgaccgaccatgctcccgggcctcgcactcagtagccggtacgatgctctccttgatgctttgggtgaacaatggaaggagataaaaaattcttcctccttcaacaactccatggcgagagagaagtgtcttgccaaaagtctgcttgataaggagatgaagaagaatggaaagacacccatgagaacattcaagtggcatcaagggaacaaaactgagatactgtcaccaggtgcctatctaagtgttctttacgactcgagttatattctatctgacggagctagactagccaatcttctgctaaattggaaacctggttctaagatcgaaattggagacaacaaagtactcgaagacaaacttaagcggcagtttccggatttgatgaaatccggtgaggcgactgagactgaattagagtatcaaatgcccaaggaagtgagggacatcatcttcagagagtgggtgcgtctcttgattaacgtgtccatcagatgtacgaggaattcccatgccaagcagcttgctcgtggtggtgagctcactaccgttgtgtggatcctcgctgaacacgctcgcattcttcgtgtgaaaaagacgacgaagaggaaaccagcagatagctacgatagactaggcattcatgtgtctcgctactga

SEQ ID NO: 66806 - DNA, 287 bp, Oryza sativa
  Clone ID: PAT_MRT4530_67722C.1
gggaagtagtatacaaatttacgttttgattgagacaaggaaaaaatcgagaaaatacataaaacgagccattcacacaccgaccatggcgtggggcctgtcaattccatccggctgacacgggggacacgcatgtcattcactatttaatggaggaagacttttgggtcctcacttgtgtcgagaaacagaaaccctgctctggacaagggatgccaggtggcacaccgcctgacatgcaaccagtgcacaggcgcactaccctggtcacatcggtcattcgacca

SEQ ID NO: 66807 - DNA, 2595 bp, Oryza sativa
  Clone ID: PAT_MRT4530_67723C.1
cccacgcgtccgacttgctctcctctcgctctcgctctccctcttcctcccacctccagatcgatgcgtcggcggtagatctcgctcgattcctccccctcctgctcgacggcgaggagagcccacatcatcatgcaaattttaaagccattgtatgtgtcaaaagcgtggaaagatggatactctcgacatggccaccgaggtaagagatatggatctggcagggaaatttgtacgccaaggtctactgctactggcgcattcgtccctgtaccttgtcctgtcactactcatgttgacaagtgtcgttcagtgcaattgaattgagacatgaaatgcttggcactcgcagattggatattgttgtctctgaagaaacacgttgaattgtgtatgattcgtgtaaaggtcaaaggttcgtagtttcgaacttgctgcgcaaattcaaagcgagtggtaatttctttttttcttctatattccggttatggtgctgagtttcctcagattagcggtttctactctgggattcgtcttcttcatacctgcgtgtaagatcatgtcttgaaaattaagggtttgaaccccatgttgacttttaatgcaaccaaactgacaaatgattctgtcagtaagcgattccgaacataaactaccaaagcctagtaaatttggtgaactagatgttcaggcagaagaaagtgctggttcaaaagcaataatggagatggtattccgctgttcagatcttgaaatcaaggaccttctctcaaaaagtgatccctttttactaatatctagaatatcagagagtggagtgcctgttccaatttgtaagacggaagagaaccctttaatcatagagtgcttcaacttcagtagcaacggcaaacatgacctaataggcaagatagtaaaatcggtcgcagaattggaaaagatgtatcatagtcaggatggtgaaaatttctttgttcctgccagcactgctcatgatagtcacagtaaggaggtactaaagagtcaagtgtatgtggagaaatatcttgagaacaacagacagacttttctagattatatttctgctgggtgccaattgaattttatggtagccgtagacttcacagcttcaaatggaaatccacggcttccagattccttgcattatattgatcccactggtcggccaaatgcatatcagagagcaatactggaagtaggagatgtactacagtactatgacccagctaagcggtttccctcatggggctttggtgctagacctattgatggtcctgtttcccactgtttcaacctgaatggtagcacctatcaacctgaggttgagggaatacaagggattatgtcagcttatatcagtgcgcttcgtaatgtctcattggctgggcccaccctatttggtccagtagttagcactgctacggcaatagcaaaccaatcacttgccaacaaccagcagaaatactttgttctgttaatagtcacggatggtgtggtgactgatttccaagagactatcgatgcaatcataaaggcatctgattttcctttgtccattcttgttgttggagttggtggagcggacttcaaggaaatggagtttctagatccaaataaaggagagagactagaaagctcaacaggaagagtggcatcaagggatatgatacagttcgccccaatgaaggatgcccatggcagtgggatttcgacagttcagtcacttcttgctgaaataccagggcagttcatgacctacatgagaacaagagaaattcaagcaatcagttaatatatggtgccgtctatttgtgattcttagttgatagaagatgcacattctaatggtcttgttggtatggttttggctgttgggccacatcatcatgcaaattttaaagccattgatgtgtgaaaaggtggaaagatggatagtctggacatgttacaaggcaattgaattgaggcatgaattgcttggcactgcagattggaaactgttgtctctgaagaaacatttgaattgtgtatgattcgtgtaaaggtcaaaggttcgtagtttcgaacttgctgctcaaatcaagcgagtggtagtttttttttcttctatattctggttatggtgctgagtttcctcagattagcggtttctatctgggattcgtcttcttcatacctgcgtgtaagatcatgtcttgaaattaagggtttgaaccccatgttgactctttgtgcgtacctggtaaaaaacatttttgtcagtaactctaccatgttctggtgttatattgatgttacatatagttctgttagaagttaattatgcttattgagggttgtaccaattgcgttgtcgtgatatttattgttgttatacctgcattgtcgttacaactatcattatcttgtctcagggtacctgcactgacgctttgatgtgtttaaatatttgttagtattagtacaatctcagaaacttgtaccaagaatactccacttagggctgtgcgtcagtgcagtgcagttctcaatcttcacataattctgaagccagagtagcttgcaataaaaaaa

SEQ ID NO: 66808 - DNA, 265 bp, Oryza sativa
  Clone ID: PAT_MRT4530_67724C.1
ttcgtttcagtacgaggggaggtcggtgcagctcctgagaaacgagctcgaggaccgtgtgggctacgccatcacggtgtgcgtccgcgccggccgccatgggcagcacagccctctgctcatcaacctgcctcacagccgggagaccctgcacatcgtcgttctcaggcgcaacagcgaagcggataatcagttgacattcccagatcccaaagcatcatcacgtcggagatataggcatcggaggagggccataattcagtga

SEQ ID NO: 66809 - DNA, 411 bp, Oryza sativa
  Clone ID: PAT_MRT4530_67725C.1
atgaaggcaaagacatcaatcggcggcgacgaaggtgaccagtcggtgaagacgaagatgcccatcaacggtggtccgacgcccccagcgacgcgcctcgccgatcgggagccagcagatgtcgccatgccgcctcgcaagcgccgtcctccgcgccaccacgcgcgcaccggaccacccacgcgcgcgctggacttcgccgcctcgcgccgccacgcgcgcaccggccgccgccaaccttgccgcctccgcacacgccgccccacggcgccgccgccagtactccggccgaaaaccggagaggctggccagatccggcgacggcggcgccggatctgccactgcctagcccagaggcctcgccgccaccactccccgacgccggcgaacgtctcctccaccgcgccttag

SEQ ID NO: 66810 - DNA, 838 bp, Oryza sativa
  Clone ID: PAT_MRT4530_67726C.1
gtgttgctgatacggtggcgcgtggttggtgcgacggcagatgacaggaggtcgatggcgacgacgactcctgagccctcctaccgccacccgcaccagcccaaagacaaacctgccaataaaagcgctatggtggtgcttggtgtggcgtggcagggaggaggtctcgacggcgctgtcgcagttggtgccgacgatcttctctatgtccatgaaggtggagaagaggtcgtcctcggagtcgatgtcgtcgaagccatcgccatccgcgctgccgacgaggcccaagttatccgggaagcggaaggctgcctcagatctggcgtggcgacaagggcagtggcaaccacggccggctgcgtgggcccgtcacgccgctaccaccgccagggatgggtttgtcgcgcatgtacgccaccactgtctcctcgggaagctcatcgttggagcccctgtgcacgatgttgaacagtcgcggcgcctgcagtggcgccttcgccattcccgctgcgcctccttctcctcccccgaccaacgatcgtgcccccgcgacatcgcagtgcacaagacaagcaccatcgttgccgtggcccctgcacccgacgatggtggtggagaatgagaagcgtcgcaccggcgatggaagggagcgtaggtgacaaatggtagcgacggtggtggaggaggaggagcgacgacggtggctgtgaggaagtcggcccgaaggtgggagcgacggcggcaaccagcggcggtggtggagggggaggaggagcgatgggggcggagggagcaaacgactcaaccgggctgcaccgcccgcccttgtgtgcgccat

SEQ ID NO: 66811 - DNA, 720 bp, Oryza sativa
  unsure (1)..(720): unsure at all n locations
  Clone ID: PAT_MRT4530_67727C.1
tttttttttttttttttagtgaaaaaaaagtagattcattgataaagtaaaaaaactatctacaataaccttcccaatgtacatactttacatattagtgtgcaaggcatacttacagaaaggggaagaatgcacactccaatctgcttcaacaaactaatggtacaacaatatggcaagtagctgattctctgcaaaaaaaactgccatggcctccaagatgttgctctaaggggaaaatccccccaaaaaatgctatttacattgtattcctgcgcctctccatctactatgtgttaaattaacacaggttaaactgttatccgtccaattgatttcccagtgccatcagcactcatgacactggtctattttgcaatgtaagatcagaaacagatgaaagctcctcctccaaagtgttaagaagatcaaggtactctctgaacacatcatgtgactgtaaggtgatgttatatgcgtttccacagtcgcaaatcatgtcgaaagagatccaccaaaacctcagcgcgtctcaataaagttgctagcacaacaatccattccttaaacttggcagaacacatgtgagcaagaaggaactcagcatcaagccgactttgaagagtgtccatttgaagcttttgtccaatcagttcaagtgcagatgcaaaattctctagtccgagcagaccctagncctttctcgctgaagatattcca

SEQ ID NO: 66812 - DNA, 498 bp, Oryza sativa
  Clone ID: PAT_MRT4530_67728C.1
gttccttccactcagctttgctcttcaccttcaacaacacctatcaacatggcaatgctgctgaggaaggccgctgtggcccctgccaggaccagcgtgcgcagcaaggctgccatcgagtggtacggccccgaccgccccaagttcctgggcccattcagcgagggtgacacccccgcctacctgaccggtgagttccccggtgactatggatgggacactgctggcctgtccgccgatccccagaccttcgccaagtacagggagatcgaggtgatccacgcccgctgggccatgctcggcgccctgggctgcgtgacccccgagctgctggccaagaacggcatgcccttcggtgaggccgtgtggttcaaggccggtgcccagatcttcaggacggtggcctgaactacctgggtaacgagaacctggtacacgcccagtccatcctggcaaccctggccatccacgtgctgctgatgggtgctgctgagagct

SEQ ID NO: 66813 - DNA, 226 bp, Oryza sativa
  Clone ID: PAT_MRT4530_67729C.1
gtcacctcgaactttaaagaatcatatatgctaaaggcgagacttaaaagaatattagtcgccctataaacctcacactattatcaatgcacaaactaactattaacacttcatgcctttgctcccttggcttcacttatgaatacatccttcaaggtggtttattccaggccccagtcatacacttagaaccatttcttctaatcctcaacttctctaaatacca

SEQ ID NO: 66814 - DNA, 557 bp, Oryza sativa
  Clone ID: PAT_MRT4530_6772C.1
tgcaggatcggcacgagggcctggacatcccacttttcaccgagtatttctgtacaattctgttggagagagtacaactgcaggtctaattctgtgtgctaaaaaggtagattttgatttaaccaaattttggcttgatctatgaatatatagtaaaataaaaggatcatttttttcttccaggaaagtaaggttgtaaaatcaaggagaccagctgttccattttgcttctgaacagctcacccaacttgcacttgatgaaacgattcgatttcgcggctaaaagacatgttcacttgaatatattttcattctagagctgcaagtacatattcaattaaatgtcatttccttttcattttgctgctagaaagccaggttcaattgaataccctatctaatcaaattttctatttgttcagatgtctgtacctattaactccgaaatgaacatggtaggatggtttaggtttggagactattttttgttcaggacttcatgtacttattaacatttgcagcaatgataataccaagaacttcagttttaggccaaa

SEQ ID NO: 66815 - DNA, 1004 bp, Oryza sativa
  unsure (1)..(1004): unsure at all n locations
  Clone ID: PAT_MRT4530_67730C.1
ttttttggccgcgggttttttttttttttttttccctgcagatgctgttgttcattctagcattttcatatgatagaagccaaatctagttcactagtatttattacttcatggcaagaaccctgcatcaacaagagtagcaagaatactcgaatcctagaacctatttacactaatccatgatcgtttgaacacataccccatgagcataaatttgatcctatgaaccctgacttctagtaccgataattttgattgaagaaaggattctcatcccttgcttctgcttctagttcagccttggctcttctttcagcctctacctcctccagaatggagcgccttgtgtttgaagccttaaacttgttaaccagactttcaaacgctcttgatccattttgttcaatgtatctctgcgcagctgatatcacatcatcgggtctatctgactcatcctttcttgggatgtaccagatattaactatttgctggttgacaaccattggcctcacaaagtgttcatagacatgtgcagcaccattgaagtagggcaagaccaaccagcaattgaaaaacaatttagcataagaccataaaggaagccattcaagtaccggagaaaaagtgagctcaaatagagtgataaacgagtacaacacccagtatgtgagccattgctgatcatctacagcagattttgtttctatcgctcgaacagatgcatatagtggataagcaagtgaaactataggccccgcaagaacatccaagttctttaccaccaccttgaggaaagatccggatccggaacccattccgccgctcgtcctgctcccggtctcaagctgcgaagtgcgaatccaaagcagcgaggagcaatgcaggncggtttcagccgctgggcgaccttttcccctttttatctttttcttatttggtttcttcaccctttagccaacccactcctctttcttgttcttttgtgttgtctgcctgctttgctg

SEQ ID NO: 66816 - DNA, 744 bp, Oryza sativa
  unsure (1)..(744): unsure at all n locations
  Clone ID: PAT_MRT4530_67731C.1
ataaatcgcaagcaattgcgttgctgctatgtactgtaaaagtttcttataatatcagttctgaatgctaaggacatccctcaaaacaaaaaacaaaaaaacaaaaaaaaagaacntatttggccttctgagcccactatcctacatcaggccagtgacaactctgggcgaatggttgaaggtcagacatttacagttgaacctattcttacatggaaaaggctgagacagttacatgggaagatggatggactactgtcacgccgatggcagctggctgcgccgtttcggacgcgtgggctagtcactcggacaggggctgaaatactgacaaaactttgacatcttctttattatgataagaagttgttgggccatttaccttgagcatgtttatgttcatataacagccccagccccccgctagcagccgtatcctaccgaaatgtctctttggtccacatgtggcaggattacagatcacaggctgaagagctgatcgatgagatctgtgatgaaagttctgtaccaggcgagtggcttgtgcgaagggtttgcggatccttagaattttgtgtgtggcatactggcatatgatcagttactgacgtattgctaggcatgtaatgtgtaaatagtccttaatttgttttgtttcctccttaatacaacgccgaatgctgcagtcgcttgcattgctgttggtttgcttgacctgctgcagcctgtaaaaaaaaaaaaaaa

SEQ ID NO: 66817 - DNA, 459 bp, Oryza sativa
  Clone ID: PAT_MRT4530_67732C.1
ggcgcaccaattgataactactaggtacctgacacgccgcttggccgtaggcattcaatagtagatgagattcaaccacaagcaaggatgtgccctaaatacaaactgagcacacaccacgcacccacaaacaaacaccaccagagttatgaaataagctctcctactacataaatacactaacttagacgcactgggtgcaggacgagaacagatatgtaccctaaggactatgtcctccatataggggaaaaggttttggatggatgaaacacataatgctgatctaatcggcacttggtattgaagttcccaccacgtgagatatgcgatagtgattcagacgtccgtatatatgtgggacgacggagagtttgcatagaggatatatgtgcacgacgcgctggtggggacgagctggtaccgctgtcaggctgggagatgctggatgcctcatgg

SEQ ID NO: 66818 - DNA, 4599 bp, Oryza sativa
  Clone ID: PAT_MRT4530_67733C.1
tgcagctcagcactaaggcaatggcagaagctgtgctgcttgccatctcaaagatcagtacagctttgggagatgaagccaccagggctgtcatagccaaactctccggaaaagtatctaacttgagggaacttcctgacaaagttgagtatatcagaagggaattgcgtctcatgaaagatgtaatacaagatttagattccacaaataccaacatgaatgttgtcaagggttggatcgacgaactgcggaagctggcttaccgtgttgaagacataatggacaagtactcatactatgcttgtcaacggcagcaagaaggatcagtgatgagatgcgtaagaggagcacattatgcaggtgttttcagtgaagttgctagtgaggtaatgaagataaagggtgatgttgaacaggttaaaagacagcaaatggaatggttacctacagttcagctcatttcaagaacacccactgacatcgaaacaccgcgatctcaaggaagaagaaagttgcttgaatgtggcgatcctgtggggattgaatacaacaggaaaaggttgcttgaattactgtaccctgaagaaccaggccacaaagtgataacagtgtctggtatgggtggactgggaaaaaccaccctggccttagacgtatttgaacgtgaaaagatcaagttcccagttcatgcctggatcactgtgtcacagacttgcacgatccttagtcttctaagacagttagtcagtccgctcatacccatggaacaagaatcatcagaatccaaggaagatctaatcaacaaaatgggcgttcatgaattgacaaaagaattaaacagaaggactgaaaactgtacatcatgtttgattgtgctagatgatgtctgggaccagaacgtgtacttcgaaatacagggcatgcttaagaatccccaagcaagtcgcattatcatcacgacacggatggaacatgtggcagttcttgctccctctgaatgccatctcaagatacaggctttgggtgaaattgatgcattcaaccttttctgcagaagggcattttacaacacaaaggaccataggtgcccgctggaccttgagaatgtggctgcctccatagtaagtaagtgtaaggggctgcccctagcacttgttaccatgggtggcctgatgtccacaaagctacaaactgagcatgcctggcaacaaatgtacaaccagcttcggagtgagctggccaaaaatgatgatgtcaaggcaattctgaaagtaagctaccatgcattaccagctgaccaaaagaactgcttcttgtactgcagcctgttccctgaagattttcgcatatctcgtgagagccttgtgcggtactgggttgcagaaggttttgcggtgagaatcgaacacaatagaccagaagatgtggccgaaataaatctcatggaactgatccaccggaacatgcttgaagttgacgagtatgatgagcttggcaaggtgatctcttgtaagatgcatgacattgtgcgcaacctggctctctcaattgctggacaggagaggttcggttacgcaaatgattatggagctgtggaaaaggttgattgggaagtccgtcgtctgtcattattcttgaacaatggaaaaggttgtgcatcaacagtgaaatttccacatcttcgcacactacttgaaacaactacacaccctcctggattgttatcctcaattttgtctgaatccaaatacctcactgtcctagagctacaagactcagatatcaccgaagtaccagcatgcataggcaaattgtttaatttacgttacattggcttaaggcggacaagactctgctcactaccagagtctattgacaagctctcaaacctgcaaactctggacatcaagcaaactaaaatagagaagctaccacgtggaatcactaagatcaagaagctgaggcaccttctagctgacagatatgaggatgaaaataagtcagagttccggtattttattggagtgcaagcacccaaatatctgtctaagttggaagaacttcagactcttgagactgtggaagccagcaaggacttggccgagcagctgaaggaactaatgcagataagaagtatttggattgacaacataagttctgctgattgtggaaatatttttgctacactatcaaatatgccgcttctttccagcttgcttctttcggcaagggatgagaatgagccactttgctttgaggctctccagcccatgtccaatgaactccacaggtcaattatcagagggcaatgggccaagggcacactggactacccgatatttcttagccacgctacacatctcaagtacttagctctaagttggtgtcatcttggggaagatccactggggatgctcgcatcacacttgtcaaacctcacttatctaagactgaacaacatgcacagttcgaaaactttggttcttgatgcagaggcgttcccccacctgaagactcttgtgttaatgcacatgcctgatgtcaaccagataaacatcacggatggcgcccttccatgcatcgaaggtttatacattgtatcattgcggaagctggataaagtccctcaaggcattgaatcccttgcctccctgaagaagctctggttgatggacctgcacaaagacttcaagactcaatggaatggtgacgggatgcaccagaagatgctgcatgttgcagagatccatttctagggtggccaattttttgagaagggttaacagtctgacggaaagcagcgacgacatttgccaccgattaggttctcaggttgagaaggcacctgcattccaagaattgcgggaagttcttatgagtaactatggcaatctgtctgatcatcttgtcaagacatgcctgctatacatgagtgtattcccaaagggttttgagatcaggagaaacagtctagccaggagatgggtagctgaaggatatgcacagtctgtgggtaaattcacagacgaaacggtggcacatcaaaacttcaagaaactgcttgaccagaatatcatcgagccgatgggtgcatgcgacaatgcaagagtgaagacatgcagaactaatgctgtcatgcgcgagttcatgctgcacagatccttctgtgatcacttcatcgggtctcttgatacaatgtcagagtcagatgacccaagtacctttcgtcatctcttcatccagaattgcacaaatatcaacatcctcaggttggccaagaagaaacttcgtgcccgttctctgacaatctttgggagtggaggaggaggagctgtttcttgtatgagagatgctccggccttagatctaaaagaatgcaatgattttgatgataatcgtgtcaagggcatcatgaaggacaatctcagtcgtctaaaatatctgagcctcggaagcgctactacgaaacttccaaaggcgattgagaacctacagtgtttacatacactcgaattaagaaagacaaatgtagtggcactgcctatagtagtcataaagctgccccatctagttcacctgtttgggaaggtcaagctcaggaaaaagaggagtattcatgcggtgcaggtaatagatgatatcatctcaaacaaaaaaagtatcggacaaaagagtaagctgcagactctatcaggatttatcatagacaaagactctataattccgcaactgatggttcatatgaggggactgagaaaggtcaagatatggtgtgattattccactggtgaaggtaacactatccacctcaaggaggctattgaaaatatggttatgtacgaaatggacacaggtgttggcgttcgttctctgtcactgtacctcggaaatgccttggagaatcttcttggtcttctaggtgaaacaaatggttttcttaccactctgaaactgcacggcagactgagccaatttcccaagtttgttacgtcgcttacaggcatcaaagagttgtgcctttcatcaactaatctaactgggagtgatttatcaggatcaggcctgggtgatctaccctgcttgctttatctcaaactggtagaatacaaccttgtgggcttcgtcattaaaaaaggggattacccagtcctgcagcgcctatgtctagtggtggagagtcctaatcctatcctacctaaaatcgaagaggaagctttgccagaacttgtttcacttcacctgctttgtgtgcgccttggtgatcttgctggcattaatattagaaaccacacaaatctccaggaagttgctcttgattcagctatcagtatggaaaccataattacttgggaaaatgaagctcggaagcacccaaaaagacccaaggttttgttcttcaaaagggttggcacacccaacactgggtgtacgattctcagaagctgtggcctgtttggaacagcttctagtagaaacagcttttgggaaaagctgcagctgggacaaactcccccaaacagggcctttgtcttggcaccgtcgctggttgcaacttgcaagcatgtcgatcgtaaagctgttgttccgcaggagctgtaa

SEQ ID NO: 66819 - DNA, 534 bp, Oryza sativa
  Clone ID: PAT_MRT4530_67734C.1
atggcagcgccgcccaagctacgcgagcccgtacccaccacgtacgcgcgcgtgcatgcatgcgttcgtcacagctctcgtgctcttgctcttggcgtcgcgcgactcgagcccgcgcgcatcccggcgactgatggcgacttctgcgcgctaaattcgcagcgtagcagaggattttcttgggctcgcgagtgcggatacggttcgttttgggggcttcgcgctaatgcgtccgctgcgccgttctgtttctccctgtacgttattttgccgctttgcacgccgccggcccgtgaccgcgactccaacgaaaacggcgcggctcccggagcggcggggcgctctgataacggcagcgctgcgctgccgccgcagctgctcgcggcttttggcgacacggccgcggtaccagccaaaccatctggctttacacgacgccgcgggcctcgcggccggaacggcggcgcgcgtacggcggacgccgtttctacgcccagattccagtacgccacgcgcgtgtgttgtcacactgcg

SEQ ID NO: 66820 - DNA, 783 bp, Oryza sativa
  Clone ID: PAT_MRT4530_67735C.1
atgagcagccatgagaggttcaggctgtcccatctcatgccaaactcatggttctacaagctgagggacatgaagaggcccaggccaacatcaagccggatgatcaccgcagcagatcatgcagcaagaagctccaggagatcgtcgtcgtcgtcaagcagcatccaccactactacctccatggacatggaaccaccactcccaagcctctcccgttgtcaccgccgcgacgatcctactacccctacctggaacgagccaagcagatgccactgatggagaaggaatctcagctcatctcccactcccctctccaccaaagaatccccgccacagccattcccggagaccaccacgacggcgagtttcaagacttgcagctacgtcctatacgcacgaggccaccgtcggcggcggcggcgtcggccgagccgaggaggacggcgagcgggagcggcacgtgcccgagctcgccgaggatgaggagcaggaggctgcacgttctcggcggctgcgagtgtagggctggtagtggtcgccggaggagcggcggcggtgggttcgcggtggtgaaggcgtcggcggagccggcgagggacttccgggagagcatggtggagatggtggtcgggaacgggatgcggtcgccggaggatttgctggagctgctcgagtgctacctgtcgctcaacgcgcgggagcaccacggcgtgatcatggaggcgttcaggggcgtctgggttgagatcgtcgctgatgctgattgttgcgttgggttgtga

SEQ ID NO: 66821 - DNA, 321 bp, Oryza sativa
  Clone ID: PAT_MRT4530_67736C.1
tgtcgcctctgcctccggaagccaccctgaagaaacggccgcgccgcgccgtcgctcgggcaattcctcgagatggagaggagagcaagcagcagctcgttgtagcctatgatctcatattctcatggggaaccatggctagagatgctcgagtttgatcggtttcgcgttgcatttcgattcctctcattttccagagaacccgggtcattgtcgaatctttcatgattcttcacattgatctctgctacgtttgtctttgccgagtaaaacatttgccgataaaaaaatagacaagttctttatcaaaaaaaaaaaaaa

SEQ ID NO: 66822 - DNA, 355 bp, Oryza sativa
  Clone ID: PAT_MRT4530_67737C.1
acagaggacttagcatagaccataggggtgcaactgggaatttcatttgcagtctaacacttgtaagcttcactaacaatgaatgtaatgacaggaatggttgcatacaatatttttgtaatctcatatgggactatctagacctaatttcactactattgggggtgaggggaaatttcacaatttcaaattatctaagcaacgaaaaaactgctaaatcatgtaggcctacctgttgatttttcctctccatctgcagcccagtgtgctaagactagcagcccacaaaagctgatgcacaaatcttaaggtgtattgaacagtcaagaatttgactgatactagctctcatcaa

SEQ ID NO: 66823 - DNA, 728 bp, Oryza sativa
  Clone ID: PAT_MRT4530_67738C.1
gtagaaacaaagatcaattgatcactggaaattatcaaaatttctagtcctgatgatcacacattaaattaacttggattcccttcggtagtttggttggctgaattagatgttgggatttagggtctggtgagatgggccatggcctttgcccaaattggaaatatctcatgggccctcaatttccaccttctgttttgccaaatactgggcttccaatcatgggcccttacgattgaactaaacagcgagccttcttcatatcttggtcgtacctagctaactaatcatttgccaagagagcaacactgttgggagtcatcccaccgctgtggtctttgtaatgttgataaccttgtctttatggtcaaaatatctttagatagctctgtgcttggaggctttgcagcacaaaatagttttctttgtggtaaattttatcttgttgaatatatccactttcaaatctcgactgttatttaaattgatttccatgatatattttgcagatttacagctgtagtcacggaggtgaaatatgtcttatggaccttgagagagagaactttaatattacccggctgtccgaatttcctattttgtcactttgtcaagcgccaaatagccccagctgtctatattttggtgaagaaacagatgtgaaactttttgatgataggattggtaaagtgtcaacctcatggaatgcacatgctagcagaatcaac

SEQ ID NO: 66824 - DNA, 234 bp, Oryza sativa
  unsure (1)..(234): unsure at all n locations
  Clone ID: PAT_MRT4530_67739C.1
gcgtgggcggccgcgtgggcgggctcagtttgctgcngccctatgcctcattgcgggagcnggnnncaggncnngtgcnntcnngngagcgttnntctggagggccctgtcngcnnngtcnttctgcgcgtggctgctctttctgtttggctgcgcccttttgctccctgggggggggggggttcttcntnntcctnnccgtgctgtttccttcggtgccggggctggctgggt

SEQ ID NO: 66825 - DNA, 1140 bp, Oryza sativa
  Clone ID: PAT_MRT4530_6773C.1
atgagtagagtgtccactagttgaggttttgtttaatctagggtgaacaagccgagggagagggcgcgcggaccgggtccacgggagtggggcccacgcgtcagcctctcggtccacggtggaccgggcgcacgcggctgacggcggccggcgccgtgggtcccacgcgtcagccgcacccgcgggcgcgggcggctgacggccgggcccacttggcagccgcgagggcgcgcccgaaggcagcctcgccggcacggccgacgggagggggacgcgcccgcgccccgatggtcaccgccggcgaccaccggcgcggcggagcagcacccgagagagaggagggaagggggaagcgaatggagcggtcttcggctcaccccggtcgacggcgacgacgggaacggcggccgaagcggaggaaggcggcggcgcggttcgggacgacgaggacgacggcgctccgacggtcggcgagcgaaacggaggagcggacggggtcgacgacgacgcggcgaagccgatggaggtgacgccgagacgggaggaggtccggagcgacgacggcggcgagccggagctcggcggcgacggcggagagagagtacaacggcgcgagcacgaatccgacggaaagagcgagcggcgagcggcggaaacggaggagcgaagcacgaggagcgattatatagcgtcgggagagggagagagcggtcggagagggaggaatcggccgcggagatctcggccgccatcaataacgccggcgaggattgcgggaataaaatcggacgaatccgagggagagagagaggggaaagcgggggaaacgggagagggaatcgcggggaataattccccccactttaatgcgcgcggggacggcgggatgcggcggattcggcggcggcggcggcgctagggcacgggcgggcggcgggcgcggcgcgaggaaggcgatgacaggtgggccccacccgtcagcgagggtggcgggcgggcggcgggcgcgcggggaggagccgatgggccggaggagaggagagagagggagggaagagaagtgggccgagccggcccaagaaaggaaggggggggggaaagaggacttcttttagggtttttctttttataaaccttttc

SEQ ID NO: 66826 - DNA, 1252 bp, Oryza sativa
  Clone ID: PAT_MRT4530_67740C.1
ggtaagagctagcagctcgagagagcgcaaaaaaagaaaaaagaaaaccccaaaactccagagattaatcggcagagctagctgtgaccgaggagaagacagagcagccgaatcgaagatggcgttctataatggcgcgagtgttgtcgcgctgctgttgctggtctccacggctgctcgagctgccggcgatggcctgctgctcaacggcaacttcgagtaccagccgagcaagtcacagatgaacggcacaagggtgatggcggagtacgcgatcccgtactggaagatcaccgggttcgtggagtacatctcgtccgggcagaagcagggcgacatgctgctgacggtgccagagggcgcgcacgccgtgcggctgggcaacgaggcctccatcgagcagcagatcagcgtgacccggggcatgtactactccatcacattcagcgccgcgcgcacctgcgcccagtccgagaagctgaacgtgtcagtggctcccggcccggagtccggcgagctccccatccagaccgtgtacaccagcagcggctgggactcgtacgcctgggcgttcaaggccaagcgcggcctcgtgtcgctcatcatccacaaccacggcgaggacgacgaccccgcgtgcggcccgctcatcgactccgtcgccatcaagaccctgtaccctcctcaggccacccagaacaacatgctgagaaacggggacttcgaggaggggccgtacatgttcccgaacgcggcgtggggagtgatggtgccgccgatctcagaggacgaccactcgccgctgccggggtggatggtgatgtcggacacgaaggccgtcaagtgcgtcgactccgcgcacttcaccgtgccgcacggcgcgcgcgccgtggagctggtgtccgggctcgagacggcgctgatgcaggaggtgcgcaccgtgccggggaggtcgtacaggctggagttctcggtcggggacgccagcgacggttgcgtgggttccatgcaggtgaaagggtacgcgggtcaggggtgcacgaccgtgacgtacagctcccagggcacgggcgggcacacccgcgcgtcgctggagttcgccgccgtcgcgaacaccacgcgggtggtgttcgtcagctcgacgtacatcaccaagtgggacgggacgctgtgcgggcccgtcgtcgacgacgcctcgctcgtgtgcgtgtcccagcagcagccgcccgctcgccgcctgcttcgtctctga

SEQ ID NO: 66827 - DNA, 702 bp, Oryza sativa
  Clone ID: PAT_MRT4530_67741C.1
atggcgattattctgaatgctacaaatgatggagatcgcattgagcttagagtaatgcacttttctggacatggtgattggactacaaatcgtgatcggcctacttttactctttaccctctacaagaatgctacaaactatggcgatgggggacacagatgataaaagtattctcgaagatcaagatgaatgccctagcaattaatgttatttggatagaggcacaattgaactgtattggcagggccaacccctgccgcataagatttcttctgcactcaagtgcctgggcacatataggtatcaaacgaatgggtgagcttgatattatagcatttaaaaatgctgtgaaacaaaaatcacctgaagaagctgctattctttgttcgaagtgggaagccgaaattacaaaaccagaatggcacccattcatgattgtcatggttgatggaaaagagatggaggtgatccgggaggatgatgcgaaacttgttgaattaaaagaagagctcggtgaagaaatctatacaacctggtgaccaaggcgttgctcgagaattgagattaacgagtataactataacccgagcgacaggtatcctgtatcggagccgtggaactacaaggaaggaaggaaagtgaccctgaaggaaatcgttcagttcatcatgaggcagtggacacgcaagaggaaacgttga

SEQ ID NO: 66828 - DNA, 369 bp, Oryza sativa
  Clone ID: PAT_MRT4530_67742C.1
atgagcgcgcgctgccgcgccggaccacctcagctcgtcggcgacgagcggaggatcttccatgtcctgctgcacatggtcggcgaccctgattggccagagcggcagcagaacggcgacaccgctctcgccgagaccaatgttgttgttgtcaccggttgtcgacatgttggtgaagatgatgcagagcagtcgcgcttgaagcgctatctaaaacttgatcgctcgcctacccgtgcatgttctcaagcggacggagtttcggaggcacttgctcgttccgatcacccgtgcgcgcgggatgaacagaaccggggaaacagagagacagcgcaggaacagaaggagagtatcgccaaggaacaatag

SEQ ID NO: 66829 - DNA, 717 bp, Oryza sativa
  Clone ID: PAT_MRT4530_67743C.1
atggccgccgccgccgtcgccgacgaggtcaccgaggcgatggagcaagtcgaaggggagcgtgaggaggccgacgcggtcgctgatgaggccgccgaggtgatggagcaagccgaaggggagcgggaggaagccatcgatgcggtcgccggcgaggccggcgaggtgatgaaggaagtcgtcgaaggggagcgggaggaggcgaatgccatggccgatgaggccgatgaggcgatggagccggaaggggagcgggaggaggaggcagacgccgtcgccgacgaggccaccgagccgatggagcaagtcgaaggggagggggaggatggcgacgccgccgcgcaacggccggcgctgccgctggggagggtgaagcggatcatccgggtggaccgtgacatcaagaaggtgaccaacgaggcggcgctgctcatcgccgcggccacggagctcttcgtcggctccctcgccgcgggcgcccacagggccgcctcccggcgcggccggcgcgcggtgcgtgccgtgcacgtgcgggccgccgcgcgcgagcaccgccccaccgccgacttcctcctcgactgcctccccgccgccgaggaggcggcgcctgctcgcgcggctgccgccggtcccagccgcggcggcggaagaggagaggcaaagccgttgccacgtgggacccgccgcatcgacgcgttcttccagaagaccacctag

SEQ ID NO: 66830 - DNA, 2580 bp, Oryza sativa
  Clone ID: PAT_MRT4530_67744C.1
atggcagagaagaatcttgaagagcccgactcccctctaattgcatctttgtcggcaccgaaattcatgcaaaattctgcagagcctgagctaactgcaggtactgattgtgagaacagtaatcttcagaacagagaaacagccaactttgaggcagcaatgcaggaagaacttccagaaatcttagttggcaacaaaagcaatatgcaagaaatatcaacagaacaaaaggctcctattagcgtctgcgcaactccatctgaagtagacaacagtggacttgtatctgccagtgatcctcatgctttttcagtgacctctcagaatgatgatgaatcaacagaacccagcagtgattctaccacaattccaccttcagagaagaacacccactcaacttcacagacctccgacaggctgaaagcagtggtccaactacaagatacacccctgcataacactggggatgatgccttttgttcctattctgtgaaggcttcatatgagacttcagctgcgacaccagcaaaggtgaaagaaaagaagccacatctgatgcatcattttaatgagcgccaaatgagcttaagagacatgcggcagaaggcccctgcacctttgaacagatcaaacagcgggaagaacttcagaacagataacacctttgtcgatacaacaacccacattgaatcagttaaggtggcggcctcaagatttggtggcagcgtcaactggaaaactcgtataacagagccagagcaggagaatgaaatcgtacttgaacttgataggctgaagaaggaaatttcagaaagtaaacgacaagcggaggctgtagaggcagcaaaggtgcctctgtccaatgagtatgagaaaacaaagaggctaattgaaggattggaacatgacctggaaaaggcacaagaggaggagataattgcaaggttgggtttggagttatttcagttaatagtacatgagatgcgggaaggagataccagtgatggtggtgtcattggcagggagaaattgaatataatcaaagaacagtacaacgcagtgctggccaacttaatgttagtgaaggatgagtccggaaaagtgcaggagaattacgagaccttgttgattgaacgggatatttctatcgggaaagctcagttagccgtttcaatgtctgaaggtgctgtaaggaaggttgaggagctcaccgtagaacttaacagactgaaggtggagttggaattggctcattccacatgccatgatgctgaaaaacatagtaaagacacgtccttggcatgtgatgaggattcccttaaatggaagagtgatctgaggcaagcagaagaggagctcaatcagctcgccaagaaaatttcttctattgaagaattgaaatcaacacttgacacatcaaccggcttgttgctcaagctgaaaaatgagctagctggatatgtggaagctaagccaattgataaagaagcacaaggaaatattactcaaagatctttacacaatgaagttattctatctacacgagagttggaggagtgtctgatgagcgtagataaggtgagagatgaagtttgtgctctgaatgttgctgcggcatcgctaaaaacagagttgatcaaagagaaaacggcacttgctaccatgaagcagatggaagcgacgtcatccatcgctgctgcatctctaagggtggagattcagctagcactccgggaactggaagcagttcaggccaaggagaaagaatcccgaaatggaatgcttggtttgcagaagattatggaagatacagccaaagaagctgatgagtctaagtccatcgcaagagaggcacaggagaagctaagaaaggccaaggaggatatggaccatgcaaaatcttgtcttgatactatggaattcaggatccaggcagttctaaaggagatggaggccacgaaagagtccatgaggctggcaattgatgccctcagaccgtttgacagtgagcttccagtggatatcgaggaacaaggctctcagatagtcacagttgacctggatgaataccaatctctcattgcgaaatccagcaaggcagaagaacttgtccatgaaaggacggcttctgcaattgcacaggccaagatagccaaggagtccgagtctcgtaccttatcaacactgagtgaaacacacaaggttttggaacaacgaaagcaggcattggttgctgccacagagagagctgatagagccactgaaggcaagcttgccatggagcaagaattgagaaaatggagagaagagaatgagcagcgtcgtaaggctggcgaagctttgaaatcgcaacttaatccatcaagcacccctgtgatcatcgttgaacgcagcagcgacaccaagagcacaagcaaggatgatagttacgcctcggttcatccactgctggatatgtctgcgaggagtacccctaatgattcagcgttgctctcgaataagaagaaaagaaagaagctgtcgttcttcccccgcatcaccatgttcttcacgaggaagaagtctagagctgctatatga

SEQ ID NO: 66831 - DNA, 473 bp, Oryza sativa
  Clone ID: PAT_MRT4530_67745C.1
ctcccaaggattgccatctcagccccagtggtcccatgtcctagaatgccatgttccagaatgctaaagaatggtgttcataatgcagttgtgtaacataccgggacctaattgatggtcatatgatgacagaagcttggagctatggactcttttggatacttaaaccttgctggttcgatgcactcagcagtcagcattgttgttaccgaggatcgaataagtgggttcatcgaaataattaaaagcagattctgtgattcttgcttgcagctttgagttttgctgctggtttgaaactaggaatcctgtaagggtagtagtgttttattaggcagaggcgaggaggcctcaggcctgcaatatgctggtaatgagaataatcatgttggcgctgcagtgctgctttgggaattctttgactagcagaagaggatacatgcccgtaattaaatgtaatgtgttgttcgatt

SEQ ID NO: 66832 - DNA, 1138 bp, Oryza sativa
  Clone ID: PAT_MRT4530_67746C.1
atgcagacgtgcaaagggatacaaggacggtttgtggctatttgcataaaggcggttgtaaaacattttattgagaaaacggggggccccacacgacagcgggcaagggagtggtccaccgtggaccgggaccacggggtggtccaccgctggtccacgggaaccgacggcccagatcagcccgagctgatcgggcggccacggggtggcgcggctgagcacgggcactgctcaggcccgcccggccgagcgacggctcacggcggcgcggcctcctgcagcgacagccgacgcacgcgggaaagtggcggcgcggcgcggcaaggggatccgggcggcctaggcaagcggggcggcgacaagtcggccggccgacctaacggcggcggcgcacggcccggtggtcgccggcggcggccaccggcgcggcagcacgcacgggagacagaggagggaggcaaggagggagatgaggagctcaccaaggacgcgacgacgaggggcggggaaaggcgggggagctcggcgtcggcgctcctcgggacgaaggcggaacggcggcccagcggcgtagggtggaggtggcttgggatgcacgtggctagggcggcggctagaggtggccggagctcgccggggaccgatggagagagggagcacggtggagaggtggttcgcgtggtggaaggggaggaagaaacggcggccgagcgtgcccttgaggtggcaaagccagcggtggcggcggagcagtgcggcggcgaccctagcgacgggaaacggcggccggagttcgccggagtgtggcggcgcgcgggagcggcgtggggagagcgagggagagagtgccgggctcgggaaacaaggggaaatggacgaggggagcacgggggtgctttttatgggctcgggaaggcgggatcgaggccggacatggcggaatcggctggcgaagtggggcgccgacgtggggtggtcgaggggttaaccggcgccaattttcgcggggagagtggggggaaaggtggaggaggtggaggggatcgatttcacgcgctcgtggggcggggtggagcgcgggagccgcggcgtcgtggggcgaaaccggcggccatggcggcagttggggcgacaggag

SEQ ID NO: 66833 - DNA, 2264 bp, Oryza sativa
  Clone ID: PAT_MRT4530_67747C.1
ttaggacgagctgggacccagggtcgggttgccggttcggtggtggttgtactcagtcttgctcaatttttcccaagcccagaagaggagctccttgaagatgaaggctttggtgtctagctcgtgcctgccgtcaagcgcctgtggtcgtcgccttagtcttccgctgtttctcgtttgtctctgtgtgtgctgggccttcgcgccagtgccagccctctttaggtgggacccgaggccccacctgtcatcttctcccccaacctcccgtcgccccaactgccgccatggccgccggtttcgcccccacgacgctgcggctcccgcgctccaccccgccccacgagcacgtgaaatcgatcccctccacctcctccacctttcccccccactctccccgcgaaaatcggcgccagttaacccctccaccaccccacgtcggcgccccacttcgtcggccgattccgccacgtccggcctcgatcccgccttcccgagcccataaaaagcgcccccgtgctcccctcgtccatttccccttgtttcccgggcccggcactctctccctcgctctccccacgccgcccccgcgcgccgccacactccggcgaactccggccgcggtttcccgtcgctagggtcgccgccgcactgctccaccgccaccgctggctttgccacctcaagggcacgctcggccgccgtttcttcctccccttccaccacgcgaaccacctctccaccgtgctccctctctccatcggtccccggcgagctccagccacctctagccgccgccctagccactgccgcgccgcgccgtttgcaccgccggcttctccgtgcctcgccgcaccccggcctctgctccgtttccccatttaatcgccgcaaccacccttccaccgtgcatcccaagccacctccaccctacgccgccgggccgccgttccgccttcgtcccgaggagcgccgacgccgagctccccgcctttccccgcccctcgtcgccgcgtccttggtgagctcctcttctccctccttgcctccctcctctgtctcctgtgcgcgctttcgcgccggtggccgccgccggcgaccacctggccatgcgccgccgccccgctcgcctgggccacccggacccccccttgtcgcgccgcgtcgatcttgtgcgccgccaccgcccatgcgtgccgcctctcccgcgccgcccgtcggtcgccgtcgccggagaccgcgctaccgccgcgccatggatcagataggccggctttgtgccgtgctgtgccccagccgcgccgcccctggccgcccgatcggcttgggccgatccggaccgtcggttcccgtggaccggtggtggaccaccttggtggtcccggtccacggtggaccggtgcccttgtgccgctgaccggtggggcccacttgccggcgccgcccctcccctttgatgacgtcagcaaccctcttttccctgtcggccccgtcttcctcctccagccggcggcaaccgccgctgccgccgaaaccgccgcgctgccgccatttcccgcccttctctgcacccccactccgcccgcacctcgcgcccacgccgccgcctccttaaacgaatctcgaccccgagattcggaagagctggcgaagaggtgcggatgggcggccttcaattcatctactctttcccaggtggcctcttcctctgagtggtggctccactgaactttgcaaaacctgatcaccttgtttttggtccttctcttgctggtttcgaggatacgaatcagcttctccacatatgtcagatcttgttggatgtcgatgtgctctgagttagcttgttcctcaggtaccctcaaacacttcttcaactgagatacatgaaacacatcgtggatagctgccatgttagatggaagctcaagctggtatgcgacttcacctctgcgttccaaaatcctgtatggtcccacaaagcgcggtgccaatttgcctttcatctggaaccggtgtactccccggagcgtagtgacacgaaggtacacataatcccctgcttcgaaagtaggctctcttcggcggttgtcagcataactcttctgccgagactgggcgattctcaatctttccctgacggtcctaactttctcctctgcttcggttagcacttctgtcctaaacagttggcgctcacctgtttgatcccagaagagtggcgtacgacacttccggccatacaatgcttcaaacggtgccat

SEQ ID NO: 66834 - DNA, 799 bp, Oryza sativa
  Clone ID: PAT_MRT4530_67748C.1
atactgatctctgatgctactcttaacattgacattttccctactaacgtgtctatggttcttaccattgcttatatcattaataatggttcctccaaagcaactttaaacatcctgatcacaatgtggcatatctggaaagctagaaatgatcaaaaaatttcggggggaaacaaggagccgactcaggtatacaaggcggctgaagcaatgagcaaaacatacacgaatctttcttctcatactttgttgcatgtagatcaaaacgaggagacaatcagaagatttgataaatcacctaatgcatggtccccgatgttatactgatgctacctggaacaatggccaaacaggacttggaattttcttccatataccaaccactcataatgctatcttcattaaagccacaaccttagtggcccaatctcctttgcatgctgaattgatggctcttcaacttgctatggaacttgtcaaacttcttaacattcttgcaaaaaaaaaggaactttgaagaagaaccagggcactggagtctaagaccaatatggagtcaaatctgttcaagaattccagaatgtcttttgcaggttagctgaatcccaagggagataaacaagtcagcagataggttagctaaagaagcaaaatccaagcagccttctgctcctgttttcatttgtcaaaacatatctcatctagcctatcgttatgcaaactctgtcagagacaacatcagtctcagaaaatttgtaatctagcatgttctatgcttctaagttggaataaagtgctc

SEQ ID NO: 66835 - DNA, 2327 bp, Oryza sativa
  Clone ID: PAT_MRT4530_67749C.1
tttttttttttttttttttggcagaatcaggagctctcttctttcagagttttgacgaactgattttttttaaaaaaaaattgatcacgtcattataaattttgcaattttacaatttggcattactatttgcctatatacatgttgaaattgaaaaatatgacactaacattgaaaactgaaatatcccttggctgtatttttcaatttttgggaccaaaatacccaatcttctccgttcatcctctcatgtacctccagtcatcttctccaccaaaccacccatggctgccccgtgctcgagcgccacagccggccgttccactgctgtacaaattttgaagaatttccatataaacttgttcagctttcacatgaatcgtgtaagaatttcggctgtctaaacgggggcctaatcgatgccgtggcgcgccatgcatgcgccatcacattccggcaggtctgccgcctttcctcgggtcgctgacggcggtgagcatcccgtggaagacgttcccgccgccgtgctgccgacggtcggcggccgagccgaccggcgccagcaagtcctgcacgatgaactggcagacggcgccggagcccgtgctcctcagccggtggcccctccgccgcaggaactccctcgcctcgccgctgagctcgatcacctcgccgccgaccaccgtctcgttctcgtacaccaccacgttcggcaccagctgggccgccgtcgcgatgatgttcgtcccgccactgccgccgactactccggcgagctgtccgttctgcacagatagcactgcagtggtcagcatcggcgagtatatgcttgcctttagtatgatcgtcggcgtcatggaggagagaggccgttttcccggagcgatgaagttcgccggcgccggcgggaggtggtccggcgtccgctccgccggcacggagaagtcgtccatctcgttgttcagcacgatgcccgtcgacggcgacagcacgtgcgccccgaagtaagagttcaccgtcgtcgtcatcgccaccgcgttccggtcgccgtcgacgacgcagaggtggctcgtcccgtggtcattcagctggctccattttgggaagtagtaactgggagggaacgtagtgttgtcgacgatccgctgccggattttgtcggcgaacgccggcgagagcatctgggagacgttgccggcgacgttgacgtagtcagggtcgccgagagccatcctgatggccagcatgtgcttcagcgcctcgatgaaccggtgcacgccaagaaaccctttcaagaactcgagcgatttgtatccatccaagatgttcaaaaccagagccattccgactgtgccgctggaaggcggcggcatgccgaggaaagtgtatcccatggcgtcggcgcgcatggcgtcgctcacctcgaccttgtacgccctcaggtcgtccaccgtcgcgatgcccccggcgcgccgcacgtcggcgacgaacctctcgccgatggcgccgccgtagaacgcctcgacgccgccgctggcgacggcctcaagcgtgtccgcgagcgccgggttgcggcacacctcgccggcggcgaggatcctcccctgcggcgcgaacacggcgcggaggcccgggtcggcgagcacgtcccgctccgcctccttgagcgcgccggcgacgggcggcaccaccgtgaagccgtcccgcgctagcttgatcgccggcgcgaagaggtccttccacggcagcctgccgtagcgggaccacgcggcgtggaggccggcgagctcgccggggacgcccatggcgagcgcgcccttgtacttggaggtcgggttgcccgcgtacatgtccggcgtggccgcggccggcgcggtctcgcgggcgtcgaaggcgacggcgtcgccggaggcggcgtccctggtgacgatgaacgcgccgccgccgacgccgctcgacatcgggtgcaccacgccgagccagagcgccgccgccacggccgcgtccgccgcgtgcccgccggcgcgcagcgccgcggcgcccacctccgagcacctcccgtcgtccgccgccaccgcgcccaccccggcctccacctcgtgcgggctcagccccacgcccccgccgccgccgccggacaccaccctgctccgatcaccgccttgctccgctccccccgagctcaggagcagcagcacgacgcacgccacggcgagcagcgccacggcgatggcgagcgcggtccacgggcggcggcgccgactgccctgagaagaaaccgggccgccgccgaggagggggttctccaggccgccgcgcgcggccat

SEQ ID NO: 66836 - DNA, 6288 bp, Oryza sativa
  Clone ID: PAT_MRT4530_6774C.1
tacatagaatttacgtagttggtcaatgttccacgaatttgctagttcgcgatcgtcgccgtctgcgattttgaatgcgcctggccgcaagacttgtgtgatcgtgtagggtccttcccattttggtgagagtttgttttgccctgcttgggtttgaactcgtctgaggacatagtcgccgatcgaaagtatgcatgctcggatgcgcttctcgtgataacggcggagggcttgttgatagctagctgctcgaacggcaactcgctcacgatgctcctcgagaaggtttacatcgatgtctcgctgtttctcctggttctcgtcggaatgcttctgtactcgtgtactttgatgtcgtaactcgccggggaacatggcttcagagccgtacacgaggaagaagggtgtttccttattggatgttgtcagtgtggtgtgcatggcccatagtagggtttttatcccttgtagtactatgccgtttgccctttcgacttgtccattgctttgagggtgagagaccgaggcgaaacatattttgactcccaagccgatgcagtaatcctggaaatcggcgctgatgaattgagggccgttgttagttatgatgcggtgcggtagtccgtatctgcataatatacctctgatgaacttgatggcgttatcggccttgatttccccagtgggtactgcttcgatccatttggtgaatttgtcgattgctacaaataggaatctgtagccgccctgtcctcgtgggaatggcccaagtatgtctagcccccagcacgagaacggccaagtcagagggattgtctggagtgcttgtgcaggtagctttgtgtgcttgtatgtcgcatgcatctttaaggtcggttggccagaaaaacccttgtcgaaaggctttgccgaccaatgtccgaccggcggcgtgtgacccgcatatgccttcatgtatgtcgaggaggagttgtctgccgtcgtcggtggagacgcatttgagaagtatcccgtttggcgcttttttgtataaatcgttgccgaccatacagtagatctttgctttacgggttattttctcggcctctgtatcgtcctcgggcaactcctcgctgctgatgaatttgattaatgggatgcgccagtcatctgtggtttcaatgtcagcaacggcgcgttctgcctcggtgacctccaagctgatgtcgggggtactcgggccaacttcaccgctaacttcttttaccgatggctttgtcaggacgtcgagaaaggtgccgggttcgagcggttctcgtctggatgcacgtcgtgctaggtcgtctggctcgatgttgtccttgcgatagacgtgtcggacctcgatcccgtcgaacctcttctcgagcttcctgacttctgcgaggtacttggataactcggggttggtgcatttgtagtctttgtgcacctggtttgcgattagctcagagtcccctttgacgattagtcgcttggccccaagtgcggctgcagctcgtatcccggcaagtagtccttcgtattctgcagtgttattggttgccctgaagttaaggtggattgcgtgcttgaattgatctccggagagagatgtcaagataaatcctgcccttgctccttggctgttgagtgcgccatcgaacgccattgtccatgtctcattgtcaccttggttgtctgacttattatctggcatggtccaatcggccacgaagtcggcgagtatctgagatttgatggctgttcgcggcacaaagtggatatcaaattggcttagctcgactacccatttcgcgatgcggccgacaacgtctttgtttctcacaacttcgccaagggggaaggaggagacaactgtgactctgtgggcttgaaagtagtggcgtagcttccttgatgtcatgatgactgcgtagagcagtttttgaatatgtggatatcttgtctttgcgtcatggagagcttcgctgacgtaataaactggtcgctgtattttctctgtctcgacaacaatgacggtgctaacggaatatggcgtggcggtaatataaaggaataattcttcattaggttggggagcaacgagtacaggggggtttgataggtagcgcttgagtgcaataaatgcctcttcggcttcctgtgtccatacaaatttgtcttgtttcttcaataaggcgaagaaaggctgtcctcgttctcccatcctagcgacgaatctgcttaatgctgcgatgcatccggttagcttctgcacctccttgagtcatgtgggcggcttcatgttctcgattgctttgatcttctcgggattcgcctatattcctctgccagaaacaaggaatccgagtagcttgcccgacggtacttcgaacgtgcacttctctagattgagcatgaggcgatatcgtccgaggttgtcgaacgtttcccgcaggtcgtcaatcaatgagtcacttgtcttggttttgacaacgatgtcgtcgacgtaagcctcgacattgttgccaagctggttgctaagtgcgccctggaccgtacgctggaaagtattcccggtggttatcagtccgaaaggcatcttaacgtagcaaaataccccgaacggcgtgatgaacactgtcttctcttcgttctcttttgccatgctgatttggtggtagccagagtaagcgtcgaggaagcttagaagctcgcaaccggctgttgaatccaccaactgatctattcgagggagaggaaagtgatccttggggcatgccttgttgaggtctgtgaagtcgacacacattctccattttccgttggccttccgcaccataactgggttggctagccactctgggtgaagtacttctctaatgaagccagctttcaaaagtttgtcgagctcttcttgtatggcttgttttcggtctggtgcaaatctccgcagtctttgctttactagcttggcatcgggtcgcaccataagtttgtgctcaatcacctccctggggacccccggcatgtcgcacggctgccaagcgaacacgtcggcattatcgcggaggaatgtgatgaacgcgagttcagtcttgtcggggttagcactagagagcggaacgatcttgatggtgccgtctggctttggcgtcttatttggcttgctcactttcttaggtggctcagacgtggcgggtggggtgggcgtttgctcgaccatgtcgaggctccgcttgtcgcactgcaccgccagctttgcgttcccctaaatagtgattgttcccttcggtcccagcatcttgagcacttgatatgcgtagtgggatgtggccatgaacttcacaagtgcagttctcccgatgatggcgttataagctgtatcgaattcagcgacatcgaaggtgatcagggtgcagccccctgccacgtcgaacagacttcacgttccactttcttgtattctcgcttggaggagtacgttgtggaaccaccgaatatgtgtgagacgtggaggtcggagtctgggtacgcagaatccgattcgtgaggaggtgtctccttgttcttctcaacaacgcgtactcgcttgcctttttcaaacgccatgtgcttctcgagcgactttttgaaaacaaggcaatcctccagagaatgtctgtccgttttgtgtatggggcaccatgatttctttgtatcgctgccctgtcggtctgggcgcttgggagggttcgcgtattctgctgcgaggacttccgcttgagctttccttttcccgtttttgcgatttttcttcttgcttgactcagatgcgtctgcggatagtttcttctctcccccagtcttcggcttgtcgttcttgcgtcttagcgcgtcatccacatgggctcaccgctcaacgatctcgaataatcttcgagtagttgtgatgcgtcttgtcgccaactcctgggtagtgtagcgatctctgacaccagacttgaaggcgagaattacagaagcgtcggtaatctcgggaattgtgtttctgcactcgttgaagtgccgaacgtattccctcaatgattcccccgagttctgtgttaacgcatgtaagtcgtcttagatcgcgtggcgcttgtatgttccttggaaattggcgacgaactgttgccacaggtctgcccacgaggagattgagtagggaggaagatgcatcagccatgaacgcgcagaaccctttaacgcggatggtaaatagttcgccaacgcgttgtcatctgctccggcagcataaagcactgtcgagtagacttgaaggaattcttctgggtcggtgctcccatcataattttcaatggctctgggtcggaatctctcaggccatcggacatcacatagggaacgaccgaaagccctacacccagcactgggggcggtggtttgtcggcggtcgcgtgaccttcgtggatgtctgtccaacgatgaagaggacgcggatgatgacgatgacgatgggtcgcttggttctggcgtacgattacgaggatgacgacctggatcccgggcatcctgtcgttgtctctcgctgttgtctcggcgccgatcgccttcgtcgtcgtcgttgcggcgacggccatgaccagtattgtctggcccccgccgttcgcgatcgttgtagtctcggtcctcgtttgggcgatttcctcgatcatggcgtcgtgaagagacatgacgccgggagcgatttgcgtcgtcccatgtgcgtcgtgcttctcggcgatcattgatttgatctcgaagatctccaatgccacgaggtggaggggtagcctgtcgaggtaattccctccgctccggatctttaccattggtgtcgccgatcggtggctgatcttggtgtgctgcggtagcggcttcttcgaacgcattgctgaggttggtcaccgactcccgtaatcgttccgtccaacgctcgaggtcgtcgttcagaacgggatcgtaaggagtttccctctgtatggcttgaacaaccctgatgtgctgggctggagtagtcgattgatttgccgcctctgcattggcttgtgctgacgtgccaacgtcatcgatagccaatacctcccgcgacgcacttgttgtcgatgacccacagtcttcgaggagatgtaagaccgatggttcgtgggggtcgagatcgattaccccaacgaatcgatctgaggctggagtcgctccttgttccttgccgttatccctaacggggacgtatgacttaggagacggagttttcacggcgccgaggagaactttgcagctcgagaggtcgtgattctttgtcttgtggataggacaatagacatcccgagttagagaagtacgctgaattccgcgttctttgcaggcgcgaatttcagcacggacattgatgaatacctagcaatcttgaagggtatgtttcttggttttgtggataggacacaaagaccagataacttcggaagtcatctttgttggcccgtggtttatgtcggagggacaagacttggccgcatcagaatccttcacgagtttggatgtagtcgataatccgttctctgtttcaacgggtggatttttcgacatggagccgtcctggttcatagccactgcgttctcgtttccagtcattggaggaccggttgagatcggcatcgtggtgtaaaccgggaagacgatttcgccgacttgagtccataccagcattattgaagctgagagtgcttgactggagctggtgttgacgttgttgtcgacgaagcttgatggcatagtagtagaaccttgagtaccaagtgcccctacctggcgcgccactgtacgtagactggatatagagggtattggggtacgctggtacaaggatttcgtaggctgtgtgggttgtgttggctctgagattcgatcctctatgccctccccggggggtcccttttatatcgcaggtctggtggtctccgagtaggactcgaacacaccagacccagctcaatacgtaggtaacccagttcttatccgagaaggactcttcccgtctattgatttcgtgagaagttttcttagattatgaaggaaatatccacgtacgcgtgggtatgccatgtcgatacgtaacgtatatcgaagggtagagggtatgccagacccgtaaccctcactcaacggtgatgtaggtcggagctgatccgtgcattgcatgaatccgccaaagaaatccagtatagtctgcactggatttctcttcttggttgaacgtactcggcgcat

SEQ ID NO: 66837 - DNA, 2019 bp, Oryza sativa
  Clone ID: PAT_MRT4530_67750C.1
gcacgaggcaccaccccacgttcgagccttcggggccgcgacttcttgcttttccgccctcgccaccacatcgacacgccgagatccgccgttgcatcgcctccaatcgagcccgctcacctcctgcatcaccagcaccactctccgcctccctggccgccgtcgcgccgggtcgagtgccgctcgcgtgcgcgcctccttccccaccgccgattggattcttgtgcagaaatccatcaattcctcaatcctcactagacacatcaacgctccaactccaggctagagaagagcagaaggcttgcggagaagaatggcttctgccgagcgcagcaagaagctgagggtcctgctcatgcccttcttcgccacaagccacatcggcccctgcaccgacctcgccgtccgcctcgccgcggccagaccggatgtcgtcgagcccactctcgccgtcaccccggccaacgtctcggtcgtccgatcagccctcaggctgcatggctctgcggcgagcaccgtggtcagcatcgccacgtatccgttcccggaagcggccggcctcccaccgggcgtcgagaacctctccaccgccggcgacgaaaggtggcgcgttgacgccgctgccttcgacgaggcgatgacatggccagcacaggaggcgctcatcaaggaccaatctcccgacgtcctcatcacagacttccacttctcgtggaacgtcggcatcgccgaggaactcgccatgccctgcgttcaactcaacgtcatcggtttattctccacgctcgccgtataccttgccgctgccgtcgtgaatgactccgattcggaggagctcaccgtcgcagggtttccggggccggagctacggatcccgaggtcagagttgccggatttcttgaccgctcatcggaatctcgacttagtggacaatatgcgcaagttggtacaagtgaacacgaggtgccatggcttcgccgtcaactcgttcttgttcctggacaagccatactgtgagaagttcatgtgcaacggcttcgcgaagcgcggctactacgtcggtcccctctgccttccgcagccaccggccgtagctagcgtcggtgagcccacttgcatcagctggttggactcgaagccgaaccgatcggtggtgtacatatgcttcggcacatttgctcccgtctcggaggagcagctccatgagctggctctcgggctggaagcctccggtaagccgttcctttgggcggttagggcggccgacgggtgggcgccgccggcggggtgggaggagcgtgtcggtgacaggggattgcttgtcagagattgggtcccgcagacggcgatacttgcccactcggcgacggcggcgttcttgacgcactgtggctggaactcagtgttagagggtgtgacggctggtgtcccgttgctgacatggccgctggtgttcgagcagttcatcacggaaaggctggtcatggacgtcctgcggattggggagagggtgtgggacggagcacgaagtgtacggtacaaggaggcggcgctggtgccggcggcggcggtggcgcgggccgtggcgaggttcttggagcctggaggggcaggggacgcggcgaggatcagagcgcaggatttcgcggcggaggctcatgcggccgtggcggaaggtggctcttcgtatggagatctgcgcaggctcatcgacgatcttgttgaagcaagggcggacgccggcgagtccgcgctgcaacctctgtaacctgtcgtttctctatacgataccgagacattcgttccagactccatccagttcatctcgttctgttgcgttcaatcaaaataaattacgatgtgatgtattgatacatgggatcacctatatatttgttgatataattttttaaaaaatttgacagatgtaattatagtataattgtgatataattacactgtaacttatatgtaacttctatgaaactttcaaaaatatcttgtaatataatattggtg

SEQ ID NO: 66838 - DNA, 623 bp, Oryza sativa
  Clone ID: PAT_MRT4530_67751C.1
ccatataaacttgttcagctttcacatgaatcgtgtaagaatttcggctgtctaaacgggggcctaatcgatgccgtggcgcgccatgcatgcgccatcacattccggcaggtctgccgcctttcctcgggtcgctgacggcggtgagcatcccgtggaagacgttcccgccgccgtgctgccgacggtcggcggccgagccgaccggcgccagcaagtcctgcacgatgaactggcagacggcgccggagcccgtgctcctcagccggtggcccctccgccgcaggaactccctcgcctcgccgctgagctcgatcacctcgccgccgaccaccgtctcgttctcgtacaccaccacgttcggcaccagcttgtggtagactctgggatgctggacggcggcgagcgggtgcatgccgacgatgaaatggttcacgaacacctgggccgccgtcgcgatgatgttcgtcccgccactgccgccgactactccggcgagctgtccgttctttagtatgatcgtcggcgtcatggagaagagaggccgttttcccggagcgatgaagttcgccggcgccggcgggaggtggtccggcgtccgctccgccggcacggagaagtcg

SEQ ID NO: 66839 - DNA, 1930 bp, Oryza sativa
  Clone ID: PAT_MRT4530_67752C.1
caattcaaatcatacaatttttttgcagaatttttcatataaacatgttcactttttcacatgaatcttgtgagaattttcggtggtttaaaaggaggcctaataggcgccgtgacacgtcatgcatgcgtcatcacatcccggcaggtctcccgtctttcctcgggtcgctgacggcggtgagcatcccgtggaagacattctcgtcgccggcggcggcgaccggcgtcagcaagtcctgcacgatgaactggcagacggcgccggagtccgtgctcgtcagccggtggcccctccgccgcaggaactccctcgcctcgccgctgagctcgaacacctcgccgtcgaccaccgtcacgttctcgtacaccacctcatttggcaccagctggaccaccgtcgctatgatgaacggcccgccgctgccgccgacgacgccggcgagctgtccgtccacgatgcccgtcgacggcgacagcaggtgcgccccgaagaggtggttctccgtggtcgtcatcgccaccgcgttccggtcgccgtcgacgacgcacaggtggctcgtcccgtggtcatccagctggctccattttgggaagtagtagctgggagggaacgtggtgttgtcgacgatcctctgccggagtttgtcggcgaacgccggcgagagcatctccgagacgttgccggtgatgttgacgtagtcagggtcgccgagatccatccggatggccagcatgtgcttgaacgcctcgatgaaccggtgcaagccaagaaatcctttcaagaactcgagtgatttgtatccgctcaagatgttcaaaatcagagccaccccgacgccgccgctggacggcggcggcatgccgaggaaggtgtagcccatggcgtcggagcgcatggcgtcgctcacctcgaccttgtacgccctcaggtcgtccaccttcgcgatgccgccggcgcgccgcacgtcggcgacgaacctctcgccgacggcgccgtcgtagaacgcctcgacgccgccgctggcgatggcctcgagcgtgtcggcgagcgccgggttgcggcacacctcgccggcggcgaggatcctcccctccggcgccagcacggggcggaggcccgggtccgcgagcacgtcgcgctccgtcttcttgagcgcgatctcgaggtacggcaccaccgtgaagccgtcgcgcgccagcttgatcgccggcgcgaagaggtccttccacggcagcctgccgtagcgggaccacgcggcgtggaggccggcgagctcgccggggatgcccatggcgagcgcgcccttgtacttggaggtcgggttgcccgcgtacatgtcagaaatggacattttctgaagcgatctacaatatttcaataatataatcaatgtccatttctgaatagttctgaagactgaagcagagttgtagcttgaataattctccaaacacagccttaatagcggcgtggccgcggccggcgcggtctcgcgggcgtcgaaggctacggcgtcgccggaggcggcgtccctggcgacgatgaacgcgccgccgccgacgccgctcgacatcgggtgcaccacgccgaggcagagcgttgccgccacggtcgcgtccaccgtgtgcccgccggcgcgcagcgccgcggcgcccaccttcgagcaccgcccgttgtccgttgccaccgcgcccaccccggcctccacctcgtgcgggctcagtctcacacccccgccgccgccggacaccaccctgctccgatcatcgccgcccgagctcaggtgcagcacgacgcacgccgccagggcgagcagcgccgcggcggcgatggcgagcgcggtgcacggacggcggcgccgactgtccggagaagaaaccgcgccgccgccgaggagagggttctctaggccgcctcgcgcggccat

SEQ ID NO: 66840 - DNA, 198 bp, Oryza sativa
  Clone ID: PAT_MRT4530_67753C.1
atgccgatctaccggattgagacaaagcgaaaaaatatcccagatctacaacagaagatgggaaataaagaggatgagcgtagggcacgggggcggaagcagcaggacgtcgggacggctgctcgcgggatggagattggcaaggagactattgccgaggccgaggagatggggagattgactgggcgcgaggagtga

SEQ ID NO: 66841 - DNA, 868 bp, Oryza sativa
  Clone ID: PAT_MRT4530_67754C.1
cgtctcgtctcgttccactgcttcaccgcgagcgaaaggggagagttggggttttgcgagcgagatcgagcgatggcgacggggagcggagcagcggcggcggcggcggcggatgcggaggagaaggagagcggcagcaggatgatcaccctgacgagcaacgagggcaaggcattcgttgtgacggaggcgtcggcgaggcagtccgcgaccatcaggagcatggtcgacgacggcggctgcgtcgacaagggcttcccgctccccaacgtcgactccaagaccctcgcgagggtgatccagtactgcgacgagcacggcaacaaggagccccacaccgtcgacgagagagcggcgctcgccaagttcgacagggacttcatcgccgagctggacgccgacaaggccttcctctacgacgtcaccatggccgccaactacctccacatccaagggctcctcgccctcaccacccagtgcgtcgccgacaccatcaagggcaagacccccgaggagatccgcacggccttcggcatcgagtacgacctcaccgcgcaggacgagaaggagatcaaggaggaggatactcacgcatgacgcaccagctagctgcccccgtaagccgtagtgtcctcgtcgtaacgattgttctctcgtagttgcgcgttgtgtctctggtggattcagatccaatcaagcttactgcctttgagttcgtgcatcctgtgtccaagtagaagtgtagaactgagtcggctgtgtcgttgaatgcttttgcaactgctggatcgcttgcatgaagtgaatattttgccccgaaaaaaaaaaaaaaaaaaaaaaaaaaaaaaaaaaaaaaaaaaaaaaaaaa

SEQ ID NO: 66842 - DNA, 351 bp, Oryza sativa
  Clone ID: PAT_MRT4530_67755C.1
atggcggcacatgtggaaggaaagaaaccacaacacaaatattccaaaaaaggtagaaaaagtgatcgaatcgaacggcaaatgtgtatagacaaagagaagagaacaatcaaaagcaagcgagagcaatcaaaatgtgagggcagcgaggttgttcacccaactagctccgacaaggaaaggaatagtaccatcatatcggtcgtcgatttcactgtcgcgatggattactgtgtatcaccatcggtcgtcgtcgctgtcacacaaacgggaaaagggattcgatttggacagccccacacagcaggcgacattactacaggtcaggtcaatggacgccaccgaccaaaa

SEQ ID NO: 66843 - DNA, 643 bp, Oryza sativa
  Clone ID: PAT_MRT4530_67756C.1
atgggatgctctactgtttcatcacctgccctgccatggagtaaaaacggagggaagggattactgatcattgaaggcaaagggattccctctcgtacagagaagttcggttcgcgatccacttgtccgccccagaagtccaaaccagaaaccgaaccaaaacccacgtcagaaccaaacgtgggcagcgcgaccgacccccaagtccgccaaaaggccccagatgtcaccaaaaccacttggcaaactccccaagcggccacgctcgtcacgactcacgactcacgacacggaaaagcctgcagcgagcggcaaacccaccacgcggagccaaaaaaccccaccgcgcgcaccgcaccacccccgctccactcggcctcgcgcggcacacagggccgatcgagccaaaaacccatctactcgttcacaacccatctgctcgttcatgcgaccgcgcggggcaccgtcctcctcgccgagtcgtctccacggcacggcggtgacggcagctgcaggggccacgcgcccacgcccacggtatcgcgggttaacgaggcacgcggcggccgcctcgcgattcgcacccgcggaaaggagccatcaaaaccgcgggtcggctgcggcctgcgtgcctgcgctttcg

SEQ ID NO: 66844 - DNA, 312 bp, Oryza sativa
  Clone ID: PAT_MRT4530_67757C.1
atgcggctgctgcttgtggcggcggcggcggcgttggttgctgctggcgcgtgctttcaggccggcggtggccgccggccgccgccgccaccgccgccggtggagctcggtgcatcaatagtagtgctgtcgccaacgacgacgacgacgacaagtggtggtggagtgaatctgcaggctgacgccgcggtgccggagacggagacgaagcggccagtgcgcggcgtcgtcggcgtcgctgttgatcaggagacggattatgggtcaaccgatgaggctcgggatagattaaccatctcaacacttaattga

SEQ ID NO: 66845 - DNA, 278 bp, Oryza sativa
  Clone ID: PAT_MRT4530_67758C.1
gccgcgccacgtcgtcacgacggacgacgtgcgggcgaaggaacaactaaacaataaaaacattggcatgatcatgaacatgccctagtgtgctaaagtgctgaccagagatatagtggtcacgcgtttccctgcttctagacgaggtatttactgtctctgagatggagtacgcgtgacgtacagtgttgagagtaccgacgaccgtgttcgtgactcgttgtttgagtctttgttttacttcttttcgccccctaactacgcaggctcattcttgc

SEQ ID NO: 66846 - DNA, 2451 bp, Oryza sativa
  Clone ID: PAT_MRT4530_67759C.1
atggagagtttctcagctgttgttgggccaaatggcagcgggaaaagcaatgtcattgatgcgatgctgtttgtgtttgggaagcgtgcaaaacagcgagtgctagatgccaaagttggcatggctgttgagggcagtgattttatcatcacaagagttgctttccgtgacaacacttctaaatactacataaacgaccgtggaagcaatttcactgaagtaactaaactgttgaagggcaaaggagttgaccttgataataatcgctttttgatccttcagggtgaggttgaacaaatctccctgatgaaaccaaaatctcaaggtccacatgatgaggggtttctagaatatctggaagacatcattgggacaaatcagtatgttgagaaaattgaagaagcttccaagcaattggaaatgctcaatgaaaaacggacagcatctgtgcagatgctgaagttggctgagaaggaaagagataacttagagagtgcgaaaaatgaggctgaaacatttatgctgaaggaactcttacttttgaaatggcaagagaaggcgaccacattggcttctgatgatgctacctcacacgttgctcagctgcaagagaatgttgcagacttggaaaagaaccttgcctctgaaagggaaaaaattcagcatagttctcaaactctgaaggaaatggagtctgtttacaacaaacatgctaaaaggcaagaggaccttgaaaataatatgaagtcttgcaaggatcaatttaaagagtttgagagaaaagatgtaaaatatagggaggatttgaagcatcttaaacagaagattaagaagctggaggacaaaactgaaaaggagaaagtaaaaacacctgaaggggttccacgcctctttgatctagtaaaggttaaagatgagaagctcaagttagctttctttgccaccttggggaacactattgttgcaagtgatcttgatcaggctactcgaattgcatatagtgcagccagtgaattccgtcgagtagttacccttgatggtgcactttttgagaagtctggtaccatgagtggtggtggtagcaaaccaagaggtggcaagatgggcacatccatccgggaaagtatttcagaagaggctgttgcaaatgctgaaaatgatcttaataagctagtcgatcaactcaacaggttacgtgaaaaaattaatgatgctaaaaaaggttaccgggccctggaagatgccaaatcccgttttgagatggaactggcaaaagctaaaaaggagcaacttgacaaaacaagctcagatatcaaccgccacaaagttagaattactacatgtgagaagttggtgaaaaaattaaccaagggcatcgaggagtctaggaaagaaaaggaaaagcttcttgctgaaaaggagaagatgatgtctattttcaaagagattgagaaggcagcttttactgttcaagaagattataagaaaacacaagagatgatggacaaccataaagatgagcttgacaaaacaaaggtagaatacaacaaattaaagaaagcaatggatgaactgagatccagtgaggtcgatgtggaatacaaactgcaagatacaaaaaagcttgccaaggagtgggaaatgaaggtgaaggcattcaggaaaaagcttgatgacattcagacaaatcttgttaaacacatggatcaaattcaaaaggatgctattgatcatgagaaactgaaagaaacattgagtgacgagcaattcaatgaggcgtgtgacatgagaaaagcagttgagatggtggcactgttggaagccctgcttaaagacttgagtcctaacctggattcaatagcagagtaccgcacaaaggctcgtgtatatggtgaacgcgttgatgagctaaatgccaccactcaggagcgtgatgatcttaaaaagcaatacgatgcattgaggaagagaaggttagatgagttcatggcaggattcaacataatatctttgaaactgaaggagatgtaccagatgattacgcttggaggtgatgctgagctggaacttgttgattccttggacccgttttcagaaggtgttgttttcagtgttagacctcccaagaaaagctggaaaaacattgccaatttatctggtggcgaaaagacgcttagctcactagctctggtgtttgctcttcaccattataaaccaactcctttatatgttatggatgagatagatgctgcgttggactttaagaatgtctccatcgttggacattacgtgaaagaccggaccaaagatgctcagttcattattatcagtctcagaaacaacatgtttgaactagctgataggctggttggcatctacaagacggataattgcaccaagagtataaccatcaatcccggaagctttgcggagagcatgaaggtagtttag

SEQ ID NO: 66847 - DNA, 3084 bp, Oryza sativa
  Clone ID: PAT_MRT4530_6775C.1
tcagtagggcgggagatgcatcagccatgaacgtgcagagccttttaacgtagttggcaaataattcgccaatgcgttatcgtctgctccggcagcgtagagtactgtggagtagacttgaaggaactcttctgggtcggtgctcccatcgtacttttctattgctccaagtcggaatctctcaggccatcggacatcacgcagggaacgactgaaagctctacacctagcgctggggacggtgggttgtcggcgatcgtgtgtccttcgtggatgtctgtctgatgatgaagaagacgaggatgatgacgatgatgatgggtcgctcggttccggcgtacggttacgaggatgtcggcctggatctcgagagtcctgtcgttgtctcccgctgttgtctcggcgacggtctccatcatcgtcgtcattatggcgacgtcctcgactagtatcacctggcacccgccgttcgcgatcattgtgatcgtggcggtggtggcggttatcatagtctcggtcttcgtttgagcggtctcctcgatcttcgttatcatggcgccgtgaagagacatgacgccgggaacgattctcgttgtctcgtgtgcgtcgtgcctctcggcggccgttgaggtgatctcggagatcgccagtgccgccaggtggaggggtagctcgatgaggcgattccctccgttcagggtcttcaccattggcatcgccagttggtggctgctccgggtgcgctgcggcagcggcctctccgaacgcgttgctgaggttggtcactgattcccgtagtcgttctgtccaacgtgcgagatcatcgttcagaacaggatcgtagggggttttcctcagtatagcgttgacggctctgatgtgctgggctggagtggccaattgattctccgcttctgcattggtgcgcgctgacgtgccgacatcatcgatagccaatacctcccgcggcgcgctcgttctcgatgatccatagtctacgagaaggtgcaagactgatggttcgtggggatcgatatcgattaccccaacaaatcgatctgaggttggcatcgctccttgttccttgtctttatccctgatggggatgtgtgactgttggactttaggagatggcgctttcatggcgctgagaaagaccttgcagctggagaggtcgtgattctttgtcttgtgaataggataatagacatcacgagttggagaaatacgctgaattccacgctctttgcaggcgcgaatttcagcgcggacgttgagaaaaacccagcaggcttgcaaagtgtgtttcctggttttgtggataggacaccaggactttgtcgcttcggaagtcatcttcatcggctcacggttcatgtcgggacaacaaggtttggccgcattagaatccttctcgagctcggatgtcgtcgatgttccgttctctgcctcggcgggaggatctttcgacaaggagtcgtcttggtctgtagccactgcgttcttgtttccagtcattgatggaccggctgagatcggtattgtggtgtaaaccgggaagacgatttcgtcgacttgagtccacaccagcattgttgaagcagggaatacttggttgaggttggtgttgacgctgttgtcgacgaagctggatgacatagtagtagaaccttgagcaccaagtgcccctacctggcgcgccactgtcgacgggtgatacccgtagaccggatatagaggatattggggtacgttggtacaggatcttacacgatacattgacgacccagccttgtccgagtagaactctttccatccgtaaattccgtgaaggatttccttaatgtgtgcagagaatatccgtatgcgcgtgggtatgccataccgatatgcgacgtatatcgaagggtaaagggtatacctaactcgtaacccttcctccaatatgccgtccatgaattcaacgtctcctgtcctcgggaactcatttacgttaatgttgtcaagatctacctgactaatattgcttagcatagtttctctgtgagggtaaaggtcattggagatggaagcagaatagagtctaaaatatttcctgcccaagacatgtagccattttggatatggccacaaccttttatcggaatatgagctttggtgcagtgcaaacattccagtgatctcaaaacagagtgggtgatctacgcgttggatgaataccagtatctgagggtttccctgagcaaaaaggttatgatacaggtcatgatgcaatggtgtaaccgtcccttcagggccaaaccaggcattgagcttttggagttccccaccaccagcgttacaatattcaggaaccattatgtcttcacggagctcttttatctcaacaggaacagtccgatctcctgcaatcctctctaggtatcttatgtccttccactttgtccgtgcaggccagtgatcgatgtagccactgagtataacaggggactcacataaaaagtaatcacgtataaatgcctccaaagaaatgcatgatcgcctctcgatttgcttacaagataaggacttcactggcagaactttgagcacatcggcgaggtctcgtttcctggttaggccttccatccatttctcaacatcagctccgttctctccggcgccgtcgccaccaccgccaccgcagccgcggctacggtcggcgaccacccgcgcgatggcttcctccagctcggcgcggaggaggtcgccacccatgatgaggcccatgtcgagcgcccggagcgcggcgcgtcggccgtcgccgccgccgccggcaacgcggagcgcggccacgtggaggcacgcgagcgcgtaggcgtccctccacgcgcgcccgacctcgctccgcgggcacgcgtgcagctgctcccacgccatctcccgcgccgcctccgccgcgcggaggtccccgtcggccgccgccttctccgccgacgccacgaacgcgaacccgccttcctccgtgatctccctcagcagcgccgcccgcttctccccgccctccgccgccgccgccgcccgcggctcgccgccggtggccat

SEQ ID NO: 66848 - DNA, 1766 bp, Oryza sativa
  Clone ID: PAT_MRT4530_67760C.1
ctacttcttttcacttaacttattttgtgcatttgtacaatggcgattttttttttttttttttgaaatctggaatgctacttcttttcactgaactcattttgtgcatttgtacaatggcgatgcaactgcatcctgaggggaaaaagatacatacagaaagggtgaaacagaaaaaaaggaaccccctttggtcttctaacttatggaacatctttcattcctgtatacaaagtgtgtttgggttttctacaatcttcttggagaatcaaatggtggtgctttcagttgagagatttcgagccatggatctggaacatggttgcttggtctttttgggtagagtgcattgttgatagggctgtagttagctgctccagctgaataggctggatgaggaggcgacggcatgcaactccgattcgacctgccggtactgcggtaatgggctagagcaaggtgacaccgggcagggaccatgttcatacgcacattggatgggttggatggcagagatcctgcgagttgaaatcggaaggaattcctttgaaggacttgatagatgtgtgcgctgatatatgcttggccatcccaaaatcagcaagtttgatgtcaccattaggatctacaagtatgttggcccctttgatatccctatgcactgtattccgcccatgcaaatatgcaaggccagaaagaatttgtgctgtgtaattccgaaggactgcctccccaaatgcaccatactcttgaagcaacttatggatagagcccccagaaacatactcgagatagactgaaagcgtctcactagacagatcactgccatagtactgcacaatatttggatgtgacaactgactcagaagcacaatttcctgatgtagctgcctgagacactctttcgagttagaatcatcagaaataaccttgacctctttaattgcacacatttggccaccttcactgttaaatccttggtatacttgcccaaatgtaccactgcctaacaacttgcccttcttccactgtgaactgacgacacgtgatgatgagcatggggagcccggaggacgaggaagagggtgaggtgagcttgagcttcgtgaatcatcctgccgagcagtgggggatcctgggcattgcccgaatgctcttgattgcacaggggaggtcggacagggaatttggccttttgagccagggggagagattggcactcttgtactgaacacaatctccgttgatttccgaccatggcaatacgcagttcgatcgtttgaaagatccaaattgtgaaggtaagattctttccttggagaaactgaagtttcagacaacctgggatgctccaaaccctggttgtttgcgaaaaagcgtccttcttcaaccgcaagattttgtctccgagaatcaatagccagcgttctgcctggaagcacatagcttgcatctggcaccctgtaagtcccgagatccggcggctcgtcggacgccgccgacgagccgagcgaggagctgccggcgctggacgccgaggcggacccggccgcggacgaggacgccgccgacggcgccggcagcgacgccggccgcggcagcgggtgcccgaccaccaccacctccttctcctcccgactctgcttcccggctaggagcgcctcgtcgaagctccccgccttcctcctcccctcctcctcctcccccgccgccgccgatccccctttccccttcttccccttccccctcttccaccacgccggcat

SEQ ID NO: 66849 - DNA, 291 bp, Oryza sativa
  Clone ID: PAT_MRT4530_67761C.1
gagaaaagaaacaatattcttgacgtggcagggaaccacttacattaagccctttgagtctacaaatacaccctaacttgccaactattttaaatggaagaagttgaatcggggagtaccaaatacccatactttttggagtaaactcactcaatttaacatggcttactccttttgaaactcgaaaatcgctgaacaatcacatttccacatcacagcaatccttgtaagccacaactcagaacgaacaacatttctggtaaaaacttgatcctagcatctaaaacgtgt

SEQ ID NO: 66850 - DNA, 4126 bp, Oryza sativa
  Clone ID: PAT_MRT4530_67762C.1
tcagcccaacatgagccccatataagttcgcacacgaaagcagcgcatcgctcgtaatccagcccaactccagagtcttccttttggtattcccctctcggccgcttcgacttttccccaaaatccccccaccgccaccgcctccgcctccaccgccgacggcccgagatctgcgcgcctccaccgccgcggccttcgtcgggcccggagcacccgcgccgcccggtcgccgtcgctcggagttgcgcgcgcgcggtcgccgtcgtcccgagttgcgcaccgcttggtcgcctttgtcctcgagccgccccccttcagccggtgccgcccttgctgggcgagtgatcttccggcgggcgggcggcggcggcggcggctctcgcggtccggtcctcccttgctgctgcggtcaggcatggagagttccccgccgaggtcacccgcgccctcgccagggagggcggggaggccgcggctgttcataaaggagatggtcctccgcaacttcaagtcgtacgcaggggagcagcgcatcggccctttccacaagagtttctcagctgttgttgggccaaatggcagcgggaaaagcaatgtcattgatgcgatgctgtttgtgtttgggaagcgtgcaaaacagatgcgcctgaacaaggtctcagaactcatacacaattcttctaaccaccagaatctagacagtgctggggtctccgtccattttcaagaaatcattgatttggatgatgggaactacagggctgttgagggcagtgattttatcatcacaagagttgctttccgtgacaacacttctaaatactacataaacgaccgtggaagcaatttcactgaagtaactaaactgttgaagggcaaaggagttgaccttgataataatcgctttttgatccttcagggtgaggttgaacaaatctctctaatgaaaccaaaatctcaaggtccacatgatgaggggtttctagaatatctggaagacatcattgggacaaatcagtatgttgagaaaattgaagaagcttccaagcagttggaaatgctcaatgaaaaacggacagcatctgtgcagatgctgaagttgtctgagaaggaaagagataacttagagagtgcgaaaaatgaggctgaaacatttatgctgaaggaactcttacttttgaaatggcaagagaaggcgaccacattggcttctgatgatgctacctcacacgttgctcagctgcaagagaatgttgcagacttggaaaagaaccttgcctctgaaagggaaaaaattcagcatagttctcaaactctgaaggaaatggagtctgtttacaacaaacatgctaaaaggcaagaggtattggaaaataatatgaagtcttgcaaggatcaatttaaagagtttgagagaaaagatgtaaaatatagggaggatttgaagcatcttaaacagaagattaagaagctggaggacaaaactgaaaaggatacatcgaaaattgatgaatcaacaaaagaggttgaagaatcatccagtttaattccacaactagaggaagagatacccaaattgcaagaaaaatttaatgaagaagagaaggtgctggagcaaattaaagaaaactctcgaggtgagacagagagacttcgttctaaacttactcaagtaaggtctgaacttgaaccatgggaaaatcaaataattgagcataaaggaagcttagatgttgcatctgctgagaaaaaattaatgaaagagaaggtttgtcctgctttgtatttcttttctaatgctcaaaaccagatggaaagcattaaagagcaaatcaaagcgaaggatacatatattatggagcttcaagaaaaaatagagaaacaccatagtgaagcaaatgaggctcgtaaagttgaacaggaatgcctaaaacaggaagagtcacttattcctcttgaacaagcagctaggcagaaagttgctgagattaaaaccacaagggattctgaaaagaatcaaggcactgtcttgaaagcaattttgcaagctaaggaatcaaaggaaatagaaggcatttatggcaggctaggtgatcttggcgcaatcgatgcaaagtatgatgttgccatatctacagcatgccctgggcttgattatattgttgttgaaacaaccaattcagctcaagcttgtgttgagttattacgcagaagaaatcttggaattgcaacttttatgatactggaaaaacaaacacatcatcttcgtaagctacaggagaaagtaaaaacacctgaaggggttccacgcctctttgatctagtaaaggttaaagatgagaagctcaagttagctttctttgccaccttggggaacactattgttgcaagtgatcttgatcaggctactcgaattgcatatagtgcagccagtgaattccgtcgagtagttacccttgatggtgcactttttgagaagtctggtaccatgagtggtggtggtagcaaaccaagaggtggcaagatgggcacatccatccgggaaagtatttcagaagaggctgttgcaaatgctgaaaatgatcttaataagctagtcgatcaactcaacaggttacgtgaaaaaattaatgatgctaaaaaaggttaccgggccctggaagatgccaaatcccgttttgagatggaactggcaaaagctaaaaaggaggttgagagtatgaatgcacaatttagttacaacgaaaagcgacttgactctctgaaagctgcatcacatcccaaagcggacgaggttcgcagaatggaagagctggatgatatcatatctgctgagcaagctgaactaaatagacttgctaaatgttccagcaagctcaaagatcagctacagcagaaaattgaaaacgcagggggacaagtgctcaaggatcagaagctaaaagttgcaaacatccaatctcaacttgacaaaacaagctcagatatcaaccgccacaaagttagaattactacatgtgagaagttggtgaaaaaattaaccaagggcatcgaggagtctaggaaagaaaaggaaaagcttcttgctgaaaaggagaagatgatgtctattttcaaagagattgagaaggcagcttttactgttcaagaagattataagaaaacacaacagatgatggacaaccataaagatgagcttgacaaaacaaaggtagaatacaacaaattaaagaaagcaatggatgaactgagatccagtcaggtcgatgtggaatacaaactgcaagatacaaaaaagcttgccaaggagtgggaaatgaaggtgaaggcattcaggaaaaagcttgatgacattcagacaaatcttgttaaacacatggatcagattcaaaaggatgctattgatcatgagaaactgaaagaaacattgagtgacgagcaattcaatgaggcgtgtgacatgagaaaagcagttgagatggtggcactgttggaagccctgcttaaagacttgagtcctaacctggattcaatagcagagtaccgcacaaaggctcgtgtatatggtgaacgcgttgatgagctaaatgccaccactcaggagcgtgatgatcttaaaaagcaatacgatgcattgaggaagagaaggttagatgagttcatggcaggattcaacataatatctttgaaactgaaggagatgtaccagatgattacgcttggaggtgatgctgagctggaacttgttgattccttggacccgttttcagaaggtgttgttttcagtgttagacctcccaagaaaagctggaaaaacattgccaatttatctggtggcgaaaagacgcttagctcactagctctggtgtttgctcttcaccattataaaccaactcctttatatgttatggatgagatagatgctgcgttggactttaagaatgtctccatcgttggacattacgtgaaagaccggaccaaagatgctcagttcattattatcagtctcagaaacaacatgtttgaactagctgataggctggttggcatctacaagacggataattgcaccaagagtataaccatcaatcccggaagctttgcggagagcatgaaggtagtttag

SEQ ID NO: 66851 - DNA, 299 bp, Oryza sativa
  Clone ID: PAT_MRT4530_67763C.1
gccacgcgaggtgcaacccgagcacgcttggctgcgtatatggtcatatgcaacacatggagtagcctactgctagctagtgccggagtgctcgcagctctagatgatgcaatggatgacggagtcgcatttcggtgcctgtacattgatgctgatgaggatacatttggcgcgctgcatgcgttacaacaagtgattaccattgagcatgctgggggacactatggccctcgaccacaaggtattggcaatacagctcctagtggtattacagacgcagcaagcaagatcgatcggtc

SEQ ID NO: 66852 - DNA, 1912 bp, Oryza sativa
  Clone ID: PAT_MRT4530_67764C.1
atggatcctatcgccaccgcctcttggccgtcgacgtcggcgtcgtcgtggccgcggtcggtgaggcgccgcgtgccggaggcggaggaggagagggagctcgggcggcgggtggaggagatggaggaggcggtggagcggctgcgggcggagaaggaggcggccgaggcggaggagcgggacctccgcgccgagctggacgcggagcgcgccgcggcggagacggcggcgagcgaggcgatgctgatgatcgagcggctgcagcgggagaaggccgccgcgctcttggaggcccgccacttccgccgcctcgccgacggccgcgccgaccgcgacggggagctccaggacgagctcgcctccctctccgcgctcgccgcctcctacctctccctcctccacgcccacggcatcgaccccgacgacgacgacggaagcaaccagcaagagcagctgcagcctcccgtcgaacacctggacgcggaggcagacagggagagccgctcggtggttgcgtcgccgcctccgtcggagaaggtgttcgcgtacgcggccgcgacggcgccggccgcggattgcggcgccgaggtgacggagaatctgtacgcgagggtggaggcgctcgaggtggactggtcggcgatgcggagggaggtggcggcgctgcgggcggagcgcgcgcaggcggtgctggcgagggaggtggcgcggaggctgtgccgggaggcggcggtggccggcgagaggggcgccgtcgccgtggcggcggagaggccgaggttctcggtgctcgccgtttgcaaggagaaagagatgtcatactgccaggagaaagagtctgactcttgtcgactacgcttctctgcctgcttctactcgtcgacaaatccgtcccgctgcatcgacgacgacggccaaggacgggacaggatgtggtggtggccggcgttcctgtacccgccgccggcgccggcgttcgtggcggcggcgtcggtggcgcagttcgcgttgctggcgaacgccgggctcggggagctccgcggcgagcacatggcctactccaagttctggcaggtcgtcgccgggaagaagaagaacggcggcggcggcggcggcggcgcgctgctgcccagccggcaggggatgctggtggcgtacgtgccggcgttcgtcgccgcggcggcgtcgttcgccgtgcccggcgccgtggtgggcgtgcgcgcccaggtcctcagcgccgcgctcaccgtccactttctcaaacgaattctcgaggtactgttcatccatcagtacagtggaagcatgccactcaacacggcggccaccatctcctccagctacctcgtcatcaccgccaccatgatctacgcgcagcacctcgccgccggcctcccggacccgccggtcgacctcctctaccccggcgtggccgccttcgccgtcggcatcgccggcaacttctaccaccactacctcctctcgcagctgaggaacgcagccggcggcagcggcggcggcgagaggcagtacaggatccccaccggcggcctcttcgggctcgccgcctgcccgcactacctgttcgagatcgtcggcttcttcggcttcgccatgatcgcgcagacggcgcacgcgctcgccgtggcctccggcacggtggcgtacctcgccgggaggagctgcgccaccaggaggtggtacgagtccaagttcgaggatttccctgatagcatcaaggcgttggttccatatattctgtaaatctttttcattttgatgaaaaattatgtaaaatgaataaatactggccaagaaatatcttaggcttttcgtcgcttcgttttgaatttagactaactgtgacttgtggctatgcatgcaatgaaaccaataattaaacgtgagggcc

SEQ ID NO: 66853 - DNA, 186 bp, Oryza sativa
  Clone ID: PAT_MRT4530_67765C.1
atgaaaaaacaacgtcatgcgaaaaaacaaaagttgccgatgatgacagcgatcttcgtcggtcgttttatcctgagttttatgttttggaaaaaacgaaaagaggagatcgagtggatcgaaaaccctcaaccaatattggatgatgacggcaatctggatcgaaaaccctcaaccaatattgga

SEQ ID NO: 66854 - DNA, 222 bp, Oryza sativa
  Clone ID: PAT_MRT4530_67766C.1
atggagacgatgatttttatacaggttcggacccctgaattgtcagtcgacaatagggtagccttcctcctcgaatctgcatccggcgagatcaaagacagtgctgtctctcctgacaatatccgtagataccgtgggggactagtcatgcttatctctgaagtcgatatccggcgtcttatcttggcacatgttggcttgtatgttgatcttgtgtcttga

SEQ ID NO: 66855 - DNA, 1749 bp, Oryza sativa
  Clone ID: PAT_MRT4530_67767C.1
atggaccccaccgctcccaactccggcgacgccaacggcggcgcggccgccgacgccaccgccccgtccaacaccaccgtcaccctcccgccgctcaccctccgcgacgtgcccctgctcccgtcggcggcggcggcgaccgacacgatccccaacccgatctcccgccacccctacttccacccgccggccaccttctacatctccccgggtgacgtctccctccgccacgccttcttcgacctcgcctccgcgtcgccgtccccgctcgtcgcctaccgccgcgcggggccgcgcgcgggggtcgccgtggaccccgcccgcgcgcgcgccgcggtcgtcacctgcggggggctctgcccgggcctcaacaccgtcctcagggagctcgtcgtcggcctccgggagctctacggcgtccgcgacgtcttcggcgtcgccgccggctaccgcgggttctacggccccgacgccgaccacgcccgcctggacctggccgccgtcgacgactggcacaagaagggcggcaccgtgctcaagaccacccgtggtggctttgatctcaacaagatcgttgacggcatcgtcgcgcgcgggtatacgcagtgtctgacctcaaacactttttatcatgactatatcttgctgaaggtttatgcaattggaggggatggaacaatgagaggagctgtggccatcttcaacgagtttaagcgccgtggtttgaacatttctattacagggatcccgaaaactgtggacaatgatatcggcatcatagacaggtcatttgggttccaaaccgcagtggagattgctcagcaggcaatcgacgcagcacatgtcgaggctgtgagcgccgtgaatggcattggacttgtcaaacttatgggcaggagcacaggccacattgctcttcatgccaccctgagcagccgcgatgttgactgctgtttgattcctgaggttgatttctatcttgaaggaaaggggggcctgtttgagttcttgtatgaaaggataaaacagaagggacatgctgttgtcgttgttgctgaaggtgctggtcaggaattgattccaaggactgacgatcaaaagcgggagcaggacgagtccggcaacattgtgttccttgatgtgggtccctggttaaaatctgagctgggtaaatggtggaagagagaacacccaagcgagttgttcactgtgaagtatatcgatcccacttacatgatacgagctgttccagcaaatgccactgacaatctgtactgtacattgttggcacattcggcgatccatgggatcatggctgggtacactggcttcgtccctggcccgattaatggaaactatagctacataccgctggaagatgttgctgtggcgaagaacccggtggatgtgaatgatcacaaatgggcatgggttagatcagtcacaaaccaaccagatttcatgaagccaaaatactaagaccaaaagtgctgttactggacatggttgtatgactttttctccctggagccttgacacgttaagcttgatttctttctatccagtttcttctcttgttatgccgatctatctataagatgttaggtattctgatctccctggtttgtgtttgtgtgcacttgaaatcgtgttagcaggtattgctgtaaatctgtagtacataaataaatgaagtggcaggaaatgttgttctccaaaaaaaaaaagcttaaaaaaaaaaaaaaaaaa

SEQ ID NO: 66856 - DNA, 240 bp, Oryza sativa
  Clone ID: PAT_MRT4530_67768C.1
gcagacggcgggattcagcgcttccggggggcggtggagaggggggggggccgctcccgccccatgcggactgagccgggagcacagccggggaaagggcgggggagcgggtcggggggggggaatggcgcacaattccgctcgcgaaaaaccccgggcgaggaaggaacggaggaaatgctgcaggggcgcgccgaacgcaggcgggccccccggaacagtgagacgcgatcgggctaa

SEQ ID NO: 66857 - DNA, 333 bp, Oryza sativa
  Clone ID: PAT_MRT4530_67769C.1
gtgatagaaggagaaaatgccgagccattacatacataaaccaaaatatggaaggctggggaacgagctcaggacacacaacaggctgaagatgttttaagtaaatagcaggggatacatccttggggagagacacttgggttgtttaagagaagtttgcaggagaaaccgcatcttaaacatgtccttggattaatctagcgaccatatctggtcctcattatcatggtcttggactcagtacaatctatttgaccatcatcaacagtgatgtgtgctttgcaccatgcatgtgagttttggattggagcacatttcacctactggcttggg

SEQ ID NO: 66858 - DNA, 320 bp, Oryza sativa
  Clone ID: PAT_MRT4530_6776C.1
atgggcccacaagttaggtgtaaccgtcctgaaaactgcatcaactaccataacagtcataaggacccacctgctagtgacccagagaagtgtggaggcctactgggccagcccaggtttggccgaaccaggggttcggccgaaccctggttgctgcggctctggctggccttacacgtggacgtccaggatggctagctgatggcggttgcagggtagaatattcatttcgccttttctaaaaccgtcataccgaccctataaaacgatttccacgagtgttggtgtatattcatatgcaggtgacaaactaccaaggt

SEQ ID NO: 66859 - DNA, 2094 bp, Oryza sativa
  Clone ID: PAT_MRT4530_67770C.1
ctttaccttcctcttcttctcttctccttcgttgggcgtgggcgtcgcgagaggcgagatggcggcggcgacgttggcggcggcgagcatgggggtggtgacggaggtgctggggagcgacgtcgtcgacgaggtcgaccagcccatcatcgactacatcgccaacgtcctcgccgacgaggacttcgacttcggcgcccccgacggccacggcatcttcgacgcgctcggcgacctcctcatcgacgctcggtgcgtcgccgacgaggagcactgcctcgaggtctgcagtaagatttgtgaaaaatttggaaagcatggcctggtaaaacctaaacaagctatgcgaagccttgtcactcctttacgtatgaacgagggaatggacgataaggttgcccccaaaaagcaagctgatgtatttgatggacccttgctttcatcacgtgacaaagccaagattgaacggaagaagagaaggatgagagacaaagagaggctcaataccaaacgcatgttgctgaaatggaggcacttagggctggaatgcctccagtatttgtaaatcacaataactctggtgggccagctgttagggatatccatatggagaacttcagtgttactgttggtggtcgtgatctcattcaagattgcactgtaacacttgcttttgggaggcactatggtcttgttggaagaaatggtacagggaaaacctcttttctcagagctatggcgatgcatgcgattgatgggattcccaagaactgccagatattgcatgttgagcaagaggttgtgggcgatgacacaacagctttgcagtgtgttctgaatgctgatattgaacgggttcaacttttgcaagaagaagctcatctggttcaacggcaggttgacagtatcacatgctagggagtttcttaatacggtcgtcaccgacattcttcatctgcatggacaaaagctacatgcttacaaaaggtgattatgacacatttcagcaggagggggaggggcaccttaagaaccagcagaaagcttttgactcaaatgagaagggcagatcccacatgcaggcattcattgacaagttccgttacaatgcaaagagagcatcacttgttcaatcaagaatcaaggcattggagcgaatggagcatgttgatgcggtcgtcagtgatccagactatgttgctacttgatgagccaacaaatcatcttgatctccatgctgtgttatggttagaaacatatctcctgaaatggccagagaccccacttgttgtaaaaacttgaattttggtattgacctggacagccgcatagcaatggttggtccaaatggtattggcaaatccactatacttaaactaatatctggagatcttcagccaacttcagggacagtgttccgctctcccaaggttcgcatggctgtattcaatcaacaccatgttgatgggcttgatttaacagtgaacccccttttgtacatgatgagatgctaccctggtgtacctgaacagaaactgagggcacatttgggttctttcggtgttacaggaaatcttgccctccaaccaatgtacactttatcaggtggtcagaaaagtagggttgcctttgcaaagatcaccttcaagaagccacacattattcttctcgatgagccttctaaccatcttgatctggatgctgtggaggcgctgatccagggtttactcgttttccagggaggagtgctaatggtgagtcacgacgagcacctgataacggggagcgtggatgagctttgggtggtgtcggaaggcagggtgtcgcctttcgcaggcacgttcaaggactacaagaagatgctcaagtcttaatctagagccagtgatgatatatatacagagacagcgagtctacaaagaaagacaccaacatatatatctgtatcgtgcagcaccgatgtaacatttaccggcctgaggccaaatcatcatttatgtttatttcatgtggatttactgagaaaaaaaaaaaaaaaaaaaaaaacctatcacaggcacgttcaaggactacaagaagatgctcaagtcttaa

SEQ ID NO: 66860 - DNA, 249 bp, Oryza sativa
  Clone ID: PAT_MRT4530_67771C.1
ctttactgtggcgttactcgggtcagtttacattcattgggtaaaatagtccaagaaacacgtcccttgattgtcatcctattactgctccatgtgcattcaaggatccagttcatttttctcaccttataatggtggcatattcttaacggtgtgtccttagatactgatatatgctccgtgcacagtttcttgtacaaatgagcagttcgccaatgcaacttacatatactaacctgactgagatcg

SEQ ID NO: 66861 - DNA, 255 bp, Oryza sativa
  Clone ID: PAT_MRT4530_67772C.1
accccgcctcgctgtcacccacgaggggggttctatttcaatcgcgggggcgggttacacaacctactctactacacgcctcaggggtaatgggggctctatcggggcatggccatcctacctcaggcggctgtcaccatcagaactgacccctggcacgggcgtcacaggcgaaacatcctccggtcagggaaggggccaaccccggcgagcctgaggggcgaaggccccgtcgaatccgagggggacaaggcc

SEQ ID NO: 66862 - DNA, 516 bp, Oryza sativa
  Clone ID: PAT_MRT4530_67773C.1
agactgacctaagaaaacatttgtaaggttgatttcagagaacgtttgcctatgttcccttccaggagtttgatggtgtcttgtcttatatttaagtccttaaaccattttgagtttatttttgtgcatggtagtgagggtgtgttccagtttcattgatttacatgcgactgtctaatattcccagtaccatttgctgaaaagactgtctttttctcattttatattcctgcctccttggtcaaagattaattgaccataggtgtctgggtttatttctgtttctctattctgtacctttggtctgtatgtctgtttaggtaccagtacaacacagtcttgattactgtggctttataatgttgcctgagagttatgcctcctgcttggtttttgttcctcataattgcttcggaaattctgggtctttagtagtaccatataaatttttggattgtatactctagttctgtgaaaaatgtcatgcataatttgacagggactgtattgaatctg

SEQ ID NO: 66863 - DNA, 230 bp, Oryza sativa
  Clone ID: PAT_MRT4530_67774C.1
accggacccgtatgcccaggcggacgcacacgtgtgcgcacacgtgtgcgcacacgtgtgcggagacgtgcggtaacgggtccggttaggcttccggcgacacgccgtactggataaggttaagatgctggggggaaacagcactgaaaaacaccaacgtgatgtcgacgaacaggactgagacgtactcggggaaggtgcacggcgattagacctgggtgctcagccag

SEQ ID NO: 66864 - DNA, 441 bp, Oryza sativa
  Clone ID: PAT_MRT4530_67775C.1
tgcaggtaccggtccggaattcccgggtcgacccacgcgtccgcccacgcgtccgggtatgcctaatatcaataatccaaggaatgacttcctgtagtgctcttcttcccttgagagccaccaccgccaataagctatcacaaagagtatacatcttttccaagaaaacgaaagggaatgaccacgagaattgccacctctctaacccccagagaatatcacaccaagcctcaatagaaccaccaggtatcgtgaagcaaatcactctcaaacattattgttttttttattctgttctaattttatctggctaggaagtgggaactgtcgggcgctggaatattgctgcttcttttaagctccttttttttttctctgtcaccaaaaactatttcgttgaagtaaatggatggttaaatcgaaaaaaaaaaaaaaaaaaaa

SEQ ID NO: 66865 - DNA, 224 bp, Oryza sativa
  Clone ID: PAT_MRT4530_67776C.1
ccaaccccgccagggagggcgcgcgcagtccgccgccgccacgcgcaggcagccacctcaccagcccggccgcgccgctgtttgccctgcaccgtgccgctgccggccttgtctcatgcgaggggagggggaggacgggtgtggtggtggagggggagaaggggatcgagctagcgctggtgggagagggaggcgaggagtcgtgggtggataagatgaggaga

SEQ ID NO: 66866 - DNA, 493 bp, Oryza sativa
  Clone ID: PAT_MRT4530_67777C.1
cgccgtcgacgccgccctcgcctacgacaaggccgccgcgtccatcctcggtccccgcgcggtcctcaacttcccggcattcagccctcctgccgccgccatcgccgcgccggagcaatgcgaacccccgttctgttctcctgccaccaccgccgccgccactgcgccggagcaacgccaaaccccgggctgttctcctgcagccgtcgccggcagcggcggcggcgcagtgttcgaggagcgtgacgtgaagccggtggtgttgccgttgccgttgccggccatactccaggatggcggcggcacggaggcaatggcgcagcattgggattgggagtgggacgcgtcttggcctgagctggagatgttcgagtgtctggatgacatcgccatgtacctcgacgtcgacgctgtgatgacgactcgggattgcaaggttgaggagctcgacgccgacatcgtcgactcgccgctgtggacactgtcggactga

SEQ ID NO: 66867 - DNA, 1175 bp, Oryza sativa
  Clone ID: PAT_MRT4530_67778C.1
cgctgccaagccagcttccgcccacgacgccgccgccgccgaccggtccggcgaatcccccgctctcccgactcgcgagggctctctctctctccggttcgtactccctccccacccctctcccgcttccctctcccacaacaccgctcgcgtcgagtgacatgctcaccgggtgttcggcgtaatgcctctcccagaccaagaagcagctgcaggcggggacggcggcgcgatggcgagcggcgacggcgcgaacggcggtggcggtggcgggcaggggaagctcccgcggaagcggttctaccgggcgcgcgcgcacagcaacccgctcagcgactcgcacttcccgatcccgatatcgcccgacgaggtagacctctcgcagcactacccgcggtacttcccctccggcgagggcgaggcccgccagggcgacgcggcggtgccacggatccgcttcgcggacgttgggtgtgggttcggcgggctgctcgtcggcctctctacgctcttcccggacaccctcatgatcggcatggagctcagggacaaggtgactgagtatgtcaaagagcggattttggctttaagagcatcgaatccgggaaagtacgacaacatatctgtcgtgcgcaccaattcgatgaaatacattccaaactatttcaggaaggctcagctttcgaaaatgttcttcctgttccctgatcctcacttcaaggagaagaaccaccggcggagggtgatcagcatgcagctgctagatgagtatgcttatgtgatggaagtgggaggaatcatatatacaatcacagatgtggaggagctcggagaatggatgcggtcatgcctggagaaacacccgctgttcgaagctatcccagaggaagagacaaaagcagacccagttgtcaagctactgtctaccgccactgaagaaggtcagaaggttgcaagaaatggaggtcagactttccaggccatctttagacgcatctccttgcaagagtaggcaactcttgaatttactagcctgcagtgccattgcacctattgtatggattttgtgtcatctctacaaatttatgttgcatgaattttgctgtttaaggtgtactagttactcataccatagtaatgatgtgtgaaatgtttgtctaccttagagggaaaaa

SEQ ID NO: 66868 - DNA, 2292 bp, Oryza sativa
  Clone ID: PAT_MRT4530_67779C.1
atggaggtggaggaagaggcgttctttgacacgcgggaggagctgctgccgccgtcgccggcggcggcattgccgtggtcgggtgggctcgacagcgtgcggcagcggagggagcggttcatgcgaagcatgggcctggagcgcagcccgagcctccgccaggcggatttcgcggacgtcgtgggcgatgtgctcccggcggcagcatccctgagggggcgaaaaccgaagccttttcttggattccagagcgagcgtgcgcgcgcgcgaatgccatctcgcccagcggccgtgctcgccacaacgatccatggaggggtgccaattggtagcgaggtgtagtagtagtagtagaggagccagtagcaggatggaggtggaggaagaggcatgagccgcaatggcaagccttctggtgctccgaagacgatcgacaggaggagaaatgggtggctccggaggctgggcgtcagtgcttgtgttgtggatagtggagcagcagatgaagccagcaccagttcttcagatagtgagcaaattggggctgggaggtatgaaagaatcaaggttcactcgtaccggaagcggtcgaaggaattgtccgccgtgtatcaggggcaagtgatcaaagcacatgatggtgccatcctgacgatgaagtttagtcctgatgggcagcttcttgcaaccggtggagaagatggagttgtcagggtttgggctgtcatgcagtccgaggactgcaaaattccactggatgatccttcttgcgtcgccgcaatggcaagccttctggtgctccgaagacgatcgacaggaggagaaatgggtggctccggaggctgggcgtcagtgcttgtgttgtggatagtggggcagcagatgaagccagcaccagttcttcagatagtgagcaaattgaggctgggaggtatgaaagaatcaaggttcactcttaccggaagcggtcgaaggaattgtccgccgtgtatcaggggcaagtgatcaaagcacatgatggtgccatcctgacgatgaagtttagtcctgatgggcagcttcttgcaaccggtggagaagatggagttgtcagggtttgggctgtcatgcagtccgaggactgcaaaattccactggatgatccttcttgcgtctacctaaaagcgcggcgcaagtatgggcttgctcctgtgaatgccgagagcgtaccggcctggtggaaagggagtggtggttggtactattactggaaattgtcgcttctatgaaatatctgacaatctgctgaagctagaaacacaaattgctctcaatggaaagaagaaatcatctctcaaaagaatcacaggctttcagttttgcccaagcaacccaagtaaactaatggtgacatctgccgattcgaagatcagaatacttgatgggaccaatgtgattcagaattatagtggactccgaagtggttcttgccagttgtcagcaacattcactccagaagggcagcacataatttctgccagtgaagactccaacgtttatgtttggagccatgaaaaccagtatgagtgtgcatgcaaacaagcaaaaaccacacagacatctgagcatttccggtccaacaatgcagccattgcaataccatggaatggcacaaaaccaagaagcccagttccgttgtcgtcccaaattttaccaccacaaggagatactttctggtcaatgagcaaggctatcaaatacaattcaagcctctgtggaaaggattcttccattaaaaaaattgtgtcaacgcctgctgctcctggtattttcaatctgaaccaggagttcttcattgagtcctcttgcaaaagttcagcaacttggccagaggaaatgctaccatctaccacagccagtgtaaatttggacgagtcacagttcaagctcttaaggaactgtttccaaggaacatcaaactcctggggtcaagtgatagttactgcaggatgggatggcaggattagatgtgggcaatttgtgcttctgtttggggtcacaagttgtttgctgtggaccttgtggagcatctcaagagctattattgttcctctaatgggacctgaggaaggcgaattcccggctattttagggctggaaagggttctgatcagcggcagtgctgcgagtcagaaacatgttggaaaagccgaaaaggccacggctgcagattcggaggttagcaggtttcactcctactacagcactgtcgaaacagtagaagagaatttacaacagccatcgaattattga

SEQ ID NO: 66869 - DNA, 2169 bp, Oryza sativa
  Clone ID: PAT_MRT4530_6777C.1
tttttatgtattgttattgcttctttatagggtttagctttgcttgtgtgcttcgcgtagctcctgtcgttccggaggttcccaaagcgtggttcgtggtcgtcgccgaaggatcggaaggccgttctctctaagcaaggcaatctagtcctgaacaaaaggacacggatagagatggatgaagtcgttgcgacgatggatatctctgaggcaaatgaaggctacgcgagctgcggctcggtaatcgagatgtctaggcaaatgaagactacacgggtcggtgcccgggctcaaccctggcctgcctgtcccgggataccggccgtaggcagggttgggtcggtacttttgttcacggctaggatgggtgaagggttatgtcacatctttacgacgggttccaaggccatggaatgcggagtaaagatgtgtcttgtgggttggcctgggttggcttgggacgagctggaacccaggtcgggttgccagttcggtccaaactatcgtaggccttgggttaaggcagtactagatggtcagctttgcgaagaagaagatgtcgtcagtcgtttgccgaagctccggaagactgcaggatccgctagcgaagcgaaggaagcagtgaagccagctgtgaagcaggacaaaagacttagatctgttaaggtcctatccttagtttctaatctgtctctcccctttgttttccctctctccctctccaaacctttgcaacagatggctgacaatgagaaaggcaataaggtcagaagtcaggacattggtacctcaagctcccgagtgaatgaagcaccagacaccagttgtgtgacactagtccaacacctgattaaccagaaccgattgcttatagagatactacagcagcaccagacgccaattctgaacttgagtcaaatacaacctcaagtacagttggaggcagtccaagcactcacaccacaagtcagcgcaccgccaacatcccagaaggcccctcatgccatgccacatgttgacccaaaagaagcaagtatcatctgttttatgtgtgatgagcaagggcactacgcaaggaactgtcctcagcagaaaagaaaagcaccaatgcgaaccgaagatgaagtccgtaagatgatcattaccagcacagaatggcctccaccaggaatgacaaaacatcagagaagaaattccttccgaggtgcacaacagttgacagagcatcttttagctaatggaggtagagtgtctgatagtgaagattcagatcaagtctcctcagatgatgaagatgcgaagtctccccaagattttaaccagaataaaatagaacttaaggcatgctctcgttgtggagaaatcggtcatgttgccagctcgtgtgcctttacatgcgttcgttgtgaggaagaccatccacccgataggtgccctatgagcaggatcacttgtttcttgtgtgaaggaactgatcatgtaccaaaagattgtcaactcagttttctgctgacgaagaagatggccgaccaacacgcccattctaatggagagaagcatcaaggaagcacaaatcctcgccaagattacagtttcagcctaactccagtgccaggacagaggaaacaaaatgagaaaagaaaatgccgagtccgggaagatatccgttgcttcaattgtcaaggaatgggtcatttcgccgacaagtgcccaaaaccgagaaacatagctgccggcacgtcagtccacgcaactccctgcaatcagcagcttgctcctcaacgaattgtcatccatgcatcccgaagcagtcctttagcccgcgttgcaacaactccaattccaatgagtgcactaccacaaggtgtcaatgctcaatttcagccccagccaccagctgacaagacagaggccagtatctgcgttgtacctttggaagttccaatacagcagctgagaaatcaagtacaagatgaagaacccgagtgtaagaaagttattgtttgttacaactgcagtgaagaagggcattactccaaaaactgtccccaaccaaggcaaaatcgacctccacattaccgccaatttacacgaagcagacattccaatcgtattgtggtcacgggagcaaacgccgtacccgtaaggcctcgtgttaatcagaaccca

SEQ ID NO: 66870 - DNA, 508 bp, Oryza sativa
  Clone ID: PAT_MRT4530_67780C.1
cacgcctgcgcagccggtacccaatacaccggtcgacctacgcgttcgcatgcattatacaacaaaaatttaaaagaactaatgggctgggacaatgaagatcattttcacatttgctctacttgctattgctgaatgcagtgccactgcgcagattgatgtattaggacaaaatattacgcgatatcacgagcagtggcatctcctgctacagcaacatgtgcttagcctatataacgatatcgtaagggatctatataagattgcagtgctttcactgttccgaaacattgtgtatcaagtgagaaacaaccatgctttgcgacaactcaaggtgctggcgcatcaatatcactaccaggacattaacgatgttcaggccataccgcagcagctacacctacaacaggttggctatgtatatgttaagaaggcactggcagaaggttgtgctctcgtggcttttaacacgacatctacatatgtgttataccctaggtactatagt

SEQ ID NO: 66871 - DNA, 327 bp, Oryza sativa
  Clone ID: PAT_MRT4530_67781C.1
atgttaaatgtactcacaattatttatcttatcgttgctataatattaatcggttttgtgcttatgcaacaaggtaaaggtgccgatacaggtgcttcatttggtgccggtgcttcaggaacggtatttggttcagcaggttcagcaaattttttatcaagaacaaccgcttttttagccactattttctttgcacttagcttattaataggcaatttaaactcacataaaacaggtaatgtaagtcagtttgaagatttaagtggtattcaacaaaaggtagaacaatctacaaaagttgaaaatcaaaataatgatattcctcaa

SEQ ID NO: 66872 - DNA, 1831 bp, Oryza sativa
  Clone ID: PAT_MRT4530_67782C.1
acgaggaaaagctctttaacgcagttcccagctggcccgccgatccccgcccacgcgtccgcagcttcttctttctccattctagctatcttagctagctagatatatctctgaaatctcttcttgttgggttgagatgggtaggagtggtggcggtggtccggcgatcttgctggtggcggcggtgctcgtcgccggcgccaccgtcagcaatgcgcagctgaaggtggggttctactccaagtcatgtcctacagctgaatccaccgtcgcctccgccgtccggcagttcgccgatgccgacagcaccatcctccccgccctcgtccgcctccagttccacgactgcttcgtcaaggggtgtgatgggtcggtgctgatcaagggagtggggaataacgcggaggtgaacaacaacaagcaccaggggctgcgtgggcttgacgtggtggacagcatcaagcagcagctggagtcggagtgccccggcgtcgtctcctgcgccgacatcgtcgtcctcgcctcccgcgacgccatcgccttcacgggcgggccgtcgttcgacgtgccgacggggcggcgcgacgggcggacgtcgagcctccgcgacgccgacgtgctccccgacgtcaaggactccatcgacgtcctccgctccaagttcgccgccaatggcctcgacgacaaggacctcgtcctcctcagctcggcgcacacggtggggacgacggcgtgcttcttcctgcaggacaggctgtacaacttcccgctcgccggcggcggccgcggcgcggacccgtcgatcccggaggcgttcctctcggagctccagtcccggtgcgcccccggcgacttcaacacgcggctgccgctcgaccgcggcagcgaggccgagttcgacacctccatcctccgcaacatccgcaacggcttcgccgtcatcgcctccgacgccgcgctctacaacgccacggccaccgtcggcgtcgtcgacacctactccagcatgctcagcgccttcttcggcccctacttccgccaggacttcgccgacgccatggtcaagatggggagcgtcggcgtgctcaccggcgccgccggcgaggtcaggaaagtctgctccaagttcaactgagtttgaaaaaaaattaagctagagctattagctggtagaatgagatgaaaattaatcatccatggttggcataattttaatttcttcttgaaatcaacaaaattgtgtagatcataattaaattactggaaattaaaaggaattgatcaagttcatgtgcatcttgctgggacagaagaagagagaaattttgcataaaggtccaaaaatattaaattaattgaggatctgtgcagttttcttcttttctggggtctcagaagatggaatatatacagagagaggggttataagataaatttggtctacatgtttatatatatacatatatgtacaagtgagatatagtcatttttgttcttgggtttggggtattttgttgatttgttgccgagtgaaactgtaaagaagtgttgaattcattgattctaagtggtgccaaacctctgtaacgatctgtcccctagcttaattttttttctttggttggattgtaaattaaaagctaccatttgcttcttgttacgagctttaaagtgcagttatattgttagggccggcctagtacatggattgttctatcatctttgatatatgcaatgcaattaccaggtagtgtaaatttttcactgaattacaagtcaactgatttgttaggtttgttaaaaaaaaaaaaaaaaaaaaaaaaaaaaaaaa

SEQ ID NO: 66873 - DNA, 303 bp, Oryza sativa
  Clone ID: PAT_MRT4530_67783C.1
atggcggaaggcgaaagcgagggagatgggtttgggggaggggctcgggtttatagggcggctatgtcagttcggaaaccgaccttgggcagtcaagccagcgagctggcgccctggctagcggccaaaacggtgacagggaggatgacgctggcggaggaggaggagctcttcctccatcccttagaagctagcgcgcggagtggcggggccgggtcgatgacaacggcgatgacggcggggcggtttggaagggcgcggctacagggcagcagacgcgggctcaggtgtggcaggcgctga

SEQ ID NO: 66874 - DNA, 393 bp, Oryza sativa
  Clone ID: PAT_MRT4530_67784C.1
atggcggaaggcgaaagagagggagatgggtttgggggaggggctcgggtttatagggtggctatgtcggttcggaaaccgaccttgggcggtcaagccagcgagctggtgctccggctagcgggcaaaacggcgacagggaggatgacgccggcggtggaagagaaaagggaaaaaggaagaaagaaaggagattaccccttgtttctttgggaaaagaaggagggagagagggcgatgaggcaggaggaggaggagctctgcctccatcccttggaagctagcgcgcggagtggcggggccgggtcgatgacgacggcgatgacagcggggcggtttggaagggcacggctacagggcggcagacgcgggctcaggcgcggcaggtgctga

SEQ ID NO: 66875 - DNA, 198 bp, Oryza sativa
  Clone ID: PAT_MRT4530_67785C.1
tgttatcacagtgtgcggatttcaaatctacggttgtaagcttaagaatgagctcccatgggtcccacgaaagcggcctgtccgagcctaaaatgagctggagcacgccacggtgaccagcttatatgcagtcgtgtaccccggggccgactcgtccggctgctgaagctactggtcgacacaacagaccggatcacc

SEQ ID NO: 66876 - DNA, 517 bp, Oryza sativa
  Clone ID: PAT_MRT4530_67787C.1
tttttctctcttaatttgcaccacgtagctctaagatgtccacgagagtttggtttatccaacttcttttgctggtgatccaactgctcaccgtcctcttactcgttgccgcctccggtagaggctacagctgctatgtatgccaacattgcgatccccataattgtccccacaagaaatgaatctttacatctggtctggtaatctacttgaactcttccgtctttgctttgtcttcagtaatcaaccggagaaaatttttggttgcaaatgttatgagttttgtttcgtttaatgtttcttttaaaagaactttaatatatcagaacttagtcaattggtataacttgtgtgcttcaattttgtatatttgtttgaccaaaggaaatggcatctttattaaatgcagttttgatcaaactggccaaacctagctttaatcaataatgggtatattgaaatgtataagattacctgaaaaattaagatacctcttaagattaagattttatgtgct

SEQ ID NO: 66877 - DNA, 591 bp, Oryza sativa
  Clone ID: PAT_MRT4530_67788C.1
ggccgccccttttttttttttttttttcagtcaactagcatcatttcgatagaaattttgactttgtttcctttaacatatgccctttgacaaaaagaaaaaaacgatgtggtgaaataagacttaaccctaacaatggctgtcaagaacctcggccattcctacaggataagcaaaaaaaaaaggagaaatattctagtagatcaacaaggaacagatgaaaatctacatctaaatgcctacacgatagacagagatagcaggtcacaaccatttcagtatagagtatatacgtttctttctgctactgcccatcgtagccactacaccgcctgaagcagccgacgccgcagcccaccgcactcaacgccgacaccctccgcagcctgatgcagcctgctgtagccgtcgccaagcagccgcaagcgcggcagtcgacgccgacacctgccggagccgcgcgccgcaagccgctgcttgccttactgcactactcgttgaaatctgcaccttttttattggcatctactactcccaagtgaccgattttttgatcgatttgcttctgatttgaatgaagggatgagagga

SEQ ID NO: 66878 - DNA, 729 bp, Oryza sativa
  Clone ID: PAT_MRT4530_67789C.1
atgtggatgcaggaagggcatccaacatgtgtcaaccttacgcctataccacatacagatggccatctctggaggaagtatggagagaagaaaatcaagaactcatcgttcccaagacgttggtgtaaaactgtcgcgatctacaggctatactaccgatgctcttaccgggacgacaggaattgcatggcgaccaaggtggtgcagcaggagaacgacgccgacccgccactctacagggtcacctacattcacccgcacacctgcaacccatcgccgccggccccgacgccggcccatgtcttcaccgagccaccgccggccaaagcggaagtacaccacgcggtgttgttcaggttcagctccactgccggcggccacacggccaataatgcagtgcatcgtcagcagtggcagcctgcggcggctacgatggcggcgggggcccaggcgcagctgtcaatgacgatgagcgacgacgagcgggagcagccgccggcggccatccgttctgcgccgccggcacggcggctgtcgatgttccgcgccgtcgttgatggactcaggcagatgcggtcgtcggcgccgccaacaccgtcgtcgtcgatggtggtggacgacggatgggacacgttctcgtcgtttgatttggatacgtgcgaattcagtgtcgatgacgagttgctctgtggtgaccatatgtatttcccggacagtatgcagcaatag

SEQ ID NO: 66879 - DNA, 395 bp, Oryza sativa
  Clone ID: PAT_MRT4530_6778C.1
ccgaagatcccaaggtgccggaccaagacaaacgcgcccaagacgcacatcgatcgaagggactagtgacgaggaaaagaggctacttactagccatcccaagcaatgcaagaactaagacgcacccactgtatctgaagcgtgcactagtccttgcgaataagatgataaaaacgctcaggaacatgagtactcactgtatacaacggagatactcacgattgtcaacaaatataccataacgagatgctaaagacgactgacaatgtgaaagagtgaagatggcatcaccgaatgaatagtatcaagtatgtgatactctcggacaaggtagacatagtggaaccagacactgataatgaggtgcggctcatgatgccactatgtgatttctc

SEQ ID NO: 66880 - DNA, 435 bp, Oryza sativa
  Clone ID: PAT_MRT4530_67790C.1
gtatttaaaaaagaagggagaagagatcacagcagagcacgcacgtagcagcaacacagcaaagcaaaggcattcgatttcagagacgcatcttcgctttttgcctcggcgtcggtgctccacggcggcggcggcggcgggggcggcgccggagttccaccgcgcccgcctacatccgcgtgtgtgagagagagcggctacaaatggcctccgccgccgaggaggccaagggcgtggaggatggagatggaggggccagtgccaacaggggatacatcacacatatacgcttcacgatccgactacacagcggccgaggacacatccagtttccccgatgatgacaggggtctacgtagatcaagcgctatgtcatgtgggactgatagggttgtacacaccgaaggaaatgtctgcccgtctaaagaggagaga

SEQ ID NO: 66881 - DNA, 739 bp, Oryza sativa
  Clone ID: PAT_MRT4530_67791C.1
ccgaaaaaaaatataatcagagagaggtgatcagttgctgacacttctctgcatctcttgatgattctagttagagagggcaggaagcatgcacacatccttccttagtggcacacaatccaggtccaatgggcagttgagcagctcatgttttgaacattattgttcttggactgattcaatgctggtcactgtttagttctctgtagctttcagagtattaacttcttgattgacctgtgcagctagcagcagagatgaggttttctttgaagcttgcccttggttagagtctgactgcgaggatgaattctacagtatcaatggaggtaacgaaaaatattacatgtgtgaaagaaaaagttaattcagaaacagaacagttagatttttgtctatatctaatctttggtttgattcagcttcatcctgatacatatttttccattctaggatttaccccaaccaaatatttactgctgcatgtttcaaatatcaatagcattttattgtttgtgcgagtcgtggtatgtagggcttttaaatgaattttactacggaggcatactcaaacttcaaaactcgaatctgacatttcatttgggtttttggataaaacgactgacttgacagaaatcaatttactgaaacggttgctttcatggttgcatggaaatcagggtgttacattgcctgaacataacattcagatatttatccatatctagtctttgatttg

SEQ ID NO: 66882 - DNA, 1940 bp, Oryza sativa
  Clone ID: PAT_MRT4530_67792C.1
atggcgaacgccggtgtcaatgagacggtcgccgtcgccgtcgccattgacgcacctggagttgggcatgaccatggtgccgccggcgaggttcgtcgtccgtcgacgcgccggctggctccggcgggaagcggcgggcggctgatggcggagcttcttggcgtgttcaatggactgacggagcggatgggggaggacgtggcgacctcgtcgtcgtcgcggcttctcttccgcgcgctcaagctggcgcttcccgcgctccgcgacggcggcggcgatggcggcggcggccagtccgtctcccgtgcgctcgtggtcgccgcctccctcgccgacctccagatggacgcggaggtcatctcggctggcatggtgaggggagctctggataccggggcactcgccatggccgacgtcgaggcgcagctcggtgccagcgccgccggtctggtggaagagagcctcaaggtgaagcgcgcgccgtcggaggtcgacgtcgccgacgaggaggccgcgagcgcgctgcggaagcggtgcctctccagctacgacatccgcgccgtcatcctggagctcgccgtcaagctcgacgccatgaagcacctcgacgtcctccccaagcaccagcagcggaccacctcgcttgaggtgctcaaggtgttcgcgctgctggcgcacgccgtcggcgccggcgagctgtcgctggagctcgaggacctctccttccagcgcctgtacccgcaggcctacgcccacatcgaccagtggctgagcagccaagaagacgactgcaagcgcgtcatcgccgcgtccaaggaggagctcctccgcgcgctcaccgccgacgacgagctccgctgcaccgtcaccggcgtcgacgtcatgggccggtacaagagccggttcagcaccatgaagaagctggtgaaggacggccggcggccggaggacgtgaacgacatcctcggcatgcgcgtcatcctggaccctcgccccggcggcggcggcggcggcgacggcgacggcggcgacagggcatgcctgcggacgcacgaggtgatcaaggccatgtggaaggacgtgccggcgaggaccaaggactacatcacgcgtcccaaggggaacgggtaccggagcttgcacgtcgccgtcgacatgagcgagccggggccggaggggaagaagaggccgctgatggagatccaggtgcgcaccagggagatggacatggccgccgtcggcggccaggcgtcgcacgcgctctacaagggcggcctcaccgatcctgaggaggccaagaggctcaaggccatcatgctggcggcggcggaggtggcagctcagcacctccgcgacgagccagccggcgacggtggtccctgccgccgccgcagccgccgccaccgccggcaacatcgagcgagcattccggttgctcgacaagaacggcgacgggaggatcagcatggaggagctgacggagctcatggaggacctcggcgccggcggcaaggacgccgaggagctcatgcgcctcctcgacgacaataacgacggctcgctcagctccgacgagttcgccctcttccaaaaacgggttgagctgaaggcgaagttggaggacaaggatgatgagtacaaggagatcctcaggcagaagctgcagaaggtcgacgacacggggctcatccacgtctaccgcaagaacctcagcgacaagctcgtctccggctgaacaaacgagctgcaaaatcgatctggtgatatttggttgtggtttcggcgtcaatttgaagatcattgattgcatgcaaatcccaatctgggttgatgttgatgttttcgtcttgtatgaatcaattcatgttaatggaatctgtaagcctgtaataatttatttggatgctgaacggtaataaggtaccaaaatgctttttacc

SEQ ID NO: 66883 - DNA, 219 bp, Oryza sativa
  Clone ID: PAT_MRT4530_67793C.1
atggaatcgcccacgtggcctggcaccttcggggacgtcgggcccgagggtgaggtgtccgccctcctcctgatttccccgagggggggtcgggttgctcctgccccggccccgagggccgaggtgccccgaccccttgtggggtttgcactatcgcaatgcagcgcgctcttttatccggtctgtgaccagtcacagaccggtcagatcaacggttag

SEQ ID NO: 66884 - DNA, 372 bp, Oryza sativa
  Clone ID: PAT_MRT4530_67794C.1
atgcagatggaagctgcagatgtagccaaggaacatcacaaggaggagaaaaaggacaaggaacacgccaaagaggcgaaaccggagaaggagaagaaggagaagaaagagaagaacggcgaagaggcggcgaaaccggccaaggagaagaaggagaagaaagagaagaaggagaagggcaaggagaagaaggagaaggtggaggagacgacggacgtggccaagctgcgagccaagctggagaagctggacgccaagatcgacgacctcaaggccaagaagcaggagatcgtggcccgactcgtccagctcgaggagggtgcgacggcaaatgctgctgctgcagatgcggcaccacctgccagcggctga

SEQ ID NO: 66885 - DNA, 131 bp, Oryza sativa
  Clone ID: PAT_MRT4530_67795C.1
aaaagcacatacagttatttgtgagctggtatccaaacactgagttattacctacacaccccttcaacatttacatataaagcacaacctcaacaaacatttgacctaacaattatgcaggataactcaag

SEQ ID NO: 66886 - DNA, 2573 bp, Oryza sativa
  Clone ID: PAT_MRT4530_67796C.1
ggagagagagaactaagctcgagttcctttttttccgccctttttttttttttttttttttttttttttttgtttttttttttttttttttttttttcgaaacacaattatactcctttaaaagggtatgtatggttttccgtttatcaaatatttcatcaaatttgaagggtacaacaaattgtatcccgcggcgctctatcccactggagcccccccctgcaggttgactttttttctttttttttttttttttttctcagtaaactcttagctgtcctttccttcactagggcagctggaccaagatgatcctcagtaacaatgtcactattgatacaacaatatacaacagcagaggaaaaaaaacagctacaaaataaacagaataaatgaaattacaacaatggagaaccccctgaaaacagaaatctatggctgtctactctgtccacactgtcacaaggatgaagtttcgttccaactacagaatatgtatttataccaactccattagaagagggtctcccgtggacataacccgaataagctttataaaatcaatctcgttctgtactttcactgggaaaacagcaggtgcgtgagctgtataaatacttgagaaagtctcgttgcccaccaagttgctcctgaacactgttccagccagagcatcagagtcaaaatttttaggcgagtccatcgccaggaagaacatcgggacagcaactttgtggtgcaattccaaatcgccgacaagtcccacaaggtcaccaaaatcctcaacaaattgacgtggtatgtaaaaaagctcactgccacagaatgcaatcttatcttcgcccatgctttctttatagtttgtctggaaatgaactggggaactgccaatgacctgcttaaccattgacccttgctttacaaaccattcctctttgttgtactgcattagaacaaaaacccaaaaacttgcaaccttgttggttatccaaagtttttccttgtcagcctgcaacaggttccagtagttaagaatcatgtgatcttgcaggaagagaaatccatcagcaccaccgtatctcgcaaacaccttgggcagaaacttgtatgcatgtgacaacgcgcagcgctcaacagcaagctctgtgttgctctgttcagctagtatgataaccgtcttgaaaatccttccatatagcagcctccactcgagtgccgtgcgatccacaggcccactaacatgcatgatcaacacaacatttccaaagttctttctccacttaatcaggtttccaatctcatagttcactgtaccaatctcatcaactcccaagtgcacagatggcagcttcttgggtacaaattccttcatgtcaccctctccaatggttgcccgctgcctgtcaatttccaatgacatgagccgaggctgccggtaacccactgcaagaaggtcctgcagccaggcagccgttaatctcacatcttgctctgtccagaacccttcctcagccatggcatagctcaaatcaagaatcctctcgaatagagttctcttgtttgacctccactcattcagaaacttgatcaaccgacccacattaacatgcagatccttctcctcagcgaacgggtatgcctgaatatgatccttccggtaaatagtcggcggatagaaagccacatacccaccaatctcccacaagatccgttgcgcccagtagccacggatcacatctgatgccattgagctcactgacactggcatcatgagaccccagaaagctggcgtgtggaacaatgtgttgaacgaattcaccggtgccatcgtgccctgaggcagtgccactttcggcgcctctgcatcaaacctgagatcaaacgccgcggttggtggcttcctagtgaagtagaacacggcatcgacatccggcaatccatctgagagcccttgctgaatgtattgctggccactgaacacctcagtgtagaacacctcgtgagccacctccccaaccttgtctagcggcagcccccgtggccacacggaacgctgcccaaagtgcacgtagggattcaccaccgtcctgttgggatcggcgtggctgtactgcagaagcacgggatggttggtgaccccagatcccaaatcgacatcgaaatgcttgcccagatcgttgccggggacctcggcgcggtcgtcggcgtcgaagatcaccttggccccgtgctggatggcgaagaggtagccggccgtcttgcggacgtgggacgcgtaggggaggaagtcgacggagcggtagccgagctgcgcctggagctcgagggagaggaagatggcgcccttgagctcccacccggagggcgtgtgggagttgccgacggcgaggagctgccaccccttgacgcgggcgagcgcgccgagcgcggcggtgggcggggacgagacggagaccacgatccacctctccgcgcggaacgacgcgaacggcgcccccgccgcgatcgcaagcgggcggcacggcggccccacttgacgtccgggtactcgcagcctgggcggaccccgcggc

SEQ ID NO: 66887 - DNA, 300 bp, Oryza sativa
  unsure (1)..(300): unsure at all n locations
  Clone ID: PAT_MRT4530_67797C.1
cggcggggcaaacatctcctttcctctcttttcttggattgagatacttctcttctcttcctcctacctcttgtgaccgggcgccgccgcttcggcttgtatcctgtcttctcttctctcactccttagaaattgtatactagttaatatttctagaaagaggaaaagaagagaagaagaggggnaaccacgtgggtgggggcgtgctanggagtcnaagacaaaagggaagggaggcccaactgctccatcctcccttttcccaaatccactccttcctttcgatttggctccttccct

SEQ ID NO: 66888 - DNA, 337 bp, Oryza sativa
  Clone ID: PAT_MRT4530_67798C.1
gagcgcgccggcctcctccatgtggctgcggtggagggcgcgggatccggcgggcggtggtagtccctacacggatccaacggtggtggccgtcaacgcaagaatccagtggtggcggtcgtccccgcatggatccggcagccagccgccttctccccgcgtgggatccagctcccctcctctccccttccttccctccctagatccggcggaggggaggggcgtcggcggcgttgcagccggaggggagcgcggatccgacggtgggtggcgcggaggccggcgggaggcagccggcactatggctatcgggcggaagcccgccgccggattctag

SEQ ID NO: 66889 - DNA, 568 bp, Oryza sativa
  unsure (1)..(568): unsure at all n locations
  Clone ID: PAT_MRT4530_67799C.1
atgtgaattgcgtgccggagcctgcgggcgtcccggctctgcctcttgtgagatctgttcgtcaggaaatggaaggagatagtggatgactgggtgctgctgcacaattccggtggcgtcggcggttgctcggttgtgggtggtggtgactcttctgnttatttttantgcttgtgcttctcttttgttctggtttttctctttttttcttctcgtttttctccgtttctttttgttttgtgttcttttctttttctcgcttttttttttttttttcttttttttttgttttttttttttttctgtttttttttgttttttttttttttttttttttttttttttttcttttttttttttttctttccgcgcgtggttccttttttcgttccttttttttcttttctgttctttttttttttttcgttttttttttcttttttctttttttttttttttttttttttctttccttttttttttttttcttttttttttttttttttttttttttttggtttttctttttttttttttctgtcgtttttttccgttttttttttttttt

SEQ ID NO: 66890 - DNA, 5598 bp, Oryza sativa
  Clone ID: PAT_MRT4530_6779C.1
atggccgagatcgattcgatctaccacgtggcggtggctgacaggatgctgacatcagcaatgacaacaccaccggcggcggctcgggaccttatggtcgccggcgatctagggcacggcggtgctatccgagggcactatcgtgatgaggggaactcaccggtgcacgacacgacgacggatggcgatagcggtgaggaagaccgccgtcgtggtcgccaagtcgccgccgtcctcatccgccccttcgccgtcgccgaagatcaccggagcaccgtcgccgccgtcgacccgatctccgccgccgcttcttcttcgtcgtcgtcgccgtccgttcctcttccgccgtcgctttggtcgccgattccgtcgtttccggagagtccgttttcgccgaagaagagtttgaagagttccaaggccggcaaggaaactcctggtttggaatggtatattcctggtttggagatagaactgtgcagccgggatggttgttcagaatggttgggcctatacaacaggatgccgcgctacaagcctgagtacttgtttggtgttgagggttttgtccaggagttgcgtacgatgtcctttgtcattggaattgggactgcccctttttatgctcagattcctcatgatcgtcatgaagagaagtgccgagtcaaagtcaccttgaacagtaatagtgaagatatcccctcagtgatgttcgaagctggaggaagaaattacatccatgcatgtcaggaggtggcaaggatcgccataggagagctccgcgatcgttacagtgatcagttggccgacactgagtatcgctaccatcctcgccaacctcagggaagtgaccgtggcagctaccttgagactgaaggaattgagaatgatgctaccacaaggcatttggttgagatgttgtgggctatggatgaaagccgtgcggagactgtgttagcagctcaagatcgtgaagaccggaatcgtggtaagatttgcaagttagaagacaaggtggatcgtttggagaaggaactagctgcgttgaagggagaagcaccgccgcagaaggccaggattcgtctcaccgcaaggaagagagctctatttgtccctcgttaccaattggcgccaaagtttcccccggtttctcttcttgtgccctgtccatgccagatggtgaacactcgcagcaacgggaatggccccaacaaccccaataacaacaacaatggagagaatcccactcttgctcaagttcttgctcaacagactcagttaatgaacatgatgatgcagcaacttcagaaccagcagaaccaaggaaataaccatgcacctccccagaacaagttagcagaatttcttcgtgtgaggccgcctactttctctagtaccactaatcctgtcgaagctggtgattggttgcatgccatagagaagaagttggatttgcttcagtgcactgatcaggagaaggtctcatttgcatcacatcagttgcatggccctgcctctgaatggtgggatcacttccgccttaacaggactactgctgaacctatcacttggcttgaattcaccgctgctttccggaagacgcatataccatcgggagtggtgtctctcaagaagaaggaattcaggtcgctcacccagggatctcgctctgttacggagtatttgcacgagttcaatcgtctggcttgttatgctccggaagatgtgcgcaatgatgaagagcgccaagagaagttcttggaaggacttaatgatgagctttcttatccactcatgactggagattattctgatttccagaagttggtggataaggctattcgtcaggaggacaaatacaaccgcatggagcagaagaaacgccggatggctcaattcaagacacaacaggggaataatcagaggccgcgtcttactttaggaccccagtccatgccacatggaggttcttcgtctgttgttcgtccgcagcgtcagttcttcaacaacaatgctggcaacaacatccgcaatcaagctccacgccctgttgcagttccaacacagcaacagcctgccaagagggagcaaggcagcaagcccgtggtgtgtttcaactgtggagacccaggacattacgctgacaagtgtccgaagccccgacgcgtgaaggttgtccctgctcagagcaactctgctgtaccagcatcaaaggcccgtgtcaatcatgttgctgctgcagaagctcaagatgctccagatgtgattttgggtacgttccttgttaactcagttcctacaacagtgcttttcgattctggtgttacacattcattcttatctatgagttttgcgggaaatcatgggatggaagtagaagatcttagacgtcctttgatggttagtaccccaagtaatcaagcactctctttgcaacgtagcccctctgtcagaatagaaattaaaggagtaccatttctggccaatcttatcctgttagaatccaaagaccttgatgtcatcctagggatggactggctagccagacataaaggtgtgatagactgtgctaacagaaaagtaactctcaccagcaatgatggtcgagttgtaactgttcatgcattgtcttctgagtctttaaggtcaagactgaaccaaataactttggaagagattcctatagtccaggagtatcccgatgtgttcccagatgatttacctggtatgccgcccaaaagggatatagagttcagaatagatttggtacctggaacaactccgatccataagagaccttatagaatggcagccaatgagttggcagaagtcaagaggcaagtagatgatttgcttcagaaaggatacatcagaccaagttcatctccatggggagctccggttatttttgtggaaaagaaagatcatacccagagaatgtgtgtggactatcgtgcactaaatgatgtgactatcaagaataagtatccactacccagaattgatgatttgtttgatcagcttaaaggtgctactgttttctccaaaatagatcttcgatcaggatatcaccagttgagaatcaaagaggaagatatacctaagacagcttttaccactaggtatgggttgttcgaatgtactgttatgtcttttggacttaccaatgcccctgctttcttcatgaacttgatgaataaagtgtttatggaatacctagacaagttcgtggtggtctttattgatgatattcttatctactctcggaccaaagaagagcatgaagaacatcttcgccttgcattggagaagctacgagaacatcaactatatgctaagtttagcaagtgtgaattttggttgtctgaagtgaagttccttggtcacgtcatctcagcaggaggagttgccgtcgatcctagtaatgtggaatccgtaaccaactggaaacaaccgaagacagtttcagagattcgcagtttcttaggcctcgcaggatattatcggaggtttatagagaatttttccaagattgctaggcccaggacacgactgcttcagaaagatgtaaagtacaagtggtcggaagaatgtgagcagagttttcaagaattgaagaatcgcttgatatcagctcctattttgattttgcctgatccaaagaagggtttccaagtgtattgcgatgcatccaaacttgggttaggttgtgtactgatgcaagatgggaaggtggttgcctatgcatctcgtcagttacgtccgcatgagaagaactaccctactcatgatcttgaattagctgcagtagttcatgcgttgaagatttggcgtcattatctcttcggtactcgtacagaggtatataccgatcacaagagtttaaagtatatctttactcagccggatctgaacatgagacaaaggagatggttggaattaattaaggagtatgacatgggaattcattatcacccgggaaaggctaatgttgtagcagacgctcttagcaggaaaggctattgcaatgctacggaaggacgacagttgccgttggaattatgcaaggaatttgaaagattaaatttgggaattgtcagtagaggttttgttgcaaccttagaagcaaagcccactctaattgatcaagttagagaagcccaaattaatgatcctgatattcaagaaatcaagaagaatatgagaagaggaaaagctattggtttcttggaagatgagcacggaactgtatggttgggtgagagaatctgtgtccccgacaataaagatttaaaagatgcaattctgaaagaagctcatgatactttatactccattcaccctggtagtaccaaaatgtaccaggatctcaaggaaagattttggtgggcaagtatgaagcgtgaaatcgcagaatacgtagcagtatgtgatgtttgtcagcgagtcaaggcagaacatcagaaacctgccggtttgttgcagcctttgaagattcctgaatggaagtgggaagaaatcggtatggattttatcactggtttacccagaacgtcatcaggccatgactctatatgggtaatagtcgatagacttaccaaagtggcacatttcattccggtaaagacaacttattccggaagtcgcttagcggaattatatatggcaaggattgtgtgtttacatggcgttcctaagaagatagtgtctgatcgaggcagtcaatttacttcaaatttttggaagaaacttcaggaagagatgggttctaagctgaactttagtactgcttatcatccgcagacagacggacaaaccgaaagggtgaatcagattttggaagacatgttgagagcttgtgctttagacttcggtggaagttgggataagaatctaccttatgcggaattctcgtataacaacagttatcaagctagtctacagatggctccttacgaagcactgtatggtcggaagtgccgcactccgcttttgtgggatcaaacgggagaacgtcaggttttcgggacggatatcctaagggaagcaaaagaaaaggtgaaaatcattcaagaaagattgcgagtggctcagtctcgacataagagttatgctgacaatcgccgcagagatctaagttttgaagaaggagattatgtgtatcttcgtgtcacgcctcttcgaggagttcatcgtttccacaccaaaggaaaattggcaccgcgttttgtgggaccttataagattgtcagtagaagaggagaggttgcatatcaattggagttacctcaatccttggcaggagtccataatgtgttccatgtgtcgcaactaaaaaagtgtttaagggtacctatcgaagaagctaatcttgaacagatagaagtccaagaggatctgacctatgttgagaaaccaatccgtatcatggaaatagatgagagaaaaaccaggaatcgagttatccgtttttgcaaagtccaatggggtaatcactcggaagaagaatcaacttgggaacgagaagatgaattgaagtcagctcatccgcatctgttcgccagttcttccgaatctcgaggacgagattctgtttaa

SEQ ID NO: 66891 - DNA, 282 bp, Oryza sativa
  unsure (1)..(282): unsure at all n locations
  Clone ID: PAT_MRT4530_677C.1
cggacgcgtgggggcggctctctcactccactccgggaggatctcagcggcggctatcggcggcggcctccgctctcgcagggatccccgatgggcgccgtcgccaccccgttcctccggagctccttcgtcttctcctcctccacgtcatccgccttcgnctncctcgacgagctttttgtcgtggtcttggcgttgctgaccttcacctctggctcctcatttgctgggtcatctttggggattgaattcaacctcaacagagttacaacaggaagatcc

SEQ ID NO: 66892 - DNA, 432 bp, Oryza sativa
  Clone ID: PAT_MRT4530_67801C.1
atgaagagcgctggagctggtaattttgcaaaaaaatcctctcttaccttgataatctttcttaagtcctcaatccgatgcaatccttctccatctccacagtgggttggcgcccttctgctcaagtttgaagctccgctgccgtgcggcgccgacactgtttcgcaattgcagatctggccagcaacagattgtgttagaacaaaaaccttcagagaagctcaacatttactaatagaagtacgtttttggacttgtgatgcttctggtgaggtttttggactagaccaaccaatagcatttaggttgttgggctcgttcctttccatgctgaaatttcatacgttgagtgccagttacaccaaaagagctgaatgcgtggagccacaaggttgcaggcaggttgtacaaatggaaccttccatcccataa

SEQ ID NO: 66893 - DNA, 340 bp, Oryza sativa
  unsure (1)..(340): unsure at all n locations
  Clone ID: PAT_MRT4530_67802C.1
gcgactcctcgatcgttgtgacgaaggcgctcgcgttgcagcacgccactacggacccccaagatccacaactctgcttgaacgactacgcaatctcagatgaaactctgactggagactagaagacactctgaaatacagatcgttcgattgactagagataagggcgaacgactaaacaaaccatttagaaactgcatacctccgattccatgctattgataaacttgcacctttaggattgctatgagggacagccaatgaatataggcgtccaggactctcacttacagatcgagctatatatgttgaataagttgcacggnnggatgccncctgc

SEQ ID NO: 66894 - DNA, 1877 bp, Oryza sativa
  unsure (1)..(1877): unsure at all n locations
  Clone ID: PAT_MRT4530_67803C.1
atggcgggggaagaaggggaggacgaggcggcgtcgatcgagctgcagctggagcaccacctacaggagcagcgggcctccctcaccgccgtcgacgaggccctcgccgccgacccctccaacgccgacctcctcgaggtccatgaagaacttcttgctgcaattaaggatgcagaggagggacttctccatttgaaacgctctagactagtaaagcaaattgatgagatatttcctaaccaagagccaacatctgaagcacctgaagtagctgttgatccacccgatgatgttgagccagaaccattggagccacaggaattttcagttggatctaagtgtagattcaggcataaggatgggcgctggtataatggatgtgttataggacttgaaggctcaagtgatgcaaggatctcatttctgactcctacgtctgaaaacatgtcgatgtgcaagttttttctccagcaacgatgtcggtttggtagtaactgccgcttgtcccatggtattgtaattcctattctgtccctgaagcaattcactccgactagatggcagcagtccttggtaggatccagcatactggctgcttctgggcatcattctggcctttggagacgagctgaacttgagtcatgggatgacgatctgaaagttggccaggttgtttttcaagatgacgggagctctgcaaggcttcccagtgattctctttcaatctcagaatatgctgatgagagcgatgaagatggtgaaggaagctcaagtgatgaaggatctgattttagtgaggatggagatcaagaggatgaatctgttcatcagggtctaggccttttggaatccaaaaatttaagtggtgttcagacagagactgcgatctttgcaaagtgggagcaccataccaggggcgttgcctccaaaatgatggcaaaaatggggtaccgagagggaatgggtctaggtgtttctggacaaggcatgcttgatccaatcccagttaaggtactacccccaaagcaatctcttgatcacgctgtggctgcaagtgaggttaatgatagtgtaggccctggaaaaaaacgcagtcggggtgggaaaagaaagcgtgagaagaagtttgctgaacaggcaagggctgctaaagctgaagaagaagagaggtctgtcttcagctttatcaatagccaactagtgggtcaagatgttgcagaaggctcagccgtgaaatctaaaaaggattcatccggtgaggcaaatggacatgccaagaaggaagacagaagatccttgcttgcatacgatgacgaagtgaaagaactgaggagccgtgttgagaagctggaggaaatgatgaagcgaaaccgcaaggacaaggcattctacgaagcagcttcaaagaaattgaaacaaacccgaaaagctctagctgatgctgaagcaacgcatgcttcggcaaccaacgcggttgctagaaaggagaaagagaagaaatggttaaaattctaatgtcattttcgatgcagtatcattagcatctgccagtcaatcaatatccacttttgatacctgaaggttgtcgtggcatgcgacttcagattgcttgttctttcatgccttatacagtgtgatctgtggctgtaatgttttaggagctctgttgtagggaaaatataggactgtgatatctagtttgtccgccagaagttcaggaccatattgtttcgagttctgaactcacaacttatgctccctattgtcattttggtacctattctgccagaagctgacgatgatgtgtgtgttattatggtcccgttcgaaagtgatnatccagatacaattgatcatgctccaaaaaaaaaaaaaaa

SEQ ID NO: 66895 - DNA, 1532 bp, Oryza sativa
  Clone ID: PAT_MRT4530_67804C.1
ctagttcccgggttttacgtaactaagaacggagtaaactgcctggatcacggtgcagacgagcccaatggtggccgccacgaggccggcggtgagccacgggttgagaaagtacttctgcctcagcgacgccatccaccgccgcggcctactccggaaccgccggtcgagcacctggcacaccggcctcaggtagttctggtcggcctcgtcgaagtcgaacacggcgcccttgcacaggttcgcgaagaggcccgcgacctcgccgtcgttgcccaggccgtgcacgatcacgccgcgccgcgacagcagctccacgtccctcgccgtgcacgccagctgcgacatgaacacgcagtacgccgtcacgtggctccccgccgccgacgggttgctctgctccagcgccatcaggttccggagcagccgccacgtctcgccgtcgatgctcagccggggcacctgcagcgcgccgccgcgccggctcaccttcacgtcgaggatgctgcgcgcgccgccgccgctgctgagcgggcggcgcttgaacgtcacgccggcgtagtggtactccgtcgccgtgcgccaccggcccacggaccttccgccgcgactgaccttgccggaagcgagcacggtaggcgtgaagtgcatgtgcagcaggtggagaaggttcgccggctccggccgcagcgccggcggcgccactatcgtcggcgtcgcgaccgagtactccgtccaactcaacaggtcgtgcgcgtacctcgcgatggcgtccaacaccggagtttcgccgtcgaggaacgtcagctggtggaccttgtcgacgacgaagaacgggatctggttctcggcaaggtagagcacgtcgcggaccaccgcgacggccatctgctggtcgtctgcggccgctctcctctcctcggtcggcacgacgcggtgccccgcgtgcacgacgccgttagccacggccacctcctccgccgccgccgccgccggctgcggcggcgccgcggtgcgcggcgtgagcacgtcgccgaagcggacgaggatgtagcaggcgtcgagcagcagcatgcgcacgaactccctgcttgggatgtcgaacgaatggacgtagcacctcctcacgctgtgctcgaggtgcgccagctcggagaggtagtcctcgagcgtcatcggcgcggtggagctcgccgccgccgccgagaggacgtcgccgaggtacttcaccttgatggcctctccggcgaggtcggcggcgcggtggtacggcccgatggagacgtactgcggcacgtactcgtgcgggtcgtggatgcgggtggactcaccaaccttgtcgacgatgatgcacggcggaggcgcggcgccgccgacgacccgcgccgtcgacgacttgaagctggagagttcgaccctcagttctttcgccaatgaagggatgtcaatcacacagctatctgttttcatctccaactctgcaacgcaacgagtaggatcgccccccatcgtttcttcctcctctgcggctc

SEQ ID NO: 66896 - DNA, 325 bp, Oryza sativa
  Clone ID: PAT_MRT4530_67805C.1
atgaagttaagcatgaaacgaccctagtacagccgtacttctcgaatgggcatgagttttcccctcgggagtgctagaactcctatcactactagaaacttatgacgtctagagtgcatgaggactcaagttcatggagcgggtactgtcaatgtgaggttgttgaaaggctttgccgtggcaagtctcattcgttgggacgtaggctcatgtgttgggcaagtcgcggagtacgggtaaagtgtacatccactgcagtcagagtgatgaagagaagcccttgttagtacgcttgcgtacttaacaagatgaccggagtgcggtt

SEQ ID NO: 66897 - DNA, 2882 bp, Oryza sativa
  Clone ID: PAT_MRT4530_67806C.1
cgggctgcaggaattcggcacgagggaactagtctcgagtttttttttttttttttttttttttaaagtaaaaagtggtaaatatgtataatactataacatatttacaacagggattagcatttccatttttttttcttttttgtttgagaagttcttttttctgttttatccttttcctataacatattgccaaagattctaactaagctaacccttgcaaagaatgtgatatatgtttctcctatttattgtcttcagtatggtcaattcttcttcaccatagaaattcaatcgtgtacctcaaccgaaccgagtcagaatggtttcatattccccaatggattgtcatctttgagcactttctctgggcaaaccaagttgatgtttcttccatttgttgtgatgatctcttcgatcacgagaccgttgcagtttgcagcagatgtagcttgacttcgagtgtttcctttaatgtagctgcgatagcttctgctgttgaatccttttgctgagatgtcaccaagacaaattttatagctctagtagcaaagcatgcctccgccatccacccaatgcgtgaagcggtcagagtagtcacggatgtctgacatttggctgcttgagcgtgacagatctgtgtcatctcttccctcatcattgtgtccctgttcactgtatgatgtagttgattcaatactgacaacatccatgggtgaattgatgagtgatgacctctcataaatttcctcctcacaagaatttcctgaagatgataacagatcaagatcaagaaagtttgaagagtgcaattcaggataacccaatcttctcaaataattctgccgctcttctgaaattgagtgtctcccagacaatgtgctatagtttgtactggagcacgggttaggttctatagagatctctggtgcagaatcagaaggttctctaatatcctccagtggttgcattgggagcaattctgagcttgtgttgttttttccaacattacagtcagatacaggtccaccagtgttgtcacataaaatattaccgtccgataacgacctctttatgaatgatctcccagtttcttcagttaaagttccttgcctgccaatgttgtaatgctgatctgagtccaatttccaaagcgcaggttttccttcttgtggttggaaatgacccaagaacacatttatagaatcctgcttctcaggatcagtgtaggcattactgtagtagcgctgaagggtccggaggaactcctgagattgtgttgctgccttccattggcctctttgctcacagaagatcttgttgtgagcagcagagccaccatattgaatagctagcgtatcacccatccgttcatagaaatccataagatcatcggccaaaggagcatgcaattcaattgtaggggtttcattgagctggagcacatgaagttgacgccctaaagcagctaagccatacgcaaactgtgcaacatttgtgcggtccaagcagtctatgcagttagtcctgaggacacccttttgcagtaaaagaggtactagcttagttgcacataaattttgatcctggatgttttcgatgtcacctgagttggcaacagctccttgtccacttgatgcatcctcatactttgatgtagttatctcacagtggaggaagtcagttagatccaacacatctgatgctaccttgttcaacagcgaaagcacattggtacctttccttctagaaagcttactcagatccatgtgtaaaaactttagacgtttgtcatctggcagccccttgttaatataatgtatagcctttgcgaattctgcacggagcaaagattcacgaggtttcttctcacgagtcttgatcaagtttaagataattattgggttcccatatctaagtgcaaggttctcaaaatgaaggcgagttgtcttgtagtctacatccggtttcagtatgatatctggcctaatgttgagtcttgaagtttcctgaaaccatataagaggtatggatcctctatgttgtacaacagatgatatctgatgtggtatttcatctggtgtgtcctcaaaaacaatttgttcagtctcaacatcattggcaaccctacccttttcattaacacctcttttcaagaatctggttccagcaaaatgacgtgagcgccttgctataagtgtcaaccagaattccttcccagctactgagagctttgactgtttaaaaaatccatggattaaggcaacagtccacgttgtattcttgagatggttccggatagctcgagacagaaactcgttccaaacaaacattgtctcataaacaacttgcccagtattcttgtcagttatgttcttctgaaggctgcgcatgatattgtaagagtagctgaagaagaagtctttcgagagatcgaccgagcaaaggagccgtttatatctgttctcatccctagaataagccacgttgggccacacaataggacttggaattgcaatcaattcgctcttgccgacagaatatatttcatgactgcagattgtaccaactttccttcttctggtaattagaaccatgtaataagggccaagaaattttataaaaccaactattccatagcatttcgtgacaaatttcagtccaccagtcaatctattcccctcatgaattcgccacagcagttcttggcattcattctctgtgtaacttgtatgatcttcctcgatttccagctcagtaggctccatcctgtcaatcttcagcaccctccatagagtccttgtcttgtcccttccgataagataaaatttcgatctggtctcgtagagccggaacttctgaaggaatttgtcgcccgccat

SEQ ID NO: 66898 - DNA, 361 bp, Oryza sativa
  Clone ID: PAT_MRT4530_67807C.1
cggcacgagggtttctctcgtccatttgcacatgcgcccgatcgcgtgagctcctttcgcggagaggaatcgtacgtgccttcgacgcttacatgaattccttttcttatgcgtaattgtgcggctagcatccatataatatataatctatatatatataattttacttgaaattattaaatatagctatattattatcttatgaatttgaatgaccaaatcttaccatgcccatgtttcttttttttttagagttctaagctctttctaatagagtagtatttttttcggggagggatagagtttgtatagccaccagcctcctccacatacagaatcctttaaattccctacaacccac

SEQ ID NO: 66899 - DNA, 1173 bp, Oryza sativa
  Clone ID: PAT_MRT4530_67808C.1
atggcgcgtgggtgggaggacctgccgccggacctcctcgtgcacatcgccggtggcttctccatccaagcctacacccgactccgcggcgtctgcgccgcctggcgcgacgccctccggccgccctcgccgtcgctcctcgtcctccgcgaccgccacgccgggcagcgcttcgccgcctggtgcgtgtccccgaggatggtctccaccgcgctccacgagacgctcgccgcgaggctctccccggcgagccgctgcgtcggctccggcgacggctgggtcgccgcccacgtgcccggcggcgccgtcctcgtgaaccctcacaccggcgacgagatcccgctccactctttccccggcggcggggggaataatgtggtggtgttcaaggtcgtcttcgcgccgaacccgacgccgagcgagttcaccgcggcggcgatcaccggcggcggccgcgtcgtctacacgacgaacgggaacagcggatggaccgacttcaagtgcccccgcctcggcgctcacggcgacgggggcagcatcgccgacgtggtgtaccacgaccacggcggcggcaagaaggtggtgtactgcctcacggccggcggcgacgtgcacgtcctccgcctccccgccggcggccagcgaaggacgacggcgtcgctggtgccactgttcgacaagcccgccgcgacgttctacccggcggccgcgttcgcgccgccgtacgacacggtccgcaccttcgccgactccaagaacctggccgtctgcggcgacggccaactctaccagatctggagggacgacgacgcgaacgccaccatgttcgtcctcaggtaccaccctcgccgccgcccgtgctggctgccggcgaaggacctcggcggacacgcggtgttcatcgggaagaacaacgcggtggcgctgcgcggggacgacggcggcggcgcgacgccggcgccgagagccaactgcgtgtactggaccgacgtctggaccgatcgggccaaggtgttcgacgtggtgaccggcgagtcgacgttgtgctttcctggcgcagaagtttcatttaatacgggatatattttacagtgctttaaaattgttttcgaccatccaattaatgttgatccaatgttcattggaggtaatgggattggatatgatctgtga

SEQ ID NO: 66900 - DNA, 270 bp, Oryza sativa
  Clone ID: PAT_MRT4530_67809C.1
atggagcctactgagctggaaatcgaggaagatcatacaagttacacagagaatgaatgccaagaactgctgtggcgaattcatgaggggaatagattgactggtggactgaaatttgtcacgaaatgctatggaatagttggtaatgaaacaggaactgagataccattgtttattgatcaaacttcctggttttataaaatttcttggcccttattacatggttctaattaccagaagaaggaaagttggtacaatctgcagtcatga

SEQ ID NO: 66901 - DNA, 1065 bp, Oryza sativa
  Clone ID: PAT_MRT4530_6780C.1
atggtgcccccaatcgccgggaacggccgcgccaagtccggccgccttcctttgccgccggccgccattcccgtcgccgttcccgctcctcccgtggccggctctctcccccatcctataaaatgggatcctcatccttcgttctatcgttttagccccttcccgagcctccccgtgccgcctctccctcctcaccggagcatcgtccggccgtgtcgtcgcctccctcggctctgcaacaccgtccccttcaccggcctcaccgtctcctcgccggaaactcgccggaacggtgcccccgccggcaaccagtggcattggtgccactgtactccctccagccggctgctgttcatcgccggtgcgccgatcgacgccgccgtctcctccttcgacaccgcggcatcgccttcttccccggcatcacctcctcctcgcccgaatttcgccggaacgccgtcgtctccgcgccggcctctccttcctcctcgtcggctcgtcgccccgctgcaccaccaccttcaccaacatcgcagcggcgtgttccacgccgtcccctcctccgctcagccgctgctgcctgccatcatcgtttcatcgtcgtctccgatcgttctcgtcgtcgacgtcccatcggtcgcccggctcgtcgtcttgcggcgccgcctccgtcatcgtcatcgctgcggcgtgttccacgccgtcctcgcctccgtgcagccgttgccggctgccctcgtcgtctcctcgccggctgccctcgtagcctcctcgccggccccggtcgtcgtcgtcctcgtcctctcgtcgttcccgatcgtcgtggcgttcgtccctccgtcaagccgttctcgttcgtcgtcctcgcttcgtcaagatcgctgcagccccgtcctcgtgttcgtcctcggctccgcgtcgtcaagcctcgtgccggccgcgtctcgccttcgcccaaggatcgccgccgaagccgtcccctcgccgttcgtctccgttgcgcccgtctgcctccgccgcgcccgttcgtcgttgtcgttcccacgcctcgtcgcgtggtggtaa

SEQ ID NO: 66902 - DNA, 808 bp, Oryza sativa
  unsure (1)..(808): unsure at all n locations
  Clone ID: PAT_MRT4530_67810C.1
gtccggnnaattcccggngtcgacccacgcgtccggttgttctgtgtgtgcaattaatatcactttgcctttaagtatacaattttcttgttgataataatatgcaccctactcatacggtcggtgcatacgtcaattcttgcagttctgagcattgtgtgtggtgttcataaggtcagaggtatatagaattgtttcgaatttctttgatccactaatattcttcttagtatgattctaaatatactatatctagagtttttctcatttctattgtctgcggatatttatatttttacctttcactttttgtagatataaacggctcctttgctcggtcgatctctcgaaagacttcttcttcagctactcttacaatatcatgcgcagccttcagaagaacataactgacaagaatactgggcaagttgtttatgagacaatgtttgtttggaacgagtttctgtctcgagctatccggaaccatctcaagaatacaacgtggactgttgccttaatccatggattttttaaacagtcaaagctctcagtagctgggaaggaattctggttgacacttatagcaaggcgctcacgtcattttgctggaaccagattcttgaaaagaggtgttaatgaaaagggtagggttgccaatgatgttgagactgaacaaattgtttttgaggacacaccagatgaaataccacatcagatatcatcttgttgtacaaacatagaggatccatacctcttatatgggtttcaggaaacttcaagactcaacattangccagatatcatactg

SEQ ID NO: 66903 - DNA, 1359 bp, Oryza sativa
  Clone ID: PAT_MRT4530_67811C.1
atgcgtaaggagaaaataccgcatcaggcgccattcgccattcaggctgcgcaactgttgggaagggcgatcggtgcgggcctcttcgctattacgccagctggcgaaagggggatgtgctgcaaggcgattaagttggtactaagtgctatttacaggaaaggtaccaatgtgctttcgctgttgaacaaggtagcatcagatgtgttggatctaactgacttcctccactgtgagataactacatcaaagtatgaggatgcatcaagtggacaaggagctgttgccaactcaggtgacatcgaaaacatccaggatcaaaatttatgtgcaactaagctagtacctcttttactgcaaaagggtgtcctcaggactaactgcatagactgcttggaccgcacaaatgttgcacagtttgcgtatggcttagctgctttagggcgtcaacttcatgtgctccagctcaatgaaacccctacaattgaattgcatgctcctttggccgatgatcttatggatttctatgaacggatgggtgatacgctagctattcaatatggtggctctgctgctcacaacaagatcttctgtgagcaaagaggccaatggaaggcagcaacacaatctcaggagttcctccggacccttcagcgctactacagtaatgcctacactgatcctgagaagcaggattctataaatgtgttcttgggtcatttccaaccacaagaaggaaaacctgcgctttggaaattggactcagatcagcattacaacattggcaggcaaggaactttaactgaagaaactgggagatcattcataaagaggtcgttatcggacggtaatattttatgtgacaacactggtggacctgtatctgactgtaatgttggaaaaaacaacacaagctcagaattgctcccaatgcaaccactggaggatattagagaaccttctgattctgcaccagagatctctatagaacctaacccgtgctccagtacaaactatagcacattgtctgggagacactcaatttcagaagagcggcagaattatttgagaagattgggttatcctgaattgcactcttcaaactttcttgatcttgatctgttatcatcttcaggaaattcttgtgaggaggaaatttatgagaggtcatcactcatcaattcacccatggatgttgtcagtattgaatcaactacatcatacagtgaacagggacacaatgatgagggaagagatgacacagatctgtcacgctcaagcagccaaatgtcagacatccgtgactactctgaccgcttcacgcattgggtggatggcggaggcatgctttgctactag

SEQ ID NO: 66904 - DNA, 1023 bp, Oryza sativa
  Clone ID: PAT_MRT4530_67812C.1
atggaggaagagaaggcggcggcgtactacgacgagctcagccgcaagggcgagggcgcccgccgcttcaagcagggcctcggcttctcctcctccgatccccaatccacctccttcccctccaaacccccctccacctcctcctccttcctctccggcttcgtccgcgccggcgccacccccgcccccgcgcaacccaccaagcagccgccgccgccgccgccgccgccacacgagccgtcccgcacaggccgtcactctcggtccccgtccccgtcgcggcggcatcggacccgctccagttccccgtctcgctcgcggcgccaccggtccaggtcgagggagcggaggcgccggtccaggtccagggagagggagagggaggaccgcagggcgtcgcgccgccgctcccggtctcgttctcggtcgcggtcgccttctcgccgaagcgggaggagctcgtactccgagaaccggcatggggacaggcggcgcgacgatggtggcggccgccgtggaagctcgaaggggcgcggtggcagggagggtggtaaggtggattactcgcggctcatagaaggttatgatagaatgaccccagcggagagagtgaaggcaaagatgaagcttcagctttcagagacaggttttggcccgctctttgtatatgttcttgtgtttccacttcaaaagattccacccttggaaatgccactgtggggtgggaaagatttgaattcaataaggatgctccacttgatgaagatgacaatgatgttgaagtccaagcatgaagatacggtcagagatgcacatgaaaatgctatatttggagtacctgcataccccattgttgatactgaaactacggaggctgagcctgaaaccaatgacgaaagcgagaaagctaaagatgttgaagccgaacctagcagttccctcattagtgataaagttctggcaacgcaaagcgggtcatggagagaaagagctcagaaattacggcagaatccaaatgcgtga

SEQ ID NO: 66905 - DNA, 441 bp, Oryza sativa
  Clone ID: PAT_MRT4530_67813C.1
atggcgcgcttaagaggccatgagcgtttgaagctgaccagcatggcagagggagtgagggacctgtctatatttaggggaaaaaaatttggtggagaccgggcgctgtgcgaggaggatgcagatggcttggctagttggctccaggcgcagacgctttcagcctcgccgacggctcgattcaacgcagaccacgtctcctcgcctggcgagccgcagcgccaggcgatcgatcccgcggcgcgtttggctgctggctgcgacgtggtggagctcaacacattggccatggtgctcccatatgtcagtctcaggacgtccgcggtgctggaggaggaggaagaggacgaccccaggaagacgcagtgccgggagcagggccgagctaaccgttcaatccctaggtcatccacgtggcatccatccggagcagggctgtag

SEQ ID NO: 66906 - DNA, 732 bp, Oryza sativa
  Clone ID: PAT_MRT4530_67814C.1
atgggtgtgccttctcccccgccgcctcctccttcgtcgtgcctcagccacggcctactccggcgccaccaccggagcggctcctcagccgctgcaaccgcatactccgccgctggctcattcgcctccgcctccgctttcacggacaatacagaggccaatctcgcggcgccgaaggaggaacacggcagtggcagacacggcgacggcggggcggaagaggaacatggcggcgctggagcggaagagaaacacggcgacgacatggaagaggaacacggcggcggcggatcgggatttctaggggacagaattggtaccgcccagtacaaactctaccagccgttggatcggggaagcatgagccggagcaacgggaacggcggcggcggcggcgggagcacgaggggggcgaggttggagctgcagctgaacctgtcgccgccggcggtgggtatggaggtggacggcaacgacgacagcgactcgtcgtcgccgacgtcgtgcgtgtcgtcggatggccgcagctccgccggcggcagccccggggacaagtcgccgatggtgatcggcgcctgcacccgttgcctcatgtactgcatggtcgccaagaaggactacccgacctgcatcaactgcaagcaaccctccctcgtcgacctcctccagaaccaggacgccgccgccgccgacgccgacgccgacaagaagcgcggcggaaagcgcaagtga

SEQ ID NO: 66907 - DNA, 1175 bp, Oryza sativa
  unsure (1)..(1175): unsure at all n locations
  Clone ID: PAT_MRT4530_67815C.1
atgggtgtgccttctcccccgccgcctcctccttcgtcgtgcctcagccacggcctactccggcgccaccaccggagcggctcctcagccgctgcaaccgcatactccgccgctggctcattcgcctccgcctccgctttcacggacaatacagaggccaatctcgcggcgccgaaggaggaacacggcagtggcagacacggcgacggcggggcggaagaggaacatggcggcgctggagcggaagagaaacacggcgacgacatggaagaggaacacggcggcggcggatcgggatttctaggggacagaattggtaccgcccagtacaaactctaccagccgttggatcgggtcagatccaacggccaggattttggtaccgggcggtactggtaccgaccgctcatgagccggagcaacgggaacggcggcggcggcgtctggagcacgaggggggcgaggttggagctgcagctgaacctgtcgccgtcggcggtgggtatggaggtggacggcaacgacgacagcgactcgtcgtcggcgacgtcgtgcgtgtcgtcggatggccgcagctccgccggcggtagccccggggacaagtcgccgatggtgatcggcgcctgcacccgttgccttatgtactgcatggtcgccaagaaggactacccgacctgcatcaactgcaagcaaccctccctcgtcgacctcctccagaaccaggacgccgccgccgccgacgccgacgccgacaagaagcgcggcggaaagcgcaagtgaagacgccgccgccgacgaggccaccattgccgccggccatgtccgtccagtggatgctcacacggatggttacctcatcaggatccatgcatgcgtggacgagtgacagccgttggatcatccactggacggtgccggatttcttcatcattattatagtagtagtagcctctttaagtgtctttggtttcgtcataaaaaaccaaaaaaatggttgtgtcaccttatgtattattgttatgggttggtgtgggtgtgttttagtaggggggaatttaatttacgtngtggtggcttaattggttcttgtagcagcagttaattgtaactcccccctttttcattggaagaatgcaagataagacttttagattaagaaaaaaaaaaaaaaaaaa

SEQ ID NO: 66908 - DNA, 507 bp, Oryza sativa
  Clone ID: PAT_MRT4530_67816C.1
atgaacgattttacaattgaggaccatgccctcagcaacacacaggcgcatatgagtggcagtggtgtggagatgcctattccgctggtgaagaggaataggatgaggaggaacaggtctaggaagaggagcaggatgaaggttgcaaggaggacaggagcaaatgaaggaatccagcgatggataggaagaagcagagggctcactgctgcatctcctcctgttcatcgccactgtcactgctgcctcctcccaaccgccacagccaaagccttctatctctccccatctccacccctcttacccttcggtgcttcccattcctttgccaaagtctgcaccattgaggccaaggccaggaacaagccagcaacacactcacccctccctaagccctacagtcctacactacctccatgttcgctccctcagaagcaccgttttaatgtagtccacacccagcctacatggacaggagcaactgatgtggtattctttgccctctag

SEQ ID NO: 66909 - DNA, 1023 bp, Oryza sativa
  Clone ID: PAT_MRT4530_67817C.1
atggctgacatgaccctcagcgagtccgctgctccctctgttgacaacatggccactgggccgcaaatcaacatgggagacatggactttgatctgaagtccagcctcatcacgatgacgcaggctagcccattctgtagcaagccagacgatgatgccaatgcaaacctgcaacagttcctggagatttgcagcacgtacacgatgaagggcgtcaatcctgacgccgtcaggctccgattgtttccgttttctctccttgggaaagcgaagcagtggttttatgccaacttcgctacgaccaacacctgggacaaatgctcaacggcattcttatcaaagttcttcccaatgggcaaaaccaatgccctacgtgggagaatctcaagtttccagcagacaagagacgagtctattcccgaggcgtgggaacgactactggagtatgtggctgcctgtcctcatcatgggatggacgactggctgatcctgcagaacttctataatggactcactcccacgtcccgtgatcacctagacgcggcagctggaggagccttcttctctaagacgggcagaggagccgtcgatctcatagagaagaaggatcttgtttttgcgcaaaccaaaactacagatgctcttagcaaaaagctagctgctaatgacaagaccctggaaaatataaatgttaagctagatggcttcgcttctgcatttcaagaccagctgagttttaataaaatgattgaaacccggttggcacaattagctgctctagtacctgctaatgaatctggaaggattctggggcaacccaaatcctctgttgaaaatgttaaggcgatcacgatgaggggaggagctagccacactcgggaagcaccatctgacaacacggttaatgaagaggttcagccagagaagaccttgccgcaagagtactgcgacacaaggctgttgccattccctcaaagatacaagaagccattggtggacgagcagtttgctcgttttgtttag

SEQ ID NO: 66910 - DNA, 315 bp, Oryza sativa
  Clone ID: PAT_MRT4530_67818C.1
atgtcatgcgccaacgaggtgtcattggagaggcagctcaacgaccggcagtccggcacagggcatctttggaagggcgtcgtagttgccgggccgaagacgacgggtgtctactgtcctgtacacatacgcaacgacagtttgccggtgccggtgccggtgcggctgccgtatcgcgtggctgcctctggcaccggcgcggccatcgaccgttcaattcaagccgcgatgaggcccgtgagcaggcctcgtgtgttgctctcccaagttgggcaaaatttctcagaatcgcgtggtcaactgctgatagcctga

SEQ ID NO: 66911 - DNA, 346 bp, Oryza sativa
  unsure (1)..(346): unsure at all n locations
  Clone ID: PAT_MRT4530_67819C.1
cagcccctcggggangangtncgacngcgtcntgcactgcaccgtcggcntntgnttttttnctttcganccgcngatggcgccccncgggaaggtgatcgacatcacgcccaacttctcagccatgcctcacctcggcgctgcannctgtgaccctncngcggaancngntggtgccgctctgctgtccccnaacaangccnacctggaattctttgtctggctggtnggggaacggaactcacgacggtggtggantccaaggggggccngtaccaattccncctataatnaatcttattacattcattgggccgtcgtttacaaacctcctnactngggaaaa

SEQ ID NO: 66912 - DNA, 1794 bp, Oryza sativa
  Clone ID: PAT_MRT4530_6781C.1
ttgttagaatcacatacgagtgatcaaaagctcagatcagatcaatggaggctctagtggcggcggcggcggcggctgcgagggatcagccatggctgctgctgccgtggtcctggctcgccggcgtcgtggtggtggtcgtctacttctacgcgccgtggtggggcgtccggcgggtgccggggccggccgccctccccgtcgtcggccacctgccgctgctcgccgcccatggccccgacgtgttcgccgtcctcgccaagaaatacgggcccatcttcaggtttcatttggggaggcagccgctggtgattgtggcggaggcggagctgtgcaaggaggtcgggatcaggcagtttaagagcatcgcaaaccggagcttgccggcgcctatcgccggctcccctctccaccagaagggcctcttcttcacaagtgtaatgcgagaacgcttgcgttgcagggacgcgaggtggtcggcgatgaggaacacgatcatctcgctgtaccagccgtcgcacctcgccggcctcatccccaccatgcacagctgcgtcgcgcgcgccgcggacgccatagcggcggcggagcaacgcgacgtcgacttctccgacctgtcactcaagctcgccaccgacgtcatcggccaggcggcgttcggcgtcgacttcggcctgacggccgccgcggcggcagcaccgcgctccgacgacgccgacgccgacggcggcgaggcggcggagttcatcagggagcacgtccactccaccacctccctcaagatggacctctcggggtcgctctccatcgtgctcggcctcgtcgcgccggcgctgcaggggcccgcgcggcggctgctgagccgcgtcccggcgacggcggactggcggaccgcgcgcgccaacgagcggctgcgggcgcgcgtgggggcggtcgtggcgaggcgggagcgcgccggcggcgaggcgaggcgggcgcggcgggacttcctgtccgccgtgctcaacgcccgcgacggcggcagcgacaggatgcgggcgctgctcacgccggactacgtcggcgcgctcacctacgagcacctcctcgccggctccgccaccacggcgttcacgctctcctccgccgtgtacctcgtcgccggccacccgggcgtcgaggccaagctgctcgacgaggtcgaccgcttcggcccgcccgacgcggtcccgacggcagacgacctggagcacaagttcccctacctcgaccaggtgataaaggaggcgatgaggttctacacggtgtcgccgctcatcgcgagggagacgtcggagcaagtagaggtcggaggctacacactcccaaaggggacgtgggtgtggctggcgccgggggtcctgtcgcgcgacgaggcgcagttccgggacgccggcgagttccggccggagaggttcgacgccggcggcgaggaggagcggcggcggcactcgtacgcgcacgtgccgttcgggctgggcccgcgcgcgtgcccggggcggcggttcgcgctgccaggaggtgaagctggccatggcgcacctctaccgccgcttcgtgttccgccggtcgccgcggatggagtcgccgccggagctccagttcgggatggtgctcagcttcaggcgcggcgtcaagctcaccggtcccgtgttccatattaccaccaaaccagcagcattgctagtagggaaactcttatcaccccttatcacctcagaatgccaaaataacaggttcctgaagaagagaatatcttttggctactgtggttaa

SEQ ID NO: 66913 - DNA, 1076 bp, Oryza sativa
  Clone ID: PAT_MRT4530_67820C.1
atggcttccaccgtcgccctcaagggccgcccgctcgccaccctcctcaggcagctcctcgccgccgacgcgccgcccgccgccaccgggaggcccgtcgccgccgctcccgccgcctccgggaagcccgtgaccgcccccgccgccgcgaccgccaccaacgccgcctcccgccgcctgtacaacaccgagggcgcgccgctccgccgctacgacgtcgtcgacgagtccggcaccgacagcggcgacgagtacgacgccaccgacgacggccgccgcctcaccgtccccttcttcttctccgcctccgacgtgctcgacccgttcggcgcgccgacgagcctgggacgactgctggccctgatggaggacgcggcggtggcgacggcggcggcgccggggaccaacggcctcgcaaccgcggctgcacggcgcggcgggtggtgggtggcgaaggaggacgacgacgcggtgcacctcaaggtctcgatgcccgggctggggaaggagcacgtgaaggtgtgggcggagcagaacagcctggtgatcaagggcgagggggagaaggacccggaggacgacgccgacgccgcgccgccgcgctacacccgccgcatcgagctccccgccgacgcgttcaaaatggacaagatcaaggcggagatgaagaacggcgtgctcagggtggccgtgcccaagctcaaggaggaggagcgcaaggacgtcttccaggtcaatgtcgagtaggaggtccgaccaagtaagctctagtgctaatggagagcgaggctatctagagtaggagtaagtttgagactagatcgagagcgaggctatctagagtaggaataagtttgagactagatcgagaggcctttttgtgatggtgtccgcgactcgtgttctgatccctgcttgcgttttgttcatcctgtgggggtttctgatgttttgttcatcctgtggagtttctgatggtggtgaaaacagtaacaacagtgcaaatctttgctgatgatggttaaaaaaaagtactagtgctccgagttactgagcaaaaaaaaaaaaaaaaaaaa

SEQ ID NO: 66914 - DNA, 663 bp, Oryza sativa
  Clone ID: PAT_MRT4530_67821C.1
ggcttctccgccactccggaaccttctccatcccctcctccaagaaagccgcggcttacaaaaggctgcacaccctgacacctccggccgggcattccccccaccgcttcagcttccaccgcaagaatcacagagcgctcgaaacaagggagaggagagagagagagagagagagagagagagagagagagagagtcatccatggcttccaccgtcgccctcaagggccgcccgctcgccaccctcctcaggcagctcctcgccgccgacgcgccgcccgccgccaccgggaggcccgtcgccgccgctcccgccgcctccgggaagcccgtgaccgcccccgccgccgcgaccgccaccaacgccgactcccgccgcctgtacaacaccgagggcgcgccgctccgccgctacgacgtcgtcgacgagtccggcaccgacagcggtgacgagtacgacgccaccgactacggccgccgcctcaccgtccccttcttcttctccgcctacgacgtgcttcacccgttcggcgcgccgacgagcctgggacgactgttgtacctgatggaagacgcggtcggagccactgcagcgatgcctgggacccacggactcgtaagcgcggctgcacggagacgcgggtggtgtttgacgaaggagacg

SEQ ID NO: 66915 - DNA, 199 bp, Oryza sativa
  Clone ID: PAT_MRT4530_67822C.1
ccggccgggatccttctcacaactcaaacattacagcgaaagcataacaactagaatcccaccacaatgaagatcattttcttctttgctctccttgctattgctgcatgtagcgcctctgcgcagtttgatgctgctactcacgtttacaggtaatatcacctgcacctgcatctcctgctgcacccacacattgctt

SEQ ID NO: 66916 - DNA, 1137 bp, Oryza sativa
  Clone ID: PAT_MRT4530_67823C.1
atgcccgtgcccgtcgggtatgggtacgggcacggagttttgctcgctaaccctagtggggtggcagtggagcctgcaaaggtaaatgtggtctacggtggctctaggaaagagaataggggtttgtgtggtccaggcaagaagcaagacgtgctcacgctgaggggcgacacgggaggcaacccagctgccgccgccgtgccacccccaccgccctccttctacctcgccgccgcccgagcgggccgccagaaaccgcgcggccgcaaggacggcggcggtggggcttcctccccccgaggtcgcggcgttcggagcccacgaccccgacctagcttcggggcggcgacttcggcggctgcgacgtcgagctcgacggtggcacatggcttcggcgaggtggcggtgccgacgacggttgaagagatgggcgaccgggccgacgacgagaaggcggtgctggctcctacgctctcctgcgcggatctggtgcggggggatggatcccgagccgctggcggtggtgatgcgcgtggaggcggcgggatggccggatccggaaccctcctgtccgggtccggcgcgggaggccgagctccgaccccaggcagcgaggcggcgggggcgcgcggtgctgggcggcggtggctgaaggcggcggggatggcgatggcggcggggacggagctggccgagggcgcggaggcggcggcggcggtcccgtggctgcgacggcgcggtgcctggcggctgcggcggtggtgcccccccaaatccgcgcctctcggccgggtctggagggtggcggcagttggcgacggcggcggtggtgtggcgatggcggcggcggtcgtggatgtggtggctgctgtgtcaactggcggcggcggcgacggaagacatggagtcgggcagctagctgctcggtgttggaggacgacggcgcaccaccagtttgcgaagccggtggttggcgtcggtggcagcgacgacggcggctgcgactctgaaggcggtggcgacgtcggcggcagggaaggagtcgggtgcgaggtggctgggtgttcggcagcagcggctgcggtggtggtgaccgtgtttgcggtcaccggagtcatggcggcctcggttgactag

SEQ ID NO: 66917 - DNA, 867 bp, Oryza sativa
  unsure (1)..(867): unsure at all n locations
  Clone ID: PAT_MRT4530_67824C.1
tccggtccgnattccgggtcgacccagcgtccgacattgtgtctcttgagcgtgttcagccttgcttggatcatgtacgacataggtatgtgttagcagaggctggtgatacattattcggctacatttatcggtacaaaacattacaaagatattattgctgatgtgaatatactccaaggaaccgtatttcatgaggataccgcacaggatttggctggtgctgttgagtgtgtgcaaaatgatgaccagaagggtgaagaaaacctcgggacatcttatcgagagaaatcaaaacagttgagaaaatcaaaacctgctgcacaccggggtttcttagcacgtgccaatggaattcctgctctggagctatacaaacttgctcagaaaaagaacaggaaacttgttctgtgcggacattcgcttggtggagcggtagctgctttggctacccttgcaatattaagagtacttgcatcctcatctccatctaaagagcctgacaggcttcaggtgaagtgtatcacgttttctcagccaccagttgggaatgctgcactgagagactacgttcatcgaagaggatggcaagattatttcaaatcctactgtattccagaggacttggtgccacgtattttatcgccggcatactttcaccactataatgcccaaacacctgataacactaacgcaaaatctgatgaagaaaatgacgcaaaatctgtatgttcaaaagagaacaatggggagcaacttgttctaggtgttggtcctgttcaaaagtcactctggagactttcaaagttgtttctttggaaggagtgcgaaaaagtttaagtgtgcttcaaaaacaaccaatatttt

SEQ ID NO: 66918 - DNA, 469 bp, Oryza sativa
  Clone ID: PAT_MRT4530_67825C.1
agatagaatgcacaaagttttttttttttttttttttgggaaaaaggcagggtaattcatatggaaataataagttcttctagcctaggaaataggatatggtcatatgcaattgttaccaactacaaataacaacagtaggttcctcctctcttgtatcaagaacaaaaattgacaagataaacattacaggggctacttgcgttcttcgaaactcctggtgatgaggactaattttagtacatagtagtggcatatccagcagttttacagcagaaatagcagagaatgaaatataggaagttgaggcataacttgcgcgtttctttgggcggctcaaattggttacttttctatccaccaaattgatcatccggggtaacttgggcacggatcagctcccgaacgggatctgtaagacgacgtggtggttttctacctgttcagtgactgtttgctctgatggcag

SEQ ID NO: 66919 - DNA, 385 bp, Oryza sativa
  Clone ID: PAT_MRT4530_67826C.1
aacagcacatctggagatagactatacaatatactggttaattaggctcggtagctagagagtcataaatgaagaagcgcatgaacttttacggccggacgcgagcagttcagtgatggctatggcggatacaggtggaggaggagcattggcgaccccatggtacgcgacggcatggccataatgcatgtcgtaagtgaacataaagggaaacaggtgtggcaggacgctgcatcaacagcgaggtgaagggattgacggaaagctatgtacgcgatgcgaggacggaacggtgcggatatctctgccttgaggaggctcaaccaagcaatctaccttctgactactggtgccagggagagcgccttcaggaacatcaagacca

SEQ ID NO: 66920 - DNA, 663 bp, Oryza sativa
  Clone ID: PAT_MRT4530_67827C.1
atgagcaagaagaggagagaaggaggcggcggaggaaacggcggctgcgacccgccggtgaccgatgcgctatccatggacagcggcctccgcgaggtgtccctctccgtggtcttctccgtctggtgcctcctcctccttcgctcccagtgtcatggatcgatcaatgtcatgtcaccctggcgtttgattgatctcttctttgtagatttctacgacgatgtcgaggacggaatgcgtgaaaactactgcaagggcaaggccgcgaacggccgcatccccgacggcgcggcggcccaccggctcgagccaagcggcgcggagtacaactacgcggcggcgtccaagggcgcgccaaggtgctcgcccacaatcgcgaggccaagggcgccgccaacttcctcggcgccacgctcctccgccgcctctgccgcctcatctcctccgctgccacacagctccgccgccacgctcctccgccacctccgctcctccgccgccacacagctccgccgtctgcgccgacgtccgcgccgccgcactcgcctcacctcgctgaccgcacacgccgaccgcccgtccctgcgttcgtcctcgccgtgcgagagagaaaagagggcggaatcaggcatggggcagttagggcttgagccccatgcctag

SEQ ID NO: 66921 - DNA, 639 bp, Oryza sativa
  Clone ID: PAT_MRT4530_67828C.1
atggccgccgccgctcggacccatcacagggacaacacaagcgcattgtcgtcggcgtcggtgtcgtcagtcaacacgtccgttagctccacgccaaaggggtcgtcggcggcgacgaggccacgcacgccggccataacgcggagcatcccggcgatggccgccgccgcttggacccatcacagggacagaacacaagcgctgcacgtgttcggctccgtcgccgccgctggccaacccaatgttttgtcactatccaggcggctcgccgtggtccatcaatctcttgctctggcgcccaacagtccttcaccatctccagccaccctccatccctttccatctcaccggcatctggccatccctgtctcctgccgccctccatccctccccatctgctttctccgtccaagtggcggcacctctagctcctcaaaatctagcatgtgggtagcgatttcagccatcactccattgccaccatgtggcgcatcaagttcgtactgctccggaagatgtcaaccgtccagttcttacaaggagaagaatgatttcggatccgacaaggccttatcggctctgggcgtccccagccgaagttcccttaggttccttggaagccttgtcaagacggcgtaa

SEQ ID NO: 66922 - DNA, 3183 bp, Oryza sativa
  Clone ID: PAT_MRT4530_67829C.1
atgcatctgtcgctatggaagccgctggcgaactgcgccacgctgctcaagaaccggccgccgcggccgccggcggcgggaggggcggcggggggaagcgggcggcggctgcaggagagcaagctgcgggaggcgctggaggaggcgtcggaggacgggtcgctcgccaagtcccgcgacgcggcgctcctcgacgatggcggcggcggtggggacggtggaggggaggaggggtccggcgtcgggcggtcccggtcgctggcgcggctgaacgcgcagcgcgagttcctgcgggcgacggcggtggcggcggagcgcgcgttcctgtcgcccgacgcgctcccggcgctggaggaggcgctcgcgacgttcctgtccatgtaccccaagtactcgtcggcggcggacgtggaccgcctccgcgccgacgagtacccgcacctggacaaggtatgcctcgactactgcggcttcggcctcttctcctacctccagagctgcaacccttccgactccaccgcgtccttcacgctgtctgagatcaccgccaacctcagcaaccatgcgctctacggcgccgccgagaagggcacctgcgagcacgacgtcaaggcccgcatcatggagtacctcaacatcccggagtcggagtactgcctcgtcttcacggtcagccgcggctccgcgttccggctgctcgccgagtgctaccccttcggcaccaacaaacggctgctcaccatgttcgaccatgagtcccagtccgtgaattggatggcgcagtccgcgcgcgacaagggggccaaggcctacaccgcctggttcaagtggcctaccctcaagatctgctccaccgagctccggaagctgatctcaaccaagaagcggcggcgcaagaaggactccgctacggggctattcgtgttcccggtgcagtcgagggtgaccggagcgaagtactcgtatcaatggatggcattggcgcagcagaatcactggcatgtcctgctggacgccggggcattggggcctaaggacatggactcattggggttgtctttgttccggccagacttcatcatcacatcattttacagggtgtttggggctgacccgacgggctttggctgcttgctgatcaagaagtcggtcatgtcgtgcttgcagagcccaaatggcgggacgggtacagggatggtgcggatcatgccagtcttccctcaatatttgagtgattcggtcgatgggtttgatggtgtcctggatggccttgaggatgatacaatcatcccaatcgaggagggttcagcgtcgaacagtctccatgctacgcacttgcctgcattctcaggcgcttattcatcagctcaggtgagggaggtcatcgaggatgaaatggaccaggacagctctgatagggatggtgccagcacgatatatgaggagaatgagagtgtatctgtaggggaggtgatgaagagcccagtgttcagtgaggatgagtcatcggagaactctttctgggttgatttgggccagagtccacttggttcagaccattcagaacagtcaagcaaggggaaattaggatctcctctgccagcgtcttggttttctggtaggaagaatgtgaagaagacatcgccaaaggttctgtccaaactgagaaggagccctattcctgacaaccatgttgtgtcctttgatgctgctgtgagatcagtatcacaagagctagaacatgggaaggattttactgaggaagattgttcacaaaatggtatcaagaatgttgttcctatcaaggtcagtgagattgaagaagatcaagatggtaaacaaaacaaaaggtttgtaaagttctcttgtgctaatggccctgcagaaggtagctcaacctctgtttttgggggttgcacagcccgtgggaatggctccacttcggagatttgttcagaagccaaagatagtgccatcagaagggaaaatgaaggggacttccgtctactgggaaggagagaagcacataatagcagattcaatggtggtaggtttgttggagtggaagaagcagagcgagtgtcaagtatgggccgcaaggtatcattcagcatggaggatagcaggctgtgtcgcaattcggaaactgcagaaacatctggatatgcaatgggagatgaggatgatgatgaagaatacagtgactatgatgatattcaggatggcaggcgagaacctgaaattatttgcaagcattttgatcatgtgaaccagctaggtctcagtaagactacgttaagactgcggtaccttatcaactggttggtgacctcactactgcaacttcgcttgcctgattccggagatggtgaaggggtgcctcttgtttacatctacggtccaaagatcaaatatgaacggggagcagcggttgcattcaatataaaggactgcagtactggaacttcactgatcaatcctgaaactgtacaaaaattggcagagaaagaaggactctctttgggcattggctttcttagtcatattcgcatcatggacaaccaaaaacaaggggtggttgatgtggggctcagttcttccttgtgtcggcctacgtcaaacggccgacgtgagaagaaaagtagcaagaatgatataattgggattgaagtggttacagcttctcttgggttcctcacaaactttgaggatgtatacaggttgtgggcatttgttgcaaaatttctggattcatcatttcttgagcaacagaggctatcatcaattcccgaggattcagagagatagtatttagagggtttccattatgcctgttgcaactacatacatacacggaggatggcggcgacggcaatgtaattgtgaggacataagaagagatgtcaaggagcttttgcttggagcttttgtatccccaaaaatgactccaccttggcataaaggggccatcttgtggtgcggctggtatatttcttcgttcttctttttccctctttttctaggatgcagcttttttgcttgtagattttgttccagatttatatgtgccacctaattattttgagcagcatcttttccatgtactcgtttgtaaagtggctcccttggccctgaagttaagcttgcttgtatgattcttgccaaaaaaaaaaaaaaaaaaaa

SEQ ID NO: 66923 - DNA, 431 bp, Oryza sativa
  unsure (1)..(431): unsure at all n locations
  Clone ID: PAT_MRT4530_6782C.1
tgccgtccgtcgcctccgtcgggtgcgcacgaaggagaggaaccccgtccaccccttcgcagccgctgaagaccatcggagcgccgtcgccgtcggggacccgagccgagccgcagtcgaacctcgtcgccggccatcgttngtcgtcgtccgtcgttgttctttgcaccgtttccgacgttccgnaggagagcgttttcgttgagaaaaggttcaggagtgtttgaagaagctcaagttgaagagaaaggatccagaaggagaagacgtttggcttataccccagttgagctgcctgtgggaatggagctgaagccattgctagaccgttaattccgctgctgtttttcttttcttttgtaagtatgtaacgttattattatgatggatttttatattaaattgttagtttgtgtaaaaaaaaaaaaaaa

SEQ ID NO: 66924 - DNA, 2244 bp, Oryza sativa
  Clone ID: PAT_MRT4530_67830C.1
ctacttgtcatacttcctctgatatttgttgattatcttagccgaattcacttgaaaaccctttgcacggaccctatcggctgattggccagctgtatgtaccatattaacaggaaaaggattactatcgaccttcattggcctcttcgaatcatcaaacttgatttttcctccctcaatagccgtttggatctgctgcctgaagaccttgcagtcattagttgtatgagacccagaattatgccacttacaatacctcttcttacccaactcttcagccgatggaattgtatgtccggcaggaagttgaatctgtttttctcgaagtagcaaatcaaatatcttatcagccttggttatgtcaaagtcatacctctcctcttttcctgagttcttcacccattggcacggtataacctgtttgctcctaacccactcggctgcagctatttcggaatcatcatcctcctcatccgacccatacatataaggatagacatgattaatctccctagagttcttcctagcttccgcaaacctttgttcatgcaaagctaccttctgtgtaaggtgcgacaagctttcgaaattttcatatgagaatttttccctgatcggagcaatcatcccttgaaaagccaaatcggataactgggcatcagtcaaactcaagctgtaacacttattcctcattttcctgaacctttgaatatactcacgcaccggctcatcatgcttttgcttgattgacgtgagatcagacagtttcatctcattaatcccactaaccctcaaagcatctacaaccgatgcctcaccacactgagctaaaaatcggctaatgtgctcataagtcgatgtagtgtcttgtcctgaaaactttgagaaatctggtgctttgaaccggttaggtaaaggaactctttcaaaccattcaggataaggttgtcggtacaaatttccagtctcttttggtttaagcccaaattgctccctcattacatcagctatcacatcagcccatggtcgctgctgaggtgttccttgaggttgttgtggtgtgggctcaaactggttgtaaaactgaggttgaactgatcctgcctgttggtactgaacttgtggtgatggaggttgatattgataactcaaattgccccctggtaattgtgaaggttcggcaccaggcattgcaaatccagccgacgcgttcattgaggcttgctgctgaatcggctgaacgacctgctgtctcaacggtgtctgctgaatcggctgtaaagccggtcgtcttggtggcgtctgctgaactggttgcacgacctgctggattggggatgtttgttgaataggctgcacaacctgttgcctgggcggcgtttgctgattcggctgctgctgagccgaattaatagcattctgaggaggtagaaacatagatgcaaccgggtcttgtgttatctgagtcacattcggtccaggatgctgtgattgctctcttaccaatatttgaggattgactaattgacctgaggccgacgacggcactgcaggtgctggagccgatgctggtaccgtcggctgagctgatgatgtaacaggaggaactccctgagtaagtggatgaacatcggtaatcaaagtccgataatttggaaaagtacccccttgcaaataaactgggcctgcagcctgatgttcagctattgaaccatcggctaccgatttcatcatatttgacaaggtattagttaatactccagattgattgatcaaagcattatacacggcatagtcaacccgatcttgaaagttattgaaaaaatcttggaatgcattgtcattctgattaagatttcccctttgcggtccctgagtgccgtcaccttgaactccatgtacttcacgaaagtagtcaccctggttctcctgggtcgacccatctgtaacacctttgtcactcggctgggctgatccatctggaacttgtttcttttctccctctttaaaagagccgatcccaggatcatcaggaaccaccttcaccttgtacttcataagtctttgcggcagacttttgcccacatttatctctaagtaatttacataaaatatctctgtttccgcaacaacccttatattcgattccgcttcgatcccatcttcatctccgatgctgatattaccaaatttggtcgttaacagccgcagacgccgccgccgcatctcttgggtgagagccat

SEQ ID NO: 66925 - DNA, 521 bp, Oryza sativa
  unsure (1)..(521): unsure at all n locations
  Clone ID: PAT_MRT4530_67831C.1
acgcctgcagtaccgtccggaattcccgggtcgacccacgcgtccggactggtgaaacctatgacaatcacctcagatgattgtaagtgttcagctgagaggttaatatgcatatagggaaaaaaattggcatgccaattccgtgttcaacctttgtaaataatgacgtttcattacnttgcatatcatatgctctggagctatttgtcttatgttaatgagttgcatgcagccttgcatccaatttgaccctgtgcaaaagacaggtttcagttttggtatgtagacaagtctgacatcatttgcacctgtctcctgtttctaattattctgtttcacagccatttggttttcaatggtgcccctttagtggatgtcacccagctagcatcgtgtatttgagtaagcatgtctcttcttatctcatatgtatgggtcttgtatatgcattaatgatttacaagccaagagccaggtatttggtcatagtactaattttagtaaaaaaaaaaaaaaaaaaa

SEQ ID NO: 66926 - DNA, 726 bp, Oryza sativa
  Clone ID: PAT_MRT4530_67832C.1
ccggccgggatcgtccgccgatcgccgacacaatacaagaatcatggcgagcttacctccgcccgaaaccgtcagcatcggcgagaccaaccgcaaccttacctgtggtcgcacgcgctgctccactcatggaacacacagatgtctactggcatgtattcagaatggtctaccaacctattccattccaaccatgggtgattgcagccacgccacaagcctacagctgggactaaagctgctgccactgtccccagaacgacattagacttccaccgtactggagaccttcatacaaatgctatctcccttcttgagagattcatccttaacgaccaatgctgtgactagataacataccctctaggataagtcctttcttcgagactgagctctacggatctcttggaggatgataacgaccattccatctccctggagcctggacaattgccccatctgtatctccatccagtcgtgaccccgatctcacgtataggacgctgactccactgagtcgcctacttcgcttctacacatctaaagatggatctcttgcgtgcgtcattagtgatacacgttgcactagtcagacactactacatcttccatgctaacatctgcctcttgtgttcgtcactcgagccctaatgacttatctgcctatttactgatgagatagactatgcatcgtgagttgggtgacagctctctgcacgtgatgcg

SEQ ID NO: 66927 - DNA, 558 bp, Oryza sativa
  Clone ID: PAT_MRT4530_67833C.1
atgtcgcagtcctcaaggtggaggacggcgagcgcggcgcaggagaagaaggccctggtcgatgacccagtacggcggggtgtcggggtggccgcggcgcaccccgtcgcactcgatggcgagctcccggacgcccttgctcgccagggcggggaaccaggtgggcaggtggtggaagtggcgggcgtggacgcaggcgcggaagccgacgacgggcgccgcgcaccgccacaggtcgcgggcggagggcgcgccgcggcagccccagccgaggcggatgtcgaggtagcgcacggactcccaccggcgccgccacgcgtgggagaggcagcacgtgcggaccagcaggtcgaaggggatccgcgcgaggatgatgtcgaggacgtccgtggggagcgacatcagctcgtcctccctcgccgccgccgccatattccggcggttcggattcgccgttgcttcttcgcctcgtgttatgaaaatagatgcacaacggagaaacgaattttacgtagaaaacccttgcggaaaaaaactatgggcgccgaccggcaatga

SEQ ID NO: 66928 - DNA, 757 bp, Oryza sativa
  Clone ID: PAT_MRT4530_67834C.1
ccttcgcctgctcggcggcgaaacccgggcggccgcccccctctccccgccccggcgcggggagagcggccgccgcggcgcccgcggcggccgtcgcgctggtcggcgcgttcggggccgccccccccgccggggcgaccaaacccttcgcgagatcagaagcgaaaccctagcggcgaatccccacacgacgcgccggagcggggagaggggccatggcggcggcggcggcggcggtggagaaggtcaaggcgctctgggactcgcaggtcaacgacgaggaggcttgggcgttcaactacaagctgatgaaggctggtggtctgtttgttgcatccatcttcgtgatgcgcaactttggtgacctgatggccatctaaagaggagctgatgcgacagtaacgtggatccaccagagctgtgtgtcttgttagctgttagttttcacttttatgtcagcaacgcaaccagacttgttcttaggatcatgaattacaaactgctcactcgagaattgagatagttttcatgatataatggaagccagagtgctactggttttgtgaatcagcaggcgaatctgcgaaaactcaattgggatatcctttagttgagactggccaagttctctacactccaaaaaaaaatgtagtgcattgtactaaaaaaaaaaaaaaaaaaatgacttgctgagaaatctttatctcactgggagcgcaacaacaccgagtacaagctcgacactttcagctctgtc

SEQ ID NO: 66929 - DNA, 201 bp, Oryza sativa
  Clone ID: PAT_MRT4530_67835C.1
tttttctcgactggcactgggttaacagttctggaagattttaacctggctggggccctttgaagccaatatctatatgatgaacagacattttatccgctacagctagtgatattatcagttacatgtctcgaaccttgtggccatatcaactgaagcaccacctccatgctgaaggtgaaatttagaatgactagacct

SEQ ID NO: 66930 - DNA, 495 bp, Oryza sativa
  Clone ID: PAT_MRT4530_67836C.1
atgacatgtggggccagggatgaggtggggtcggtgtgtggttgggctgcaacggtggggcccaggggccgggttcgttcggtgagtgccgttggagccggcgatgaggacggcccatctggtgtcctcggcggcgtcgtcctccgccaccgcgtcatccgccacgccgcgctcagacggcaggcggaggttgctctcctcctcccctcatggttcctccatccgcggccgcgtgcccgcgccaccgcgacggcgaggagcgcgaagaggagcagcaccgcgagcggtggcaggacgaggcggaggcggaggcgagtgcgcgccgccagggcttcccgtcctgtcgcggcgcggcgaggcactgttccgtgcggaggaagaagaggcgggctgtctacctcctgggagcgggcgccggcgcggccgcacgccctcggccaccgccgcctccccgccgcgcgctctcgctgtcgcctccgcgccgccccgcgctag

SEQ ID NO: 66931 - DNA, 243 bp, Oryza sativa
  Clone ID: PAT_MRT4530_67837C.1
atgaaagcaaaaggaagcggaagaggggggaagctatggatcttcgtttcggacttcatcgacgccggagccctctcctccctcctccaaggcggcagcggcgccgggcgccggcttcacgtcgcgggcgtcgcgctggcagccccgcgcggcgtggcgtttatctacggcgcgggcgccggcgctagctcgtcagagatgctcgcgcggaggaggaaccgaggaagagaagaggggggatga

SEQ ID NO: 66932 - DNA, 1521 bp, Oryza sativa
  Clone ID: PAT_MRT4530_67838C.1
agtggatccccgggctgcaggctcgagccgacctaaccgcgaacccccaactccgacgagaacgacatggacgccggcggcgaggaggcgaagcaggagcgccacctggtgctggcccacaagctcttcctcctctcccaccccgacctcgacgacctcgccaaggtcgccctccgctccgacgccctcgacgccgtcaagtccgatggcatggcgccgctgttcgagtcgctggccgccgcgggcgtcctggagccggacgacgcgctgctcgccgagatgcgcgcgcggatcgacgaggaggtccgcaagctcgacgagaaaattgctgatgctgaagagaatttgggtgagagcgaagtgcgtgaggcccatctggcgaaatccttgtacttcatgagggttggagagaaggaaaaagcactggagcagcttaaagttactgaagggaaaactgtagctgttggccagaaaatggatcttgtgttctacactttgcaaataggccttttccacatggactttgatctcatctcaaaatccattgacaaggcaaagaacctgtttgaggaaggaggcgactgggagagaaagaaccgattgaaagtatatgaaggcctatacttcatggcaacgagaaacttcaagaaagctgccagcttatttttagattccatctcaactttcacaacttacgagttgtttccatatgatacttttgtcttctatacagtcatcacaagcataatcacattggatcgtgtatctctaaaacaaaaggtggtagatgcaccagaaattttggcagtgattggcaaagtacctcatctatctgagtttctgaactccctttacaattgccagtacaagtcattttttgttgcattctctggcatgacggagcagattaagttggatcgctatcttcagcctcatttccgctactatatgagggaagtgcggaccgttgtctattcacagtttttggagtcatacaagagtgtgacaatggaagcgatggccgcagcatttggtgtgactgttgatttcatagaccaggaattgtcgcggttcattgcagctgggaagcttcactgcaagatcgataaggttgctggtgttctggagacaaaccgacctgacgctaggaatgccttctaccaagcgaccatcaagcaaggggacttcttgctgaaccgcatccagaaactgtcacgagtcattgacttgtaaattcaatggtctacgttggacgttggaggtgtgatccttctagatccctgcaaagctccccatggacataaaccgtactgaagttgctgttctacttgtactcctaggctcatgagaacatgatctttatctcggtttgattttattgcggacagcaaaaaggttttaaagagaacctccgtgtgcaatttcagtaagtgtgctttagatttgtagaacgagaagagtgcatgtctttctgagatgaatctgttcgttcattttcaaaaaaaaaaaaaaacctcgtgc

SEQ ID NO: 66933 - DNA, 106 bp, Oryza sativa
  unsure (1)..(106): unsure at all n locations
  Clone ID: PAT_MRT4530_67839C.1
agcttcgggagaactctccccgcgcggccaagggtacagtgcggatggtggcgggttcnacagcgtgagggctcgcgcggtgacgggacggaaggtgagcggcaag

SEQ ID NO: 66934 - DNA, 156 bp, Oryza sativa
  Clone ID: PAT_MRT4530_6783C.1
atggccgcggtggacaaggtcaacagtcgcgatgacgtgagcgagggccacaagacggacaatgttgaggatggcaacgtcggcatgacggatgcgaacgacggtggcagccatggagggagaggacgacgagatggacgcaggcgatggcagtag

SEQ ID NO: 66935 - DNA, 465 bp, Oryza sativa
  Clone ID: PAT_MRT4530_67840C.1
acagagattcaagttgaccgtgatcttttcgggattcaactaattaaattcaaagtatccaacccagaaccagcatttcattttccacctatttttattggcccgttaaatggtttggggagggattttccagaaaaaccaacctaaacccttgctgttgtgggcctttcaaaggtttttactccagttcccccaaaaatgggttttagcaaatagggtttggggtttgaaactgaacctacaatttaacctttggcctgttttgttggggccgattgcaacaggttaagtagctggggctggccctggtttggcagttccattgcttgactgaccacctccagcaggatttccagcattactgatcgccccttacttgctggcaacatctgaacttccacaactgttaatgggttgctgcggtgcagcttacccactaggttaaccggccaaagcggcctgtgt

SEQ ID NO: 66936 - DNA, 1252 bp, Oryza sativa
  Clone ID: PAT_MRT4530_67841C.1
aactaaataatggactcaacctgattttgacatattacaaactgttttagtacaagtctttgtttacatcaatacttattgggacaactgggggtagggatgacagtagtttaatccataggtgcccattgcccaactctatttcacctacaaataaagaaataaagaaaaagtgtgtttttagtaaaactagcggactaatgggtacccatatttataatggattactcccatctaatcagggatttggggtgtactcgaatagcattaacattttcataaatgttaatgttctcatagtattatgtacaaaaaatgtgcaaagaatataaactataaaacaaccttttgattcagtaccaatcttttgagatgaaatctgctctgctgtacaccccaatggtctacaactgaaattgtattgtaaacattagtgtttcacaggtgctgctcatggcattgaagaacactcctttgagtacttcggcaagttgaattgcactgttcgtgcaggaaagtctggtggccgctggaatacaactgaagcagcatgtatcaggatgccagcagtcagaccccatattacgtacttctcactccctttctcgtaattgaagtaatgaattgtgaattcttgtcccatccattcacgctcctcagatgtccttttctcatccttgagaaacatctccaagggtacatcgaaaatgctatccacctcatcaacattaagaacaggtttaaatgcttgtatatcagagagtatgccaacaacagggacaactaccagaagatgctttgacaagaagtgctcaagagaggcaacaacagtaacagaagctggatcaagtccaatctcctcctttgcctcccttaatgctgttgctgcatcatcagcatcaccctcctcagcctttcctcctggcaaagaaacctccccggagtgggaggagagtttggaggagcgcttggtgaggaggacacggagctcgccggcggcgccgcggaagaggcagatcagcacggcggccctccgagggcggaacagcagctcggccggcggcgcggccgcgtcgggcgagggggccgccgcggcggcgtacggggaggggcgcgggcggtggagcctgaggcgctggatgagcgcctggatgtcggcgccgggtgcctccatggaaggtgggatggtgagatcggtggacatggaaagcttaggcacttgcggacgcgtgggtcgacccgggaattccgg

SEQ ID NO: 66937 - DNA, 249 bp, Oryza sativa
  Clone ID: PAT_MRT4530_67842C.1
atggaggaaggttatagggaactaagacgaccggccaacaactatgagaggtctttgggcacaaccaaaatagctgatgaagatgcagtagagagaacagggaagatgccagccgcccttgggcagagcatcagcaggatatggggaacgccgttcttgggagcggctcgatggagcagctctgcacggtgcggcctcggaaccggtgcagcggtgctggcggacagcgcctggtggacggcggcgtaa

SEQ ID NO: 66938 - DNA, 258 bp, Oryza sativa
  Clone ID: PAT_MRT4530_67843C.1
atgaacatcgcgttactacgtcgttctgagacgagagctgagaagagtggaggtggtggggaaagtgaagggcggcccgagggcgatttaccactgagaggaggtcgcttacaaaatcaccatggcacacctcccacggggtgccacgtcatcgaggataaggagctcgtcggtgccagagctcaaagaggtgcgaggagaccagggcgaggccaggccattggtgctgggtttgagcttaagctcaagctcatcgtg

SEQ ID NO: 66939 - DNA, 559 bp, Oryza sativa
  Clone ID: PAT_MRT4530_67844C.1
ggaacggagattttaggctgtggctccaagaaagcagcatgaaagtgcgaaaatctgaggaggaaggagaagggaggttgaatcgatcgatcgatggctcggcggccggcgccgtgggagcagggcggcgacgagtacgactacctgttcaagatcgtgctgatcggggactccggcgtggggaagttgaacctcctctcccgcttcacccgcaacagcttctccctcgactccaagtccaccatcggcgtcgagttcgccacccgcaccatccaggttgaaggaaagattgtaaaggcacagatatgggacacagccgggcaagaacggtaccggtccatcacaagcgcatactaccgcggcgcagtgggagcattgctagtctatgatgtcacaaaggccacaacttttgagaatgtgaacaggtggctcaaggagctccgtgaccatgccgactccaacatcgaagtcattgctcattggcaacaagatcgaccttaagcatctccggtcagtgtccttggaggacgcaacaagctttgcagagagggagggccta

SEQ ID NO: 66940 - DNA, 1184 bp, Oryza sativa
  Clone ID: PAT_MRT4530_67845C.1
atggctcggcggccggcgccgtgggagcagggcggcgacgagtacgactacctgttcaagatcgtgctgatcggggactccggcgtggggaagtcgaacctcctctcccgcttcacccgcaacagcttctccctcgactccaagtccaccatcggcgtcgagttcgccacccgcaccatccagtactattgtttccccaaaggtccattgttaaattgcttcaattttgtgacccaggttgaaggaaagattgtaaaggcacagatatgggacacagccgggcaagaacggtaccgggccatcacaagcgcatactaccgcggcgcagtgggagcattgctagtctatgatgtcacaaaggccacaacttttgagaatgtgaagaggtggctcaaggagctccgtgaccatgccgactccaacatcgtcgtcatgctcatcggcaacaagatcgacctcaagcatctccggtcagtgtccttggaggacgcaacaagctttgcagagagggagggcctatccttcgtcgagacctcggcgctcgacgcgacgaatgtggataaagcttttcagacagtgctcactgagatctaccggatcatcagcaagaaggcattggctgcagatgaggctggagctggtgctggtgctgtcagagagggccaatctatccaagtctccgcgacagattccagcagttttacatcaagatgttgctctttctagcggcgatgacccagctgcaccaccaaaggggcagaccatcaatgttggtggcaaagatgatgtctctgcagtgaaaaagtctgcttgttgttcatcagcgtagatcgaaaggacttgacaaacatggagatacccgaggtggttgatactatgcagtaggacacaggatgttattgcattcatagacctcatctgtattcatgtgttactaagtgtctccttcgttttgccatttgaaacattaattcattcaggacataatcttgccggtatagtttagggatatgaaattgtgaggccgtcagattttcatacaggccatttgtttgcttctattatggtttgaccgcttgatttatttatatgttgctgtctatttttcagtagcgcagttcattgtctgtacagtttctctcttttgctagctagactgctactcatgaattttttgctgctac

SEQ ID NO: 66941 - DNA, 345 bp, Oryza sativa
  Clone ID: PAT_MRT4530_67846C.1
ggccgccccttttttttttttttttttgcaacaattgtacatgttattttttttattttttttatttcttaatagtcatttgtctttttattttttttaaaactgacacacacgaagatgtgtgacactttatttatccaactatataggaaagagggtacacactaccaagaaccgatttgacagggagcaactatatatggagcgccaaaatacctagggtggactccaaacagggggggcatcttgtgagccaccggggaaatgggactgagcttgggggtggacaacaaaggcagaatcaaactgcacttgctgcatgatagactgtaccatgctgcaaga

SEQ ID NO: 66942 - DNA, 389 bp, Oryza sativa
  Clone ID: PAT_MRT4530_67847C.1
ccttaatttttttttttgtttttttaaaaaaataaactttttttacccgttttttttttttttttttttttttttattttttttgaaaaaaaactccaaaaacaaatcttaaaataaaaaaaactgcccaaaaaaaacaagggtaaaaaaaaaacaaaaaaatttttaaaaacccaaaaaaaaaaaaaaactaatgcaaaaaaaaaacttgaaacgcggatcaatagcaaatttcgcgctaaaacaaaccgctcaaatttggggccaaaacccttgccgcctgccgggggaaaaaaggcctccaccaagcccccggacaataccggccaaaggccctggaaaaaattggcaaaaaaggggttgaaaaaaccctcaaaatccttaaaatt

SEQ ID NO: 66943 - DNA, 371 bp, Oryza sativa
  Clone ID: PAT_MRT4530_67848C.1
aaccatccggaatcccttttaacacgggggaccaaaaaattcgggggagcacaaaacccgggaaacgagcaaaaccccttacaaaagcaaaaggggcccgggagcccaagtttaagggagcccaaagggttaaaaaccccgtttccctggaaaccacaaggcccacacgaatttcaaaaaattcttccctcctttaaactagaaaaaaaaaaagggctttaaaaaaccaggtaatgaaggccgggtccccccggggtgaaaaaacttttgcagcgggatggaaagaacccaaattggggggcccaaaagggcaccgatttcttagtcacccaaaaatatgcatgaagccccccaaaaaggaccttccaaaa

SEQ ID NO: 66944 - DNA, 321 bp, Oryza sativa
  Clone ID: PAT_MRT4530_67849C.1
atgaaggcagtgggattaaggcagtgggattatggtttagggtcccgggtagagatggggatgggagaaagggtgggggaagggggaagaggggggatcggcagatttagagggatagccgtgggaggcggtagcctagcggtgggcggtggacacgggcgggcaacaaggcgccggaggtggcgtccaagccgctgggatggaggagcgcggtgggcctacgttagcgacgggggcaaaccagatcttgtggttaggaggtggcggctgatggtggcagatcggacaacggggaagacggtggggcggggacagaggtag

SEQ ID NO: 66945 - DNA, 4019 bp, Oryza sativa
  Clone ID: PAT_MRT4530_6784C.1
ccgggctcccgggctccgcgcgtggcccccccttttttttttttttttttttttttttttgttttatctcacttcaaaacttctctatttgattctggttctgcagatatgtacagggcaatgggctttttcagtagttcagttgcgacactgataagttaatacaaaggtaatgtacacaacgaaacatcgagatgaggggagagacacctcgccctttttacaacgggagaagcaaaagcatctacaaagggaaccacctggtcacattgccaatctacctgcaaaattgtgttgtaacgccgaatcgaatattacctctgttccatgagtttaagttttcgccagctcaggctgtcaggtggtgagggtatgttcttaatatcttgatcgtgttccaccatcatgattgaaattcagcacaggggtctaccgaactatcaatttcctcagctttctttccactagtaaatgcctttgaatgaatatctcaagctatgcacgtgcttctacaaaggcaagcttaatgccaaggtctcagtttcttcagagtcgatgctgtatgacagcctctggaaagcagttgcaaatgccatgttatgacggtataagtacaacagttactcatttgaatagctgtcggcgaagtctttaattcttctcttgatagtctgcaactcttcgtgaagcagtgaaaagaccttcttcatcaatttatgccttgtgcccgattcatgatacatgtctctgattctttccataatgttataatacagatccttatctctttctttagcgacattaagatcctcctgaacctttaggaattcagatcgagttttctcaatctgaatgtttaagtaggagtaaactttgtatttctcagtgtactcctgaacataatctttgtattgtgagaaatcttttattggacctttcagttctggttcctctttatcatactttgagaagaataaattatcttcatctgaagaactgtcccttctctttctacttgcatcattctcaatcaaagagttgttcctacttctttcctcattttctgctggggaaattgatttctgtgttctagagcctatggcattcctactaccattctgaggaagcttgggggtagttttccctatcttctttggacctacttgatctagcattccaacctgaacccttgtttcccttttcccgggtttttctcctggctgatctggatgtaatatgaccacaggaactggattatcaggttttgacaattgctgactttgtggaacatttcctctttgttgaggcctccaataccaaattctcgaggtgatggtttcctctgatcttgagaagaggatagagaaccctttctgtttgccatactgggaatggagtatcacattagctaatttaccatcaagtgattttgaagaactatttctttcaaattgcttctttgccctcccagtctcattttccagagaagcctcacgaaattcacccaactcgagatctgaaagctctctctggagcactttttttccatgaggtgaactctcggcattatttctttgcaaatttgatggctgaccattactttcattggaatcaggaaacggcataacaccatcatatccaacatttcctttagcacttttagctgaaaccatggaattcacgtcaatgttagcatctttggaacgactgagcattttatcctcaacttgggttcccccatatctagctttttttcttgtggcagaatcatcagagtcatcaaaattggcatatgggtcttcagcgtgcgaaactcttccaaggttaccatccaaactattccaaggcttctgaaccttatctgcctttttcttagaaattgacttctcaaccttatcttgtgttctctcagagtgcattgcttggttaagtacatttgggctttgatttatcttttgcaaatttccagaagccaaatgtcttactttcacagcagggctgctatcatgtgcatgaagatcactatgtgcatcccagctaacattccctgtctccttactcagcttctcattcacatgtttgtcaagaggtaaagtttgtctctgttctgataatgaactagtagttcctaaataatcagccttggcccttttggcacttccagacattacactcgagttctcattggcagagcatcttttcaacttgggtttggcacctttctcgttgatcctatcctgaccatgatttgatccatcctttgatactgactttctcctactgccatgatgttttgtagattggctggtttcttccttgggtaggttttcactacttggtgctaaagggtcaccaaaaaggtcctcataagacatttcatttgcagcgtacttgctatcaattctactaggatctatgctggtatttaccatgttcttgcttccaggaatttctggtggcttctctaagtggctcgcatcgaagctatcagttggtacagctgtgtatgctgactcattattgttgtcattaaaattgttcaaatcaatgtgtggggatgcgctcttataatccagatttgttccaatatctattagctcatcatcgccatctagtgcagtcaaatctcttggcaatgaagataatttaagttcatctgctgcttttctgtgtgctcctcctttatcatcatcacttgtaatatccacaaatgcatctgatccttccttgctgcttgaagaagcatcactgtcactgtcactactgctcccactgccacttgcagcgcttctgctttggctcccactgtcacttccactgtcactgctttcactgtcactatcactaccgcttccactctcactagatgagccagctttaccatcactgtcattattgactttttcatctcgggcagcagaaactggggagcctccaatgtcaatcctctcaaatatatcaggatcatccatttttaagcttggaccagcttcctcagtgttgtcatcaatagatcttttagagctttctgcctctaatccaggtttgagcaaatacctccctggcgcttggaaaattgcaatattcttgatgatactatctattttctttgaagcattcggaaatacatctgcaacagctttctccaggccctttaaattcattccttttggattttctgaaagtacagatatcaagagacttcgcagctcatttgtattatcatcagtacttgcagaaacaacacttgctcgacgacttgttccttgagacaccctatttggggttgatttctcgactttactattttcatctttattcaaatcgaatggtgttatgacttcattatttacatctgatccggtaggaactgaaggaatgctcggtccaggttgctcaggagaaagcgctggtgaagtggagaaatttgcttttggtacactattagacagcttcactttggaaactgatttggttggagcaataacagcagctggattcttcttgtaaaattctttcttctgcttccagttcatcctccgcatattaccttcaacagcagcagcagccattgacttggcctgactcttaacagatggatttgcagggtccagcacaatcgattttcgagattttgagagacgctcagcctcctctgagcgcattttcacaaggttctttgctgattcatccaaaatacgctgcacattcaccttgcgccacgcagagccacattcaagaagcaatccatttccatcctctccactctgacgttcttcataaatatcacataattcaccacgttcagaagcccatgtaaatttaaattctttgccaccaacatctataatgttctccgaggagttgtacatgttagggttgaacttgatgcgagcgccgctgcccgattcctcggcacgccggatctcgtcgacgaggtcaggggtcagccttatgattgccgcgaaggccggcgggccactggactccaggctgaacgactcctcccgcccggccgc

SEQ ID NO: 66946 - DNA, 309 bp, Oryza sativa
  unsure (1)..(309): unsure at all n locations
  Clone ID: PAT_MRT4530_67850C.1
tcgctgcntctttggccctcgcaaaacgccggatccagcggctacgagctcggcaccgccggatccgactcgtcatacggcgggcgtgcggttggggcgatggagcggcatgggcaggcgcagcggcgtgtagcggcatgggcaggcggagcggcgtacgggcgagcattgcggcgttgcggactgctctatgacggttctctttattttgcttgttttttttctaatccgattgattgccgggtgaattaagggtcatttgaatattaggaatgaaaaaatggaggaataggaaaaaaaaaaaaaaaa

SEQ ID NO: 66947 - DNA, 441 bp, Oryza sativa
  Clone ID: PAT_MRT4530_67851C.1
atgtcggctgccaccgggagtgatgcaaaaagtcaggtggcgggagagggcaacattaccaccactaacaaagtcggtgaacaggcaatctcaggacaaattcaagcatatagttacctcatgacatttccccataggacaattattggtatggacatgctgatgatatctaacaatgttacatctctcatgcccataggccaagatggactgatgtcccttggccccgcattagctatgacccacacgcccatacctatgattatcccatggggcaatgtcatgaggaggttctacatcatctatggagtccatgttcactgttggttcatttacctatttactgactttgttactggtgataccgctaccctctcccgctacctgacttttcgcatcactcccagtggcagccgacatcttgaacttgctgaaacgtga

SEQ ID NO: 66948 - DNA, 623 bp, Oryza sativa
  Clone ID: PAT_MRT4530_67852C.1
cctaaatttcctcactaaggggactagctgcggttcgcgtttgcagatccttcggctatgctggaatattggattaaaggcttttgtggcagaaataaaggattgctgtcttggccgggagttaaataggacttgcagccttcctttgttgaagggccatacgatggcaacgtgatgccttgagctgaaatcataatccagaaacgctgttttgctggtgacttgcagccttcctttgttcggtgcacgttgctattctgttcagctctgcttcccaacttgagcgtgccttgtaatctgatggcaaggcgacgccatgccatgccacagtccactggtgtctaaccaccaaattgtactcgttggaagagtgacccatacaggctcaacgggagtctgaattctgatgtccctcatacagccatacaggagtagtaggttggtagtctgaaacttttgttttgctctgatgatgtacgtgaagaagtggtgtgtttcccttcttcgacctatggttcttttatagtactggagtagtacagtagtactagcagtccacgcgcctaaaaaaaaaaaaaaaaaaaaaaaaaaaaaaaaactcgagactagttcttccctcgtgc

SEQ ID NO: 66949 - DNA, 546 bp, Oryza sativa
  Clone ID: PAT_MRT4530_67853C.1
ccggccgggatccttcacacccctcaatcgtatataatgaagcatcatcccctcgaagccgacgagacggaacatcttttccgtatgagatctcctgtgctattgctgcatgccacgattctgcgcgactagaagctcttacccaaacatatacacgatatcaactacaatcacatctcctgctacaggaacaagcgctcagcccatgcacatatgacctactgcaacaaaataggatagaggccgcccccttctggaattcagcatacgaacaatgtgctatccacccgcgtgatgcatcaatagggtcggcaacggcatctcgctcgcaggactataatctcactaacaacccattactagtggtgaggcgcatcgtgcaccaactacagctgcagcaggacccagccgtctactgtgatcccactccagcccaagctcaagctctgctggtctcaaacttgccatccatatgcggtatctatcctaactactacatctgaccgagcatcattccaccgttgatgaagtctggtactgacatgt

SEQ ID NO: 66950 - DNA, 3096 bp, Oryza sativa
  Clone ID: PAT_MRT4530_67854C.1
atgacggagggcgtggtgaagttcgccgtggacaagctggagtcgatggcggcgcaggagctgaagctgcagacggaggtcgggaagaaggtgctcgaactccgccacgagctcgagtggctccgcaccttcctccgcgacgccgaccgcaagcgccgcggctcctcctcctcctccgccaccggcggcgccgccgccgccgcgtacgacgagctgatcgaggtgtgggtgcggcagacgcgggagctggcgcacgacgcggaggacctcctggaggagttcgtccaccggggggagctccactgccatggctgcttcgacctcccctccttcctccgctggctccgccactccgccgccggcgtcttcgcccgccacgccatcttcgacggcatcgaggacatcaacaagcggatcgagcagatgaagcagcagcgcaaggagtgcaacctcgagaagctgccctgtgcctccaaacctcaccgcaagaagtacactgactggtcatcgctgactgagctggagatcgaagacaacctggtcaagatcggcgactacgacgaaatcaagaggctggtcctcgaccagagccggcaaaggacggtgatcaacctcaccggcaagagcggcatcggcaagacgacgctggcgagctacctctaccggcggagcagcatccggaagcacttcgcctgcacggcgtgggtccacgtcccccgcaagttccgcttcgccgacctcctccacgacgtcatccgccaggccaacgcctcctccggccacgacgacgatgagctcgccgccgccgccgccgacgacgacgtgcggcgccggggtgggatggaggcggagaggctcgtcaaggcgcgcctcgccgccgcgctccaggggaggaggtacctcgtggtgctcgacgacgtccggagcagggaggagtgggccttcttcctcgccgcgctccccgccggcctcgccggcagctgcgtgctcgtcacgacgcaggtcaagatcagcgaggagtcggcggcggagcaatccggcggcgtcgtgcgcaccagggagctcgggaagctgcggccggagcaggccgccgagctgttccgccggagggtgtacggccacggcgagccggacccgaagaagatggagcagctcaagaaagtcgtggactccatgacgaagggatccaacctgccgctcaacatcgtcatgctcgccggactcttgaggtccaagaaggaggatgaatgggatgccgtgatccatagcctcgatgatacgccgccgccgccgacatcgccggagcagatgccgccggagaaggatagcctcgatgatatcgcgcctgctgccgccagcgagacggcgccgacatcgacggaacaaacgacgaagaagaagatgaaggggaagcagatggcgacgtcgatggacaagatattgacggtgtgcatggacgacctgccgacgcatctgaagccgtgcttcctctacttcgccgggttcaccgcgcagacgccgatctgcgccgggaagctggtccggctgtgggtcgccgaggggttcatgcaggcgaagaacgggcagacggtggaggagcacggcgaggagtgcctcaaggagctcatctcccggtgcctcgtccagctcgtcgagacggacgccgccggcggcagggtcgccgccgtcagcgtccaccaggcggtgctcgacttcgcccaggcggaggcgcgcgacaccaacttcctccacgtccacagcggcgccgcgggcctctccaacggcgccgcccgccgcctcgcgctccgcaacacctacgacaccgacctcgccgtcatgctcgaggcgcccaagctccacaccctcctctgcgacatcccggagcgcgccgccgacgccgccggcgccgcggcgtggcagagagcgctcgagctcatcaatggccgcgcccccaccttctccgtccacggctcgaggttcctccgcgtgatggatctcaagggcgtgcggctgccgcaccgggagtcgctgccggaggagatcgggtggctgatccacctcaggtacctgggcctctcgcacaccgccatgaggcacctcccgagctccgtcaagaggctccggaacctgcagacgctggacgtgtcgcgcacggacgtcgaggcgctgccgtggcggctctggcgcaacccctcgctccgccacgtcatggcgaggcggctcgccgcgtggtccgcgccggacgagcgcgccgtgctcccggacctgcagacgctccacggcgtgccgtggggccggtgggctcggagcggcggcggcggcgccatcgggaagatgaccagcctgcggtcgctcatggcgtggaacgtctccgccgccgccgcagccggcggcggcggcggcgagcggctgtcgtcagctctggccgggctggagtgcctgcggtcgctggacctcgaggcggcggacgacgccgcgacgacgctcccgctctgggacctcctcaccatgcttggcctgagacagctcgagtacctcacgctacgaggcagggtggcgccatggaacccgccgccaccggagacgacgacgacgccgacgacgccgccaccattgcaaggccaccaccaccaccaccaccattacctcctcccaaacctcgccaagctcgagctgcacagatcagagtgcgaccaacccctcatcgacgccatcgccaagctccccaacctcgccgagctcgtgctcgacgaggcgtcctacgtcaagccctacatgaggttccccgccgccgggttccccaagctgaggaagctgcagctcaccagcctagacaagctgacagagtgcaccgcggcggcggcggcggccggagacggcggcggcggcgcgctgccgcagctccggcacgtgtccgtcttccactgcgggaagctgaacacgttcccggtgaagatggcgccgaagctggagctcctcaccatccatgattcggaggagttgaagaatttcatggattgcaaccaagacaacgagcacatccacgtggtgcatggcaagatgtccaagaggagggtgatgactgcccccaaatag

SEQ ID NO: 66951 - DNA, 1730 bp, Oryza sativa
  Clone ID: PAT_MRT4530_67855C.1
ctgttgttttcgggtttttttttttttttgttgccaaccacctattttagtttcattgaagtggttaacaatctctaacatgtgttatacacagtaatgtggtgcttcttacaagacaggggactggacgcacaacgtctccaccaaaaacgttggcgcagtgaaattcaaagaataaccatcccacagaacatcctccttacaatgttcagccgcagagacgcatgcatgccacaggccacaatcaaacaaatatactgtgctcttcaccgctgccacatcgtcgtatactcgaagcgcttccgcttctggagtccccttctctccggtaccgacaattaatggagtcgacgaagcggccagaaatacaaaaaatcttgcaaggcaaaggcaattctgctagctcgacaggcgcagtcttgctagctgcaattgccgccgtcaaaatcacaagctccggttgattctcgcaagctccttctccagctcttccagaccaccaacctcctccagctccttgggtccaagaaacagcccatacggtacgccctcgaacttgtccgtgtggtgtatcttgtgggccgcggccactcgccggaagtagggcacattcgcgatggggccgacggggaagcggcggtggaccaggccgtcgtggacgaacatgtaggccatgccgaacagcgtaatcccgaggcccgcgccgaagcagaggccggggacgatgccccggtggaagaagccgtaggcgaggagggagatggccggcacggcgttggtgatggcgaacacgtcgttgagctcgaacgggccctcgcgcgcacggtggtgcgactcgtgcatgtgccacagggaggcgtgccacagcgagcggtgcgcccactgcgcccagaactccatcccaaccgctgcgccgacggagagcgcaaacgtgccaaacatctcggtcatcggcacatccccgccctccagttgccaatggaagcggtagtacacggcggcgacggccatggacgtgaagccgaggctggacatgacggccgcaaccaggtacgtccgcctctccgacagcttccgcgccttcctctccgcgatgcgccgcgccgccgcggcagccgcctcttcctccagcgagggcacgggcacgggcaccgtcggcggcggggacggagccggggcctgctggctctccgtgccctgcggcacgaagcacgtgacggtcccgagcccgcggctgcgcggggtccgcgtgagcggcgagaacggcagcgcgcggcccgacggcgggggccacgaccggcggcgcacggcggccgcgaggagcggcttcttgacggcgaagctggtcatagcgccgccggagagaccggtggccatgccgtggtcgttcttccctcccggcctcgtatcttacccgcgcgcgctttcgtggacagggatggagcgggagagtgtgacgggggagtgtaatcgagagaccccgcggctcggtcgtagtactactacttaaagagacgtcgagtcgtcgagtcgcccggtggcttaccgtggaacgcgtgtgcatctggggacgacgaagcggggaaattcgactgtgatttctcgttggctcacagacgttcatgtcagcgagaaggcgatggggccctggttgccggtcgatttggatccaacggctgcaagggcaaatatttcttagggcaatagcaatgtgccaccaatttttaccg

SEQ ID NO: 66952 - DNA, 265 bp, Oryza sativa
  Clone ID: PAT_MRT4530_67856C.1
agtgtcagactcaggcgccggtcgcagcttggctccctccctgctgctgatggaaaggaatgagctctcaccctgggcacggacaaccggcatcatcatgactatagggctactggtttcagaactttttcagatgccactactgactggttgcccgccccccccactctactaccattctcttgattctgttttggacctcaccttcctgaaagatccaagctttactagtttgccattttcacttctttgtgttgttataacg

SEQ ID NO: 66953 - DNA, 303 bp, Oryza sativa
  Clone ID: PAT_MRT4530_67857C.1
atgggcttttcgccgccaccgagctgctctacacgaacctgccgctgttcaagcatcaccagggcttgtgcacagcttgccttgaagccgctgccgccaccgctcgcgttgccgctggcgtcaattatggccacctccggctacaagacgaccatcgtcgggttcgcaagaagcctgcgcatctttctctttttggccgcatcatctgaggagtcgccgttcgccgtcggcatcgccgtgaaggagtttcagccggcaaggccatgcctcagctgctgctcgcaccagggacttgatttataa

SEQ ID NO: 66954 - DNA, 308 bp, Oryza sativa
  Clone ID: PAT_MRT4530_67858C.1
gggatcggctcggctgccacgttggtgggatggtcagcgtcaaccagtattgtggaaaacggttgatacggccgttcaatcggagacgccgtttccgactaatgggccgcataatccactgtgatcacaaggcccagtccacagaacaactatccggcccattagctatcttctattcgagcacagcgagcaaattccgacaattaggaaccaaatccgccaccgccgctccctaccgctgtccccaccgccaccgccaccactcctacccgctgccgccgccgctccccaccgccactctggccaag

SEQ ID NO: 66955 - DNA, 1110 bp, Oryza sativa
  Clone ID: PAT_MRT4530_67859C.1
atggcaccgtcgtcctctgcacaaaccgccacgtcccctctcccgaagctccccacggccaggacaggatctagccataggaggggaggagctccacgaggtggaggagaagcagcagcagcagcagctgttgctcccatggcttccatctctgtcccaaacccagctccttcccctacagaggatgcagagagcataagaaaggcagtgcaaggatggggaacggacgagaatgcgctgatcgagatcctcggccaccggacggcggcgcagcgggcggagatcgccgtcgcctacgagggcctctacgacgagaccctcctcgacaggctccactccgagctctccggcgacttccgtagcgcgttgatgctgtggacgatggacccggcggcgcgggacgccaagctggccaacgaggccctgaagaagaagaagaagggcgagctccgccacatctgggtgctcgtcgaggtcgcctgcgcgtcgtcgccggaccacctcgtcgccgtcaggaaggcctaccgcgccgcctacgcctcgtcgctggaggaggacgtggcgtcgtgctcgctgttcggggacccgctcaggcggttcctggtgcgcctcgtgagctcctaccggtacggcggcggtggcgtcgacggcgagctggcgatcgccgaggcggcggagctgcacgacgcggtggtgggcagggggcaggcgctgcacggcgacgacgtcgtccgcatcgtcggcacgaggagcaaggcgcagctcgcggtgacgctggagcggtacaggcaggagcacggcaagggcatcgacgaggtcctcgacggccgccgcggcgaccagctcgcggcggtgctcaaggccgcgctctggtgcctcacctcgccggagaagcatttcgctgaggtgatccggacatcgattctagggcttggcaccgacgaggagatgctgacgagagggatcgtgtcgcgggcggaggtggacatggagaaggtgaaggaggagtacaaggtcaggtacaacaccacggtcaccgccgacgtccgcggcgacacgtcggggtactacatgaacacgcttctcaccctcgtcggccctgagaagtag

SEQ ID NO: 66956 - DNA, 231 bp, Oryza sativa
  Clone ID: PAT_MRT4530_6785C.1
atggatccaccgacgccgtcgcacctcctgccgccgccaccgtccgaccacctcccgcagctgaggggcgcgggccgcctgcctcccaccgctgaggggcgcaggctacctccatccaaccgtctcatgccgcctcccgcagctgagggggcatgggccacttgcctcccaccgtcacctagaataggtgctggtctcaacggttgctgggatgatgagcgcgccaggtag

SEQ ID NO: 66957 - DNA, 403 bp, Oryza sativa
  Clone ID: PAT_MRT4530_67860C.1
cgggctgcaggaatcggcacgagggagagagagagagaactagtctcgagttttttttttttttttttggcttgcaatttagtatatatacattgatcatacatcaaatggaagttaagaagtatatcagcgtctgcctgctatatcagcggcttacaaaaatatgagcaccgaacaactcattgcacttcaaaaaaatgagggaaaaaaaatcatatcagcggtggcctgctatatccatttttttttaggtaatgaattcaaactcggtcagcatggttatacatggccaaaagcctgctatattcatttattaacagcttctagctagctgactaaagaaagtcgcagcatctatcacttatactagtcagtacagcattttgtaatggaggtctatctt

SEQ ID NO: 66958 - DNA, 1820 bp, Oryza sativa
  Clone ID: PAT_MRT4530_67861C.1
tctcatcagccaccagttagcccagttcaccaccccacggctcaggtaggctcacggcctgctcccgcacatcgccatggcaccgtcgtcctctgcacaaaccgccacgtcccctctcccgaagctccccacggccaggacaggatctagccataggaggggaggagctccacgaggtgggttttttaagccgcccgggaagaagagacgtcgccgccgccaactgcttccccgtgcacataggccagagaagcagcagttgatgcatgtccgtgagccgctgccgcctcctccgcgcggccctcgcgccgcggccgccgcctccgccgccgacctgcgcgtccagcccagatctagccaagggagggccggatccgaactcgacggctccggatctggccgtcctcgccaagctgcgcctctcgtgctccggtctcatcggcgccccaaccgcttgactaggagtgaggggaaagggagagacccgccgccgccgtctttgcagccgcccggctttgccggcggctgctcaggcggtggaggagaagcagcagcagcagcagctgttgctcccatggcttccatctctgtcccaaacccagctccttcccctacagaggatgcagagagcataagaaaggcagtgcaaggatggggaacggacgagaatgcgctgatcgagatcctcggccaccggacggcggcgcagcggggggagatcgccgtcgcctacgagggcctctacgacgagaccctcctcgacaggctccactccgagctctccggcgacttccgtagcgcgttgatgctgttgacgatggacccggcggcgcgggacgccaagctggccaacgaggccctgaagaagaagaagaagggcgagctccgccacatctgggtgctcgtcgaggtcgcctgcgcgtcgtcgccggaccacctcgtcgccgtcaggaaggcctaccgcgccgcctacgcctcgtcgctggaggaggacgtggcgtcgtgctcgctgttcggggacccgctcaggcggttcctggtgcgcctcgtgagctcctaccggtacggcggcggtggcgtcgacggcgagctggcgatcgccgaggcggcggagctgcacgacgcggtggtgggcagggggcaggcgctgcacggcgacgacgtcgtccgcatcgtcggcacgaggagcaaggcgcagctcgcggtgacgctggagcggtacaggcaggagcacggcaagggcatcgacgaggtcctcgacggccgccgcggcgaccagctcgcggcggtgctcaaggccgcgctctggtgcctcacctcgccggagaagcatttcgctgaggtgatccggacatcgattctagggcttggcaccgacgaggagatgctgacgagagggatcgtgtcgcgggcggaggtggacatggagaaggtgaaggaggagtacaaggtcaggtacaacaccacggtcaccgccgacgtccgcggcgacacgtcggggtactacatgaacacgcttctcaccctcgtcggccctgagaagtagccatgtagcagcttggacattttattgcttgctcatttgatttgaacaaaatacacccgtgtgatgttgcagttattagtaaaatgcgagtaggatcgatgttgttttcgcttgggtggattaataatggagcatgttttatcgcacccgtggtgtatccaacacttgttttcagacgatactatcgatgtttgatcagaatcaagcccagaggtgcttgaaactagtgacataaaccaaagaaaggaaaggtacatgttccatccggaaaaaa

SEQ ID NO: 66959 - DNA, 665 bp, Oryza sativa
  Clone ID: PAT_MRT4530_67862C.1
atggacggcggatcgggtgccagcgccacccgcctcgccgaatccgggccgtccattcctccgctcggtcgggcgccccgttaagcttgagccccacccaccccccacccccgaaccctcgccctcctcaccccgcgcaccccctccacctcgccgccgccgccgactcgccggggctcgccgccaccggtggtgggggggagctcgacctcctcgccccacgcgcgcatccggacgccgtcgttctgggcgcgggagagatccgtccgtcgccccccgctgggcttgcgccatcctctcgccggaaagtggagccaggaaacatcatcatccgccaaagaggaacccgcttccatcctgggaactacgttggcatggggaaggaccatactctcttctgtctgaaagaaggacatgtgcgattcgagcgcaacaagctgactggcaggaaatgggttcatgttgatcctgttgctgggcatgtgctccaccctgtctacgccagtgattcgacccctgcagctgaaatggagccatttggaggcgcgtggaagttctcggttgggggtttccgtgggctccgtgggttcccgctcgcggtccagcggcggaatgtgaatgggaatgggaatggcgtggtggcccgtaggtccaaccacccctag

SEQ ID NO: 66960 - DNA, 970 bp, Oryza sativa
  Clone ID: PAT_MRT4530_67863C.1
gaaccctcgccctcctcctcacccctcgcaccccctccacctcgccgccgccgccgactcgccggggctcgccgccaccggtggtgggggggagctcgacctcctcgccccacgcgcgcgtccggacgccgtcgttctgggcgcgggagagatccgtccgtcgccccccgctgggcttgcgccatcctctcgccgggtgatttgagacaatcaagatggctttttcatcagttttcaggagaggaaatgtcaaagaattgatctcaaatgtttcggtctacactagcgcagcagagtcatctggaggattgagcttgatttttaagcgttgggccaccaaaaagacagctggatcaacaaaaaatggccgtgactctaaccctaagtatttgggtgttaaaaagtttggcggagagaaagtggagccaggaaacatcatcatccgccaaagaggaacccgcttccatcctgggaactacgttggcatggggaaggaccatactctcttctgtctgaaagaaggacatgtgcgattcgagcgcaacaagctgactggcaggaaatgggttcatgttgatcctgttgctgggcatgtgctccaccctgtctacgccagtgattcgacccctgcagctgaaatggagccattgtaatggctttacatggaatgaagtaacatatgttgctgacagctttcgtccttgccttgagagtgacttctctaaagaaacttattgcgattaagaggcttctgggttgaatttgcttgcaataaggaacctaaccatcatgtttagaacccttttgtttttggttcttgctgtggcttaaagttgtttgttttaagtatcctttgtgatttgtggcatgaaggttgacaaacctacatgatttatgaacacacagaaattctaaaaatgttgcttgggccgggaaaaaaaaaaaaaaaaaaaaaaaaaaaaaaaaaaaa

SEQ ID NO: 66961 - DNA, 150 bp, Oryza sativa
  Clone ID: PAT_MRT4530_67864C.1
atggtgtacgaagcagctgtggccagtgcagcaagaagccatgaacatcaggtgaggaaggagaagaagctgaagcagattggatgcagcatcctctgggctttcaggaggatctacccaacagcctccagcgcctcagggaagaaatga

SEQ ID NO: 66962 - DNA, 318 bp, Oryza sativa
  Clone ID: PAT_MRT4530_67865C.1
atgatattaagcatgaaacgatcctagtacagtcgtacttctcgaatggtttttccctccccaggagtgccagaactcctctcactgctagaaaccgtggacgcctagagtgcatgaggatttaagttcatggagtgggtactgccaaagtgaggttgttgaaaggctttgccgaggcaagtctcattcgttgggacgtaggctcatgtgttgggcaagtctcggagtacgagtaaagtgtacatccactgcaatcagagtgttgaagagaatcccttgttagtacacttgcgtagctaacaagatgatcagagtgcg

SEQ ID NO: 66963 - DNA, 1125 bp, Oryza sativa
  unsure (1)..(1125): unsure at all n locations
  Clone ID: PAT_MRT4530_67866C.1
agggtgcaggtaangcnncaccgngttgncggccgactagcaccagagggacccccgggctgcaggatttcggcgacgagggaaccagccggagggnntnnntttttttttttttttttttttgtgtttttaacaaaaacgcggggaaaggcccccaaaaaacaacaattttttcccaatcgaagaaaaacccccccggggcccccgcaaagagaccaaaacctttttcgtgggttacccggaaggggacaaacccacccaaaaacccaccccccacaaacccccaacaaacccgagaaaccgccccgccccggagcaaacccaaccccggggcgccggaaagggggggggggacaccccccccggcggcgaggaaaacaccccggcagaccagggccgccccccgcgacccacacccccaaacacaacagagggggcaggacacgcccccccaccacccacagccacgggggcggggacccaccaggggagagacccgaggcgcccgcaaaaggcggccccgagaaccccaccccacagggcccgcacgacagacccacagcggaagagaaccagagggcagcgccccacaccgccccccacagagacgccgcccgagccccggggaggcgggccgacccgcgcacgcgaagggcaacggacaggcccgggaggcgcgcccaccgcgcacacagcgggccgagggacgccgcgggccgccgacggagagagacgcccagaccgacagagacgggaggccaagaagcagggcgacaagcgcgagagcgagcgcggaagagcgccgggaaaccaaggcgggcggggaggcgagcgggagacgacgacggcgaggcgagacgaggaggagcgggcaaggagagagcacaggggacgagcgagaggcgccgcgaagagcacaggaacacaaccgacaaaagagcaagcgcggagggaggaggacgggcaaggggggagacacgaagggcggggagggagagaagggcacccagacaggaggggacggagaagaggacgcgaggacagggaggacgaaaggaccgcggagagggagagaaagggggaagaggaggggagcgcgcggcgagcgcgcagagaacacagaag

SEQ ID NO: 66964 - DNA, 3229 bp, Oryza sativa
  Clone ID: PAT_MRT4530_67867C.1
atggcacctctccccatccgcgcccggctctctgcgctggacgacgacgacgacggcgctgctacggtctccttctcggacacctcctccgccgcaacgtcgccgtcctgctcgccctcgccgctcgtcccgcgcacctcggtctttagggcaacgcgggtcgcctcgcagctctcgtccacagaggtcggtcacgtcgtcgcccaggataaggtgatgtacgtatccacgttctaggaagatgcagaggtggcgctggaagtgctgaacgagtcgtcgaacgtgttctttctcatcgagtcagtgcccgcgccaagcgaagactcgagcccaatctctgggtgctagccggtgttgggtgtctccttgacgcacgagattaagtacttaggcacgacggcgcgttctttgaataaggtcgggatcgtgcgcgcctgtaacaccactcaagtgttctacgttagcaccaggttaggatttgaggttgctaatggtgtgcctcctgggatgaagcaaagaatcgtcgagagcttgcaagagttgaagttttagagttcaaaaagagacgtcagcatgttcgatgccactgacgtcacgacaataggtgctatggtgcgtacttcaactggatttccgctgaattgtgctaaacagggggatcaggattcttgttgtgaggatgtaaatgacaagcctgttgatgctgaggttgtcaatggtatagagcctgagcctttggtaggcgagtctgttgatgctgaggttgtcaatggtgtcgtgcctgagcctttggtaggcgaatctgggggctccgacggtggtggtatgcatgttgaggatgaattcgagatggagggtggaaagtctgacaatgggattgctgaattgcctccagtggtgagtgctcaagagcttcaagcgtgtctgttcaagtttagttttgccgacacaattacctggacgggtcagcataaaggctaatacatcagagcagttgaagattgccctattaggtgtctgttcaatgacaatgtatttatggaacaggatgcatcctttttattgatcgtaattattaatagcactggtgcgttgggaagtgctcggaagcttcagagttcaggctcctactactcagctagggatataagttgaaccatcactttcagtcaagaatcaagacaagtgtagctgtgctgccatttgatgtttgcttccctccctccgatgtgcagttggtggacaactttaagagcagaagaagatctactcttgttttggagaaacttgtgatcagtagcagctgttaaaccataataccattgtaagttattaccatcttaccatctttttttttctctgtgttgcccctttcgatgaagcaactaaagttcgacaaatacaagaaatctagatgttgggtaaaacaagggccatcatattgtgctatgtcaatggttggtaaactttttgaactactatgcttatgccctttgtgctggacatctgataagcatgacacctgagaaattatagtttcagttagtatttgcgtcttattcatagactggggcgcataaaggtggcaaatcattcctctgagcttgagagtgcctggaagaaggctttgcaacttgaagcagagggaacagaggacttggaattctcatgcaatgtattggtccttgggaagacagtgaaggagatttctggggttgttggtggtgttaagtttcgtgttgtcgacaccccgggacttgggactactcacatggatgaaaaatcaaacaggaaacggactcatgcaattcagcaaagtatccggcaggcaactaatgatcctcggtttgagaacacatcagctcttgtggagaatcatcacctctgtcggaggaacacagagggtgaaaaggtgcttcctaatggccttatttggaggcgcctgctcctcctcctgtgctactcagtgaagacagttgagactaacagcctgtcagcccgggttgcttctcccgcaaacctctttagcctgcgttttcggatgcctccacttcctcacttcttgtcatcattgttgcaatctagagagcacccaaggtgtgctgctgaccaagatgttggagatattgatcctgatgagttgataaatgaggatgaagaagatgactacgatcaacttccaccctttaagccattaagtaaatcacaggttgcgaaactctccaaggagcaacagaaattgtactttgatgagtatgactaccgaaccaagcttcttgagaagaaacagttgaaggaacagctccgaagactaaaggaaatgaagatagagggaaataaccatgatgtacttggggacaatgataatcctgatgatgaatatgagacagaaagatctgtcatgccagattgggccttgccatcttcgtttgactctgatgatccagcataccgttatcggtgccttgaccctaagccaaactttctggtgcgtgctattaccaaccctgatggatgggatcatgattgtgggtttgatggtgtgagccttcaatatagccttgatgctgccaatgcgtttccagcttctctgtgggtccaagttaacaaggacaagagagaatccaccattcatttggtgtcctcaatatcagctaagcatagggaaaatgtttcaagccttgcaggcttcgacatccaaaccataatggaccagcttgcttacactcttagaggggagagcaaattcaagaactccaagaaaaacacaactaccggaggtttgtccatgactttcttgggagatactatggtgaccggagcgaagtttgaagacaagctatcagtaggtgatagattaacattgttagcaaacactggtgctgtgtccattagaggtgatactgcatatggagtgaatatggaggcaactctgcgagagaaagactatctgatgggtcaagaccttgcaattttgggagcatccctggttagatggcataaagaatggagcatggctgcaaagttggattcccagttctctatgggaagagcttcaaacgtggctgttcatgttgatttgaccaacaaattaactggacggggagccaagaacatgactctccttatggggtcctccgcggccgagccccggcagtcgtcgccgccgtggctcgggccgcggctgacggcggaggcggccggcctcgccgcgccggcggtgccatag

SEQ ID NO: 66965 - DNA, 705 bp, Oryza sativa
  Clone ID: PAT_MRT4530_67868C.1
cacaagacgagagagcagcggcgagaagaagataaaagctgctgatggcttgcagctacttcagaaagatgtttacaatgagtgtatttactcagataagaagaaaaattacctcacctgctatagcctatgcctcaactcatcttcaactgttttgaacaactgttgtgcaagcttcttgtgctcatgatcatttaccaaacctgctccaaaaggtgccaaagcacctgtccttcacctcgagatgctcttggcatgtggcttcataatactaaccctgaaccaatatcacacactccctgctattgctggatgagtggtgatggtgaaccaagttcatgaatcatggactggccagccggtgtcaatgaccaaatttgcagcagcaatgaccaatggtgcattgccaaggtgcaggaaggtcaagcatcggaatgaaacctccactctgcctagatatggatcgcatgagtggactcagggagcgagacgtgtcgcgcatcaggaccctcctggacggcatcggacggagcagctcgctagctccaaggaggggtttttttgcaacaaacataacgggctgtgcacctgtccaaggacgtatacgataattcgtggaaacgcaaggactttttttgcaaatagcctactaatgcaacctgttccaaccgccgtcgagtgtgtgcgcacgcccccacagcgccg

SEQ ID NO: 66966 - DNA, 1569 bp, Oryza sativa
  Clone ID: PAT_MRT4530_67869C.1
ctacttggtggcaaggttgtcgagagcttgctgcaacactggcctgaatcgggtgacgtcaatggtgatgtcctggccgtccatgagcgtctgcttcatgaaggcgaaccctctcttgtgcagacccgtcgggttggtgaagatctcgtcgccggcggggtacttgtccttgagcgagctctcggcgacggcgatctcgtactggatgtagttgagccccatcgccgccgccggctcgccgtagtccatgcgcgcgatccactggaggccgccccatggcaccacctgcaccatcgtcgctcccggcggcaggaacatcatgttcgtcaggccggcgccatggacgccgagcagcgcgtcgcacgagttgatcagcttccccacctgctcgatggagttccccacgtccgactcgttcaccaccacctcgaacccgacctcctccgccgcgcggaccacggcgtcgaggttcaggagcagcctggtgcgcccccgggagatgaccaggaggcgcggccgccgcccggtgccgtcgccgagccgcgtcggcgcgtcgcgcggcagcgacagcgcgcggcggaggaaccgcgtgaagtccggcgtcgccagcccgtccaggctgcgctcccgctcgatgatgagctcccggtgcgcgcggaggctgacgacggcgctcgggaagcagtgcacctcgccggcggcgccggccttggcgaggtcgatcggcgcgtggcgcgacagctcgcggaggagcttgtcgtacttgacgagccaccacgacgccacgttcaccatcaccagctgcaccccgccgcggtagcgctgcacggtgttgtacagcggcacgatcacgtcggagaagtcgtggaagatgttgcccgtgtacccgccgatggagaacgccacggcgggcacgtcgtgcgcccgcgtgcaccgcggcgcgcccgccgcgtcgcccgtggcgcgcacggtgatctccgtgacgcgccccatgcacgtcgcgtcgcccttccgcgggtacggccgcaccttgtgcgacaccgccgccgccgccgggtcgacgacgacgacgaactccgacgtgttggccgccatgcggacgtcgccggagaagtcgcagatgtcggtgcggaagtcggagaagtcgcagagcggccgccggtccacggaatctgcgttcatggcgcgcacgttgtccgccacgttagttggtgcccaaaattcaaaattaaacgtttgctccggcgtgcgagctggctcgccggcgtcctgcagcttcaccggaagctgctgctgattcttctcctccactgcaggtgcagcctcgtcgccggaatctgccgcgacacgctccgccgcctcctccgcctcttccgatctctcgccggcgacctcctggattatcaccgtgtctttcacccgggtggagaagacggtggcgtcggggcgggaggagaggaggaaggtgagggagatgaggaagcagccgacgacgatggtcagcagcctgaacctctgcgactcgaaccgcagggcgtgcagccgcccgctgctcccccccggcttcat

SEQ ID NO: 66967 - DNA, 193 bp, Oryza sativa
  Clone ID: PAT_MRT4530_6786C.1
catgttcccctcctcctcgcctcgcatcccctggctcttttcgtgagcagggaagagcatcccctctctcttttcgtgagcagggaagagggggggggggggggggttcacatataaccataaggagctcaagggctgacgggtcgttattcttggacactgaaagcaccaccgcacagggagagaggaagag

SEQ ID NO: 66968 - DNA, 219 bp, Oryza sativa
  Clone ID: PAT_MRT4530_67870C.1
atggcgccgggggttactgtcagagatatgggcccgggggtatgccccgtcacatccggacgccgctcgaagcagggctgccgcaagtcctcactcgtttatgagggaatgacagggctgtcccccgtgtcaggcgggagacggcgctgggccccactcaaggaccgatcgatgcttagcttccagcagaaggcacgggttgaaacccggtcgcagtag

SEQ ID NO: 66969 - DNA, 127 bp, Oryza sativa
  Clone ID: PAT_MRT4530_67871C.1
ctgagaagcatcccttctattttaatccataagccggcatcagaaatgcacggttcacacgttaccagcacgagggttgaattctgttcccccaaccatttgatatggccaaattatactgtctact

SEQ ID NO: 66970 - DNA, 1075 bp, Oryza sativa
  Clone ID: PAT_MRT4530_67872C.1
cctcctcctcctccgactccgatccacccccgggatcccgcccatggagtgcaaccccgtctcctccaccacctcctcctccctgctctgggactgggacgccaccgcctccgccgagccgccgccgccgcccgggaagcgcggcgggagggattcgtcgtcggcgtcggcgtcggcgaagcgtgggaggtcggcggcagcagcgggggatgcggcggcggtggcggcggaggcgccgcggtgccaggtggagggctgcgggctggagctgggaggctacaaggagtactaccgcaagcaccgcgtctgcgagccccacaccaagtgcctccgcgtcgtcgtcgccggccaggaccgccgcttctgccagcagtgcagcaggttccacgcgccttcggagtttgatcaggagaaacggagctgccggagacgactttctgatcataatgcccgtcgacggaaaccacagacagatgtgtttgcttttggctctggaacactaccgcgatcactgtttgatgataggcagcaaataagtttcgcatgggataataacgctccacttaaccatgcaaacaccacttcaagttcctcgtggacatctgacttacagctctcccaagtgatggacataagcaaaaggtcacgaaaagctggggcagacagtgcaaatatccgtttgtcaaatgctttgccaactctttgtcatgacacaaatgagctcttgccaataaaaggtgcagatgcatctgaaactgcttcaaaactagatggagcactagatgttcagcgtgctctctctcttctgtcagctagttcaaggggtttgactgaccccggacaccaaacatcttctatcatccaatttacgaattcgaaccaaaacagcacattgcccagtgtaccaagcgaaggaaactctaatgtacccttttgggttgatggacaacatcaagcagtagagcctcaggtgtttcagttcacaatggacaccggtaacactgtgtttccggatctagagcggatcaaaccttcctacgagtcttcaatgtttggtctgaaccagatacattga

SEQ ID NO: 66971 - DNA, 2995 bp, Oryza sativa
  Clone ID: PAT_MRT4530_67873C.1
tcctatgtggcaggttgagaccactagtactaatggtctccatttaacatgccctaaccaagtgaagttcggggagccaaagttggccatgggtacctcgtcagatttgtcagggtgtgtggggggatgggggcgaaataggaaccgggggaaagagggggataggagcgacgccgtcatggggcttgtcgccggcaccgccgccgttcgccgctcttccccgatgccgccgccgcccccggctctgcaggccaccgccgagggaagaggggagagaggagcagcactggagaggagagatgccaccgacggagagagaggtggtgccgccacggctgcccgttgccctctggctccgctagactctcgacgcttgagatggccgccgcgcttttgctcgtcctcgcttgatcgaccgcggtcagagaggagagggaaaggcaagggcggagggttagcggagaggccgctgccgaagatgagagaagccgacgcggcgagaggagaggagcggcctcgaccgtggaggggtggatctggccgcccctttccagcgttgccgacaccgccgctgcttcgggggagggtggatctggccgccccgccgccgccgtcgccccagtgccaccttgcagccctcgcccgctgtttttgtgcgatggggaaaggaggaagctgtgcgatgggaaaaggggaaacagcccacggtccactacagtagccgtgccggcccggcacggcccagcacctccttgggccgtgcttgggccgaggccttggcacgtgggccggcacggcacggcccgctacaggagtcgtgcctaacgggccgtgccctagtgggccgtgccgtcagtgtgccgtgccgtgctgggccgggccgcccgtttggcctgctatatccgccacactccggagtacgagcaatggcgtcctcctcgcgttcctcgcaccagaggaagcgctcgcgctcgggggcgaccacaatgaagcgctccacggcgagctgcgcgtgcgccagggacacgaggtcgacgcgggcggggacgacgatgacgaagcgtggcgcggcgaggtgcgcgctccccagggccgcgcgtacgacgacgacgcggccgaggacgaggaggggctgcgcttcctccccggccgcgcgcgctacggcgtggagacgcgcggcttccgcgcggacgacgtcggcggcggcgggtgccgcggccagggacacgaggtcgacgcggccggggacgccgacgacgaagcgcggcgcggcgaggtgcgcgctccccagggccgcgcgtacgacgacgacgcggccgaggacgaggaggggctgcgcttcctccccggccgcgcgctcggcgaggaggtgcggggcgtgctcccgctccgcgaccgcgcactgcgcctccgccgcgaccgcatgggctacgatgacgagggggatgtccttcgcctccaggcccgcggtgacgcggaggacgacgaggggctgctccgccgccgcgcgcacggcgaggggctcccccttcccgcattcggtgtcagcggcgagaggcgcccgctcggcggccgcgcgcgcctctactacgacgccaacgacgactaccaggggctccgcggccgcgcgcgctacggcgtggagacgcgcggcttctgcgcggaggacgtcggcgacgaggggcgccgcggccgcgctcacgacgacgggcacgagcgacaccgaggacgcgggcgcgtgggcggcgagaggcagagcagctgcgcgaacgacgacgaccaaggcctccgcggcggcgcgcacgacgatcctgacgagccgcgccgtggccgcgtgcttctcacgctccgtgcccgcctcaaggacgacgacgacgaggaattgatgcgtgaccaggagggcgccctcggggacgaggtccaccggggcgcgaacggctaccgcgagggccatcgctccgcgcacgacgacggcgagggacccccgttcgccgcgctcgacgacggcgaggagcgcccgctcggcggccttgtcgaggagctgttcgtttgccgcctcggggacgacgacgaggtccgcgtcggtgcgaaccacaacggcgaggggcgccgactccgcggcccccgtcccgatggcgaggaggcgcgcgtgcgctgcggccgcgcgtaccagctcgcgccccgcgcccacgcgcaggaggagccgcgcgtacgccgcgaccgcgcgcaggaggacgaagaggagccgcccgttcgccgcggccgcgcccgttcgccccttcgcctccaggcccgcggtgacgcggaggatggcgaggggctcccgttccgcctccgcgcgcacggcgaggggctcccgctgcccggactcggtgtcggtggtcgcgcgcgcctctacggcgaggggctcggtcgggaggacgacgccgagcggctcgaggtcgcggtggacgacgccgagggtggcgtggaccttggcgccctcgagctccaggatgaagagcctgccggcggcaagaaggtcgccgtcagcgccgccgttgcggctgcgcgcgccgttaagaatgccgccggaaagaaagccgctaaggaagctatggtccggtggggacagagaaaccccaacaagaacacccccaagaaaggatcaggtactgccaattgctcgatctataaagaaccagttgaagttggagctttccagtccaatcagaagatttatgagccagacaagagatttatgacgggaaatgaagtcactgacagcgaatacattgagctagtcgggctttacaataaaatgaacaatctccaattagagaccaaggacatgatcaaggggaatgctatgaggagtgacatcttggacaactgcttactgatgaggaacttagttcggaagatgcgatcacttcgtgcgatgatcaaaagaaaagtcgaaggtgaacctcctataatacctcccaatctattagaaattccagatatctcttag

SEQ ID NO: 66972 - DNA, 1500 bp, Oryza sativa
  Clone ID: PAT_MRT4530_67874C.1
atggctgccacattaaaaattgttcttggctcccatatatggctggaagataaagatttagcttggattgatggtgaggtcttccgaattgagggtcaaaaggcccatatccgcactaccaacggaaatatggttgttgcgagcatatcagacattcatccaaaggacacagaagtgcattctgatggaattgatgatatgataagactatcatacttgcatgagcctggtgttttaaacaatctatctgttcgatatgcaaaaaatataatttacacctatactggtaatatattgattgcaatcaatccattccaaaggttgcctcatcttgctgaaccccatactatggagaagtacaaaggtgcaaatttcggtgagctagaccctcatgtatttgcaattgctgacatttcttacaggcaaatgatgaatgagagaaagagcaactccatattggtgagtggtgaaagtggtgctggcaagactgaaaccacaaagatgcttatgagatatcttgcatttttgggtggacggtctagaacaggagggaggacagttgaacaacaagttttagaatctaatccagtccttgaagcttttggcaatgcaaagactgttcggaacaataattcaagccggttgggctactctctcggttgccagcttggcaggtgtgggaagatatctggtgctgccattagaacatacttacttgaaagatcacgtgtttgtcaaatcaatagtccagagagaaactaccattgcttttacttcctatgtgcagcaccatcggaggaaattagaaagtataatctgggtgacccttcgtcgtttcactatctcaaccaatctacttgcattaaagttgatgggattagtgacaatgaggagtatcttgcaacaagaagtgctatgaatacagttggcataactgagcaggagcaggtctcaagaggctatattccgagttgttgtgctgtgcttcaccttgggaacatcaattttgtgaaagggagagaggtagattcatctgtaataaaggatgagaaagctaggttccatcttaatgcagctgcagagcttttgatgtgtgatcatgggaagttagagaatgcactgataaagaggaaaataaatacaccagaaggagtgattaccacaacagttgaccctaattctgccacagttagcagagatggcttagccaaacaaatatattctcgactatttgactggcttgtaagcagactaaacgcatcaataggacaagatgagaactctcaatatttgatcggcgtgcttgatatctatggttttgaaagtttcaagactaatagctttgaacaattatgcatcaatttcaccaacgaaaaactccagcagcattttaaccagaatgtcttcaaaatggagcaggaagagtataaccgtgagcagatcgattggagttacatagaatttgttgacaaccaagacgtgttggacttgattgaaaag

SEQ ID NO: 66973 - DNA, 205 bp, Oryza sativa
  Clone ID: PAT_MRT4530_67875C.1
atggctctaccctttgaagccctgccactaccaccatcgctgaaaaaaaaggacgaaatagataagcaagcagctaggaatgctctaagcccgaaatggtgcaaatcatatcaaaggttcagattgttcctcaggataatgaggacaaactctattggattcctacttcttcaagagcattacttcaaaaagcaattataagcag

SEQ ID NO: 66974 - DNA, 257 bp, Oryza sativa
  Clone ID: PAT_MRT4530_67876C.1
gtgtgggatatgcatgctcttcattactgtatatggcatgctcttcatcaaggttaaaccgtggatctattttccttttattattggtggctataaaatagattgatgctaattaatggcaagtttgcgaaaatactgaactctcatatctccaggattggctataaaatcggcaggtctgggtcatggaacaagaaaccctaatttctatttgggtttggttatggcccatctggatagatttattgtgaaacatt

SEQ ID NO: 66975 - DNA, 535 bp, Oryza sativa
  Clone ID: PAT_MRT4530_67877C.1
gtcaaacaggaaaaaccacctgcagaagaacctgatccagccccacctgttactgaagctgacccacctcctcctcctcccaagactaaggtggcagatactggcgatctactgggattaactgatccgaaccctaatgtatcagcgattgaacaaagcaaccctctggctttggccattgatccagcagatgctgtggctctcaacatacaggaccgttacatggcaggataaaggatttgttccaacagggtgggatctcgcccttgttaccacgtgtagtgtcacgaattcatctgttgcccatagtcaactggctggtgggtttgacatgctcatcttggaaagcctatatgaccgtgtgggactatcaggcacagacaggcccgagctcttatatgtgtctttcgctcccaacccgtttatgtcaaacgcatcctttcataatgtccaagcaatttgatccttgcccatcggagcatatggttgtcatgccctcagcatccatcaacagataccaccctttgatgcatgc

SEQ ID NO: 66976 - DNA, 399 bp, Oryza sativa
  Clone ID: PAT_MRT4530_67878C.1
ctaccctgctactactttctcaatttcgcagcctgcaacaacacttgaatcatccagtgcctcgacgccatcgcatgactcggccactgggccatgtttttcatcgagttcaggtagagggtgcaggctagaggagactccaggtacagcagacgcgtcggccgggaaggagcgttgggtagaggaatgcacctgagggatgacatggtaggcagggaggagccgcaccggccggggatgagcactgggcaggggaggtgccggtggaccaagaccacgtcgggcggctcccgcgcttttccaaccgtggatgggggctgtgcagtagagcccatgtgacggctccaatttggcgcagagaacaaccgacagctccagcacgcacgttattggcctcat

SEQ ID NO: 66977 - DNA, 423 bp, Oryza sativa
  Clone ID: PAT_MRT4530_67879C.1
atggctgcagatttctgcatcgcaggggaggaagcatgcgatgcgagcctacaagattgtgccactagctcagcagacagcgcccacgaggtgttcgaccgttgtcctcagcgaagggcacccctctcctcctcctcctgctgctgctgcagcaaggtgtctcccaccagagaggccacgcgttgctccggcagaggaagtcgcaaggccctggatggcgtcgcgcgccttcccctcggaagaaagacccacgcacgagcagaatcgcttacctcgccggaggaggcgacgacgcccgggcgggaggaggaggcgacgcagcaggtgacggcgcccttcttgtgcccccgcagccgcctcggcttccgaccctccgccgccgccgccgatgaatccgtctcggacatggcgtcgcagcgctga

SEQ ID NO: 66978 - DNA, 6509 bp, Oryza sativa
  unsure (1)..(6509): unsure at all n locations
  Clone ID: PAT_MRT4530_6787C.1
tcattcccaattcggcgaccacttgccaaatttactatcacgagtaccaatcggcaaaatcagcttccatacaagttctccttccgaaaaatctttaagtaccactttcttattataatgccaagcaacacgttccttatccctagtaaccttcgcaagggctcgcaatcttgactgaaccaaatcctccctctcatcagccataaggttgtaatactcatcggctgttaaatcattttgcaactccgttcgttgagagccgattctaacctcccatggcaaaacagcctcatgtccataaacaagtttgtaaggaggaacttgaatcgatccatgacaagccatcctataagaccacaatgcttcggccaaccgagtatgccattgccaaggataatcagaaattttccgcttaatcaatttgatcaaacttttattagacgcctcggcttgcccattagcttgtgcaaaataaggtgaagaattcaacaacttgatacccatgctatcggcaaactgaacaaactcatcggacacaaagattgaaccctgatccgtagtaatagtttgaggaagaccaaatcggtagattatatgctcctgaaaaaattgaatagcatccccagaatcaactttcttcaaaggaatcgcctctacccacttggtgaaataatcagttgccaccaatataaatttatgtcctttactcgatggtggattgatcataccgatcatatcaattccccaacctctgaacggccatggcttaataataggatttatagccgacgccggtgctcgctgaattgctccgaacttctgacaatcctgacaccccttataatatctgaaacaatcctccagcattgtcggccaaaagtatcctgcacgccgaagcaaccacttcatcttgtgagccgattgatgagtaccacagatcccttcatgtacttcgccgattgcaaacttagcctgatcggcactcaagcacttaagtaatactccattaatcatccgataataaagctcgtcatccaacagtgtatactttaatgccttatatcttaatttcctacaagccgattgagatggattactcaaatactgatgcacatcgtacctccaatcattggctgacatcgctgcaatttcaactttaacatctgtgatcattggcttataccccaacgccccttgagctaaatcattagcttcaagattttgttctcgagatacatgctttaaagtaaccagctgaaactctttcattagttccaagcacttctcattataaaccatcaacgtatcgttcttgcattcatattctcctgccaattgactgattactagcaaagaatcccccatgatttcaatggtatcggcttcaacttccttgagtaattgcaaccccttgagcaccgcttcatactcaacttgattattggtcgcatatggtttaatagtataagcaaactcgaaacatacccccctagggggaattataactaagccgatgccacaaccatgagtacataccgatccgtcaaagaataaagtccatggcactatctcaaccgagccgattgaatcatcacgatactctacaataaaatcggctatagcttgtcccttaatcgctttcggtgattcataccgaagatcaaactcagtcaaggaaaatatccacttcccaactcttccctttaatattggagccgatagcatgtacctgactacgtcggctttgcatataacagtacactcgttagataatagataatgcctcaaccttccagacaaattagaaataaaccttctaacaaaatttatcttgccgatcatctcttgtagctctgtcttattttccgggggctgaatcttcttgatcgcattaacgctcctttgggttacctcgatccccctttcatgaacaagaaatcccaaaaactggccggccgacacacgaaaagcacattttgtcggattcatcttcaagccatatttcctggttctctcgaaaactttctttaaatcggctatgtggtcctccacttcagggcatctaaaagccgtcttatggatatcttcctcagctataaagatctgattatatcctgcgttcccatccataaaactcaaaattttgttccctgatgcggcatcaaccagctgatcggccactggcattggatatttgtcctttggtgtagctttattcagatctcgaaaatcaatgcacaccctgaccttgccattctttttaataactggaactatgctagaaacccattcagcatatcggcagggacgaataaaatcggcatcatacaaccgtttgatctcagctttaacaggttcaagcatattggctttacatctcctcggaggttgctggcgtggtctaacccctggcttgataggtagccgatgttcaacaatcgatcggctgagtccaggcatctcataatactcccaagcgaagcaatctctaaactcttttaggagctctatcagcttggttctaaactctggagacaaatttttgctaataaatgtcggccttggccgatcgcctggacctatgtctatttcttccaactcatcagccgacatgaaaccttgaccttgcttgtcatcgagatcatctaccatatccttggcgtagacatttgaaccctccacgacgccctcaaagtaatagcttgggttctccatcttcgattggctgtcggctggcacaatctctatcttgtcgctgccgactgtcagctccacattcagaacacctttggtttccgatggattatcaccaaagtctttgagcaccatatttgtcttgatgagatcctcggcgttcctacccaacttcctgaacgtagcataaggcatcaaatttaccgcggccccaccatcgaccatcatcttagacatcggcttcccattgacgtagccgtttatatacaatggtttaagatgccgattctctgtcccctcgggtttctcgaatactgcctgttctggtgacagaaccaacttagctgatccctcttccacctcatcgacatcggcctgatcgatcccgaattcggctggcaatgtaaagaccatgttaattggtgccgctacaacgctcttcccttttgccaacctcttcgcctcatcggctgcagcatcatcggctacaggaacctgattcttgacacgccactcctgtcttggctttggtttcctcagccgatggttgatttcctcttcaacctcctgaaaacgctccctgttcctcaatctctggacccttcttttctgattcttcgtgaaaataccagaaggacaccattgattcttcctgattacctcatcctcttggccacaatcttgattcatcggacccaatctctgatgaacaggaagtcttgcctgccttagccgattacctctactgtatgaccggctcgagttctcaacgatatcactgcacccagggcaattttcgatggatggcaacctcatcccttcattccagcagaatctaaagaactcacaaccccaatgaggatcaaaaccatcgtcgtattcttcataatgcctctcctgctgcttatcatacttcctttgatacttgttgataatcttagccgaatttacttgaaaaccctttgcacggaccctatcggctgcttgaccagctgtatgcaccatattaacaggaaaaggattaccatcgaccttcatcggctttttggaatcatcaaacctaatctttcccccttcaatggcaacctggatttgctgtctaaaaaccttgcaatcgttagtagaatgagacccagaattatgccatttgcaatatctcttcttgcctaattcctctgccgatgggattgtatgaccagcaggaagatgaatctgcttttctcggagtagtaaatcaaagatcttttcagccttggtgatatcaaaatcatacttttcctcttttctaggactttttacccattggcatggtatgacctttttgctcctcacccattcggctgcagctatttcagaatcatcttcctcgtcatccgatccatacatgtatggacaaacatgattaactttcttagagcttctcctaacttccgccgacctatgctcatgcaaggttaccttctgtatcagatgcgataagctatcaaagtcttcgaacgagaatttctccctctgaatatactcgtgcacgggttcatcatgccgctgcttgatcgctgtcaagtcggacaacttcatctcatgaaccccactgtagaaatagctgtaaaattgcttctccaaatcggcccaactggccgatgcattcactgaccccgggtgctgaatcggctgaacgatctgctgtctcaacggagtctgttggatcggctgctgaggctgctgccttggtggcgtctgctgaaccggctgcagaggttgttgccttggtggtgtttgctgagctggttgtatgacctgttgttggattggctgtacaaccagctggattggtggtgcctgctgaattggctgctgctgcactggatcaacaataggtggaggtggtagaaacatggcagcaacctgatttttggttagccgattcgtagcctgcccgccatgttgtggttgttcccttgttaacaaccgagggttcaccggctgtcctggcgacatagctagtatagcaggcaaaggagtcgacgctggcgccgtcggctgagttgtgggcgcaacagagggaactgcttgaacagacggctgaacatcggtgatcaaagattgataacttgggaagacacctccctgcaagtaaactgggcctgcaggatgctcagctatcgaaccaccggctattgtcttcatcatgtttgacaatgtgttgactaataccccagactgggctagatggtggtggtggctgtttctcggccatgaggaagaactgacgtctgacttcttacaggtcccaccaggcgtgccaaaagcgtgttgactgaaaacacgtggcctgggagatctgcttaactccagtgcaggtccaaagctcgccttcggatgtgttagcgtgccagttgatttgatccggacacgactattatctctaacaaactctaagataccataagtctttgcggcagacttttgcccacatttatccttaatcagatggtggcgatagaacttctgtctttctagaaggccagggattgctgaagaagtcttgaagcacttaaaactcaaatccagcaaaagcaaaatcaatgcttcattgtttagaggccacagcctccaatccagaccgccaagggaatgtccacttgagagaagcaagctgctgtcaaacaagtgccgcctagatcggagaatggagacgccatggaagatatttgctacatgcaccagcaccgaggcgtccgccaactgtgtcaccttcatagcatagcagcagcctgccaccgacacctgcagccgacgcctacgatcgccgccccctctcacagcctgcggaatagggaccagcctactccagccaatgcagccgggcgctgatcggtaaaggccacaagtagccaccaccgtcaacgcacggagcaggatggggagcccgcagcagtggccagcgctgccgccgacgccaccacaaggagacatcaccacccttcggttcttcaacaaatcttctgatctcacagctccaccgccacctgctatcaccgccgccatgaatcggtttaatcggctacccttgtccgactcgaactctgtcgattctggttgcagccgattcggacttcagctgattcttgctctgttcccggaacgatccatccttagattccgcttcggttttatctccatctccgatactanaactaccaatttgnatcgttaacacttctctagccggtgtcaacagacaacatatcgactagagaagtaggaggctcatgcaggtttagcgaggcggaagtgttactccgacaaccgtgggtggtgacggagcggcttgcgatcacacatagcccgagagctaactgtgcggcgtgctgtggaggtcgagggaatagtaaagctccaaccacacgtacgcatagaggcgtggggtgctaggagcagcacatttgaccttgctgggctttacaaccaacagtctgatgtaagggccagtagaccgggcaaacatccccatgaaaggcgtaaagttccaaccggcggctctttaggggctaatgggtattttggaatgaaagaagatatgcgataatcaaatataagtttaaagtaagaattcaaatataagtttgaatcaaatataaattcaaatggtaattaaggaaattcaaataaatcttaaaatagcaagtctgatatcaaaatgtagagtttgaatttagatgaatttaggtcaagtgtcattggaatcggatatatggtttaggacatatgggcttctaaataataggatttggataaaatctagaaaatactaa

SEQ ID NO: 66979 - DNA, 720 bp, Oryza sativa
  unsure (1)..(720): unsure at all n locations
  Clone ID: PAT_MRT4530_67880C.1
agagaggatgctagaacatcccagagaggaaccacaatacagagaaacgatgacgagatcaagaaancgataggaggatgacgatgacgatacgtacggatgacgaagaatgaatanatacgcaagtagcacagggtactatacagtagatccggacgtgtcatacagcctcaaggccaataggtaccacgatacacacatatcctgacgtggtctacatcatccaagggagaggtactatgggaacaaccttccccggttgccctgcaactaaccagcaacaattccaacaattttcatctcaaggccaaagtcagagccaaaagtatagagatgatctctcaaaagatccatcaatacaaggcaaagagaccattgatcgcacatcccaaactgggtgtaagcaccattggttcctaccaatgaatgggtgatgccacctaatggtaagcccgtatattgttgaatgacgtaaaacaacaaacaccaaatcaaccatgaaccctaggccaaaaagaattcctattaacccgggcaacaacaattcgggctccaacaacaccaagttaattatggttaaccccccaattgaaccaacccctccgggggcccaaaaacatatttgcaggcgggaatttcggttgtttaaaaaatgccaaaaataaaaggcctaaaaggccatcaacccccattaacccaccaaaaaaagccaacaaaacc

SEQ ID NO: 66980 - DNA, 288 bp, Oryza sativa
  Clone ID: PAT_MRT4530_67881C.1
atgccacattccaaaggtgaagctctctgcaagcgcacagataccgttgtagctttcacccaagataaaattctatcaattgcttcgggcaccggcttacccctgatctgccaaggagactctggccttatgatgtacccgaacgtggaggattacgaaggatggacatggctatcaccaccagtcatctacctctacaacccgtggggcacacaaaaaacaatggtggagccgtgggtctccatcttctacctccacgagatggtgccatgcacatatgatgtttga

SEQ ID NO: 66981 - DNA, 256 bp, Oryza sativa
  Clone ID: PAT_MRT4530_67882C.1
aagcttacgcaacaactcaaagaacaaggaaaagaaaaatggaaagatttgtatttccacgagcgactgttaaatggagaactcccgctatcgattggtggtggactcggacagtcaagaatatacttgttattgttgaaaaaatgggcatttggtgaattttggccaccttttgggccaaaaaaaaggtgggaaaattgaaaaaaaaaaaccttccctttctaataaaattttttatcctaaaaaaaaaaacctt

SEQ ID NO: 66982 - DNA, 422 bp, Oryza sativa
  Clone ID: PAT_MRT4530_67883C.1
aacctacccaaattaccaaactatactactgctcgacacggttcgttttttttcaccgacccaagaagcagagaaagaaaggaggtgagaaatctggtgggtgtggtgatggccgcggcgagtttgatcaaggcgcccgtggggcagaatcctgcgaggatgggcgcggggaggagcagcggaggaggaggggtggtcaggtgctcgctgcagggcgccgtggtgggcggccgggcggagtggcagagcagctgcgccgtgctgtccagcaaggtggccgcgctcggggcggcgtccccgcacgccgcggcgccaagcttcgttaatgggcatgtcgcgccgctggtcccggagcagcaggcggcggcggaggacggcggtgcggtgcttgatttggtgcccgtgagcagcgttaatggcgg

SEQ ID NO: 66983 - DNA, 1193 bp, Oryza sativa
  Clone ID: PAT_MRT4530_67884C.1
ctattgatgcttaatctcagccttcctcttatgccacagcttgtccagtgcaatgtttccatctcccttggttgcagaaaccgacttgcagagaaagggttgcacggtgctgtggatctcgaacaggaggcggaggcgacggaggacggcggcgcggtgctggatcttgaccgggaggcggaggaccgacagctgatggaggcgtacgacgcgccggcggacggggtggcgcgatctggatgggaaggacggagcgtcggcgctcgcggacagggatcgggacagcgacggaggatcgcgacggggagggagaggaggaggcggaagcggagggggagagggcggcgcaaggcggcggcgggcggtggccgccgatccagtcgccgagctcctaccgctgtgggttctcccacaaagaagacccttttttactgcccatgggctgaaccccattctgagctacagtgtccagcccatcgtaaccctcattttatatggcccaacccaaccctgcccttatcccttcctataataagttcatttgaggtcccttaattttacaccgaatccgattctcgtccttaaaccccaaaaccagatacaaccggtcctcgaactatcaaaaccggtacaaggtcccttagcggttttgaaggcggttttggctgacgtggcgcctacgtggcttgtttcactaggcctccgtccctgtggcattgacgcggcgatgacgtggcaattatatattggaaaaataataaaaatcatgggcccacatgtcagccacacaaaaaaaaatctaaaaataatggggcccacatgtcagttaaaaaatggtggggcccacgtgggccccgcatgtcatctccctctccccacttggctctcactcttcttcctcatcacgttgcagcatgccgacaacgacggcgtcggccgaagcatgccggcggagcggcggctgcggcaggccgcggccgaaggggcccacgaggagcggaggggcgggcggagcggcgggccaaccaatcacccactggcccccgccgttgttcgcgacaccgctctcctcgccgtcgccggttcactcgccgccgccgtcgccggttcactcgctgcacagccatggggatggaggggagttggtggcggagaagcacgtccgctacatcgtcaccgtggagaaggattga

SEQ ID NO: 66984 - DNA, 199 bp, Oryza sativa
  unsure (1)..(199): unsure at all n locations
  Clone ID: PAT_MRT4530_67885C.1
taggggcatgtatacagaagttatanccgtgactgattgctttatttgcttctcccgttnctgttagccntggagcacntgggagaatcgtataatggggtttgtttggttccaatttgccatggtctagtgataaaatggtaagagaataaatttggccagatagtgcagctttcagttcctgttagcaaaaaaaaaa

SEQ ID NO: 66985 - DNA, 228 bp, Oryza sativa
  Clone ID: PAT_MRT4530_67887C.1
atggagcccatcactgtgcgtagcataggtttcagcatgaacatcggccgaaaggagcgcctcgcggcaaagaccttgtcgaagggttccgcgggcgaagatggtgaggcgaaagccttagcacggagacacgggcttcgccgagcgccgaaccctaccgcgaggaggcccaacgggccgttacactctcgaggaggattcgacgaacgaatgggccaagccatctaa

SEQ ID NO: 66986 - DNA, 885 bp, Oryza sativa
  Clone ID: PAT_MRT4530_67888C.1
ttatcgtctccttctttttgtgcagagtagcgaggagcagagggcggcggcggcctggcctacgtgccacggaaggccgtggcgggccgcggcaggtggcggcgggaagcagggagggtagtagcgggcggataggatggcggcggcaggcagcaggcgcgcggcgacaggcggcgggcgacggcgtttggcggcgtcctcccctctgccggagaggaggcgggagacggcagtggcatcgccgtttcttctttctttttttttgaaaactctcttgttggccttcagagcttctttctcccagttggtggccagaagccacagcatctgcacgatgagtgcacacattatctctggccgccgccccaagatcatgacgagccccgccgatcgcgatgccgacgacgagacgtggccagcaccatcaccatcagcgagattcttgagtcgccagcaatagttcgtcaccggcatgtagccctgaaggacgctacggaactccatttcatgataaatgattctggtttcacggttgtcgtggaagatgccctgtcgtgggccaactaccatggtctccatgatgacatcaaggacgtcggtggcgatggagcagtacatggcgatgtggacagcggagtccttttgcgcccagatcccagcagtgtcgagcggaggaggaggctcgaacgcgacgaagatggttctttacttggtgtagttcgaactcttcatgtcaaggacggcagacacgtgtgccttgaagtttgggatgctgaaagctcaggtgctgcaccaacgaccacgcgtgttaggcgtaggtggcgggagagcaccaattcgatcttgcacggacagcgggatcgtcagggccgaagagacgcctag

SEQ ID NO: 66987 - DNA, 2840 bp, Oryza sativa
  Clone ID: PAT_MRT4530_67889C.1
ctctctctctctctctagcgcgcaacaacagcagcctcaaaaccctagctgccctcgcgaccgggtcagggccttcgattggatcggccattcggttcgttcctccaggatattgttggtacttgcattcctccgtctgttattcaagaaagccagtttacactgagagaaccttgctttatttgcaggttcattggccttttgttttgcctgagtgaatgcaattggaaccttctgggtagaagctgaagcttagtttggaacttcatcatactgatttcatactcagaaagtggcgagaaatggatcgtgatgatatagctggtttcgtaagtggaggttgcaaggccttctgagttttctgacgaagcagatgataatagagttatgatatacagaagtcaggcaactggttcttttcatttactatttggttgacgtttgaagtttgttaactggaatggacaaagcatcatgtggccttgggtttggtgatagtatcaactccttagacacgtcccgtcattggagcactgttcagcatacttctgggcttaaagctactacaattgactattcaacgtattccagtttttctattgcaagctcaaaaacactaaaaaggaagcgaagtgctatggcaggaccagaaggtactggaaacccattacttactttgggtttagggcactcaccaagttcatctgacaatagcaaagttagttctgccacagcttatgcaatgtctccatcttcattgaaagaggctgatgaggagtcatcagctgatcttggcctgaattttgagctttgccttggcaatgatatggtacattgtcaaaagaaatcccctgttggtgctgagaattcaccattgacaaactctcataaattggatcttcagctgagtttgtctactggatcacctgaatcagctgtcaccaacacaaatatggtgtcaccgattattcacggtggcttggagatacctgttaccaactgttcaccagctattataggggaaggatctgtaccctgtacttgggttttcgagaagtcagtgatttcatcttcgtatgcctctgaagcaacatataccttcccattttcgaaggtacccaaaacaggggatgctgctatgtcttctccagtcatatcgtcaaccttggtaacaagtatgaaaagcccagttgcctgtacttctgggtcaattaatccccaacaacgcaacagtatcactaaaaactgtcagtttccaggatgtgttaaaggagccagaggggcatcggggcattgcatagcccatggcggtggtaggagatgccaaaaacctggttgtcagaagggtgctgaaggaaggaccatatattgcaaggcccatggtggaggaaggagatgccaatttcttggatgcacaaagagtgccgaagggcgcacagaccactgtatagctcatggtggtggtcgccgctgcagtcatgatggttgttcccgggctgcacgtggcaaatctggcttgtgcatcaggcatggaggtggcaaaagatgtcagaaggagaactgtatcaggagcgccgaaggtcattcaggcttctgcatctctcatgggggtgggaggcgttgccaatttccagaatgcacgaagggtgcacagggaagcacaaagttctgcaaggcgcatggtggaggaaagcgatgcacattctcgggttgcaacaaaggagctgaaggcagcactctcttttgcaagggccacggtggaggcaagcgatgcttatttcagggtggtggtgtgtgcccgaagagcgtgcatggcggaactcaatactgtgttgctcatggtggtgggaagaggtgtgctatttctggttgcaccaagagtgctagagggcgtacagagtactgcgtgcgccatggaggtggcaagaggtgcaagtttgagggctgcgcgaagagtgcgcaggggagcaccgatttctgcaaggctcatggtggaggtaagcgctgctcatggggccaggttgacttgaacttcggtgtcggcgcaccacagtgtgataagtttgctcggagcaagactggtctctgttcagctcactgtgctttagtccaggaccattgtgtccgtggtggtacattaggcgctgcaaccttccagttcgcaactgatgccaaattcgacgagatggaagtcaccccagtgaagggagatcctcacgcgcaggcaagcagcgacgaccagtctcatctcggtggtgctcatcctcctgctgtaccggcgatcacctcggatcgattttctgaaggaagagtgcatggtggtgggctactggccttactttcacggggtggaaaccatgcgaatgcaggtaactcaaagaatggcgcccttctaccatgatgacatgggagtgagattctcttcaagaaattggtggctcgcagttttgatctgtttccaagagtttgtgctgtgacggacgggaaaaactagtgttttcacatttcaccagatgttcttgtgatgcttggatttgttgttatggccctctcccgtgtgctatatataaataaggagctcgtagagcgtggagtaccgggctttctgtcttccgtgctattgtagttgatgtcgttgaactgcccttctgtcagaattcatgtaatcttggtacttcgtgtttatttgtattgtcagtgatttgccttgctgctttgctgttggaaaattgtcgtgtatttttgttgatagattatatatattgccttttcgttgcaagcctagctgttaaaaaaaaaaaaaaaaaaaaaaaaaaaaaaaaagggggggggcctcgtgc

SEQ ID NO: 66988 - DNA, 6199 bp, Oryza sativa
  unsure (1)..(6199): unsure at all n locations
  Clone ID: PAT_MRT4530_6788C.1
tcattcccaatttggcgaccccttgcgaaatttcttatcacgtgtagcgcttttcgccttgccgttgagtacatttgcgccctcgaacagctcattctcccccccggacctaccctcatccctcctcccctgcccgacgtcctcgctagcgcccccgcgcgcccgaactctcgcttcaactcaattacaatatacatgagagataaggatgagattgtcctcgcctcggcaaatgccacccaggaccatactcagataaacaacgtctaccaacccgtcttgaatcacccccgagatcaggtcaagctcctcgtgtaggaaccagacccgagtcccctttatgccctctatcagaattctaggattcgacctgagtggaaaagtaggggttagcatgcgcagcaaaggtccttctatattttcgactcaaaggccatcctgagaagtgtcaacttccattgattaactcaaacaccttgtaagcataattcattgtatcttctggactgcagttttactgatttcttcactgacccacccaaccgaacccctgaattgttcttttattcatttcatcgtactaatcacgggactgatataaaaacaacaaagttactcaacatgggaattttatcactcctgcaaactgtcagcaaacaccacttttttattaactctatactgttaatgtttctacatcagcagcagaaggagataaattgaacatacagatccattctagtcaatgtctgacaaaccctgtataaatagagtacatcttagaataaaatgcacaatccgggatacttaatcctgtcaactaagaattatatcagggctttgtttgtggttttgcatcggacagcaaaaagagcgttgactctccaatgttagaaagggagacacagatcctcaaagccgatcccaaaggtccaacactacccaaaaggaggacggaactggaaatgtccacatactaagcagacaatgaagtgaaaacctggtcaggaacaattcctcactgcgatagcccgtaatagggggacagaagggattcctggcggctcgctgcactaaccccggataccgattgagactacgatcgtgcgacccgatgggctcgacaacaccggagtggatggccagatgagggaagatacagtgctgctgggtggagcatcggagcagctgcagttggagctagttgttaaggcaacgtataaggaggaggagagcaaagggagccattatcctgaacatccgccgccggcactgccagccccgtgtccgatgaatgcacgccctgaatattcctggtcgtcgtcactaggcccctcgtcgtcgttgccgtgcccgcttccgctcgtaggggaaaggagcgccgtccatgggaggtgtggtgaagggaggccaccgccgttgccgagcctgtccgctgttgcgccggatgagaggtcaaagaaggccgacgcctcccgtgccgtgcccaccgatgcggagcagccgctgctcccgctccgagccccgctgtagatgttggagagttaaaaaacaaatgcaacgggtctatctcccccgagttcattcttataaaaggagtctatttaattaaatgaaaattttggtttccatttaaagagtccgattacttgttcatgtgtcaggaggcaagcaacgataaaatccccatcatcactcttctttgtaaatttgtagcctgcgccatgtacgtgacatagtaggctatgcagatcatagtactcttttaagtgtatagctgatgaaacaaactctccgccgaatctggaataaaccttccagtaaaagacacctgcgggaatatttcttgttcgtctgtcttaatttacgttggcttagtcttcttgatcgcattaacgctcctttgggttgcctcgatccccctttcatgaacaagaaatcccaaaaactggccggccgacacacgaaaagcacattttgtcggattcatcttcaagccatatttcctggttctctcgaaaactttctttaaatcggctatgtggtcctccacttcagggcatctaaaagccgtcttatggatatcttcctcagctataaagatctgattatatcctgcgttcccatccataaaactcaaaattttgttccctgatgcggcatcaaccagctgatcggccactggcattggatatttgtcctttggtgtagctttattcagatctcgaaaatcaatgcacaccctgaccttgccattctttttaataactggaactatgctagaaacccattcagcatatcggcagggacgaataaaatcggcatcatacaaccgtttgatctcagctttaacaggttcaagcatattggctttacatctcctcggaggttgctggcgtggtctaacccctggcttgataggtagccgatgttcaacaatcgatcggctgagtccaggcatctcataatactcccaagcgaagcaatctctaaactcttttaggagctctatcagcttggttctaaactctggagacaaatttttgctaataaatgtcggccttggccgatcgcctggacctatgtctatttcttccaactcatcagccgacatgaaaccttgaccttgcttgtcatcgagatcatctaccatatccttggcgtagacatttgaaccctccacgacgccctcaaagtaatagcttgggttctccatcttcgattggctgtcggctggcacaatctctatcttgtcgccttgccattgaatcaagcattgatgcatagtcaaaggaatgcaacaattggcgtgaatccaatcccttccaagcaccaaactgtacgaacccttcccatcgatgacaaaaaacgtggtaggaatagtcttactgccgactgtcagctccacattcagaacacctttggtttccgatggattatcaccaaagtctttgagcaccatatttgtcttgatgagatcctcggcgttcctacccaacttcctgaacgtagcataaggcatcaaatttaccgcggccccaccatcgaccatcatcttagacatcggcttcccattgacgtagccgtttatatacaatggtttaagatgccgattctctgtcccctcgggtttctcgaatactgcctgttctggtgacagaaccaacttagctgatccctcttccacctcatcgacatcggcctgatcgatcccgaattcggctggcaatgtaaagaccatgttaattggtgccgctacaacgctcttcccttttgccaacctcttcgcctcatcggctgcagcatcatcggctacaggaacctgattcttgacacgccactcctgtcttggctttggtttcctcagccgatggttgatttcctcttcaacctcctgaaaacgctccctgttcctcaatctctggacccttcttttctgattcttcgtgaaaataccagaaggacaccattgattcttcctgattacctcatcctcttggccacaatcttgattcatcggacccaatctctgatgaacaggaagtcttgcctgccttagccgattacctctactgtatgaccggctcgagttctcaacgatatcactgcacccagggcaattttcgatggatggcaacctcatcccttcattccagcagaatctaaagaactcacaaccccaatgaggatcaaaaccatcgtcgtattcttcataatgcctctcctgctgcttatcatacttcctttgatacttgttgataatcttagccgaatttacttgaaaaccctttgcacggaccctatcggctgcttgaccagctgtatgcaccatattaacaggaaaaggattaccatcgaccttcatcggctttttggaatcatcaaacctaatctttcccccttcaatggcaacctggatttgctgtctaaaaaccttgcaatcgttagtagaatgagacccagaattatgccatttgcaatatctcttcttgcctaattcctctgccgatgggattgtatgaccagcaggaagatgaatctgcttttctcggagtagtaaatcaaagatcttttcagccttggtgatatcaaaatcatacttttcctcttttctaggactttttacccattggcatggtatgacctttttgctcctcacccattcggctgcagctatttcagaatcatcttcctcgtcatccgatccatacatgtatggacaaacatgattaactttcttagagcttctcctaacttccgccgacctatgctcatgcaaggttaccttctgtatcagatgcgataagctatcaaagtcttcgaacgagaatttctccctctgaatatactcgtgcacgggttcatcatgccgctgcttgatcgctgtcaagtcggacaacttcatctcatgaaccccactgtagaaatagctgtaaaattgcttctccaaatcggcccaactggccgatgcattcactgaccccgggtgctgaatcggctgaacgatctgctgtctcaacggagtctgttggatcggctgctgaggctgctgccttggtggcgtctgctgaaccggctgcagaggttgttgccttggtggtgtttgctgagctggttgtatgacctgttgttggattggctgtacaaccagctggattggtggtgcctgctgaattggctgctgctgcactggatcaacaataggtggaggtggtagaaacatggcagcaacctgatttttggttagccgattcgtagcctgcccgccatgttgtggttgttcccttgttaacaaccgagggttcaccggctgtcctggcgacatagctagtatagcaggcaaaggagtcgacgctggcgccgtcggctgagttgtgggcgcaacagagggaactgcttgaacagacggctgaacatcggtgatcaaagattgataacttgggaagacacctccctgcaagtaaactgggcctgcaggatgctcagctatcgaaccaccggctattgtcttcatcatgtttgacaatgtgttgactaataccccagactgattgatcaaagcatgatgcacagcgtaatcaacccgatcttggaagttattgaaaaaatcttgtgctagttcactattctggtcaagatttcctccttgtggctcctgagcaccatcaccttgaacgccacgaactccttgagaattgtcgccatgatcgctcggggagccgtcggtagcacctttagtactcggctgacccgagccgcctggagcttgtttcacttctccatctttagaagagccggtcccaggactatcagcaaccacttttattttatacttctgaacaagtgccccctgggctagatggtggtggtggctgtttctcggccatgaggaagaactgacgtctgacttcttacaggtcccaccaggcgtgccaaaagcgtgttgactgaaaacacgttgcctgggagatctgcttagctccattgcaggggcaaagggcgcctttggatccgttaattacaaaatatgtccataccggacacgactattatctctaacaaactctaagataccataagtctttgcggcagacttttgcccaaacttatctttaatgaaattacagaaattaacctaatttatagatacaattgccttcacagcactagatccgtgcatggcaatcaacctgaagtacattaactgaaccagaaatcgtgcattgtttagaattgtcggcatcggatccagaccgccaagggaatgtccactgaagagaagcaagctgctgtcaaacaagtgccgcctagatcggagaatggagacgccatggaagatatttgctacatgcaccagcaccgaggcgtccgccaactgtgtcaccttcatagcatagcagcagcctgccaccgacacctgcagccgacgcctacgatcgccgccccctctcacagcctgcggaatagggaccagcctactccagccaatgcagccgggcgctgatcggtaaaggccacaagtagccaccaccgtcaacgcacggagcaggatggggagcccgcagcagtggccagcgctgccgccgacgccaccacaaggagacatcaccacccttcggttcttcaacaaatcttctgatctcacagctccaccgccacctgctatcaccgccgccatgtaangggccagtagaccggg

SEQ ID NO: 66989 - DNA, 398 bp, Oryza sativa
  Clone ID: PAT_MRT4530_67890C.1
gcgggtgggaagaaaacaacctgtcagctgctgcaaaggatcctgatagtgccttctttaaaagattggacagcttccaaccatgtgatataggtgaactaaaaccaggcacgcacttctttgctgtctatggtgacaatttcttcagaagtgtgaactatactatagaggttgtatgtggtgaatctttccctgctgaaaaggagaagctccagagtgttgaggcaaatatactcacaaaacgagcagagctatccaaatttgagaccgagtacagagaaagttttggcaaagttcactgaaatgaccagcagatacacacaagaaatgcaagcaatcgataatcttcttaaggaaaggaatgaaattcatgcgtcctataccaacaattcaccact

SEQ ID NO: 66990 - DNA, 1279 bp, Oryza sativa
  Clone ID: PAT_MRT4530_67891C.1
aggagtataagttacagacaatatatatatatttatatggaaaagagatgttaaaagatacggaaactgcatgagaacatatgtaagcttgtgcaattacataagctagaccttgaaggatgtcactatcttgtcacgttgcctacaaagaagagtaaaatgaaggagcttcagtacctaaatgttctcaattgctactcactcacagcaatgcctcatgctatgggccaacttacacatcttcacacattgcttggttactttgtccccaacattggtagtagtgcaatgtcagagcttcaatcactgctagacctccacagcctatcactagtgaaccttgaaaaggtttcagacactgaagatgcaagaatggcaaaacttcaagagaaagaaaagctcgagacattgatgttgaggtggaatatggatgctggaaatgccagtagaatagatcatgaagtacttgaaaccctccaacctaaccagtgcctgaaaactttggagattgttgcgtatgaaggacatgcatttccatcttggataacaagcactgagccatatctcacatctctggttgagataaggttggttaatctgagatcatgtgaaaatgctttacctccacttgggctactgccatgtctgaagattgtggagataagccgagttgagaatatcagttgtattgacgataatttctatggtcagaacggtacatttccttcattggagaagctgattctctcattcatgactagccttgaagtctgggaacagtcatctaggatgaatctgtttcctcgtcttgcagaacttgtcatcattcagtgcccaaaattgagagcactgcatatggagtttccatcgattgaaaaattgattttgtggatgaataataagatgttgtacagctcgaaggaaggtctgagaggtgtagagaagagcctcgaaaatctttcaatttctttctgtgaagagttgcatgcttcttcaggctgtgagggtctacaggctcttgatcgcctcaagaagttggagatatgtggttgtcatgaattgtcatgcctcccacagggtttgcagcatctttcctctctcgccagcttgaaaattgataactgcaacaaattggagattttgccagaatggttggagaacctaccttttctacagataatgtgtttgtctggctgtccaattctgcactccattcctgaaggcctaacatgtagcgacattattgttgaatattgccccaattttaaagaaccatcag

SEQ ID NO: 66991 - DNA, 399 bp, Oryza sativa
  Clone ID: PAT_MRT4530_67892C.1
atggagtccgagaccaacgccaacgcggtgcggcgcccacaaaagcggagagaggcgggagctctggagactagggtcgtacggaggggcacggagcaggaccggcccaagtcggcccagcccctcccactcaagccgactccctgctcctcctcccgtgggtgcttccaggcgccgccaccgtgcgccattactgccgccgtgcacgactcagctaccgccgccgccatcttgccgtcgaagcgaaggaaccgccacccgacgtcagctacacttcattccgccgacgtcagcaacagggacgaaccgccatcgtcggccaatcagaggacagagccggcgccgtcattcttttctccacgtcgctgcagccgtgtcctcatcgaccttctcctctga

SEQ ID NO: 66992 - DNA, 312 bp, Oryza sativa
  Clone ID: PAT_MRT4530_67893C.1
atgggaggtaggggtgcaggaggagaagctcatgatgatccgttccgtagccgttcatcatcattcggggcagtgcagtgccctctcacagtcttctcacatgcgtgcagcgaatcatgcatgcgcatggagatcgagatagaactaccaatatacaataatgcagctgaggaaaaggagttgcaaagctctttgattctcgccatgaccaaaacaaacacagcataccggactggagtagcacacatgctactacatccgctacgaaacactacaagagctcgttcgttttttgaggaaaaactgaggatt

SEQ ID NO: 66993 - DNA, 473 bp, Oryza sativa
  Clone ID: PAT_MRT4530_67894C.1
caacaaattcgtgggttccaggagctgcatttgaagaagcaggggtgccccatgcaagcaatcttttgctgtgtgatgaactgctggtgatctggaggcacttgattattgtatgattcctgttgccatctgatgttgcagaagctataccaagttaccgcttcttgtgcatggaagcatggcatctgactgcgaggtagatctttacgacctgggatgactacctactgtgtgccatagtatgttcttgtacattttgatgaacctacattgacgtgcataaagttagttcatagtatgcagcaagactgcaagagctagtgtagagctgcatggtatactgaacatttggacggatcaataatgtatacatcttaggtagtggacagtagggttgcttgtctagtggaattttgcttatgacgataacccagattgatttgacttcgatcatccaaattcgtttatgaact

SEQ ID NO: 66994 - DNA, 450 bp, Oryza sativa
  Clone ID: PAT_MRT4530_67895C.1
atggctgacactgatgatgagcttgaccccgtcatcgtcgccggcgccaaccgtgccttcaccgacaacgggcgcaagcttggagtcggcgctggtgtcatcatcaatcatcatcgtttatcctcgcggctgccaccgatggcgaacctgatcctggtcatcgttgccggcgccgaccgtttctcccctgccgaccgtctctcaagcttggagctgccgtcggtgtggtcatcaaccatcggcgtctatactcctggctgccaccaatggcgaacctgtccctgcgcccatacacatgacggcttcttcatggccgccatcggcgcactcccgagtcaagtcactacgatcggagacggctcaacatcatttgagttcagccccgattgtcggcgcatatacaagagggccacccagctcctggaacgcatctcatcgttcccaggctag

SEQ ID NO: 66995 - DNA, 330 bp, Oryza sativa
  Clone ID: PAT_MRT4530_67896C.1
atggatctggagctggtcgaccatggctgccatcaccatgcgcatcttgtcctcctccaggaggccgtcgaggtcgccaagcatgttcttgtccatcgctgccaccgccgggggaggaggaggaaggctagggttttggggttcggggagcagaggagaggagaggagaggagtcgagatctaaaactgtcgacgtttgatgtctcgactacggttcgggtccctgagcggtcagtcgacaacagggtagccttcctcctcgagctcacgcccgacggaatcagagacagtgctagatccctacggccggcctctgaaggtaccggatag

SEQ ID NO: 66996 - DNA, 2438 bp, Oryza sativa
  Clone ID: PAT_MRT4530_67897C.1
ccaccacctcctcctctcccttctcttggaggaccgggtcctcttggaggtcttgttctagccagcagcattggccgattaagcggcggcggcggcggcggcggcagaagtagtatcagtgacggccgcggtggcgccgtgtggccgtggacgcagcggcggcggatcggagggatcgccgccgccgccgccacacccgccgccgccatctccgtctccgccgccattgccgccgccgccttccctcgggtagcccggcggctcaggcttaggcttgctgctcgtcggcgctgccggtggcggcgccaccgcgtggatcaccccgccgcccttctgcgcttctctcgggttaccgggcggcgtcggtctcacgccgccgccgccgcggcctccccctccgccgcctcgccgccgccgcctgcagattctcggtcaccggcgccagcaggagcggcatggacagctccaccattgccgccggcgccctccgccggcgagcctggcctctgcggcgcggagtcggcgacggcgtggatcacgccgccgcgtccgccgcggccttctctaggtccggcgccaccgccgttgcctctctccggagtggtgcccgccgccgccaagatcaccggcggcgacgcgggcagtcggagttctcctcctcccctgggcttccactgcgggaccgcgttgtggtgtgggccactgccttgctccggaatgcccgccgccgccgccagcatcaccggcggctgtcggaggaggatggcattgtggtgcgggcctccgcctgtctcgggcggagcgtccctcaccaacacttttgcgccggcgagctgcaggccggaagacgtcatgccaccaccttaaccgctcaacagatgccgccgccgtcgcggtctccctcctcctcctatcccgccgcctcggcctctacttgcagccgccgagcgggccttggtcggcgcggcatgcctctgtctcgctctcgccgctgccagcaacttcgccggctctgccctcctgcgcactcgccgcctccttgccctgcccatgggtgccgccggagctggacacgaagactagcatgctgctgttcttggtggtgatggggacgctgctgatgccgcagcaggagcgacatggacatctccaccattgccgccggcgccctccgccggcgcgcctggcctctgcggcgcggagtcggcgatggcgtggatcactccgccgcgtccgccgctgccttctctaggtccggcgccaccgggcggcgtgggccgcctgaggacggcgttgatcttggggccgttgccttgctccggagtgcccgccgccgccgccaacatcaccggcggcttggccggcgatggaggttcggtggtcggcggcgacacgcggctcgggaggtggcgcggcgtcgtgcggcggcggcgagaacggtgggcagcggcggcggccgcggaaatggagccggcggcggtggctgtgggggcgccacggggtgacccggtttgcggcggtggaggcgtggttgcggcgcgggggtggcgcggcggcggcggcggagcgcgggattggctgggctgtggcggcgcccgtggtggcgcggtggcggcggcggcggcgcccataggagagagaggaggtgacctcgcgggcccggctgggccgctcttgattgggccggctcggctgggccacactctaggtgggctggcggcctgaggaggagggagtggactttctactcaagaagaggcagcagcagcaggggcgacatggacagctccaccattgccgccggcgccctccgccggcgcgcctggcctctgcggcgcggagtcggcgacggcgtggatcactccgccgcgtccgccgctgccttctctaggtccggcgccaccgggcggcgttggccgcctgaggacggcgttggtcttggggccgttgccttgctccggagtgctcgccgccgccaagatcaccggcggcgacgcgggcagtcggagttgatctcctcccctgggcttccactgcgtgaccgcgttgtagtgtgggccactgccttgctccggagtgcccgccgccgccgccaacatcaccggcggctgtcggaggacggcgttgtggtgcgggcccccgcctgtctcaggcggagcgtccctcaccaacacgtttgcgccggcgagcgacgcggcgtggggccgcaggaggtgcgccgggaggaacgacgacggcgaggtcggcgacgccatggcctcccccacctcctcctctaggcctcatctccaggagcactccgccttgtctcggagtagtgtccattgctgccgcgacggcgagctgcatcgggcggcgccggtcggaggaggacggcgacgggagggggaggagcaggcccggctggtggcgcggggaggacgacacgtagaacgacg

SEQ ID NO: 66997 - DNA, 315 bp, Oryza sativa
  Clone ID: PAT_MRT4530_67898C.1
acccgcgcagcatgcattttatttaggcacgggccaaaattaaaacatgtataggggataccttttggcgggagacactcacggtataaaaggggaggcgggggtacagggatatagtcatatttgggcgttttttaatgccggtcggtgacttcggtcaaaggggcagggtcgggtaggcaaaatcgagggggaccccccaaagggcggggccaccgacgttggggagaaaccggatgtagccgggcttgccccaagactggccccaagaggtcttgaagggccaaaacttggcgccggaagacccgttggtgc

SEQ ID NO: 66998 - DNA, 691 bp, Oryza sativa
  unsure (1)..(691): unsure at all n locations
  Clone ID: PAT_MRT4530_67899C.1
atggcatcagccttggcatcgccgacctcgccgtcgttcctcccggctcacctcctgcggccccacgccgcgtcgtcgtcttccggcctgcagctcgccggcgcaaaagtgttggtgagggacgctccgcccgagacaggcggaggcccgcaccacaatgccatcctcctccgacagccgccggtgatgctggcggcggcggcgggcattccggagcaaggcagtggcccacaccacaacgcggtcccgcagtggaagcccaggggaggaggagaactccgactgcccgcgtcgccgccggtgatcttggcggcggcgggcaccactccggagagaggcaacggctccaagaccaacgccgtcctcaggcggcccacgccgcccggtggcgccggacctagagaaggccgcggcggacgcggcggcgtgatccacgccgtcgccgactccgcgccgcagaggccaggctcgccggcggagggcgccggcggcaatggtggagctgtccatgccgctcctgctgctgctgctgctgccgcctcttcttgagcacaaaactaatgaaaaacgcacaaaattaaatcaaattaaattaagatgtgattacaaagattcgtaattntgtaagattttgtagctagattactgtatgtgatgtagtagtacgtgtacatgtacatgtgtgagttga

SEQ ID NO: 66999 - DNA, 280 bp, Oryza sativa
  Clone ID: PAT_MRT4530_6789C.1
cccacgcgtccggcagtacctaatctagcattttacctctagaacagtagttatatcttgttgtgccattgtactctggtgtgaagtgctttgtaaagggagatctatctataagctgccagtaacaatgaacatatccgatgttaggaaataggaaaataccatcaaatcaaatctatattgccaatgtaggccggaattgggagatgtgagatgcctgtggccactaattgaggctgcatagtttgtctccactgttttaaaaaaaatcatttttcat

SEQ ID NO: 67000 - DNA, 492 bp, Oryza sativa
  Clone ID: PAT_MRT4530_678C.1
atgaacttttcgttcgtcaagactaggggtgaaaacggtaacgaaatatcccattgtgctgtcgctggtgcgctcatcgcctacaaccacgaccaacggctcgccgcctccatccaccacgccgatggtcggatctacagcatcgcgggaccacctccgccccctctctactccaccgccgcaaagggagaagaaggacgccgcccctttcttgcgccgcgagcagcgggcgagtgctttgcgtcgagccgtcaaggtcttctctccacggcctccttctcaccgcgtcgctggtcatgcccctccctctgcgtcgggcgacggcgagctcccgcggcgccgagctcctgcgctgcgtcccgcccggcggcgagctgcgccaccctcctcgacttgcgccgccaagctcctgctccccgtgcccccctccgcgcccagcggcgctacggcgagcagccgccgccacagatcctcccactgcagcagcagtga

SEQ ID NO: 67001 - DNA, 414 bp, Oryza sativa
  Clone ID: PAT_MRT4530_67900C.1
atggcatcagccttggcgccgttcctgatccccgcacacctcctgcagccccacgccgcgtcggcgtcttccggcctgcagctcgccggcgcaaacgtgttgctgagggacgacgctccgcccgagggaggccgaggcccgcaccacaatgccgtcctcctcccacagccgccggtgatgttggcggcggcggcgggcactccggagcaaggcaacggccccaagatcaacgccgtcctcaggcggcccacgccgcccggtggcgccggacctagagaaggcagcggcggacgcggcggagtgatccacgccatcgccgactccgcgccgcagaggccaggcgcgccggcggagggcgccggcggcaatggtggagatgtccatgtcgctcctgctgctgctacctcttcttga

SEQ ID NO: 67002 - DNA, 1474 bp, Oryza sativa
  Clone ID: PAT_MRT4530_67901C.1
ctacggtggggcagccattggtaggactgcgaggcgggtgtctacagtggtgtcgccatcggtaggagtcttcctctttggcatctggtacaaccggttccagccgcgcggccccgccggcatagatacgcggttgtcgcaggccgacacggtggagccggacaacctggaggagtagtttgacgccatgccgccgccggaggtgtttcgggcttgctacgagaggttgtggacactggcggggcagaaacggcacggccacgcccatgtcgcgcaccagctcgaacgcgttcaggcgctgctccgcgtacagcggccacggcaccagcggcacgccgtgccacaggctctccagcgtcgagttccacccgcagtgcgtcacgaagctgccgatggcggcgtgggcgaggatctccttctgcggcgcccacgtcggccacacgagccccctccccttggtcctctccaggaaccactccgggaggagctcgtcgaggctcgcgtccgtcgggtgcaccgtgccggcggcgggcgggccacgcagcgcccacaggaagcggtggccgctgcgctcgagccccgcggcgacctcgcgcgccttcgcggcgtcgaaccagcccatgctcccgaagcagaggaacagcaccgacgccggcggctgcgcgtcgagccaccggacgcagcgagcgttcgacgacggcttgtcctcgaggtcgagcaccgggccgatcgggtacagcggcggcgccgttcgtcccggcacgcaacggccgtcggcgatcgcggcgaggagggccggctcaagctcggccactgtgttgatgatgatgccgtcggcgtccatgaagcggcggccgtggtagaggaaccacttgaagttcgggctctccttgcgtcccatgaacgcgggaagggaaccagcgggcaccggcggcaacccggggacgtcgaccgtgccgtcgaactcctcgaagtcgacggggacctcctcctccagcgccggcagccgcagcatcagcgcgagcaacgcggcggtggacgtgaagtacacgtacgtcgggacgccggcctcgcgggccgcgtcgagcacgccggtggcgaagaagtcgacgacgagcgccgcggcgcccagctccgccgccgcagccctcacgtggggcgcctgcagctgcatgtaccgcgacttgaactcctgcacgttgccggcggcgcagcccatcggcggcggctcgacggcggggaggcggtggaaccggacgccgagcccggatgcctcgacgcgcccgacgtgcgcgtcgacctcggcggccgactcggacgtcgccgggcggacgaccagcacggtgacggtcaccgcggggccctcgccgtcgccccggccgccgtgagcgagcagccgcttgccggcctcgatcagcgacatgaggtggccggagccggcctcggggaggaggaggacgttcgcgctcgccat

SEQ ID NO: 67003 - DNA, 591 bp, Oryza sativa
  Clone ID: PAT_MRT4530_67902C.1
ctatccctcgccgagcaccgccttcacgtcgccttgaagtcttgtgctacgccacctggtccgcctccacctcttcttgtcgacgttgaaacggtgccgggccttctccacaatctccttggagaggtcactgggcaacacctccacaagccatctaggaggcggcaacactctctctcctcccggcgacgtcggaggaggcagcggcaaggtgagacggcggcgaggcgagatggcggcggaggcagcgagtgtggggaggcgagcacggcgacgaggcgagcggcagggcagggcagtggaggaggcgagcggtggtgggagctcacgctgctcgaggtgaggcgaggcagcggcggcggaggaggcgagcagcggcggggtgcgccggaggaggcaagcgtggtggcagaggaggcgagcgcggaggcggaagaggcgacacggcgtggggtgacggcgcgccgacggggctcgaggcgacgacagcgacgggcgacagacgacggcgcgcggcactggcggggctcgaggggagatggcaacggcgcgcagcgcgtgcgacgatgacaggcgacggcgcgcgcgcat

SEQ ID NO: 67004 - DNA, 576 bp, Oryza sativa
  Clone ID: PAT_MRT4530_67903C.1
aaccgttcaagaaagcctgtggaagcgcagctcgtcgccccccactcgcagccccccgccacggcgccggccgccgccgtcacctccaccgccttccagaaccactcgctgtacccggcgattgctaatggcggcggcgccaacggaggcggtggtggtggtggcggtggcggcagcgcgcctggctcgttcgccttggggtctaatactcagctgcacatggacaatgctgcgtcttactcgactgttgctgctggtgccggaaacaaagatttcaggtacagggtgcaattaaaatttctgcaaactttctttactgtttattgttgtctactgcatgatggatgtcagatggatggatgcagcagagctggatgcctcctaatagtgtttgaagttttctcattattgtgcttgattgcatctgcagacactagtggtaaatctgaatactactagtgcagcatcactactagcacttcaagtgctcgtatgaaaatgtgcatggggcgctgtttacttcaaatgtttggcgtcagctctggcacaagaactgctgttaactgtgtttaggct

SEQ ID NO: 67005 - DNA, 222 bp, Oryza sativa
  Clone ID: PAT_MRT4530_67904C.1
ctaggcttgatgggccaagatagcttcttcggccctcccggggccgaaactgctacggcgaagtcgtccccctttggcatatgctcttcgccttgcgcccttcgcccaggaggcctctagcttggctgcgaatccctgcctctcgccgtccttgctccatagtcttcgccatggggagggttcgccttgactaaccctgacgtcttgggcttgaatcctcat

SEQ ID NO: 67006 - DNA, 372 bp, Oryza sativa
  Clone ID: PAT_MRT4530_67905C.1
atgcccctacccccaaacaactacccccgctaccaaatcgtggccccgaatctgccaagggtggatccaagaatggaccgaaacgacagtccgatccagacagccggcggctacgactcccgcggatctgggaaggtggaggaggaggagggcggcgcgcatacctgcagcgccggcgaggccacggcgggagacgaggcgggcgagcggggaagacgaggaggacgccgccgccgccgcaacgagacgagatgccatcgcttcttcttggattggttcttccttccaggcaggcagactcggcccctcccccgtcttgcgggtccggtgcgctttaggtccctcgacggttttgagggtggttttggctaa

SEQ ID NO: 67007 - DNA, 623 bp, Oryza sativa
  Clone ID: PAT_MRT4530_67906C.1
aagaacttttcttgagctcaatcagcatcaacatctatctccttcgtgcttagttaagaccttcgccctcccaagaagaacaagatggcttgctgtggcggaaactgctgttgcggctgcggctgccagtgcggcggcgggtgcggcggacgcaagatgctccctgatgtggaggccacagccaccaccaagaccttgggcctccctgctccatccaacacggcgagctctggaggaacggagatggcggcggagagcgcaaagatcggcggctgcggatgcaacacctgcgagtggggcaccagctgaagggtgtgctgctgctgctcctgcaagcgaatctatagttgtcgacgcccggttgcctgaagattcatcgcatggacgctgctactgccgatcagagctccgatcgaagccttagttagctagccttcggacccagctgatatggaggcagaccttgacctctgctctgacgcctaagtaaaacacgactgctgagttggcatacacagcgtgtgtcaatcaccggctgacggatccacctgtagcttgtatggatgatctgtcatcgagaggagctcatgatgactctgctgctgcatgctcctatgcgtgcc

SEQ ID NO: 67008 - DNA, 986 bp, Oryza sativa
  Clone ID: PAT_MRT4530_67907C.1
gctggcaccaacaatcacatgcacctcaaaataataaaaataaaaaaggggaaaattactcttgctgaactcgtgtgagcttaagaaattactgctccgatatagagggggggggggggtaaaaaatgtactcttcttaattcacacttgctacctaatggtagatctttgcaacacaaacatctcaaaataattttcgatcgatctctaggagaaagaaaatccaaccggccggacaatgctagagaaatcaagaacaaatgaacttacaaattacaaaccgagcaagaaaggaggcgagcagaggtagatcagatcagatcagaatcagagcatcctgaggaagatgatggcgacggcgaggagggcggcgtaggaggggttggcgagagaggaggcggcggcggaagacttggacttggaagaggcggtgtcggacttggaggaggaggaggagtcgccggagccagaggaggaagaagatgcggagcccttcttggcggtgacggcgagcttcatgcctttgtagcagtagccatagctgcagatgaagtagtagtccttggcctccttgagctggaacgcgtagctgtgccccttgctgtagctgctaatggcgttcgccttgtcgcagttgtcgtacccgacctcgtccacctgcaccacgtccgacctcccgttctggtactcgaacaggagccagtcgcccttgtagaaggggcggtgcttcttgacccaggcggtgtagtccacgtcggggttccaccccttctcgtcgcccaccgtgtagttggtcgccaccgccgccgccggcagcagcgccaccgccaccaccagcaacggcagcatccggtggcacaccatctccagtggcagatcgatcgatctgagctctgagctgagcttgccttgaagacgaaggggaccttgcctcacctcactctgctctgtcactctggttgtctctgctcttgcttcccggccgg

SEQ ID NO: 67009 - DNA, 360 bp, Oryza sativa
  unsure (1)..(360): unsure at all n locations
  Clone ID: PAT_MRT4530_67908C.1
tatttttcctagcacgcatcttcctcctnaatccttaagaccaccgtcgtttgtttgtttttttggcgaatgcatgccatctcaagctcttgaattgatttatgatttaccaagctgacagtctcagattccgcttccgggggcggatgtcacatttatcacgtacccaggaggggtgtcaggtggataaagcattgcagtaggacgagtgaggacaaagcttcatgtatccacttgacgcataataagtgtagagcaatcaagtgttgtgagtctggaggatctcaggcagatggacgttcgagagcatggtatggagtgtgatctcacgctgcttcttcttacgcttagccttgggct

SEQ ID NO: 67010 - DNA, 227 bp, Oryza sativa
  Clone ID: PAT_MRT4530_67909C.1
cggacgcgtgggcttactcttttttctttgaaactaaaaaatatattatatacatacaatctcaggaggaactggttcttaaactatatcatcacatagacatactgatcatattttaaggcatatactaactcagaataaattacttaagaaatttgacacgttcatgtatcatagactcctgcaccaataatcacaatcacatatactagatctacgacaactac

SEQ ID NO: 67011 - DNA, 210 bp, Oryza sativa
  Clone ID: PAT_MRT4530_6790C.1
agtgcagatagagttccccaagatcgaagtgaggtacgaggatctgacagtggacgcatacgtgcatgtcgggagcagggcgctgccaaccatcccaaacttcatttgcaacatgacagaggcatttctgaggcatttgaggatctatcgagggggaagagtgaagttgccgatattggataatgttagtgggatcattcgtccatcaag

SEQ ID NO: 67012 - DNA, 285 bp, Oryza sativa
  unsure (1)..(285): unsure at all n locations
  Clone ID: PAT_MRT4530_67910C.1
gggtgttctccaccgtacgccttaccgggtntgcaagctcccgtatcccgtagcccacggtagtatcaggtaggctcaacncatagggatcaagttcatggggttctcaagaacacccgctcaagtggtgcctgctgcacacctgcacacacatagctgtgggggataggtggaattgccaataggtggtatgctatgccccactggggcaattgtggtttgcaataccagcggggtgtctgctatggatgatgccaatgactgggctgggtgatggggaaaggc

SEQ ID NO: 67013 - DNA, 275 bp, Oryza sativa
  Clone ID: PAT_MRT4530_67911C.1
atggcaccaacttctaaccctaaaactataaaacctaggtcctctgctggagttttatcgtccgaggtcacctccaccgctgtcaggggaaactcgtcgccaccgtggtgggtgagttacccactccttctcacccgagctctaggacgactccgtgacaatccaagagccatggagcatccgccaccgccctaccgcgccgctgcccgcctcgccggctggccagagggcgtcaacggcgccggcgaggcccctcggccagcctcctccccctc

SEQ ID NO: 67014 - DNA, 771 bp, Oryza sativa
  Clone ID: PAT_MRT4530_67912C.1
atggcgcaatccccgcatcgtcgcaataactgccaaggcaagtatatcatcccctcagcccctcatgccctcgcccttcccccgccgttgtcgccttccaccacccgtatcccgcagcggcgtccgtcgccagctccccttccctgcacgcaggcgctgttggatttggatcgagagccgtcgtccttggatcaaagtcttcgcctcactgccgtcgtcgggcagtggagaagaggagatccagtgtatatgcactgctacagctgtcccaccgcctacggggaattgagtggtttgcagtgtgatactgggttcaaccttcctaagaaggagaacggcagctgcggcggccagtataacttggcctcgaaaaaaggtgatttgccaactccaactattcaggtggtactgcccttctctgcagtgacggaggatgaatttcagaagcagttgactcaggacagtggaaacctctccttccccaaggagaagcagatggaggctctggtggcacgtctgaaggggcaatagatgtagcgcgcgggcgtcgcccgcgtctgcttccggcaagcccagcaagcccgttaggctttttgggtccctaggtgcggtccttgtctgcctaaattagcataataattggttcaagctgggtgccaacaacaatgctcagaaatatacaggtacaaggaagagaagttttttttatgctatacacatctattgatcacttatgtgtaaagttgctctaatgggctcctatgtggatgt

SEQ ID NO: 67015 - DNA, 1317 bp, Oryza sativa
  Clone ID: PAT_MRT4530_67913C.1
atggcgcctctcgcccgcgccagccgcgccgtcgcacgccacgccgcccgcgccgcgctgcagcacgccaccaccgcgctcgccgccgccgcacgcccgcaccgcgccgccgcacgccaccaccgtgctcgccacacggcatcctcgcctgctcgccgcccggaacccctatccggcgtcattgtctctgatccgaaggcaaaggcaaagccaagtgcttctccggctaacgttgttggtgcagctgcaggagaccgcaacattctactttcttttggatttaaaaagatgtccgtagctagtgggagtggaagctatcaacgtcaatctccattatctcaagcatcacaaccaaaatcagagtctcttccactctccacatctccacaacctgaatctatcaatgactcagaacctattgaagttgatggtgacgaagatgaggccgaagaagaaagaattcaagagagtgaaatatgtgtgcaaaagaagatcaagctgaagggaaagactttgacacaatctgctctaaggttttcctcagcagattctaaaaatattacagtggagaactatacatttgatcaagatgtagctagaagagaattgtgtgatatgatagtgctgcatgagtaccccttaagtatggttgatcatgttggctttaggagatttgtagctgcatttcagccactattcaaatttgggactaggaacacaataagagcagaaattatggaccaatatgagtttgagaggaagaaagccattcaatacatggctggaattcaatctagggtggctatcactactgacttgtggacttcgagcaatcagaagagaggttatatggctatcacagcccactttgttgatgaatcttggaaacttagaagtattattatgaggttcatctatgttcctgcgctagaccgctatatgaccaatatgagtttgagaggaagaaggccagtagggactgagctagaccactatttggatgatgatttggttgacatccacacaaaaagttttgatgttttagattggtggaaggtggctggaattcggttccctgttttgaggaggatagcacgagatatatatgcaattcctgttagcacagttgcttcagaatcagcttttagcactagtgggagagtccttagtgagcatcgcagtcgactcacttcgaagttgttggaagctctaatctgctcacaggattggcttcgaaacaaatacaaagttgatgacaagaacaaagaacaaccttccttttggtcttgtcttcaagacattcaagagggtcttcag

SEQ ID NO: 67016 - DNA, 1611 bp, Oryza sativa
  Clone ID: PAT_MRT4530_67914C.1
gcggccgccatatgtttaacccggggccgctcggggggaaaggggcccccccgcaagcccccaaccggaaaaaaacttggggggcgcggcgccaggcccccacccggtgtcgaagcagcaaccccgacgccctcctcctgccgcctcccgggcctttccgaccccgaggcgcggcgacgccctcccttctccccggccgccatcgccgccgccgcgcccgccgcccgcagtggctttccggccaccggccgcctctctaccacgcccgtacccccgccacgtccatcgccggccaccaactcgccgccaccggtgccgccctcccctcctgccgcgtcgccgccgacgcccctcccctccgccggaattgggaggggaggggccgcacgcgctgcctccttcgctgccgacgtcaccaccgtgtccgccaaacccaatatcttcatctacttgtttcccttttccaataacatcatcagcgcctttgcctccgctgccaatcccttcatttgtgtcatctcctttgcatccagtaacatcatcaacgtctttgcctccgctgccaatcccttcatttgtatcatctcctttgcaaccaccaatctctccacctccccggcacaaaaaacgcacggaaaaacagccccatcactccacctcttcggctcaaaaaaaccgcaacgaaaccgccgcatcacgccgcaacttaccaaaaaaaatggccgccggatttggaggagagaaaaccacctccgccgcagcctacgcttcccaccgcaactgccggcgcgatgaggggaaaccgtcggctccgcgcctccgccgtcggctccgccgactccgccgacgccagcgcgacgggaggaaacatcagcaactcccccatccccccttcgccatggatttcgccggagattcacgccgcctccaccacggatttcgctggagattcatgccgcctccgcctctctctcactctccgcctccgccgccgccactgccctccctccggccaaatctgggagggagggaaccgccgctaccgccaccgccctcccccgtcctccctccggtcggatctggaagggagggaaccgccagtgccgccaccgccctcccccggcctccctccggccagatctggaagggagggaaccgatgccgccgccactgccctcccccgccctccctccggccagatctgggagggagggaacagccaccgccgccattgccctccctccggccggatctaggagggaaggaaccgccgccgccgccacctctcctcccccttcccccattcggccggatctgggagggagggtgtgcgccgccgctgggggtgggggcgcgccgtgtgtgcggggatgggggccgccgacgacgaccccgcgcctcaccgaccccgccgccgccgaccccacgccatcaccggttcccgctgcccacgccgccgggccctgccccccccgggagggacccccggtttcctttttttttctttccgatgacctgggccatttgggcgatttgtataatgccggggatttcatattttttcctctgacccccgcgtctggtttttttctcgggtttcgggcgcgctct

SEQ ID NO: 67017 - DNA, 357 bp, Oryza sativa
  Clone ID: PAT_MRT4530_67915C.1
atgcgtggcctaagcccgctgcgcaagagcacacagtcgccgccgctctaccaaatcgccgccaccatcacctccctcctcacgctggagaaatcgggggaaagggtagaaatggcttatgtagtcgcctaccgccctctgggagggcgatttttaaaaatcgccatcccagagggcggcgaaaatgacgtggcagacggccgttcgctctcgggcgacggccgtcaacgaaatttgcaggcggcccccttgccgccctccgctaggacgattttgtactgtgcggggggtcgcctgcaaatgggcggccagggggcatggaaatttgcaggcggcccccttgccgccctccaatag

SEQ ID NO: 67018 - DNA, 438 bp, Oryza sativa
  Clone ID: PAT_MRT4530_67916C.1
atgaggagcggcgagttggtggccggcgatggacgtggcgggggtacgggcgtggtagagaggcggccggtggccggaaagccactgcgggcggcgggcgctgtcgccctcgcgcaccgccgggagcagcagcacggtcgtcaccagggcggcgttagcggcgtcatcgtcgtccacctccttgcacctccacctccatggcggctagcgggtggggaagaggtcgctggggcgaggcgagagacggcgaccaccggcggcggcgatggcggccggggagaagggagggcgtcgccgcgcctcggggtcggaaaggcccgggaggcggcaggaggagggcgtcggggttgctgcttcgacaccgggtggctcctcccccggcatcaactggttgcgtccttcgcccgcgacgaagtggcccggggcgcggcggcggcc

SEQ ID NO: 67019 - DNA, 139 bp, Oryza sativa
  Clone ID: PAT_MRT4530_67917C.1
tcctgctgcagccgccgcggcgttattgcctggaccaaccacgccgatacacacctctgttcttctttcattgcttggggggcttactaattaatcaaccactttcacctctacatggcctatgaagccatcatcttct

SEQ ID NO: 67020 - DNA, 282 bp, Oryza sativa
  Clone ID: PAT_MRT4530_67918C.1
atgtgtggcccatatgagctgtgggcgcatgtttattacgaccttgttagtttagcaaaagtggagctaatttataaggcctcttccctccaaccataccactcccgggttaacccttttacacgaagtgaggacgaaagtcatgctccactcaacaccatcctacgccggagtcctcaacctcacccccgatctcggtcaccagcgctcgctcccccctcctcaaagcatgctccactcaaggccgccaccttcctacccttagcatatcggcctcacccc

SEQ ID NO: 67021 - DNA, 345 bp, Oryza sativa
  Clone ID: PAT_MRT4530_67919C.1
atgtggcttacgttcgttcagaccattcggaaggcatatcactgtatcatccgtatcgggaagaatccactgccgccgccgcctcctcctcctccgctgccgccgctgacgccgcctcctcctcctccaagccgtcgcctcccgaccactgccgcctccctccacgccccccggttcaagatcccccgccgcctccctccacgcccctggttcaagatccaacgccaccgcctccctccacgcctcccggttcaagatccaccgccgcctcctgctctgagcgccgccaccgcctcccggttcaagatccaccgctgcctcctccctcatcgtccacgagccctc

SEQ ID NO: 67022 - DNA, 1944 bp, Oryza sativa
  Clone ID: PAT_MRT4530_6791C.1
atggccgagaagccgccaccatcgccgtcttcggctagcccaggttctgttaaagagaagatccagcaattagacctatctgaggttaatgagggcaacgtcatgaccatcactctggacaaattgacacctgatcagaaggagtttgaagcaatgatgcagcaagcacggaaccagttcttgaactcattcatgcagacccgcaagggaacagtggtgcaaaagtatcaggtgcgagtagtggctgatgtccccgggaccggttcttccaaggatggggagatgaaacaagccttaggtggctcggctcaaccgagcaacaaaggtgctacaaatggatcggctcaggagaatcagggtgaccactctcaaggagtacatggagttcaaggctgcaggcccagtttatttgccaggaggtacctttccgaattatcggcctttggtcaccgatattcatccacctattcaagcggttcctcccattgcatcatcagcctagccgacggcgccggtatcgatttccccatctactccgtcaatgtcggcaccaggtcagctgacgccatcaagacagcagactatccaaccgattcaccagcaaggcttgatgaatccatcggctgggcaacatactctgaatcaggttgttccagagcatttggtccatcacgtgcagctggatcatacgtcaattcgagcccatgcagcaacaatcgcaaggagcagctcaacaacgaccgtgggccgatggagaaattctcgtctgaagactttgaaagcttaccgcatcttacacaaaaggtaactttgcacgagcagaggtttgctgaagctaggaggaattctaggaaggttaatcatgtctgttcttatatgtgtggatcggacgatgaggatgatgattctgagatagctgcagccgagtgggtaaggagcaaaaaggttatgccatgccaatgggtgaagaattctggaaaagaagagaggtatgattttgatattaccaaggctgacaagatttttgatctattactctgggaaatgcaaattcagctccctgctggtcatactattccatcggctgaggaattaggcaagaaaaggaagttgggtagaaacgccgaagatctcatcaaaacaaacatggtactcaaagactttggtggcaatccatcagaaaccaagggtgttctaaatgtggagctgacagtcggcggcgacaagatagaaatcgtgccagccgacagccaattgaagatggagaacccaagctattactttgagggcatcgtggagggttcaaacgtctacaccaaggacacagtagatgatctcgatgacaagcaagttcctgttatcaagaagaacggcaaggagagggtgtgcattgattttagagatttgaataaagctactccaaaggacgaatatccaatgccagtggccgatcagttggttgatgctgcttcaggatataagatattaagttttatggatggaaatgtgggatataatcaaatctttatggctgaagaagatatccataagacggctttcagctggttggttgaagtctacattgatgatgtggttgttaagtctaaagaaatagaagaccacattgccgatttaagaaaggttttcgagaggaccaggaaatatggcttgaagatgaatccgacaaagtgtgcttttggcgtatcggctggccagttcttgggatttcttgttcatgagagggggattgaaataactcagagaagtatcaatgtgatcaagatgattaaacctccggaggacaagacagaattgcaggagatgatcggcaaaattaattttgttcgaagacggctgatcaagcttggacttctcttcgtgcataagctgccgattgtgctggattgtagcttcgatgtttttgcgttcccggcgatcggctaa

SEQ ID NO: 67023 - DNA, 609 bp, Oryza sativa
  Clone ID: PAT_MRT4530_67920C.1
ctgtgttttgggttttttttttttttttttttttttgtgtttttttttttttttaaacgaatttaaaccttgaggccatagaaaacgagctaaagggagaacaaatggaagaagctacggagaaaatcggagacaaacggcagaagtcaagaacaagggaatgaaggggactatttttttttttccccaaagaaatacacggggaaagttggatctatccttttttcccctatgactcctttttacactaaaggaggccttattaatgggttgggagggccaggccctgtttccccaaattttgatataacccatgcacatagtcgagcacggacgggaaatcaccaccttttttaaccgggagggggaaagatccaacagggggaccaggaacaagctccaaaaatcgaccttgacatacttaaaaaacatcctcccacccagttttttgtctaaaccacttggaaaaagctgaagggggcacattgccgggggcatttggcaaaaggattttaccagtgcccttaaagaggggaaaaacaagcatgaccacggccactgaaaaaattccaaggcacaacatttccgctttttaaacccccattgaaa

SEQ ID NO: 67024 - DNA, 250 bp, Oryza sativa
  Clone ID: PAT_MRT4530_67921C.1
cccacgcgtccgagcatctagctagggagagaaaggaagagacgagaggagagagatggccactgcttatgctcccatggcgagccagctgatgaagagctgcttggtgtgctccaagccgagggggctagctgttgcttttatgacacggaggccctgtttgacagttaaggccattcagtctgagaagtcaacgtaccatgtggtgaatcctatcttttggtgaccctttcatctttatttttgtata

SEQ ID NO: 67025 - DNA, 220 bp, Oryza sativa
  Clone ID: PAT_MRT4530_67922C.1
atcaaacccaagcccgcatctcatcaaccttaagacctacatcggagctaataaaatcgcccaggacgtcgagttcgtcgacttagttcgcgccaccacagttcctggacctgcatgtgctgactactacagaactgtcatgacaagggtgagcctagtaaacatggttgcggagatcatggggccacctattgctatcaccaccatcgcctgtagaacg

SEQ ID NO: 67026 - DNA, 470 bp, Oryza sativa
  Clone ID: PAT_MRT4530_67923C.1
aaaacagttcacacaaactttactgaaatttccatatataactacaaagaactagaaagaacaactgacaccaggaagaatgcagaaaagtctacaatattatcaagaaaagaacatatttgccttggaccacataggacagtcaccttcctgccatgccaattttaggatcacatgctctaattgccaaagtgaaattgaagtactaaacataaaatgaaaacaacgtgatagataacagtttggcaaatgggtacttcagttgtcctatttagtcattcaaccacgaaattcatacctcgggacttcgaacgcggtctgttcaaacatgcagggttcgaaacatgcattcagttgtgtatatatatcctcaccgaacagtgtaacttttcgcgaacaaatattagttgccaaattctaagtccaaacactgctgtgatgggagagatcatgaaggaggcaccacattc

SEQ ID NO: 67027 - DNA, 573 bp, Oryza sativa
  Clone ID: PAT_MRT4530_67924C.1
cccgggctgcaggaattcggcacgaggagttgctatgtttcctcattttacattcaaaattggatattctcttgtatatgccatctgaaaatgatttgcatcccttggatgctctagctgcgagaacactgctacaatgctgctgttaaagattttaagctaaccagatattttgtgcaaatgagaaaactgcccaacacaacttggcaaggcatttcaagttcagttactcttatatctagtttttatgccactttgccagtttattactactattatatttttaggaaaagtagggggattgcgctggttccacagcataattggaccacaaggttttgcagtaaaaaatgtggccacgctagacccgaaaatctcactcatatgaggccaaacacacaccagagattttcctactcctgcatacgacgcaaagttcaatttcagatattcattccgtggtggcatgtagtagcatgtcctactgctgcaaaggtcattcggtggtggcatgtttactgggatccctggcacttcttacctgaaactgttcaattttgcaggcccgaaggt

SEQ ID NO: 67028 - DNA, 394 bp, Oryza sativa
  Clone ID: PAT_MRT4530_67925C.1
atcgaagtctggaacgcagttcagaatttgcgcctgattgagcatgaagaggacaaaatatcttgaaaacttaccagccatggtgaatatacggcgacatcggcttataaagcacaatttctaatcaccatagctacaaacttcaaacaacctattctggaagccgtgtgcgccgtgtaaatgcaaaaccttagcctggttgatcatccaaaacagagtctgaacatccgacagactagccaccagggattggccgaatggatccatttgccccttatgtcaccatagccaggagacagccatccacctcctcgcggagtgtagctacacccggagaatctagggggcgatagcagagttgtcacgtcccgaactagtaccgaccggaactagc

SEQ ID NO: 67029 - DNA, 2316 bp, Oryza sativa
  Clone ID: PAT_MRT4530_67926C.1
ttccagaaacaaaaaaaatacggttcgttgtttacctctttataattcttccttccagcagtacccatcacctccttttggtttttcaccgccagaaaaagaattacatgatttaaataaggcgattgttacaacttacaaagtcacaagacaacaaacattggaacgaattacaatacgcgcgtgctacagattaaccttaaaagcaggctcactactcactaggcactaacttcacttgagataaaactgaaagaatgtttggtagttgtattctacagaacatacagaagcttaggagccaagtgagagagcaccagccgcaaataaaagatttcgccgagaaaaccgcagagtataaacaggagttgattttgtacggagagttttgagcatcctcagccggttagttgaggtatcatctgtcttaaggaccttcgtgctggaggcaacatcccagagtttcacagtgcagtcggctgatccagatgcaagcaatgccccttcacaactgtaagcaatgaacactgaccagaagagagatcccacatcatgatggttccatcttcatctccggaggccatgtatcgcccatcaggagacatagccaatgataaaaccatactcctatggccaatgaacatccgtatacattcaccagtttgaacatcccataatcttacagttttgtcactagagccggtggcaatgtagttacagttaacatgccactgcacacaatcaacatcagagagatgtccagccattatccgcaaaggctggattttatccattgaccaaattctagcagtcctgtcatgagaagcgctagcaaaataatgaccaactgggctaaactcatgcaccaaaataagcactgatgcaatagcaggcaatgcatattgattgaacaatataatttgtacatcccaaacagggtagttgtgtcctttgtagcaaacaagattagcattcaacttggtactccatagtcgaacttggaataatgtataaggtctttttccataatctgatgctgatgtgcgctcaccctgggaaagtccattctctccttgtggactagatgttttcggcggttggccaatctttgacatatcccaaacctttttaacagaacctccctgctttccaccttccgaagattttctcttattgttatcttcggcatctgcatccttgctttctgcttcagttttatctgattctaaaagtgttttctccatgcgctcttcaactgaatcttcaagcaactccttcagatttatttgttttgccaaatccttctttgttccaactagagcaacaacatccgtgtcatcagagattaaagatggctgaccaggggatacgtcaaaagttgtgcgttcatttattattccaagaaccacaagagcttgtgttttctggagatactggaggagtaactcatatgaatactccaaatgtgaaggagaaagaatgccttccagtttctggagatccctagaatgcatcagttcatggtcttcatggaacgtgtggaaaaaggaccgagcttcctgtgtatgtccctctgccactagatccatgaaggaatggataaacactgggtaaaggacacggagtaattcatgcttgtactgatcgagagaactgtatgcccatgttcttagtttactataaccatcatagtatcttgccggatcattttccgacctggcgagcgcgacgtcggagacggaggaggtggagatgcggttgcgctcctcctgcaacgcgagctcggtgaggcggaaccccttccgctgcaggtactgctgcaccttcttctcaatctcctcgtcctccatctggagatccctagaatgcatcagttcatggtcttcatggaacgtgtggaaaaaggaccgagcttcctgtgtatgtccctctgccactagatccatgaaggaatggataaacactgggtaaaggacacggagtaattcatgcttgtactgatcgagagaactgtatgcccatgttcttagtttactataaccatcatagtatcttgccggatcattttccgacctggcgagcgcgacgtcggagacggaggaggtggagatgcggttgcgctcctcctgcaacgcgagctcggtgaggcggaaccccttccgctgcaggtactgctgcaccttcttctccatctcctcgtcctccatggcgccgacgcgagggcgagggagttctagggtttagggctctcggatccgtcgcgcgggagggagacgcgacgcgactcagagcctcccgccgaattcctgcagcccg

SEQ ID NO: 67030 - DNA, 2327 bp, Oryza sativa
  unsure (1)..(2327): unsure at all n locations
  Clone ID: PAT_MRT4530_67927C.1
ttaggagccaagtgagggagcaccagccgcaaataaaagattcctccgagaaaactgcagagtgtaaacaggggttgattttgtagggagggctttcagcatcctcagtcggttagctgaaccacctttggtatcatccatcttaagagtcttagtgctggaggcgacatcccatagttttacagtgcagtcggctgatccagatgcaagtaatgccccttcacagctgtaagcaagcgaccacacacaagagttatgtcccactagcggtgaaacacaacgaccagaagatatatcccacatcatgattgttccatcttcatctccagaggccatgtatcgcccatcaggagacattgccaatgataaaaccatactcctatggccaataaacatccttatacattcacctgtttgaacatcccatagtcttactgttttgtcactagagccagtggcaatgtagttgcagttgacatgccattgcacacaatcaacatcagataaatgcccagccattattctcaaaggctggattttatccatggaccagattctagcagtcctgtcatgcgaagcactagcaaagtaatgtccaactggactaaattggacatcccaaacagggtagttgtgtcctttgtagcaaacaagattagcattcaacttggtgttccataagcgaaatgctttggaaggctggccaatctttgacatatcccaaacagatggcaatgacaagctattcaattgtgcacggtttcgcaagtcctcaagaattgactgctcaacttcaacagacgtcattggaagcgttagctctggtttaactcgtggtgctatagaaaccatgctagtttcagatttcatgtttttccctgtggttcctacaaacttgtcctttttgatctttttatgtgagccaccctgctttccaccttctgaggatctttttacaaaacagtttcttgccttgttgtcttctgtgtctgcatccttgctttctatttcagttttatcagaatctgaaattgccttctccatacgttcttcaagtgaatcttcaagtatcccccaatgcacctccttctgatttatctgttttgtcaagtccttgctagttccaatcagaacaacagcatccgagtcatcaatgattaatggagactgcccaggggatacttgaaaatctatgcgttcattgattattccaagcaccacaagagcttgtgttttgtggagatactggagaagcaattcatatgaatattccaaatgtaaaggagaaaggatgctttccagcttcttgagatccctcgagtgttcatggtcttcacgaaatgtgtggaaaaatgagcaagcttcctgtgtatgtccctctgccactaaatccatgaagcagtggaaaaatagtggataaagaatgcggagtaattcatgcttgtagtgatcaagataactgtatgcccatgttcttagtttactatagccatcatagtacctcgctggatcgttttctgacctggagagcgcggcgtcggagagggagtgggaggaggaggaggcggtggtggtggtggtggtggtggcggagaggcgggtgcggtcctcgagcagcgcgagccccgccacgcggaagcccttccgctgcaggtactggtgcaccttcttctccatctcctcgtcctccatcatcncgtgtcatcagagattaaagatggctgaccaggggatacgtcaaaagnttgtgcgttcatttattattccaagaaccacaagagcttgtgttttctggagatactggaggagtaactcatatgaatactcacataacttaattctgaattgatttttccttaaagatctggccagttccatttcctccaaatgtgaaggagaaagaatgccttccagtttctggagatccctagaatgcatcagttcatggtcttcatggaacgtgtggaaaaaggaccgagcttcctgtgtatgtccctctgccactagatccatgaaggaatggataaacactgggtaaaggacacggagtaattcatgcttgtactgatcgagagaactgtatgcccatgttcttagtttactataaccatcatagtatcttgccggatcattttccgacctggcgagcgcgacgtcggagacggaggaggtggagatgcggttgcgctcctcctgcaacgcgagctcggtgaggcggaaccccttccgctgcaggtactgctgcaccttcttctccatctcctcgtcctccatggcgccgacgcgagggcgagggagttctagggtttagggctccggacgcgtgg

SEQ ID NO: 67031 - DNA, 825 bp, Oryza sativa
  Clone ID: PAT_MRT4530_67928C.1
cgtcatgtgaaattgatgagcaatttagcccattatgagtattaaggaatgtgtagaagctaacagatggcaatgccaggctattcaactgtgcacggtttcgcaaatcctcaagaattgactgctcgacttcaacaggaatcactggaagtgtaagctctggtttcacacgaggtgccaccgaaactatgcttgtttcagatttattggttttccctgtggctcctgcaatcttatcttttttgacctttttaacagaacctccctgctttccaccttccgaagattttctcttattgttatcttcggcatctgcatccttgctttctgcttcagttttatctgattctaaaagtgttttctccatgcgctcttcaactgaatcttcaagcaacccccaatgcacctccttcagatttatttgttttgccaaatccttctttgttccaactagagcaacaacatccgtgtcatcagagattaaagatggctgaccaggggatacgtcaaaagttgtgcgttcatttattattccaagaaccacaagagcttgtgttttctggagatactggaggagtaactcatatgaatactcacataacttaattctgaattgatttttccttaaagatctggccagttccatttcctccaaatgtgaaggagaaagaatgccttccagtttctggagatccctagaatgcatcagttcatggtcttcatggaacgtgtggaaaaaggaccgagcttcctgtgtatgtccctctgccactagatccatgaaggaatggataaacactgggtaaaggacacggagtaattcat

SEQ ID NO: 67032 - DNA, 646 bp, Oryza sativa
  Clone ID: PAT_MRT4530_67929C.1
caccgccagaaaaagaattacatgatttaaataaggcgattgttacaacttacaaagtcacaagacaacaaacattggaacgaattacaatacgcgcgtgctacagattaaccttaaaagcaggctcactactcactaggcactaacttcacttgagataaaactgaaagaatgtttggtagttgtattctacagaacatacagaagcttaggagccaagtgagagagcaccagccgcaaataaaagatttcgccgagaaaaccgcagagtataaacaggagttgattttgtacggagagttttgagcatcctcagccggttagttgaggtatcatctgtcttaaggaccttcgtgctggaggcaacatcccagagtttcacagtgcagtcggctgatccagatgcaagcaatgccccttcacaactgtaagcaagtgaccacacacaagagctgtgtcccccaagtggtgaaacgcaccgaccagaagagagatcccacatcatgatggttccatcttcatctccggaggccatgtatcgcccatcaggagacatagccaatgataaaaccatactcctatggccaatgaacatccgtatacattcaccagtttgaacatcccataatcttacagttttgtcact

SEQ ID NO: 67033 - DNA, 690 bp, Oryza sativa
  unsure (1)..(690): unsure at all n locations
  Clone ID: PAT_MRT4530_6792C.1
ccggccgggtccctctccctctccgccgcacttgctcacccctcccaatggcgacgccgcaagcgcgcgcgccgccgttgctacgggctccgccccgggcgttccccgcctcccagctcgccacgcgccatcggcttgtccggctacccgtggccgcgtcggccagagtcggcggcggaggagggcccgagctccgcacgtgcaagaactgcaagaagcagtacgacccggcggcgaaccacccctcggcgtgccgccaccacaccgcccacttcggaggagaaacgaagagaaaatttgaaagtgtctatgcgggtgggactctggatactccagattcaggcaaagtgttccagtattggcattgttgtggatcggaagatccttttgatgttggctgtactgcttctcctcactgttcatatgatgactgaataccttctcatgtctgcattgtgatcctactattctttcatatgaatacttttgcctatattgttcatatatgtgaaactgaaaacagtgcatttttgctgtcaaatgtagtttgctatactcatttttaatttgaacattcaatacggttacgtatgaacccanttatttgttgtttaacactagattatatgatacatgcagtcaacaagtgccactcccagtagcaaaaaaaaaaaaaaaaaatttgcggcc

SEQ ID NO: 67034 - DNA, 407 bp, Oryza sativa
  Clone ID: PAT_MRT4530_67930C.1
caggttgttgctgattgcatggaaaagaacaggaagttcaccgagaccgatgagcttcataatggtctcatgatctatgagccattaaggtcatgcgtgtaatagttctgcttttttttcttattcgtgtctattaattattttttgctttatttccttcttttttgttattttagttatttatttctatttttaatttttttctttttttactttttttatttatgtatttatgtttttctttttttttttctatcgttattcttttttttttttttttatctgttttttatttttttttttttattttttttatttgtaatttgtttttatttaatcttttttttttttttattatctttttttgtctttttttttcttttattatttattttagtcttattttt

SEQ ID NO: 67035 - DNA, 790 bp, Oryza sativa
  Clone ID: PAT_MRT4530_67931C.1
atagctagtatatatctgacaaattcagagaaattcagagagtcaccgcgagagcttaagctagctagctagccggccatggcatcgcatgtggacccgctggtggtggggagggtgatcggcgacgtggtggacctgttcgtgccgacgacggccatgtcggtgcggttcgggaccaaggacctcaccaacggctgcgagatcaagccgtccgtcgccgccgcgccgcccgccgtgcagatcgccggcagggtcaacgagctcttcgctctggtcatgactgatccagatgctcctagccccagcgagccgactatgagagagtggcttcactggctggtggttaacataccaggtggaacagatccttctcaaggggatgtggtggtgccgtacatggggccacggccgccggtggggatccaccgctacgtgatggtgctgttccagcagaaggcgcgcgtggcggcgccgccgcccgacgaggacgccgcgcgcgccaggttcagcacgcgcgccttcgccgaccgccacgacctcggcctccccgtcgccgccctctacttcaacgcccagaaggagcccgccaaccgccgccgccgctactagcctccctcccctcgctcggcgtcgcccatccatccatccatggacggcgacggcgacctagctagctaataagccatcggtcggccatgctcgccgtccaaactatcatgcaccatatcatgtcgtcgtttatgtggttaattaattatttccggcgttttattaacaaaaaaaaaaaaaa

SEQ ID NO: 67036 - DNA, 1341 bp, Oryza sativa
  Clone ID: PAT_MRT4530_67932C.1
atgggtagtatacaccatttgatcggtgatctcccacaccgctccttacatgatctatcacgacggtatgggcctgtcatgttactcaagtttggacaggtaccattcattattgtttcttccccggaggctgccaaggatatcatgaagactcatgacagcatatttgcgatgagaccgcaaagcgagataatgaagatcattacaaagagaggacaggggcttgtgttcgcgccctatgatgatcaatggaggcagctccgtaagatctgcatccgtgagctcttgtgtgccaagcgtgtccagtccttctgcgccatccgggaagaggaggctgcacgccttgtgaagtccatatcaagtgatcaagcacatctagtgaacctcagtaagaagcttgccgactatgctaccgacgcagctattcgcatcatcactggtactaggtttgagaatcaagaggttcgcgacaaattccagtactaccaagatgagggtgttcatcttgcggcaagcttctgcacagccaacctatgcccatctctccagcttggaaacactctgagccgaactgctcgcaaagcagagatatatcgggaggggatgtttgcattcataggtgggattattgatgaacaccaggagaggagagcacaagatatgtatcataaggaagacttgatagatgtactcctaaggatccagcaggaaggctctcttgagtccccagttagcatggaaacaatcaagttcttaatttttgatattttggctgggggaagtgagacagtgacaacagtattacagtgggctatgacagaactaatgaggaatccaacagtgatgtccaaggcgcaagacgaagttagggaggttttcaagtggaaaaagatgtttgttattaaggagactgtacggttacataccccggggccacttttcatgagggagtgccaggagcaatgtcaagtgatgggctatgacgtgccaaagggtacaaaatttctactaaatctgtggtcgatctcaagagatccgaaatattgggatgatccagaaacattcaaacctgagagattcgagaatgatgcaagagatttcaaaggaaatgactttgaattcattccatttggtgctgggagaaggatgtgccctggtatgttgtttgggctcgccaatattgagctggctcttgcaaaccttttattttattttgactggagtcttcccgacggagttctacccagtgaattggacatgacagaaaactttggagttactgtccggaagaaggaagatctcttgttgcatgcttctctatatgcacaactttcttgctga

SEQ ID NO: 67037 - DNA, 256 bp, Oryza sativa
  Clone ID: PAT_MRT4530_67933C.1
caacgcatggggtagggataaaaatggagcggatagtttccgtccgctccgaacaaaaacggatacggatacattttggatcggatagctcggattcggatacaaatatggatatggtatcggggatatttgtttctattagaacttgacttggttttcatgttccgagaaaaatttgtttccatatccgtgtctgatcatattcgattgttattcatattcgagataatccgtattatttttcgtattcgttttt

SEQ ID NO: 67038 - DNA, 110 bp, Oryza sativa
  Clone ID: PAT_MRT4530_67934C.1
aaactgaggcttcttctgaaactggtttgaaaaccctggagaaaaagacatgtcagattaatgtgctggaaataagtgagtatcctcataaattggaaactgaagcataa

SEQ ID NO: 67039 - DNA, 1008 bp, Oryza sativa
  Clone ID: PAT_MRT4530_67935C.1
atggcaaagaagaagaacccaattgtctttatggatatttcgataggtgatgaacctgaggccattcccaacccaatgactaggatggacgggttcgcgcagtgcatcgttggcctcctctccgtcgccgacgaggagagaagcttcctgctgttcatcgtcgtcccgagagcccccgcctgggatgacgtcacccacctgccgtcactggcggagtccggcgtcgccgagcgctccgtggaggtgggccgggtggaagccatcgacgacatcgcgctggagcgcgagttccgccgcctcgacgacgggagctccgtcgaggtgtccttcatgcagcggccggcgggcctcccgtcgttcgccatgctcgtcttcctccccgacgaccgcgacggccggtctatcggacctgctcgacaggatcacctcctcgccggagttcgtcgacgaccacctcccgccggagtgcgtccccgtgggcaggagtccgacgatgatctcgggttctcgctgtacgatggttactacccgccgccgctgaagctggtggacttcgttgccgaccatctgttcgccttcttcatcgtcgaggagaggttgcaatccatcgtcttcgcaggacatgcaaaaccgcacaagttacgtgctgacatgactgaagattatccagaccagcttcatactggagggtacgacatcaagcaaacagggaacaaggattatactggttcaggccccttaatagcgaggaggctggcacggcgcgacgaggcgtggccggcggtgacggaggcgggcacaatgcgaggaggaggagctgccggcgggtgcggtgcggactacggcgcacgaaggctggccggcggggggcaccggtgcagtggtcccatatgtcagcagaggttggatagtggtagagcatcggggcgccagcatggattcgcaggtggtgagcggcgtgtgaaaatccagcccggcctcagccgggccggcaatgatgacgcttga

SEQ ID NO: 67040 - DNA, 851 bp, Oryza sativa
  Clone ID: PAT_MRT4530_67936C.1
atggcgctccacctcttcctcctcctcctcctcgcggcgagcctcgccctcgccaatgccgccccgccgcccaacgacgagggcgccaccaccatcgtgctcaaggacggcaccacctgcaagctctgcgcctcctgcgacaacccctgcaacccctcctactacccgccacccccgccgccggtcgtcacccccacgccgcagtgcccgccgccaccttcctacccctccggcggaggcggtggcggaggcggaggcaccgtcatgtacacctcgccgccacctccctacagcggcggtggaggcggcagcagcaccggcggtggaggcatctactaccccccgcccaccggtggaggcggcggcggcggtggcggctggcagcagggcggtggaggaggcggcgcctacccgacaccgccgccgcccaacccgttcctcccctacttcccattctactactacagcccgccgccgccgttctactccagcggctcgtctgtcgccggcgtgtcggccatttcgtcggcggcggcggcgacattcacgctgctcctcactgggctcctactgtggtgggtaatttgaatgggatagatctgctgagttaaaccgatgtttttctttacacctaggtgggtaatttgattgtggtttctgtaatttaattttttattttttatttttttttacttctctctcttggtgatttatgtatcgatcaggtataagaaaaaattgcacccaactgtaaaacatgggccaagtaataagcccccagtaccgttgtactactaccatagatggatctgctgattaaattttttcgtgccaaaaaaaaaaaaaaaaaa

SEQ ID NO: 67041 - DNA, 1551 bp, Oryza sativa
  Clone ID: PAT_MRT4530_67937C.1
atgggtttcgagtggacggtggcgacggccgcggcggcggtggcggcgtcgtgggcgttcatcgcggtggtggtgaagctgggcgtcgccgggccgggatacaggttcttctccggcaacctcagcgagatcaggcgtctccgcgccgagggcgccaaccttgtgctcgacgtctcctcccatgacttcgtccccatcgtgcagccacacatccgcaaatggattcccctctacgggaagacgttcttgtattggttcgggacacggccaaacatatgcttggcagatatgaacatggtgaggcaggtgttgtcggaccgtacagggatgttccccaagtacatagataacatgcagttcgcacgcctgcttggtaaggggctcgtgctcaccgacgacgatgagtggaaacgccactacaaggtggttcacccagccttcgacatggacaagctcaagatgatgacggagaccatatccgactacgcccaatcaatgatgtttgagtgggaatcggagttggggatgaagggcggaagcacggagattgaactgagccggtggtttgaggagctcactgctgatgtgatttcgcgtacggcatttgggagcagctacagggaggggaagcaggtcttcctagcacagaggaagctccaatttcttgccttctccgtgtttctcaccatccaaatcccagggttcagctacctcctgaccaaaaagaatctgaagacatggtcactagacaagaaggtgaggagcatgctcatgaacattatcaagagtcgactcactaacaaagaaaccatgggatatgggaatgacctgcttggattgatgttagaggcatgcgtgccagagcatggcgggagccagccacaactcagcatggacgatatcatcgctgagtgcaagaccttcttcttcgctgggcatgacaccacctcgcaattgctcacttggaccatgttcttgcttagcacacaccaacattggatggagaaactcagaaaggaggttaggatggtgtgcaatgacgaggtgcccaccggagacatgctcaacaagttgaaattggtcaacatgttccttctcgagaccctaaggttgtatggccctgtctcactcgtaacgaggagagctggtaccgacgtcaagcttggtagcatcaaggttcctaagggcaccatcctaacgatcccgatcgcaacaatccaccgtgacaaggaagtgtggggggaggacgccgatgagttcaagccagagaggtccgagaatggagtgttgaatgcagcgaagcaccccagcgcactactctccttctctatcgggctaaggtcgtgcatcgggcaaaactttgccatgatcgaggccaggaccatcatcgccatgatcctgcaaaggttctccttcacgttgtcccctaagtacgtccacacgccaatcagtgtgatcacgctaaggcctaagtatggtcttccaatgatccttaggagcctcaagaattgggatgtaaatttttctagtttgcttgttgattggagataa

SEQ ID NO: 67042 - DNA, 740 bp, Oryza sativa
  unsure (1)..(740): unsure at all n locations
  Clone ID: PAT_MRT4530_67938C.1
tcgaggccggcccgggaagaccaaaatcattataaacaatatcttcactttcctaacctctctaccagaaccattgcctacctaagatagagaatgggggagaaagaggcaatgctagtggtgtgtgctaatgatgtagggttggtgtacgatatcaacacatgcgagaagattatgtacatacacgactgcgttgctcctccatgtggcctcgcttttgttgatggatttctcctcgctgcatctcggacagacaaggatcaaccaatctttggaagtgctatatatttctgggctccaagtaagatcaaggaagtgcaaaaaagttatgtagctgaagccattgggcccattgcttgctcaaaagatggggtgtnatttggttggtggtgctagttctggacatacttatatttgggagatagcaagtggagcattattgaaaagatggtgcggacataaaaatgctacaagttgtttagccttctctcaagatagttcgtttctcatctctggatctatagaagggatggtttatacttggtcaatggtcagcgctccaattactgcattagcattttgttctanaggagtagggttggtttctgcatcaaaggattgcactatccttgtttgngacacaagagcatggcaagttattaataaaatagaanaccaaataggtgggcatataacaaatttgctagtctttcccaagcgagcgatcttcactgttcatc

SEQ ID NO: 67043 - DNA, 333 bp, Oryza sativa
  Clone ID: PAT_MRT4530_67939C.1
atggccggtgggggctcggcagctggcggggtaggcgggtgcgcggccacgctgggaggcaggcagcagctagccggccagggccaggcagcggcgcggcggcgtgggcgtgctgcggtgcggccgcgggaggcaggcggccagcgcagcagggcagccggcaacaagcatgcatgcccaagtactcatggaagccaaaatgttgcagtagagatggaggaggaggaggggcagatggaggagcatgttgtccaagagcttggggaagaacgtgttgaagagaattttgaaggtataactaagttcaacccagattacattggctgtgtttag

SEQ ID NO: 67044 - DNA, 522 bp, Oryza sativa
  Clone ID: PAT_MRT4530_6793C.1
tcagccgatggcaccagcatcagctcctgcacctaccgtaccaccttcggctccaggccaattgatcaatccccgactgctgataagagaatagccacaacacgctggatagaatgtggatcggctaacacaagaccaggttgcatcccatgtttttgcctcctcaaaacactgttgatccaacccagcagcagccgattcagcaaacaccaccaaggcagcaggttgtgcaacccatacagcaaacacccccaatccaacaagttgtgccaccagtgcagcaaacaccccgagctcaaagagttgtacaaccgattcagcaaatgccattaaggcaacaggttgtccagctgattcaacaacaaggttcaatgaatgcatcggctgggtttgcgacacctggtgggcggcctcatgttcaacaccagcaagcaggatcagctcagccccaatttgttcctcaatataaccaattcgagccgatgccacaacaacctcaagggacacctcaacagcggccat

SEQ ID NO: 67045 - DNA, 1539 bp, Oryza sativa
  Clone ID: PAT_MRT4530_67940C.1
aatcctttgtctaagggggtgtttagatataaagttttggagctcctgctcctgtatgcgccgtgtctcattctccgcgtctcctccctgtaccttctccggctcttctctgacgctcgccgcaacctgccgccgggtccccgcccgctgccgctcgtcggcaacctcctcgagctcggtgccaagccacaccgctccctggcacgcctcgcggagcgccacggcccgctcatgacgctccgcctcggcgccgtcaccaccatcgtcgcgtcctcaccggacgccgcccgagacatcctccagcgccacgacgccgccttctcgacgcgccctgttccggacatcgtccgggcgtgcgggcacgacaggtttgccatgccctggctccctcccagcagcccccagtggcgcgccctccgcaaggtgtgctccgcggagctcttcgcgccgcgccgcctcgacgcgcagcagcgcctccgccgcgagaaggcgcgccggctcgtgtcgcacgtcgcgaggatggcgcgcgagggcgcgcccgtcgacgtccgccgcgtcgtgttcacgaccttgctgaacatgctctcctgcacgctgttctcggccgacctcgccgacctcgacgagggacgcgccggatcggcgggggagttagcggacacggtcgcagagttcgcgggcaccgtcggtgtcccgaacgtggtggactacttcccggcggtcgcggcgttcgacccgcagcggctgcggaggtggctgtcgagggtgttcacgcgactgttcgctgagttcgacgagcagatcgagcggcgcatgcgggagcgcgacgcgggtgagccgcccaagaacgacttcctggacgtgctgctcgactaccgcacgacggaggatggccggcagttcgaccggcaaacgctacggtcacggtttacggatttgtttagcgcggggagtgatacaagcgcggtaactgtagaatgggcaatggctcagctgctacaaagcccatcatccatgatgaaagctcgggaggagcttactcgagtgattggctccaaaccagaaatcgacgaatccgacatcgacagcctcgagtaccttcaggccgtcgtgaaagagactttccggctccatcctcccgcgccgttgctgctctctcaccgagccgagacggacacagagatcggaggctacacggtgcccaagggcgcgaccgttatggtgaatatttgggcgattggccgagatagcaaggtgtggtttgagcctgacaagttcatcccggagaggttcctgcagaaagaggtggatttccgtggtcgcgacttcgagctgattccatttggctccggccgaaggatctgtcccgggttgccgctggctgttcgcatggtgcatctgatgctcgcatcgttgctgcaccggtttgagtggaggcttctgccggaggttgagaggaacggggtgaacatggaggagaaatttgggatcgtaatgacgttggctacgcccctccaagctattgctacaccaatttga

SEQ ID NO: 67046 - DNA, 555 bp, Oryza sativa
  Clone ID: PAT_MRT4530_67941C.1
atgggggagaaagaggcaatgctagtggtgtgtgctaatgatgtagggttggtgtacgatatcaacacatgcgagaagattatgtacatacacgactgcgttgctcctccatgtggcctcgcttttgttgatggatttctcctcgctgcatctcggacagacaaggatcaaccaatctttggaagtgctatatatttctgggctccaagagtagatctaattcgatcagtattgacaaattcaggtttttcaattttagtcagaaatcatatgccagattatggtagaagggattcaagatgtaaaagtgtgattgtgattaggatcaaggaagtgcaaaaaagttatgtagctgaagccattgggcccattgcttgctcaaaagatggggtgtatttggttggtggtgctagttctggacatacttatatttgggaggatgccactctgatcataaattggtttgctccatttgttaatgttagtttggatgatctaaataaggaggtccatgtaactgacaaacggaagaaagtttatgaccatggaagttaa

SEQ ID NO: 67047 - DNA, 1371 bp, Oryza sativa
  Clone ID: PAT_MRT4530_67942C.1
atggacacggagccgctgctgtcgccgctgtcgccgtcgccgcacctgctccacccgctgccggagcacgcggaggtgtccaccttctcgccgcccctctcgccctgcccttccccggcgtcctcgtacaaggagcggatcatcttcggcgcgcacccgccgccgccgccgccgccgccgccgccgcctccgcccccgccgcgggggaggcggtactaccggcgtgtgtccggggatgacctcgacgtgccgtcgtgttcgtcctcgccttcccctcccttcgacgaggagaacccgccgccgaacccgccgtggctgttcgacttcatcggggggcgcaagaacctccaccgctcgcgcaccgcgccggccatggcgccgctcaacgcggcggctatcgccgcggccgccgcctcgggggacagccggaacccgccgcctcccccacggcggccggccatcgtgctgcacgcgttcctcttcctgctcgcctacctcgccatgggcgtcaccttttacgccgccttgccgggcaacttcacctcctcggccggccctacccaccccgtcgccgacgcgctctacttctgcatagtgactctctgcaccatcggctacggtgacatcacaccggcgacccccgccgcgaagctcttctcaatctccttcgtcctcatcgggtttggctttgttgacatcctcctatccggcatggtgtcctatgtgcttgaccttcaggagcacctcctcatcacggcgctcaagaacccccgctctgtgcgcaagcaccggcacaattacatctttgatcttaagaagggccggatgcgtgtgcgcatgaaggttgcacttgcgctcaccgtggtggccatctgcgtgggggtcggtgccgcggtgctcaagagggtcgagaatttggggtggctcgatgccgtttaccttgctgtgatgtcggtgaccaccgtcgggtatggcgatcacgcgttccggacactggctggacggctctttgcatccgcgtggctgctcgtgtcgactcttgctgttgcaagggcattcctctacttagcggagatgaggattgacaagaggcaccgcgctatggctaactgggtgctgtcgagagacatgaccgtgtcagagtttcttgctgcggatatcgacaacaacggttatgtcacgaaatcggaatttgtagtttacaagctcaaggagatgggcaaaatttcagaaaaagacataatgatgatctgtgaccaattccaaagaatggactcaggaaactgtgggaagattacactttcagatcttctcgagagtcatcagctggtcactgaccttaacgagaagaaaaaggggaagaaatcataa

SEQ ID NO: 67048 - DNA, 305 bp, Oryza sativa
  Clone ID: PAT_MRT4530_67943C.1
ttgtgtttttttaaaaaaggggggttgtactaatcctgaacatggcagtaaaacacttgtcaaaggaactaacaaaatggccttcaacagaccacaaatctacattaaatcaatgcttgagcagcgcaaagacacaccgaatgggagcaaagccaacgctggggtcgcccgttacaactgaatctttggcgtgttacaagggtcctacccggccacacaaggaaaggccaggttctctagcgaccctgggccagatgccacatgaaacaacaaaggggccactagggtgaggatcctattcttct

SEQ ID NO: 67049 - DNA, 541 bp, Oryza sativa
  Clone ID: PAT_MRT4530_67944C.1
aagcagcagagagaaagagagcaaaagcagcgagaggttgtggggagagagaggagcgaattgattagtgtcgccacatcgtctccaccaccaccacctccgtccttcctcgccaagccaccatcattgcgccaccgccgcaagatctgagctcgactcctcctctcctcgcccccgcacgggcgcacgacgctagcttcttaagtatttttcttcttcccgcgcagcgcgcggcggctggctggctagctagcttctcggcaaaggcttgttgcggttgcggttgcagtacaggggcgtgtgtgcgcgcgagcggcggtggtacggtgcccgcacccacccaccaccacccccgccattaaaggcgctcacgcaccgcctccagcttcttcgtccacgagaaagcgaggtgatcagagagagagagagagagagagagagtgaagcggagctcacttcctcccctcacgggagcagccaacgcccagcgccgccaccacccacgccgttcgcgcgctttaaagaagaagagacagagaga

SEQ ID NO: 67050 - DNA, 294 bp, Oryza sativa
  Clone ID: PAT_MRT4530_67945C.1
atgcggacagcaagaggggcccacctgtcagtgactgaaagagagaaggaggcacggggcccggctatcagcggtggggttttcttcttcctcctctcgctcggttcagctctggggcggaggcgtgacgtggcagcgaggctcggctcggcgaccggcggtcggggaggcggcagcgaactccggtggagctatgccagcgacggcggcgctgggaggcgaggcggcgtggcatggcgggacgtggcggtgagctggcgtctaggcgcgggagaactgtgggtagctggctag

SEQ ID NO: 67051 - DNA, 346 bp, Oryza sativa
  Clone ID: PAT_MRT4530_67946C.1
tccacgcgtccgcttcgcttcaattctgtgttggtagcaggcgacgctcggtgtcttagttcatggctcggagggatcagctggtctctttcctctgcttcttcctgatcgtctctgccgtcgccggcggcttgtgcgtctcggccaccgtgctcccgatgcgggtggggaagcagtacgtcgtcggcggccgtagcgggtggaggacgccgccgccggctagcgtcgacttgtacgccaagtgggccgccggcatccgcttctacgtcgccgactccattgagttcgtgtacaagaacgattccgtgggtgaaggtggacaagttcgggtactaccactgcaacg

SEQ ID NO: 67052 - DNA, 411 bp, Oryza sativa
  Clone ID: PAT_MRT4530_67947C.1
caggagtccgtgatgtttattaggatgagcgtatcgattaggctcgacgtgagctgcattgctggcagagtaaatcaccatgacgtcgttggatcacggctcgactaactcacgcccaagctcaatggagtgaacgacgcggttaccaaagcgacgtcgcttctcacgacttggacgcgagtattccacgtgcggggcccccacaacgccatattgagtgtataggtccctgcatttcctggttcctcgatcacgtccatgcagacttaagtttcactggctcaatggctttgaccagcacaaacgtgcgcgagaagtttctcttgccaagacgatctggagtctaagaggttttgcgtaatgatccactcgaaggggctatctctcgacgagttccaacgatatatgttt

SEQ ID NO: 67053 - DNA, 291 bp, Oryza sativa
  Clone ID: PAT_MRT4530_67948C.1
aaggagatctaatatgagcttaattcagatagggatccgaataggaatcctacaggccttggaggcccgagtcatggatcctatatatttgtgaggggcgtgactggcggaggcattgcatcaccttgggcgtacggcgaggagaacgcacgaggaagagaaggttgagccggtgcgatcgactacttcctctacatcgacgcgcgctacatcacgagggttcctttgccttcttagcacttttttccgctacgcagtgcgtccagtggtaattgtattgggtgtcctacg

SEQ ID NO: 67054 - DNA, 341 bp, Oryza sativa
  Clone ID: PAT_MRT4530_67949C.1
aagaaagcatacagcatacacaagggattaactcatcactcacttatgctagatgagatggatgggccatgacattcaagcgcgtcaactgcggctgttcagacatgccccggaaacaacacaagacggtcatttggaatgggcctatgggtgtcttggaatttgacaagtttgcaggaggaaccgaggcttttgcaaagatgttggcagaccttagcggctagggtgttacaaccattattggaggaggtgattcttgtgccgctgttgtgaaggttggagtagcttatgttatgtgccacattttaacgggaggtggggctagtttggagcttttggaa

SEQ ID NO: 67055 - DNA, 6799 bp, Oryza sativa
  Clone ID: PAT_MRT4530_6794C.1
ataagtgtgggcaaaagtctgccgcaaagacttgtggatcaaatcaactgttacgctaatatatccgaaggtgagctttggacctacactggagttaagcagatctcccaggccacatgttttctgtcaacacgcttttggcacgcccggtgggacctgattaaaagtcagacgtcagtccctcctcatggccgagaaacagccaccgccaccatcaagcccaggttccgttaaaggcaaggcgccgaagccgggattgaccgaaatcattgatgacaacgtcatgccaatcgatccagagaaattcacgcctgagcagaagcaggagtttgaagcaatgatgcagcaagcacgggaccagttcctgaattcattcatgcagactcgcaagcgaacgtttgttcagaagtataagataaaagtggttgctaatagtcctgaaaccggttcttctaaagatggagaggtaaaacaagctcctgaaggctcggctcacctgagcaataaaggtgctactgacggttctctaggaaatcaaggcgacaacccccaaggagtccatggagtacaaggtgatggagcgcatggggctcaaggtgatggtgctcaagggccgcaaggaggaaattttaatcagaacagtgaactagcacaggattttttcaataacttccaagatcgggtcgattacgctgtgcatcatgctttgatcaatcagtcaggagtactagtcaatacattgtcaaacatgatgaagacaatagccgatgactcaatagctgagcatcaggccgcaggcccgccacctgctcaagcagttccctctgttgcacccacaactcagccgacggcgccaacatcaactcctctacctgctacagcagccatggcgccaggccagctgatgaaccctcggttgttaatgagggaacatccaaagtctactgggcaaatcgcgaatcagccaacccaagatcaagttgctgccatgtttttgccacctccacctattgttgatctagtgcagcagcagccgattcagcagacaccaccaatccagccagttgtagacccgatccaacaacaggtcgtacaaccagctcagcaaacaccatcaagacagcagcctctgcaaccgattcagcacacgccaccaaggcagcggcttcagccgatccaacagactccgcaatttgtaaaccaagtggtcccagagcatttggttcaccatccacaaccggatggcacggtggtgcctcagatggttcctaagcacttgcaacaaccgaaaggagcagctcagcaacgaccatgggccgatgtgattgccgatgtaatgagggagcaatttgggcttaaaccaaaagaaactggaagtttgtatcggcagccttaccctgagtggtttgaaagagttcctcttccccattggtttaaagttctagatttctccaaattttcgggacaagagggtgtgtcgacttatgagcacatcagccgattccttgctcagtgcggtgaagcatcggctgtagacgccttgagagttaggttgttccggttatctctgtccggatcagcttttacttggttttcctctttgccatatgggtcgatcaatagttgggccgatttggagaagcaattccacagctatttctacagtggggtccatgagatgaagttgtccgacttaacagcgatcaagcagcggcatgatgaacccatgcacgagtatattcagagggagaaattcttattcgaagacttcgatagcttatcgcatctgatacagaaggtaaccttgcatgagcataggtcggcggaagttaggaaaagctctaagaaagttaatcacgtttgtccatatatgtatgggtcggatgacgaagaagatgattctgagatagctgcagccgaatgggtgaggagtaagaaagttataccatgccaatgggtgaaaagtcctgggaaagaggagaagtatgactttgatatcaccaaagctgacaagatttttgatttgctactccgagaaaagcagattcagcttcctgctggtcatacgatcccattggctgaggaattacgcaagagaagatattgcaaatggcacaattctgggtctcattctactaatgattgtaaggtctttagacagcaaatccaggttgccattgaagggggaaagattaggtttgatgattccaagaagccgatgaaggtcgatgggaatccttttcccgttaatgtggtgcatacagctggtcaagcagccgatagagcccgtgcaaagggttttcaagtaaattcggctaagattatcaacaagtatcagaggaagtatgataagcagcaggaaaggcgttacgaaggatacgacgatggttttgatcctcattggggttgcgaattcttcagattctgctggaatgaagggatgaggttgccatctattgaaaactgccctggatgcagtgatatcatcgagggctcaagccgatcatataatagggataatcggctgagacaggcaagactccctgttcatcagagattgggtccgatgaatcaggattgtggccaagaggaagaagcgatcaggaagaatcaatggtgtccttctggtattttcacgaagaatcagaagaggagggtccatagattgaggagcagggagcgttttcaggaggttgaggaggaaatcaaccatcggctgaggaaaccaaagccaagacaggagtggcgtgtcaagaatcaggttcccgtagccgatgatgctgcagctgatgaggccgatgttgacgaagtggaagaggagtcggctaagttggtcctttcgccagaacaagcagtattcgagaaacctgaggggacagagaatcggcatcttaaaccattatatataaacggctacgtcaatgggaagccgatgtctaagatgatggtcgatggtggggccgcggtgaatttgatgccttatgctacgttcaggaagctgggtaggaatgccgaggatctcatcaagacaaatatggtgctcaaagactttggtggtaatccatcggagaccaaaggtgttctaaatgtggagttgacagtcggcagcaagactattcctaccaccttttttgtcatcgatgggaagggttcgtacagcttgttgcttggaagggattggcttcatgccaattgttgcatcccttcgactatgcatcaatgcttgattcaatggcaaggcgacaagatagagatcgtgccagccgacagccaatcgaagatggagaacccaagctattactttgagggcgtcgtggagggttcgaatgtctatgctaaggataccgtagatgatcccgatgacaagcagggccaaggttttatgtcggccgatgatttggaagaaatagacataggtccaagcgatcggccaaggccgacatttattagcaaaaatttgtctccagagtttagaaccaagttgatagagctcctaaaagagtttagagattgcttcgcttgggagtactatgagatgcccggacttagccgatcgattgttgagcatcggctacctatcaagccaagggttagaccatgccagcaacccccaaggagatgtaaagccgatatgctcgaacttgttaaagctgagattaaacgatcgtattatgctggttttattcgtccctgccgatatgctgaatgggtctctagcatagttccagttattaaaaagaatggcaaggtcagggtgtgcattgattttcgagatttgaataaagctacaccgaaggacgaatatccaatgccagtagccgatcagctggttgatgccgcatcagggaacaaaattttgagttttatggatgggaacgcaggatatcataagatctttatggctgaggaagatatccataagacagcttttagatgccctagtgcaatcggcttatttgaatgggtcgtcatgactttcggcttaaagagtgctggagcaacataccaaagggccatgaattatataaatcatgatttaatcggctggttggttgaagtctatattgacgatgtggttgttaaatctaaagaggtggaggaccacatagccgatttaaggaaagtttttgagagaactagaaagtatggcttgaagatgaatccgacaaaatgtactttcggtgtgtcggctggccagtttttgggatttcttgttcatgagagggggattgaggtgactcaaaggagcgttaatgcgatcaagaagattcagcccccagaaaataagacagagctacaagagatgatcggcaagataaattttgttagaaggtttatttctaatttgtccgggagattggaaccttttacacgcttattgaggttaaaagccgatcagcaattcacttggggggcagagcagcaaaaggctttggataatatcaaggagtatctcagctctcctcctgttttgatttctccacagaaagggataccgtttaggttgaggcattatctgttatctaatgagtgcactgttatatgcgaagccgatgaagtcaagtatatgctgtcggctccaatattaaagggacgagttgggaagtggatattttccttgactgagtttgatcttcggtatgaatcaccgaaagtgattaagggacaggctatagccgattttattgtagaacatcatgatgattcgattggctcggtcgagatggtgccatggactttattctttgatggatcggtatgcactcatggttgtggcatcggcttggttataatttcccctaagggggcatgcttcgagtttgcctatactattaaaccatatgcgactaataatcaggctgaatatgaagcagtgctcaaggggttgcgattactcaaggaagttgaagccgatactattgaaatcatgggggattctttgctagtaatcagccaattggtaggagaatatgaatgcaagaatgatacattgatggtttataatgagaagtgcctagaactaatgaaagagtttcggctggttactttgaagcatgtatctcaggaacaaaatcttgaagctaatgatttggctcaaggggcatcggggtataagccgatgatcaaagatgttaaagttgaaattgcagcagtatcagccgatgattggaggtatgatgtgcatcagtatttgagtaatccatctcaatcggcttcccggaaattaagatataaggcattaaagtacacattgttggatgatgagctttattatcggacgattgatggggtattacttaaatgcttgagtgctgtggagattatgggtaccccatacccacacggcatggttatccgactggcgattgatgctagtcatggactcgaggcgtctcagctttctggtcgatcggccgcgagtccactctgccggcttgtcctcgccaccgccattgctaatagcaacaacgacttcaccgccggcttgcctccgtcgccgccgactggtgtctctgcctacacggttggcctgttatgccgccgtcgttgggcatctacgacttcaccgctggctcgcctcatccgccgccgactggtgtttccgcctgcacggctggcctattatgcccacgttgttgggcgtctacgtcttcaccgaccggccgcctcatccgccgccgactggtgtttccgcctgcacggctggtctattatgccgccgttgttgggcgtctacgtcttcaccgatcggccgcctcgtccgccgccgactattgtcaccgcctgcacggctggcctattgtgccgctgttattgggcgtctacgacttcactgccggcctgcctctgtcgccgccgactagtgtcctcgcctatacggatccagatccagatatgcacaaaagggattcatggctttaagcttatcccttacgctccaggaatggatcagtcagaacatcaccaccggcttgccatcgtcaccgccgactggtgccttcacctatacggttggttggtcacaccaccgttgttgggcgtctacgtcttcaccgaccggcttgccctcgtccgccgccgactgatgttcccgcctacacggctggccttttataccgcactttttaggagttgtcatgacgctgtttgggtttatcaagcaattgattggatacaatatcattgcttttcgccacggtacttttggccgacaatgctggaagattgtttcaaatattataagggatgtaaagattgtcagaagtttggagtgattcagcgagcaccggcgtcggctatgaatcctattattaaaccatggccgttcagaggttggggaattgatatgatcggtatgataaacccaccatcgagtaaagggcataaatttatattggtggcaactgattatttcaccaagtgggtagaggcgattcctttgaagaaggttgattctggggatgctattcaatttgttcaggaacacataatctatcgatttggtcttcctcaaactattactacggatcaaggttcaatcttcgtgtccgatgagtttgttcagtttgctggtagcgtgggtatcaagttgttgaattcttcaccttattatgcacaagctaataaggttgttggatcgattcaagttcctccttacaaacttgtttatggacatgaggttgttttgccatgggaggttagaatcggctatcgacaaacggagttgcaaaacgatttaacggctgatgagtattacaatcttatggctgatgagagggaagatttggttcagtcatga

SEQ ID NO: 67056 - DNA, 1023 bp, Oryza sativa
  Clone ID: PAT_MRT4530_67950C.1
atggggatcgatggggttgggggagtaggggaagggagggaggaggacgatggtgatgagctcaaggaaagacggggaagaaaacggatcgacggtggtggttgggagaggcgggacgttacggccggatccgtcgccgcgacgacaggagaggccggatccgccgctgcgacgacggggaaggtgggatccgctgccacgacgagggggacggcgggatccgccgcctcgacgacgggggaggctgatggggagggcagcgacggtggaagtgggtccggtggcggctgccacaacgacgacgacggctcccgcgagaatgacgatggtggctaccatgacgatgacgacatcggctaccgtgactccaacccctcccctctactgcctggcgaccacggcgtggacttcggcaggcggcggccacggcgaggtgtcgcgacggccactggcgccaccgcctcccgctgccacgccgccaccgcctcccgctgccgggccgccaccgcctcccctctcgccgccggatctggcggaggggatggcgccgcaaccgggccgccgacgcctccgccggatcagaagagagggggaggggatgagaaggagagggaccgccgccaccgcctcctccatccgaggccgcagccagccccaccacgccgtctcggcctccacatcgcacggagccgccgcacggcctcgtcctcgacgtcgcccggccacgacgcctacggccagccgcagcgcctcactggcctccgcacccgccgcgccgccgccgccgcccgtccggcctctgcaccctctggcgccatcaggggaggaaggggaaagaaaaagaaagagaaggaaggaaagaaagataaggaagaaggaaagaagagaatagaagtcatagcgtctcaccggcctccgcacccgccgcgccgccaccaccgcccgtccggcctctgcaccctctggcgccatcaggggaggaaggggaaagaaaaagaaagagaaggaaggaaagaaagataa

SEQ ID NO: 67057 - DNA, 349 bp, Oryza sativa
  Clone ID: PAT_MRT4530_67951C.1
ggggatttcttagctgctgatgcggatgcggatgaggatgaggatgccgtgtgtgcgtgcgcccggagatcttctctcgttttggtcaatgaacaattgagaattgaccatgggtgggtgggaagaaatcctagtgttctaactattgatcgatccaatttgggcgcaccgtgttaatcgcgtctgaatcgagcatacccggatggagctcataactttttcttgcagaatctgacgaacagatgctggtttttaatggatgtaggcattgtagtgttcctcacttcagggttaccatctattgaattaaaccctcatgtactcaattacttttaaaaaaaaaaaaaaa

SEQ ID NO: 67058 - DNA, 231 bp, Oryza sativa
  Clone ID: PAT_MRT4530_67952C.1
atttttaatttactgagcttggatggacccagtaagctcaaaactggtgctacatttgtgactcaatacaatatgacgatgggtctataatgatggagcaagctttaagataaataaattcagtgctaaatgattatgcaataacaacgtgccaccaaatactaccagtgggcagactacaaatataatgcatggaacacacaaatgctgctctcacattctatagatcac

SEQ ID NO: 67059 - DNA, 1289 bp, Oryza sativa
  Clone ID: PAT_MRT4530_67953C.1
tgctggagggacgcccacgactgcaacagcgacgggccccaggagtggatctgctgctgcggcggtggtggctgctggggcaggggttgctggaagcggatcgggccaggcaggggcaggtgggcatcgatgttggaggggaagaaggacatggcgggcctgggcctgctgcatgaggaagatctggcgctggtgcagctggttctgcgccacggtggatgccgaggaggtcggggtggagttcgcggcggcgtccatggtgggggcggaggtggattggctagaggagaagatctgggggaaatggtggggggggccccggagtgcggctgctgctgctgcggttgcggctgtggcggaggctgaggcggctgcggctgcggctgcgggggctgctggaagcggatggggccgagcgggcggaggtgggcgtcgatgttggaggggaagcgggacatggcctgctgcgacagctgctgcggcgtcggggcgtggccctgcgactgcgactgcgcctgggcctgctgcatgaggaagatctggcgctgaagctgctggtgctgcgccgcggcggccgcggctgcggcggcggcggaggaggaggaggaagtcggggtggggttcgcggcgtcgtccatggcgggggagcagcgaggagtgagatctgtgggggaaacggtggtggaggcgggtgcagaggccggacgggcggcggcggcgcggcgggtgcgaaggccggtgaggcgttgcggctggccgtagacgtcgtggccgggcgacattgaggacgaggccgtgcggcggctccgtgcgatgtggaggccgggacggcgtggtggggctggctgcggcttcggatggaggaggcggtggcagcggctgcggtcgctcgcgaacacggatccggcggcagcggccactattgcgcgcggatccggcggcgacggccgctcgagcgcgcggatccgggtatgtgccccacggcagcggcgcgccctttcactccctctccttctcgtccccttcccctctcttctgatccggcggaggcgtcggtggcccggttgcggcgccatcccctccgccagatccggcagcgagaggggaggcggtggcggcccggcggcaggaggcggtggcggcgtggcggcgggaagcggtggtgttgtcgacatggcggtctgaagatctgactcgtagtcgacaacagggtagttttcctcctcaaatccgtgcccggcgagatcagagatagcgcttttgtttctcctaacagtatctggagacat

SEQ ID NO: 67060 - DNA, 1778 bp, Oryza sativa
  Clone ID: PAT_MRT4530_67954C.1
cccacgcgtccgtggactcgtgggcgcgaggcgctccttttttttttgttttgaacaacaaccaaccaataggagcttttcctttggaatacccgtaccagtgcataagaatcgttgacgagctgccgtacaccctttgttctaacaagaagacatgctcggcatttccaacctaagctactgtcatcggaagtaccaaagtttggctaagcacggcatatgatggccccccctcgagtttttttttttttttttttttttttttttttttttttttttttttttttttttggggggcaaagacaaataaatcaccaccacgaacatgcatatttacatcgtcagttcctacttacactcatgcgcttgaatgcacatttaacctattctccgggctgaatattagccgctgactaaaccacgacatatcccctcgcagcaaactatgagaaagaatcaacaaatgaaacgcaatggttggggttgacgactgtgctgttgacaatattgcttcccggtaacgaatcgtcctccccggccagctccacatgattagcagaactaatatcattccaccgatatgaagccgtccttctatccatttatgccgcgtaccgatgaatttgagcgcgaagatgtcctcatagaccttatcgaccgcattgacctattaacgaaaggatgctccagcagctttgctgcagagggtctgtcttgcggattgggttttacgcactggcttataaaatcacgagcatccctagaaaggcaatttggaattgctggtggttcccccttcccaatcctgtataaagcttgtgtccattccagaccaggatagggaagttgacgtgtcaacatctctaggactgtgcagcccagactccatatatcagcttcaggtccatatgttgtcttgggattgacaacctcaggtgccatccaataaacagttcctttgcacgatttaagcacgttgaatttggtaatctccttagcaagaccaaagtcagcaagtttcacggatccattggcatgcaccaatatattggcacatttgatatccctatgaacaatgtttcgttcatgcaggtaagtcaacccattaagaatctgtcttgtatatgctgaaacatgagtatctcgcagtctgtacttctgatacaaagatgcaagagatccttgggtgactaattcaaggaagatgtacagttttgagtcctctttgtcggtaccatagtactgcacaatattttcatgttcaaactgactcaaaagtgcgatttcctgctcaagctgaaaaatgcactgctgtgcattgctcccttgatcacacaagcagacctctttgacagcaaagaagacaccctcgtcgctgatcccctcgaagactgtcccaaacgagccacttcccaggagcatcccccggttccacgaccggatcttcctcctaaacctcccattcggcgagatgtagaacatggactcggtggttgtgctcgacgtttcgtcatcgttcgtcgtcgacagcgaagacgtgcccgtgaattcctcggacgtctcccctagcctgagctcctccagcgtcaacaccgcggccgcatcatcctcctcctcacccgcgtcctggcatgcggaatcaccaccagatctgctcgccggggcgtgagcatggctatcctcctccggcgcgaacgaccgcaagatatcccacgtggactccaccacgcagaccgccggccgtaccatcgacggcggcggcttgagcacgaccggcg

SEQ ID NO: 67061 - DNA, 2898 bp, Oryza sativa
  Clone ID: PAT_MRT4530_67955C.1
atgtcggaggatgggtcaggagggagcggggacggggacggggacggggacgggggagggggagcaagagccaagccgatccccgatctaaggggagggaccggcgccggcggcggagtatgccgagggggaggtaggtgggagccgccggacaaggtgccggagaacgtgctgaagtgtgtgctggagttcctgacggcggcgcgggaccggaacgcggcgtcgctggtgtgccggtcgtggtaccgcgccgaggcgcagacgcggcggggagctgtccatcggcaactgctacgcggtgtcgccgcgccagcgccggtggagcggttcggaggggtgcgcgccgtggtggctcaaggggaagccgcggttcgcggacttcagcctcgtgccctacggctggggcgccgacgtctccccttgggttgcgccgctcggccccgcctacccgcacctcgagcgcatctgcctcaagcgcatgaccgtctccaacgacgacctcgcgctcatcgccaagtcattcccgctgttcaaggagctgtcgctggtgtgctgcgatgggttcagcacgctaggcctcgccgccatcgccgagcggtgccggcatctccgtgtgctggatctgattgaagactatattgacgaggaggaggatgagctagtggattggatctccaagttcccggagtccaacacgtcgctggagtcacttgtgtttgattgtgttagtgtcccattcaactttgaggccctggaggcgcttgttgcacgctcaccagctatgcgccggttgcgaatgaatcaccatgtgacagtagagcaattgcgccgtctaatggcaagggctccccagctcacacaccttggtactggtgcattccgttctgagccaggccctggtggtgctctgtctgttactgagcttgctacatcttttgcggcatctaggtctctgatttgtttgtcaggtttccgggatgtcaatccagaatacctcccagcaatccacccagtctgcgctaatctcacttcccttaattttagctttgcaaacctaactgctgaggagctcacaccgattattcgcaactgcgtccgtcttcgcactttctgggttctagatacagtgggtgatgaaggtcttcgggctgtggctgagacatgctcagatcttcgtgagctgcgagtttttcctttcgatgccactgaggattctgagggatcggtttcagatgttggtcttcaggcaatctcggaagggtgccggaagcttgaatcaattctctacttttgccagcgcaggacaaatgcagcagtaattgctatgtccaagaactgttctgacctggtaacattccgtctttgtattatggggcgacaccgccctgatcggatcactggggagcccatggatgatggttttggggcaattgtgatgaactgcaagaagctcactagactttcagtctctggtctgctcactgataaggcgtttgcatacattggaaaatatgggaaactaataaagacactgtctgttgccttcgctggaaatagtgacatgtctctccaatctgtgtttgaaggatgcactaggttgcaaaagcttgaggtcagagatagtccttttagtgataagggattgctctctggcctgagctatttttacaacatgaggttcttatggatgaattcatgcaggctaaccatgaggggttgtagagatgtagctcagcaaatgcctgacttggtggttgaagtgatgaaggatcatcttgatgatgaaggggagatggagactgttgataaactgtacttgtatcgatcactggcaggagcaaggaatgatgcaccttcatttgtcaacatcttgtagtactgctacaggaagaagtttgttgtactcacaaaacaagtttgttctattaaaccttatcattgctattgtattcctgaaccctgatcagtctatcagaatcagacacagaagcttcccgcagatgattttcaaatgccgtggggaaacttcgattatgccggatctccaaattgttcttttcatttgctgacaatgaggcatatgaggctcttcttgatgtatgtattgttgctgaggagaagttcgtcgagtgagctacctgatgcctgatggggatccttcttttccttgctgtgactcgactgatgcctaccattttactgttagatgaagagtaggaactgattccaatcagcagggttagattagccatcttttgatctgctcagacgaaggaatggcaatgctccaatattccatcatccgttgccttatgttttagatctcaaaactcaactatgataattgtttcctttttcatttttttggggttctctcttgagttatttttgtagtccattttaccccccttttacttggtcacgtcgctgttatgaatcaagaagctattggaggaattgaaatttaatgcattattttgaagccttttggtctgatcgagattgataccgtatcatttcagtcagaggcgaaacctttctagtatctcagctacttcatggctgtgtcgtgtgtaaatcaaaagcgacgcggccattttttgtgcatctcttctctgagcagagtagcaaactttgatcagtggcccgtgatttgccagggaagcttgctgtaaagatgtggactttcatatagttaggctcagcgctctagatcggcaggtaaattgcaaccgaaatttcaactggttgctgtggaagtggaaatacggattggctggatttggatgctaccctctagtcaccatattttagatctattttgaacccctgagtatctgttaaatgtatgtttggttcaaaaaaaaaaaaaaaaaaaaaaaaaaaaaaaaaaaaaaa

SEQ ID NO: 67062 - DNA, 254 bp, Oryza sativa
  Clone ID: PAT_MRT4530_67956C.1
cggcgttgtacgagctctgcaagctagcggagaacatgcatcgcatcgtgtgtgcaagcggggcggcgcccgcgctcaccgactctgcccgcgtcgcggatgtgctcatcttcttcgccaagtccagtgagagccgccacgagctgtccactgtccgatgcttgttcagagtgacaaggagcagcggtcttgatggatccaaaataaaggaggacatgtcattcccagaaacatttcatcatcttacagctcat

SEQ ID NO: 67063 - DNA, 113 bp, Oryza sativa
  Clone ID: PAT_MRT4530_67957C.1
tcggactcgtggggtttttagctaattttttatcctacccctaatggtgagcatttaaggaaggaactgggttccacttttaggggccatgtgttgtaaccaggaacttttgc

SEQ ID NO: 67064 - DNA, 1600 bp, Oryza sativa
  unsure (1)..(1600): unsure at all n locations
  Clone ID: PAT_MRT4530_67958C.1
cgggtcagccaccgccgtcggaaaaaaatcccctcgctaaacgcgcaccaatctccgttttaaaaactcgcccaaatttcaagggaagggaaggggaagaaggaaggcaggtgcgcgtgcgccgttgtagattgctccttcctcgtggccggagcgcgcggcggcggcggcggcgacggcggcgagatgagtcgatgagatggggatgaggtgcaagaagcacccgtaccaggcgggcggcggcgtctgcgccacgtgcctcaacgaccgcctgctcgcgctcgccgccgcgcagaacggggcgtcgtcgtcgcctcctcctccggctgcgccaccggccgcggcggcgccggcgttcccgaggtcggtgtcgccgtacgtgtcccgcaggaagtcggattcctcgggcggcggcgcgcttaagcatcatcccagcctcctcttcttccggacgccgcaggtcggccccgcctacggcagcagcggcgggctcgaggagggggacatcgggtacgagaagcggcgcgcggggaagttctccgtcatcgccacgctcttcggccaccaccaccaccatcacagatcggaggagaaggacaagggaggcgacaacagggagagcagaaaccgttcttggctcgccgggttcatgccgcgccgccgcaagaagcagccgccagcgccagccgcagccgcagccgcctcgtcgcccccgcctaggcgctcctgccgcgtggtcagcaaccgtgggctctcgccggagcgggactgcgacggcagcgacgaggagagcagctcgccgactgatcccccatggcagccatctccttcaccgatgcggaggaccccatgccggcggcgccaaaccagcaccatgccatcgggcttcgccgtctgcctcagccctctcgtgcggcccagccccgggcgccgccaccgccacgcccatccgcccgacccaggcaccttctcctgcgagctacggccatcgccgctccacaacctctcctccgccgcctccattactcggtgccgctccaggaagctcgccgacggcggacgcttccggtgatcttttcacgttttctttttcacctttttcatcttctcttcaccgcttatcaccacctaatcccaattaccatcctttttagatttttcttctcctttcttactcgcattttgtccatccatgaaaagtctctataagattttatactcccaactccaaaccacttcgttgacatataggttactactgctcgtcagccgaccattactgtaagagctgcttgtttgtttgtacagctagttgtctaatcttgatttgcaaaattgttaattaaccttagtttcttttttttttctttgatgcttgggtttaagaatgagtggacttgttgatgtgcatggactgcacggtacaggtcgtttgtacacaggattaaatgctggatttatgagtgagagggatctgagtagagggggataggagtgtatgtggctttgtgcacagggattaaaagaaggttcttgattgttttgtgtntgaaaaaaaaaaaaaaaaaaaaaaaaaaaaaaaaaaaaaaaaaaaaaaaaa

SEQ ID NO: 67065 - DNA, 1149 bp, Oryza sativa
  Clone ID: PAT_MRT4530_67959C.1
atggctcaagaagggaagctcgatctcttgttgaagatgatggaggatgcagagaagaagagggaggagacgggaggagtccgatgcgttgaatctagcggagctgcagtcgttgaaggcggtggtggaatcgcgcatacccatggtggaatagaagccaattgggttaaggtggctttgctgaatttcactggtaatgcttcattttggttgcaatcggtgcggcaccagatggtgggcatttcgtggatggagctgtgtgacatggtctgtcataagttcaccagagatagacaggcaaccctgataaggcaatggattcatgtgggacagactggcagtgtagctgagtatgttgaaaggtttgacaacttaatgcaccacctgctttcttatgataatgctctcacccctccttattttttaaccaagtttgtggatggattgaaagatgagattagaggagtggtcatgattcagaaaccagtggatctggatgctgcttgctcagtggctatgcttcaggaggaaatcttggatgggaataagaaaatttctttcaggaaggctgagggtactagcttcaccaaggctttcactagaccagttcagggcactgtatgtcagaagagtcctgtggcaacgcctggagaggaaaagagaatcttggagtctgccagaactactcccaaggatgacaaggtttctcaattaaggtcttatagacgttctaaggggttatgctttacccatggtgaacgttggagtaaggaccataagtgtgctcagaccgtccagttgcatgtggtggagttagaggcatttcaacttgaggaagaaacagacagtttggagacaatccttgagtctaacccagaggagaacaacctcatgaccatctcagttcatgcttggaatggcactgattcagcccattctcttcgagttaagggattaatacaaggcactgaacttcttatgctcattaactctgggagtacccactcatttgtcgatgaacagatgattcaccattttccaggagtggtgtccacaactccgccagttaaggtcagggttgctgataaacaacttcctgactgtgttggtggcttcaaggtagatgctatcgatccaattttaagctaa

SEQ ID NO: 67066 - DNA, 378 bp, Oryza sativa
  Clone ID: PAT_MRT4530_6795C.1
cgccaagtggttggtgaaagggccttccgaccgtggaaacgaatttggccatggggttatcacttcaaaagacccaaatcaccaatccctttcgtaatattcaagaatcgcagggaagcccatccattcttcgtgctctacccgttgacagtgctcagccaaatgcttataggctttcaagggaggactctaggcagtgtaaagttcaaccccggcagataaaatggcatgtctttgctccaaggcgtggcacacagcagtatgctgagtggcagatcaacgaaaagtaaactaaatgtgtaacgatcttactgtaatgaataatgtaaaaaaaattgcctacacctctttttccaataaaaaaaaaaaaaaaaaaaa

SEQ ID NO: 67067 - DNA, 279 bp, Oryza sativa
  Clone ID: PAT_MRT4530_67960C.1
atgcggcggtggatccggctgccgctctgcgccccatgcacatggatccagctacagcggcgcggatccagcgcggttgcgggcggcgcgtccgcggatccggcgcccccttcctcccgcatggatcctgcacgggtgaagactatgggcaggaggcaagatggcggcaaccttcgcggcgcttatggaattaacgccaaatcaatgcacgctatgatttcgcagtttctggaccaacggatccggcgacatggagttgagttctatccggtgaattaa

SEQ ID NO: 67068 - DNA, 583 bp, Oryza sativa
  Clone ID: PAT_MRT4530_67961C.1
gcacgaggctctttctctccttcgcagacgcaccttcatcttcgctctcgctgccccgggcctgccccgggttcgggcggccggccttctctccccgcgagtccgcgaccccgcacgcgcggccggcgagcaagcccagaggcgcgtcgccgagcccgacctagcatcctcggttggcgcggcctactcgagcggcgcagggccagcgagagctcaggttcggaggggggctatgcgggaggcatccttccaccgccgacctccacctcggccggaatagaactgaaggtcaggagtcaaggtatatcagatgatggatctgtccacgacttcagtagtggctgctaaggcctacaagtacagagcagaatcacttgttaaggactaccttcttgcagattgttatgtttcatacactgctgtgcttggtgggatcctgatgtgcaaaatggtctatgacatcacacacttaatcagttcattgtactacaagggttatggttctcttacgaaaatccaaaagcttgagtggaacaacagtttacctagtattcttctccaacctattctctgatgagctgga

SEQ ID NO: 67069 - DNA, 595 bp, Oryza sativa
  Clone ID: PAT_MRT4530_67962C.1
cggcacgaggcaattagctaagaaacactactaatatgtgttccatttggctagctataacattttggttgatgtttcaactaccagcgtccatgtttgtcgcaagatcaacaaaggccaatgctagtgatatggctacaatgcgagtgctggcccaattcttgggtgctgatcgtgctctagggtggggcagagcatcgcctgacccttgcgatggtagttggctaggtataacttgcgacgcttctggttacgtggtctacatcatagcaaacaacagtggcttgacggggcatctcccacgggaaacacgcaacctttcaatgttagctgccatctacctcaacaacaacagtctgtctggcgacgtccctccactcggccctaaccttatggagatatcgttgtcatacaaccgtttcatgtccatctcaccggagttcttcaaaggtatgtcccttccatccatggactatccctgattcatggagagatatggaaatcttgttcagtttgtcggccgtcaatgcaaatatcattggcccaatccccgagttcgtgggtgatcacttcaagtatctcggaacactgaagc

SEQ ID NO: 67070 - DNA, 2985 bp, Oryza sativa
  Clone ID: PAT_MRT4530_67963C.1
cccgatcactgcgatatttttaactgacccgtgcttacaaaattcaatactcccaggaggccttaatacagttcacctcatccaaaccccactaactaataatgcataagcaagcaaaacacgtggatcaaaacaggggaagggccaaaataggcttttccgagaggcctaacgaaaaacccagaagacggcatatttacagcagcgaatagccagcccttcgtcggtgtcccttcttattccaggaaggacacaaaagctggtaacttagctagaacgccaacgccacaaagcacaaagccatcaggatattcagatagtcactctactctgtgttctgtgatatcacctcgccgaacttcaggaagagctccgcatctgacgcgctcgacgaattttcacaggagagcgtgctgccgcctcgtaggctcacgtactcgttgacatagctcggaaccgtggacgactgtggcaatgccggtggcagtgccggctttgagggcgggtcggggtagacgaggcagtccaggacacgcacgacctcgtgcatcgtcggtcgatcagaaggctgcctcttgctgcaaaggagcgccaactggaacaccttcttgacctcgccaagatctttgcacgtatcggcgatgtctgggtcgaccatctccatgaccgtgttgtctgcggctttggataggatcaagtgatggagattgcactcattatcgactggctttttgcctgtaagtagctccaggaggacaatgccatagctgtagacatccgatttctcgttgaggcgggatgtgcatgcgtactcagggtcaatgtagcctatagtacccatcacataggttgatgtgtgtgtctttgaggtgcacaagctcttggcaataccaaagtcggcaagatgtgcttcatagtccttgtctagaaggatattcttcgacttcacatccctattgaattatccgtgggttgcagtcatgatgaagataagccagaccttgtgccgcaccaagagcaatccggagcctagcctcccaatctagtttttgcttcttggatgagcctgcatgtaaaacatcccagagactgccattttccaagtagtcgtagaagagaagattcccagcaggtgatagggaatacccttgaaggctgacaagattccggtgcttgatacttccaacagtctcaagctcagtctcgaattccttcaggctctgtgggtagtgagcatacaatttttttattgcaaccggcttgcagttcttcagtacacatttgtacactgtgcttgatgccccatacccgataatgtacttctcgctcaaattttcagtcatcctcattatatcttcgtacacaaggaatgccatgttcatgtgaaggattacaagctttggaggaacacttacttgatggtagtgcatggatatctggtttgcttaaagacacatctttgggaacttgtgcccagtgtggccagcaagcagcagctaggatcatcagcaggataacaagcccagctacagcaatcccaagaattgcagaccttgagacagaggatctctgcacatgactggtggagtagcacgaagaaccaagccaatagccacagagtccaggattacccaagaagctgtccggtgaaaatcgtgaaaaattattgtctgttggtacaatgccagccaggttgttgtatgatacgtttaagacattgagactgaagcagttaataagtgaagaaacatccccagttatattattactttccagttttagcaatatcaggttttgcagcatgccaacctcttgtggaatcaaaccaccaaggtgattactagacaaatcactaaaacagaggaagaggaatatctccatgatactcctcaagtttccaaactcagcagggatgtatccaaccaaattattattgctaaaatttagtctcaaaagatgctctaagctcccaattgccgagggaattggaccagcaaccatgttacaggataagtccaatgtgtccaagtttttcatttttgctagttcaatgggaatggctccactaagatagtttgatgatagattcaagctaatgagattcatgcatgagcttatattatcagggattggtccttcaaggttgttgtttgccaggttcaagtaatgaagtgtcgacatattaccaagctcgggtggtattgatccagttagcctattgccttggaggtacagtttctcagtgtatgttaagttgccaagtattgatggtattggcccagacaattggttgaaactcagatcaagcactgcgagcgcctgcataaggccaattactgatggaatagggccagagaaattgttcccttgcaaagacaatgtagccacttgtaggaagccaatgttgaatgggatttctcccgtgagccggttgtaagacagatccaagtaccacaggccagtcaactggcacatctcaggagagaggcttccttctaaattattgctccgtaatccccgaactatttgccctacattacatatgttcaaccgcaagtactgaagaacctcattccagtagattaacctcggaatctcaccatttagcttgttttgagccaagtccaaaatcttcaaatttggtagctgagagagtgtcgacgggatcatccccaccagctggttgttcttcaagatcagagttttaagcgacgtgcaatcgccaatctcatcagggatctgcccagaaagttcattcgacttcaagtcgagcgccgcgacggcgaaggtgacgttgtcgcagagcacgccgcgccacgagcagtagcgccgcggcgcgccatcgccggcccaatcgtacagcacgttgtccacattgcggaaggacttcttgatctccagtagcgtttgtccgtcatcgtcggcggcggccaccgcgaggagaatggcagcgaggaggaggcgagtggtggtggtcgtcgtcat

SEQ ID NO: 67071 - DNA, 1031 bp, Oryza sativa
  Clone ID: PAT_MRT4530_67964C.1
gtcgtggcgtgtttttgttctcgcctggtctcgttcgaggccaaacgaaggtggggcctaccggccactcgcaggcgaagctcaaaaaccgacgacgggcgaaagcccagcaacagtgaggaggtagcttgcctgcaatgatggccgggaccctgcaggtcgccggtggctgcctggcgcccctcctccccagccgacgagcggcggcggcggtacgcccgccacgcgcgtccggggcgtcggcgtcggcggcggcggcggcggcggcggtggaggaggacggcaaggtgaggctgggtgggtcggacgtggcggtgaccaagctcggcatcggcgcctggtcctggggcgacaccacctactggaacgagttccagtgggacggatctcagtaggttaccttgatggtcttggagatgcttatgagcaaggtcttgtaaaagctgttggagtctcaaactacagcgaaaagcgtctacgggatgcttacgagcgcctcaagaagaggggagttccacttgcttcaaaccaagtaaactacagtttgatatacaggaaccctgaagaaaatggggtggttctgaactggctgatctgccaaggcaacgttgtgccgatccccggagcgaagaatgcagagcaggccagggagttcgctggtgcgctcgggtggagcctgacggatcaggaggtggaagaactgcgttccatggcacgagagatcaagccggtcatcggattcccagtagagaagttgtaatttctagtgagtttttcttctactttgggtctccgagaacatccgtatgaagctcctcggcacccaagacgggccagcctctggtcgaagccgcgttagggacgtcatgctcccgcgacccgggaagctcaccgacaatgccgcctcgatctactcaagaggatgttggcgtgcgggaggagaggatgacaccagcgtgtgggggaagaggtcggttgtggaagagaacgacaccgacgtgtggaaggaagggaggaatgagcttcattga

SEQ ID NO: 67072 - DNA, 1458 bp, Oryza sativa
  Clone ID: PAT_MRT4530_67965C.1
cggggcggaccaacccgtccggcgcttcccggccattttaagtggaattcaagcaaccgccgccgcgccgaggccgaccaacagtgaggaggtagcttgcctgcaatgatggccggaaccctgcaggtcgccggtggctgcctggcgcccctcctccccagccgacaagcggcggcggcggtacgcccgccacgcgcgtccggggcgtcggcgtcggcggcggcggcggcggcggcggtggaggaggacggcaaggtgaggctgggtgggtcggacgtggcggtgaccaagctcggcatcggcgcctggtcctggggcgacaccacctactggaacgagttccagtgggacgataggaaattgaaggctgctaaaggagcatttgatgcgagtgtcgattgcggaataaccttctttgatactgcagaagtatatggtgcagggatatcaggagccataaattcagaaagtttactaggaagattcatcaaggaaaggcaacagaaagaacaggtcgaagtagccattgcgacaaagtttgcagcccttccgtggaggcttggccgaggaagtgttatttctgcactgaaggactcgttatcccgccttggcgtctcctcagttgagctctaccaacttcattggccagggatatggggaaatgaaggttaccttgatggtcttggagatgcttatgagcaaggtcttgtaaaagctgttggagtctcaaactacagcgaaaagcgtctacgggatgcttacgagcgcctcaagaagaggggagttccacttgcttcaaaccaagtaaactacagtttgatatacaggaaccctgaagaaaatggggtaaaagcggcttgtgatgagcttggtattactttgatcgcatattccccgatcgctcaaggtgttctgacaggaaaatacactccaaataatcccccaactgggccccgtggacgaatatacactcctgagttcctgaccaagctccaaccacttattaacaggattaaagagattggaggaagttatgagaagaccccaactcaggtggttctgaactggctgatctgccaaggcaacgttgtgccgatccccggagcgaagaacgcagagcaggccagggagttcgctggtgcgctcgggtggagcctgacggatcaggaggtggaagaactgcgttccatggcacgagagatcaagccggtcatcggattcccagtagagaagttgtaatttctagtgagtttttcttctactttgggtctccgagaacatcatttacataaatacacaatgatctagacatacatagataggaaccatgtgtagtctttggaactgaaaattaagatgtcttagaaaataaccaaaatttacagtctgagtagcgtacatgcatgtatgctcatcgaccatattacaactaagattggtaactggattatcttcaag

SEQ ID NO: 67073 - DNA, 503 bp, Oryza sativa
  Clone ID: PAT_MRT4530_67966C.1
ggtaaaaaaatccttcaaagggtttccgggaaaaaaaaagtccccccaagggccaagggtcgacattttgaaccaaaaagggtaaagggccccggtttatttttttttccccgggggcccttacaaagggaaaaaagggaagggggggccccacatttattacaaaaaggaccggggatacccgggacggggcccatcggctaccaaggggggggagggaaaaaaaaaccttttttggggggggggggggggctcaagaagcgaatccccggaaaacagcccctttgaagggttcccccctcaacttaaacttggcagcgggggggggatcaaggacagctttaactgcttttttggaggcaagggaagttggagaaacttttttttaatttccttgggccctcccgaaagcagttttggggaaaattctccgcttccacgggggagcttaaacctcatccttttttggggggggggcaacacccccaacggagtcgggggcc

SEQ ID NO: 67074 - DNA, 331 bp, Oryza sativa
  Clone ID: PAT_MRT4530_67967C.1
ggacgaaaatgaaacccatgatttaaaaaaactaggtgttccttttttttaaaaggggcccaaaaaataccagtattaatttttttcaactgatctaaaggacccaactagtttggaaccaccaaaggtacagaagggtgttacaaagttggaacacacccctattcctactttatttttaaactgatgtacagaacgggccttaatatactccggggatacaaaacaatgcgcctgaattccaacattgcttatgggggagtacatttttgaacttgatgcttcggcctactccttaacagggggatccacccaacggccattggccctt

SEQ ID NO: 67075 - DNA, 135 bp, Oryza sativa
  Clone ID: PAT_MRT4530_67968C.1
atggagatcatgaagagctgccagagccgcaaccggtcagaccgagccgatggcggtctgaccgagccgtggacgggggcgtgcgatggcttcgtggttgagcggtggagttgggctcgcctcaacggggattag

SEQ ID NO: 67076 - DNA, 683 bp, Oryza sativa
  unsure (1)..(683): unsure at all n locations
  Clone ID: PAT_MRT4530_67969C.1
atgggcccccgcgaatttccgggtacggaggaagggatgaaaagctacccacagggtctcgaggatccatcggaggaggaggagggaggggaggcgcgcggcgccggggggcggatcggctgcgggtgcatggtggaggccgccgcggggcgccgcaccagcgcctcgccgcgggcgcgcgcngcgggcccggggcccgcgcggggcgcggcgggcnccgccgcggcccgggccggggggggggcgggggccngcngccggggcgggggcgcgcggcgcgcccggggcgccgggagcgcacgnggccgcnggggccccgccggggagggggangacggnaaggaggaggggccggcgcgggaggcacgngggagnagcgcggcgcggcggaagggggagaagaagagaggcgggggcggcaggcgaggcaagagnagaaggaaggaagagganggcagannaaagccnaggcgggcccacnnnccacgggnnggggnggggggagaaagnaacgagnggnaagggcgcaaggaggnnaaggggaggagggnaggagggacaganggangacgggannnaaagagggncggaggggggacgnccaaaggacgggaggaagnncgggacgcaccnacggagnaagggaagggggacggagcagaggcagatcgcgggaccgagcg

SEQ ID NO: 67077 - DNA, 5766 bp, Oryza sativa
  Clone ID: PAT_MRT4530_6796C.1
atggccgagaagccaccgctgtcgccatcctcggctagcccaagcactgttaaagaaaagatccagaagttggggttgactgacatcaatgaaggaaacgtcgtgcctatcgatccagagaaattcacacctgagcagaagaaggattttgaagcaatgttgcagcaagcccgggatcagttcttgaactcattcatgcagacccgcaagggaacattggttcagaagtataaagtaaaggtagttgccgatgaccctgggaccagttcttccaaaggtgaagacgggaaacaagctccagatggctcggctcgactgagtgacaaaggggctaccgacggttctctaggaagtcaaggtgacaactctcaaggggtccatggagttcaaggcgatggagtgcatggagttcaaggtgatggtgctcaggggttgcaagggagaaatcttaatcagaatagtgatgcggcacaagattttttcaataatttccaagaccgggtcgactatgctgtgcaccatgctttgatcaatcagtctagggtgttagtcaataccttatcaaacatgatgaagtcaatagccgatggatcaatagttgagcatcaggctgcaggcccagtttattttcaaggaggtgtctttccaaattatcggcctttgatcactaatacccaaccatctattcaggcagttccccccgtcgcaccatcagctcagccgacggagccggcatcgactcccttacctactccgtcagtattggcaccaggccagctggtaaaccctcggttgttaatgagagagcagccacagcatagtgggcaggttgtgaatcggccaacgcaagatcagattgctgccatgtttctgccgcctcaacctgctattgatccaatacagcagcagccgattcaacagacactcccgagtcagcaggttgtacaaccaatccagcaacaagttgtgcaaccagtccagcaaacgccaccaaggcaacagcctccgcggccgattcagcaaacgtcgttaagacagcaaatcgttcagccgattcagcaccaaggctcaatgagcgtatcggccgggggcaacttgaattatcaaaatcatcatccttccccgcaagcccaatatcagtcagggggactggctcaacctcagtttgtgtctcagtacggtcagttcgagcccatgcaacaacagtcacagggagcagctcagcaacgaccgtgggccgatgtgattgctgatgtaatgagggaacagtttgggcttaaaccaaaagagactggaagcttgtatcggcagccttaccctgagtggtttgagagagttcctctccccaatcggttcaaagttccggacttctccaaatttttgggacaagatgggtatgattgcacgattagggagaaattctcgtctgaagactttgatagcttgtcacatctgatacaaaaggtaaccttgcatgagcataggtctgcggaggctaggaaaagctctaagaagattaatcatgtttgtccctacatgtatgggtcggatgacgatgaagatgactctgagatagctgcagccgaatgggtgaggagtaaaaaggtcataccgtgccaatgggtaaagagttctggaaaggaagagaagtatgattttgatattactaaagctggcaagatttttgatctgctactccgagagaagcaaattcaactccctgctggtcatacgattccatcggatgaggaattaggcaaaaagagatattgcaaatggcataattctgggtcccattctactaacgattgcaaggtgtttagacaacagattcaggtggccattgagggaggcaagattaagtttgatgattccaaaaagccgatgagggtcgatggtaacccatttcccgttaacatggtacacacagctggtcgaacaactgatacggggcgcatgaggggttatcaagtaagttcagctagaattataaacaaatatcaaaggaaatacgacaagcaacaggaaaggcatcatgaagaagataatggtggctttgatcctcattggggctgtgagttcttcaggttctgttggaatgaatgtatgaggttaccatctatcgaggattgtcctagatgcagtgatgttgcagggggttcaagccgattgtacgatggaggaaattggccaaaacagacaagagtacctgttcatcagagattgggcccagtaaaccaacgtggtgattcggaagatgacgaaaataagaagactcaatggtgtcctcctggtatttttacgaaaaatcagaaaagaagggttcaaagattgaggagtagagaacgcttccaggaggtcgagcaagaaattaatcatcggctgaagaaagcaaaaccgaggcaggagtggcgtgttaagaatcaggctcatgtagccgatgatgttgcagctgatgaggcaaagaggttggtaaaaggaaagagtgttgtgacggcactagttaacatggtttttaccttgccaactgaattcgggatcgatcaagccgatgtcgacgaggtggaagaggaatcggctaagttggttctgtcaccaaaacaggcggtgttcgagaagcctgaggggacagagaatcggcatcttaaaccattgtatataaatgactatgtcaatgggaagccgatgtctaaaatgatggttgatggtggggccgcggtgaatttgatgccttatgctacgttcaggaagttgggtagaaatgccgaggatcttatcaagataaatatggtgctcaagggctttggtggcaatccatcggaaaccaaaggtgttctaaatgtggagttgacagtcggcagtaagactattcctaccacgttttttgtcatcgatgggaagggttcttacagcttgttgcttggaagggattggattcacgccaattattgtattcctttaactatacatcaatgcttgattcagtggcaaggcgacaaaatagagatcgtaccagccgacagccagttgaagatggagaacccaagctattattttgagggcgtcgtggagggttcaagtgtctacactaaggatacggtagatgatctcgatgacaagcaaggtcaaggttttatgtcggccgatgatttggaagaaatagatataggtccaggcgatcagccaaggccgacatttattagtaagaatttgtctccagaatttagaaccaagctgatagagctcttaaaagagtttagagattgcttcgcttgggagtattatgagatgcctggactcagccgatcaattgtagaacatcggctacctatcaaaccaggggttaggccgcaccagcagcctccgaggagatgcaaagccgatatgcttgaacctgtcaaagctgagattaagcgtttatatgatgctagttttattcgtccttgccgatatgctgagtgggtttctagcatagttcctgtcatcaagaagaacaacaaggtgagggtatgcattgattttagagatctgaataaagctacaccgaaagatgaatatccaatgccagtagccgatcaactggttgatgccgcgtcagggaacaaaattttgagttttatggatggaaacgcagggtataatcaaatttttatggctgaagaagatatccataagacagcttttagatgtcctggtgcaatcggcttatttgaatgggttgttataactttcgacttgaagagtgctggagctacatatcaacgggccatgaattatatttatcataatctaatcggctggctggttgaggtctatattgatgatgtggttgttaaatttaagggaataaaagacgacatagccgatttaagaaaagttttcgagaggaccaggaaatatggcttgaagatgaatccgacaaagtgtgcttttggtttatcggctggccagttcttgggatttcttgtctatgagaggggaattgagataactcagagaagtatcaatgcgatcaaaaagattaagcccccggaaaacaagaccgaattgcaggagatgatcggcaagattaattttgttcgaaggtttatttctaatttgtccggaaaattagaaccttttacaccattgttgagattgaaggccgatcagcagtttacttggggggcagagcagcaaaaggctttggataatattaaaggatacctgagttcccctcctgttttgattcctccacagaaagggataccttttagattgtatctgtcggccggtgagaagtcaatcggctcagtcttgattcaggagttggatggaaaagaacgagttgtattttatcttagtcgtcggctcttggatgcagagactagatattctcctgtggagaagttatgcttatgtttatatttttcatgcacgaggttaaggcattatttactgtccaatgaatgtactattatatgcaaggccgacgttgttagatacatgttatcggctccaatattgaaaggaagggttggaaagtggatattttccttaactgagtttgatcttcggtatgagtcatcgaaggcgattaagggacaagctatagccgattttattgtggaacatcgtgatgattcaatcggctcggttgaaatggtgccatggactttattctttgatggatcgggggcatgtttcaagtttgcttatactattaaaccttatgcgactaataatcaagctgagtatgaagcagtgcttaaagggttgcaattgcttaaggaagttgaagccgatgctattgaaatcatgggggattctttgctggtaatcagtcaattggcaggggagtatgaatgcaagaatgatacgttaatagtttataatgagaagtgccaagaactgatgaaggaatttcggctggttactttaaagcatgtatctcgagaacaaaatattgaagctaatgatctgacccaaggggcatcggggtataagccgatgatcaaagatgttaaggttgaaattgcagcaataacagccgatgattggagatattataaggggtgtcaagattgtcagaagtttggggcaattcaacgagcgccggcgtcagctatgaatcctattattaaaccatggccatttagaggttggggaattgatatgatcgatgagtttgttcagtttgccgatagcgtgggtatcaaattattgaattcttcaccatattatgcacaagctaatgggcaggctgaggcatctaacaagagcttgatcaaattaattaagcggaagatttctgattatcctcggcaatggcataaccggttggccgaagcattgtggtcttatcagatggcttgtcatggatcaattcaagttcctccttataagcttgtttatggacatgaagctgttttgccatgggaagttagaatcggctctagaaggatagaattgcaagatggtttgacagccgatgagtattataatcttatggccgatgagagggaggacttggttcaatcgcgtttacgagcccttactaaggttaccaaagataaggaacgagttgctaggcactataacaagaaagtagtgcctaaggatttttcggaaggtgaacttgtatggaagttgattttaccgattggaactcgggataacaagttcggcaagtggtcaccaaattgggaaggaccgtttcaaatctataaggttgtgtctaaaggggcatatatgttgcaagggcttgatggtgaggtttatggatga

SEQ ID NO: 67078 - DNA, 615 bp, Oryza sativa
  Clone ID: PAT_MRT4530_67970C.1
atgggcaagtacatgcgccaagccaaggtggtggccgccgcagtcatggagctcgccgccgttgcccccgcgccgctcggggtgcgcacccgcacccgctccctcgcgctgcagaagaggcaaggaggagagtacctcgagctcaggagccgcaggctcgagaagcttcctcctcccccgccgccgccgccgaggaggagggcaccggttacgacccctgatgcgccggcggcggagagcgcggaggcggagggttcattcgggggggggggagaacgtcctcgagctggaggccatggaaaggtccagtcctgtctggcggatcaagcgcccggcatcaccggtggcgtgcttgatccgccggcggcgaagcacgccaccggcactgttgcggacaggaggccgccgcttcacaaggacaagccaaccggtggcgccaagaaaccccacacctccagcggcggcggcaggatgtgcgggagcgtcaactcctgcattgggtaccggcaccaagtgagctgccaccgcgccgacgccaaattcaccacgcccgccgtgcctttcggcgacatcctcctcacctgccggctggcttgccaaggaggagagaagtga

SEQ ID NO: 67079 - DNA, 474 bp, Oryza sativa
  Clone ID: PAT_MRT4530_67971C.1
atggcatcccgttgcttctcgctagtacccgccgaggcagccgttgcgcctctctgctcttgctttggcttctggatccaggaggtcaaggtcaaggcgtccactgttgctcctcctccgccgcaccaatcgactcgctccagctcctgcctcaatccttttccccgctcctatgcctgccgcccacatagctatcacagcgacgatggaggacgattcaagctcaatggtgtagacgagccttgtcccccgtactgctgctcccagtggtacaggagatggatggcaccacggcactcgctatcgtgccaaggaggaccaagtccaagatgggtgtcgtggggctatggtggtggttggtggcgacggggtgggagaggggggcttgggctgctagtgctgcagcagcagcggccagtgaggggatggaagcgacagcggcggggagatagtgtcggcggtggatgggaataa

SEQ ID NO: 67080 - DNA, 985 bp, Oryza sativa
  Clone ID: PAT_MRT4530_67972C.1
cccgcctccaggcgcgtccggccggcctctcgccgcagccgccctcggagccagacaaaggagagaagcgcgaaggcggcggcggcggcggcgcaaggcgaagatgtcggagaagaagcgcggcgccggcacccgcaaggacgaggtggtgacccgcgagtacaccatcaacctccacaagcgtctccacggatgcaccttcaagaagaaggcgccgaatgccatcaaggagatcaggaagtttgcacagaaggccatgggcacaacggatatacgcatcgacgtgaagcttaacaaggccatctggaccaatggtatccggagtgtcccaaggcgagtccgtgttagaatctctcgcaagagaaacgatgaggaggacgccaaggaggagctctactctctggtcacagttgctgagatccctgcagagggtctcaagggtttgggaaccaaggttgttgaggatgaggagtaaacttttcattgttatctgtcagttagcgcttagtgcatatttccatgattccagtcactatgctgagagcaaatttggaagtcttgctttagcgttttgttatctactgttgatgattcaagactgcattttcttaagcgcttggaattttgacatgtttgtcaaccttttgggatatatactccatgctatcgtgctgtgaacaaggatcactcttaagcttaaaaaaatgtctgttaaatgcggataataattttttaacttaaattacaccgcacctggaaaaccataagtctccggcctcttcctttgcttgcgtgcctttggccccccggtttcctgaccgggcctcctcgctcctccattccctgcgccctactgcttgctgaccaccctattcgcttaaatgcgggtgtggggttcctctatactctccttacaatctttcccttttttattttctttctttttactatcttttccgcacctataggctcttcttctgtactt

SEQ ID NO: 67081 - DNA, 627 bp, Oryza sativa
  Clone ID: PAT_MRT4530_67973C.1
atgtcggagaagaagcgcggcgccggcacccgcaaggacgaggtggtgacccgcgagtacaccatcaacctccacaagcgtctccacggatgtattgtttgctctaatgatttgatccattatgccccggacatagtcagcaccttcaagaagaaggcgccgaatgccatcaaggagatcaggaagtttgcacagaaggccatgggcacaacggatatacgcatcgacgtgaagcttaacaaggccatctggaccaatggtatccggagtgtcccaaggcgagtccgtgttagaatctctcgcaagagaaacgatgaggaggacgccaaggaggagctctactctctggtcacagttgctgagatccctgcagagggtctcaagggtttgggaaccaaggttgttgaggatgaggagtaactgtttgcacacattgcttctgatgcaacccttaagccattgggccactttgctgaagcatccgatgctcatagttatccaccaatctgtgctggcgactacgtcgaacaggaactatcacaaacggaacaacagtccaggctgatatgtatcttcattgctggaggctcacatgctgaaactgttgggttgttccctgcacagccc

SEQ ID NO: 67082 - DNA, 371 bp, Oryza sativa
  unsure (1)..(371): unsure at all n locations
  Clone ID: PAT_MRT4530_67974C.1
agccggtcggcgntggggcgtcatggacccccgtggcggcgacggcgagcgtgggacgtcgacggtggaggcatcgagcaggttgagcggtggctccggcggcgtgcggcgaccccgttggcgctggaggaggggcgccggcatgtcgatctgtctggagctggtcgcttggaggggcgtcggcggcgtgcaccgccaaggtcgagggcggcggcgtcatggaccccggcgacannggcgtcatggcctctcctgtcctcacgcctcttcttcctcctccttccttctctcattctttccccctctcctttctaccactgtggcgacggcggcggtanaaccgagaggctttttggaggaagaattgaggg

SEQ ID NO: 67083 - DNA, 2695 bp, Oryza sativa
  Clone ID: PAT_MRT4530_67975C.1
atgtcgtcgtcggcggcgccggcgaggaaagagaatggcaccgtcgccgcccccgccgcctcatccgccgccgccagcaacacgttccacgtgctcaactccggcagcgccgccgccgccgtcgcagccggacgtgcgtatgttcagtcgccgcgagcgacggcgctgcggtcgccgcaggtgcgagccatcaccaactacggcatgttcccgaccaccggcgcttcggcggcgaggacggccatggcggggcgaacgatcaatggtggcgcgtcgatgctgacgacgacgacgacgacgacgacgccaccgcacctgatccagcagctcatggtgttggctggctggaccacccggagtccgtggctccagaaccacgcgtccatgtcgccgcggggctcgccgtcgtcgttctcctccgggagattctccgacccccgtgggatgccgtcgacgttcgcttaccgaacacccggagctagtagcggccgcgttatcgacaacggcgccgtcgccggccgtggcaagcagatggccggaactagccgctcacttgagattatcgccgttgataccggcgccggaagcagcaagaacgcgtcgccggccggcggccatgcaaatgccggcgtggtggtgaaacgtttggcccctgtgctcgcgatgccgagtgccggagccgccggcaaagggaaggaggaggcggcggcggcggcggcggctccgtcgccaaatggccgcggccgtaagcgcgcgccgcccaaggtgagcaatgtgcccgcggccgggatccgacaagaagccgaggaagagggccaagaaggcggcggccgctggcagcaaggtgaccgtcccggctgacgtgatcatcgtcgacgacgacgtcaaccagccgagctcgaacaccgacgcgcaaagcaacgccgacgacgatctgaagaaggcggccgtcgcttcccctgcggcgacgcggagcaagaccagatcaaagtgcaagaccagcagcaacagcgccgccgcctcgccgagcgccaggtccagcgccatcgccgccaggaagaagaacaacgccacagcgaccggcacgacggcgacaccaccaccaccggaggcgaagaagcacaccgtgctgacctggctgatagacaccggcttcctcaaggacaaagcgaaggtgttctacgtgccgggcgacgccggcgccgccgagaaggtcatctccggcatggtcaccaagacgggaatccgctgccgctgctgcaacaccgtcgtccccgtggctgtgttcgaaacccacgccaggtgcgagcggccagggcagccatgggagaagctgctgctcatgtccgggaagccgctgtcgaagtgcatgcaggaggcgtgggcgcaggagcgggtgaccgccatgcgcgcccgggagaaggccatggcgtcgctggagcaggagaaggagaagagctcgcaggccaagaggaagctcgcgaagacgaagaagatgcagctcctcgacggcgtcgtcgtcgtctccacctcttctcctcgtcatcaggtgaagaagaacggcggcggcaaggattgcagcgacgacgcctgcggcgtctgcgccgacggcggccagctgctctgctgcgacacctgcccctccaccttccatccagattgcctcgccatccagttcatgatcaaatcttggttactgtttgacagacagcaactgacaacaatttacggccagcaaccgtggctccagacggctcctggagctgccatttctgccgatcatcagtactgccgtcctttgcaaagccctgggttcgagatcggcgcatactgcagcgaaacctgcaaaaagatgtcctctcatctatcagatatgataggagtcatgaaccatactgaagatggcttttcttgggccctcctgaagattcagaaggatgagctagtcacttctgaggacatgcctgtcattcttgagagcaatgtgaagcttgcagtagctctgggtgtactcaatgaatgctttaatcctgtgcaagatcgaaggactaagatcgatatgctccaccaagctgtctacagtctaggatcagagttcaaacgagtaaactatgagggattctacaccatggttcttgagaaggatggagaaatcatttcagtagccttgctgaggttccatggcaggaaactggctgagatgcctttcgcaggcacgctgccagcttaccagaaacaaggaatgatgcgtcgccttgtcaaggctgttgaaaaggtgttggcgtcgttgcaagtggaaaatctagtgatcccggccgtcgctgatctagtggaaacctggaagagatccttctccttcaggccaatgcaggcagaggtcagggacgaagccaagaagctgagcttggtcgccatcaccgggacgacgctgctgcagaaacccatctctgctcatcagcagcaaccagttccatcccggaaaggtagcagcagcagcagaagcaagcgcgcgtctgctccggcgacggtcaccggcagcagcaaggaagaggaggagcagatgacgacgacggcggctcgcctgaccgacgacgagctggcattcctggagatggcacccttgtgcagcttcaccgacctgttggccggaggcgtctacccgacgggtctccagcttctccgcggcatgaagtga

SEQ ID NO: 67084 - DNA, 515 bp, Oryza sativa
  Clone ID: PAT_MRT4530_67976C.1
gttcagtaacaatctattactacttccacaattctacatcgcacccagagttagacttacaataatcataggtgccgcatccaaataattcttacaataatcgtagctgcttcatccacataattcagatctagcgcctgaagtttcaagcttaacttgactttcttttttcttaggaggaggaccaaagctgggagcctgggtcctaattcacgcaagttacagatacttcaaaaattaatcttactcaacacggctgaagaataccttggcttgtggagaagctcgcctatattttattttgcaagttctataactgcctcttcattagatttcgaacaatcttcagctaggcagacatcatttttttcaagatttcttgcctttgacaaaataaactcaataaaatgcatctcacttaacttgcacgtcatatttctcacgtaaacacttttaagattggagaataagtcatcagtccactgtccatttagaaaatcattatcaacttcatc

SEQ ID NO: 67085 - DNA, 3312 bp, Oryza sativa
  Clone ID: PAT_MRT4530_67977C.1
ttatctaacatcctccctcaatcttaacctttctaggtctagattgtatctgaacttttcaagcaattgcagcggcagtggttttgtcagaccatctgctacttgatcttgcgtaggaacaaatgcaatctctagcaatctttgagatacccgttcccgtacaaaatgaaaatctatctcaatgtacttggttcttgcatgaaacactggattcgacgatagataagtcgctccaagattatcacaccatagtcgggaagccttgggtgcttggactccaagttcaggtttgcagtcttccattcccactcttttcaacacatcagcagcatacttctcctgtgttaacagaataccattcttgttcttgtgaaaacttctattcccaagaaataatgtaagtctccaggctctaggtgcttgcttcaacccatacagtgccttatctagcttgcatacatgattagacatagccttattttcatattcaggtggctgtttcatatagacttcttcctctaaaagcccatgcaggaaagcattctgcacatctaactgacgtagagaccaccctctagacattgccagagataaggctattcttatagtggctgccttgaccactggactaaaaatatcctcatagtctatgtcatatctctgtttaaatcgctttgctactaatctagccttgtatctatctaaactttcatcggctttccttttaatctcatagacccatttacaatctataatgttttggcctttagatgaaggaactaggtgccatgtctcatttttcattagtgccatatattccgcgccttgtgttggcgacgtggctgcacggggttggctcggcgaagagaatgaagtcccatcgccatcctcctgcgtctgcgcctccattctgttgctgctaggactgacagtacctgcatcatcaggatcagtgtcatcggaggccgtgtcattcctgccaatctccagctcgtcatgcccatcatcgcttgcagctccagatcctgcattattgcttccatttgcaccagaaaaatcattagcggcattagcagtactggctgaattagtctgttgatcagtcacattgtcacccccatgatcagcaggctgaaaattccgaaggtgagatggaagtagcaggatttcagaacggagttttgcaccggcattaggattaagattagcaaaggaaaacaccgtttcatcaaagatgacatcgcgagagatgtagacacggccggcagccacatcaagacacttaaaccccttatgaaagttgctatagccaaggaaaacacattgtttagaccgaaattggagcttgtaaacattataaggtctaaggtttggacaacatgcacatccaaaaatgcgcatagaggaatagtctggtttttgttggagtaacttttctaggggtgtagcaaagtcgataactttactaggtatacggtttataagatatgtggctgccaaaaaggcttcatcccagaactttaatggcatacttgcaaaagctagtagggcaagtcctacttccactatgtggcgatgtttacgttcggctgaaccattttgttggtgtgtatggggacatgagatgtgatgtgtgatgccggcttgggcaaaaaaattgtggagcttttggtactcgccaccccagtcggtttgcatagtaataatcttcctattaaacaagcgttcaacaagagcttgaaattcaagaaatttactgaaaacttcagacttgaactttaataaataaatccaagtgaatttactaaaatcatcaataaaactaacataatacttgtatctccctgcagattctggggcagcaccccatacatcagaaaacacccattgcaaaggatactcagacttatgaatggactcagaataaggtaattgatgactcttagtcttttgacaggcatcacaaacagactctttgtttgactgacttaaacatggaagattattactagcaacgactacgggtgacgggtggccaagccggctatgccatctctcataggaaggtttcacagcaccacagacttgctttattctggatgaagacttggaaggtggaacagggtaaaggccttggtggcatcttcctctaagtagaggtatcttcgtggctcggtcctttacataaaagaattttggatgaagttcaacataagctgcgccacttgcagtgtgaacttgatcattgcccttgtatttctcccgaatgatgagcttgtctagatcacttgtgatgtgatctgttgcaccggtaccaatgtaccagtttgagtccacaccgtaggagctcgtcgctgctgccacgaacttctcatcaggcacgaagtcctcctcgtacctatgccagcagtcggccaccacatggccgactttgaaacacagctgacagcgcggcttgttaccgcgtcctcctccagaattttgcggcgcattgccgcgtccctttccgcgaccgtggttcgcaccaccgcgaccacggttgaagccgccaccacggccccctttgctcaccgtattcacaaatgagtaggagcccaccaagccgactcccggtccatcaccgcaaatactctcccgaggcatcgagtcaccgctcaacacaagccggtctgaccggctgtcacacctttcaaagtttaaaagctgggcatacaactcagaaacagtaattggttctatcctagtaacaagagcagagacaactgaattgtaatcttcatctaacccatttactatgtaggcgaccatatcatcatcgtccagtggttttccagaggcagcaaattcatctcctaagctcttcatcttcccaaagtattccgcaatggaagacgtacctttctgcattgtggtaagtgcgagtcgcacgttgatggcgcgcgctcgtgtctgagaagaaaacatctcctcaatggccctccaggcctgcgctgcattccttgatgcagcaacttgtgtcatcacctccttggataaggaggagaacaggtacccaagaacctgctggtctgtggccagccaggattcatatgcagggtttgccgtcgtcttcgtcttgccatctttgtcggtggtgacgagttcggcgaccggcggagcagcttcgccggtgatgtagtgctcaagccgcgcacctcggagggtggcaaggacttgcgcctgccagatcgcgtgattctgcttgttcagcctttcagggacctgaaggccgatcagcggattcacggctgtagtcgaggatgagctcgccat

SEQ ID NO: 67086 - DNA, 450 bp, Oryza sativa
  Clone ID: PAT_MRT4530_67978C.1
atggcgctgctcccgcggacggcgcggctggcgctgctctcggcgccgcgggcgtactcggcggccgctacgggggcgggcgcagccccggcgaggtacgcgggggcgccgccgccggcgccccagtcgaaggcggccgagttcgtgatctccaaggtggacgacctcatgaactgggcgcggagggggtcgatctggccgatgacgttcgggctggcctgctgcgccgtcgagatgatgcacgccggcgcgtcccgctacgacttcgaccgcttcggcgtcatcttccgcccatccccgcgacagtccgactgcatgatcgtcgccgggacgctcaccaacaagatggcgcccgcgctccgcaagtcagtaccaccttcctcccctcggctgctcagatttcgcgttcctgtgttccgatctgggaatttggtgttgcccagcttttag

SEQ ID NO: 67087 - DNA, 244 bp, Oryza sativa
  unsure (1)..(244): unsure at all n locations
  Clone ID: PAT_MRT4530_67979C.1
aacttatttgggggagtgagataactgtactagtccatgtagacggtaatacaggttggtacggctttacaaaaagagtagttcaccatatttttcccatcctgcactttttgtggaacccctgttgcagttaaatcgccatcagcatcatccatattcagtcctgagccaatttcaaacctctagataccatcaatttgcttntgaaggcttaggtgggttgtttcattattttttttagcac

SEQ ID NO: 67088 - DNA, 804 bp, Oryza sativa
  Clone ID: PAT_MRT4530_6797C.1
atggcttctgatggtcctcaagagaactgtcagtgcagtttttgtcacaaggacttcgagggtagaagttcttgtgcagagcatgagctgcagtgcaagaacaatcccgacgtgcattcgcaaacagaaccttcaggcaatgctcagggtggcataggcagcttggatgttcatgtaccaaggcgaaagcgaacagccagaaatcagccgctgccagaacaacatctgaagaagccagcttctgattatgctcagggtggcaccagtgatgcaccagagactccaccgaagccaacaacaagtgaagtgaaagtggattctgctgtcaatgctcctgatatcactattcctgacaacaaagatccttctgtgatgcagaaacaaaagaagaagcttgatctcaatctgcaacctcacagtgacagttcagatcaggaggaacaggccgacaatttcagctctatcaatgatctcagtacaattgatacaaattcagacaagaagaaaaataccatcactggtgttgctgataccaatattcctgaccacaaagatccttctaggatgcagatgcaaatcaagcttgatctcaatctgccacctcacgacgacagttccagctctatggatgatctcaaaactctggctcccactgataccaattcagataaggagacgaacaccggcaatggtggtgttgataccaatattcctgaccacagtgatccttctgcgatgcagacgaaaaacaagcttgatttcaatcttccgcctcgcaatgacagttcagattcattagtctga

SEQ ID NO: 67089 - DNA, 493 bp, Oryza sativa
  unsure (1)..(493): unsure at all n locations
  Clone ID: PAT_MRT4530_67980C.1
aagataatgggattaaccgggctttacacctaaagaatgtacacagcctacgatgcatgtctgctcaacctgaaacttttaataatatcctggtttgtttgcccttatagcaatttgttggttttggagtgtgatcagggggtgtgtgatgggtgcggggagtaagtcctgatattttagaggagttttaagcagataaacaaaattgaaaattttagtgaaaagaaactgaatntgtgtgtggtggtgctagcggctggtggaaagggttctgtggattgaaaggaatgatgatgtgtttgcaaacatagataaaatctccattgcaggttatagacaaatctttagctcttttgcagagctgaaaggtgctgcagagaggacgagatcaagaaatgctgacaaagctacgaccagccagttgcacctaaaaacctaagctgatagggaaagaaaaaggcgggcaattcactttatacactccaacactccc

SEQ ID NO: 67090 - DNA, 150 bp, Oryza sativa
  Clone ID: PAT_MRT4530_67981C.1
atggcttcagctcaggagcttcttgtagccaccaactccgtcgtcgtgccctacctatgtgatagaggaggtgaaaaagtagttgccggcgctgacaaaggtaaagctggggtggacttttcgtactcgtggatgggcctaccaaaatga

SEQ ID NO: 67091 - DNA, 276 bp, Oryza sativa
  Clone ID: PAT_MRT4530_67982C.1
atggaggatacagccatcgccgacgagctccgtcgtgggacgtggatgacgaaggacgcggccgccggcgacgagctccaatgtggcgtggacggtggaggatgcggtcgtcagcgacaagctccggcgtggggcgtggagatggaggacgcggccgccggcgatgagttccgacgtggcgcggacgatgaaggatgtggccgccggcgacgagctccggcgtgggacgtggacggtgggaccaccggcgacgacgctttgatgctcggctcctga

SEQ ID NO: 67092 - DNA, 469 bp, Oryza sativa
  unsure (1)..(469): unsure at all n locations
  Clone ID: PAT_MRT4530_67983C.1
acctnanctgcaactggctaagatgcancgactcctgcgttttaagaaacagcaagctcctgcaccgactaaatgccttaaaattttttgtatgcctggctggctggtgttaatcntgggtaaatgtttttaatgccatctnggggccatgttatgtttttgttctaccttccaaatccgaactaaatcctaattgcaaactatggggcantangnatnaanaanaannaagaggagnactccgaaggggggggggccccgggtaccccaatttccgcccctaattaagnngaagttccgtatttnacaaantncacttgggccngncntttttttnctaaccgttccngngaactgggggaaaaaacccctgggccgttttaccccaaaccttttnaaatccnccctttgccagnnnaanattcccccccctttttcngcccaagcttggggcgnttaanttaacccn

SEQ ID NO: 67093 - DNA, 850 bp, Oryza sativa
  Clone ID: PAT_MRT4530_67984C.1
gtgtccatgcacatctccccagtaatgatcatttttcttgcaattcccattgatcgggtcatttgagttaaataaccaagcgctaaccaatctcacgtcttcgtctggtgtccatgacagacgcttttctttcctaacctcatctccattatcaatgttaattacatttttgcctttagaacctgatgcagcttcttgagtatttggattagaatgtggtgccaggagtgaagtctggtcattttggagaaggcttacatatccaccgagtgaacgctctaatggatcgttggatgtattttgactgccttggccatctggtggtgttggtacggcacccatccaagctccatatggggaaacaaatgaattaatctgcagtggaggtgctgtccaccaacggagacgacggcggaaagtgcgattttacttggaacagccatggcttcaccagacggagggaaggcgacgccgggcttcactacaccaccccaccaaggaacgccgggaggcaaagcttgaggcgttggaggagcaatctcccgcttggatctatggctcatcacttgaggtttgaggagatatgaggattagggatgagtttcaggaagactgagcgacaagcggtggatttatggattaggggcaaacttggcttgggtctaccgcgggaataagagggtgatttggcgcgtaaactacgcgggaagattagcagccatggggatttggcgccctggagaagaggagagcgcgcgaggaggaagacgcaggggcgtgcagggaacacccgatcccctttggcgagaaaacgcgttgaatagcctcgtgccgaattcctgcagcccgg

SEQ ID NO: 67094 - DNA, 606 bp, Oryza sativa
  Clone ID: PAT_MRT4530_67985C.1
atgggctcacttgtcaatctctttttatctgttcttcttctttctctcatgtcatggtgcccgcccgcgtcgctcgcgctcgttgacagcgcctccggagctcgccgccgccgcgtcgtgatgttctcgttcccgttccgcagccacatcgccctgatgctccagctcgccgagctcctccacgaccgcgcgcggcctcgccgtcaacgtcgtccacaccaccttcaactccccccgacttcactgaccccgcgccgacctggtcgagcagatgctggcactcaacgccgcctgtgccgttctgcgaggcgctccggtgggtggtgcggcggcgcggcggccagaccggggggtggagcgaggtggcgtgcgcggtcgtcgacaggcagtggtacgcgccaccatgctccactgcatgctcagctactcgcgcctccgctcccgggcaccggcaccatcaacgaaatccgtgagggcgttggcaagcactacagcgtgaacgtgccgctggacaccggtcgctgggcggcaaaggcgagttcttcccgggcaccgtgcgccggaatgctgccgtgcgtcatcgccgtcggtggtgaaccccggtga

SEQ ID NO: 67095 - DNA, 634 bp, Oryza sativa
  Clone ID: PAT_MRT4530_67986C.1
ttcggcacgagggtagcagcagcggcggcggcggcggaggctaccacaaccatcaccaccatggaggccagccgcagatgcagcggaaagggggctccaatccgaagagccccatcgtatggaaggccgccgacgaaatgatcggcgtgccggttccgaggaaggctcggtcagcttctacaaagaggagttcgcacgagtggtcggtccccggcggtggaagcagcggcggcggcggcagcggtagcgtcgctggagacacctcacagatccagcggccgtcctcacggccgatctctccagcgtccagctcttccaccggacctgcaaggaagaagtccgggacatggatccggtcgccgttgccgccttccctgcctcccaactgatggccacccgcggatctggcctccgggatgcagatccggccgccaccgcctcttcctccaaggccacccgaccgctggccgctggatccggcctccacgaggtttagagacgtggatccggcgaccaccgcctccatcccccaaccgttggcatccgtggcctcttccccgactcctccaacgccacccgaccgccggcgtccgcggcctccaccgtctccttcacccaccagagccgccgccat

SEQ ID NO: 67096 - DNA, 361 bp, Oryza sativa
  Clone ID: PAT_MRT4530_67987C.1
tcgcctggcgcggctggggaaggtgaacagtgtggcccgccatgttcttctccgcggcgctccgggcccgggcggctggcctcaccgcccactggggaagacatgtaaggaatttgcataagacagctatgcaaaatggagctggaggagctttatttgtgcacagagatactcctgagaataaccctgatactccatttgatttcacaccagaaaactataagaggatagaggcaattgtaaaaaactatccagaaggccataaagcagcagctgttcttccagtcctggatttagcccaaaggcagaatgggtggttgcccatctctgctatgaacaaggttgcagaagttttacaagt

SEQ ID NO: 67097 - DNA, 576 bp, Oryza sativa
  unsure (1)..(576): unsure at all n locations
  Clone ID: PAT_MRT4530_67988C.1
ggagacagcgcttgagaggagagagtgtgtacctggtgtgggtgtgagggttatttctttgactntgggctggtatgaacgttattgggctttgttgggctggcctgagttttctttctctctctcttctgatgctgctaatcacttaggttatggtgtcgccataccttagcggttttacactagagtggtaactagtaaggcgtgggtgggtcgccttacccgccttaacaaccatatagtttatatattaggaaatgtagaaaaggaatccatggaagaagcgtgtcagattgtcaatagaccaatgtaacacaaagcagttctgagcaaaagaaaggttaacgtgtgttatgtacatgatggcccatttatagttcatcttaactgttcccttggagatatagctctctaaggtgtgaaaaagagaaaagttccgtttgcaactttgcaagagaagttccatcggttgcttgattgtcatgaattggtctagttcaacaaaattaactaaatgcaccagtcagtgacccacgcccatccttaaatttgacctaattccttgtggaaacttag

SEQ ID NO: 67098 - DNA, 174 bp, Oryza sativa
  Clone ID: PAT_MRT4530_67989C.1
atggcccacgctgtcactggcacgacgttggccaggtacacgctcgcaagtcgcaaccccggcgtcatcgacggcttcaacgtgccggggcagtgcgagcacccaccgaccaaatactcgaggttcttcagggacaagttccctatacgtaaaaattcacatcctctaccataa

SEQ ID NO: 67099 - DNA, 3504 bp, Oryza sativa
  Clone ID: PAT_MRT4530_6798C.1
atggagggagttccggataaggaaagacaaccagagttctacatggaaacgacaaggactactcggattgggacagacactcaccatgagacgatcaacacgatcaccacgatcgggacgaccaccttatcaacacccaacacaatcaacatacaagccaacatacgccaagacttgccgccggatatcgacttcagggataggcatagctattcccctacggtgtctccggataccgtcaggagatatgaaagcgctatctgtgatctcgccgggcacggatccgagaaggaagactaccctgttgtcgactacgagtcagaccttcggaccaacatgtcgacaacacctcatcccgagcctccccgtggtcgtatcacccctccccgccgtcacctttctctttcccctgcgccggccgcctccagccgcctctccctcctcgcccgagcgcgggctggccgtgccgtcgccttccccgacatcacagcagcctcctctcccccggcctgccctccgtttcgcgtgagacccccggaggcacgtccccgccggcaaccggtggcactgtcgccacccaccgcctccagccgcccctgccgcgccgctcaggtgcaggccggccacgccgtctcctccctcggcatcaccgcgtcgacctccaccccggcctgccctcggtttcgtccggagaccgccgtcgcccgcgccggcctctccatcctcgtcgtcgccgacgtcccttcggccgccccttcgtcctccccggcttgtcggctcgctgcgtcaccaccacctccggcatcgcagcggcaaggtcgccctcggcctcgcctcccctccacccaaacaccgccggtgtccgtcgtcgtcttcaccgctcatcctcgccgactcgtcgtctcgtggcgccgcctccgtcgtcggcatcgtagcggcgtgttccacgccatcctcgtcttcgtgcagccgctccccgtcgtcatcttcgtcctcggctctgcgtcatcaagcctcgtgccggccgtgtctcgccttcgttcaaggatcgccgccgaagttgttccctcgccgtttgcttccgtcgtccccgagccgtctccgttcccacgccttgtcgcgtggtgcatagagtactgtggagtagacttgaaggaattcttctgggtcggtgctcccatcatacttttcaattgctccgggtcgaaatctctcaggccatcgaacatcacgaggacgcagatgatgatgatgacgatgggtcgcttggttccggcgtacgattacgaggatgacggcctggatctcgggaatcctgtcgttgtctctcgctgttgtctcggcgccgatctccattatcgtcgtcgttacggcggcggccatgaccaagatcgccagcgccgtgaggtggaggagtggctcgttgaggacaccaagaccttgtggcttcggaagtcatctttgccggctcgtggttcatgtcggaaggacaagaaccatgagtaccaagtccccctacctggcgcgccactgtcgacgggtgatacccgtagaccggatatagagggtattgggactcgcaagggaacatttattcaaaagtacaaggtaaaggtggttcccgatgagcctgagaccagtacctctaaggaggaagaaggaaaaagagttttagatgactcggctcaagagaatcagggtgacggctctcaggaggtacatgcagttcaatgtgatggtgctcacgagccacaagaaggaaatcttaatcagaatagtgagacagcacaagatttcttcaacaatttccaagatcgagtggactacgccgtacaccatgctttgatcaatcaatctggagtattagtcaacacattgtctaacatgatgaagacgatagccgatggatcaatagctgagcatcaagctgcaggcccggtctacttgcagggagacgccaccaaggcaacaagttgtgcagccgattcaacagacttcatcaaggcagcaggttgtgcagtccgttcagccaacacctccgaaacaacaaactatacaaccgattccacagcaagccttgatgaatcaatcggctgggcaatcgactggacacgccgtgaatcaggttattccagaacatttggttcaccatatacagccagatggtacgacgatgcctcagagtgtgccagagcacttggtgcaaatttgaaccaatacagcaacagtcgcaaggagcagctcaacaacgaccatgggccgatggagatgaggaacaagtgctttagcttaagtttgactgacgcccagttagccgatttggcttttcaaggcatgattcctccgattaaggagaaattctcatctgaagattttgatagcttatcgcatctcgtgcagaaggtaacattgcatgaacagaggtttgcagaggccaggagaagctctaagagggttaatcacgtctgcccttacatgtatggatcggatgatgatgacgatgactccgaaatagctgcagccgaatgggtaaggagtaaaaaggttgtaccttgtcagtgggtaaagaattctgggaaagaggagaaatatgattttgatattaccaaagctgacaagatttttgatctgctgctccgggagaagcaaattcaactccccgctggtcatattcaagtggccattgaaggagggaagattaagtttgatgattccaaaaagccgatgaaggtcgatggccgatcgtacaataaaggcaatcggctgaagcaggcgagaattcccgctcatcaaagggagcacttccaggaggtcgagcaagaaattggtcatcggctgagaaaagcaaagccaaggaaggagtggcgtgttaagaatcaagttcttggagccgatgatattgcagccgacgaagcaaagaggttggcaaatgggaaaagtgttgtgacggcaccaattaacatggtctttactttgccagccaaatttgggattggccaggccgatgttgacgaattaaaagagggatcggctaagttggttctatcaccaaaacgagcaatctttgaaaagcctgaggggacagaaaatcggcatcttaaaccattgtatataaatggctatgtcaatggaaagccgatgtctaagatgatggttgatggtggggctgcggtaaatttgataccttatactacgttcagaaagttaggtagaactactgaggatctcatcaagacgaacatggtgcttaaagactttggtggcaacccatcggaaacaaagggcgttttgaatgtagaattgacagtcggcagtaaaactatacctaccatattttttgtcatcgatgggaaaggttcttacagcttgttgctcggaagggattggattcatgccaattgttgtattccttcgaccatgcaccaatgcttgattcaatggcaaggcgacaaggttgagattgtgccagccgacagccgattgaagatgaagaacccaagctaa

SEQ ID NO: 67100 - DNA, 3916 bp, Oryza sativa
  Clone ID: PAT_MRT4530_67990C.1
tcccctccgccctcctcctccgcttccttcccttccttccttccttccttccgcctcgcgtctcctcgtcctcacctcacctcgcctcgtcttcctcctcgcatcgccctagccctaggccacctcgccatttgatgcgggggcgcccgccatggcgtcgtgggggctgggctggaagcggagctccgagatcttccacctcaccctcgactacggggacctcgcggatggacctcctcaccatcaccagcagcagccgccgccgccgcagcagccgggctcccctcccacgccatccagcgcgggctccacgccgacgtcgtcgtcgtcttcgccgacggcgaggaggagcggcggcagcggcgagttcgggttccggatcgagctcgactggtcggcgggcgacgacgaggaccaggtcgcgctgcggctccagtcccagctcatggtcgcgctccccccgccgcacgacgccgtctgcgtcgatctgtccccgagaggggagggcgacggcggcgaggagggtgcggtggcggtggagatgcgggtggtcaggaggcgggaggcgctgcggtcggtgcgcgtggcgcgggccgcggggtccgcggccgggagcggcgacggcgccggggtgctctcgcggctcatcagatccaacctcgcgcccgcgccggccgtcgacggtgccgctgccacgggcgtccccgtgctcgccgaccactggcgctccgtcgccgtgctcagcctctgcaactgcggcttgctgaattatgttaccgccgtgattgctcgatgctgtagtgatctaggaggtggcattgtagtgttgtcgtcttttgtgggagaatttgattggatgtgtataaaggaggcttgggcatatgttttggttgcttcacatacctttacttttagctatagagattctgattatcagatgcttcctgttgaattaactcgccttgcacttcttgagaagctacatcttgacaacaacaaattgtcagttttgccacctgaagttggtgatttgaagaaattgatagtgctgacagtcgacaacaacatgctagtttctgtacctgcagaactgcgacagtgtgttttgctggaggaattatcgttggagaataataagcttgtccgcccattactggatttcaggtcaatgcctaagttgcgtgtattgcgcttgtttggaaatcctctagagtttctcccagaaattttgccactgcataaccttaggcatctcacacttgcaaatattagaattgaagcactggaaagtcttagatctgtcactgtacaaattgagactgaaaataattcctacttcgttgcggccaggcacaaacttagtgccttcttttcacttgtttttcggttctcttcctgtcaccaccctttgctagcctctgctttggccaaaataatggaagatcgtagcaaccaagttgcaattagcaaagaagaaaatgctgtcaggcagcttataagcatgataagcagtgataatcgtcatgtggtgcaacgtctatctctatttgcagttggcaatttggctttctgcttggagactcgtcgcaccctcatgcactctgaaagtttgcgcgaccttttaattcgcttaactctttcacaagagaagcgtgtcagcaaggcagctgcacgtgctttggcaattctaggtgagaacgagaacttgcgtcgagcaataagaggaagaccagttgcaaagaagggtctgcgcattctatcaatggatggtggtggcatgaaaggccttgcgactgtccaaattcttaaacagatagagcaagggactgggaaacgcatacatgaaatgtttgacctcatatgtggtacatcgacaggtggcatgcttgcgatggctcttggagtcaagcagatgactctggatcaatgtgaagaaatatacacaaaacttggcaaacttgtctttgctgaacctgcccccaaggatgaagctgcaacgtggaaggagaagattgatcagctttttaaaagttcatcacagagttttagggtggttgtacatggatcaaagcacagtgcagatcaatttgagaggttactaaaggaaatgtgtgctgatgaagatggtgacctccttatagagtctgctgtaaaaggcattccgaaggtttttgctgtatctactttagtcagtgtcatgcctgcccaaccatatatattccgaaattaccagtacccacctggcactgtggaagtatcatcagtcatgacagaaagcccatcaattggctcagctggaacgcccgtttctggtgccccggtcggtattaaaccaattaacacggttggaactgctgtttctggtgcaccggttggtattaaacgtggtgctttcatgggtagctgcaagcatcgcatatgggaagccataagagcatcttctgcagctccatattatctggatgatttctctgatgacgtaaatcgttggcaggatggagctattgtagccaacaatcccacaatctttgcgataagagaggcacaacttttgtggcctgatacgagaatagattgtctagtttcaatagggtgtggttcagttccaactaagagtcggagaggtgggtggcgctacttggacacagggcaagttttaatagaaagttcatgctctgtagagagagttgaagaaactttggatacactgataccaatgctcccagaaatgcagtatttccgctttaatccagttgatgagcggtgtggtatggaactagatgagactgatcctgctgtctggcttaagttggaagctgcaactgatgagtacattcagaaaaactttcaagatttcaagaatgtttgtgagcttttagttccaagataccaagaggaagaaaagtcatctgaaactaccaaatcaatgttgttttcaagattcaagccatcaaattcaggttttagtgaaagtaatcctaccttaggatggaggcgtgtggttttacttgtagaggcttcatatagtcctgattttgggaagaaagtaaatcatgcccgctcgcttgaaacattctgctcccagaatggtatcaggcttactctaatgaacagtgcttctgggtttggaaaggcagctaccacacttccgactccaattacttctcccttatttactggcagttttccatctagtccacttctatatagtccagagggcacccaaagaattggccgaattgacctggttccgccgcttagcctggatggcaacccaactgcaaagtcctcgccgccaacgtcacctcttaagtcatggcagccatctgtacatgttcaatcactatatgataagttgcaaaatatgcctcaagttggtgtgatacatatggcacttcaaaacgattcaactggctcaatattgaggaggacagtgcctgctgctcatatgacacctgaagatgttcgatggatggttggagcatggagggagaggatcattgtatgcagtggtaagtatggccttgctcacggcctggtcaaagcattcatggattctggtgccaaagcagtcatctcgtcggccatggagcctccagattcccagtctatagtataccatgggatggaagtaaatggcagccttgagaacgggaagtttgtcattgccgatgatgaggcttccgagtctgaggcggaacctgttagccctacgagtgactgggaagacagcgacatggagaaaaatggcgatcgcagcaaagatttcgatgatgaggagtacatggctcagttcatctgcctcctgtatgacaagctgttccgcgagggcgtgacggtggacacggcgctccagcaagcgctccggtcacatccaaagttgaagtacaactgccatttacccaatgttttgtag

SEQ ID NO: 67101 - DNA, 324 bp, Oryza sativa
  Clone ID: PAT_MRT4530_67991C.1
atggccgtggccgaggaggccggagacgagagtggcagcggcagcgggcgagggctggagcgacgaagcactgctgcagtccgaggctatgccgggggatggagaagggagagggctctcgcccgcccacccaccgtcgccgctctcgtctccggcatcctcaattgcagtcaccgccaccagccgcgagacgcgctgctgccgctcctgctctcctcgtcgcggcaccgcttgaatccgccgcccagctctttgatgccgtcgtcgccgctccatctcttattgccaccgctcaacctcagctttatgggaaggagaggatga

SEQ ID NO: 67102 - DNA, 159 bp, Oryza sativa
  Clone ID: PAT_MRT4530_67992C.1
gcgtcgccgcgtacaaggtgtgctggccggaggggtgcctcggctccgacattctcgccggcattgacgctgccgtggccgacggggtcggcgtgctctccctgtccctcggcggcggctcggcgccgtacttccgggacaccgtcgcggtgggtgcgt

SEQ ID NO: 67103 - DNA, 408 bp, Oryza sativa
  Clone ID: PAT_MRT4530_67993C.1
atggagacgaatcaagagctagaagcagagcttctcgccgggataggggagggtactagcagtgctatggaagaaaatgacaagctcttttatcaagaagtggatgatcgagctcaatcagaaggaagcaagtctcagtttctccacagagtcaagtcgcacctgactttaggtatggcttatttggctggggctcaagctgctaggaattatggttctcctgctacgatcgggggatgttgttctgtttctgggcatgatgtggctagcgttcctcgaggaaaacttttgcaaactcagcctcaagatcagcttcttgcacatggggattacttgggattggagaaaggtcggctcacttctcaagggcagttggcgccagcccacaaggtgccacaggcaccatga

SEQ ID NO: 67104 - DNA, 468 bp, Oryza sativa
  Clone ID: PAT_MRT4530_67994C.1
atgccgacgccctccaccgccacgcgccgcccatcgaccgtcacacgcttcgctctctgcctgtcgtcgccgccgtcgacgccgctgccgacacccgtcgctgccgcccacgccgatgccgacgctgccgctgctgttatcgggaggccgaaaggggaggggagagaatgggaggagaggagtcgttcccaacgaacaccatcaccacccaactcagagtcgccgccaaaagccaactggggtattgccagcaacaactgctactcaagaatgatcattgcgtcggctgccttaacaagcgatcgccgaatgagtaatgcctgcgaccgcatgctcgcggcggtcataccctcgcccacggcgcaaccacatgctggccataaaggacgggatgtttgcgtccttggttacgcctcaccctgcccttgcccacacctcgccggcgccacggccatgaatgccacatag

SEQ ID NO: 67105 - DNA, 564 bp, Oryza sativa
  Clone ID: PAT_MRT4530_67995C.1
atgtggaggctgaaggtcgcggagggcggggcgcccgggctgcggtcatgcaacggctttcttggtagagctgtgtgggaattcgacccaaacgccggcacgccggaggagcgcgccgaggtagagaggatgcgccgtgagtttactctgcgccgcttcgagaggagggaagcccaggatctgctcatgcgtatgcaggccggatccacactgccgccgccgccggagcccatgcctaccgccaccgtgccgctcgccgccatcgtgccccacgcccactacctcccgctcaagaccgctgtcggcctaccgctcgagctcattgccggatatgcacgggggagggccaagggggccgtcactgtcgccgtagccaaacccacacccgctgccaccgccgtcgccgtcgagcacaccaagcatggcaactgcctccattggtgcccaccatcgggagggaggagatgggagaggaggaggctgggggagaaggtggaggaggctggagtgaggagtactgggggagaggaggagtgggccagggtagagaggagtggagaataa

SEQ ID NO: 67106 - DNA, 640 bp, Oryza sativa
  Clone ID: PAT_MRT4530_67996C.1
gtgcaaccgtgcaatcctcacaccgacaggacgggcccacgggtcagcgagacagcagtggtgccctgtggtagttctctctaggaagtccaaccgcttaccatttgtaactgtcctaaccttgacctccctccgccgtccgatctaccataggcggttcagatcactaggggcacgtttggatcctgggcaagggtcaccctagccttgcctggcaaggctatccgtttggaactagtaaaatagcttggcttttaagggcgagttagttgtacagggcgagaaaaaccttgccggctagggagagccaatttggctcgctttcgacgtcaaacttcactcgcgtgaaaatattgtctgcgggcgacgcggacttctccggaatcgctgatattctctccccgatcaggagacgaactcattagcagcagctcaatccggaggcgatctcatccgcgtagactcctagatttgatttcttctttatcgtcagctcctaacctcttctttctgagatacatggtgtgctgtcttgttcaatcgctctgtcaggaagttggtagagttagaaaagagcgtctttgagatcgtttgctttgtgctagatgcagcctttgcgttgccaagatcatttattatg

SEQ ID NO: 67107 - DNA, 2180 bp, Oryza sativa
  Clone ID: PAT_MRT4530_67997C.1
gaagaggagagggcaaaaatggcgcagctgcaggagacgtacgcgtgctcgccggcgacggagcgcggccgcgggatcctcctcgcgggggaccccaagacggagacgatcgcctactgcacgggccgcagcgtcatcatccgccgcctcgacgcgccgctcgactgctgggcctacccggaccacgcctacccgaccaccgtcgcccgcttctcccccaacggcgagtgggtcgcctccgccgacgcctccggctgcgtccgcgtctgggggcgctacggcgaccgcgccctcaaggccgagttccgccccctctccggccgcgtcgacgacctccgctggtcccccgatggcctccgcatcgtcgtgtccggggacggcaaggggaagtccttcgtccgcgctttcgtgtgggactctggcagcactgttggtgagtttgacgggcactcaaagagagttctgagctgtgactttaagccaacccggccgttccgcattgtgacatgtggtgaagattttctggcaaactactatgaaggaccaccatttaaattcaagcattccataagggatcactcaaactttgttaactgtatccgatatgctcctgatgggagtaagtttatcagcgtgagttcagataagaagggtttgatatatgatggcaaaactggagacaagattggagaactttccagcgaaggcagtcacacagggagtatatatgctgttagctggagtcctgacagcaaacaagttctgacagtttctgctgataaaactgccaaagtctgggacatactagaagacgctagtgggaaattgaacagaactttggcttgtcctggtacaggtggagtagatgacatgcttgtgggttgcctctggcagaatgattatcttgtgacagtctctcttggtgggacatttaatgtgttctctgcaagtaatccagacaaagagccagtaacctttgcaggacatttgaagactgttagttctttggcctttttcccacaaagtaaccccaaaactatactgtccacaagttacgatggcgttatcatgagatggataaagggtgttggatatggtggcagattgatgcgaaagaacaacacccagattaaatgctttactgtagcagaagaggaactcgtcacctctggatatgataacaaggttttcagaattcctcttaatggagatcagtgtggagatgctgaatcagttgatgtaggaggtcagccaaatgctttgaaccttgcaattcaaaaacctgaatttgcactggtcacaacagattctgggatagtattgctgcacaagtcaacggtcatttctacaaccaaagttaattatactatcacttcatctgctgtttctcctgatggcactgaagccatcgttggtgcacaagatgggaaactgcgtatctattccatcaatggggatacagttacagaagaagcattaattgagaagcaccggggtgctattacttgcatacattattcgcccgatgtttccatgtttgcttctgctgatgccaacagggaagccgttgtgtgggatcgggcaacgagagagatcaagctgaagaacatgttgttccactcagctcggataaactgcctggcttggtcacctgacaatcgcctggttgccacaggctcattggacacctgtgcaattgtatatgaaatagacaagccagcatccagccgcatcaccgtaaaaggagctcatcttggtggagtccatggtttaacctttgtcgataatgatagtctggtgactgctggggaggatgcatgcatccgagtttggaagctggtgccacaatagatgttctccctgatgttgcctgttgggcgtgtcttcgtcccttgattgaaataaacattgtttgcccttgtcccttagggtgtctgcgatttttttcctaggttgcgacgcagttggccttgagttgcattttctttttgttgcatttctggaagaacttgttgattgttgttattttatccctgcgtctgattttgttacggaactgacaattcacgggatgctgtcttttttttttccttcctccgctttgtaacctgcccatggctgtatctgtttgtaattttgaccgatcagctgcataaaaaaaaaaaaaaaaaaaaaaaaaa

SEQ ID NO: 67108 - DNA, 133 bp, Oryza sativa
  Clone ID: PAT_MRT4530_67998C.1
ggcgtcaccacggtgcttcagattcttacacatcaatttcatcataatctagcgttcttattacaaggcactcacacatccatgagtatgttaacataacaaaggcagggcatgcttttttttattatttcgg

SEQ ID NO: 67109 - DNA, 2089 bp, Oryza sativa
  Clone ID: PAT_MRT4530_67999C.1
acacaaacaacgtgtaacattgatttctcgtttataatttacacttggcaatattgttctctagtcatatgtagtatggcatgttgtgatgtcctccattctgtttccccccaacttctagaaggccaggatgtgtaaaacaaatgctgctagtacaaaaactgaaaagaatggcactgctagcttttggaattcaattcgccgtataaatccctgaattccaataaccggcaatgtctacagcaaacctatgcgaagaagaaaaaacgacaaaaaaaaaaaagtcttccccagcatatgccctcttttttttgtgtgttttggtgaggagaaatgaatcatacaatttgtgcgaggtcacgaaaacgtaaccgtcaaacgtacgccttgggcgggtacttggcgacgcagtccacccaggggttgcagctcttcttccccttcggcggcggcgacacggccggcacgtcgcggagcgcgcgccagaccgcgctgttgcacttgaaccccgagccgaagccgatctgccacacgcggttgccgcgctggacgcggcccttggcctcggcgtacgccagctcgtaccacagcgagctgctgctggtgttgccgaaccggtgcagcgagcacttgctcggctccatgtccctgtcctccaggctgaggctgcgctgcacctcctccagcacggcgcggccgccggcgtgcacgcagaagtgctcgaacgcgcggcggaagtccgggatgtaggggcgcacgcccttgacgcggaacacgcggcgcatcatcagggacttgaggaacttgagctgctcggtgagcgggaggacgaggggccccagcgtggtgatgttggtcttgagcgcgtcgccggccaccgccatgagctcccgcgccagcgacaccccgaccttcccgtcctcgtcctcgcgctggtacacgcagttgaagcactcgtcggtggcgcccttgtgcgtccgcacggtgtgcagcaaccggtacttggcgcggccggcgtcggcgcggcggttcgagagcagcgccgccgcgccgcccatacggaagatgcaattcgaaaggagcatcgagcggtcgttaccgaagtaccagttgagggtgatgttctccgtgctgaggacgaccgcgtacgagttggggttcgcctggagcatgtccttggcgaggtcgatggcgatgaggccggcgctgcaccccatgccgccgaggttgaacgacttgacgtccgcccgcatctcgtagtggttgatgatcatcgacgacagcgacggcgtcgggttgaagaggctgcagttgacgatgaggatgcccacgtcgcgtttcgggttgatcccggtggactcgaagagcgcgtcgaggcacccgaacatgacggcctcggcctccatcctcgcctcggccatgttgagcctcggcggccgcgcctggacgccgggagggaggtacgtctcgtcgccgagcgcggagcgattggtgatcttggtctggaagtcgagcgcggcgtcattgaagcagccggtgctctcggtcatctcgaggaagccttccttggagatcttgtgctggtcgtccggcttgtagcaggcgaactcgacgaggtacaccgggcgcgggcgcttgaagtagtagacggtgagcagcagcacggcggtcccgagccaggcgacgcaggtgagcaggtcgatggagcggtagatgacgtcgaggcggacgaaggagtaggcggcggaggcgagcagcggcacgcacagcatgggcaggtacgacgtgacgctgccgccgtgccggatcccgagcttgacgtacttgaggttcacggaccgcgcgaagtccgggaggcggcgccggatcttgatcacgatgctcggcgcccactcccccccggccgcccgcgcgtcgtcgcggaacgccatctccgccgtgagccgctcccgctccatgacagccgcctccatggagctcacagctaagctagccctctctttctctttctcttgactctccccgacacgtaccgagctgaactcgaggttgcctttggcgtgaatggaaaaggctaaagcactagagc

SEQ ID NO: 67110 - DNA, 330 bp, Oryza sativa
  Clone ID: PAT_MRT4530_6799C.1
atgcgtgtccccagatgcggctcacatgggctccatctcacgctgcccccgccgcgccaagctaggcagatgctgagatgctcccctccctcgcgctgtgcgtgcgtgagaggcgccgcagacgcgcggatttccccggtgatccggttggttttgtgctgctccactgggttggctgctgtgtgcgaccgtgactacgttgctctacggggccgtgccgtctgccaatctgttggcgcggtcggctggctccgcgatagattatactacccggcaacagcaaggcagctacagcgtctacagcctcacgcggcagcagcgatcacctga

SEQ ID NO: 67111 - DNA, 273 bp, Oryza sativa
  Clone ID: PAT_MRT4530_679C.1
cacacaaaacaatttttatatttaacaaacaacatttacataaagtttgaaaccacttggatttccagccacgatttttcgcaccggattcacacatggtgtgcccaatcacacacacacactgatggtttcagccacactcacacaggcttgggctatcacagtggatggactctttatttattcatcatgtacacaggctggtgcattgtcaattaaatcataaattcgccttggccttaaaagtttgagggtttgtaccctaatttggag

SEQ ID NO: 67112 - DNA, 945 bp, Oryza sativa
  unsure (1)..(945): unsure at all n locations
  Clone ID: PAT_MRT4530_67C.1
ccgggctgcaggaattcggcacgaggctaagctagccaagtagtagccatggctctggccttcgccgtgctcgccaccttcgccgcggcggcgacgccgaccaccaccaccaacctcaccctccacaacctctgcacccaccctgtctggccgctcgtcaccgccaacgccggcctccccgccatcgccgacgccgccggcgcggccacccgcctcgacggcaacggcgacggcctcgccaccctcgcgttcccgccgggggcgtggtccgggcgcgtggtggcgcgcaccggctgcagaggcaacggcagcagcaggtgcgacacgggcgacgcgccgccggtgacggtggcgcaggtgagcgtgcacggggcgggcgggctggcggagtacagcgtgagcctggtggacgggttcaacgtggcggtggtggtgacgccgcacgggttcgagcaggggcggctgtgcccgtcgctcgggtgcgccgtggacctcgccgcggactgccccggcgacgggggcaggggggggtgcatggcggcggggcaggcggaggcgttcaaggcgaggtgcccggacacgaggacgacgccgacggactgccccgcggacgccagggtcggcgccgggtgcagggcctcgccgcagttcttcaaggagatgtgccccgaggcgaggacgacggcgaccgacgtggaggcgacgccgcagaagtgcttcggccccggcgagctcaaggtcgtcttctgcccaaccaattgaatgactgntcgntcaagccatcatccatatatgtggtcaattggcgatggaattaataagcttgcgattaaattatttgtgtgatttctgtgtacgtgaccatgtaacaaaaattcctttcaaaatctaaaaataaaaaaaatcgtggcatttggttccaaaaaaaaaaaaaaaaaaaaaaaa

SEQ ID NO: 67113 - DNA, 483 bp, Oryza sativa
  Clone ID: PAT_MRT4530_68000C.1
tttgcttttcctgcttccatcacgttgtctcgagaaagattggagtttttggaggtttgggttgagcgactcttgtttttgtcggcgcaagcgcatgactgtttctggaacatagtgagcgcgagaaagagatattgtgttagttggagttcgccttatggtgaatcttcgattcaagtctggagatggcgcgtttttaggaaaccaaggagaggaatgatcaaagacctgttgctgatcatgtagagcaccaagacctgatgcaaaacctgacacatcctcatgattaccacgacatggacaagatggtcaaagcgcgaatctaaaggtgctgaagccatacacgataacgaaactaaggttgaaattaaccatggtactacattagatgatcttggaagcccttgagttatatggcttgcattagtacccagctaatatgtaggcaggccttgcctattgctctgacgcctaaataaaacc

SEQ ID NO: 67114 - DNA, 1048 bp, Oryza sativa
  Clone ID: PAT_MRT4530_68001C.1
gtctagaaaggctaggagataaagatttatacaagttttgtgtgcgcaaaggctcgagagtaaagaacctacaggttaatgatgatggtcgtaatgatacataattgcaaatgcaacctaaacttcaggagcctacaatctacatggatgagttgacatgtttttatgcctacatggctgcctgaaattcagcagcctccttatactattccaggggcggagggctcggtagggcgaggtgtggcgctcgccatacctcgcgccgcccgctgaacccctcgtactcctccgtgcagagcagcagccgagtcagagagagtggcgacgccgcatcgtgagaagacgagcgacagctgagacgcggcgtgggcgtgtccgcgaggctcgtcttgttttgtgtcttgaatctagacccaaatttccccatctgaccatctcctccactctcccccaatccgccaatccccatcccgatctcatcggcggacgacggctgccgcgatgtgcgtcgtgcgcgggaggactgggtgaggtgaggaggacgcagagctgcggctgcggcatccgctccggccaggcggcggcgcgaccagcctccagggcccaggggggcatgcgaacacgcagtcgcacacgcgcaggcgcgcagcgcaggaagagcagaggtagaggcagggtgggaccactctttgatgtcaagaccttcccttccctttctatccattttcgcaaaacttggttgcccctgctaattggctgcttgctgagcggcggatgcagtcacgcacggcgcgcccacgccgccactggctgcatgcttgtgccttgttgagttgagttgttgctctgctgctagcccctgctgaagtgccgagtgcccaatgccggagtgcctgcggccggcggcctgcccaacctgcgccgtcgcagcctcctcctccccgtgcctcctccccgcgaccccgcaccagcgccgcccaactccactcgaccggcggccggattagggattggagttggagagaagaggggaattttgggtttagcc

SEQ ID NO: 67115 - DNA, 339 bp, Oryza sativa
  Clone ID: PAT_MRT4530_68002C.1
atggggtcggcgacggcgacgctcggggacggtggcatccacacccggcacggctcccttctcctccctcctagatccggccgaaggggggagggggaggaggggtggcggtggctacccctggaggtggcggcggtggcggttcccgtttctcctagatccgacctaagggaggccaggggagggcgatggcggcggcggcagtacccctccctcccagatccggacggagggaggccgggggagggcggtggcggtggtggtggtggcggcgggttgttagctgcaacaaaggatagcgggcgtctcatgcggaccgtggagcacgacatgcagtag

SEQ ID NO: 67116 - DNA, 1031 bp, Oryza sativa
  Clone ID: PAT_MRT4530_68003C.1
accatatgtttatttcagaacaaatcaattcctgatgttcccattcaacaagaaaatataaagccgtgatggtcagaacatgtgcaaaatcttacaaagagggaaagttaaacttgatacaaaactgagagcacacatgcatgcccagaaaggtgagtcgaccatgagtgtgtatataatcccttttgttcgcatcaatggcgcgataggtgaaagcgaggacggttcgtgaacttccgtccgttagctttgacataacgcgtgatgccaaagcaaaaaccagaccatagtagtgacagcaccaaatggaaaacatcattacgtgctcttctcagtgacattatcaagaatatcacggcagccaaaagcagagcaaaagcaaggcggaaggacgcgtgattctctataagtcctttggttggagttggcatatcccgactaactgaggatatgtgatgtccttgaagaagatccatggcatcctgtttagtaccatctgcaaagttgttcaggtaatatctagccattgcattccacagatcatttaaaattccctgtgtagttcgctttccgtaccgcacaaagtctcccttcaaggcaggagttccagagtactgagtgcttattgcatcgccatggttggcccacaaaactttgtaatctgcatcaaatgccggataatcgctgattgtattgttgtcaccaagaacactgattttttgcagttggctttccaatatttttctcccgatcatgctctgagttacattagtacgatccagacaatcgacacaatttgttctaacggttccggtctgctcttccattttctcacctttactatttaaaaggaagtacctaaggtttctaaaaatatcctcaatttgatcatacagttgagaaaggcgttcaaagtgaatatgaccacagatttgatggaagtcaaaatgcacaaatcttatatcttcactcaagataggctcaattgattttgcatatctttcatacaggcgaccttcgccaccatgcat

SEQ ID NO: 67117 - DNA, 183 bp, Oryza sativa
  Clone ID: PAT_MRT4530_68004C.1
atggctgcttcggctatgcaaaattaccttcaggaaaaatcacaaatcctccatggagacgccgctgtctctgcattttactggtacaacaaacgggtggatggttcaacaagtttcaaggcattgcagaggaggaaggttgaaatcaggaaggagttcggagtcgtaggtctgaatagttga

SEQ ID NO: 67118 - DNA, 1158 bp, Oryza sativa
  unsure (1)..(1158): unsure at all n locations
  Clone ID: PAT_MRT4530_68005C.1
atggccaagacgcggcagccgcagaagcgggtgctggagtcgttcaccatcaaggggcccgacggggtcatcaagcgtgaggacccctttcttgatccttttatctatttatctaggtttttgttgttttgggggaaattttggatcgtagaatcaagatactacctaagatttcgtagcatcgtggaaatgaatactggggatactgtgctaatgatggcacctgactcatcaaagaaaccatatgtggcaagggttgaggaaattgaggcaacaggacctcaagcctctcaagtgaagatcaaggtgcggtggtactaccgcccagaagagtccattggtggccggcggccattccatggttcgaaggaagtatttctttctgaccactatgattcgcagagtgctgacaccatagagggcaagtgttatgtccacacctttcgagattacaccaagcttcgatctgtcagcgctgaggacttcttttgccgctttgagtacaaatctgccacaggcagctttgtgcctgaccgtatagctgtgttttgcaaatgtgagatgccatacaatcctgataaccttatgatccaatgtgaggattgctctgactggtttcatccttcctgtgttgaaataaccatcaaagaagcgaagaaactagagcatttttactgtaaaagctgtattgctgaaaatggaaaggatctacaaaagtccaatggtgctactgtgcaatctgaagaaaaggtgcagtccaaacgacggcggaggtgatgccatggagacagaatctcaatacctccaaagtggatgtaacaattctgtggggagcaaagcctcatcactcctctagatcttctctcttctcttcctgtgcaaggctgcttgcagccagtgaccagtgtactgtgtacatatttaccagtgttttctttttgcatcgtttgcatggtcgtcgtagcgtcgtcgcatgtactagcttggagtcagtcagtcagttagctcgagcaaagggatcaaactccctcttggtcataaactcataagcgatgatgatagatgaaactgggcactacctaccgtggttgtgttgttgtccatcaataataccttgacgacaaactacaaaaaaaaaagtgaaaaatcaaanaaaaa

SEQ ID NO: 67119 - DNA, 252 bp, Oryza sativa
  Clone ID: PAT_MRT4530_68006C.1
ctgctgccgaccctgccgacgggtgtgggatgctcgctccccaccattggttgcctcatcctctcctacgcacttatgagggaagaaggctggaatccattgggcaatgttgaactcgagcttctcccacggctaggagtgaacctcgtcgatagtgtgggcccagatgccaagacgggcgatgctcggctgctgcccttctccacacctcccgccgtgcctttccacgccgcccgctgcgcgccgccctaa

SEQ ID NO: 67120 - DNA, 300 bp, Oryza sativa
  Clone ID: PAT_MRT4530_68007C.1
gccccccaaaaatccgaaatcctttgccccccatttagtcatcctaaagcaaggggccccgtaaagtcaaccctgcccatattgccgcctctaaaaactactctttttttttaatcccccaccaaacattcttaataaaaagggttttatcatccaatatttctagttctaaggagctggttcccaaggcatccacctcttactgcccccaccttcatgaaattctgccttttcttcccccttaaaagcgcccccccccttttgtccgtggcttcaaaatttttttaacagcattttcct

SEQ ID NO: 67121 - DNA, 258 bp, Oryza sativa
  Clone ID: PAT_MRT4530_68008C.1
atggaggtggtgctaccggaagtggcgatgcgggtcagaggtgtcggatttattggcaacgaggctggcggcctaacgatggcaagcgagagttttagcggggaggtggcaatggctccgtttggttgggccttcctagcacagtgtggccatatggtgagaccggttgacaagttatcacggcacgagagccaggagatttcgtccctgacccgggaggtggatgggcagcagtggcatagggtggtgcgtggttga

SEQ ID NO: 67122 - DNA, 318 bp, Oryza sativa
  Clone ID: PAT_MRT4530_68009C.1
atgcagctgccacctgatgatcgatcgatcgaggacctccctgcgatgctactcgatcgatcatacacccttctctgctgttgtgcaccacacgctacaccgaatcaaacgtaccagcaccgcgaacgcatggggtatccggccatccaacggcagagcatgctcgttgaccgtcggatcgatcggcactcggcaaatacatggatcagatcgatttataccatgtcctgcaacaaggagactttgcacaaacttcgatctaatattggtcgacgacgtacgactaaatcctctcatcagcatcagaccccttctctc

SEQ ID NO: 67123 - DNA, 5001 bp, Oryza sativa
  Clone ID: PAT_MRT4530_6800C.1
atggccgagaagacaccgctgtcgctatcctcggctagcccaagcactgttaaagaaaagatccagaaattggggttgactgacgtcaatgaaggaaacgtcgtgcccatcaatccagagaaattcacacctgagcagaagaaggattttgaagcaatgttgcagcaagcccaggatcagttcttgaactcattcatgcagacccgcaagggaacattggttcagaagtataaagtaaaggtagttgccgatgatcctgggaccagttcttccaaaggtgaagatgggaaacaagctccagatggctcggctcaactgagtgacaaaggtgctaccgatggttctttaggaagtcaaggtgacaactctcaaggggtccatggagttcaaggcgatggagtgcatggagttcaagggggcaactttaattatcaatatcaacctccttctccgcaagcccaatatcagccagggagactggctcaacctcagtttgcgtctcagtacggtcagttcgagcccatgcaacaacagtcacagggagcagctcagcaacgaccgtgggccgatgtgattgctgatgtaatgagggaacagtttgggcttaaaccaaaagagactggaagcttgtatcggcagccttaccctgagtggtttgagagagttcctctccccaatcggttcaaagttccggacttctccaaattttcgggacaagatggtgtgtcaacttatgagcacattagccgatttttagctcagtgtggtgaagcatcggctgtggacactctgaggggtatgattgctccgattagggagaaattctcgtctgaagactttgatagcttgtcacatctgatacaaaaggtaaccttgcacgagcataggtctgcggaggctaggaaaagctctaagaaggttaatcatgtttgtccttacatgtatgggtcggatgacgatgaggatgactctgagatagctgcagccgaattggtgaggagtaaaaaggtcatactgtgccaatggttaaagagttctggaaaggaagagaagtatgattttgatattactaaagctgacaagatttttgatctgctactccgagagaagcaaattcaactccctgctggtcatatgattccgtcggctgaggaattaggcaaaaagagatattgcaaatggcataattctgggtcccattctactaacgattgcaagggaggcaagattaagtttgatgattccaaaaagccgatgagggtcgatggtaacccatttcccgtgaacatggtacacacagctggccgaacagctgataaggggcgcatgaggggttatcaagtaagttcggctagaattataaacaaatatcaaaggaaatatgacaagcaacaggaaaggcgtcatgaagaagataatggtggctttgatcctcattgggactgtgagttctttagattctgttggaatgaaggtatgaggtttccatctatcgaggattgtcctggatgcagtgatgttgcagggggttcaagccgattgtacaatggaggcaattggccaaaacagacaagagtgcctgtttatcagagatttggcccagtaaaccaacgtggtgattcggaatatgacgaaaataagaagactcaatggtgtcctcctggtatttttacgaagaatcagaaaagaagggttcaaagattgaggagtagggaacgcttccaggaggtcgagcaagaaattaatcatcggctgaagaaagcaaaaccgaggcaggagtggcgtgttaagaatcaggctcctgtagccgacgatattgcagctgatgaggcaaagaggttggcaaaaggaaagagtgttgtgacggcaccagttaacatggtttttaccttgccagccgaattcgggatcgatcaagctgatgtcgacgaggtggaagaggaatcgactaagttggttctatcactagaacaggtggtgttcgagaagcctgaggggacagagaatcggcatcttaaaccattgtatataaatggctatgtcaatgggaagtcgatgtctaaaatgatggttgatggtggggccgcggtgaatttgatgccttatgctacattcagaaagttgggtagaaatgccgaggatctcatcaagacaaatatggtgctcaaggactttggtggcaatccatcggaaaccaaagtggcaaggctacaaaatagagatcgtaccagccgacagttgaagatggagaacccaagctattattttgagggcgtcgtggagggttcaagtgtctacactaaggatacggtagatgatctcgatgacaagcaaggtcaaggttttatgtcggccgatgatttggaagaaatagatataggtccaggcaatcggccaaggccgacatttattagtaagaatttgtctccagaatttagaaccaagctgatagagctcttaaaagagtttagagattgcttcgcttgggagtattatgagatgcctggactcagccgatcaattgtaaaacatcggctacctatcaagccaggggttaggccgcaccagcagcctccaaggagatgcaaagccgatatgcttgaacctgtcaaagctgagattaagcgtttatatgatgttggttttattcgtccttgccgatatgctgagtgggtttctagcatagttcctgtcatcaagaagaacggcaaggtgagggtatgcattgattttagagatctgaataaagctacaccgaaagatggatatccaatgccagtagccgatcagctggttgatgctgcgtcagggaacaaaattttgagttttatggatggaaacgtagggtataatcaaatttttatggctgaagaagatatccataagacagcttttagatatcctggtgcaatcggcttatttgaatgggttatgactttcggcttgaagagtgctggagctacatatcaacaggccatgaattatatttatcatgatctaatcggctggctggttgaggtctatattaatgatgtggttgttaaatataaggaaataaaagaccacatagccgatttaagaaaagttttcgagagaaccaggaaatatggcttgaagatgaatccgacaaagtgtgcttttggtgtatcggctggccagttcttgggatttcttgtccatgagaggggaattgagataactcagagaagtataaatgcgatcaaaaagattaagcccccggaaaacaagaccgaattgcaggagatgatcggcaagattaattttgttcgaaggttaaggcattatttactgtccaatgaatgtactattatatgcaaggtcgacgttgttagatacatgttatcggctccaatattgaaaggaagggttggaaagaggatattttccttaactgagtttgatcttcggtatgagtctccgaaggtgattaagggacaagctgtagctgattttattgtggaacatcgtgatgattcaatcggttcggttgaaatggtgccatggactttattctttgatggatcgggggcatgtttcgagtttgcttatactattaaaccagatgcgactaataatcaagctgagtatgaagcagtgcttaaagggttgcaattgctcaaggaagttgaagccgatgctattgaaatcatgggggattctttgctggtaatcagtcaattggcaggggagtatgaatgcaagaatgatacgttaatagtttataatgagaagtgccaagaactgatgaaggaatttcggctggttactttaaagcatgtatctcaagaacaaaatattgaagctaatgatttggcccaaggggcatcagggtataagccgatgatcaaagatgttaaggttgaaattgcagcaataacagccgatgattggaggtatgatgtgcatcaatatttacataatccatctcaatcagcttctaggaaattaagatataaggcgttgaagtacactctattggatgatgagctttattatcggacgattgatggagtgttacttaagtgcttgagtgtcgatcaggctaaagttgcaatcggcgaagttcatgaaggaatttgtggcactcaccaatcggcccataagatgaagtggttacttcggcgtacagggtatttttggccgacaatgctggaggatagctttagatattataaggggtgtcaagattgtcagaagtttgaggcaattcaacgagcgtcggcgtcggctatgaatcctattattaaaccgtggccatttagaggttggggaattgatatgatcggtatgatagatccaccatcaagtaaagggcataagtttatattggtggcgactgattatttcaccaagtggatggaggccattcctttgaagaaagttgattctggggatgcaattcaatttgctcaagaacatataatctaccgatttggtattcttcaaactattacaactgatcaaggttcaatcttcgtgttcgatgagtttgttcagtttgccaatagcgttggtatcaaattgttgaattcttcaccatattatgcacaagctaatggacatggagctgttttgccatgggaagttagaatcggctctagaaggatagaattgcaagacggtttgacagccgatgagtattataaccttatggccgatgagagggaggacttggttcaatcgcgtttacgagcccttgctaaggttaccaaagataaggaacgagttgctaggcattataacaagaaagtagtgcctaaggatttttcagaaggtgaacttgtatggaagttgattttgccgattggaactcgggataacaagttcgacaagtggtcaccaaattgggaaggaccgtttcaaatctataaggttgtgtctaaaggggcatatatgttgcaagggcttgatggtgaggtttatggacgagcgctcaatggcaaatacttgaagaagtattacccaagtgtttgggtttga

SEQ ID NO: 67124 - DNA, 600 bp, Oryza sativa
  Clone ID: PAT_MRT4530_68010C.1
ctacggcgaggagacggcgtcgccgagctcgcatgggccatggaagaggacaccgcagatggacagattggtgagccgggcgaacacacaggacggcggcacggcgaggccaaggaaccctagctccagcgagagcgaggtggcgctcccgaagcagggaagctcaagaaatgtaccttgttcgatgtgctccgggtctcccctgctggtcaccttgaacagatctccggcgaggcggcgggcggcgacggggagccattccgcgatgcggcgagggccaacgtccgcggcccggacgaggaggcggcggagggaaggcgattcgtcggcggcgagggcggcgcggatgctgtggccgtcggcttcggggccgaaatcgagctccgggaggaggtaccagaggtggcgccagcggcgggagaggacgctggtccgagcagcaccgcccgtgcctacgcggagaaggatatggacgagaatgtcgttgggaagcgcgctgaggcggtcctcgccgtcgcggccgtcgccgccgccgccggcgacgtagggtttctcgcggttgggggtgagcccggccggagtatataatactccccccat

SEQ ID NO: 67125 - DNA, 585 bp, Oryza sativa
  Clone ID: PAT_MRT4530_68011C.1
atggccgacgaaggcgagctcctcgccggcggcgagcccgtccggccgccgcggctggaggacgcggggctcgaggactgcgccctcccgccggagtccatcgccgaggccttctccctcgccgccatggccgtctcgtcccgcctcgcccatttctccctctccgacgacgacgacgacgacgacgaggacctcctcctcccgccgcgtggcggcggcgccgggggatgcgtggaagactcgggcccgacgtgcggggacatcccggatgccctcgtcggggtgggaggcgaccgcgggagcggcgccgacgaggtcgtggtggtcggcggcggagccggtgagggcggagacgaggtggtcgtcggagggcgcggggacgaggaggatagggttgtggtggtcggggaggagcggggcgagaagcttggttctgacaatggctgcgtcgaggggatccgggaaggaatcgctgattcggatcgcggagaaggcaatggagaagaagggaaggagaaggaggaggagaaggtggaggtggtggtggctgtggagaaggcgatcttggtggaagatttcgcgtga

SEQ ID NO: 67126 - DNA, 242 bp, Oryza sativa
  Clone ID: PAT_MRT4530_68012C.1
atatcaaaacaacatggatgtagagtgtttgtaaaatattcaacaagtattcttgcaccctgttacaggcttacagctaacccacctgtttgaaatttaataacccagctaactaattttattgatcttcaatttctcctattacttgcaaaaaagcaacaagaatgaagcatatgcactgagtagtctgtgcaatcatatatttcaattaaaatgccgaaatttgtgaacagaattgtgat

SEQ ID NO: 67127 - DNA, 2268 bp, Oryza sativa
  unsure (1)..(2268): unsure at all n locations
  Clone ID: PAT_MRT4530_68013C.1
atgacggacggccaccacttcaacaacatatccctcggcggccgcggcggcaacaaccctggccagtttaaactttattcgggaggacttgcatggaagaggcaaggtggaggaaagaccattgaggttgaaaagtctgatatcacttctgtgacatggatggcaatccccagatcctatcagcttggtgtttcaacaaaggagggcctcttctacaggttctttggcttccgtgaacaggatatcagttcattgactaacttcatggaaaagaacatgagaatcacaccagaggagaagcagctttctgttggtggacataattggggcggaattgaaatcaatggcaatatgcttagctttaatgttggttcaaaggaagcatttgaagtctctctagcagacgtagcacaaactcagatgcaaggaaaaacagatgttgttctggagtttcatgtggatgatactactggtggtaatgagaaagattcattgatggatttaagctttcatgtaccaacttcaaatactcaattccctggagatgagaatcgtccttcagctcaggttttatggcaggctatcttgaataaggctgatgttggctcatcagaggaagctgttgttacatttgatggaattgctattcttactccaagaggtcgatacagtgttgaacttcatctgtcattcttacgactccaaggacaagctaatgatttcaaaattcaatatagcagtattcttcgcctctttgttttaccaaagtcaaataatcctcatacctttgtggttatcactcttgatccaccaattcgcaaaggacagacattatatcctcacattgttattcagtttgaaactgaagcagtcgttcaaagggatctgacattaagtgatgaggttttggctgaaaagtacaaggatagactggagaactcttaccagggtctgatacatgaagtgttctccaaggtccttcgtggcctatctggtgctaaagttacgaggccaagcacgttccgcagttgtcaagatggatatgcagtgaaatcatcactcaaagctgaagatggttgctctatccgctggagaagggcttcttctttctaccaaagcccccaacactcattctgcatgaggagctgtagctctttatggcagattgagtatgttgaatttgagcgacatggtgctgggggtgctagtatctcatctcactattttgatctcctggtcaagctgaaaaatgatcaagaacatctattcagaaatatccaaagaaatgaataccataatctcttcaatttcatcagtggcaagcatttgaaaatcttgaatcttggagaagctcaaggtagagctggtggcgttacagctgttcttcagagcactgatgatgatgctgttgatcctcatctggagcggatcagaaatcagactggcgatgatgagagtgatgaagaggatgaagattttgtggcggacaaggacgacagtggatctcctactgatgattctggagaggagggttctgacgctagtttaagtggaggagaaaaggagaaatcttccaaaaaggaagctagtagctcaaaggcgcctttgaagaagaggaagccaaagggtggggatgcggcggaaggctcggagaaaagaaagccaaagaaaaagaaggatcctaatgcccctaaaagagcaattgcaccattcatgtacttctcaaaagctgagcgagctaatctgaagaacagcaatccggagctggctaccacagagattgcgaagaagcttggggagaggtggcaaaagatgacagccgaggagaagcagccatacgtcgagcagtctcaagttgacaagaagcgctacgcggaggagtcagccgcctaccgcggggcggctgccatggatgtggactccggccctgcttcggactgaagagaagagacctgaattgcattccagattacccttagtctaggagggcgacagacaggatacggctagtggcatctctatttccatgtaaataaaacttatgagttatctggatgtaaataaaactatcgtaggtatctttcgagtcccgttctatgagtgtcttatcgctttatcttagctatatatatagatagcagctatagtatagtagagttcttcccgccatttatgctggccggataacttaccttcacctatgtagcagcaataagcatgcttatctgcttagttaaattataaatgcgtgttctagcntggagaatc

SEQ ID NO: 67128 - DNA, 627 bp, Oryza sativa
  Clone ID: PAT_MRT4530_68014C.1
atgggctcctaccactacacctccacctcccacttcttcttcgccggcggcggcgagggggagtactccagctacaagggtactggtagcaccgacacccacaggcccaccaccgtgcggatcccggttaccaccccgggcccggagcggccgccggacgacgcggcggcggccaggatccaggccgcgttccgggggcacctggtgaggaggcacgccgcggccgtccgcggcgccgacgacgaggcgacgcggctggagcggctgctccggaggcaggagacagtggacgccgtccgcggcgacgagcgcgagcgggcgcggttctcggaggcgctcatggccgtgctgctccgcctcgacgccgtcccggggtactacccggccgtgcgggaggcgcgccgcgccgtgacccgccgcgtggtggggctgcaggaggtgttcgacgccgtgctcgccgcgcccgacgccgccgacacgtgcggggtccccgccagcctggatcaggtcctcgaggggatctggggagagtcgccggctgcgccgccaccgccgccgccgccgccgccgccagcggcggtggaggtggaggaggaggtgctctggaagaaaaagggaatcagctag

SEQ ID NO: 67129 - DNA, 252 bp, Oryza sativa
  Clone ID: PAT_MRT4530_68015C.1
atgggctcctcctcgagcaacggccggaccgcgcccgcgccgccgcctccggctgcgcctgcgccgccgcacccactccacgtgatggacgccgacgaggaggacgagaacgtgaagcagctcagcgagattgcctcgtggagtccaaccgcagctggaaggcctgccaagcactctgcttttggaaggtttatcatattcttcattgaggatggcgacaccataggcagcgtgtttagagctgttagctga

SEQ ID NO: 67130 - DNA, 546 bp, Oryza sativa
  Clone ID: PAT_MRT4530_68016C.1
gaaagagggcgaaaaccatgggctcctcctcgagcaacggccggaccgcgcccgcgccgccgcctccggctgcgcctgcgccgccgcacccactccacgtgatggacgccgacgaggaggacgagaacgtgaagcagctcagcgagtgcgccgccctctacctctccctccaggattgcctcgtggagtccaaccgcagctggaaggcctgccaagcacatgttcaagccttgaaagcatgtgaggcaaagagaaacaaaagtgaaacaagataaaattattttgcaatatttggcactaataccagtctgcttttggaaggtttatcatattcttcattgaggatggcgacaccataggcagcgtgtttagagctaccgagaacaccaactcctgccattctcccggtggctttctccatcggatagtttcttccgtgttcaattataggatccccgggtaccgagctcgaattcgccctatagtgagtcgtattacaattcactggccgtcgttttacaacgtcgtgactgggaaaaccctggc

SEQ ID NO: 67131 - DNA, 271 bp, Oryza sativa
  Clone ID: PAT_MRT4530_68017C.1
tctctcacagaagaagtaaggagatggcccataaaaattaaaaaaaatttgtgttgcagtaagtatacgatatctctattgtatcaattggctataatgattactccagatgaggtgtccctctattgcagccgatagttggctctgttattgacctcgctctaagcttaaatttttcacgcatcccagtataccaataaaaaacataaactttattcttcttttatatttgccaagcattatctctacttctcaaatcgatgcaaggtac

SEQ ID NO: 67132 - DNA, 214 bp, Oryza sativa
  Clone ID: PAT_MRT4530_68018C.1
cccacgcgtccgcaacagacatcagaggattaaatacatatacacttctagtgaatgactgattgatcatcaagggctaacaaggtcgtgttattctactaggtactaatggcggccattgaggccatctccggcgcgcagctgagatagtcgaatattaggtttaaggacaggcaatgccagcgagaggtgcaggacagtgcgttggactcgt

SEQ ID NO: 67133 - DNA, 1893 bp, Oryza sativa
  Clone ID: PAT_MRT4530_68019C.1
cagtaaggtaggatggcatcgttgatggaagtgcaggtgccgctgttgggaatggtgcttcaccaactactccccatgtgtactgtctactctctcgtccaattcccgatgatatggaacgcctttgggcggcggcggcttcccccgagtccggcgagcctaccggtgatcgggcaccttcacctgctccggccgccggtgcaccgcaccttccacgagctggcggcgaggctgggccccctgatgcacgtccggctggggtcgacgcactgcgttgtggcgagctcggcggaggtggcggcggagctgatccgcagccacgaggcgaagatatcggagcggccgctgacggcggtggcccggcagttcgcgtacgagtcggcggggttcgcgttcgcgccctacagcccgcactggcgcttcatgaagcggctgtgcatgtcggagctgctgggcccgcgcacggtggagcagctgcgccccgtgcgccgagccgggctggtgtcgctgctgcgccacgtgttgtcgcagccggaggcggaggcggtggacctgacccgcgagctcatccgcatgtccaacacctccatcatccgcatggccgccagcacggtccccagcagcgtgacggaggaggcgcaggagctggtgaaggtggtggcggagctggtgggcgccttcaacgccgacgactacatcgccctgtgccgtggctgggacctgcagggcctcgggcgccgtgcggccgacgtgcacaagaggttcgacgcgctgctggaggagatgatcaggcacaaggaggaggctaggatgcggaagaagacagacacagacgtcggcagcaaggacctgcttgacatcctgctggacaaggcggaggacggcgcggcggaggtgaagctcaccagagacaacatcaaggccttcatcatcgacgttgttactgccgggtccgacacttcggccgccatggtggagtggatggtggcggagctgatgaaccacccggaggccctgcgcaaggtgcgggaggagatcgaggcggtggtggggcgggacaggatcgccggcgagggggacctgccgagactgccgtatctgcaggcggcgtacaaggagacgctgcggttgaggccggcggcgccgatcgcgcacaggcagtcgacggaggagatccagatccgagggttcagggtgccggcgcagacggcggtgttcatcaacgtgtgggccatcgggcgagacccggcgtactgggaggagccgctggagttcaggccggagcggttcctcgccggcggcggcggcgagggcgtggagccgcgcgggcagcacttccagttcatgccgttcgggagcggccggcgcgggtgccccgggatggggcttgcgctgcagtcggtgccggcggtggtggcggcgctgctgcagtgcttcgattggcagtgcatggacaataagttgatagacatggaggaggcagacggcctggtttgcgctcggaagcatcgcctcctcctccacgcccacccgcgcctccaccctttcccgccgctcctctagctacccctacctacctaccactcctactcctttcctgtccctgtaacgcaccgtaatacaaccattataaattaattaccactttactatattgtaataattaatgtgtatgtattccctacctagacctattgcatgtctctcaaatcaaatattccaagcaagcttgattgtgataaactgaaaaaggaaaaaaaaaaagaatgaaaaaaaaaaaaaaaacaaaaaagaaagagagaggagatggctgagagggggggggccgattaagaggaccaaagtttacttccccggccttgcaacgtaaaagtttttttttggggcccccaa

SEQ ID NO: 67134 - DNA, 1647 bp, Oryza sativa
  Clone ID: PAT_MRT4530_6801C.1
atggcgacggtggatctggcggagggtgcagccagcaaggcaaaggctggcaattggtggattggtggaggacaacgagcaatgcgaaggctggcgacgaccacatcttctctggatctggttgtaggttgcggcggaggaaggcgcaggcacaggcggcaatggtgtgaccacgacatcaagtggtccaatgttgttcatcttcaatccgagctagttgccatcgatctagtcctgggcttgaagaagatcaaatcaactggcacgctagcacacccgaagaaaccgccagcgtcgccgtctttggctggtgagcctcgctctgttaaagctaagatccacaagctgggtctatctgaggttgatgaaggcaacattgtgctcatcactctagataaattgacacctgagcagcaaaaggatcttgaggcaatgatgcaacaagcacggaatcagttcttgagctcattcacggagacccgcaagggaacacttgttcagaagtacaaagtaaaagtaattgctgatgtttctgggacaggttcttctaaggatggagaagtgaaacaagctccagatggcgtggctcaaccgagtaataaaggtgctgcagatggctttcaaggaattcaaggtgatggtgttcagggatttcaaggtggaggtcttaaccaagatggcaacacagcacagttacagtttaacaacttccaggatcagggtatgattgctccgatcagggagaagttctcgtctcaagactttgatagtttgtcacattttgcacagaaggaggttgagcaagaaatcaatcatcggttgaagaaggcgaagccgagacaggtgtggcgtgttagaaatcaagctcctgtagccgatgaagccgcagccgatgaagcgaagatgttggctaaaggaaaaagtgttgtgaccgcatcggttaacatggttttcatattgcctgctgaatttggggtcaagcaagccgatgtcgatgaagttgaagaagaatcggctaagttgattttatcaccagagcaagcagtcttcgagaagccagaaggaacagagaatcggcatcttaaaccattgtatataattggctatgtcaatgggaagccgatgtctaagatgatggttgatggtggggctgcagtgaatttgatgccttatgctacatttaagaagttaggtagaaatgctgaagatctcatcaagacgaatatggtgctcaaagattttggtgggtacaatcagatctttatggccaaagaagatattcataagacaacttttaggtgtcctggtgcaatcggcttatttgagtgggttgtaatgacttttggtttgaaaagtgctggggctacatatcaaagagccatgaattatatatatcatgatctgatcggctggttggttgaagtctatattgatgatgtggttgttaaatctaaagaaatagaggaccacatagccgatttgaggaaggtttttgagagaaccaggaaatatggcttgaaaatgaacccaacaaagtgtgctttcggtgtatcgtctggccagtttttgggatttcttgttcatgagagggggattgagataactcaaagaagtgttaatgcaatcaaaaagattcagcctccatag

SEQ ID NO: 67135 - DNA, 1317 bp, Oryza sativa
  Clone ID: PAT_MRT4530_68020C.1
atggccacgaatcaagaaatggctatgaacaaatgttcagtgctgctgaatagagctcgggaattcgagccatcgcgtgcaaacggtggttacatcctctcaacaagttcatacccgcagatcagacagtatgcagctagtcctgacgagcatctacgttccttaccctcactgctgcctcctccaccggggcaagaactcccactggcttacttgagggctcagcgtcaatcaagcggcaattatcgtggaatccaagctcaacgtcgcccattaattgatcaaactggagcattgcagagctcatttcctgaatccatctgcttaaaggaagagttgcagtctttgagcatgccaaggaattctccaaatgctggtcgaaatctcgtcggacatcctcatagtagctcgaagtcgagttccaagccttgccatttccatttcttcaggggttactgcaagaaaggtgtcaactgtcagttcttccatgggtccgtccctgagctgcataatcccaggcaagttcacccctttgcgtcgctgagcaagctggatatggagatcagagaactcctgatcggaataccaccaccagtcgcagtcgatcgtttgccgtcgatgtactttgagaagtacggtaagcccctgcggcctgatggatggctcactgagagccagcagcatggaaggactggttgcagtcttacaagtctgctcatggggcttaacaccatcagagtggtcgagagagaacatggacagtatcatgtagtcctggtggaagatgctcggaagaagtacatggattgcttgggcttggctcacagttgcaacttgatggatactggcactgggtctaaccagatttatatgaccttccctgttcacagcaaattcactgatgatgatgtcgagaattacttcaagtattgccttaactttattgttactaggcaatttgggcctgtctccggtgtgcgaattccctatcaggagaagcggatgtttggttttgtgagcttcctatacactgagacagtgaggcttatcttatcaaaggggacagctcacttcatctgtggattgcgagttcttgtcaagcgctacatggaaaagtctgaactaagaaaaatttatcggaaaaataagcaatttgactatcgtgaacacaggacatcaggtttcggtgtcactaatgagcattatataggtaacaacatgaaaaaaaaatcacacaggtcggatgatttggatgaagcttcagcatatgaagatagtgatgagatcattcttccagatagccttggtctctactga

SEQ ID NO: 67136 - DNA, 333 bp, Oryza sativa
  Clone ID: PAT_MRT4530_68021C.1
actagaacgagtatttttgattccaggcgtgaaagacaccctggctgtggaacgtcattgatcggtagcgcatactacatctctcacctttctgttattaacagcgggtggaattgcatgcgaacccttttgctgagaataaactctgctggaatcgtcgaatggattttagcgacggctaccgtagacgttgccgatatactttggctacgatggattcgaggaaataataggcttcggcagcatctgagaataatagcatgacgacactctgactctagcactgatattaacgagcacgctgaggagcacgacgattatgcgctctcttct

SEQ ID NO: 67137 - DNA, 732 bp, Oryza sativa
  Clone ID: PAT_MRT4530_68022C.1
atggatcatattggaattagcggcggcggcgagggcggggtggtgtctccggcgcagccgtcgtcgccggagcggcggtacaagggcgtgcggctgcggaagtgggggcggtgggtgtcggagatccggatgcccaacagccgggagaggatatggctgggctcgtacgagtccgccgagaaggcggcgcgggcgttcgacgccgccgccgtctgcctccgcggctcgcgcggcgccggctcgctcaacttcccggagtccccccctcccgacgtccgccgccgcttccccggcgcggctctcacggtcgagcagatccaggccgaggcggcgaggcacgccaaccgcccgtttccggcgaacaccgccgccgccggcgggtcgtcgtcgtcgtactcgatctcgcagcggcaagaagcagcagcccctgcgcggtcgacgagcaacgacgacacggccatgtcgtcagtgccctccaccgacggcggcgctgccgactacgacggcggtgatgatgtcattgactggtcattcatggacacgttgccggcgatgtcgtcgtcagcggctagtaccaatgctgatctggtcccggccatggatgatttcatgtacgggttcttgcacacaatgccgccatcgccatgcgaagacggtggggaggatgtgatgatcgacggcaattgcaacatggatcagacatttttctcagtagatctttggagattttga

SEQ ID NO: 67138 - DNA, 329 bp, Oryza sativa
  Clone ID: PAT_MRT4530_68023C.1
ttgttctttgagggagtggggtgcacattcacaaacaggccaacgaaaaggctcgacgccagttacgggttaaacttttcgactaataccgaccagcttatgcagggtaaggcacgaggggcacctctcgggtatctgaccagggaggaccatgcacgaggcacagcttgttatcgaatacccaactaatgactgcaacgtgcacgcctgtatgcgaatagtaccgatacatcggggcaggctggactacagtacactaaggccaggggatggcacgccgcgcctacaacagactggatacacgctctcatttcagattgtacaccagc

SEQ ID NO: 67139 - DNA, 230 bp, Oryza sativa
  Clone ID: PAT_MRT4530_68024C.1
gttcataggtgttcttaggcacgaatcaatctacctgcccaaggtttaacgagtaaaaagattgcaatagttgaaatggataaacaaccccacaaagctttctttcggggaaaaaacacaggtttttaaaaataaaagtggccaccactgcagataaagcgcctttttaatggaacataacgaccatgagcatattcccccgggggaactgaaccacactagcacacctt

SEQ ID NO: 67140 - DNA, 574 bp, Oryza sativa
  Clone ID: PAT_MRT4530_68025C.1
ggcaggcgttcactagccatttttgttcactgggattgcagagactacaataagaggcctgcattgaaccttaactaacaggatgaccaaatattgggagagcatattaatggtttggtgcatattttgcaaatgatggatttatggttcgatacacattctgattgattcttctacgaccaccatccaggtgatttcaagcaattatatatatactggtgctgcataggattcaacatgacatagagaaatacaaactgttgcattcagttgaaaatatatactttaacagttgacggggatatgcatcggtgttcattatttgatatatcatgtactatgaacatattgatgctctacatcaaggttaaaaggtggatctacttccctttgtcttttattgatggataacgtgcatagatgctatttcttgacaagctgtcaagaatatggaactatcatatctgcctaactggttacaaatgcataggatctggatcatgtacaagtaaaccttgattcctatgtgctctttttgatggtcgccttgcatagatggtaaatatgacaaata

SEQ ID NO: 67141 - DNA, 197 bp, Oryza sativa
  Clone ID: PAT_MRT4530_68026C.1
agctgtagctgaagatggccctctgatggcgtgcgcacacgcgtccttcaggggctaagtcaccgcgcatgcccgccccgcgtcggactcagttggacgcagatggggagacagggcatgcaggggcatgagcatagagtcagaccttctactgcaccgttaccgggaggacctctgagcagatcgagtacttgctc

SEQ ID NO: 67142 - DNA, 2395 bp, Oryza sativa
  Clone ID: PAT_MRT4530_68027C.1
gggtgaacttttttttagttttttttttttttttttttttttttattgaaagataaggctttatttatctgtagcatccagacaatacaaaactttcccatccttcattattaaggcaaaaccgaatgcaaaactgtcacacaaattatatctataccgcgtcatctaagagcctagcatgatctcatatgaagctccaattttccattggacaagaatagcagtattcagttagaccagaatagtcagctctcttataccctgaaaaagctcaaacaggtcagctcctgtcaagtaggagctgactaataaaggagctgaggcatctcaggatttcaggaagatgacgggacatctatacgtttctcttgaaactgtgtcagcttctctctgtactcatgcaatttgcatgtgagaacagctcgattcagcataatctcatcactctggaagtttaagccggtcaaagagtaccaagaaactctgctcaggcacgctgtacaggaaaccaagctccgcacctccaaggtgtgggatcgtgctcttgccattgagcaccaatagctcaccatccacccaccggggatttttgaagccaggctgtgcaattctcccttgacctttatagctagcaatcacaccaaattcttcagggtatgcaccacggttctcaagacgtttgcccttcccaatcttagcacggaatgttatctgtccagcagggacactcagatcaccagtcaactttactgcttcaacatactcgaaaaactccacttcatctgtgctgttccaatggccgaactttcgacggagctgcacaacttctggtccatatggactaaatgctcccacatagagaccactaaatggatctgagccgttactgtcagtaatgatcctattgaaaattgtattctcagtcagcttgactcgagccttgctgagggtaagctttaagagctcttgtacttctttatttatcttcgaagaactcttggtcgttccccataatgccttcgcaacatcagaaggcataagttctgatgccaatttggcagccatatcagcaactttctgttttgcagcctttgtatcagccagatctcgatcagaaccttttccaggaatgtaaagttcgaaggaatccttttccaaattattgatttcagctggaactcgaacatatgattttgctccagcatcctccttgttatgaaccactccactaatgaagagcttcatttctggacttttactatcttcagctgagtctgaatctccatctggaacatcatcctgctgaagctcctcagtggtagaatcttccaatgagttctctgacgtgctcttcacatcatcttgcactaattcttctgacgaatctgaagctaattcagcttcctcagacacatctacatttattacttgaactttgaattcaggaatccgagacttgaagaaattcagaacgcttttcaacccttcaacactactatccttggcgttaccaacatcttgttctttatcctcaacatcttcatctccctttaatgtagtatctgtattcgcttcatcggtaatgccctcagatatagcactactttccaatgagctttcattctcttccttagctggactttctgcagttgctgatgatacggatgatgcacttgaagtgccttttgttggtcgcatgtgtacaaccttcattgtatatgtctcatcgtcatctctgacaaggaaaatttcaaataatggagttcctgacgatgcagtaaccaattgccttgggctgaagctcttagccacatatctcccaacaccggggcttatccgtacgattctcccgatcgaatcatcggtatccttagcgtaccccacccaccaacctaccaagttggttctggcaagctttgtcaaccttgaggcgtcctgatacctctgttcctctatagcagtcttgagttcagacatgacttgggcgacggcgtcgttgcccgtggcctcgagtatggccttcttgagcttggaggcttccgcgaagtcctcgttgtcgacggcctcctcgagctggaacttgaggagggaggcgtagctctcggcctggtcgacgtcggcgaagtggcgggtccagcgggtccaatcccaggtggagggcgaggcggaggcggaggcggaggcggtgcagcggcaagcggcggaggaggcccggcgggaggcggcggcggagggaaggtgcgcggcggaaggaggcgagcggagggggatgtggaggggcgggcgcgccgccgccggcgaggcgcacgcggtggctgcggacatggccgatcggtgacgtcctctctctccccgccgcgcgtgagcccgtgaggaagagcagggctacgggggg

SEQ ID NO: 67143 - DNA, 534 bp, Oryza sativa
  Clone ID: PAT_MRT4530_68028C.1
atggcgcagtggcggccggtgccggcacggcgggactactggcgcgagggcttaccacgaagtggcggaacggcgaagttcgacggcgagtggcgcggcgcggtcgaaatagggacggacggcggtcggcgacgggcgcaggtgttcgacgctcgacctccctcgcgtaacggctcccggctccctccaatagcagcaacggcaacgggcacacctcctcaacacaccccgccacccacactggccgagaagccctgtggcggcggcgcagccggcgcccaccaggtgttcgacacccggcgacggcgtgatcctgcccctcttcggttcgattcaatgccctgggccggcatgattgcctacgcggtagtatgcaggagaggtctcgctagctggagaaaggggcaccgcattacccagcggtcgcaaccgggggtgacaagatggagacgcgacggggacgtgatggcgacaagagcgacggcgatgggcagtggtaacggcttggatagggggcgccgggctatgccctag

SEQ ID NO: 67144 - DNA, 335 bp, Oryza sativa
  Clone ID: PAT_MRT4530_68029C.1
ggtggggggttttttttttttttttggggtgtttttttttttttagctcaaaaattctgctcaatgggcttggaaggtcaacaggggccccagatgaagtatcgggaatgaaacaaaccggggcatattgcagcgggggggggggcagcttttagcataaacgtttgaagcgcttttgaacgtgaaagggttttgattaagccatattttttgaacggggggctttcaaccagtttgcagctttggttttatcccggggctctttttaaaactggggcagatttttccgggtcggggcgagaaacgactttaaaatcttggtgatttgggccttg

SEQ ID NO: 67145 - DNA, 4119 bp, Oryza sativa
  Clone ID: PAT_MRT4530_6802C.1
cacgaggatcgaattaagcagtttattatgccatagatatattgcatttcgcaacataagctctcgcagtgttccacatggacgaaggccccttactatgcacaatgatggcatactaccaagtggacaaaattggggcgggcaagatggatacgactttgctcctgccacttaacgtaattagcaaccaaactggatcagaatttactctcctagagttcgattagattgcatattataaagagttagtagtacatcagattttcagtgggtatgctcagtgtgctctatgcggcaattgcctctcctgggacaagagatataccgaaatttcgatgcttgccatctgccttgttgatgagcttgaaacctttcaaaggtagctgatttatgagaagagtttccagttggcatgcaatgctcttcccaggtaccaaaatatataatatcgtggcatcctgcataccttccttcgatctgtgagcactaagtcgacccacaagatcatccgtctgtccaatatagagcttgctgtcacgtctgataattacataaatgctggacctgccaacagttgaaggtgggggttgctccctagcacccacagcaacacagaccacctcaatcagttctgagatgctccttttgttgtagagatccaacagtttcttcttgcatattgtggtaacaacactctcaatttctttttctagtccatttctcaggtaattaggcttctcaaccaagctatttacagtagagttggctatggatatttcatggtggacagctgatgatgtctgcttgctgtttgtgctcatagccaaatatagttcctcagctcttctaattatcaagtcaggcataccttctttcctggctgtttgaaaagcaagactctctctacagatgccatccattaatttccatgttggctgaatgcacctatcgatgatttcggttcccatagctttgaaatcagtattgtggagtgacagtggaaggtcaaaaatgccatgcaaatgagttgatatgatgcctatgcagccaacattatcgagtctttcaatgatgctaccagctatacatgttccttttgctgtttctgtgcccctacatatttcatcaattagaacaagactcctagctgtagctcggcagactaaagatcgtatctctgacatttcaatctgaaacgaacttttaccatcagctgggctatcatatgctttcatatgcagcatgatggaatcgaaatgtgggatgacagctgaagcagctggcaccatcaggccacatattccaagtaatgcagcagcacagactgatctcagcatactggatttaccaccaccgtttggaccagtaagaataaacaaagagtgcatatggacatcattcagtattgcattcccttggttagtatcaagccagtaaggaaaagttcctgacaattccatttcacttgagatttcaatagtaagacaatatggtaccttacacaagggagatatagtaggaagcacccaaccccttcttcgtccttcactaacatgaccaaaaagtgcttttgttatgatgagcatcgttgagcaaaagacaaggacattaatcttgtcctgcaattcacttgaaagtcctctcaacaactcaagaactttacgttttgcattatcacaagcttcatggtacctggttaaagcattctcaactttgatagtggtgaaccattcttctccgacctttctaccttttgagtcaattgcaggcttcaattgctttatctgtagttcaccaggagtgttggcccacacatttggtgtgaatcgcctccctttaaaccaaacagattcatgctcttttgcataactgatttctcccttcgaacttccatttgaggacatcacagattttactcttgaaataattggcagaaaatcttcaatgaccgctgttgacagtgcctcagcagctatatcaacatttgagaactcctcttcagcatgcaccctttttacacgtcccttccaagatgactccatatcattgaagaactctttcggaatatattcagatgaagttattgcctggtcactttcaccacctaaagagattacttcagctatacgttgtgaaataaagctacattcattcactagtatatcggcttcaactttgaacccagtaactatggcggcaggatcaagcaatttattcaggatagcagaaagctcagcattgctacccatgaacaacacctcatcgaggacattctttattctacaaaattcgatgtgattaacctcttttgactcgagtaatttcacaagctttgctgccggtatgcatgtaaattcaggaatcgagcaagttatgctacccataagcctgcaagcctcttgaactgatgatgcaacatcaaaagatggagggttaagaagaagatctctaatatacaatgatggaaggccaccaaagtttggagggagaacaatttttagcaaactgggtattccctcagttggtatcaccccaatttgagtagctgttccaagatacaagggttgaggcctcccttccaatgagacactgacattacggaaaacagtcttctcttcaagcccatatatttcccttaccttgcataacagttcttcaataggattaccatcaaaccactcaaaagattttccactgcactctccccacaatagcccaccttcgccaaattctccccagcgtgatgtgcctgaagaattgttcctcaaagaactatgaaggtatagatgatgataacggcatatgcgaagcttagtaacaactgcttcctctgttaagccctcctcagctgaatatgttttcattgtctctagcacagaaatcaggcaatagccttttgcagatcgtgaaatcccaactacaggcattggatcagggaactcaacatcatggtctacttcagcaagaccaaatacataaggactaccaggatgtgcatggccagaaataaatcggcctttcctagcacgagcttgggttgggccttgaatttcttcaactatgcacacagagtaacctcatcgaggcagatcatcctatgatagttctgccgccaatccatgactggacatccagcttttggaatactatcagaacgcaagcctccaaaaggatttaagcctgcatgctccacaaggatacatgcatcaaacccaacagcctcgtagaaatctcccactctgcaaagtagaacttcacgaggaaacttcgatttgaattgcaacatttccgtgttcaggcttccatccttcaagcttccatttcttaaagttggatccaatcctaaaatatttgaatacacaagtctctgagtcaattgcattgatgatggtttcctgcacctctccattttcacccaatccgcatgcctttgataaaatgccaccagggctgtgaatttttcgatttcgtgccactttcgccggaggagagcaggaggcaatggcccttgatggtggcggtggtacagcggcagcagcctcgcgcatccccggcgtctcctccgccttgacccgccgccggcggtatccattcgcggctgctgcccacgtagccaatgcaacagccttgcgcgtccccaccgatgtctcctttgcctcatcccatttccgcggcgtgcccgccgacgagcgtcctcgcctgctgccgctggatggccgtgcccccatcggcgtctccttcacctgttgccttctggccgacaacggcatcctcggctgctgctgctacccgctctgccactgcatcgcctcgctgctgcccgcgccaccactgccgccaccaaggaccattgcctcatgccctcctccagcgaaacgcggggagcggggagcagcgagggcggtggcggcgccggagaaacgagtcggcggcgacgggaagccaccgcggcgtggcggccacgagcgagctcgcgagcagccgctgaatggccatggcgccgcccggcgcgcggggagggggaggagacccgccgccgctagggttccagccttccggtggctccccggcccgcggagcgcctggctccggccgcctccgtggacgccggcggaatga

SEQ ID NO: 67146 - DNA, 283 bp, Oryza sativa
  Clone ID: PAT_MRT4530_68030C.1
ttccctcgaggaggagggagccggacgccgccgtgggtagagcaggggagagaaggagaggaggagatcgccgtcttcttcgcctgccctcttgccgatcttgagcggtagtggagatggtgctcacgttcactaagcttttcagtcttcttttctccaataaggagatgaggatcctcatgtgcggtttctatgcggtcggttaaaccaccattctttacaagcttaagctctgttagatcgtcaccactattcccaccatttgttttaatgtctcaactgt

SEQ ID NO: 67147 - DNA, 590 bp, Oryza sativa
  Clone ID: PAT_MRT4530_68031C.1
taaactgcaggcggactcctggctcggtaccctcggtaccatggacgctatagcaaccaccttctcccacattcataacctcatcaccggcgtcaccaatggctgcctctacgagatgcgctccgtctacgctcattttcccttcaacgccctgctccccaaatccacgccatcatctaaacccgatcttgttgggcaaaaagaatgtgaggaaggttgacatgctcgagggggtaaccatcttgccgtcggataatgtgaaagacgaacttgtcctctacggaaacgacatcacagctctgctctcgctcagcagccctcattaacacataaatgccacttgaacaacaaggatttaaagaagtgcttgcatggactctacgtcagcgaccagggttccatcacagaggatgcctaacctcctatcttaacctaaaatcatgaaatgctggtaatacccccgtgtgggataatactctgaatgatcatacccttagagactaacttttggattggaggggcatttaggatgtaatggaccttggcatcttatcctacaaattgcgtctgtgtgcgatcatgaacccgat

SEQ ID NO: 67148 - DNA, 209 bp, Oryza sativa
  Clone ID: PAT_MRT4530_68032C.1
gtgtagcagtagcagctgctgtattaatggcgccgtagtgcaatggtggtggtagtttgctctcttctccctcctcgtgctcagcccgagctgcatgccagcttaaatgcttccccagagcgagctcatctcgctctcgcccgatccaacgccgcatagctagctagctagctacctcgtcgctgcgttgtgtttgtgctgctgcattg

SEQ ID NO: 67149 - DNA, 303 bp, Oryza sativa
  Clone ID: PAT_MRT4530_68033C.1
acatatggcaagattagtttcacgaggcaagtcccatttgatggattacgcatcgctaacatctacagccgatcaagtataccgaacaatctccaagtttttatttgcctctgccgatctgacgcaagttacgtcggcatggcctcatacgatacgtcatcggcaatcctaccgatcagctatcgatcaaaccagctggcacgctcagaatccgaaggcaattcttttggacgtgcattaaagttaagcagatctctcagaccagtgcatgttttccgcgtcaacactaggacaatgaatctg

SEQ ID NO: 67150 - DNA, 748 bp, Oryza sativa
  unsure (1)..(748): unsure at all n locations
  Clone ID: PAT_MRT4530_68034C.1
ccacgcgtccggcgcagcagcagcagcagcagcagtagccatctcttcttcctctcgcctccgtttccgccgtcgcctgctcggttccagctgagaccgtgcgcgcgcgcgagggagcaacctcgagaggaaggggatggagatgaagaagatcgcctgcgccgtcctcgtcgtcgccgcctcggccgccaccgtggcgttcgccgccgaggccccggctcctgcgcccaccagcgccgctcccgcggccgtcgcgccggccatcggcgcggcgctcggcgccaccgtggtctcgttcttcgcctactacctgcagtgagcccagccggaggaggaagagaggaagaggaggagatggatgcatggccatggctactaaaccgatccaaacacgcgcgataatgtgggtgctttgatttgtgccaactttgatgcctcgtcttctttcttctctttttataatgggttgtatttttgatgcaccggtttgatttcggtgctttgatttctcatatttcgtccaccctatttgaagggaatggatattgtactattattcaccatttgtttggattaaattaagatattggaattactggctacgcattttcgtttgaaaaaaannaaaanaaaaaaaaaaaaaaaaaaaaaaaaaaaaaaaaaaaaaaaaaaaaaaaaaaaaaaaaaaaaaaaaaaaaaaaaaaaaaaaaaaaaaaaaaaaaaaaaaaaaaaagggggggccgtttta

SEQ ID NO: 67151 - DNA, 159 bp, Oryza sativa
  Clone ID: PAT_MRT4530_68035C.1
gtatgggtatatgctgcacccccttggagggtgactttatggggtgcgccacccttggaggtgcaccccattgcaccccaccctgtgcgccggtgtgtgctgtggtgaaatgggaagtgttttcacacccagtatataaatgtgggttgcgagggaaca

SEQ ID NO: 67152 - DNA, 857 bp, Oryza sativa
  unsure (1)..(857): unsure at all n locations
  Clone ID: PAT_MRT4530_68036C.1
gcacgaggccccccccccttttttttttttttttttttttttttttttcgggatcaactcgctcgtttttttttttttttttacaagaaacgaatttaagacttaagagtacacatgcagagtgacttccagactacctataaggagcctcagtaggtagggtattacagtgtttgtacaaatggaatgaacaaaattaatcatgacaataaaccggccacaataatatgaatatcaacttagaatacaaagagcgcactaaattttggaatacagaattacaatgtacaaaatgaatgacaaactacacaccaaattattctgtatagcctcagcagtttgtcacctgtgaacttcctttacaattgcatcttcagaaacagaagattgtgaaagcaggtgcttgtcttcaagatcttcatcttcaaaatgctcattgctggatgtgcgggaatcatctgagaaatgacagtccgcgaggtgctttgtcccagttgactccaaccgcatgctttctggcagaaggcagttgcaaaaggcacctagcttcgcaagtcggttaacccagccaggaatcggttttcctgtcaatctggtactgagatcatccgtaaagtggttacagtttttggaaatgaggtgataagtatctccatggtattctgaagccattctctgaatgaaatctcgaaattctaaggcccggccggtcgtacggcctatgaaaattgaacatctgtacatgaaccctgngcagcactttggttccacctcaaaaacccctcgttggggtgatcatgagctccaaaactgtactcncgatccatggacctcgacggcggagggggaagatcccg

SEQ ID NO: 67153 - DNA, 453 bp, Oryza sativa
  Clone ID: PAT_MRT4530_68037C.1
gcccctgatgattatccaatggaggcagacgatatgtcgatatccttcagcggcaaaaaccgtaaactttggatgtcttatagcagattttaccaataactaaggcagtttcactacaaatcctaacaaaatttgaacaaatttgtgtgaactttttttttttttttgaaaattttggcaagaggcgtattcggtgggcgtctcgatggcgcgaggatgtccacatggtcatgcgacctcggccgcagcgcgcagcaaaattccaagcgatgggcgcgcgtcgcgtcgcgtcaagctcacgtgagccatggcgacctcgaccatggagaaagtataagcaaagccgccccccgcctttctcgcctccacggcgagcgcgaggagaagcaaccgagccgaagcgagccatggctggtggggtcgtcatcggcgtcgcgccaccggcggcggcgg

SEQ ID NO: 67154 - DNA, 147 bp, Oryza sativa
  Clone ID: PAT_MRT4530_68038C.1
atggagatccaaggaagcgacaagaggagatccccagagaaaaggagcacgaaggttgaacaggaggcggtgagaatgagggttgcacgcgacgtggaaaaggcaaggtgggtgacattgaactcgttggaggggcatccagaataa

SEQ ID NO: 67155 - DNA, 505 bp, Oryza sativa
  Clone ID: PAT_MRT4530_68039C.1
ggagaaataaacacaacggctttatttttattttctaccgcttggttaaccatacaaaatcatcaaaacatgcgtgcatacatgggggatccacgaaacaaaacgggcccaaaccaaagatgggggaaacgaagccccccacaagaagaagatcatgggtcgggcgatgggctagtaaaaaacaaaaacaccccgtacgtcgatcttttgtcaggggatgagtacagtaactagcagctagctagctagctacttcccttggcgggccgaaaccgaaacaacagccgtgtagaagggggttttgtgggcgtaaaggccggaaacggggactcctaaccctaacgtaaccctgtcaaggatgttaacatgattgccacgcctgatcagagttccagacactgaatcaccctgggcatcgagctttgaaattctaactaaacccattatccacaactccccctcataaaagcgcatgttcagtttctgagagagcatgcccatatca

SEQ ID NO: 67156 - DNA, 1035 bp, Oryza sativa
  Clone ID: PAT_MRT4530_6803C.1
ccggccgggaatatagagggtaagaagtgggggcatcaatcactactagaaaaaatatttttcccgacgtggggtcttattttcatagtggaacatagcccttaaagccaaatgaccgcctacaaaaatataaatcggagtgaagtcctattttcgcaggcggaccacttaagcgacgcttgcgaaaatcaatttccgcaggcgcaccttacgtggtccgcctacaaaaatcgtacctacctaaaaaaatctagtcatccttatcctctcctcccccatccttatcctctcctctccaccactcatttccttccccccctctctctctcatacttagaaaaaatctcttctctccacccccacctccattgccgggcggctccctcctcggcgacgacgatgaccgcgacgccacctctgcgcgccaacggctcccctcggccacggcgacgaccttcgcgccaccgggtcccctcctctccccacgtccgcgcgccgccggccggctccatcctctcccacgtccacgcgtcgccggctcccaccttcgccaccggccggctcccccctcggcgacgacgacgaccgcaccgccgcctccgcatgccgacggctcccctcggccgtgacgacgaccttcgcgccgccggctccccacctacgccgccgaccggctccctcctcggtgacgacgacgaccgcgacgccggctctgcgcgccgacggcttccctcggccgcgacgacgaccttcgcgccgccagctcccctcctctccccacgtccgcgcgccgccagctccctcctttcccacgtccgtgcaccgccggctccccacctccggcgccggccggctccctcctcggcgatgacgacgaccttcgcgccgccggcgggctccctcctcgcccccttcgccgtcggccacgacgagcgacgacaacggctcgcctcctccgccaccggccacgacgggcgacaacgacgacgatggcgccgatgcggcagggtttatctctttgtaacagaaaagtag

SEQ ID NO: 67157 - DNA, 302 bp, Oryza sativa
  Clone ID: PAT_MRT4530_68040C.1
ttgtgtgtttttttttttttttttggggggtttttttttttttttttttttttttttttttttaaaaaaatacattaaaatccttaacaaagcccccccaactttaggcaaagttcccgctttaggaatatccccatttttcccattcctttggggggaaaacctccaattaaaaagggaggcagttttatttccaaaacccaaagggaaaaaaaaaaaaaaaacttctccaagagggtggggcctttccccaaaggtttgggtgaaaaaaccctcacaaaagccattgttgcccccaaaaa

SEQ ID NO: 67158 - DNA, 540 bp, Oryza sativa
  Clone ID: PAT_MRT4530_68041C.1
tcagggttcagaagtgtcgttgaattcagctttggagaacttgccgttggaatcgatccactgctcgcgttgttcgacaaaggcgaggcggagggcttcatcaactctgattgtagacaaatatttgtatctatgaactctgatgtgagcatttgcaaagcctgagcgacttttttcatgcccccatttggactcagcaatacactcggttgcaccaggaggtggcccaagctctactaatgcctttgcttttgttttcccttgcttcttgtgatcaagtgtcaaattaaactcctcaccatggacatggtctccagttgctgtgttcttgatttccatcgatccggtgacgaaccaaagaagccggtcgtcaccgttttcctctgctgggtcggtcggtcttttttggcatttggtttgctttacggagcgcgtcttgtgttggtctcgtcgtctttggttgatgacggtcacgtcggcacgtccacgacgttgtggatggagatccctcgctcctgtgcttttccttttctttctcat

SEQ ID NO: 67159 - DNA, 209 bp, Oryza sativa
  Clone ID: PAT_MRT4530_68042C.1
atgggaaagaacgtgacatccgtggaggtgctttgggggagaggggaagtgcaacaagcaactgctggagagatagtacacctggcacacactcacaatttgacagaagacactgatgcacaagcaccacacgcacacacccaaaattagcaggctccacacccggaattaacataccgagcaatctacgtaccccacactaaccacca

SEQ ID NO: 67160 - DNA, 1686 bp, Oryza sativa
  Clone ID: PAT_MRT4530_68043C.1
ttagaaaatctccttgtatacaatgtttctagcgacattttcttcgggacaatctgaatcatcaatcagaaccttcaggccatttcggtttgtgactctagagaatgctaccgccctgtttgggggagcttctcccagctgcagcttttcccaaaagctgcttctgctagaagctgcctcaaacagtccacagcttctgagaatcttgtcgtccacatgtgtacctgttatgatctgtgcttcgatgtatttcttacctaactgtgtgattgtcattctcgtgccgttgcataggcctgcagtttggttgatgttacgaagtagcatgacaggcaggcctactttaagcttaagttcgtggtttggtattccagggaatttcaacgtgttgaggaactcggtaggatacatgtgctccatgctactgttgtttgtcatcgctttgcaaacggtgtcacagcttaggtatgtcatttcttctcgttgtatttggttcattatgtactcattaatttcctggactgtttcgtttcttgggcataggatagctctttcctctagaaattctctttcacggtagttgtccagcaagtttggataaatgcttttgacgattgtttcttttgggtcttgtcctttttgtagtaggatatcacttgggatttttacccattcctctccttcatctgatgctgatgctccgtcaccgatatgtagaatccacttagcgaattcagcgaccttttgcttctctagcggttcattggacatgcagcttagtcgcatgttttctgttagtttgataatttcaaagtgattccagaggtatgagcgtttgattgatgcattcactatattctctctccttccctttggaatcaccggaaggatctgtctaaagtccccgcccaatacaactgtcatgccgccaaatggcctttcactgctgttttcattagtgaacctcattatatctcttaggcttttgtccaatgcttcaaagcaatgcttgtttgccatcggagcctcatcccatagtatcagtgatgtcctttttagtagttcggccaaatgggttccttgctttatttcgcatgttgactcttccgtgatctttattggaatgcgaaatcttgagtgtgccgttctcccaccttggagtagaagtgctgcaataccacatgaagcaactgcaaggactatcttcccctcggatcttagttttgtcgtgagtgctttccataggtatgttttccctgtcccgccatagccttccacaaatatttgctttccttgccctccgttgatagattccattatcgcatcgaaggcttttttctgatctgtgttaaggctgtttaatatggcgaggtgctcatccttcagttggtctttgtcatagttaagctcttcgtttataagtctgttaccaagttcctctatctcggcagcatttggtagctctatgtctgggtagtcccttagcgattttcctgcttgtctcattagtttctctatttcgatcaaggcatatgctttcttctgtgaatctgttaaccgcagcgttggaaagtttaagattattcttctcttgtactgcatgtcctcggattttttagtattcgccttttgctggttttcaccaaaaattttggtcataacaaaatctgctattttgggtctcat

SEQ ID NO: 67161 - DNA, 594 bp, Oryza sativa
  Clone ID: PAT_MRT4530_68044C.1
atggctgacaagaccctacgtgaattccctgctcccttcgctaacaacgtggccactgggccgcaaatcaacatgggagacatggatttcgatctgaagtccagcctcattacgatggcgcatgctagcccgttctgcgctaagcctaataaggatgccaatgcacatctacaacagttcctggagatctgcagcacatacatagtgaagggcatcagtcctgacgccgtcaggctacgattgtttctgttttccctccttggaaaagagaaacagtggttttatgccaaccgtgtcacgatcaacatctggtacaaatgctcaacggcattcctgtcaaagttcttcccgatgggcaaaaccaacgcccttcgtgggagaatcctaagttttcagcagacgagggatgagtccattaatggggcgtgggaacgacttcaggaatatatggtcgcctatcctcatcttgggatggacgactggctgattttgcaaaatttttacaatggactcactcccacgtctgggaccacctggacgcggcagctggaggagcctttttctctaagacggttcgaggagccggcgacttga

SEQ ID NO: 67162 - DNA, 440 bp, Oryza sativa
  Clone ID: PAT_MRT4530_68045C.1
ggctgggtacagaaatcagaagagccactaaactgtgagagatggacagccaaatctatctaccccgtttacactcgctccaaaggatcatacttgtgctgagccaagtttctgtgttgcatcctttggtaggaagcttctttttatttttgtccatgatatgtagcataccatacagtctcagacagctagatagtcccatacttagtggaagtgtggaaaaggtccttcagttcagtgtttgttatggttcgtgatccctcagatagattggctgtaactcttatataagtgttttctgtgtgatctctggataaaatctgataattttggtagcctccagtagatacctgtcctaaaagctcaaattactgatataaattggtggctggtagtttgtatggtatcaacttcacatatctcacactcttacttttacg

SEQ ID NO: 67163 - DNA, 387 bp, Oryza sativa
  Clone ID: PAT_MRT4530_68046C.1
atggtggcaagcggagttggcgcggcgagcgggcgagcgcgtggggaagaatctatgcggggggcggaggccggctcccctcgtgacttcgtgggcgtccatacctccgccgccgatgtccctccaccatcgccgatgttgtgctcgtcttgcatggagatcccctcgcgacttcgcggcggcgggcaagtacggtgggcgagcatgccggcgggcagagcaaccccgtcctcatcgtgctcctccccttcgtcggaagcgagagcagcagcgaggcatcaggcggaaaacgagcacggttgcgggctcgctgagatgaaggcggcggcggcgggcgcgctggtggagaaggcgcgagagaatcatctttgtaccaccgggcaatga

SEQ ID NO: 67164 - DNA, 267 bp, Oryza sativa
  Clone ID: PAT_MRT4530_68047C.1
gacaagcaattaagcgtaggttatccaccataaggggatcaagaaagtgatgatatgtcaggcacagcacacaaataaacccagcatgactaacttctactcgtgccataagaaattcaccactcaacttacccccttacccatgcatctagatccatgcatgcaggaaacatttactacaacacacacagaaagtctgaatttcatcatattcataaaaggatctttactctctccaattcattaacaattttatacatgcatact

SEQ ID NO: 67165 - DNA, 183 bp, Oryza sativa
  unsure (1)..(183): unsure at all n locations
  Clone ID: PAT_MRT4530_68048C.1
attaaaaagaaaaaactaaaatatccgnttcgncgcaccggcctcctcctcgccggccgccgcggcgaccgagcgcgtcgtccaacgcaaggctcgatcccgtcgcgccgncccatgcacccattctnctgcgtgcccccggtcccngtctcccccgncgtctctnncgtcgtcgngtcaact

SEQ ID NO: 67166 - DNA, 798 bp, Oryza sativa
  Clone ID: PAT_MRT4530_68049C.1
atgccggtgttggacatagaggttctacttggacgaggggacacctataggagagacgaaagcgctatctctgatctcgccgggcacggattcgaggaggaaggctaccctgttgtcgactacgagtcagatcttcagaccgccagtctcgcgtataccctagtaccaacgatccccataccatacaaataccagaattgcgacatcaaacgtcgacagtatatactcctcatcgtagagcagcaattaccactagccggaggagtagtagccatctatgctacacattgcaccacagccatagccctcatctctcatcgatggggagaaagaaattttagagatcgtttttctccttttgacgtcatctatgcgctcctatgtagcgtgtggactcgctcagccacggcccacaaagcggcgggaaggggagaaggggaagcggcggcgctgcacgtcatggttgtcgtcgccgagagccatcgtggtcgtcgtcaggccaccaacagatcagccgccaactctaccgcccaagaagattcagcggtgatgccgctgttgcgagtagatcggctagcgagaggaagacgaggcggccatcttcatggagcgtgggacaccgcgagtagccatcgttgccggctccaagaagatgagcgcgagctcaatccactgcgcggcagcaccatcggagctcgattcgcagagagaaagagggccttgtcaccgtcgcctccggccgccctttccgcttcatttattgggccaccggcgaggaggaggagtggcggtggtgga

SEQ ID NO: 67167 - DNA, 4980 bp, Oryza sativa
  Clone ID: PAT_MRT4530_6804C.1
atggccgagaaacagccaccaccaccatctagcccaggttccgttaaaggcaaggcgttgaagcagggattgactgacatcattgatgacaacacccgcaaggggacacttgttcagaagtataaaataaaagtgattgctgatagttctgggaccggttcttctagagatggagaggtgaaacaagctccaggcggctcggctcagccaagtactaaaggtgctaccgacggctccccaagcgatcaaggcgacaatctgcaaggagcgcatggggctcaaggtgatggtgctcaagggccgcaaggaggaaatcttaatcagaatagagtactagtcaatacattgtcgaacatgatgaagacaatagccgatggctcaatagctgagcatcaggccgtaggcccggtttatttgcaaggaggtgtcttcccgaattatcgatctttgatcaccgatgttcagccacctgttcaagcagttccctttgttgcaaccacaactcagctgacggcgccggcatcaactcccctacctgctacatcagctatggcgccaggccagccgatgaacccttggttgttgataagggagcatccacaccctactgggcagattgcgaatcggccgacccaagatcaagttgctgccatgtttctgccacctccacctattgttgatccagtgcagcagcagccgattcagcagacaccaccaatccagccagttgtacaaccagtccaacaacagccgaatcttcataattaccaagagggtaacctgggctatcaatatcagcctccttccccgcaagcccaatatcagccagggggattggctcaaccccagttcacatctcagtatggtcagttcgagtccatgcaacaacagccacaaggagaaactcagcaacgaccgtgggccgatgtgattgccgatgtaatgagagaacaatttgggcttaaaccaaaagagactggaagcttgtatcggcagccttatcctgagtggtttgaaagagtccctctccccaatcggtttaaagttccagatttctccaagtttttgggacaagaaggcgtgtcaacttatgagcacatcagccgattccttgctcaatgtagtgaagcatcggctgtagacgctctgagagttaggttattccggttatctctgtctggatcagcttttacttggttttcttctttgccatatgggtcgatcaatagttgggccgatttggagaagcaatttcacagctatttttacagtggggttcatgagatgaagttgtccgacttgacagcgatcaagcagcggcatgatgaacccatgcacgagtatattcagaggttcagggagaggaggaacaaatgctttagcttgagtttgactgatgctcaactagccgatttggccttccatggtatgattcctccgatcagggagaagttctcgtccgaagactttgatagcttatcgcatctgatacagaaggtaaccttgcatgggcataggtcggcggaagtcaggaaaagctctaagaaagttaatcacgtttgtccatacatgtatgggtcggatgacgaggaagatgattctgaaatagctgcagccgaatgggtgaggagcaaaaaggtcataccatgccaatgggtgaaaagtcctggaaaagaggaaaagtatgactttgatatcaccaaggctgacaagatctttgatttactactccgagaaaagcagattcagcttcctgcgggtcatacaataccatcggctgaggaattaggcaagaagagatattgcaaatggcataattctagatttcattctactaacgattgcaaggtttttaaacagcaattccaagttgccattgctgggggcaagattaggtttgatgattccaagaagccgatgaaggtcgatggtaatccttttcctgttaatatggtgcatacagctggtcaagcagccgatagggcccgtgcaaagggttttcaagccgatgtcgatgaagtggaagagggatcagctaagttggttctgtcaccagaacagacaatattcgagaaacctgaggggacagagaatcggcatcttaaaccgttgtatataaatgactacgtcaatgggaagccgatgtctaagatgatggtcgatggtggggccgcggtgaatttgatgccttacgctacgtttagaaagttgggtagaaacgccgaggatcttatcaagacaaatatggtgctcaaggactttggtggtaatccatcggaaaccagaggtgttctaaatgtggagcttacagtcggcagcaagactattcctaccacattttttgtcatcgatgggaagggttcgtacagcttgttgcttggaagggattggattcacgccaatggttgcattccttcgactatgcatcaatgcttgattcaatggcaaggcgacaagatagagatcgtgccagccgacaggtcagttaatgttgccagtgccgatttagccctttgggagatggatggccttgattgtttatctggaaaagtctgggatggagattttctaaaaatggagaacccaagctattactttgagggcgtcgtggagggttcgaatgtctacgccaaggatacggtagatgatctcgatgacaagcaaggtcaaggtttcatgtcggccgatgagttggaagaaatagacataggtctaggcgatcggccaaggccgacatttattagcaaaaaattgtctccagagtttagaaccaagctgatagagctcctgaaagagtttagagattgctttgcttgggagtattatgagatgcctggactcagccgatcgattgttgaacatcggctacctatcaagccaggggttagaccacgccagcaacctccgaggagatgtaaagctgatatgctcgaacctgttaaagctgagatcaaacgattgtatgatgctggttttattcgtccctgccgatatgctgaatgggtttctagcatagtcccagttattaaaaagaatggcaaggttagggtgtgcattgattttcgagatttgaataaagctacaccaaaggacgaatatccaatgccagtggctgatcagctggttgatgccgcatcagggaacaaaattttgagttttatggatgagaacgcaggatataatcagatctttatggctgaggaagatatccataagacggcttttagatgccctggtgcaatcggcttatttgaatgggtcgtcatgactttcggcttgaagagtgctggagcaacatatcaaagagccatgaattatatatatcatgatttaatcggctggttggttgaagtttatattgacgatgtggttgtcaaatctaaagaagtgaaggatcacatatccgatttgaggaaagttttcgagagaaccagaaaatatggcttgaagatgaatccaataaaatgtgcttttggtgtgttggccgaccagttttgggatttcttgttcatgaaagggggatcgaggttgaggcattatctattatctaatgagtgcactgttatatgcaaagccgacgtagtcagggaggcaagtttcgagtttgcttatactattaaaccatatgcgaccaataatcaagctgagtatgaagcagtgctcaaggggttgcaattgctcaaggaagttgaagccgataccattgaaatcatgggggattctttgctagtaatcagccaattggcaggagaatatgaatgcaagaacgatacattgatggtttataatgagaagtgcctggaactaatgaaagagtttcggctggttactttaaagcatatatctcgagaacaaaatcttgaagctaatgatttagcccaaggggtatcggggtataagccaatgaccaaagatgttaaagttgaaattgcagcgatgacagccgatgattggaggtacgatgtgcatcagtatttgagtaatccatctcaatcggcttctaggaaattaagatataaggcattaaagtatacactgttggatgatgagctttattatcggacgattgacggagtattacttaagtgcttgagtgccgatcaggctaaggttgcaatcggcgaagttcatgaagggatctgtggtactcatcaatcggttcacaagatgaagtggttgcttcggcgtgcagggtacttttggccgacaatgctggaagattgtttcagatattacatggggtgtcaggattgtcaaaagttcagagcaattcggcgagcaccggcgtcggctatgaatcctattattaagccatggccgttcaaaggttggggaattgatgtgatcggtattataaacccaccatcgagtaaaggacataaatttatattggtggcaactgattatttcaccaagtgggtagaggtgattcctttgaagaaagttgattctggggatgctattcaatttgttcaggagcatataatctaccgatttggtcttcctcaaactattactacggatcaagttcctccttacaaacttgtttatggtcatgagactgttttgccatgggaggttagaatcggctctcgacgaacggagttgcaaaacaatttaacagccgatgagtattataactttatggctgatgagagggaggatttggttcagtcacgattgcgagcccttgcaaaggttactaaggataaggaacgtgttgctcggcattataataagaaagtggtacttaaagatttttcggaaggagaacttgtatggaagctgattttgccgattggtactcgtgatagtaaattcggcaagtggtcgccgaattgggaaggaccattccaaattcataaggttgtgtctaagggagcatatatgttgcaagggcttgatggcgaagtttatgggcgagcgctcaatggcaaatatttgaagaaatattacctaagtgtttgggttaacgtatga

SEQ ID NO: 67168 - DNA, 393 bp, Oryza sativa
  Clone ID: PAT_MRT4530_68050C.1
atggctagagatggcaacggggaattcaccatcgagggtcacatccgcgtccccatccccgtgagagaatcagagaagggacgacagacggtggacggcggatggttggaggtggccggcgaagcgatgacgactagaggcggcgggcggcacgacgaggctggaggcgatggcgccgcgacgagggctggaggcggccggcggcgcgacgaggactggatgcagtcgacggcacgaggatggctggaggcggcgtgctcgtcgggacctcgcacgtgcgagaggatgcggcggcgtgcgcttctggagtggcggtggcgcgcgcgcatcttgagcggcagcgacggctatgtaggcgtcgtggagctttggaggggagagggagatggttga

SEQ ID NO: 67169 - DNA, 315 bp, Oryza sativa
  Clone ID: PAT_MRT4530_68051C.1
atggcactgtcgccgccgcccggccgtggactgccggccgccgcgtgggtcaccgccgcccggccgccttgcacccggccaccactgtccgccgccttgcggccgaccctccgtgctggcctccgtggccgccgtgctagcctccgctgccgccgccgggggcagccctccgtgcgcgacggccgccgccctccgccactgtcgcccggccgcctcccctctcggatccaatggaggggaggccgccgccaccgccgcccggccgcctcccgctgccagaggggagccggaggggaggggagggggagagaatga

SEQ ID NO: 67170 - DNA, 365 bp, Oryza sativa
  Clone ID: PAT_MRT4530_68052C.1
tctttttcttcttctccatgccgatcgcctccaagctcgtctacttccagcgccgccgcccatcgccggcgccgccggagccggagccggagcctcccgaccctcgccgcaggccctgccgagccggagccggagcctccgccgcacgccgccgcaagccgggtcaggaacatgttccaggaagcaaaagagatacctcaaagggtgtcgcatctgctggaaacataacaggacaagcaggcagcacgggctccagctcaaggctaaaccgcagcgtatcagatcatggccggcttcctgattcccgtcagcaggctagggaacggctacttcagaggcttaacagcgtggacttatcaggaaga

SEQ ID NO: 67171 - DNA, 424 bp, Oryza sativa
  unsure (1)..(424): unsure at all n locations
  Clone ID: PAT_MRT4530_68053C.1
gggaaagagagtgtnnnnnnnnnnnnngnctcnnnnnnnnnnnnntacatataccatgactcgtattcacgcgagtggagcatatgatgcctcgcgcccctgacaacagagtatagagtaccggatcttgaatcccattgatttgctgtgctctggcatggagcatcagctgcacgtctttacctcttgcgtgctgatggatgctcacatcctgtcgtgaccgcaaccaaaaccgcacaatctgttgtgctgttgagctggatgcactttcacctacctgtcatgaccatacgaagagcgcaactacgtctgttgattgcctcttgcatgcagatgcggccactggctattactcatcatgcatggcatttgtaagagagcgtggcgagtagcgatgtctgcgctcagctggaaagaatactgc

SEQ ID NO: 67172 - DNA, 1909 bp, Oryza sativa
  Clone ID: PAT_MRT4530_68054C.1
atgccgatcgcctccaagctcgtctacttccagcgccgccgcccatcgccggcgccgccggagccggagccggagcctcccgaccctcgccgcagcctgccgagccggagccggagcctccgccgcacgccgccgcaagccgctatttcccgttcattctcttttgatggttcctttgctgtggagcttggataccaagtgcgtcgttgtcaacacgttcgcatccttggaggccgcctatttggacttgaagtgtcctcccgtcgctcaaggtcgttagccatggccttcgtccagcgaccgtggctgaccggcggtgctaccgacagaggtgggtgcctggctggacgcctttcccgatggcgccgtcgtcgtcaccgccgcagcgctgccgaaagggttcgaggcggcgacaatggcgtggggacgggcctggtcatccgcgggtgggcgccgcaggtggcgatcccgcgccaccgcgccgtggggtggtccctgatgcactgcggcacgaacacgatgctggaggcgacgtcggcgggcgtcgcgatgctcacgtggcccatggtcgccgaccacttcgtgaacaagattttgctggtggaggccggcgtggcgatgcacctggcggagggcgcggacgccgtgcctgactctgggcagatggcgaaggcgatcgccgccgtggtcggcgacaaggggaagcccttcagggagcgtgcagtggcgcttgcccgcatggctgcagcggcggtagcagagggtgggacttcgtatagggacttggaaagagggaggaaatggggaataagggagaagagacgaagggcaaatgagtccaacgatatttttctccacttcgatctaacgccgttacctcataatgtgacggaagtgctacgggtcgaaggaaaaacgggtcaggaacatgttccaggaagcaaaagagatacctcaaagggtgtcgcatctgctggaaacataacaggacaagcaggcagcacgggctccagctcaaggctaaaccgcagcgtatcagatcatggccggcttcctgattccgttcagcaggctagggaacggctacttcagaggcttaacagcgtggacttatcaggaagaaggcaaaatacatcgttgtcatcagaaaccattcatggtggagtagccccgggcgtctccaccaccgcagatagcatattcagcagtctaaccagttgcttccacactgacgtatcgatcgctccctgcaaactccaagagagcacagctgaaaccttcaacaccgcagataagcatacgttcatcgcgcattgttctgaaccggctcctacacaagaagtagcaagctgcagagtaacagatgatgacgaactcgcgggaccttcaacggagtgctctatatgcctggagagatgtggggatgcagatgggctcctcgagctgcggtgcaagcacatcttccactcggcctgcctcgagcgatggctgcgctctcgcagcgactgcccctactgcagggccagcgtgctcctaacagcagaaggatgagaatttgaggatgaaactaaacccagctctgtagaacctctctttaagcccttaactttgtcactgctcacatgctcttcttccagtaccaagttttttcccccctttgctgatgaggctgtgaaatctgtgatacttttgtcactgtgtgaggcttcagaaagttagcatcttactgtaccatgaatgtgtctaaaacctgactgggttgtttgcaactggatcatgctctctccatgcatatagagtgagagctgagctgctacctgtttttccatggaagcttttgtttgctcttccatgttgtgcatctgaaagtgagtgattgcttttgctctcaaaaaaaaaaaaaaaaaaa

SEQ ID NO: 67173 - DNA, 3192 bp, Oryza sativa
  Clone ID: PAT_MRT4530_68055C.1
atggcggcatataagttgggtgtggaggttgcaagtgctcatgacctgatgcccaaggatgggcaaggttcagcaagtgcctgtgtcgagcttacgtttgatggccagcggttccgcacggctatcaaggacaaggatctgaacccagtgtggaatgagcgcttctacttcaacgtttcggatccgtctaatcttcctgagcttgcgcttgaagcgtacgtctacaacatcaacagatccgttgatggttcaaggtccttccttggcaaggtcagaattgctggaacctcattcgtgccattccctgatgcggttgtcatgcattatccactggagaagcgtgggatgttctcacgtgtgaaaggggaactgggtctgaaagtatacattaccaatgacccatccatcaaagcttcaaaccctctcccagcaatggatcctgtttcaaacaatcctcccccaacgccagcggagcaaatagcagctgatataaccagtacaaatctcagcacaactcatgagcacagggctgaggtgaaaacattgcacaccatagctaaggaggtgcagcatcagcaccatgggcatggccatctaccagcttcctttcccgaccaaccttccaagtatgctgttgacccgatgaaaccagaacctcaacaacccaagattgtaagaatgtattcagcagcctctcagcaacccatggactatgcactcaaagaaactagtccatttcttggtggcggacaggttgttggaggccgggttatacgtgccgagaagcatgccagtacatatgacctagtggagcgaatgcagtatctttttgtacgtgtggttaaggcacgggacttgcctgacatggatgtcactggaagcctagatccttatgttgaagtgagagttggcaactacaggggtataactaggcactttgagaagcagaagaatccagagtggaatgcggtctttgctttttccagagaccgtatgcaggcaactatccttgaagttgttgtcaaagacaaggatttgctaaaagatgactttgttggtctggtgcgatttgatctgaatgatgttccgatgcgtgtgccccctgacagtccattggccccagaatggtaccgcctcgttcataaaactggggataagtcaagaggcgagctgatgcttgcagtttggatcggcacccaagccgatgaggcatttcctgacgcatggcattcagatgctgcaacacttgaggatccatctgctgtaacacacatgaagtcgaaagtttaccatgctccaagactctggtacctgcgagtcaatataattgaggcccaagatattgccataactgataagacacgctatccagatgtttttgtaagggcacaagtggggcatcagcacgggaggacaaaacctgttcaagctagaaatttcaacccattctggaatgaggatctaatgtttgtggctgctgaaccttttgaggatcaccttattctttcccttgaagatcgtgtagctcctaacaaagacgaggtgcttggccgtgtaattataccgttgacaatgattgatagaagagccgatgatcgtattgtccatgggaaatggttcaatcttgagaagccggtacttattgatgtggatcaattgaagaaggagaagttctctactcggcttcatcttcgtctctgccttgatggagggtaccatgttctagatgagtccactaactacagcagtgacctcagaccaacagccaagcaactctggaaaccgtccattggtttgcttgagcttggaatcctgggtgctcaagggattgttccaatgaaaacacgggatggaaaaggttcatcagacacttactgtgttgctaagtatggttcaaagtgggtacggacacgtaccatcgtgaacaacccgggccccaaattcaatgaacaatatacctgggaagtttatgatcctgcaacagtcctgactgtcggtgtttttgacaatggccagcttggagagaaaggtggtgagaagacgtccagttctaaagatgcgaaaatcggcaaggttcggattcgtctttccactcttgaaactggccgtgtctacactcactcatatcccctcctggttctacatccatcgggggtaaaaaagatgggtgaattgcacttagccatacgattttcctcaacttcattagtaaacatgatgtacctgtactctcgacctttgctaccaaagatgcactatgtacgcccaataccagtccttcaggttgacatgctgcgccatcaagctgtccagattgtgtctgcccgacttagccggatggaaccacctctgagaaaggaagttgttgagtacatgtcagatgttgattctcacttgtggagcatgagacgaagcaaagccaacttcttcaggctcatgtcagtcttctcaggcttgtttgcagttagcaagtggtttaatggggtttggaactatcgttaccgacctcgctatcctccacacatgaacactaagatctctcatgcggaggctgtccacccagatgaacttgacgaagagttcgatacattcccaacaagcaggagtcctgatgttattaggatgaggtatgataggctgaggagtgttgctggaagaatacagactgtgtggcttgtccaggagagcacttcagtgttgctgaaagcaaatatgggagcagctgagtcatcttcaaagctcgctggctccatccatgaattcactgtgaaggatgcgagggggagtgatgtggaactcagcagatacaagggaaaagttgttcttattgtgaatgctgcatctcgatgtggtctgacgaattccaactacactgaacttggtcagttatatgggaaatacaaggagacaggagccaccgagccaggcagcaatgagcaggttgtggagtttgcttgtacccgcttcaaagcagagtatcctatccttggcaaggttgatgtgaatggcggcaatgctgctccactgtacaagttcttgaagtcagagagaggtggcctcttcggagaacgcatcaaatggaacttcaccaaatttctggttgacaaagagggtcatgtggtgaaccgttatgcaccaaccagctccccattgagcattgagaatgacatcaagaacctgctaggggcttag

SEQ ID NO: 67174 - DNA, 1176 bp, Oryza sativa
  Clone ID: PAT_MRT4530_68056C.1
aactagtggatccccgggctgcaggccttcctcagctccgcctcgcctccaccggccgtgatctcgccgccggcgccgccccgccgcccctgaggcctactagtagcgacctacaagtaccctgttttgtaccatcctaggagcgaatggccgcctcggcgcctcctccggccgagccgccgccgccgccggcggcggcggcggcggcggcgacgaatccaccggcttcgaccgcgcccacggaggacggggaggtggaggagggtgccacgccaccgagaacttctgcgttggggacggcgaactggggtaccgccaccctcgtcggcgtcttcgccgggctgctctacggcgggagcaaggaggccagcgcctctgtcagcaaagacgctgaagtgatgttgaagatggggagcaccacagacaagcgtgagcagtatagattgatgagagatgcaatggagaaaagattcatccgggttgccaaaggatcgctagttggtggtgttcgccttgggatgtttactgcaactttctttggcatacagaaccttcttattgagaaacgtggggtgcatgatgtatttaatatagctggagctggctcggctactgcagctgcatttggacttatattgccaggttcaccaatgtggcgtgcaaggaatgtattggttggatcagctcttggtgctggagtctgctttccccttggttggatacagttgaagctggcagagaaagccaatcttgagatggcaagttcgaaaccaacagatttggtggaggaacaaggtaatcaaagcggcgttggtgccgctatagaacgacttgggcgcagcctaaagaagtaaaaatttggaccatcgaaggaccttttttttttctcataatctgtgtgcgttcctgaagaccgcaggaggaacctgtttcatgggctgcactacttcaattttttcttctttcatgtgcctcacgctgtagtgctgtcaaactttgaagcagtaacagcaagggccacacggagcctccgttgtgggggaaaaaagagcatttttgataaaaatatcgtaaaaaaaaaatgtgataatgcttgtgccattacagtttgtgctgaatttaccctcggtaattcttcagttcacgaatactattttgtaaaaaaaaaaaaaaaaa

SEQ ID NO: 67175 - DNA, 171 bp, Oryza sativa
  Clone ID: PAT_MRT4530_68057C.1
atgcagattagtcgtcacactggaccgtacaagtcgctgacgagtggggcccgattgtctcggatgattagtcgagaagataccgtaggaagtactgtcaacctctcatctccaatcattgacagcggtggaaacaacccccggacatgttggggcttccagagacctaga

SEQ ID NO: 67176 - DNA, 426 bp, Oryza sativa
  Clone ID: PAT_MRT4530_68058C.1
atggtcaaattccaaggtttgtacgcgcacgcgggcatcgcgaggcaactcgacatcctccgtgtacgcaccaccaattacgcctacgtggggaaaccacatccatcctaccccagccagccggcacccattagcccattaggcccagcgtgcaagccaggcccaggaggtagggaaagaggccacgaggagggcgcagtcgtgcacatatgcacgatgaatgggttacgcaccaccaattacacctacgtggggaaaccacatccatcctacactcacggtgtcgttgcacgcgagacgcgacagcgtaccgcctacaacacggtttacgcgtatgtgatggctgatatgctatttcgcgagtcgtgcgtgctctacgcgtacccggagatcgctaggtgcctacaaggcacgtcgaacgtatga

SEQ ID NO: 67177 - DNA, 762 bp, Oryza sativa
  Clone ID: PAT_MRT4530_68059C.1
atggcctccgaacccaccgcggcggcgggcgctccggccccacagcccgccgcgccgcggaggcggccgccgtgcgtcctcagcttctcgctggcgcgcgaccggttcctccgccgccgcttcttctcggcggggctccgccccttctccatccgcctcccgtcccccgccggcgccgggaccagcgtccacgtgtgggcgccgccgcggccggcgcgccgccccgtcctcctcctccacggcttcggcgcctccaccacgtggcagtgggcgtcctacctccggccgctcctcgccgccggcttcgaccccatcgtccccgacctcctcttcttcggcgactcctgcacgctcgccgccgaccgctccgaggtgttccaggcgacggccgtcaaggccgccatggacgccatcggggtgaggcggttcgacgtggtcggcgtcagctacggcgggttcgtggcctaccggatggccgccatgtacccggaggcggtggaccgggcggtgatggtgtgcgccggggtctgcctggaggagaccgacctcgccgcgggcctcttccccgtcgccggcgtcgccgaggcggccgagctgctcgtcccgagccggccggccgacgtgcgccgcctcgtccacctcaccttcgtccggccgccgcctatcatgccctcctgcttcctgagggattacattaacgtcagccatttaatctcttcatctcttgttaattcctttgttaatccacattttttcttttaa

SEQ ID NO: 67178 - DNA, 680 bp, Oryza sativa
  Clone ID: PAT_MRT4530_6805C.1
gtcaagctcaagcaccaatcatttgttaagatgtgaacatttggcaaaaagcttatatacagttgatccaagaaatgccttgtgtttaccatttgattagaaaagaactagtcgattcaatgtgttgctgagaatttgagtactgtactaagcagctgctagtgcatttttcgggggggggggggggggggggggaatgttgtgtttctttatctgtgtaatctgttacatgatattatatctataattgatctagtagagggctaccctctttgacaagaatgaagagacctccatcacctctggagatcctgaggtccttgtctaggtaggtcgtcagcagccaagaccgggccctgttgttgccagggatgggtaacttgaggggtggctgcccagaaatggatcctgcaatacttgcaaaggcttgctgcagagggttcagcacctgctggactgggcccaagctgatcttctgcccaaatatatcaacctctgcaggtaggtctaccgatgatgatatcttcggtggctgaaagcttccctctttgaattggacctctatccttgatggactctgtacatcaaaagaagcagtggcactgaaagaaaacgaagcgaatggacttgagatagttgaggcattgactatggtcatgctatttgtgtcaatttcttgc

SEQ ID NO: 67179 - DNA, 471 bp, Oryza sativa
  unsure (1)..(471): unsure at all n locations
  Clone ID: PAT_MRT4530_68060C.1
cgccgcccattctccccgtcggccgccgctcgtcagtcgtcctccccattggtcgccgcccgtcccgacaccccttctccccgccggtcgccgcccgtcacgccatcctcctcgccggcagtcgcccatctcttcgccgcctgttacgccgtccaccccaccgaccgctgctcgtctcggcgccttggccgcatctactcctcctccggcggccaccgccgcacgccgccccttctccccggtgaccaccgcctgtcgggcatcgcgcctgatagaggagaagagagaggagagggggagagagacgaagagaggggagatggggatcgagcgaggaggaagaagagggcagtgagattgacatgtggggcccacatggcccacctttattaattattgtttttatgtaactgacctatgcgtcccacggcaattgtatttttntcaaatggagattgaacttaagcgcag

SEQ ID NO: 67180 - DNA, 177 bp, Oryza sativa
  Clone ID: PAT_MRT4530_68061C.1
atggcgttggtggcgaacgttgtacaccgcaacagtggcggcgtcgacggctcgacgctgcgctggccagaaacgtttgctctaatgcagtcatctttaaacacctaccattaccaacaacgcctctacttcgcccaaaaaaaggagaaaaaactctacttcacccgtagaggttaa

SEQ ID NO: 67181 - DNA, 710 bp, Oryza sativa
  Clone ID: PAT_MRT4530_68062C.1
ccccactccccccttccgcgagcaggttcgaggtttcggtggccgaaaatggcggaatcgccggctgatcggagcccaatctgagcctggacgcgcagataccgcgccttcctggcccgatctctcgaaaccccttgaaaaatccgagccgaaatggcggccaccgccccgatcgggcttgcgaagcgcgattcggtggtgctctggcctgggggtctcgcgagctgcacttattgtgactgaaagtgtggtcggctctttgctggttggtgtgggcttgggtcgcggagagagtaaagggtttgtggcatgatcagcgctagcgctgtggcgatgcgtggggagatgggtggcggtggcggcggcggcgatgagggagagctggaggacgagcttgatgccctcctcggaaccggtggcgctggcgcgcgtcggcgaggtgaggacgcgggagagagggaacgggagctcaacatgttcaggagcgggtcggcgccgccgactatagagggttcgctgaacgccatcagcgggctgctccgcggcggtggagaggcagccgttaccgttgcagcgattcccgacgctgagacgttgaacggcattgggtggtctcctctcggaggatgagctccgggctgacccggcctatctatcctactactactcgcatggcaatctgaacccaaggttgccaccgccggtgctat

SEQ ID NO: 67182 - DNA, 717 bp, Oryza sativa
  Clone ID: PAT_MRT4530_68063C.1
atggcatcggcgggtcccgcgggccggatcctgcgctcctcaaccccctccccctccccatccgcccgcaagatggtcggcgatcatggcgcgactgcttgggcggacgggcaacaacatgaagaaccactgaaacacgaagctgaagaagaagctgtccaggatgggcatcaaccccgttatgcacaagtccttctcgcaccttatggccgaggtgtgatcgtgggtcattctggtatacaagtagaatacagttgggtgacagccagagtgggatcagtagcgtatcgtctccagctgcctgcatcttgctccatccacttgagggtccatgtctcgcagctttgcaaagctttgtcttttggagacctttctactgttcgtcttcctcctacaatgccaaatgaagatcatgttcaagttcaagttctggcatgtcggcgttgcaagcgaggagtagcggtgccggaacaaatcaaggtgcgttggtcgggagccacgtctgatgaagcaacttgtgaagatgcagcggctttgcgccatcgtttcccgggtgcaccagcttggggacaagatggttctgaaggggagaggaatgttacaactgctattactaccaaggatacctcactggcggcaaacccagtcaaaagtattggccatggcggtcggttgaagcggcccagctctcaagtaattgggccagaatgggtgtaa

SEQ ID NO: 67183 - DNA, 950 bp, Oryza sativa
  Clone ID: PAT_MRT4530_68064C.1
tcattagtgacatcaaccatgtagtggtaattacatattgcaccagtgtgcttctcctatcaccaacatctcatctcaagacacacacacacgcagctaaccggacgattgaaatccgatgaaagaagtatcaagaaattcatgaaacttcaaagaattaacatcacaccgtaagtaatttcctaagacaaacacaaggacgcagccaaaaaaaatgaaatgaaggaaaaaaaaaattcaggacctttcatagagttaccgaacgagcaactatgctgagtgatcaacgcttcagctctcgcgggtcgacccggcgggcctgagcggccggtcgtcggcgtcgtccatcgacacgctccgggcggtccgcgcggagcccgcgccgcccagctgctcgatgcgcacgacgatctccggcatcgccggccgctggtccggcacggtcacggtgcagtccatcgccagccgcagcatctccaccatctcgtcctcggcgccggggtgcctgaggagctccgtgtcgaacacctcggacgtccactcctcccgcacgacggagcgcgcccaccgcggcaggtccacgccctcgtcgtcgtgcagcacggcgtgcgtgggggccttcccggtgagcagctccaggagcagcacgccgaagctgtacacgtcggccttctgcgacagccgccacgggtccgccaccacctccggcgcgcggtaccccgccacccggctggacggcgcgcccgccgggccgacgaggtgcgcgaggccgtggtccgccacgcgcgcgtccaccgacgaccggctgaggagtacgttcgacgacttgatgttgccgtgcaccaccttggagcccgtcgcgtggatgtactccagcccgcgcgccgacgccagcgcgatgcgcctcctcgactcccagagcagcggcgaccggccggagccacggtttc

SEQ ID NO: 67184 - DNA, 3534 bp, Oryza sativa
  Clone ID: PAT_MRT4530_68065C.1
atggctgaccgcgatgaggaacagatattgtacgatacaatcgcggagggaagcagccagtactggaatgaagaagaggggaacgaggatccaaaccagtacttgaacgaggaagggaacgtggagagggatgcggaggggaaccagcaggggcacgtggaaagggatgtggaggggaaccaggaggaggaggctagtggtagtcaaccctccgttggacagaagagggcacgcgggcaacgaggtgcagcgaagaagcttgagggtcggcacatcataacggaagtggaagaagatggacgtcctagtgccccggccgaagccgccaagaactatgtacgtcacagcggttgggttgtgcgggataacgtgcctgtcagtacggtgtactggcgaagaacaagggcacgcggagatcatgagagctttgtcccagattcggagaaagagatgctgtggaccacaatgctcgagacattcacccttcctgcgggtacagaggacaaagtgaaaaggtggactctgaagaaaatggcagaacagtttcagagcttcaagggagatctgtaccagaagtatatactgaaggggcagacaccgaacttcgacacattcccaaagctaagggatcactgggacgagttcgttgcatataagacaggtgaacaagggaaggcgatgatggaaagaaacaaagaaaatgccgccaagaagaagtaccatcaccacttggggtcaggaggctatagcgtcgcgatgccgaagtgggagcagatggaggctagcttgattgagaggggtatcgaaccggcaacagccaattggccggaacgatcgaagttctggtactatgctcacggtggaacgctcaacccagctgatggctcactggtcttcggctatcagatacaagaggctgcgcgacgactaacagatgcagtggaggcctcctctcagggcacgttccgaccagacagagatagggacgagctgacactcgccctgcagactccagagcatccaggacgaactcgagggaaaggggtgattccttggaagattggtttcaaggaggacatccacacgtacaggagtcggatgaggagcaagagagataccgaggcgaagattgcagacctagagttccgggtatcgagctacgaactcaacatgcaagaggaggttgcaaggaaggttgatgaacgcatggccgcacatcggtcccatgatccccagccgaccattcctcctgcaatggtgagcccgtcaggaaaccgtagcagctgcgcctcaacggggcaggtggggtcgggcatgcccatcccaacggacccttcaggtctttaccactgcaggccgattccagcaggatactccaaggatcgtgcactgtctcctcctcgtgctccgccagcactgtctccacctcaggctccagcatcgactcctcaggatcttgcaccgactcctcctcgtgctcctacacctactcccccgcaagctcctcttccggcaccttcaaagtcaagggcccccccagctcctccgcttgcccacacaagggcatcaaagaaggcgaaagttgactccgccaagaacaagaacccggggtgcgattgcacgcaagaggagcttaacgcttacgctgcatcagaagtcaagagacaattcaagcatcgaagtccagaaaagaagattcctatagaccccagtgtcagaactgcttcagggtccctcagcttggagagcacccaaaccaggagatcgagccggttggtgacgggtaaagaaatgacgatagaacaatttattgctgacaccggtctaactacggatcaattgctaggagtcgcaccaatcgaaaaggcggaagtgaaatacatgtacgaactcggtaaaccgcttgtcaagcctgagctgctgcagtccctacccacacaaatgtacaagttccatcagctgtacatggagatgagcgccaccggtagagagatgatcggagcgaggatcagggacacggacttcttgcaaggagatgacattctctggatcaatttcaggggaatctacgaactataccagctggacgccctcgacgtctgtattatgagttgctggattttaatggagattcaaagggcccgacggcggagggttttcgatactggattcatcgaccctcggaaagtaaacgtcgcaatgctcgaccaatatccacaagaaacagaggacaatctcgtccatctcctgaaggcgcagcattacaagacgttcatactgttgccatacaacacagaattccactgggtgcttttactcatcgacctggaggcctgcaccgtcaacgtatatgactcaatggataaaaaagagtctacgtttgacaaggttttcgaacttatagacagggcttggtatcggttccgtcatttggtccgcggcaaatggagagaaagacttaggcggaagttcaaatttccttgcgcaaagcaaaagcagggaactaacttgtgcggctattacgtgtgcgagtattgccactgccttgcagaccaaatcatcaccacaagagagctcgattttattcgcatgagggataacctgaccacacacaaggaatttatcgcggcggttcaagaacaactcatgggattcatcaacgaagaaatccttgatcccaagggtgtattaatggtcttgacacttcagcgtgtgaagatagggccgtggggtggaactggaggccatgcttgggatgagggaggccatggtgccagtgctggcggttacaccggtgtacgccgaatgagtatagggtcttcctggtgtgtcagctcaatgttgtttgaatacgacgacaatggcaaacgtgtgaaaggtaccctgcaaggagagggaggcaatggaatacccgaggaggagctcgacttccatggggaggtgttgacgcacatgtgcggctaccatgacaaccacctcatccggtggttgcagttcaggagcaaccggaacaggacgttcggaccatacggcaatcttggagaagacagagctggatggacgcggttcgaggtctccatggagcactcggggtccatcgtcggcttctgcggccggagtggcaacttcacggacgccatcggcgtttacgtcgccgtctggaatcccgagaggttctatgatagcatgcgcaggcagggcgtccgcgtttaccgggcgtcgcctctgcgcatggacctgcgtcaaatagaagaagagaaaaagaaggaagaagtggaacgtgggcgcctacagaaggagatcaaggaggggcgagaaagtcttcggaagttacgattgaagcttggagtggatgtgccgcagcaggatcaggaaatcgtgcagcaactggaacgcgggcgtcagggaaaacgccagacaatagaggagctgcaagtggagcatgagcaactggaacgggaacgagggcgcttgcttctactgcagcaagtggatgagcaactggaacgggaattgcgcagacacacctattga

SEQ ID NO: 67185 - DNA, 2817 bp, Oryza sativa
  Clone ID: PAT_MRT4530_68066C.1
atggctgatcgcgatgaggaacagatattgtacgatacaatcgcggagggaagcagccaatactggaacgaagaagaggggaacgaggatccataccagtatttgaacgaggaagggaacgtggagagggatgcggaggggaaccaggaggggcacgtggagagggatgtggaggagaaccaggaggaggaggctagtggcagtcaaccctccgctggacagaagagggcacgcgggcaacgaggtgccgcgaagaagcttgagggtcggcacatcataacggaagtggacgaagacggccgacctagtgccccggcggaagccgctaagaactacgtacgtcacagcggttgggttgtgcaggataacgtgcttgtcagtacggtgtactggcacagaacaagggcatgcggagatcatgagagctttgtcccagattcgtggaaagagatgctgtggaccacaatgctcgagacattcacccttcccacaggtacagaggacaaagtgaaaaggtggactctgaagaaaatggcagaacaatttcagagcttcaagggagatctgtaccagaaatacatcctgaaggggcagacaccgaacttcgacacattcccaaagctaagggatcactgggacgagttcgttgcatataagacaggtcaacaagggcaggcgatgatggaaagaaacaaagaaaatgccgccaagaagaagtaccatcaccacttggggtcaggcggctatagcgtcgcgatgccgaagtgggaggagatggaggctagcttgctggagaggggtatcgaaccggtcaccgctaattggccggaacgatcgaagttctggtactatgctcacggtggaacgctcaacccagctgatggctccctggtcttcggcgatcagatacgcgaggctgcgcgtcgactaacggacgcagtggaagcctcttctcagggcacgttccaacccgacagagagaaggacgagctgtcactcgccatgcagactccagagcattcaggacgaacacgagggaaaggggtgattccttggaagattgggttcaaggaggacatccacacgtataggagtcggatgaggagcaagagagataccgaggcgaagattgcagatcttgagttcagggtatcgagctacgagctcagcatgcaagaggaggtggcaaggaaggttgatgaatgcatggccgcatatcggtcccatgatccccagccgaccattcctcctacaatggtgagcccttcaggaaatcgtagcagctgcgcctcaacggggcaggtggcgtcgggcatggccatcccaacggacccttcaggtacttaccactgcaggccgattccagcaggatactccaaggtcgaagttgagttggtcgaaggcgcgtacgaggacctcgagctggattaccctggaggagacggtgagacgcatctacgagacacaagccacgccattattctatggcgcaagcggctcctgcaccgtctcctcctcatgctccagcaccgtctccacctcaggctcctgcaccgactcctcctcaggctcctacaccgactcctccttaggctcctacaccgactcctccgcaatctccttgtccggcaccttccaagtcaagggccccccaagctccaccgcctgcccccacaagggcaacaaagaaggcggaagttgatgccgccaagaacaaggacctgggaagtcaggagacaattgaagcctcgaagtccagaaaagaagattcctatagacctgagtgtcaggaacttctttaggggtatgtctgcacctgccaaggaggccatagagctatcggactatgagcgaacactcaagaaagcatcttctggaaaatccaaaccagtccctcagcttaaagagcaaccaaatcaggagatcgagccgttggtgaccggtgaagattttggaatacaagactttattaatgacaccgggctaactacggatcaattgctacaaggcgcaccaatcgaaaaggcggaagtgaaatacatgtacgaactcggtaaaccgcttgtcaagcctgagcagctgcagtccctaaccacacaaatatacaagttccatcaactgtacatggagatgagcgccaccggtagagagatgatcagagcgaggatcaaggacacgaacttcttgcaaggagatgacattctctggatcaatttcaagggtatctacgaactataccagctggacgccctcgacgcttctattatgagttgctggattttaatggagattcaaagggcccgacggcggggggttttcgatactggattcatcgactctcgaaaagtaaacgtcgcaatgctcgaccagtatccgcaagaaacagaggacgatctcgtccatctcttgaaggagcagcattataagacgttcatactgttgccgtacaacacagaattctactgggtgcttttactctttgacctggaggcctgcaccgtcaacgtatatgaatcaatggataaaaaagagtctacgtttgataaggtttttgaacttatagatagggcttggtatcggttccatcatttggttcgcggcaaatggagagaaaggccgaagttcaattttccttttattcgcatgagggataacctgatcacacacaaggaatttatcgcggcggttcaagaacaactcatgggattcatcaacgaacaaatccttgatcccaagggtgaattctactacgacggaaatacaattcataggtccttagcttctgagatagcgactactactacgtcaaaatcgtag

SEQ ID NO: 67186 - DNA, 384 bp, Oryza sativa
  unsure (1)..(384): unsure at all n locations
  Clone ID: PAT_MRT4530_68067C.1
tnnnnnnnaaaaaaagaaaattccttcagctaatcaattaatgcatttttatagggaatcaattgtagtgcatgtggtactacaatggatcacctacggtaaaatggcaaaaagggtaatagcaatgtacaagggggatggcaaaccctatgttcttccaacaaagcaatggggagcgtgagcgcattctctagttctcattcatctgctagaatagaacttcagtcaggtttttttcccagaacaagcatatctgctcactaggcctggatcttgtaggggtgcatgaacttgtcaattaacttcttttcacctgcaacgcattgctgtagtagctaagtttcacattcagcaatccctttgccttaagaagctagaacaagc

SEQ ID NO: 67187 - DNA, 4635 bp, Oryza sativa
  Clone ID: PAT_MRT4530_68068C.1
gatcctgcaccgtctcctcctcatgctccgccagcaccgtctccacctcaggctccagcatcgactcctcctcaggatcctgcaccgactcctcctcgtgctcctacacctactcctccgcaagctcctcttccggcaccttcaaagtcaaaggcccccccagctccaccgcctgcccacacaagggcaacgaagaaggcaaaagttgacgccgccaagaacaaggacccggggtacgattgcacgcaagaggagcttgacgcttacgttgcgtcagaagtcaagagacaattcaagcctcgaagtccagaaaagaagattcctatagaccccagtgtcatgaacttcttcaggggtatgtctgcacttgtcaaggaggccatcaagctatcggactatgagcgaacgctgaagaaagcatcttctggaaagtccaaaccagtccctcagcttggagagcaaccaaaccaggagatcgagccgttggtgaccgggaaagacatgacgatagaagaatttattattgacaccggtctaactacggatcaattgctaggagttgaaccaatagaaaaggcggaattgaaatacatgtacgaactcggtaaaccgcttgtcaagcctgagctggtgcagtccctacccacacaaatgtacaagttccatcagctgtacgtggagatgagcgccaccggtagagagatgatcggagcgaggatcagggacccggacttcttgcaaggagatgatattctctggatcaatttcaagggaatctacgaagtataccagctggacgccctcgatgtctctattatgagttgctggactttaatggagattcaaagggcccgacggcggagggttttcgatactggattcatcgaccctcggagagtaaacgttggaatgctcgaccaatatccgcaggaaacagaggacaatctcgtccatctcctgaaggcgcagcattacaagacgttcatactgttaccgtacaacacagaattccactgggtgcttttactcttcgacctgtcggcctgcaccgtcaatgtatatgactcaatggataaaaaagagtctacgtttgacaaggttttcgaacttatagacagggcttggtatcggttccgtcatttggtccgcggcaactggagagaaagacttaggcggaggttcaaatttcctatggctgaccgcgatgaggaacagatattgtacgatacaatcgcggagggaagcagccagtactggaatgaagaagaggggaacgaggatccaaaccagtacttgaacgaggaagggaacgtggagagggatgcggaggggaaccagcaggggcacgtggaaagggatgtggaggggaaccaggaggaggaggctagtggtagtcaaccctccgttggacagaagagggcacgcgggcaacgaggtgcagcgaagaagcttgagggtcggcacatcataacggaagtggaagaagatggacgtcctagtgccccggccgaagccgccaagaactatgtacgtcacagcggttgggttgtgcgggataacgtgcctgtcagtacggtgtactggcgaagaacaagtgcacgcggagatcatgagagctttgtcccagattcggagaaagagatgctgtggaccagaatgctcgagacattcacccttcctgcgggtacagaggacaaagtgaaaaggtggactctgaagaaaatggcagaacagtttcagagcttcaagggagatctgtaccagaagtatatactgaaggggcagacaccgaacttcgacacattcccaaagctaagggatcactgggacgagttcgttgcatataagacaggtgaacaagggcaggcgatgatggaaagaaacaaagaaaatgccgccaagaagaagtaccatcaccacttggggtcaggaggctatagcgtcgcgatgccgaagtgggagaagatggaggctagcttgattgagaggggtatcgaaccggcaacagccaattggccggaacgatcgaagttctggtactatgctcacggtggaacgctcaacccagctgatggctcactggtcttcggcgatcagatacgagaggctgcgcgacgactaacagatgcagtggaagcctcctctcagggcacgttccgaccagacagagatagggacgagctgacactcgccctgcagactccagagcatccaggacgaacacgagggaaaggggtgattccttggaagattgatttcaaggaggacatccacacgtacaggagtcggatgaggagcaagagagataccgaggcgaagattgcagacccagagttccgggtatcgagctacgaactcaacatgcaagaggaggtggcaaggaaggttgatgaacgcatggccgcacatcggtcccatgatccccagccgaccattcctcctgcaatggtgagcccgtcaggaaaccgtagcagctgcgcctcaacggggcaggtggcgtcgggcatggccatcccaacggacccttcaggtacttaccactgcaggccgattccagcaggatactcgaaggtcgaagttgagttggtcgaaggcgcgtacgaggacctcgagctggattaccctggaggagacggatcctgcaccgtctcctcctcatgctccgccagcaccgtctccacctcaggctccagcaccgactcctcctcaggatcctgcaccgtctcctcctcatgctccgccagcaccgtctccacctcaggatcctgcaccgactcctcctcaggatcctgcaccgtctcctcctcatgctccgccagcaccgtctccacctcaggctccagcaccgactcgtcctcaggatcctgcaccgtctcctcctcgtcaagggcccccccagctgcaccgcctgcccacacaagggcaacgaagaaggcgaaagttgacgccgcaaagaacaaggacccggggtacgattgcacgcaagaggagcttgacgcttacgttgcatcagaagtcaagagacaattcaagcctcgaagtccagaaaagaagattcctatagaccccagtgtcaggaacttcttcaggggtatgtctgcatctgtcaaggaggctatcaagctatcggactatgagcgaacgctgaagaaagcatcttctggaaagtccaaaccagtccctcagcttggagagcaaccaaaccaggagatcgagccgttggtgaccggtaaagaaatgacgatagaacaatttattactgacaccggtctaactacggatcaattgctaggagccgcaccaatcgaaaaggcggaagtgaaatacatgtacgaactcggtaaaccgcttgtcaagcctgagctgctgcagtccctacccacacaaatgtacaagttccatcagctgtacatggagatgagcgccaccggtagagagatgatcggagcgaggatcagggacacggacttcttgcaaggagatgacattctctggatcaatttcacacatatctacgaactataccagctggacgccgtcgacgtctctattatgagttgctggattttaatggagattcaaagggcccgacggcggagggttttcgatactggattcatcgaccctcggaaagtaaacgtcacaatgctcgaccaatatccacaagaaacagaggacaatctcgttcatcttctgaaggcccagcattacaagacgttcatactgttgccatacaacacagaattccactgggtgcttttactcttcgacctggaggcctgcaccgtcaactgcgcaaagcaaaagcagggaaataacttgtgcggctattacgtgtgcgagtattgccactgccttgcaaaccaaatcatcaccacaagagagctcgattttattcgcatgagggataacctgaccacacacaaggaatttatcgcggcggttcaagaacaactcatgggattcatcaacgaagaaatccttgatcccaagggtgaattctactacgacggaaacacaattcaccgccctccaatgatggttgtggcggttggaatggtcggaaatgccctccaaccatcattggggagtgatccaagccattcagaagaaaccctgcgtccaacggcacctgggagggttcggccgaaccatgggctggaccattctggccaatctttggcaggtggcctcctcttttgctcctttggcgatggcacccaaagaagggagggggagggcggtggaggcggcagcggctgcttcgggcacggcggcggcagggaggtcagcggctgcgactacggctctcggtatcggctcagggagggtggttgcgacgacggctcacaacgtcggctcagggagggggcgacaacgacacgggggagggagcagcggatccggcggctgtgttggcagggagagccggatccggcgcttgactccccaccggcggcggcggcgatgttgggaagggtggctctcggcgtcagctcagggagatggatctggagggctcggcggcgtgtctccttctccctctccctcctccaccgccgccagctgccgtcgccaccaccgccgcgggctgccgccagctcggggctagccggatttttgttaatgtgttga

SEQ ID NO: 67188 - DNA, 326 bp, Oryza sativa
  Clone ID: PAT_MRT4530_68069C.1
caaccctcaaagtccctacgctttacgtatccgtgtaacacacgtcacacgctcacgactccatagacctcaagagccatacaacacatggtgaatgtgaggtcaaaaaaaaaacagatggggagcacctaggctagcaatctatatatgcatctggatggagcatatgctcacaagaatgcacacacttctgaacgggccaatggacactagcttccttggacattacttgggccaagcgtcacattgaatggacatgattacgccagcttcatcaagaaactcttaaatggacaattgactgggacaagtgacatctatagcat

SEQ ID NO: 67189 - DNA, 1418 bp, Oryza sativa
  Clone ID: PAT_MRT4530_6806C.1
ttttttttttttttttttttccttgctctgcgccttcttgtgttttttttcggggggggtaaatgatgtgtagctttatcgtagtaatctgttacatgatattatatctataattgatctagtagagggctaccctctttgacaagaatgaagagacctccatcacctctggagatcctgaggtccttgtctaggtaggtcgtcagcagccaagaccgggccctgttgttgccagggatgggtaacttgaggggtggctgcccagaaatggatcctgcaatacttgcaaaggcttgctgcagagggttcagcacctgctggactgggcccaagctgatcttctgcccaaatatatcaacctctgcaggtaggtctaccgatgatgatatcttcggtggctgaaagcttccctctttgaattggaccttcattggaatgaccatcaacatgtcagtttggtcaatgtacatatttgcacaagaaagttgatgatcagaaatctcaataatttctatgcacatctcaagcttctggtgcaccgaggtttgtgtagaaatctttaacatttgtgttgctaactgaattccactagaattagtaggtagagatatctctatccttgatggactctgtacatcaaaagaagcagtggcactgaaagaaaacgaagcgaatggacttgagatagttgaggcattgactatggtcatgctatttgtgtcaatttcttgcgatatctcatcgactttgaacaatggtgctgcaccaactgctaggataggtagaagctcagaatacgctgtatatatgaggatccagttgccggcgaggaggtgggtggcctggacgggctcgggcgtgggattggtggcctcgagctgggtgacgagctctagcacctcccccctcacctcggaggacgcccggaagcccaggtcggagccgtacacagtgtccaccaagcagcgcttgagctcctcccgcctttcctcctcgttgtcttcctccggcacaggaggtggcggtggcggtggcgccggatccccaccccactcgtcgtcgttggtaggggggtcggcggcggaggtggattggggctcgggcacacccggctcgccccactcgtcggtgacgaggacggggcgagagttcccggaggcggaggggtcgtcgcggccccactcgtcgtcgtcgatgggggggtcgggctgggagggcggctcgggcgcggagggcgagcggtcgccccactcgtcggggacgccagaggcagctgctgctgcgacgggcgggcggcgggaggagcggagggggaggcggaaggggcggcgagatccggtggagctgtggatggtgggggaggggaggaggagggaggcgtgggaggcggcggcgaagagcgggggaggcatggccat

SEQ ID NO: 67190 - DNA, 2823 bp, Oryza sativa
  Clone ID: PAT_MRT4530_68070C.1
atggctgaccgcgatgaggaacagatattgtacgatacaatcgcggagggaagcagccagtactggaatgaagaagaggggaacgaggatccaaaccagtacttgaacgaggaagggaacgtggaaagggatgcggaggggaaccagcaggggcacgtggaaagggatgtggaggggaaccaggaggaggaggctagtggtagtcaaccctccgttggacagaagagggcacgcgggcaacgaggtgcagcgaagaagcttgagggtcggcacatcataacggaagtggaagaagatggacgtcctagtgccccggccgaagccgccaagaactatgtacgtcacagcggttgggttgtgcgggataacgtgcctgtcagtacggtgtactggcgaagaacaagggcacgcggagatcatgagagctttgtcccagattcggagaaagagatgctgtggaccacaatgctcgagacattcacccttcctgcgggtacagaggacaaagtgaaaaggtggactctgaagaaaatggcagaacaatttcagagcttcaagggagatctgtaccagaagtatatactgaaggggcagacaccgaacttcgacacattcccaaagctaagggatcactgggacgagttcgttgcatataagacaggtgaacaagggaaggcgatgatggaaagaaacaaagaaaatgccgccaaaaagaagtaccatcaccacttggggtcaggaggctatagcgtcgcgatgccgaagtgggagcagatggaggctagcttgattgagaagggtatcgaaccggcaacagccaattggccggaacgatcgaagttctggtactatgctcacggtggaacgctcaacccagctgatggctcactggtcttcggctatcagatacaagaggctgcgcgacgactaacagatgcagtggaagcctcctctcagggcacgttccgaccagacagagatagggacgagctgacactcgccctgcagactccagagcatccaggacgaactcgagggaaaggggtgattccttggaagattggtttcaaggaggacatccacacgtacaggagtcggatgaggagcaagagagatactgaggcgaagattgcagacctagagttccgggtatcgagctacgaactcaacatgcaagaggaggtggcaaggaaggttgatgaacgcatggccgcacatcggtcccatgatccccagccgaccattcctcctgcaatggtgagcccgtcaggaaaccgtagcagctgcgcctcaacggggcaggtggcgtcgggcatggccatcccaacggacccttcaggtacttaccactgcaggccgattccagcaggatactccaaggtcgaagttgagttggtcgaaggcgcgtacgaggacctcgagctggattaccctggaggagacggcggtacatcatcctccctgggtgacaagcggcgtctcgctccagcatcgactcctcaggatcctgcaccgactcctcctcgtgctcctacacctactcccccgcaagctcctcttccggcaccttcaaagtcaagggcccccccagctccaccgcttgcccacacaagggcaacaaagaaggcgaaagttgacgccgccaagatcaaggacccggggtacgattgcacgcaagaggagcttgacgcttacgttgcatcagaagtcaagagacaattcaagcctcgaagtccagaaaagaagattcctatagaccccagtgtcaggaacttcttcaggggtatgtctgcatctgtcaaggaggccatcaagctatcggactatgagcgaacgctgaagaaagcatcttctggaaagtccaaaccagtccctcagcttggagagcaaccaaaccaggagatcgagccgttggtgaccggtaaagaaatgacgatagaacaatttattactgacaccggtctaactacggatcaattgctaggagtcgcaccaatcgaaaaggcggaagtgaaatacatgtacgaactcgataaaccgcttgtcaagcctgagctgctgcagtccctacccacacaaatgtacaagttccatcagctgtacatggagatgagcgccaccggtagagagatgatcggagcgaggatcagggacacggacttcttgcaaggagatgacattctctggatcaatttcaggggaatctacgaactataccagctggacgccctcgacgtctctattatgagttgctggattttaatggagattcaaagggcccgacggcggagggttttcgatactggattcatcgaccctcggaaagtaaacgtcgcaatgctcgaccaatatccacaagaaacagaggacaatctcgtccatctcctgaaggcgcagcattacaagacgttcatactgttgccatacaacacagaattccactgggtgcttttactcatcgacttggaggcctgcaccgtcaactctatgacctatgaaagctgccagatggacgacgggcacaacaaagagggcgttggaggtggcaggcagcatcaaggaaggggtcatgatgtggtaggcaacgggcaacaacgaggaaagcacagagcgggagtgagcgacggcaaggagggtgcaatgagcagtgacgaggtggatgctgaaggcagtagacatcaatgaggaaggggctaccgcgcggcgggcagggctggaagcgatcggtagcgaggggggtgcgatggggaaggcgtcgttggcaacaaatggcgtcaaagggggcacagtgagtggtggcaaggtggacctggcgacacccat

SEQ ID NO: 67191 - DNA, 4056 bp, Oryza sativa
  Clone ID: PAT_MRT4530_68071C.1
atggccccgcaacgccacgccgccgccgccgtcgccacgccgccgccgccgccgccacgccgccgcgccaaccgccgccccgatgccgccacaccgccgttaacgaacgagaacgagaacgatcgaacgaacgagagcgagatgaacacgtcaacatgtttcttgtatcaacagatggctgaccgcgatgaggaacagatattgtacgatacaatcgcggagggaagcagccagtactggaatgaagaagagggaaacgaggatccaaaccagtacttgaacgaggaagggaacgtggagagggatgcggaggggaaccagcaggggcacgtggaaagggatgtggaggggaaccaggaggaggaggctagtgatagtcaaccctccgttggacagaagagggcacgcgggcaacgaggtgcagcgaagaagcttgagggtcggcacatcataacggaagtggaagaagatggacgtcctagtgccccggccgaagccgccaagaactatgtacgtcacagcggttgggttgtgcgggataacgtgcctgtcagtacggtgtactggcgaagaacaagggcacgcggagatcatgagagctttgtcccagattcggagaaagagatgctgtggaccacaatgctcgagacattcacccttcctgcgggtacagaggacaaagtgaaaaggtggactctgaagaaaatggcagaacagtttcagagcttcaagggagatctgtaccagaagtatatactgaaggggcagacaccgaacttcgacacattcccaaagctaagggatcactgggacgagttcgttgcatataagacaggtgaacaagggcaggcgatgatggaaagaaacaaagaaaatgccgccaagaagaagtaccatcaccacttggggtcaggaggctatagcgtcgcgatgccgaagtgggagcagatggaggctagcttgattgagaggggtatcgaaccggcaacagccaattggccggaacgatcgaagttctggtactatgctcacggtggaacgctcaacccagctgatggctcactggtcttcggctatcagatacgagaggctgcgcgacgactaacagatgcagtggaagcctcctctcagggcacgttccgaccagacagagatagggacgagctgacactcgccctgcagactccagagcatccaggacgaactcgagggaaatgggtgattccttggaagattggtttcaaggaggacatccacacgtacaggagtcggatgaggagcaagagagataccgaggcgaagattgcagacctagagttccgggtatcgagctacgaactcaacatgcaagaggaggtggcaaggaaggttgatgaacgcatggccgcacatcggtcccatgatccccagccgaccattcctcctgcaatggtgagcccgtcaggaaaccgtagcagctgcgcctcaacggggcaggtggcgtcgggcatggccatcccaacggacccttcaggtacttaccactgcaggccgattccagcaggatactcgaaggtcgaagttgagttggtcgaaggcgcgtacgaggacctcgagctggattaccctggaggagacggtgagacgcatctacgagacacatgccatgccattattctatggcgcaggcggtacatcatcctccctgggcgacaagcggcgtctcgtgcaccatctcctccggctccgccatctcctcctcaggatcctacaccgtctcctcctcatgctccgccagcaccgtctccacctcaggctccagcatcgactcctcctcaggatcctgcaccgactcctcctcgtgctcctacacctactcccccgcaagctccacttccggcaccttcaaagtcaagggcccccccagctccaccgcctgcccacacaagggcaacgaagaaggcgaaagttgacgccgccaagaacaaggacccggggtacgattgcacgcaagaggagcttgacgcttacgttgcatcagaagtcaagagacaattcaagcctcgaagtccagaaaagaagattcctatagaccccagtgtcaggaacttcttcaggggtatgtctgcatctgtcaaggagaccatcaagctatcggactatgagcgaacgctgaagaaagcatcttctggaaagtccaaactagtccctcagcttggagagcaaccaaaccaggagatcgagccgttggtgaccggtaaagaaatgacgatagaacaatttattactgacaccggtctaactacggatcaattgctaggagtcgcaccaatcgaaaaggcggaagtgaaatacatgtacgaactcggtaaacctcttgtcaagcctgagctgctgcagtccctacccacacaaatgtacaagttccatcagctgtacatggagatgagcgccaccggtagagagatgatcggagcgaggatcagggacacggacttcttgcaaggagatgacattctctggatcaatttcaggggaatctacgaactataccagctggacgccctcgacgtctctattatgagttgctggattttaatggagattcaaagggcccgacggcggagggttttcgatactggattcatcgaccctcggaaagtaaacgtcgcaatgctcgaccaatatccacaagaaacagaggacaatctcgtccatctcctgaaggcgcagcattacaagacgttcatactgttgccatacaacacagaattccactgggtgcttttactcatcgacctggaggcctacaccgtcaacgtatatgactcaatggataaaaaagagtctacgtttgacaaggttttcgaacttatagacagggcttggtatcggttccgtcatttggtccgcggcaaatggagagaaagacttaggcggaagttcaaatttccttgcgcaaagcaaaagcagggaactaacttgtgcggctattacgtgtgcgagtattgccactgccttgcagaccaaatcatcaccacaagagagctcgattttattcgcatgagggataacctgaccacacacaaggaatttatcgcggcgattcaagaacaactcatgggattcatcaacgaagaaatccttgatcccaagggtgtattaatggtcttgacacttcagcgtgtgaagatagggccgtggggtggaactggaggccatgcttgggatgaaggaggccatggtgccagtgctggcagttacaccggagtacgccgaatgagtatagggtcttcctggtgtgtcagctcgatgttgtttgaatacgacgacaatggcaaacgtgtgaaaggtaccctgcatggagagagagacaatggaatacccgaggaggagctcgacttccatggggaggtgttgacgcacatgtgcggctaccatgacaaccacctcatccggtggttgcagttcaggagcaaccggaacaggacgttcggaccatacggcaatcttctagaagaccaggctggatggacgcggttcgaggtctccatggagcactcggggtccatcgtcggcttctgcggccggagtgacgacttcgtggacgccatcggcgtctacgtcgccgtctggaatcccgagaggttctatgatagcatgcgcaggcagggcgtccgcgtttaccgggcgtcgcctctgcgcatggacctgcgtcaaatagaagaagagaaaaagaaggaagaagtggaacgtgggcgcctacagaaggagctcgaggaggggcgagaaagtcttcggaacatacgattgaagcttgatatgccgccggatcagagaaaacgcctgatacgacgcgacctgcgagtggagcatcaagaaatcgaacgtcagttacaagagatgcagcaactggaacgcgagcgtcagcaactggagcaacaagaaatcgaacgtcagttaccctcgcgtcagcaactggagcaacaagaaatcaaacgtcagttacaagacatggaacgcgagcgtcagctacaccggtggagaaactttgtaaccggtggagaaactttgtaa

SEQ ID NO: 67192 - DNA, 406 bp, Oryza sativa
  Clone ID: PAT_MRT4530_68072C.1
acgcaactgccgatagaggatctcatcgttatcatcggctgctacatcgctattgactggatcaccgacatcgtcatcttcatcataggagttggtacaatgcatcttaaaaggtgtcaaacagtaaagctttatatagctgtcccgctgactttttaatatagtcatggtgctgtttgggttttaaagcaattgattggttacaatatcgttgctttttgccacccctccacagtcttcagatttggtaaaagtactcgggagaccatggcaaagatgattgaagtactcggccttggagtaatctggttcgagagaagattatcttttcggcttatatctaaagtaagtttcttttatctagtactttatatacaaatcttgagcactactgcaatatctttaa

SEQ ID NO: 67193 - DNA, 344 bp, Oryza sativa
  Clone ID: PAT_MRT4530_68073C.1
atgcaaacgctgatgagcgtcttcgtcattatcatcggctattacaccgctattgactggatcaccgacatcgtcatcttcatcataggagttggtacaatgcatcttaaaaggtgtcaaacagtaaagctttatatagctgtcccgctgacttttttatatataagtcaaggtgctgtttgggtttttaagcaattgattggatataatatcattgcttttcgccacccctccacagtcttcagatttggtaaaagtactcgggagaccatgacgaagatgattgaagcactcggctttggagtaatctggttcgagagaagattatcttttcgactgcgaag

SEQ ID NO: 67194 - DNA, 337 bp, Oryza sativa
  Clone ID: PAT_MRT4530_68074C.1
gggaacaaaggaaaaactgcttagtggtcttgtgcctgctgctctgcttggtgagttggtggtcttgtgcctgctcctcggaggtggaggcgctactctgttgctggccgcggaccgcatagacggctgcgcgcggaggcgttgttctggggacggcggccagcagcccctagcccctgacgtcggcggcggaggaggatatgcgccggttgcaccgcgggacggtggggctggaggcgcagtgcccgccggcgaaggaggcgctgcggctgcgcagacggcggtgctgcacccgacgatggcgacggcaaagacgatgtggggagaccgggagtga

SEQ ID NO: 67195 - DNA, 408 bp, Oryza sativa
  Clone ID: PAT_MRT4530_68075C.1
atgcaaatgctgatgagcgtctttgtcattatcattggttgctacactgctattggctggatcaccgacatcgtcatcttcatcataggagttggtacaatgcatcttaaaaggtgtcaaacagtaaagctttatatagctggcccgctgacttttttatatataagtcaaggtgctgtttgggtttttaagcaattgattggatacaatatcattgctttttgccacccctccacagtcttcatatttggtaaaagtacttcggagaccatggcgaagatgattgaagcactcagctttggagtaatctagttcgagagaagattatcttttcgactgtgaagctttctttgtttttttcttttttattttctccttttattttctcccgaaccaagtggcatgcat

SEQ ID NO: 67196 - DNA, 579 bp, Oryza sativa
  Clone ID: PAT_MRT4530_68076C.1
cttcaacaacttcaaatatttcggtttggacgagttagacaacaacatcaactctcctccaagtgaagcatctacaacagtatgcaaatgctgatgagcgtctttgtcattatcattggttgctacactgctattggctggatcaccgacatcgtcatcttcatcatgtcggttgcgtttgtcgtcgtcaagtattttcttcatcttcatgatcggtggatttcgccatcaccgttgatgcgcgtctacgtcttcatcgtcggtttgctcatcaactcaagcgccaaagtgcgcgtgatcaaggacttaagcacatttgttaaagcagtgtgcgcatggctcttcatatttggtaaaagtacttcggagaccatggcgaagatgattgaagcactcagctttggagtaatctattcgagagaagattatgttttcgaccgtgaaggtctcaggggctactgtggagattatgggtacccaatacccacacggtctcgtgcgctatcccctttaaattaccgaaatcttgtttcgacagttggcatgctaggtcactactacagattcgtgcttcagtga

SEQ ID NO: 67197 - DNA, 277 bp, Oryza sativa
  Clone ID: PAT_MRT4530_68077C.1
tggcatgccagttcacctatcgtcagacccagtgttagctgcctctgccactgcccgagtgaacgctcagcaggctctcagcatgatccggtcagaaccttactctcttaagagttatctgtcaccgacttccatcatggatcaaaagacgagctgctgtactcgctatgagtatgatcgccatactgaacttatccgacttgaactcagggatcagatggcaaagaacgaggtggttgctagtcgatagtaggcagagttgcatgaccagcaatgc

SEQ ID NO: 67198 - DNA, 595 bp, Oryza sativa
  Clone ID: PAT_MRT4530_68078C.1
atgcaaatgctgatgagcgtctttgtcattatcattggttgctacactgctattggctggatcaccgacatcgtcatcttcatcataggagttggtacaatgcatcttaaaaggtgtcaaacagtaaagctttatatagctggcccgctgacttttttatatataagtcaaggtgctgtttgggtttttaagcaattgattggatacaatatcattgctttttgccacccctccacagtcttcagatttggtaaaagtactcgggagaccatgacaaagatgattgaagcactcggctttggagtaatctggttcgagagaagattatcttttcgactgcgaagttctagttgtttcgtttattttccacctcttgtttattgttgtcactgctggagaaaccatcttcactcccggttcgcagcccctcacaaattcacaaaaaccgggaggaggctgggatctagaggagggaggaggaggacgaagagataaaagactaaggatgggagcgctcctggttggtaacataaagtgtcgtgccgcttttgaaccggggctaaaaatgtttttttgtcccagttcctattcgaac

SEQ ID NO: 67199 - DNA, 436 bp, Oryza sativa
  Clone ID: PAT_MRT4530_68079C.1
ggcagttttgtttattcaacaggtgaccctatgctcacctagaggcgtcatgacccactgaccggcggccaagaagaggaggttcctcgcgttctgatgaaatggagatcaacacttcaattttcaaaggcaaatccaattcgatcatttcagttgaggatcgagctgggcgagtctacgaggggtgcacgtaccatgttaaccttggagctgaactcctggacgttgtcggcgccgccgccgaagttattgtacacgctgccggtgatgagcagcaacaccggcatcgagagtccgtcgcccacggtgcccaggagcccaagcaccatcaacaccacgttcaccgtgttcgtgtgcatgaacaccgtcatgaacgatccgagcactggcttccccttcccggcgctgcgaacgtcgtcacccatggccgccgtga

SEQ ID NO: 67200 - DNA, 388 bp, Oryza sativa
  Clone ID: PAT_MRT4530_6807C.1
ggaggctaaaggtatggctccatctctttcactgccgattaagataagttttcaccaatctcaatgttgcgcacagttggtttgtcctgctgtaggtttaggattcaaggaataattgaattgcgcttttgtaaggtaaccagagttagatagtagttatcttctttctgaaaatgatggcagtgctacatcaggatacatatattcttcttttttatggaatgataaatcagaatcagagatacgctgcaaaattgatctccttgcccaagatgacagtgcagagcatttcttcagaaaagaaatgcatctgaatcattttacccttttatactcatgaatttcatcttatagaagatcaatagcagcttgagttttgagctgggtg

SEQ ID NO: 67201 - DNA, 353 bp, Oryza sativa
  Clone ID: PAT_MRT4530_68080C.1
attagtttttgccatttccttaccctgatgttgatgttaaaaggatgctatgggtccttttcgaatataagcttgatggacttcccaatgttaatacaccaccgaatttgacatgtgtaaatcttgtatatgataaaagtataatttggaaactttcaattatcatcacattgatttttagataatctgtattcaaaatgtttgcacgaatactgaaattcaagaaaacattttctcggaagaattcttttccataaaaggtgactgaccttttactttctgtaaaataattctacatatggggctattttggattctgtataactttgatgttgaacttgcttgccaaaact

SEQ ID NO: 67202 - DNA, 471 bp, Oryza sativa
  Clone ID: PAT_MRT4530_68081C.1
atgccggaggtggtggcgacgtcggccggcgcacaggaggagacgcggcagaggcagccggaggcggaacagtggcgtcaacgccactgttgccggcggggatgcacttctgaaggtctctgcgggaaacggaggtctggccggggaaggggaggcgacggcacgggcggccggagtgctgacgcagcggcaggggcagctggagtcggccggcggcatgggagagagaggaggacggcggggagaggtgatgaggccacgggagtgcgcgggagggggcaaaaaatagaaaacggaccgagggggttccattttataggtataggggagggagccgggcacgggagaggtgggaacggcggcggaatttgtgtccggcggccatggaaggcggccggggaagacgcgtccgttcccgacgattgggggcgccattcaatggggaaaataggggaaatcaaagaggattga

SEQ ID NO: 67203 - DNA, 279 bp, Oryza sativa
  Clone ID: PAT_MRT4530_68082C.1
atgggcctgtttgggtctgtttggagaagtttaagattctacgaaacagctgttgtcgcctccgccggatttggatgggggagggggtggtcgttcgccatcgcgtgcacactgccgcgagcccgccgctcccggttgcccaccgccgtgcacacgtcgctgagcccgccactcccgcgcccaccgccgtcggagccggaggaggaggcgaagaggccggcgccggtgccggcggcgtggcccgcggggctcgagctcgacgcggccacgcggttctag

SEQ ID NO: 67204 - DNA, 348 bp, Oryza sativa
  Clone ID: PAT_MRT4530_68083C.1
aaaaggaggcagagtttttttattaaaataaggagaaaaaaatccccttttcctttaccaaacataaaaccatccataataataaaatggaatacgggatacagaccaccagggcgtgaaattttcacgttgtttacgataaagaggaacattttactcatactattagggacaattcattaaattaaggctccgattttttgatccaggcagggacgcaaatgcagagagatgcgaaatttaataagggaaccttgacctgaagggtttggggctttttgggctcggggggggggggttttttgagggggacggggagcaccccgtcttggcccacgggggaaattt

SEQ ID NO: 67205 - DNA, 498 bp, Oryza sativa
  Clone ID: PAT_MRT4530_68084C.1
aggaacccgcccttcccccccgagacgacgacgcagctcctcaccagccagcagcagcacacagcagctacagggcatggggctgcaggcagccagcactgccgccgagacgcaacggagcagcagcagcagcagctccaggagaggttcccagtcgtgcggacatggtggcccgcaaagccgcaacagcaggtttgatgacagcgacgcggcgcatacggtttccgaccgcttgggattgggagtgcgccgtggacaggagacggcagcggtggcggccatgccgcgggagtgcgcagccacgtggttggtaggacactgggctcccggctccgggaattagagatgtacagccatactgagagacgcagaggggctttccagctatcttaataagatgtacagctgtaccacctcaagactttgcaaatgtttctaaatccagtattccaggggcctcccaaatattttggctggcaaaaaaaaaaaaaaaaaaaa

SEQ ID NO: 67206 - DNA, 479 bp, Oryza sativa
  Clone ID: PAT_MRT4530_68085C.1
ggcctggaaatgtcctctaggggttgtccttatccttttaaaaatcccaaggccgaaaaaagattggtgttggggggggcttaaaaacttttttttcccccccggttgggtggggggatccgccccctgggttccccccggtttttcggcccgggtcctgggggggtccccattttcctttttggggggcgttttaaagcttgggggaatcatgggcataggtttttcctgggggaaatttttttccctttccatttccccccaaaataccggccgggagattaaagtgtaaaccctggggggcctttggggggggcttccccccattatttggggtggccccccttccccttttttcaaggggaaacccttttggcccgtttttttttttattccccccccccccgggggggggggctttttttttttttcccccgggtgtttttttttttttcccctttttcccgtttttccttttt

SEQ ID NO: 67207 - DNA, 256 bp, Oryza sativa
  Clone ID: PAT_MRT4530_68086C.1
gagagatcatcagtagacaccaagggatcaaggagaggatgaggggcgggcatggcgcggcggcgggggagggccgtaacgggtggatgacggtgctggcgttgggggactggaacatgaagaacggtgcgctgccggactactcgatggatctatacaagatccgggagatgcggaagcggatcaagaaggagctgttgcggaccaggctgggtggcgacgactacctcctcgcgcagcagaagcagcagcagac

SEQ ID NO: 67208 - DNA, 270 bp, Oryza sativa
  Clone ID: PAT_MRT4530_68087C.1
atggaggcaattgctgagaccctagcgagctccgtgcggcatgcttcgggccggacgggtggggggccggggggaagggttggagaccacgcgagggcgtgggggcacaacgcgccaatgcacttgcgaaccatatcctccgcacgtgagaggcttcgtataacatggcttgatgaagtgtgtgcatcctctggaggattcgacgacggcggtagctcgcgtgaatggatccacaatgatgcttgtggtggtgctcgcaaatggctctag

SEQ ID NO: 67209 - DNA, 566 bp, Oryza sativa
  unsure (1)..(566): unsure at all n locations
  Clone ID: PAT_MRT4530_68088C.1
caaggatcccgtccacagaggagattngtcggaccgcgtcaaacaatgatgtcgtcgcggtgcgtcgacactggacattgctcgtgggtgaatccctgacgtgcggtctcaagacccgcaagtatcaaacgaggtcaagcactgcccttgtccntacatggtgtgtcggccgctcaagctcatccgcacccagcgtcgccagcgcgaagtgaggatattccagtagtctgtcaaggttcccttgcggtgtggcgaggacgatgccgtgcatgagccatgctggtgtgttgtgaatgaatgctggggtgccagtgggatgcccgattgtgcttgtgggttgagggtttgagtgcagtgctcgggtgggaagatgccctgcgtgaccgttgttgactgtgttggaatgcaatttgggtgggtgttgttgaggcagtgtgtgtgcggtcgtgatgttggtattgtatgtaatntgagtgggaatcacagtgtttcatctgcatntgaatcgttgcggatcaaattacaaattttcaaggagagttcttgaaaaaaaaaaaaaaaaaaaa

SEQ ID NO: 67210 - DNA, 659 bp, Oryza sativa
  Clone ID: PAT_MRT4530_68089C.1
gatttgtattagcccccttccactctcgcgttttctccccttctctgcgtgtttttgtggacgacggcgtcgtcgcagcccgcgggtggccatcgtcttccccccctctcctccttcctcgcatcctctcctccctatctctcacaaaaatccattcttgcacagggaattttgcctactcctatttacgatccttctcttcccccctctgggcggccaaagctctcgtttttacgcgtgatttcgtcgtcttgttgcttgcttgacgagcccgcttgattttggcttcgatttaatcccattttacggggtgttttgcatctattggagatccaaaggtgcgccctttctgggggtatcttggggggaattggatccgatttcgatctgtctgaggtggttctctgggcgtttgttggtgcggttcttgatcccagagggtgagaggaatttggttggattttctccctggagcatttggtgtgctcgagcaggatgctctatttgaagcagccgacgaggagctgaactacgcggagttgtttttcccctctgaattttcttggtttggatttcgcggtggtcgtgtggtttgctttgctgatctgatctgatggaggctatggcgggcgacaaattccttcagaagttccggctct

SEQ ID NO: 67211 - DNA, 314 bp, Oryza sativa
  Clone ID: PAT_MRT4530_6808C.1
accacactgactggagatcctacaggggggacatcactgtgcaccagcttatagcccatcttccatcagctagcactgcaaaccgcgctgaaaagcctactcaagaggatatacaggaaggccaagaggtctgccacatgggctggctgatggatgacataacctattacaacctccaatatgccctgcatagtgccctcaagagtcacccggagataccaccgcagatgccacagccgagagttaagctgagcctgattctcaatcctggtagcacatctgtatgtgcatgatcgattccgtcatcgatgact

SEQ ID NO: 67212 - DNA, 807 bp, Oryza sativa
  Clone ID: PAT_MRT4530_68090C.1
atgcatcgagtttatgacttcattcttcccaccgatgctagcccgatcgaagccaaacagccagttgtggccacccattcctcgtcgatcgatcggtcgccggccggcatcctccggtcgccaccgccggctccggccagcagcgagagagaaaacacgacgccgcttggattggatcggatcggattgccgtgtatatctgccgtcgcgtcgagtcgcgtcagccccagggtggccggattggcgcgacgccgacgcggcgcttgtcgccactcgcgggcgagctcgtggtcgtgggttgccgacgaccgcaagctggaggaggaggaggaaaagaagactttggaattttatgccggcacgaatgatctttcgctcctgtttccgacctggcagggatcgcccaccatagctaacgtgactctggacgctggatcaagatatgatcaatggattcatcagcttgatcgtagaagacatagttgtcgggatgtagcagctctcatcggatcaagcgacggctcgcatgtggagaaggctactttcagtttcagaacggtgcaagtgtgcaagatgcagacggaaacgggatgggcaacggcaattgaggatgcattacttccaattccatttccagctctggcaatgctccagtccagccagccaacaaaagaaaagaggcgatgtgtaccgtacgcgtataaacgtctccacgagactgacgaggagtcgacgacgcaagctatgtacagtacgtttgaatgttcattacgtgttccgatacggttgcctaccctgccaaccagt

SEQ ID NO: 67213 - DNA, 291 bp, Oryza sativa
  Clone ID: PAT_MRT4530_68091C.1
aggtatgtaaatttttggaagcattttttatacatgttactgtttggttgtcttgaaaatttggtttttttataaaacaaaggcctaatgttttattttttccctaatgaaaaagtaatttaggccaggccaccaccaaatataatgttgtaaaggaaccggccttgtgtttttttttgctccggccgatgttctgaaataaagatagccatcccggctatggtccctgttttgggagggggggccatttgctgggagagcatccgggaggcggggaagaactactccggg

SEQ ID NO: 67214 - DNA, 567 bp, Oryza sativa
  Clone ID: PAT_MRT4530_68092C.1
atgggctggggcgagcgtttgaggcccgccgcatcgccggcgtccgggaggagccacggctgcgggagcaggactttggtaacttccaggacgtggacaagatgcggcagcaacgtcgtcgtcgacagcgcgctcgtcgacatgtacttcaaatgcagcagccccgaggacgcgcgctgggtgttcgcggcggtggctgcgcggaacatcaccatgtggaccactgtcatgtccgggcacagccagcatgggcgcgtcgcggaggcgctggcgctgttcgaccagatgatgcgggtggacaggctccggcagaatgacgtcacgttcctcaccgtgctctcggccatgaggtggtacaagtggatagtgacacagttcgagggcctcgccaacctcagcaatgacggcgcgctggtgatgcagaccggcgccggcgggaggtacagcctgctggtgcaccactcggtggaggagctgagggtgttcggcctcaccgacgacatgatcgaggaccagaggttcgcctggaccccatcctcctccgtcctgctcaatcgctggagatga

SEQ ID NO: 67215 - DNA, 3077 bp, Oryza sativa
  Clone ID: PAT_MRT4530_68093C.1
atgtcggcgccggctggtctgcggcagcactgcgcattgggccgcgccatagccgtcgtcgccatctgcctcctcgtcatcgtcggcacgtaccttctatcttctccggccgccggcgacggcgacacggaggaggagttcttcagcgtgaggcgccgccgtcgttcatcggtcgacgccggcgacgacgatctggaggcggcggtgcgcggggcggcgtacgcgaacgggacgctgatcgtgagcgtgctgaacagggcgtacgccgacgaggacggcggcctgctcgacctcttcctccggagcatgagggaaggggagggcaccgagcagctcatcgcccacgtcctcctcgtcgccatggaccggccggccttcctccgctgcaggcgcctcggcggcgtccggtgctaccagctcccggcggcgcaggacggcgccgacgacctctcgtcggagcagctctacatgtccgacggcttcatacgcatgatgtggcgacgcattcgcctcctcggcgacgtcctcaagctcggctacagcttcatcttcaccgatttggatgtgatgtggctgaggaacccgttgtcgaggctggagtacagggcggaggaggaggacctcctgatcagctccgaccagttcaacggccgccccggcgacatcgccggcaacgagctcaacaccggcttcttcttcgtggcctccaacaaccgcacggcggcgctgttcgacgagtggcacgcggcgcgggaccgctcggcgggaatgaaggagcaggacgtgctcaacgacatgaagcgccgcggcgcgctccgccgcctcggcgtccgcgcccgcgtcctcgacacggcgcgcttcagcggcttctgccaggacagccgcgacgcccgcgaggtcgccaccgtgcacgccaactgctgccggaccatgcgcgccaaggtcgccgacctcgcggccgtcctcgccgcggcgcggcggcgcctcgacggcgacggcgcgtcgccggtgctcaggtggccgccgcactcccagtgtgtcaagtcatgggagtgaaggcgacacacacacacacagaatggtcgtgagctaacagctgctactactgattatttttttctggtcttttgttgtttttttttttttttttttttttttttttgcagagagaaatggaattttataacaacatatgtggcatatcaagattggttctgaacttaatgttatacatagggaaccctgcatttcttgtacttgccatatatatacagggagtcctgcatttgagctctatcaaatagtactagctaacaaattgggtgatatttataccgaagaaagatacttctgcaacgttatttgagggggtcagaaagttatgacagccgatacagcaactgttcttcgtgtgataattgattacaacatttgcccccaacatactacgtaaatctcagcacatgccgtagtatgcgctcctaaaagcgtagcattcttcactactgtacagacatcgcttgtgcactggttctattaaccttcaccaagccatcagctaccgtgaccaaacctgatgaaaatttacgcggcctgcaaaacttcctggcgcttgatctcaaacaccttctgtaacgcatcctcaacaaccttgtccggagttgaggcgccagaagtaactccgattgtgatagggccttctggtaaccagttctctttctcgacaagctcgccatgatttaacttgtagctgatcttgtttccaggtccaatcctttgttcactgtcaatccagtaagacggaattccactgagttctccaatttcttgcaaatgagaggtgttactggagttccatcctccaacaaccagaataagatcaactttctccttcactagctggtacattgcatcttgtctttcctgtgtggcatcacagatagtgttgaaggcaatgaagtggtcattgacattctcaactccaaacctacgcatcattgtcttctcaacaagcttcccaatttcttcagtttctcctttaagcattgttgtttgattggcaatgccaactttcactaagtcaacatcaggatcaaatcctggagaaacagcatttttgaatttctcaaggaactcctcttttgtggagctagaaccatcaagttggccaccaagtatataatcacatacatagctagcctctgctatgttcttaacaatgatgtatgtccctgcaaaggaagcagtggcaacagtttcttcatgggagtattttccatgaataatagaagtgtagtcacccttcttgtgcttttcaaccatgttccacacctttgaaacccaagggcacgttgtatcgactatctgcaccttcttctcattcagcgtgtacatctcctccacggccgctccaaatgcaggcaatacgacaacatccccttgctcgacaacatcgaaatccttaatacctgcatcaacaggaatgttttggacgcccatgtcctccaatcgcttgttgacggtggggttgtggatgatctcgttggtgagccagatgcgatcgtcggggaactgcttgcgcgcctcgtaggcgatctgcacggcgcgctcgacgccccagcagaagccgtacgcctccgccagcttcaccgtcacggggccccacgtgtgctggttcccgttctccttgagcgtcttgatcacgtcgctggtgtactcctggctcatgagctcgagcgtctccttcttgtggccgaagcccttgcggttgtagttgtcgctgcgggtgaggttgtggcggaactgcttcttgtcgaagtcggcgtcgagcgacgcggaggcggacagggacgacgctgccgaggagtcgcaccgcacggacgacggggcgcgcctggcacggcggctcggcgaggccgccggcgagaggagggccgaccggagctgcgtggtgatggtcgccatcaccgcccgcgccgccggatgccggtggtggtggtggtggtgccaagtgccgcggggagctctggagtggatgggtgtgggtgcgtcggattcggagttggcggacgcgtggg

SEQ ID NO: 67216 - DNA, 217 bp, Oryza sativa
  Clone ID: PAT_MRT4530_68094C.1
atgggcggcgggcggcggcgtgctggggcgggcgggcggtcggcgcgcgtgggccggcggcggaacgcggggaggtcgcggcgggcaacgggtggcgccgaggaggccaggagggtgttggaggcgacgggctacggcgacagatccaccaccctctcgagctccgcggctacggcgacgaggcgacgagtcctctgctcaggcgggcgccgtcgag

SEQ ID NO: 67217 - DNA, 2109 bp, Oryza sativa
  Clone ID: PAT_MRT4530_68095C.1
atggacccaacggatataacattccgattgttagaagaaattacagatggattctccgaggagcgaaaaattggtcaaggtgcatatggaacagtttataagggagagtttagaaatggaaaagagattgcagtgaagatgcttcataatgatactctaggatttgacgataagcaattcgagaatgaatttcagaaccttatgaggctcgagcatccaaatattgtacggctagttgcctactgctatgaaacacaacataaatacgcagagtacaaaggaagaatagtttttgctgcaataatacatagagcgctctgcttcgagtatttaaccggtggaagccttgagaatcatctttcagacgaatttcatggtcttgactggcctacacggttcaaaattattaaagggacatgtgagggtttaaaatatctccacgagggactgaagccacctatttaccatttggatcttaaaccgggcaatatattgctggacaagaacatggtgccaaaacttgcggattttggattgtccaagctcttcaccgaagagaaaacaagggtcacacaaactccaattgggacagtcggatacctgccgccagaatacatagagaagaatgtactctcaaacaagctagacatattcagcttgggtgttgtaatgctaaacgtaattgcaggacctagagggcgctctagaagtgctgaaatgtcttcccaagaatttactgatctagtactaggaaattggacagtcaggttacaagcaacatggaatggttcctcattggaagcatatcgccaacaggtgaagacgtgcactgaaatagctctgaaatgtgtggagattgatagacacaaaagacccaatattttggatatcgtcaataagattaatgagacagaaactatgattggcaagttgccgataagccatggctcagaggtccggttcgtcaacgaccaccgcgagaagcaaacctcatacagcgacgagtttatcacccttgagagcaggttggccagccatttgaacttaagtgacacccaagtaaaccaagaagcttatcaccataacggttcttctttcaaagagaaagaagaggaccgagaggtgcatcagatcattccaatggaaaatcctgacattcccatagatgcgcatcccactgagccatggattttgacaggcaatatttttggctcagtcgacatcctgaactgtgatacacaaaaccaccttctcttaatcttaaaaattagtggtaacattgtaatgtttgcctatgcgagtgaaattcattctagcgcagccaagttgattgcgcggaagcaatggcttgtggttggatatcatgatggtttcataagagtgtacacatacgaatcccctgtacagcaagtgaagagattcaaagctcattcatggaacatcacctgtttggacgttcatccaactgagccttatgtgctgtcggtcggcttgcttgacccaattaagatgtgggactggaacaagggctgggagtgcattaggatgtttgacatgcaaggtgtcctagcacatggaatcaaatttaacccgcacgattcatacaaatttgcggctgcttccatgatgaatgtacaggtttggaatttccgttcttcccgtcgtgaattcacattgtttgggcatggatctgcagtgagctgtttcgattacttcactcgtggaaatcagcaatacataataactggttctttggacaaaacggctaggatctgggactgcaagagcaggacttgtgttcaaatactcatagggcatatggattgtgttacctgtgtttgttcccatccagacctgccaatcctacttacaggttctaatgatgagacagttcgtctgtggaactcaattaccttcaagcttgagggtgtactggactttgaacttggaaaagtcggcgctatagtttgtttgaagggttcaaaacgggttgtgataggtcatcaggctggactagtaattactgaaattcgtaatgaacaacctggtcccagcaacaggttgacacaatgcaagcaacactatagcatttgcttcactgttgcctag

SEQ ID NO: 67218 - DNA, 198 bp, Oryza sativa
  Clone ID: PAT_MRT4530_68096C.1
atgcctctccagcgccgccaccaccaaacccgaatccctactgctgcggtggcggcagaggcggcgcaaatccggacgccgctccccacgcacgaagaaaaagagggagagatagagaaagagtggctggcgccgtcgttcaacaggacggcgccagcctggcgccgttcccctgccgacgtggcggggcgatgctga

SEQ ID NO: 67219 - DNA, 412 bp, Oryza sativa
  Clone ID: PAT_MRT4530_68097C.1
atatataggaacatgcggggggcatcattcattgaccatacatgtgctattcaaacaaaagggctacactacattatttgagtctccacacctcatacatccacagcttgctccagctgccttaacagacacacagagggtgccgggcgggctcaacaccacctacagcgttggggatgtccacgttgtagcaaccccgggcggctcctcgacgggcgctccaggtgccatttcccttggccgcccaacaccttgggcatggtgctgccccacatcgcgggcgccgtgctccctgaggttccctgcctccatgtgtgtgatcttcttgcacccgccccaactcttgggcacggccgtgagctgacccctgcattctcgcccggcccgttcgggcgtgccggctctccctctt

SEQ ID NO: 67220 - DNA, 627 bp, Oryza sativa
  unsure (1)..(627): unsure at all n locations
  Clone ID: PAT_MRT4530_68098C.1
caaaaacaactcccaaggtactcgctctaatggtcccgccatccacaccccccgtaccatcgcaccggtaaccgcaaacatatcccacacacccaacacctcgccacccatcacacntcacacaccccaccaccaccgcacaccgcatccacactactcctacacatcgcgcccacacacaagtctcccccccactctccctctcacactccctccgctcaccacccaatcccaacctcgcccccctctcacacagcctacacactccccactcactnccacccacacccgcccaccctccccctctttcccaccccctccctcccccgcgcacacccactcccacacccgccctcccactcaccctcgctcccnctcgcttactactcccaccctccacacgcgctcccgctcgcccccccgccaccctctcccacaccgctcccgcctcccacacccacacccacactcgccccacacaccaaaccacccctcgctctcccgcaactccgcccacccaacgccctcccccgccttccggttgggggggcccaacgcccctctcccctcaacacctncccaactcaaccccccacccccacaaacccaacccccccaactccgctt

SEQ ID NO: 67221 - DNA, 1155 bp, Oryza sativa
  Clone ID: PAT_MRT4530_68099C.1
atggcaagttcatttagaaagcggaaaacgggttggcttattctgcatccatggcgaccgcgaggaagaggagctgtccagacaccatctccaccggcgaccgaccggctgagcgcgctgccggacgccctcctccacaccatcctctcctcactcaagggccgacagatggttcagacgagcgtgctctccaagaggtggaggcatctttggcgctccgtgccatgcctcgacatcgaccagagagagttcgcggccgccagtgagaattgggcaatctcccgaagtgaccttgaaaagtttgaggattttgcagataatgtgctggcctatcgctgtggatcgcccgcgaaattggacacattccgacttcgcatatgtgacagatatcattctctccgttcttcagatactgatagatggattcggcgcggcctcaagtgctccccgagagagtttcacttgcattttgattacagatatgactcctatttgcttgagatgcataagttgggttccaattatggctgcctcaccaagttgcaccttactaatgtttcattgcatgaatgcttcatggagcacatcactactgtttgcacccttctggaagttctagagctcaacagatgtagtctctatctccaagaaattacacatcccaagctgaagaatttggttctgcatgggcctgcagtgatgccgtctcttgtcagagcatcaatccgtttcagtgttgtctttccgtgcaaatgcaactttcttaacgtgttgtttaatgtgacaagtctagaattgtcgggtttccgtgaaatggtgcggctggagttcaatcaagtcgaattccatgcattcaaaaacctgaggaccttgttgctggatagatgccgtccgagttacaacaatgagttattgcgtcaccttctccagaactctcctaatcttgagaagctcactgtgcattgctgcaagttctcaaaaggttccctggagtggaggaaatcatcccagcataagaaccaggtgaactgtaggaagctgaagtctactgaaatcatatacaaggacattgatgatgttcgtgagcttgtcgatcttttgctggacgtctcagggcacctaccgaagaacactatagcgctcaccaaaatatga

SEQ ID NO: 67222 - DNA, 429 bp, Oryza sativa
  Clone ID: PAT_MRT4530_6809C.1
atggtgttcggctgcccggctccgattggtgatgcttggtgggctgccatggatgggtcaaaggcgaagcccccggaccaggctgattcgacggcaaccaactgggtgcaccttgactcgtgttctcctctagctgggccgaaggggctgtacctgaaatgttgtggggttggcatgactgctgaaggaaagcttgaagctgtgcctgcaaagccaaagccccttctgccattacttgtgacatttggccaggttgtaaagggtgtacttggcgaaacctgtgcccgtgtgccgaggctttcgccacatcatcttcactcgtgccgccttctgccgagaactccacttggcgaaggtggtgttacgcccagtcacggctttcgcctgtatggcttcgctcttgtccttcgccgcccatcttcggcgtga

SEQ ID NO: 67223 - DNA, 1257 bp, Oryza sativa
  Clone ID: PAT_MRT4530_680C.1
atggacgaacaccttgcctaccatctcccggatctggcgctggagatcgtcctcagccacctccagtccctcgccgaccgcgccagcttccgtggcgtgtgccggcagtgggccgccgtctggcgcgaccaatggccgcgcaccccgccgatgccgtggctcgccgcgccgggacactgcgtcgacctctccgacgcgtccgtccaccgcgtccccctcccgagcggcgtcgatgtcgacgggatcgtctgctgcggctctctcggcaactggatcgcgctcacgccgaagcggcggcggtggcggccgcgtcatcaggtccgccccttgctgctgaacccgttctccggcgccagcgtgcagctcccgatcctcacgccggccgccttccgtggaggaggcgacgatatcaacgtcgagaagatcgtcatgtcgtcggcgccggactcggacggctgcgtcgtcgccgcgatcgtgatgggctcgtacagctccacgagagagatcgtgatctggcggcgggggcaagaatcctgctcggctccggccgccgctccgtccaacgttgcagacgccgtgttccacggcggcgatctctacgtggtcgacaagtgtagccagctctacgtcttcccaaaccacgtcttctccagcgacggtggcggcggccaagagctgcacccggtgaggctcgagatggatctcacgaggaccagccgcttcgtggcccgcgttctgctggagtgcgacgggaggctgctcatggcggacaggcaccgccacggcggcgacgccggctaccacgagtacagggtgtacgccctggagcgcgacgcctcctgcggcgattggcgctggtcgccggtcacgcggctcgacggccacgtcctcttcctcggcgccggctgctgcagggctctcccggtgaccgggcgcgacagggtgaaggacggcaacgtcgtcttcctcgacgacagcgcggagatcacggccgtggtcaccgtcgacgaccggaaacccctggagagatccgccctgatcaggagaagcatggacgtgccggcttccaacgtgctggacactttccggcggcgtggcggcggcggcggtggcggcgccgacaggcctgcaccgccggcggcatgcatggcagggagaaggaatcagtgctttggatttggagggctccaagatttgatcgtcttgttgaaatctttcgtgtcactgcaggaggatggatacacgcatcgccagtaa

SEQ ID NO: 67224 - DNA, 456 bp, Oryza sativa
  Clone ID: PAT_MRT4530_68100C.1
gtacacactcactctccagtcacccccatgcttttggcacattcttctcgcgcgagaggggggcaggacagggcaggggtgtggagtgagagtgtggctttggtctcgtcggtgcatggggatgcgggggttagggtcatcgaccattctcccgcggatcgtcgccaactacacggggctgaggccgctttggtttctggagcgcgccgtcgtggtccacccggtcgggtccgccggcctgcactgtccggtgaggtacacctgggcggagacttaccttcggtgccggcggctcctttcctttcttgtgcagggatctgtccgctccggctgccctgtccttgtgctttttcctggtgtacgcgcacctgtgtttctcttatttcatggtcctcatgtttgcagcgctggccgattgcttcaccatctgcgtcaacgccgtgactgttgctcttc

SEQ ID NO: 67225 - DNA, 645 bp, Oryza sativa
  Clone ID: PAT_MRT4530_68101C.1
atgaacttggaagacctgagattatctctagcgcaacaacctaatgcaagaagtgtgctggagaccatttgggggtgcccagagaatatacagatgagagctgtcgtttgtttgtggcaatggtggaagcagatgaatgaagtgagggaaggaggtaaagccagagacccaattgacttggcgtatatcattgataaccagggagaggaattcttgaagttgaattggaaagaggggaagttgaaggagaggagaatggcaaaatggagaaaacccacctctgatgtcctgaacatcaactcggatggggccttccacagcagcaccaaacaaggcggatggggatatgttattcgggatcatcatggacgggtggttcaggctggagctggcggagctgataacatgatggatgcattccattctgagattattgcttgtgcagcggctgtaggggcggcaagtgaaagggggataatgaaggtagagtttgaaataggctcgctgctgctgaagtctacactccaggagaactctttcaatctctctgtcatggggggtgtgattctggagatcaagaatgtcatttctagaagatttatttcattcttggttaattattgccccagggaatgtaacaagtag

SEQ ID NO: 67226 - DNA, 492 bp, Oryza sativa
  Clone ID: PAT_MRT4530_68102C.1
atgacggcggaggtggcagggagaaacagcggcgaccgcgctggcgtgagcaacaacagcaacagcagcgaggaggatgaacgcgatgtggcggcgcagaggatggctttgcatgtgccgccgctgacggtgagatggagcagtggagggcgacggcgcaacgtgtcaaggtgtcggctcggtgacctcggcggccccgtcttggacgtctcggcggcaccacactccacgatgcgtgtgctgcgggaaggcgaggacatcggcacgacgcctgtcgtcgactctttcgagtggaaggatgcggccacgtacacaatgcctgaaggcagcgctgccgcctgtcgtgtccggcgtgacgtacaccgacaagatcaagttggcagcgacatgcaccacggagagtacagcaagaagctagccaccacaatgtacgagaaggtcgccggagtcgggaccgtcgtggactcgtggctggcaaggtgcagcaagtga

SEQ ID NO: 67227 - DNA, 487 bp, Oryza sativa
  unsure (1)..(487): unsure at all n locations
  Clone ID: PAT_MRT4530_68103C.1
atccaatgccccanatgactcaaaaggatatttattagaggcatttacagatgcattctgggattgcaaggtggattgcaagctgattttcccatatttggatgcagtgggaaaaatgctgtttcctgtaggttccttctatgggatacatactaaacttcctttgctacataacttcttctctctttttttcttttttttttttttgtgggtgacgtgttcaggttattaagaaataggacttgatgaagagcatgcctagtgaaaattgcctacttggtgctaacacacaaatatcttttagggagaaatgcatctccacatgtacatgcattacatgcactattataactgtaagtgcttgaagatttgggtgatggtatgaagatctgtaggttgatttgaattttcagtgttcgaatctggattctggaaccacatttgatggtgatgttagttcatgtacctgcatgaacattggtgggtt

SEQ ID NO: 67228 - DNA, 423 bp, Oryza sativa
  Clone ID: PAT_MRT4530_68104C.1
atggcggtgacgctggcgtcgaaagcgagacggacggtgcccacaaggcggcggcagcagggggaggagctgcggtggcgtccctcatggacgcggcgttcgacctccggcggcggaggtggactgtgtcatcgaatccgactccgacctcgtgtcccacctcaccgcctccacatcgtcgacttcctccgctgggacctcggcctgccccgcgactacctcacctccatgaagcgctgcagctgctgcgcatcactcggtgatgccatgccggggtccttcctggccatggtcgacctcgtggccgtcaccgaggtcaagcttgtcgcctcgcgctggtccgcccctgggctcgacgccgtcgtgcgtggcgtgacccgtcgacaagcctgccccaagtcccggagaggagaagaagagtga

SEQ ID NO: 67229 - DNA, 213 bp, Oryza sativa
  Clone ID: PAT_MRT4530_68105C.1
atgaggaggtcggaggaggcgtggcagcatgcagccgtggtggagaggaggtcgaggaggggaagccttcgataccttggttctctttgtgtgctggatgatgtgtggaaggagacgaatgcacgtgtgttccacaaccgggagaaatctgttggcttgctctttggtgccatcaaggaggaggtcatcatctggaaggaagctgggggctga

SEQ ID NO: 67230 - DNA, 375 bp, Oryza sativa
  unsure (1)..(375): unsure at all n locations
  Clone ID: PAT_MRT4530_68106C.1
aagacgaaggagagaaaaggtaaagagaaattcagaaatactcgatcgatttgcagcctcctgtcatggcacctgtcaagatcaacaagtttatcactgctactttcttcatggttcttgtgatcatgtcttgcgccctcacatccacacttgcttgtcagggtgggacggagtgcaccgttgaaacgccacactgcacgatggattcgtgcaatgcaaaatgcaaggcagaggccaccagccgcaagtgcaacagtctgactgttagttgccacaaatatgctacacttgagaagtgttgctgcacttttcatgcaaattaatatcaacaatgacatcaacataggaaaatagtactagngggtgatgatagga

SEQ ID NO: 67231 - DNA, 472 bp, Oryza sativa
  Clone ID: PAT_MRT4530_68107C.1
gcgctacttcgcgtccgccccatgccgccgccgttcctcctctcctggcctcgccagttcgccttgccctcacatcggctccacagctcccacctctccccgtcgttctttgcccgccaaggcgccgagccacgcgctgccgtcgtttgacctcccggttgctcagtccatggagaggcggagggtggaggtgccgtcacgccgaggcaccacgccgccaccggccgtgagttaggcaacaaactgccaaggcgtcgctggctgccggcgccgggagcccaaggcccctggccggttggtcctggttgattgccactccctccccctcgccatttgtgaatcagtggttagtggatgactgaatgtgatgttgacttgctatgaactgtgatttggtgaattagagctatgaactatgatttgtgatactgctaattggtgaatttgaactatgaactgcgatttgtgaacc

SEQ ID NO: 67232 - DNA, 528 bp, Oryza sativa
  Clone ID: PAT_MRT4530_68108C.1
atgcgccggtgcgtgcctcggggacccgcgccccctcgcgcgcgccggcccacctcgctcatcacagctcactcccccgtcccacattcaatgccgtcatggccgcgcgcgcgcgtcggcgtcgcgcgccacaacgcctcctcgctcggtcgctcccctagttccctcctcctcctccgcaccggggcccctccgctccgctgtcccggccaatatgtgcactcgccaatatgtcgggtcgatcgattggtgggggcggaacggatgcggatgggtgcaccgcactggcgcagcgtcccatctggggcggggcctctcgggctcgtgcgattgggacgtttgacaccggttggcctgcgctgcaaggagagggatcgatcgatcgccatatctcgcgacttcaatgctcatcttcgtctggtgcaatgcaaatggaggggggcggggccgtacgagcagcaaatcattgcgatcgacttgccagccgctggcactggccttgctgctactccataccgtcctcgatag

SEQ ID NO: 67233 - DNA, 549 bp, Oryza sativa
  Clone ID: PAT_MRT4530_68109C.1
atgccacgtctttcctcctccagatctggtccgcctcacccgcgatgggcgaagatccggcagggtcccgccactagtagtgtgacgccgacgaagaccaaggttggctctcctcctccgctgccggccttggtgacgaccacttcgaccgcctacccaacccactcctactcgtcatcttatactttcttcccccagatcacacgcatcgtgctcggcggcatcgtcaaccccatccaggtgctcgcccaaatactttcgctgccaactccacctctatcctcgcggcatctgtaccctcttccccctcgtcatcgtcctgctccttctctttgccgcggcgacgggctctctcaccgccgtgtttcacctctccaaggccgacggagcgcacctgtcgggcacctcgccatccgtcaagccgataaagtaggccttgtccttgtcacccagccatggcggtcgaggagcatctcgaagatgaggtcggggaccgggagctcaccgtcgcgtaggtatggcaggaggaagagctccatgagcatctag

SEQ ID NO: 67234 - DNA, 1710 bp, Oryza sativa
  Clone ID: PAT_MRT4530_6810C.1
atgggaatggttgcgcaagaggaagagggtgctgctgccactcaccagtggggaaagagcgctcaccactggttgggagatagccatcactgctctacggtggagcaggccaccgggcttggttacatcgttctggcgcttcaagcgtacaccccctcgctgcacccgccgccgtgcaacccggcggccacaacggcagcggcgagcaccacctgcgagccggtgcgcggcgcaaacctgagcctgctgctgctgggcctgtacctggtcccgatcggcgacggtgcgatgaaggcgtgcctgccggctctgggcggggaccagttcgacccggccgacccggacgagcagcggcaggaggtgagcttctacaactggtacaccttcgccgcgtccaccggcggtttagtcggcctcgtcttcatcgtgtgggtggagaacagcaagggctggggcatcggcttcgccatctgcgccgccttcgtcttgctcgggttgctggtctgggccgccgccttcccgctctaccggaaccggctgccgacggggagccccatcacaagaatattgcaggtttttgtagcggcattcaggaaaagaaacgtccgcttgccggaggaccccagcgaattgaaacaaatcaaccaggatgatgataacaatgccctcgaagttctccccagaacagatggatttggataccccgatgagcgtaattataatccattaaacttcctacaaacgctcctaacctaccatatgatctatcttaagaaaaatctccctctgtccatgcctatgtgcggcattatcatgaatcctcctatgtggtgcttggagaaagcagcagtcaggactggtaatgatgctggtgcatggtcgctgtgcagcgtgaaccaggtggaggagaccaagatcttgctacgcatggcacccatcttcgccgctgccgttctcggctacatccctatgccgctcatcctcaccttcaccgtgcagcaaggcagcactatgaacaccaagctcggatccgtccacatatcgccagcgacattattcctgatcccaatcattttccagctggtcatcctcattctctatgaccgcgtcatcgtgccacctctccgtaggctcaccggctatgtcggtggtgtcacccacctccagcggattggcgtcggtttcattgctaccatcatggccaccgccgtcgctgcggtggtggagataaggaggaagtctgccgccgatgagagcagcctcgcggacggcaccgccgggatcccgttatctgtattttggttgacaccacaattcttcctcattggcatcttcgacgtcacctccttcgtggggctcctcgagttcttctgcagcgaggtgtctatgggaatgaagtccatcggtagctccatcttctactgcatccttggcgtgtcggcgtggctcggcagcctgctcatccaggtcaccaaccgtgtcacccgaagaggcggtaaaggcaatggcggcagcggaggatggttggatggggccaacttgaacaatggcaagctcgagaggttctacgtcgtcctctgcatcatcgaggtggtggcactgctgtcctacgtattcttcgcgaggaggtacgtgtacaggaatgagcagaaggtggtgacccaaggagggactatgtgtgacactgggaatggtgccgatatgatctaa

SEQ ID NO: 67235 - DNA, 267 bp, Oryza sativa
  Clone ID: PAT_MRT4530_68110C.1
atgttggtgtaccgctcatatcacgagctcgagcgtgaaggcaaacttgctaagcccaagaagctcacagatgtgcggcccaatcatggttgtgagcctgcgacgcccacggccacgccgcgcgcaatgcacacaatacgaggattgggactcgggatgcacaccgcttcaatcgctgctgcgacccgacgcctgttcgctttcctgttcatcgcctccatggcttaccctccatcgagagtagatgccctcgccgccgccggctag

SEQ ID NO: 67236 - DNA, 249 bp, Oryza sativa
  unsure (1)..(249): unsure at all n locations
  Clone ID: PAT_MRT4530_68111C.1
tggggtcgctggcccctttgggaacccaaaacgccatggcctcccggaggcatatggagcatagtatttctgtgcccaaggatgaggatgatcaggtatttgatatcgagcttcagcacaccaaggcctcgcggatggtagaatcctatgccaagtccagggcntttgatgcagtcagccatgctggcgccgccccagggaggagggcgccagcatggctggcgccgctgcctccattcctgtttctct

SEQ ID NO: 67237 - DNA, 695 bp, Oryza sativa
  unsure (1)..(695): unsure at all n locations
  Clone ID: PAT_MRT4530_68112C.1
ggttgtgatggcgttcaattacaacagaacagatacaattctcactgtacgactaggagcaaccaccgcaaaagctaagcgtgctcacaagtaacacaccaaatagatatacaattacaaattcagtcggtcagaaccgcctcttctgttgagtaggataaccggggttctgcatccccatcccttgatcagctttccttctcaactgatgcggatgagattgggctccagcgcccctctgcattggaatattaccaggattcatcccagctatgcctccttgcggagctgcaccaaaggccgccatgtttgtaccacccattctcgacataccgaccatgggttgttgcatttgcctcggaatgggtctcggtaccacagactggttgccaggagctgcgttccctgatggcgcttgagttggttgaaggcttgttgttccttcaaaatcagttgtggtatcaactggacgcacaggatattgcacaattttctctccagcctgcgatggtaaaagtgcattccgtccaggcagaggatccattcgaaagtactcatgttccanagcttgcgcagctgttatacgctttcgaaggatcatactcgagcatttttgagaagaagatcaaacgcaggactcttctgaggcaagtgaacatattaagaagccctgtgttctcatacttatgcccttg

SEQ ID NO: 67238 - DNA, 1875 bp, Oryza sativa
  Clone ID: PAT_MRT4530_68113C.1
ctcttttccaggctccagccgagtacccgcctcctcctcctcgctcgccgcggaatcttctggaagcttctagatccggccgctacgatcggcgaagaagggatggggcaggccttccgcaagctcttcgacgccttcttcggcaacaaggagatgcgggtggtgatgcttgggctagatgccgcggggaagaccaccatactctataagctgcacatcggcgaagttctctccaccgtccccactataggcttcaacgtggagaaagttcaatacaagaatgtggtgttcactgtgtgggatgttggtggccaggaaaaattgaggcccttatggaggcactacttcaacaacaccgatgctctgatctacgtagttgattccctggatagagagaggattgggagagccagagctgaatttcaggccattattaatgacccttttatgcttaatagtgttctattggtgtttgctaacaagcaagacatgaggggcgcaatgactccgatggaagtatgcgagggccttggtctatatgacctgaacaaccggggcagagtattggcgaaactctggctgggtatgcctgtctccattggtgatggcatcatcggcaacctggccctggtgtgatggcgtcaattacaacagaacagatacaattctcactgtacgactaggagcaaccaccgcaaaagctaagcgtgctcacaagtaacacaccaaatagatatacaattacaaattcagtcggtcagaaccgcctcttctgttgagtaggataaccggggttctgcatccccatcccttgatctgctttccttctcaactgatgcggatgagattgggctccagcgcccctctgcattggaatattaccaggattcatcccagctatgcctccttgcggagctgcaccaaaggcccgccatgtttgtaccacccattctcgacataccgaccatgggttgttgcatttgcctcggaatgggtctcggtacctccaactggttgccaggagctgcgttccctgatggcgcttgagttggttgaaggcttgttgttccttcaaaatcagttgtggtatcaactggacgcacaggatattgcacaattttctctccagcctgcgatggtaaaagtgcattccgtccaggcagaggatccattcgaaagtacctatcaacagaaaagggttgttcagaaggattgctgtagtaaatcatactccctccatttaaaattacaagtcttatttcatgttccaaagcttgcgcagctgttatacgctttcgaggatcatactcgagcatttttgagagaagatcaaacgcaggactcttctgaggcaagtgaacaatattatgaagtcctgtgttctcactatggagatagttgagaccattgagcagttgccagagcaaagatttgactgtgtagggatttatggggaggttaagcttctctctgtgatgcctgataatctcatagagatcgtgctcggcgtaatcgaaggcgaggtagagggacatgtcggcgtggttgatgtgaacattgacgagcttgacaacattctcgtggttgatctcacgcagaagcatgatctctctgatggcggtgggcgagacaccgtcgccctccttggactgcttgaacttcttgatggcgatgggagagccacggcggccaacgccagcggcagcgtggggatgcgattgtttgaggcgagcgaggaagacgaggccgtaggtcccctcgccaatcttgcccactagttcgtattgctgcagccatgccggccgattcgttccacctccgacgcggccgtcccccatcgccgccgccgctgccggagaagaaagcctcgtgccg

SEQ ID NO: 67239 - DNA, 492 bp, Oryza sativa
  unsure (1)..(492): unsure at all n locations
  Clone ID: PAT_MRT4530_68114C.1
gtggtgaaagggtttatttatttttttttttttttttttttttttttttttttttttttttttttttttttttttttnggattaaaaccaaagtttatttttttaaaaaaccttcccccccttaagaaattgaccctgttttttttatgggggggggttggttataaattattcatccatttttttttaagatccatccaacatttatcgacacacccccacacttacaaccaccaccacggttttttttaggcgtcaaaacaaaaggcaaggccttcctacatttaaactgggttcttatgcaagcaaattaaggccttgatcaaagcttttatccacagtttctttttccataccataaatcctttttcaaccgggcgacaaccacaattaatttaatttcaggaacaacaagaacaaccctttcaatttgggccacactttcaggttttgcaaccccaacccccgtttttcccgtttttcaccgccatt

SEQ ID NO: 67240 - DNA, 577 bp, Oryza sativa
  Clone ID: PAT_MRT4530_68115C.1
acatatacctacaacagctaccattctcatgtggatatgacttgcaaagtaaaacagaactttgatgcatgagcatacttgatttgatttgtaatttgctcctgcgtacctatctgaacttttttgcctgttcaactattgcagggatttatcataattagctagacattttcatctgaacatttttgtctgttgcagcattgcagggaccatcacaagtacctggacattttctcatctacttacaaactaaaacagaacttgatgcttgagcatacttgatttgatttttaattttctgctggcattgcagggacatcacaagtgcctggacattttcttctctactaacatgcagtaattcagtgcctatctctcattttcaatttttacagttccagattaatgtgcctatatttatttagcttctctatttaaaaagttttttatctgtttaatcgtaaaaaggctttcacatgttttttttaacagagccacaacatgttattgatacaaaatggtttgatttgactctttcctgccacacattagaggacgacctgccatggtcgatgtt

SEQ ID NO: 67241 - DNA, 195 bp, Oryza sativa
  Clone ID: PAT_MRT4530_68116C.1
gtatattatgctatgctgtggtgaatgcaaatttggtacattattggaggactcgaagtgaaatgtcggtaagggggttgaccatgaatcagctatctctgttttagggatcacctggcctgttgtttgctgcatattcgttacacaccttacaggtctctcagcatacaatcgtcagattcatgaacttgaaaa

SEQ ID NO: 67242 - DNA, 351 bp, Oryza sativa
  Clone ID: PAT_MRT4530_68117C.1
ctgtcacaacacattttgtctgtcctagacgaggacgagatgcctggtgataaattaatcatcgcaattgccggacggcaagatgcttagaagcatttgactgatcctgcgcccaacgtgacgccatcacacatagcggagacgctgggaaccatgctagagacagctctatttgagagcactactgctgttatcccaacactgtacccatagctcgactacttggaatttcaggatgggtatcgacgcctaccatagctgagcgaactctaacgccagctacatctgggtcatgaaagaccgacgctgcagcgagctctttcgccttaagcgcattgacaagaacaaggt

SEQ ID NO: 67243 - DNA, 959 bp, Oryza sativa
  Clone ID: PAT_MRT4530_68118C.1
gtggggcccacatgtctgtcctcttcctcctccctatctcccttctctctctttctctcaatctctccccttcttcccattcggcggcgggcgggagggcggcgagagcgagcggccggcccggctcggcctcggtggggaggcggcggcgcaccgctggggtccactgatgatcgcgacggcgcacggacgaggagagcggcggcggcatcggggcgcagcgtaaccggagcggcggcggccatcgacgcacacgagcaggacgacgcccatggcggggctcccggagcacggcgacagccgcgtgaggtaagacgacacgtggcggcgaaggcgagcccgctgcggcggtggctatggaagcagcggagacgcggttgaggagtggacggcaacaggcgggagtaggccgacggcggcaagtcgccgcctccatccccacttccctcccgctcggccgagccgccgccgtcctagccgccaaccgccgcccccggttcggttccgatacgccccgatgccgccagctcgctctcgccgccttcctgcccatcggccgaatgggaagaaggggagagaaagagagagaagggagatagggaggaggaagaggtctgacatgtgggccccacatgcgccacgtggcgccacgtcagcgaaaccacctcccaaaaccggcaagggagtcaaattgcactggatttacaagttcgggggtcgagatttctggcattgcggttgagggatacgatttagattcggtcgccagctgagggtctcttcctgatcttaagaaacaaaactgcacaattattttccgttagcatatttccaaactgttaattaaacgatataatttttaaaaaaaaaagctaggtagccattatatatacaatccatcagaagtaacaacactatagctttcttagcttgtaggctagcatatggtctgttccata

SEQ ID NO: 67244 - DNA, 166 bp, Oryza sativa
  unsure (1)..(166): unsure at all n locations
  Clone ID: PAT_MRT4530_68119C.1
gggccgggtnctnnttatgcccataactccatgactccatgtaatgatcatacgtttggttttttnccatgtaaatatatgtaagtctagtgtaaatatgtgtggcatgtggaaacaatgtgaatatttagtacaactntttaagtcttaaaaaaaaaaaaaaaaa

SEQ ID NO: 67245 - DNA, 1629 bp, Oryza sativa
  Clone ID: PAT_MRT4530_6811C.1
attatcacccgggaaaggctaatgtcgtagcagatgcccttagtaggaaaggctattgtaatgctatggaaggatgacagttgccattggaattgtgcaaggaatttgaaagattgaatctgggaattgtcagtagaggctttgttgcagctttagatgcgaagcctactctcattgatcaagtcagagaagctcaaatcaatgatcccgatatccatgagatcaaaaagaatatgaaaagaggtaaagctatcggtttcttggaagatgagcaaggaactgtatggttgggtgagagaatctgtgtcccagacaacaaagatttgaaagatgcaattctaaaggaagcccatgatatgttatactccattcaccctggtagtactaagatgtaccaggatctcaaggaaagattttggtgggcaagtatgaagcgtgagatcgcagaatatgtagcggtatgtgacgtttgtcagcgagtcaaggcagaacatcagaaaacccgcaggtttgctgcagcctttgaagataccagaatggaagtgggaggaaatcggtatggatttcatcaccggtctacccagaacatcattgggccatgactctatttgggtgatagtcgacagacttaccaaagtggctcatttcatcccggtaaggaccacctattccggaagtcgtttagcggaattatatatggccaggattgtgtgtttgcatggtgttcctaagaagatcgtgtcagatagaggtagccaatttacttcaaaattctggaagaagctccaggaggagatgggttccaagctgaattttagtaccgcttatcatccgcagacagatgggcagaccgaaagggtaaatcagattttggaagacatgttgagagcttgtgttttagacttcggtggaagttgggataagaatttgccttacgcagaattctcgtacaacaacagttatcaagctagtctccagatggctccttacgaagcactgtatggtcggaagtgccgcactccgcttttgtgggatcaaacaggagaacgtcaggttttcgggacggatatcctgagggaagcagaagaaaaggttaaaatcattcaagaaagattgcgtgtggctcagtctcgtcacaagagttatgccgacaatcgccgcagagatctaagttttgaagaaggagattatgtgtaccttcgtgtcacgcctcttcgaggagttcatcgctttcacaccaaaggaaaattggcaccacgtttcgcgggaccttacaagattgtcagtagaagaggagaggtcgcttatcagttagaattacctcaatccttagcaggtgtccataatgtgtttcatgtgtcacagttgaaaaagtgtttaagggtacctaccgaagaagcaaatcttgaatagattgaagtccaagaggatctaacatatgttgagaaaccaatccgtattttggaaacaaatgagagaagaaccaggaatcgagttatctgtttctgtaaagttcaatggagtaatcactcggaagaagaatcaacttgggaacgagaagatgaattaaagccaactcatccgcatttgttcgccagttcttccgaatctcgaggacgagattccgtt

SEQ ID NO: 67246 - DNA, 332 bp, Oryza sativa
  Clone ID: PAT_MRT4530_68120C.1
agtatttatatgttacatatgctcacggtactatcgggctcctgagctcatattcggtgcaactgcgtacacagcataaattgatctatggtctgctggatgtgttattgctgagctggatcttggtcaacctctgtttcctgatgaaagcgcagtggaccagcttgttgagataattaacggtttgggtactctaacgccagacgagatcccctgcctgaatcccattatcaccgcgctcaaagtttcgcagataaaagcatgcccatggaacaccagctaccacaggcgaatgcctcccgaagcagaacatcttgcgtcccgtctgcttc

SEQ ID NO: 67247 - DNA, 332 bp, Oryza sativa
  Clone ID: PAT_MRT4530_68121C.1
aattcggcacgagctcgtcatcgrgcagggcgccgcctccagccatcgatccgcgrcagccaagcgaccgagcaggcctagccaccatccttctcgccccccaccggcgttcgcgactctgttcttgctgctgtctcgaggagagttgctgtttgatcggccatgccggaacaacaacaacctcgaggatctgctgctgcaaggcggcgggggcggacgaaaaaaaaaaargaagggcggcrgggcacrggggccgtcgtcrggccagggccagcaktggtcgtcgcagcagcagcagcagggggaggcgcgggtcgtcgtactccggcggg

SEQ ID NO: 67248 - DNA, 342 bp, Oryza sativa
  unsure (1)..(342): unsure at all n locations
  Clone ID: PAT_MRT4530_68122C.1
ggtcaccgcgccaccgtacgcggcgggggcgccgcgccggcgggttctcgccgctcgtccgctgggccgcggcgcctngctcgcgctcgcgccggccgcacgcacgtngtcgtnctctgtgacgggacctcgccgcggcagctgggaggacgtcgccaggcgccaaagcggccggaccgaggtggcgagcgtcaaccacgacgaggcctgctagcttttgagcggaccagtcctcctggtcttttgtgaccttggccggggttatggcacccaaccctttttattccaggggcttttaagccactaaaactcttagctgctccttcctctcgatgtcgtaag

SEQ ID NO: 67249 - DNA, 288 bp, Oryza sativa
  Clone ID: PAT_MRT4530_68123C.1
atgtggaatggttggcctgggttggcttgggacgagctgggacctgggtctggttgccagttcggtctgaatcatcataggccttgggttaaggcaggtaatgacctggttgccggcagcccgacgattttgggggagacgatgcggtcagaacttcggcagccagcgatttcgtcgaggacacatgggttatttaaaataattgagggatcctctctgttttacagccctgcagatcgtcgtattgttggattttttattggacttgccaggttctcagctccatga

SEQ ID NO: 67250 - DNA, 481 bp, Oryza sativa
  Clone ID: PAT_MRT4530_68124C.1
ttttgtttttttaagtcaactcgtaagatcttacataggataggatcgatctactagcttagctaggattcattagtaggatacacaagtacagtacatgctcacagatgctgctgctagctagctagagagtagaaagtacagtagtactagagagagtataatagatggagatagatgtacagtagaggagacaggcaggcaggcaggcatcagtgcttctggaagatgaccatgcagaagaaggcgacgcagcggaagaggacaccgttggcggcgaggacgagaatgcagaggaacctgtcgttgatgtcgtagccgctcttgaggagggagccgcatcgcgttatgagccacacgcccgagtacctctgcgcattcgcgatcacgaacccttccagcgcccacttggtgtagcacaggttcgcgaagaaggtgtccttctgctgcgttgctatcagagtcagcactaccggaagca

SEQ ID NO: 67251 - DNA, 278 bp, Oryza sativa
  Clone ID: PAT_MRT4530_68125C.1
atggcagcgtttaccggccagagatcggaccgctcgggacgaacgttaaagttcacgctcccgaacactgtcttcttcgttccagctgggacgcaccgtcttcgagttcacggtggcgaaaaatatggcgccgaagagctcggcgttaggctgaaacctggaaatccggcacgcctagtcgaagatagcgatccaaacaagcgccaacgggctcagctgcggaagttccacctggaagaggcgaaggatctccggcaacaacacgttgcagggaaacc

SEQ ID NO: 67252 - DNA, 528 bp, Oryza sativa
  Clone ID: PAT_MRT4530_68126C.1
aaagccagaagctagatgctccacggttaaagacaaaacgacacatgtcgttatggagcacaagcaaagctctgtaaaacttgccgtagatctagggggttctcagcacaggattctacgatcttccctgtaataaagctcccctgattgctgcccttatcattgcttgacatgatgatcttatcgccatcttcccttaacagccccccttgcttgcagatctgtgtcgaaaaggaaactttgtaagtcgagcaacttaccatagactcctccagcagatgctctctatctttttgtcctttttacaccgttttccaacctcatgcagttgatgtcagactaaccctcaatgatgccttctgtggcgcatccgagttcacacctctaactcttcgggaagaccagtttgaacgactccatttccaccgaaatgcacattttcaaccagggcacttcccatgtcctcggctctctccaatagctccccacttttgttgcctcccaaactttcacttccaacgagcccgt

SEQ ID NO: 67253 - DNA, 2196 bp, Oryza sativa
  Clone ID: PAT_MRT4530_68127C.1
gtttttatcagtactgtatgatgttgatgaagtaactgttcgcagtcttaatgggtgcagagtagctgaccagattcttaggcttgttccaaatgttgagaactttcgaacaacgctaaggtgtttgaagtattgggcgaaaaaaagaggagtttactctaatgttactggttttcttggcggtgtcaattgggctttacttgttgcacgtgtctgccagctctaccctaatgctgtgccaagtatgcttgtcttaagattctttagagtttttactcaatggcaatggccaaatcccgtgatgctttgtgctattgaggaggatgaacttggttttcctgtgtgggatccacgcaaatatcaccgtgacagatctcatcatatgcccataataacccctgcttacccgtgcatgaactccagctataatgtttcaacaagcacacttagggttatgatggagcaattccagtttggtaacaaaatttgccaggaaatcgatatcagtaaggctaattggtctgctctttttgagcctttccaattttttgaagcatataagaattatctccaggttgacatccccacgcgtccgggagaagatcttagactttggaagggatgggttgaatctcggttaagacaacttactttaaagattgaaagagacacatatggaatgttacaatgccatccttacccgcatgagtatgctgacccttccagacaatgtgctcattgtgcttttttcatgggtttatcaaggaaagaaggtgcaaaaatacaggagggtcaacagtttgatattcgtggaacagtagatgaatttaggcatgatatcggcatgtatgggtactggagacctgggatggagttggctgtatctcatgttcggaggaagcagattccatcttatgtgtttccagagggctacaagagacctcgtccttcgaggcatataaatcatccccagcagtctaataaaaatgatgttgaagatggcacagcgaatagatccccagatgggcagcccaagcgaaagcatgatacagctggggtttatgatagtgaacctggtagatctgttaagagggcctcaattagcccctcaattagcccagttcaccagaaaacttcatcgcctccatcaggcaatattgctgatgcttccggtgcaagtggtggaagtccggtttcacttgccaatggcaatctagaacaagcaaattgcttgaattcaccactggcatctgaaaaaagtctggactctgttacatcaggctccaagtgtgtgggagtggaagcggtttgtcctagtgatgctactaaagagcatgataactgtggttccaatatgaagaactgcaccactacaactgtagctgtatctttgaaacgtgtggcagaaaaggttgtgtcagagctcgttggaagtgaaagcttgggaggcaacaaaagtggggagctattggagagagccgaggacaagggaagtgccctggttgaaaatgtgcatttggggggacgaggaaggggtcatggtggcatgcccgcagggtggtggaaatggagtgggttaaactggtcttcccgaagtcttagaggtgtgaactcggatgcgccacagaaggcatcattgagggttagtctgacatcaactgcatgaggttggaaaacggtgtaaaaaggacaaaaagatagagagcatctgctggaggagtctatggtaagttgctcgacttacaaagtttccttttcgacacagatctgcaagcaaggggggctgttaagggaagatggcgataagatcatcatgtcaagcaatgataagggcagcaatcaggggagctttattacagggaagatcgtagaatcctgtgctgagaaccccctagatctacggcaagttttacagagctttgcttgtgctccataacgacatgtgtcgttttgtctttaaccgtggagcatctagcttctggcttcatcattgtatgggtgctgaattgaacttgtgtatggcatctctgggtcgacctgtttgcttctcagagatgcccttgcctctgctgtaggtctagattatagagatagctgctgtgctgctcatctttgtttctcaatgctcctgtgtactcggatcttcccttgtaatataagatatttgcagactggtccttacaaaaaaaaaaaaaa

SEQ ID NO: 67254 - DNA, 1551 bp, Oryza sativa
  Clone ID: PAT_MRT4530_68128C.1
atggcgtctggagcggccggcgacatcgacgacggcgtggaggctgatggggaggagggcggcgcgggagagtgggttgatgggaaggagtcgacgatggcgcaaataatgatgggaggagggcggcggcggtggcgggtggccggaggagtaggcgtcgacggcggggaggaatcagagatggagtcagtgccactaactgctgaagctattgcttttaccgagaaaaagatggacatgactttagatgatattattaagatgtcaaagaaaaagaatcctggaggcaagaaacctgctagacaacctatcaagaaacgtccattccagaatgacaacactaatcaagggaatgcaaaggttcagcgatttatggaaactagatcgtccttaagacaaggggttcttgcacaaaggaggacaaatctgggtggaaatcagttcgcagctacaaagcaggctgcaaagaaggctgctacaatgccaatacgtagcaggggtgtcagatggaacaagccaaggtatgagctaactgctgcactgtttcattactcttattctctgcagagtctttatgaatctatcttacaagaaattatgaacagtgccccatctaactcaatacagcggaggcctgtaggacaggcttttcagaatgggaaggggaaggaggtgcagaacaaggcaccaaggacaatggatgcgctctttgcacaaatgaagcagcagaggatgaggaccattccacagcagcagacgaatactgcccctggccggcagattgcccagcagcggcgtaatcagcaacagcggcgaggaagaggatatggtggccgcaatggtgggaataaagaaaaggaaaaggatgagaattattccaatttgactctgtattttggccgaaggaaaatgctaaaccttattaagataaagggtcaaaagaaggaagatgcagccaatgcaaatggaaagcctcctgccaaaaagcaaagtccaggggagttgcgtcttcacaaagatattgctgaacttaaccttcctaagtcgactagaatttcttttcctaatggcaaggatgatttgatgaactttgaagttactattcgacctgatgagggatactatgtaggtggtaaatttatttttactttccaagttcctcctgcctatcctcatgaaccacccaaagtcaagtgcaagactaaggtctatcatcccaatattgacttggagggaaatgtctgccttaacattctgcgtgaagattggaagcctgtcctgaatgtcaacacgattgtatatggcttgaatcttcttttctcacaacctaatgatgaggaccctctaaatcatgaggcggcagcagttcttcgagacaacccagaaaagtttgagagaaatgtccagagggcaatggctggaggctatgttggtgaaacccacttccctagatctagagaaaatgctgaacagtatgtgtgtgctgcacttactgcctgttatgacttatggctaccaggaagtaagaacaagttcactaacattgcttaa

SEQ ID NO: 67255 - DNA, 404 bp, Oryza sativa
  Clone ID: PAT_MRT4530_68129C.1
tgtcgttcgtccacgcgtacggagccgatatggtgctcgaggattagctggagtggcaggacacgatcgttgtagagacacacgttgtgtgcgcctcgaggagtgaattatacatcgagcgcgtgcacctgtggccacacaagcagatttgtgaccggcggacagaaatggaagacgccgtcgacgccgtgtacagattcttctacatcccgctatgaatgctcaccggaaactgcgtcgtggacggtctacaccacatgaggcttcgcctgccagcacacttattcgatgtctacaacggccactgtgctacgcaaggtgctaattactgtcgctagcgactccacgctgtgttggtgtaggagctgtgcaggatagatagatctgtgtccagtgctaacttg

SEQ ID NO: 67256 - DNA, 547 bp, Oryza sativa
  Clone ID: PAT_MRT4530_6812C.1
acttctctctctactgtatactatgtcagctttgagaactagattagatttctctcctctgtatactgcatttcagtactgcatttctctgtacttacaatgatgtctgttgggtaggatcttgtaaagggtaaagatacattgatgccattggttgattttcaagagaagaaatgtacaggatggaggcagctgaagattttgccatctggagtggtgaaatatctcagaaatacatgctatgaacatttggcaaccttagaatcagatatctttgctagtttgatacaacatatccttgtaggtgattgttgatggtgcatgcagtttgttgaaacctttgtttttttcggtttgtaagacttctgtaatggtgcattatcagaagaaccagttgctatatgggttgtaacctttgtgctatatgggttgttattgtgtttgattgctaggcctatatgggcttagcccacttgttatattaataactatttaagaagaagatctgtaatatatcttaaaaaaatgtagggcgcatcctttgtat

SEQ ID NO: 67257 - DNA, 1048 bp, Oryza sativa
  Clone ID: PAT_MRT4530_68130C.1
gcctttgtgagctgctaatgttttgtcctggatgccgaaaaaaaaagaaaaaactcccgtctcgtcgtctccgctccttgcgagttcgcccaccgccgccggcgcgccgatttccatctcccgagcaaagcggggggagggccaccgccgccgccgccgccgtcgccgtcgtcctgctgctcccgccacatcccgagatggagtcagtgccactaactgctgaagctattgcttttaccgagaaaaagatggacatgactttagatgatattattaagatgtcaaagaaaaagaatcctggaggcaagaaacctgctagacaacctatcaagaaacgtccattccagaatgacaacactaatcaagggaatgcaaaggttcagcgatttatggaaactagatcgtccttaagacaaggggttcttgcacaaaggaggacaaatctgggtggaaatcagttcgcagctacaaagcaggctgcaaagaaggctgctacaatgccaatacgtagcaggggtgtcagatggaacaagccaagtgccccatctaactcaatacagcggaggcctgtaggacaggcttttcagaatgggaaggggaaggaggtgcagaacaaggcaccaaggacaatggatgcgctctttgcacaaatgaagcagcagaggatgaggaccattccacagcagcagacgaatactgcccctggccggcagattgcccagcagcggcgtaatcagcaacagcggcgaggaagaggatatggtggccgcaatggtggtaaccaatgagttcaaccacatcaaatgtccttcatgggagcattttcagttcactggtttcttgggtgggagaagaacccctggaatgctaacttggcttctttgttcccttgtattgttaggagagtcgcggacagaatcttactgaagtctgtatgcagtttttctggtttcctatttctgcttcagcttgtataatgtccgatggagtgtatgaaaatttgcctttttgtgttaaaaaaaaaaaacaccaaaaaaaaaaaaaacac

SEQ ID NO: 67258 - DNA, 547 bp, Oryza sativa
  unsure (1)..(547): unsure at all n locations
  Clone ID: PAT_MRT4530_68131C.1
gttgtatacaacaatatctgcctgagcgaattttggcctttgtgagcagctaatgtgggggcctggatgcagtgccccatctaactcaatacagcggaggcctgtaggacaggcttttcagaatgggaaggggaaggaggtgcagaacaaggcaccaaggacaatggatgcgctctttgcacaaatgaagcagcagaggatgaggaccattccacagcagcagacgaatactgcccctggccggcagattgcccagcagcggcgtaatcagcaacagcggcgaggaagaggatatggtggccgcaatggtggtaaccaatgagttcaaccacatcaaatgtccttcatgggagcattttcagttcactggtttcttgggtgggagaagaacccctggaatgctaacttggcttctttggtcccttgtattggtaggagagtcgcggacagaatcttactgaagtctgtatgcagtttttctggtttcctatttctgcttcagcttgtataatgtccgatggagtgtatgaaaanttgccttttgtgt

SEQ ID NO: 67259 - DNA, 1232 bp, Oryza sativa
  Clone ID: PAT_MRT4530_68132C.1
ggtgtatggtgtgtaaaaactcccgtttcgccttcctccccttgtgcgccggcgtaaaagaaagagaaatctccattctcgtcgtctcctcagctgcttgcgccaagacgagtcgcggctcaacagggggaggggcggcgatctccatccatccggcgagcagagcaggggaggggaggggatcctggaaaatgctaaaccttattaagataaagggtcaaaagaaggaagatgcagccaatgcaaatggaaagcctcctgccaaaaagcaaagtccaggggagttgcgtcttcacaaagatattgctgaacttaaccttcctaagtcgactagaatttcttttcctaatggcaaggatgatttgatgaactttgaagttactattcgacctgatgagggatactatgtaggtggtaaatttatttttactttccaagttcctcctgcctatcctcatgaaccacccaaagtcaagtgcaagactaaggtctatcatcccaatattgacttggagggaaatgtctgccttaacattctgcgtgaagattggaagcctgtcctgaatgtcaacacgattgtatatggcttgaatcttcttttctcacaacctaatgatgaggaccctctaaatcatgaggcggcagcagttcttcgagacaacccagaaaagtttgagagaaatgtccagagggcaatggctggaggctatgttggtgaaacccacttccctagatgtatgtaaggcctgaagatggtgatcggtacctgacttatctgctgctgccatttctcctaccaatgcactatggtaaaagcagtatatgtaaccaagaaggaacttctctgttatgtaacaacagcagttgctagaaagtaagttagtgaggcaattgaactcacgttcataacccgcaatccgaagactctgggttaacctgttgtggcaaatgttctcttttggccctcgcgcgcatctcagtcattctgattcataccagtttctgagatgcttttgtataatgccagctagagaaaatgctgaacagtatgtgtgtgctgcacttactgcctgttatgacttatggctaccaggaagtaagaacaagttcactaacattgcttaatgtaacatgctaccttgggtagttgtgttgttctttttaaaaaaaaaaaaaaaaagaaaagtcttctccacctaaatgttctgaaaggcatttcatggctattttaa

SEQ ID NO: 67260 - DNA, 349 bp, Oryza sativa
  unsure (1)..(349): unsure at all n locations
  Clone ID: PAT_MRT4530_68133C.1
aaccccacaaaggaggacccgaaggaggggttgatttaagagaacctgccgctacaccccccggaaacagnnntggacttactgcagcgagcaccgtgagcataagcgacgagaaggccaagaagcaaagggcacaaaggacgacaacgcagcaagctatacgcgggccaagaaggggaaaatggacgcgcaaaacctgagaaagcaagatacgcgcctctggaaagacggcaccaacgggaagaaacactgccagaagcagccagcactcagagactagaaatcgcaaaagagctggagaaagaagaaggtacctcggaacccgaggaaaagcaagctggcgaggatg

SEQ ID NO: 67261 - DNA, 549 bp, Oryza sativa
  unsure (1)..(549): unsure at all n locations
  Clone ID: PAT_MRT4530_68134C.1
gagcacctctctggttgctggacaaatgttttaangctcttttactacaactagtgcagatatcttttattaaaaaaaaatgccaacaagatattgaacatgtgtttccagactcaagaggtacactgtttttctaagcagagagaagcaccttgctgtgtagcgttttacttatttagtctatgtttcatcttgttgaaaattttcaggtttaacattttgttagatagcaataagctgttgtctttatcaacatatagcggtgtacacaagttattacatgttagggctaatatagatcagttgagattgaccgtatacatcatgcttaggtttcaaatatctgttctgatgaagaaaactctgacaaatgattctgaaggataaatgatggaggatatttggtagtcaaagtattcaatgcagatgtttttttctttgccataagcccataacaagaaaatacactaaatatatgaccttccttcttacttgtaaagaattagaagctgaatcatgtttgtttaaatcaattggacattgccttct

SEQ ID NO: 67262 - DNA, 501 bp, Oryza sativa
  Clone ID: PAT_MRT4530_68135C.1
catgaatggaaatagttttgtatgcaagaatctaattagtagtaatactgcactgtcttttcggttacatctgtatttaaaattttcaaaaagaacactttatggctataaaggaaactaaaataaatccttatctactaagcatgttatgtaataattgattttatcaactcttgctaggaaaggatgttctgttttgcggtagtataggttatgctaatttaatttcctttgtagttttgttagcaacaatggatgcctgctccttgtctttctgatctttttcttttccagggactcttgtccaaatttttttaactctcctcttttggattttgtggagcatgagaactagaattaagatccagattttcttttctgctcaacctgaatacatttgttcctgatttgcattctttttccacaccattttgcggagggactttctttgattgctcaaggggatgtgggttacatgcaggtacaaatttgataaagagg

SEQ ID NO: 67263 - DNA, 414 bp, Oryza sativa
  Clone ID: PAT_MRT4530_68136C.1
atggagccgagcccgagccgccccaccgcgccactttgccgcttcgaatccgcctcaatccggcctcgattctttcggatttttgagggcttcgtcgccaccgccggcaagcaaaccggcgcagcggtccatctccggtgccgcgcgccgacgtcttcatcgtcgtcgccggtcggcgtcaccaccgttgggtgtgccgtggtgaggggaaagctcggcaaccttccttttccgtcaccggtcaccggagctccgctggcccgtgcaagccgagcccgccgccgccgcccctttgtcgccgccgtcgtcgtttgtcgtttgactcgaggcggcgagaagtccgtgggggtcgctggggagtccattgcctctggttttgagggggagattatgatccaggaacggtgcattgtg

SEQ ID NO: 67264 - DNA, 132 bp, Oryza sativa
  unsure (1)..(132): unsure at all n locations
  Clone ID: PAT_MRT4530_68137C.1
ttgatatggggttcacattacttcttagtcaataagataaactcgtcccatccgcgcgcggcctcaacatctcaaccttntggtcagctctggtaattctgctggttatatcggcggctgggaggaggtgat

SEQ ID NO: 67265 - DNA, 365 bp, Oryza sativa
  unsure (1)..(365): unsure at all n locations
  Clone ID: PAT_MRT4530_68138C.1
cacgagatggaaggatcttggaaagaattncccaatatatttctnccaacgattaaancaataaaacataaatccccacatgaactttaagctttttcctaatttttctgcaacttagtttgacaggactcgagtcagcttcgtgcatgaacagttccatcgtatncaattttcaagctgattgtancctagctactgttgggtcctgatgctgcttgggcatgctccagtagagggagtcagtagggggattacagggtactagttaaaaatgagtatgtctaccaatctccatgtcttcgaattatgtccatatatttccaaatctgttgcatatttccaaaaaaaaaaaaaaaaaaaaaaaa

SEQ ID NO: 67266 - DNA, 992 bp, Oryza sativa
  Clone ID: PAT_MRT4530_68139C.1
atgaaggggaggcgatggtggcccggcaggggcaggaggggcggagacgccctcccctccgccagatccagcaggggcgggaggggaggcgcagtggcggtggacgacatggaggggtggcggtggcggcccaatggtggaggggaggcggtggtggcccggcgacggtggatcctcggggcaacggcggcggtggcgccctcccctctaccagatctagcgggaggtgaggcagcggcggcgaaggcggtgacgtcgacgtcggggggctttggatccagcggcctcttcggatctgaacacctaagtgtaacccgccccactaattatgggccacccaagtgtaaagaccaacttgactcgatttgccgccgcttcgagcgcaggcgaggcccggctcgccgcctcgacgccgtcctggccgcagcaccgccggatctggcggaggcgaggtccggccggccgtctccacgccgtccgaaccgccgcctccatgtcgacgccgccactgccaccggatccgccgcgggaggaaggcgagagggggcggagcgagccgccaccgtcgccacctccggcggatatgccgcgggagggaggctagaggggcgccagatcatttccaccgcggccctcggccgttgccaccgcagccgacgccaccaccgccactgaagggagaagagacgggagggagagagggaggtggaacgtcgccgcctgtgggaggaggggaaggggagcgtcgccgccggtcgggggagggggaaagagagcggcggcgccggtggggagggagagggggagcggcggagggggaaaggcgccgctgcgccgccgatgtagtcgtgagagagagagaagaagggaggggaaagggagcgtcgccgccagtggggggagggggaaggggagcggcggccccggtggggagggagagggggagccacggagggggaaaggcgtcgcgcgcgtcgccgatgcagtcgtga

SEQ ID NO: 67267 - DNA, 575 bp, Oryza sativa
  Clone ID: PAT_MRT4530_6813C.1
cctcccacaacatcggcgcgcaggcgctgcttgtggacgtggtggccgcgctcgtcacgtcggtgctcggccaggagctgttcccctcctcccccttcctcggcgccttggggacgaacgaacgaacacggcgctataaagttcgacgatggcatagagggaggctcgaacttttcagtggcacagaggccagcatcatctttcttaatggcatacggggtgttatcagcaaagaaaagcttgactccttctacattcccttgtgctgccctatggacagtgaagttaacaacatcatagaggaggagggttcatttgaggtcaacaagatgatgatgcacgatccgtatgacggcacgggcaaagccttgctcgatctgaagatggtagccttgcgcgtaagagctgtatttgagccaataatagtgcagcattttgcagcgtcagatgaaatcatggacgacttcgtcagagcagtggagcggcacttgatcagttcaggggctctggaagctaggctgtccggccaacacccatttgccttcttgtgtttgtctcttactagagcgatgtga

SEQ ID NO: 67268 - DNA, 432 bp, Oryza sativa
  Clone ID: PAT_MRT4530_68140C.1
atggctaaagatggttccaatatttatccacatactccacgcaattcccaattgatgaaatcgttggaagttttggccgctcgcgccttttcttcccctctcgtgacaatcgtgagccgtttcgtcctgcggaatgctcttggtgttggcgacccttcgtcgtggggcaagcactcagaaaggcatcgacaagctcgcctccgctccagccagtgcgcggcgtcccttccgtccaaggcgttgctgcccctccttccaaagcgagacctcgccttctgtccatggcgccgtcgggactaccaaggaacctcatgtgatactctatcgtgccttgccacgagatggacgagccctggtcgtgccctacctgcccccctggacgtgcctcgcaaacttgctgatgccctcactgtccgccgcgacagctactag

SEQ ID NO: 67269 - DNA, 213 bp, Oryza sativa
  Clone ID: PAT_MRT4530_68141C.1
catcgctggcgccgcttgggctgcgccgccgccgatacctacagcgctgccgagctcctgtcatcttctgctcgtgcgccgctgcccgttgccggtaccagcgtcgctacgttagcctcgcttcctcggctaggggaaggcgaaaagaggggcgaaaagaaggaaggagagagatggtgggacccctggcggaggcgaaaagaaggaacttga

SEQ ID NO: 67270 - DNA, 292 bp, Oryza sativa
  Clone ID: PAT_MRT4530_68142C.1
ggggggaaagggggaccttgggggcaaccgggccggggggggacccggggttcaggggaaaaggaaatggggaccccggtttgggggacaaaaaaggattttggaacgcaaaggggaaattggttaccagggagagaaggaccagaaacaaagtaatcagattttgcaaaggttcagtggagccaccactcagaggaagaggccacctgggaaaagagaagatgaattaaaggccgcccatccgcacctcttcgccagctcttccgaatctcggggccgagattccgtttaa

SEQ ID NO: 67271 - DNA, 3574 bp, Oryza sativa
  Clone ID: PAT_MRT4530_68143C.1
cgtttaacgaaaggaagcgggcggccggcgctcggcggcgctcggcaggcatggcgatcggatgggatgggatcggatcggcgcagggccaaggcccgagggtcgcatcctgcgactcctgtgagttcgtgggctatgctcgctcgctcttctccttaggataccagcttatattggcaaaccatgctcagtagcctgccagtttctgacagaaatactgaccaagaagccaaatcacatccttcatgcaaacaaagccagcagttttcgcatgaatttctttcaccttgcgcttgtgctactgccgctgagcttcatctgtcctcccatcggttcatgcattgagcgctagaggctcccccggaccctgggccaagcagtgggagaagagctaggaggcgcggagggatccgcggccccgcccgcgggactgcgtgtcccctaccccggaacatgctttctccctatcagacttagccaggcattgtactggggttgatgagtactgtaactgtggtgtgggcggcgtgtgcctgggcaaatctgggaggccttcctccctgaatcttcaagagaacgtctcacatgagctcattttctcttccggtgagaaggacgaaagaattgagagctctggctggatggaggtattatttcagcctattattagaaatgtcagatattgccatgcctttcataagggctgttgtcaccaaagttagtgctgcagtgtcgtacttctgggtgtccatgataggaaggtctctgggattgattttctcagggataaggcaatcacttggttggagatgatcagatgtttctttggtttttgattgtgagatcttgtgactgagcgatatttgcctcgcagtcatgtccagttttgtcaatttatataggcttttcgttgacctttttttttactgttgagatggctgacttctggtcctcgttatacatgttctgtatcacataatgtaacaaagttcattgatctgaccaaagggtgaaaattatttgttaatcttggaatgcatctgattctggtagggatatgaaatggttacctgaagggaatactaggttttaccccagcgatacatggagtgaagtaagaaatgttcctgaaagttctgaacttgtagatgggatcaaatggttgcaaatatcaactacgttgattgatggcttgattgaaccaacatttatgaaatggattcaagaagaaaaagcctgggagaacagcaagatcaatgaagaacttatgaagacggtaaccagcaaaataaaggaggatgacaggatcttgaagaggttcaacagattagggaaatctgaactctatttggatctgctttatttcctgagatttggttctgcaagctatttaccaaacagtaatccttccataaggtcttatagctattttgatgctaaatttctggctgaacatggagcgagaattttggaggacctggttattttcttagctgacgcggtcgctagtatttacatagagcttatatcagttgatggtgatatgccgactgatgttgttggttccagcttagctctatgctcgctgtcaaccagagaacttcaaagaatgcgtaacgaggtggcaattaatgggtggctgcaccagtattttgagtcagttgtctcaatgtacgaggacaggtttgagttatatgttttatccagaaaactttgtgaaaaaccagcagataatcaagctgaagtgacaaactggtggaggcttggatttggaaagccttccaccgttactcttctagagtacgttcacataagctcattttctcttccggaggagaggctaaccctcctccggttcctcgcggagctgtcaccgccacatgataatggcctcgctgcgtcatggaggaataggaccgactgctgtacctgggaagggatcatctgtgatgtggatggtgcagtaaccaagatcttgctggcctcaagaggccttgaagggcgcatctcgtcatccctgagcgagctcaccagcttgtcgcggctcaacctgtcatacaactcactctccggtgggcttccgccagagctgatattctctggcagcatcgttgtcctcgatgtcagcttcaaccgcctcggcggggaactacaagaggtagactcatcatcatctgattggccactccaggtactgaatatctcaagtaatctgtttactggagcatttccatccaccacatgggagaaaatgagcaacctagtagcgatcaatgcaagcaacaacagcttcactgggcacataccttcctctttctgcatcagctcactatcctttgctgctcttgacctttgctacaaccaattcagtggcgaaatccccgctgggataggtaaatgctctgcacttagaatgctcaaagctggccacaacaacattagtggggccctcccggatgatctcttccatgccacatcattggagtacctctcttttcctaacaatggtttgcaaggaacaattaagcttgtgataaagctcagtaatctagtttttcttgatcttggggggaacagtttcagtggcaaggtcccagaatctataggcgagctcaagaaactggaggagcttcgcatggaccataactacatatctggggagctgccatcaaccttggccaattgcacaaatctagcagccatcgtcctcgtgagcaacaaattcacaggagaccttgctaaggatgaaacaattcatggtcttgagaatcttcaggttcttggcataaatgattgtgcactgactggaaaaatacctagttggctctcaaagctaaaaaaattggaacttctacttttatacaacaatcaacttagtggaccaataccaacctggatcaagagcctaaactaccttaagtatgtagacttatccaataatagccttataggggaaataccaacatcactaacagagatgccaatgctaagatcagacaagattgcggatcactcaaacccaagactctttcggatgccagtttttgtggctccatctcttcagtaccatacggctaatgcattccctaaaatgttgaatctaggtaacaacaaattcagtggtgtgatccccatggagattggtcagttgaaagcgctcctctcactcaacttgagcttcaacaacttacatggggagatcccgcaatcggccagcaacctcaagaatctgatggtgctagacctgtcttccaaccatctgacaggtgcaatcccttcgtcactggcgaacttgcactttctttctaacttcaacatttcttacaatgaccttgaagggcctgtaccaactataggccagttcagcacatttccaacttccagttttgctgggaacccgaagctatgcagccctatgcttttgcaccgctgcaattcagcaggagcagctccagtctccacaatccccacaaagcagtacattgacaagtttgtcttcgcaattgcatttggcatgttctttggagtaggagtgctatatgatcaaattgttgtgtccagattctttggctaa

SEQ ID NO: 67272 - DNA, 352 bp, Oryza sativa
  Clone ID: PAT_MRT4530_68144C.1
cccacacgtccagatagggtggttctcttatatagtgccgcaatacattgccatttatcggttgagacttaatatgctctttacagcctatcaactttagcttcaccaactgggatgcgcaatggctcataccaatcaggagggttgactgacaataattcattggctattgatctgtgcaagaagtatgacagacatacctagggtatgcagtcatcagatgcaatgatatgaggtcttgttacaaggactcaaagtgctagctgcactagatccatatcttgtagtctaaacttcactggttgaacagtcgagtaatgagactactgaataccagggtgtacctcacgca

SEQ ID NO: 67273 - DNA, 429 bp, Oryza sativa
  unsure (1)..(429): unsure at all n locations
  Clone ID: PAT_MRT4530_68145C.1
gccggtaatgccgccgccgccgccgcggcggcgacgcccggtgggatgtcgtccgtcacgacgccatccgggagctacggcgtcgtcggtggtgccgccgtcggggctactgctggcgttgggggcggaggtggagtgggaggggggcttctcccggcgcacgcgtacgccgggcacgggtacgccgcggtgccgacttttttttccatcgcgtcgcacagctcgagcgtggttggctccggtgggctgcagtactacgctggtaccgactgcggcgcggcggcggcgggtgcggcgaagacgacgacgacggcggcggcggcggcgacggccggggcggggagcgagagcggcgcgcaggcgccccggttcgcgacgcaccagcaccatctcctgncggnggtgagcagccggcgcgcgaggctggcg

SEQ ID NO: 67274 - DNA, 300 bp, Oryza sativa
  Clone ID: PAT_MRT4530_68146C.1
cggacgcgtgggcgccgcctgcctaatctcctcgactcgatctttccttcccaggaggcggaggagggaggaggaagaggagctatcggctttctcgctgacccccgcaccacgacacggggagagagaccgaggtggtggaaccggtaacaaggaactctgccccctcgccgcccttgccgacgggaacgggcctcgcggctacgccggagatggctgccgtggcgctggcgctggcgctgcggggttggtgggaggaggtgaacgggtcgccggcgtggcaggacggggccttttttt

SEQ ID NO: 67275 - DNA, 310 bp, Oryza sativa
  Clone ID: PAT_MRT4530_68147C.1
taatatggcaaaccaaataacccatccatcaaccacgctcatcaaatagacaaaatcggggagtcagaattcatcaaagagtagagcagcttatataataagttgttttttttcttaaaattatatggtgatttaagataatttaactataactttagagacaagtctaaaactcaagcctaactatcatagaactgcctccgtccctccctgactatgctagaacaatacggggtaccaccatatgacccagttcctttttagattatcatcggattatttgttcaatattttttaaagtacattttct

SEQ ID NO: 67276 - DNA, 421 bp, Oryza sativa
  Clone ID: PAT_MRT4530_68148C.1
attaaattaggtaaaaagaatttttttaagggcaatttattgttttaaaaatgttttcatgtttatttaatggcaccccggggataaaccggaaatttcggaccgtgactcgcagatatacaaggttacattataggaaatcgttacaaacttaggctaaaacatgataaaagctgtttcctgggaaaaaatgttatccgttaaaaattcaaaacaacaaaccaccctgaaacaaaaatgttaaaccctggggggccaaaggagggagccaaccaaaaaaaaattggtggggcatacttcccgttttccaatgggaaaacctgttcaaccagtttaataaaaaaatcaaacaaccgccggagagggggggttagatttttgggccccaagggagtttttttttaaaccaagaagaggggac

SEQ ID NO: 67277 - DNA, 801 bp, Oryza sativa
  Clone ID: PAT_MRT4530_68149C.1
gtggcttttgagtatgtttgttctacaaattcatgtattaattaactcaattgagcacctgttaggaaagagagaactggtcctagtagtcctaagctcaatgccggtctgtatcaatgacaacgttcaagatcccaagcaactcacctaggaaattgacaaagccaggagaaaattccaatgggatgggatggaggcaatgagatccatggaggcaagtgcaaagtgtattggaagggtctgcatgctgatcaagtatggtggatccagagtctctaacgttaaaaaataaaaaaggacgagcgctccagctacgctagctatggtatgagtggattagctcgaacaaaccatggataggcatgcccacaccaggggacgaacaagacatggatctatttgtagcctctacaaaggttttttgggagacggcagaaaggcactctcttgaaaaacaacctgagcctctagtatccccctcagaacaatcgccccaaacctatacaaacactcaagaaggaagaaacaggcagtcccagaggccctaaaaggtgatgaatagattgatgacattagacacgaccagtccataacactcgtcgctgaattcttccaagtgtttgaatgcatatggaccgcaaacatcacgctaacgcaagggactgcggatagcatccgctagaaatggacagtcaagagaaatagataatgcattgtcaaattggcgtaccagatgcaatcccttggcggggcccccttggccatagcaagtatggtgtggaagtgttgggcgccgtcgaa

SEQ ID NO: 67278 - DNA, 435 bp, Oryza sativa
  Clone ID: PAT_MRT4530_6814C.1
atggcgaaaggggttgccggaggagacgtcgacgaggaggaaggtgaggccggcgcgggcgacggtgttccggtgaaattcgggcgaggaggaggtgatgccggggatgagagcagcgtcgcggagccgagggaggtggtggcaacgtcgaccggcgctcaggcagggagacagaggcggctggaggcggccggcgcggaggaaagggaagggcgacggcgggaacgcagctccgggggtcaccgcgcgaaacggagggtaggccgtgggagaggaggcggctgcgacaccggggaaggcgacggcacggccggccggcgtggtgacgcggcggcaggggcggctggaggaaggccggcgccggagggagagaaggagaaggcggggagaggtggtgaggccacgggggggctcgggaggaggctaaaacggtag

SEQ ID NO: 67279 - DNA, 313 bp, Oryza sativa
  Clone ID: PAT_MRT4530_68150C.1
ttacgtcttccgcgtaaataaatgactcactcatggtactatgtcgtctgagtatcttgttccctaatccggccatgggctcctaccttcaaggcgaggatgacgttacctggtgcgaatatggaactgagatggtgcacaatctgtaggaaaaatgtcaatcgacctcggcgccgttctcgtcgacctactcaagagtgctcggcggcttgataatgaactgggcgatcatgtccacggcgtttgacaaccacatgttatacctcggtcacagctttttgaacaccaccatgatcctggacggttacttcta

SEQ ID NO: 67280 - DNA, 570 bp, Oryza sativa
  unsure (1)..(570): unsure at all n locations
  Clone ID: PAT_MRT4530_68151C.1
tggataggtgattccttttagggccaaggatgtcttgaagcgttccccccagaggatatcgtaagaaaagccaaacccatagtgtgtccaggtaagcttgagaagcgcgcccaactagggacagccaccacattgacagcgcccacaatcgaagacaccagatttgcgccaatgggaggttgcttggcctngccatattctttccccacccctggcgccagatgtggccgtagccagatggcgtatatcccttgagggcaagagaagctggaattttcacacatgtaagaagactcccgaagagaagaaagggcaagaggtggcctctcagcttagacacacaagatctatttcttttgttgctggttcttaccactgaaagagacatacaccctttttggtccctgagagctccttatgttatgtttcgccagacagcatagctgtttttttatgagtaacaccaacatttagccatgatgacacatgagaatgggttatgtactcttggatgttattaagttaaaatatttactttttccccctctttaaaaaaaaaaaaaaaaaaaa

SEQ ID NO: 67281 - DNA, 1395 bp, Oryza sativa
  Clone ID: PAT_MRT4530_68152C.1
atggcgcgcctcgcgctcctcgccgtccccgtcgcgctcctcctctccctctccttcctcctcctgcgccccgcctccccgccgctccccttctcgcggcagcaagcggcgtccggccccgaccgccgccgcctcctcagggtctacgttgcggagctcccccgcgcgctcaaccacggcctcctcgacctctactggtcgctccccgccgccgactcccgcatcccggcctcctccgaccccgaccacccgccgccgcggcctccgcgcgcgcactcgccgtacccggatagcccactgattaagcagtacagcgccgagtactggctcctcgcctccctccagccgggctcgtcgtccgcgcccgccgtcagggtggtcgcggactggagggacgcggatgtggtgttcgtccccttcttcgcgacgctgtccgcggagatggagctcgggtggggcgccaagggcgcgttccgcaggaaggaggggaacgaggactaccgccgccagcgggaggtcgtcgaccgcgtcaccgcccacccagcgtggcggcgctccggtggccgtgaccacgtcttcgtcttgacagaccctgtggcgatgtggcatgtccgtaaagagattgctcctgcaattcttttggtggttgattttggcggatggtacaaacttgattcaaactctgcaagcagcaatgtttctcatatgatacagcatacgcaagtgtcattgctcaaagatgtcattgtaccttacactcatttgctccctacaatgcacttatcagagaataaggaccgccccactcttctgtacttcaagggagccaaacacaggcatcggggtggtttggtacgggagaaactatgggacttgatggttaatgagcctgatgttgtcatggaagaaggttatcctaatgccacaggacgtgaacaatcaataaaagggatgcggacatcagagttttgcttgcacccagctggtgacaccccaacttcatgtcgtctctttgatgctgttgctagtctgtgcatacctgtcattgtcagcgatgagattgagctgccctttgaagggatgatagattacacagaattcgccatttttgtctcagtcaataattctatgagaccaaaatggctcacaaactacttaagaaatgtccccaggcagcagaaagatgaattccgaagaaacatggctcacgtccagcctatatttgagtatgatagtatttacccaggtaggatggcctctgctgcacaagatggtgctgtgaaccacatctggaaaaagattcaccagaagttgccgatgattcaagaagcggttacccgagagaagcgaaaacctgatggaacatcgatccctcttcggtgccattgtacatga

SEQ ID NO: 67282 - DNA, 3410 bp, Oryza sativa
  Clone ID: PAT_MRT4530_68153C.1
tcacaatttcaatttacccaagtcaatcttttgcttagggtacgtgtaggcctcgtagtttatcttctgcccaagggagctcagctttgtgagcgtggttatcaggtcaacctcgtagtcagttcgagagaccgtctcgcgactgcgttgatacttctcgacccatgggcggcaatccttgtcggctatcaaccgttcctccgtggcagcttggtcaggccccaggaagactgagatcacagcaagctgacgagggcacacaccaccgccggcgagctgatccttcatttcctgcgcagcagctccgctccagtcaggtacccttcccgcaggatcaggttcctgtctctcccgccgcccgaaccgtttgccgagtaagcgccagtggccatctgaaccataagcggagtatagtgttctccccttctctgggtttccgccacattttgcaacggtggtctcaaccgatgctaggttgagtgcggatcgtgccccaaagcgggtcagatctgcaaatgcaatgggtcctcccttggagtaggaatctatctcctttttcgcttcaactagcagatccacagcagcagaaagtccactgttttcaggtctgcttatttgtgggcgtgccgtcgcgcgggagacgagacggaggaagcggagccgcgtggggcgagcagcggcggcggcggcgcgggaggcaccatagtccttgttctcggcatcaacataggaatcaggaagcacaaatagaacacctgggagccccgctgccaccagtgcagcttcttggccttccaccggcttcccgtaccccacattccagcgcttgcggtcgcccgccgtttcccccacatgtggaacagcgcgcgcccgacgccgccgtcgctgccacgccgcttcgccgtcgtcgcccgccgtttgacccacatttggaacagcgcatgcccgacgccgtcgcttcgccgtcgcccgccgtttgacccacatttggaacagcgcgcgcccgacgccgccgccacgccgcttggccgccgcccgccgtttgccccacatttggaacagtgcgcgcccgacgccgccgccgccgccgtcgccacgctgcttcgccatcgcccgccgtttgtcccacatgtgtaacagcatgtgctcgacgccgccacgccgatctgccggcacgctcctggtcttcttctccccacggcgtgtcgcgcggtggaggacaccgccgagaaccttccacggcgacgggcggtgaaggccgttgtcgtggacgtcacgactgagcagcgggggcgccccctcgttgctgcccgagggaccgaagtggtggtggtggtggaggtggtggaacaccgtgccgagcttctccttgaacctcctcatccgctccactctcctctccaggcgaaggtggcagctgatcctcgacacgcctgacacttgaaacccgtactccggcggcgcaatgccccgcgattgcggtggtggtggcacacacgacggcgcattgccccgcggttgcggtggcggtggcacccaagacggcgcattgccccgcggtggcggtggcacccatgacggcactttgtctcgcggtggcacccacgaggaggtgtaacctgaagtgctcgaagtcggttctggtgggctgctgctgctgtacgtgctgccggagttgatccggttcagagctcgccgcggcggccggcttggccggcccatgctgacgctggcagcatcgtcatcggccttctccttctccttccccttcccccggcgctgtcgcgggctctcgtctaaacagtattcgtctattactccactgggctgctatggcctcttcacattatacaagtaagagaatttacagaacacaactcatggaaatcatcatgtctgattcttgaagttcagaaaagagcgaagggaacagtgaatctaaaccatctatacatgccgtacttattgccgtgtaaaaatgtcggaatgtcactgccaaatcaaatcactcttcttaggcaaacaaatgaagctcttcgttactgtatcagcatcaccgagactgagagatgatcaggaaactatccatcacaatttcaatttacccaagtcaatcttttgcttagggtacgtgtaggcctcgtagtttatcttctgcccaagggagctcagctttgtgagcgtggttatcaggtcaacctcgtagtcagttcgagagaccgtctcgcgactgcgttgatacttctcgacccatgggcggcaatccttgtcggctatcaaccgttcctccgtggcagcttggtcaggccccaggaagactgacatcacagcaagctgacgagcacccaaaccaactgcgacgaacttatccttcatttcctgcacagacgctttgctccagtcaggtacccttccttcaggatcaggttcctgtgtatcttggcgccgcgatgcagcccccgtccccgctcctgcacagctgacgacggttcgcgggagagggagcggcgcctgctgctgctgctgccgccgccgcgctccattgacgagtgatcgccacggcgcagccacctcatgtcggagcgcggattcccagcagccaccgtgccgcgccgcggcgtcacggctctggacgaacggtgcgaggcgaggtggtcaaggcgtcgctccagactctgacggtggctcggcgccggcggcggcaaggcatggaggctggggctgaacgaggctatcggcttcacgaccggcaccggcaccggcacggcgtcgccgcgcgtcgcggcgatgatcggacggggtctatcttgtgctctctgaggaactggctccacccttctctgcctttctggtgatctttgaacaatttctccgtttacaaacaactcagcgccatagtccttgttctcggcatcaacataggaatcaggaagcacaaatagaacacctggtagcccttccagcttgttggatgtttcctcgtcaatctcgcaaccgaacccaaagtaccgttcgcatgacacgttgtatatcttcttcttcgcctcctcctcacttcccacgaccttggcgagggtctggatgtagcagtcgatcatctgctgcttggtggcgccctcgccgccgggcttgtccatgacgatgagccagtgctcgtagtcgcacccggggaagagcggcgccatctccgtgggcgcgcggtcccctccctgccccgaccgcagcggcgagtacgacgactccggccgccgcgccatgcagcggacggacccggcagcgcggccgccgcgaggccgcagcgggcgagcggaggaggacgacgccgtcgtgaggcgccgcgacaacggaaccccctgcgccgggcgcccggcggccgcgacggcgcgcgctgctgctgcggcggtggccat

SEQ ID NO: 67283 - DNA, 329 bp, Oryza sativa
  Clone ID: PAT_MRT4530_68154C.1
gtgtgcgcctgactcctctcgataaccattggtttttttgtggcgtgtttgcacaggctctctttcactcagggacaatagtaagatcggaatcaatgggttcggtcgcatcgctaggctggtggccagggcggcgcatgcaagcgaggatgacgagctcgggggcgttaacgatcccttgatgaccaccgaggacatgacatacatgttgaaggatgacaccgttcacggccagcggaagcattcatgaggtcaagggtaagggcttgaatacacctatttttggcacgaaagaggttgtggggtctggctgcaggaaccctgaggag

SEQ ID NO: 67284 - DNA, 414 bp, Oryza sativa
  Clone ID: PAT_MRT4530_68155C.1
gccaaatgtggcgggaacgaagaaaaaggaagaacactatactcagcttatggttcaaatggccagtggggtttattcgacaaactgttcgggcgacaagatacacaggaacctgatcctgaaggaagggtacctgactggagcaaagcttctgtgcaggaaatgaaggataagttcgtcgcagttggtttgggtcctcgtcagcttgctgtgatgtcagtcttcctggggcctgaccaagctgccacggaggaacggttgatagccgacaaggattgccgcccatgggtcgagaagtatcaacgcagtcgcgagacggtctctcgaactgactacgaggttgacctgataaccacgctcacaaagctgagctcccttgggcagaggataaactacgagccctacacgtaccct

SEQ ID NO: 67285 - DNA, 1287 bp, Oryza sativa
  unsure (1)..(1287): unsure at all n locations
  Clone ID: PAT_MRT4530_68156C.1
tagtggatccccgggctgcagggaaacctagctagcagtaccacgcacccacgcggccgcccgcggatttcatccaaaaaaaaaagtgtttccgcccgcgcggcggcttccctgagagagatcgatcgatcggatgtccttgtggattactattaattgttgcatggcaacgagngagaggggatcgaagaaagaatgtccccgtcgcatggtggctactgggtgctcgccacatggtggggggagccgctgctgtggctatggcagccctttcgggcaggaggtggagcaggccccctaggtcacctccttgagatcagtggtggtctgggacggatacgtggatgggcggctatggaggagagaggagatgagcttatccggccatgcgttacacgtttggacgcatcccgaaatcaagttttgctggctgcgacaacggattgcagatcttctcaatcaaactcctcctccgcaacagaccatcagctccagtggccacttcatgtctatggcctcgtcgctaccagggactctcttgatcctaggcgcaaccttctctttaatcgcactagagacaactgccaaatccttactcaacaggatccctttctagtgctaacaggaccgtctcgcgcaattgtcttaattgatcctgttcaatttgaggttcagctcaaagcaaagtccaataacaacaccctgcatgatcatcctgaccaagatcaaattgttaactttggagtggtggattctggctatcttccaggcccaacgaggcattgcatcggcaagcggagtgaggtcgagttcacaatctcagtgcttgatcgatcaattgaggccactatcatcagcgtccagcttgttggtggctcgtcatggccggatcatctccaaggaaagcttgtttcccgtacggccagtgcaattcatcaagaaatcgtgctacttgattctcaaaaacaacaagatggaaaaatgcctatcgatgatggcggcttcattcagctttcaaggcgtgttgtttcggtagaactggctggccaactcatagttcaagtgctggctttcaattcccagcagcaagtagttgacaatgacaacgacaacaagaaggatgagattgttgcaaaacacgagattgtttttgatcctaaggaagcttcattgagtgtggagacgtgtgagctacaactaggaggaggaggaggaggcccatgtaagcttcaaatctctgttgcttggtctctggtcgataggcttccccctgttggctatttctaa

SEQ ID NO: 67286 - DNA, 2376 bp, Oryza sativa
  Clone ID: PAT_MRT4530_68157C.1
ttaccgaaatgcctttccatgtccagaacggtgccgcggcctcacccgctgccaccagtgcaacttcttggccttccaccggcttcccgtaccgcacatcccagcgcttgcggtagcccgccgtttcccccacatgtggaacagcgcgtgcgcgacgccgccgccaccacgccgcttcgccgtcgtcgcccgccgttggacccacatttggaaaagcgcgcgcctgacgccgccgccacgctgcttcgccgccgcccgccgcttgccccacatttggaacagcgcgcgcccgacgccgccacgttgcttcgccatcgcccgccgtttgttccacatgtgtaacagcgcgtgcccgacgccaccgccgccgccgacgccgccacgatgatctgccggcacgctcctggtcttcttctccccacggcgtgtcgcacgatggaggacaccgccgagagccttccacggcgacgggcggtgatgtccgttgccgtggacgtcacggctgaacagcgggggcgccccctcgttgttcttctccccacggcgtgtcgtgcggtggaggacaccgccgagaaccttccacggcgacgggcggtgataaccgttgtcgtggacgtcacggctgaacagcgggggcgccccctcgttgctgcccgagggaccgaagtggtggtggtggaacaccgtgccgagcttctccttgaacctcctcatccgctccactctcctctccaggcgctcctgccggcgaaggtggcgactgaccctcgacgcgcctgacacttgaaacccgtactccggcggcgcaatgccccgcggttgcggtggcggtggcacccacgacggcgcattgccccccggtggcggtggcagtggcacccaagacggcggattgcctcgcggtggcggtggcgcccacgacgatgcattgtctcgcggtggcacccacgacgaagtggaacctgaagtgctcgaagtcggctctggtgggcagctgctgctactgtacgtgctactggagttgatccggttcagagctcgccgcggcggccggcttggccggcccatgctgacgctggcagcatcatcatcgcccttctccttccccttccccttcccccggcaccgccgcaggctctcgtcttcatcagcttcaccagctcggcgtagcgagcgctccgtgaggtcacggttcggcctgatgcggctgcgtgtcatggcagccgcgtcggtcgacgaggatagcttcggcgttgacgcgccgcgtccggctcgcggagtgccacggcgcgacaccatgctcgcagacaacccggagtccagcctctcgaggcggcgcgtcgaggagccctccgctcccacgcgcactgcggccggcggcgaggcgccgcgatgcagcccccgtccacgctcctgcacagctgacgacggttcgcgggagagtgatcggccactgctgcttccgcgctccatcgatgagagttcgccacggcttggccggcccttgctgacgctggcagcatcggcaccttccttcctatcgttttcagcttcaccagctcgacgcggggagcgctccatgaattctcgggagctcggcctgatgctgctgcgtatcgtggcagccacgtccgtcgacgaggacagcttcgtcgttgttgccgcgccgcgtccgcctcgctgagagccatgtcgccgcgccagtggcggcggcaccaagtttacggacaatccggagtccagcctcccgagacggcgcgtcgaggagccgccctccgctcccacgcgcggtgccgccgccggcgaggcgccgcgatgcagcccccgtccccgctcctgcacagctgacgacggttcgcgggagagggagcggctgctgctgctgctgccgccgccgcgctccatcgacgagtcgtcgccacggcgcggacacctcatgtcggagagcggattcccaccgtccaccgtgccgcgccgcggcgtcacggctctggacgaacggcgcgaggcgaggcggtcaaggcgtcgctccggactctgacggtggcgcggcgccggcggcggcactgtggttcttgccgagcggttcgaggcgacgcgagcaaggagacggtagttgtcctggccatggcgaccgtctcgccttctcgtcgcgccttgcgtcctcagccggcttgatttctcactggcatggaggctggggctgaacgaggctatcggcttcacgaccggcaccggcaccggcaccggcacggcgtcgtcgcgcgtccggcgatgatcggactggatagatagcttcctctccagcacaggagacagcatctttgcctgcctgaggagtgtctgacgagtaatgtcatctaacatcttcgtcat

SEQ ID NO: 67287 - DNA, 496 bp, Oryza sativa
  Clone ID: PAT_MRT4530_68158C.1
atggccaccgccgcagcagcagcgcgcgccgtcgcggccgccgggcgcccggcgcagggggttccgttgtcgcggcgcctcacgacggcgtcgtcctcctccgctcgcccgctgcggcctcgcggcggccgcgctgccgggtccgtccgctgcatggcgcggcggccggagtcgtcgtactcgccgctgcggtcggggcagggaggggaccgcgcgcccacggagatggcgccgctcttccccgggtgcgactacgagcactggctcatcgtcatggacaagcccggcggcgagggcgccaccaagcagcagatgatcgactgctacatccagaccctcgccaaggtcgtgggaagaacgatgctaattttggatgactggtgggtggtggcatgtagtgaggaggaggcgaagaagaagatatacaacgtgtcatgcgaacggtactttgggttcggttgcgagattgacgaggaaacatccaacaagctggaag

SEQ ID NO: 67288 - DNA, 339 bp, Oryza sativa
  Clone ID: PAT_MRT4530_68159C.1
atgcattcatctctcctctacctctttctcctctccacccacctcctcctcctcccccacctctctcccctcctcccggagcccccagccctcctccttgtcctgtcggcgacggtgacgacggcgtccacgacgggcggggctggtggcggagctgacaccgacgatgacatgccagaccaagcgggcgcgggcggcggagctcgggcgcgggcagggaggccggatcatttgccaccgggccgcggggacgtcagactgcccccaccggaccgcgggaagggcagcaccgacctcgacgccatcgaccgtgttgcccggctccctcctctgtgttga

SEQ ID NO: 67289 - DNA, 909 bp, Oryza sativa
  Clone ID: PAT_MRT4530_6815C.1
cgaggcaaaaataaaagtgcacacagaataagactgggcaacgcaaatgagaacgacacagagttggcacgagggtaagggcacacacaagcccgaaaaaagagcggcaatgggaatggcgagaaatctattttggcgacaaaaaggaggcaaaaaaggggacacgcaggattccaaacggacccccatacccccaagggacccgcccctttcgggttgaaagaacacctagacggactaatgcaacccatccgtttgaatggtggaccgcaagagcgctactgtcccgaggacccgagccgagccaccgctttcatcggttcggcgcgccattttgttgtccccgtcgacatagggtagcaagtggacccccgcatcgtttccccctttccctccttatttcggccgccattccgccgtgcctatggccgccgccggcgaccataggggcgcgggcgcgccgcctcccgccggccgcgccgcagtggccgccttcgggcgcaccgagcggctgccgcgtggggcccggccgtcagccgcccgcgccctcgggtgcggctgacgcgtggggcccacggcaccggccggtgtgagcccgggtgcacccggtccaccgtggacccacctcggccatataaggaccggtcttcgggcctctgttgcaaagcactaccgtacttccacatgtctagtgggacaaatgaaggctacacgagctgcggcccggtagtcgagatgtcatggcacagggccggtgtcctgctgctaggggctcagtcctgcctacctgtcccgggggttccggccgtaggtggggttgggtcgatgtacacctctgatcagagtataatctattcgaatagccgcgccctcggttatgggcaagcctagcaatgtacccaagttagt

SEQ ID NO: 67290 - DNA, 669 bp, Oryza sativa
  Clone ID: PAT_MRT4530_68160C.1
atgtgcatcttcgacttccacacctacaacaaagctttgtatctaaggtggctaaggctccctttccctcttgtctccctgcggcgcagcgtaggacgacacacgggcggcacgcggggaggctcacaggcgggcgctgtgaggggcacagctcggcacacaggcacggtggccggcgatgggacaggcgtggcgagcgggtgtcaccgggtggcacaggtgacaggcgcggtgaaacgcactgagagcattcaagcatcacaaaaatcaacacagaggagggagccgggcaacacggtcgatggcgtcgaggtcggtgctgcccttcccgcggtccggtgggggcagtctgacgtccccgcggcccggtggcaaatgatccggcctccctgcccgcgcccgagctccgccgcccgcgcccgcttgccccctgccatcgctgccacggtggccgccgccccctccctctggctagatctaggagagggagagggaggggaggggaggggaggggagagaggtgagggcctcgtcgctcacgcccgtcgtggacgccgtcgtcaccgtcgccgacaggacaaggaggagggctgggggctccgggaggaggggagagaggtgggggaggaggaggaggtgggtggagaggagaaagaggtagaggagaga

SEQ ID NO: 67291 - DNA, 551 bp, Oryza sativa
  Clone ID: PAT_MRT4530_68161C.1
gtcgcctccttgccccgccgccgcggagtctaatcaccagacccgcgatcaccgcggacctatgcaatctaccgtaccgacatcgccgctccctctctctacccgcgtgacgccaacccccaatgcggcgccggacccacaccgagccggcggccatcgactgttcaccacgccggtgtcctctgcgagcgctgaccacgattcgccgccgccgctcacaactcgtcgccgccggctcctcgcctctccgccgccgtgacaccgatgcccgccgctctacccttactctcgttcgcgacgccaccgatctttgtatgcccgcctccgtgccgccagatcgccgtcgcctggagtcttcggggaacagcctcaacgaaaatccgagcaccgtcgtcgacggccatctccgcccagcgtgcctgatccctggaacagcctcgcgcggtgccaaaaccacatccgccgccgtcttgaagctggccgtcctctcgccaggtgccgtcatttgcccctgatgtatggtttagatacccacggacaaaatcccacat

SEQ ID NO: 67292 - DNA, 931 bp, Oryza sativa
  Clone ID: PAT_MRT4530_68162C.1
ctgcaggaatcggcacgaggatggcggcaagctcgtggctgtcgatggtttggcggttgatggagcaaccattgccccccaaccagccggcatcaccttttccgccgccatctgctccttgtcgctgtattggacgaggagctctgtctcctcgcgtgttgtcagccgttgcgtctgctagatggctccctctcgcgccgtgagccatcgccccccccgcctgccacctcttccgcccccgccgccgggattcccttcaagcgccgccacctccgacgtctcctcaagctccaccttgagccagtctcccctctggcgccaacggctcccataagctctgcagccaacgttgcctctgcctctgttggccacgctcgggttgaactactatggcaagaatcaagtttcagccatagagagagggagcagcaaggcgggctttctcggccgttggacgtggcgctcgtgtttctgcaggacgcaccaatgtccctgttcctgccctccgtggatttccagtttggttgaagtaatttaccaggcaccaacttcaggactggagaatgaaccgttccaacggggttcagcgagaaaattgtggacatgatgaagagtgaaaaactctttgcttcacaaggtggtcctattatcttctctcaggctgaactacagaaggaaaaaaatattacacagatacgtattggacttgatgtagccaattccttgattaaatctgttgtcttgcttatctggattaaagacctaagtaaagttgcagcatggcgatttttcttccaggaaactatcgtgtttttccaacaagactgccacgtgtggggaggtctgcggctggtgtttggtcggaacgccggcggccgctctagaggatccaagcttacgtacgcgggcatgcgacgtcatagctcttcaa

SEQ ID NO: 67293 - DNA, 279 bp, Oryza sativa
  Clone ID: PAT_MRT4530_68163C.1
atgacgtgctccacctccgcctccaccgcaaccacccgacctcacttcgtctccgccatcagcttgccaagctcgctccacgtccgcctccaccattggccactcgagctaccgttcgtcgaggtgcggcaatttcgcagaggacaccgatggatctgcgcagacaacgcgctccgcctccgcctccaccgttggtcacacgagctcgccacctccaccgcgaccacccgagctcgctccgctaccgtcggtggcctcccgagctcactccacctctag

SEQ ID NO: 67294 - DNA, 250 bp, Oryza sativa
  Clone ID: PAT_MRT4530_68164C.1
agaagatctttgtagttcatttttgattcaccaaatgtttatatgctttctgactaatgaaagcgcttgtttgttacaaccaaaaacggacgcgtgggcggacgcggggggcgccccgggaattgccgcccggttccagaaggcccaccaatttccaacaaaatgcggcgggatagagcccggggaaatagggggagaggtggaacctgggcgaaaatgggggccgaggacaatccccgaaaagataggg

SEQ ID NO: 67295 - DNA, 270 bp, Oryza sativa
  Clone ID: PAT_MRT4530_68166C.1
ccaacattatcaaccgttagattagattgattaggcgcacctccagggtgaaaacggtcggaaacggttggaatcggtagcatctcttcagaaacgatgctcgatcggccggtaactgaccatatttatcatttaaacttctcagtgtcgacattaatacaatgcagaaataaattagaaaaaacaaaatttaaaaatagccaaaaaggtatgatcggaaatagtaccccttatacagaaacgacgctcggtcgatcgggaatttctgtg

SEQ ID NO: 67296 - DNA, 426 bp, Oryza sativa
  Clone ID: PAT_MRT4530_68167C.1
atgaggcaggcagtcggtagagatcgagggcaagaaaaagagataatcagagaggcccataataacaagctggccactgaaagtctgatggatgaacagggcctgctgcaattgcaattgcatgcatcatgtatggtgcatgatgcaacaggggcgatcctgcaggcaagctcgatcagcatgattcgtaacaagattgatcagtacacgaatgatgatgatgcaggcaatgctaggagctatctagtctgcatgtttgtttgttcagttcttgggctcaagaagagaaaatgtgcagagatgatgcatggctacagttgggagctgatactgtttcaccaagagtgctgcacaaatggggcacttgaacctgcagtgcaactgcttgtgtgcatagtgcatacacacctggaagctgctaggtga

SEQ ID NO: 67297 - DNA, 278 bp, Oryza sativa
  Clone ID: PAT_MRT4530_68168C.1
tcctatcaccaactccttgccgccatcgccgaggtggatgatgagggagcgagctcgacgccgaccccatgtcgggcaggggacgtggggaactgctcatcacggggaggctgctagtcggtgagctgttactgacgctgggggtgtgcacgcactgcctgcagagcacgcaccaccacgggctgtagcggcggcggacgaagcacgagatccactcccacgaccaagactgttggaagaggtggtgatggagaatcggtgcttagggcacatcctcg

SEQ ID NO: 67298 - DNA, 1776 bp, Oryza sativa
  Clone ID: PAT_MRT4530_68169C.1
ttgtcgcgtgggctcgcctcgcctcgctgcccctagcctaggcgtgcgctaccagccagcacaggtggtgatctcatcatcccccgcccgcccgcgcgcgcgttcgcgctcccccgcccccaccaccccagatcccgaggccccgctccgccgcccgcgggatcgcgggccccgacacaagattttgcttaatgctactttatgcgtgtgtggataatggagtaatcactgctctgtgtatctgagctcacaccatgggtagcagtggcgcagacgcaccgactaagacaagcaaggcatctgcacctcaggagcaacagccacctgctagttcaagcactgcaacaccggctgtttacccagattgggccaactttcagggatatcctccaattccaccacatggcttctttccatcacctgtggcgtcaagcccacagggtcatccttacatgtggggagctcagcctatgataccaccatatggaaccccaccaccaccatatgtcatgtatcctccaggagtatatgctcacccatctatgcctccgggcgcacacccatttactccatatgccatggcctctccaaatggcaatgctgatcctactggaactacaactactgctgctgctgctgctgctggtgagacggatggcaaatcctctgaaggaaaagaaaaaagtcccattaaaagatctaaaggaagtttaggtagcttgaatatgattacagggaagaactctactgaacatggtaaaacctctggggcatcagctaatggagccatttctcaaagtggggaaagtggaagtgaaagttctagtgaaggaagtgaagcaaattctcagaatgattcacatcacaaggaaagtggacaagagcaagatggagaggttcgaagttcccagaatggtgtatcacgttcaccatcccaggcaaagttgaatcaaactatggcaatcatgccaatgacatcaagtggtccagtacctgctccaactacaaacttgaacataggaatggactactgggccaacacagctagctccactccagcaatacatggtaaagcaaccccaactgcagctccagggtctatggttccaggagagcagtgggtgcaggatgaacgggaactcaaaaggcagagaagaaaacaatccaacagggagtctgctcgcagatctaggttgcgtaagcaggctgaatgtgaggagttggctcaacgtgctgaagttttaaagcaagaaaatacttcacttagagatgaagtgaaccggatcagaaaggagtatgatgagcttctatcaaagaatagctcattaaaggaaaaacttgaggacaaacaacacaaaactgatgaggcaggagttgacaataagctgcaacattctggtgatgacagccagaaaaaaggaaactaattgagctatcgtgcaatgctcctgagcataaccctaactagattattggcaggcgcaactgtagtatgtgtattaacttcatacttattgcagttaattgttaccaggttgtgataatgttaatgccaactttgtgtggctggttcctgtttcagatctgtcttggcttatcttttagaagtcaagatatgactggcaatgtaggttgtgacccagttcactgtatctgttagaaatagtttataaactcatgtttacaaatctgtattgttgactactattgttatgtacacctgaagatgaaccagtattttatataagatgcagtcaggttgaacagttggtttta

SEQ ID NO: 67299 - DNA, 582 bp, Oryza sativa
  Clone ID: PAT_MRT4530_68170C.1
atggccgtgcccacctccgaccagcgcaagcggcggcccttcctcctctcgctgtcgctcttcctcctcgtatccgcgctcctcgccctcgcctttctcttcctcgacccctccgcgcaatccctctccgtcctctcctcccgcctcaccgccctactaggacgctcgcgcctcccgcggtcgtcgccggcggcgccgaagccggggagagcgccgacgcaaccgaaaaagccgaagagaccgcatcgcgaccagacgacaccgccgccgccgtcaacgccgacgctgcagcaggggaagggcgccgccgccacggagggagtggcggatgacgacggcggcggtggcggggacgagccggcggcgaaggtgaggtgggagacttgcaggccggggagaggggtgtcgtcggcggactacatcccgtgcctcgacaacatgagggcgatcaaggcgctgcgctcgaggcgccacatggagcaccgggagcgccactgccccgtggcgccgcggcccaggtgcctggtgcgggtgccctccgggtaccggtcgcccgtgccgtggccgcgcagccgtgacatg

SEQ ID NO: 67300 - DNA, 1878 bp, Oryza sativa
  Clone ID: PAT_MRT4530_68171C.1
atggccgtgcccacctccgaccagcgcaagcggcggcccttcctcctctcgctgtcgctcttcctcctcgtctccgcgctcctcgccctcgccttcctcttcctcgacccctccgcgcaatccctctccgtcctctcctcccgcctcaccgcccctactacgacgctcgcgcctcccgcggtcgtcgccggcggcgccgaagccggggagagcgccgacgcaaccgaaaaagccgaagagaccgcatcgcgaccagacgacaccgccgccgccgtcaacgccgacgctgcagcaggggaaggtggtggaagtagcgagtcgccacggctcgatgcggataagggcgccgccgccacggagggagtggcggatgacgacggcggcggtggcggggacgagccggcggcgaaggtgaggtgggagacttgcaggccggggagaggggtgtcgtcggcggactacatcccgtgcctcgacaacatgagggcgatcaaggcgctgcgctcgaggcgccacatggagcaccgggagcgccactgccccgtggcgccgcggcccaggctttcaactttcaaggcaatttggtacaacaatgttcctcaccctaaattggtggagtataagaaggaccaaaactgggtaacaaaatctggtgactatcttgtcttccctggaggtggaactcaattcaaaactggcgttacaagatacattcagtttattgaacagataatgcccaccattcaatggggaacacacacaaaaactgtcctggatgttggatgtggtgttgccagctttggtggatacttgcttgacaggaacgtcattaccatgtcatttgccccaaaggatgagcatgaagctcagatacagtttgcattagaacgtggtattccagcatttctagctgttattggaacacaaaaacttcctttccctgatgaggcatttgatgttgtccactgtgcaaggtgcagggtggaaaaccattgttggagcttaacagagttctcaggcctggaggatattacatttggtctgcaacccctgtctaccgtcaagaaaaaagagatcaagatgactggaatgcaatggttaaacttaccaaatcaatctgttggagaacagtggtacgctcctcttgatacatgcatttccagttcaattgaaaagagcagctggccccttccttggcctgaaagacttaatgccagatatctaaatgtgcctgatgattcttcaagtaccgacgagaagtttgatgttgatacgaagtattggaaacatgccatttcagaaatatactataatgattttccagttaattggtcatccacccgcaatgtaatggacatgaatgctggttatggaggttttgcagcagcacttgttgataaaccattatgggtaatgaatgttgttccggtcggtcagcccgatactttgccagttattttcaacagaggccttattggggtatatcatgattggtgtgaatctttcaacacgtacccacggacctatgatctccttcacatgagctatcttcttggaagtcttacaaataggtgtgacatcatggaggtagcagctgaaatagacaggatattgagacctgacagatggtttgtgttgagagacaccacagaaatgataaaaaagatgcggccagttctcaagtccctgcactacgaaactgtagttgtcaaacagcaatttcttgttgctaaaaagggtttctggcgttctggcaactcattcaagatggataaaagttggatgtatggaagtgatcgcgcgagcctggagtatagaaggggtgttgccgatttcataaatgttgtagagcaagacaagaacagaatgaacgattaa

SEQ ID NO: 67301 - DNA, 225 bp, Oryza sativa
  unsure (1)..(225): unsure at all n locations
  Clone ID: PAT_MRT4530_68172C.1
gatcaanctgttcgaatatccatgccacatcaatatttgatttttctttttgctgctggcagcgtcggtggggcggtgggaaggagcagagaggaaaaacaggcgggtttttgtgcgggtgccgtccgggagaaaaaaacacagggctgacgcgctcacgccgctggatcgcgcgctgtcgccggccaccgacactccgtgcgccggcggcgccctgttctgggg

SEQ ID NO: 67302 - DNA, 1257 bp, Oryza sativa
  Clone ID: PAT_MRT4530_68173C.1
atggggttttctccatttcggcgggaaaaccctagccggcagtggcaattcggtgattacgcattttgggggaggggaagcggcggcgtggggcgactgctccgcctccgccctgagaagtctcccggaggctcgattccccggcggaggcgtcgggacgtcggtgggttgcggaggctggagctggaggggcagcagcgagtgccgcctgtgccaaagaggactcttgaatgtggtgcgggcacacctacagggctgaagaaaagggctaatgttaccaagaagtttaatccagatgccacaacttctgatttgaatcgacacagatcaattgatgggtatcatggggaaaccaaagacaaggttggtggaggtaccagtgatcacagtaagggaaggaaaggtcttgaggattttggctatcaaagcaagtctcatgagctctcttctaaccatccagacattggaagtgcatatagaatttgtttcattgcttctttagattgtgcaagatttctcctaatgcaaggcatggccttcagtggtcctggtcaatcaccaacctccataaacaagggcaatcttctagagttaatagatttgtacaagaagagggataaagaggttgaaagggcttttgatatgaacgtcgttggaaatattgacataacttctccattgattcaaaagggtcttgcaaaagcttgtgcacaagaggtcacagaagtgataattggagagattggagatggtaatttcaccatacttattgatgattctcacgatatggcagagaaatatcaaatggcagtttttgtaaggtttgtgaataagaaagggaaggttatagaaagatttcttggtcttgaatatctcacagaggatacacctgctgcattcaaggaaacattggttggtctgcttgctcagcatggcttatctatttctaaactacgaggacaggggaacaacttctctaagtttgatgtggaaaagcttgcttggcttgctgggatttatgctgaagatttctccatagatgatcgtgtagctataaaacatgaactccaaaactacattctttttatgagaagaagccacctggactatggctcagggactttcaccatgctgaactttttgagggctaaagcaagctgggacagacctggaccatacatagcccaggttgattcctccccagctcccgaggagttgactctgagcataaatttttggacacttcttgctctgtag

SEQ ID NO: 67303 - DNA, 415 bp, Oryza sativa
  Clone ID: PAT_MRT4530_68174C.1
ttttgtttttttttttttttttttttttttttttttttttttttttttttttttttttttttttttttaaaaaaaaaaaacccccccaattaaaccctgacccagaaaatcatggttaaaaaacatttgggaatttaaaagggaggaaaaccacaacgggcaaagggtttccttaaaacattccaccaataaaaaccccccggttcaacctttatccgggaaattatgggtaaaaaaattcccacattttaaagggatggaagcccaaacgagcaaggggttcccttcacagctttgcccggaagacataaatttcccggtttaataaaaagaaataggggggggaccatgggtcatccgggacttcccgggggcctcgtgggggcccttacaattttaaaaaagggtcctttgg

SEQ ID NO: 67304 - DNA, 1780 bp, Oryza sativa
  unsure (1)..(1780): unsure at all n locations
  Clone ID: PAT_MRT4530_68175C.1
ccaagaacgattaggacacacgaaaccatggcgacgcaagcgacggcgagagaaattgcggtggtgggagtgatcggcgcggggcagatgggctcgggcatcgcccagctcgccgccgccgccggctgcggcgtcctcctcctcgactccgacaccgccgccctctcccgcgccgtcgactccatctcctcctccctccgccgcctcgtcgccaagggccagctttctcaggcctcctgtgagcattccatcgagcagattaagtgcgtctccagtgtgcaagagcttagggatgcggatcttgtgattgaggctatcgtggagtcagaagacataaaaaagaagctgtttgttgagctggataagatcactaaaccttctgctattcttgcctccaatactagctcaatctctataacccgattggcttcagccactaatcgcccctgtcaggtgattggtatgcacttttttaaccctcctccgataatgaaattgattgaaatcatacgtggggctgatacatcagaagaggttttcactaaagtcaaatctttttctgaaaggcttgggaagacggtaatatgctcacaagactaccctggtttcatcgtgaaccgcatcctcatgccaatgatcaacgaggcgttctgggcactttacactggagtagcgactaaagaggacattgatacggggatgaagctaggcacgaatcatcccatgggacctctgcagcttgctgatttcattggtttagatgtctgcctttcagtgcttcgggtacttcataatggcctaggagatagcaaatacagcccttgccctcttctcgttcaatatgttgatgctggccgacttgggaagaagcgtggacaaggcgtatactcgtataggacaaggtcttcatccattaaaccgaggtcatctctgtgaaaatcgatgtgcctgctgagcagagaaaagaatgctctttatggactttgtgtatcaatgtgaaaaaataagaaatgtgcagtttacaggtccaacataaacacctacaagttacgcctttgcaagttgcaacaacaggatactgcaggccatgtttgggctatgtaaacaaagtactcgggaaaaatggcggccgtgtgatgtaagctaatatgaaatgtatagatactgagcagatcatgccttaggacttctgtaatctcctatgcagaacttctcgcacggtttgcattttcagtcagcacatatacgcaccngganaaaaaaaaaaaaaaaaaaaaaaaaaaaaaaaaaaaaattttttaaccctcctccgataatgaaattgattgaaatcatacgtggggctgatacatcagaagaggttttcactaaagtcaaatctttttctgaaaggcttgggaagacggtaatatgctcacaagactaccctggtttcatcgtgaaccgcatcctcatgccaatgatcaacgaggcgttctgggcactttacactggagtagcgactaaagaggacattgatacggggatgaagctaggcacgaatcatcccatgggacctctgcagcttgctgatttcattggtttagatgtctgcctttcagtgcttcgggtacttcataatggcctaggagatagcaaatacagcccttgccctcttctcgttcaatatgttgatgctggccgacttgggaagaagcgtggacaaggcgtatactcgtataggacaaggtcttcatccattaaaccgaagtcatctctgtgaaaatcgatgtgnctgctg

SEQ ID NO: 67305 - DNA, 1002 bp, Oryza sativa
  Clone ID: PAT_MRT4530_68176C.1
atgtcgatgatgagcttcttgagcatggtggaggcggagctgccgccggggttcaggttccacccgagggacgacgagctcatctgcgactacctggcgcccaaggtcgccggcaaggtcggcttctccggccgccgcccgcccatggtcgacgtcgacctcaacaaggtcgagccatgggacctccccgaggtggcgtcggtgggcggaaaggagtggtacttcttcagcctgagggaccgaaaatacgcgacggggcagcgtacgaaccgagccacggtttcggggtactggaaggccacggggaaggacagggtggtggcacgaagaggggcacttgtggggatgaggaagacactggtgttctaccaggggagggcacccaagggaaggaagacagagtgggtgatgcatgagtacaggatggagggtgtgcatgatcaacaagcttccagcttctcctccaaggaagactgggtcctgtgcagagtcatctgcaagaggaaatcaggagggggtgcaacctccaagtcaagaagcctcaccaccaccaccaccaccattgtccatgacacatccacaccaacctcctcaccaccattgccacccctcatggacaccaccctagctcagctccaggcctccatgaacacctcctcctcctccgccatcgccgccgtcgccgcacttgagcaagtgccctgcttctccagcttcagcaacagcattgccagtaacaacaacaacagcaacagtgctactgtcaatgcacagcaatgctacctgccaattgtcacaggtagcaacaacaatggcatgagctacctggatcatggcctgcctgaatttggcagcttcttggacacccagagctgtgacaagaagatgctcaaggcagtgctgagccagctcaactccattgggggtgaggtgttgccaggcctgcctcctccatctgaaatggctgctgctgtcagctcttcttggatgaatcacttctag

SEQ ID NO: 67306 - DNA, 534 bp, Oryza sativa
  Clone ID: PAT_MRT4530_68177C.1
atggcggcggttggggatggagctggagttgagaggaagaatcgacatttgctagaagttgcaagatctctaatattccaaatgaatgtgccaaagtatttatggagtgaggctgtaataacagttgcatatcttatcaatcgcatgccatctaggatacttggtatgaagtcacctaccgaacttttattgggtaagcgagagttcaaggtccctccaaaagtgtttggttgtgtatgctttgtgcgagatcatcgaccttttggtggcaagttggatcctcatgcaacaaaatgtgtgtttgttgactacgcttcaagtcagaaggggtataaatgttgggatcccattgggaggagattgtttgtgagtatggatgcgacatttcgagagtttgagccctattataaaagtaaatatcttgaccaatttcttaagaaattcttgactaccatggaggttgatagtcgagagggggagatagagagatgtgacacacatgaagaaaatgctggtgacaagaatggagagtga

SEQ ID NO: 67307 - DNA, 307 bp, Oryza sativa
  Clone ID: PAT_MRT4530_68178C.1
gtaacgtcccgccttttccaggccgggcccgcttacatctggtagctttcataggtcatagactgccctcacagaccaacacatgtcttttctgtacactttgtcctcactcgtgcgcactcggaaagaatttcccgatcggtcatccatccctaaattgctctagtccaagcactcttaacctcagagttctttatagatcggcttccagaaaagaagttgcaacttgttgatatgagtattctattaattctattaagccctgggctgagatgtcataaggcatatcgatttagacttaacgagc

SEQ ID NO: 67308 - DNA, 900 bp, Oryza sativa
  Clone ID: PAT_MRT4530_68179C.1
caggcctcagtggccttcctaagcataagaatttctacaagctcaatggaaaaccagtttatatactggtggagtctcgcaaatagaaagtaacaaagcaatgatcagaaagattcacagcttcattcctttgcaagagcacgttggaggaattggatcggtattggtgagcagtgactctgcacgcagcacaactgttaatgtaatctcggtggagagatgatgagatagatgaaatgtaatctttgtagcacgactagttttccaggtagtgtcgacgacgagagcttgtagttatttctgtcgggaactgttgattacccggaagagaaagggattaagggaaatgccatcccgcttatggcgcgcggcatccgcatgaagcctacttacgtaccgcatgtcgtgtctcccgctgcacaatctccgtggatatacgtggtgatctgttggctcatcaagtccgacgcggagtcggtgtttttgtgcgaggagaaaaaggcgatgcagcagccgtcgtccacgtctacgcagccgcacgcgtcgaggaagcagcagccggtgtcatcctcgagcacacacaggtggagaaaaatcagaagccaccgagagccactgcttctgttctgttcacgtgaattaattttcacgtacggttggaaatttgtgacacacggagtttaccaggaattcaagttctgtgcattgcttggttctgtcgaggtgaacccaaattcactttcaattgctacgttcacaagccagatttaccaggagtttagatacagagatcaaaatacttcattttatgcacctagagtgtttcgcgtttctgctagggtttcacaaattataccagcagattcagaattttattcccaaggcgagtttgaagtttaa

SEQ ID NO: 67309 - DNA, 1781 bp, Oryza sativa
  Clone ID: PAT_MRT4530_6817C.1
tcacgagtagccaccctcaagaaccttttgcacctccagcttcctcctcgcctcctcctcctccctcctcatggccgcctccgcctcttcctcccgccgccgctggttgaacctctccaccctcctcagccaccggacccgcctccgcacgcagttcctcatctccagcgcagcgtacaggatgccggccacgaagcgcctctccgtcgggttcgccggcaggctctccggcttgatcccgaacgcggcgagcagcctcggctggccgtcgccggcggcggcggcggcggcgacggcggcgttgcccctgttgatgcactcgatgagaacctcctcgatccctggccccgccatgaacccgaggccgaggagcgcgggccgggtcgcctcgtaggcgccccacgccatgacgtggtactccaccagcctcctgctgccggcgtacatgtcgatggcctgcgactccaggcggcggagcagccgcgcgtacatgcggagtagcttgcccatgtcgtgctgcgccggcggcggcgctgcaagggagggaggaggaggtggctggcccacgtcgtgcgtcgccggaggagagggaggaggaggaggaggaggtggtggaggtggagtctgcttgatgagttccatggcttcttctgcagaccacgcaattacctcgtagatggaaatctcggtgaggtcgtcatcgttgacccatggggacgctacggacatgttggggaggacggacgatgcctccgctgtcagcctgcagtgcggcggccctcctgtggcggtgcacctcgggaggtggacgacgacggacggaagccgcgagggggcgcgcgcagccatggttgccggccgcacgactacggagccgccgctgatgaggaggccggaggggcgcatcatctctcgctgcccacccgtcatccccttcccctccaccgtttccgccactcgccgcctttcctccccgtcggaatcgagcccgcgccgtcgcactctctctccgccgtcgccgccgagctccggtccgccgccgccgtcgccccggaccatctcccgccccggcgccgcctccttcggcttcgccgcatcctcgccgacctcgtccgcccctccgcttcgctcaccgaccgccggaacgccgtcgaccccgtcgacccgagccgcgccgccgccttcctccgctccggccgccgttttcgtcgtcgccttcgactcggggtgagccgtggaccgccgcttcgtttccccctttccctcccctctctcggtcgctgttccgccgtgccggtggtcgccggcggtgaccatcggggcacgggcgccgcctcccgccggccgcgccgcaatggccgcccccccgggcgcaccgagcggctgccacgtggggctcggccgtcagccgcccgcgccctcgggtgcggctgacgcctggggcccacggcgccggtcggcgtgagcccgggtgcacccggtccaccgtggtcgcacctcggccatataaggaccggtcttcgggcctctgttgcaaagcaccaccgtacttccacatgtctaatgggacaaatgaaggctacacgagctgcggcccggtagtcgagatgtcatggcacagggttggtgccctgctgctaggggctcagtcctgcctacctgtcccgggggttccggccgtaggtgggattgggtcgatgtacacctctgatcagagtataacctattcgaatagccgcgccctcggttatgggcaagccgagcaatgtacccaagttagt

SEQ ID NO: 67310 - DNA, 390 bp, Oryza sativa
  Clone ID: PAT_MRT4530_68180C.1
atggagaaacggcgagcgggcgagagtggcaaaaaaaatgaaaaagaaacaggaaatcgagagcacggccgacgatccgaagactggaaaggcggagacgagacaaggtcacggatccggcgaggcggcgacccttggtggtagatccggcaaggcattcatcagagacggcgacgagatggaggcgtggtcgcgtggaggtgggggcgtggatcgacggaggcagaagcggaggcgaagcggtcaaggcggaggcggagcggtcaaggcggaggcggaggcggagggggaggcgtgcgtggatcagcggaggcggctagggttagggttagggtttcccgtttgtgttttttccccccctttttttgtttccgttttccctcttccccc

SEQ ID NO: 67311 - DNA, 1164 bp, Oryza sativa
  Clone ID: PAT_MRT4530_68181C.1
atggggagctgcttctcatcggagggcggcaacgagagcaggaaggagtccgcggagaggccacagatcacaccggacgagacggccgcctcagagatggatgtgaatttaaataccacaaatgctgattccatctcgaaccatggtatggagaggcttattcatggccagtcattcacctacggggagctgtatgcggcgacagggggcttcagtgacgatcgctttctaggagagggcgggtttggccaggtgtataggggcgtgctggataactcccaggaggtggctataaagattcttaatctacaaggcaatcaaggagacagggagttcatcaccgaagcttcagtgttgagtaaactacatcacacaaatcttgtcaagcttattggctgttgtcaggatggtgatcagaggcttttagtttatgaatacatgcctttgggttccctgaaaagtcatctccatgatctttcccctgataagaagcctcttgactggaacacaaggatcaagatacttgtcggggcagctaaaggcctgcagcacttgcatgtcaatgttgaccctcccgtcataaaccgcgacgtgaaatctgaaaacattttgcttggagatggatatcatccaaagctttctgactttggcttggcaaagatgggtccaactggtgatgacactcatatttcgactagagtgatgggcacacttggatattgtgctcctgattatcttgagagtggtaaactgaccgtccagtcagatatttacagctttggtgtggtcatgttggaggtcatcacaggacaaaaggttatagatgacagtcgagctaagcctgagcgaaatattgttgaatgggccatccccaagatcaacaaaaaggattttcccaaattagcagacccggtgcttaacggtcagtaccacatgaggtccttgttccgggcccttactgttgctgctctgtgtgttgacagaacagccaaccggaggccagatatcacagcagtagttgatgctcttactcagatctcagagtcacaatccagcagaaagcggtggtcatctcgtctgcaatcatctgtaggttccagtgcatcgactgaaccgaggatagaagattggaaccaagccaaggatcagggagaaggcagctag

SEQ ID NO: 67312 - DNA, 260 bp, Oryza sativa
  Clone ID: PAT_MRT4530_68182C.1
ggaacggcattgcaattggttgttgttggttgttttaccagccacaaaacatgttttctcactttggggttttaaggcaatggggagaagcacttccactggcattcggaggaggaacaaacaagaaacgtatgcaaaacggccgggtttgactataccccgtactccctaaaagcaaagggtaccacagggctctgtggatctatccactgggccaatgtgatcctagaacgcggtccttgtaccatacaatggaccag

SEQ ID NO: 67313 - DNA, 735 bp, Oryza sativa
  Clone ID: PAT_MRT4530_68183C.1
atggaacaagtatcaagtcatgatgatgatgtgttgagggaagcactgcttgaaactgggttgtttacaggtgccatgagcattgatcaaattgatgcaggtgatgagtttgaaatacaagatgagtttggacatgaagatggagaaactgaagatgagggggtccaatctcaacctgcagtccctgatgttgctcggcatgaggaggggtctggtgtctgggttaagacctggtacctgggttttctgggaggtactaccaggtaccagacctggtacctggattgctaccaggcaccagaccctggtacctatattcagaccctggaatttaagcttggtacaaggtttcgaggcacatttcctcctttgctcttcagcattacattggttggatttcttgacccttggtcaagtatcaaatacgactaccccatcacgggatataattttcttgccacccccatcacggcttcccttggcctcgtctataaaaaatcagaaaatctactgaactttgataatcggaggaagggatgggagcagcggtgcggcaccgtcgtcatgggggaggcggagggagggatgcgaccaacactctggtcgtggcgtatcgcgatcgtcccagtagcggttgagaagggtaccatcctgaagtttgacaacgcgtttttcctgttgtccggcttgcaggtattgcttcaacgcggcatcgccttcatgctgcgccagtaa

SEQ ID NO: 67314 - DNA, 753 bp, Oryza sativa
  Clone ID: PAT_MRT4530_68184C.1
atgactcttttggtcagcgccaaatcacctggcgctgaacttagacacctcagcgctatgtcaactggcgctgaatgccgtgccaccgcggatgggagactaagtcagcgtgccaacgcatattcagcgctacgctatttggcgctgaggtgtctaaattcagtgccaagggcgaggttcgtgctcgagccaggcggcgatggagaggagccccgccgccgttcgggggcgccgcccgggattgtcgtcgcgtcgtggctgtccgtctcctcgatcgtcgccggatcaggaggccacactcttcctggccctggcgcatctatccccggtgccagatcgagcctccccacgcccagttgcgtcagatcgcgaccagttaatgctgtgaccattattgaaggtttgcgtctcgctagatccactcgccggctagagcccgagggacgccgggatgcaaggggagaggaaggagcgaagacgtacgtggtgtgcctgcttcatggcagtcgaggtggtcaggtggggaggcgagcatacagcagctacgtgcctgcttgctgcgtcgtggattcgacgatggcgggtatctggctgcagtttggtgcgacgtcgatgtaccagacagagaggacacaacagaactcaggcagtggaggcatgacatccagggccgagagcggcatcaaggagtgctggcggtcaactgtgccaggattcgtgcaagtatcgatccgcgtcgtcggccctaattag

SEQ ID NO: 67315 - DNA, 2260 bp, Oryza sativa
  Clone ID: PAT_MRT4530_68185C.1
atggccatcagtagcagagcagctgcgtgcggcgcgctcatcttcccgaccaccgcatccgccgctccggtctcccggagcgtctccgtggaccaaagagtcagccaccggcggaggaaggcggtggcggtggcggccgtgccgcacgccagcagcggcggcgcgctgctggagcggccggccttcgaccagtcccagctcgacacgcttcccgtgacacaagaaggaggggacaccggaaggatgagggacaggaggggctctggaagcggtgacagctacaaagttttgctcatagacgacgcccgccacaccgagaagcttgtggagaaggccttgccgcaggtggtgccgtccgtgaccgcggaggcggcgcggcagctcttccacgcgtcccggcagaaaggcgccgcgctcgtcattgtcgccgtgaagcttcttctacctccgtttcacacgcgcgccctcgctcgccgccagcgccgccgccaccaccaccaccgccactgccactatactaatgccgagttgccgacacccccacttgccccgccgcgtcgctgcgctacagcgctagagcgagctagcacactagcagtgagccagtgtcccgtggtccggccattggagattttggagctcgtaatggctcacaaggccgcggctctggtgctgctgctagtgtcagtgtcagtggcggccgcggcgtcgggcgaccaggagagcgaccggatccgggagctccccgggcagccggcgaaggtgaggttctcgcagtactccggctacgtgacggtcaaccaggcgcacggccgcgcgctcttctactggctggtggaggcggtgccggcggccgggcccatcgcgccgctcgtcctgtggctcaacggcgggccggggtgctcgtcggtcgggtacggcgcgtcggaggaggtcggcccgttccggatcaggcccgacgggaagacgctgtacctgaaccccaattcttggaacaaggcggcgaatttgctgttcttggagtcgccggccggcgtggggttctcgtactcgaacaagacgttggatctgtacgtcgcaggagatgctaagacagcatcggatgcttatgcatttctggtgaactggttggagagattcccacaatacaagtacagggagttctacattgctggggagagctatgcagggcattacgttccccagttagcccagctcatctatgaacagaacaagggcattcagaatccaataattaatctcaaaggattcatggtgggtaatgcggttactgatgactaccacgactatcttggtacctttgagtattggtggactcatggcctcatctctgacaacacttatcacaacctgaagaagacatgcttgcttgagtcctctgagcacccttctcctgaatgtctaaagaacctgaacctagccagttcagaagaaggcaatatcgatccttacagcctgtatacaaagccctgcaataatacagcctctctcaaacttggcttgggaggacgctacccttggttatccagagcatatgatccctgcacagaaagatactcaagtatttactacaaccggccagaagtgcagatagcgatgcatgctaacaccactgggattcaatattcatggaaaacttgcagcgatattgtcggatcatactgggcagattccccgaaatctatgcttcctatctaccaagaattgattgcagctggtatcaggatatgggttttcagtggggatacagatgctgtagttcctgttactgcaacaaggtactcaatagatgctcttaagcttccaactatggtcaattggtacccttggtatgaccacggaaaggttggaggttggagtcaagtgtataaaggattaactctcgtcactatagcaggcgcaggccatgaggtaccactacaccggcctcgagaagcacttatattattcagacacttcttgcagaatacacccatgccaactcaatagccacttgaagcagaatgatagagtaaactacgacaatcatataaagtgctaaagtgtttttacattattttttaatttgatttgattattacaacatgatatcaactatctctactaaatgtatgtatgtttcttactagctagtagggaaacctgacaattgtactgctccagctaaagagctcctttgtatatgatactgatagtgattctttgagcagtaaaatttacaattttacatctttctcag

SEQ ID NO: 67316 - DNA, 635 bp, Oryza sativa
  Clone ID: PAT_MRT4530_68186C.1
ggttcttttcccttcagttcgcatttcaaaatagagggctcaaaggtggagcaggtgagaatcatcaaggcggtgctgctcaacaaaggcattatcacagagagccgttccagagttagcaacttagcatgtgctaatggaagtttgattgtttgtcgtactagtgggaccaatgtcatatgatttagttttagtttttcaatatttattcttgcaaagttgtgctttcgtgaagttaaataaaaaaaagtatactttttaatcggttttatgattttttttaatgcgggagaaagcattactcatcttctgggaacacaacagatttgtgtgtcatcacattagatgaaatgaaggttccaaagaaaggttcgagatgtacatgttatttcatttatatttatctcactagtcacctgaaagaattttgtgccgtggtcgaattctttgttcacattcacagctaatattgatatggaaggttaattatcctctctccattcagtgttcatgaaaagaactgttctagttttctggctcggtccccgtgataactaactttggtatctgcattaattagtaatcactgctatgtactaactaattcgtttgttgtttgcttgaacatgattgtg

SEQ ID NO: 67317 - DNA, 527 bp, Oryza sativa
  Clone ID: PAT_MRT4530_68187C.1
gccgtttgtcctcatttgcagaaagggttagaaacccttagatttcatgccatcaagcgtaacagtgtaaccccaccatgtcatttctttgctacttatagcatcccaagttgatgatccatttcatgttttctctcctttttcagatgcatactatgatgtccaatgtgggtgtctgaactgaaatctgaactctgaactctgaaggctgttgtttccatcagggtgcattggttcagcagagatcggtgatctatgttttcatatttggtcacgttctaccggtctttttcgatggaaatgaaggttcttcgaggagttctatccgtttgatggaattcagtcaagaaatccgtattaaccaaaatcaacattataaaatttaaggatgaacaatgaatgcaagattaagtctgccatggagaatcatagtaaagagtagggcgctatgtggacgagctcactacgccttcacgcatagtagcagggatgagtttcaaccagtgtgcaactaggaagtttttttt

SEQ ID NO: 67318 - DNA, 506 bp, Oryza sativa
  Clone ID: PAT_MRT4530_68188C.1
ctcttccatggcatccattccactcctgcggctgcggctccctttaactcttcggggggacctctagccaagccaccaccggccaaacgatgccggcgtctgagccggcgatctccacctgatcttcgttgtacctggggttggctgcatcaacctggaggcacggctcaccgaggcgtaccggccgtcggtgcatccgagctgcggcgcgttgaaggggaagggttggttcgggctgtgggacaacagcttggacctttcgacgtaccactacggcgactgcttcaaggagcagatgagcctcgtctacgatcccgtcagcaacgactatcggaacctccccggcgttgagacccgcgtgggcaacttcggcattgcgagagggttccactcgaagaacactttacacccagaaaggtgcctttgcaaagctattgaatagctggaagagattggataccatgatggagacaactgcacggagttccctacgatttccgtacgct

SEQ ID NO: 67319 - DNA, 545 bp, Oryza sativa
  Clone ID: PAT_MRT4530_68189C.1
gctgcaggaaaaaaatgagtcccgccaccgcagccacggccggatgccaccacctcctcctccccacggcgagccggccatgcggcgcgcctcctcgacggctagcacgaggcgccgcagcggcagcggcagcagccgggcacgtgtcggtggtgggtcggcggccgctggaggaggtatacaaggtgcgggtggagcgcggcgcggcggcgcgggagcgggcggaggcgctgcgggcgatggagacgtggtccacgtggcggacgggcgggcggtgccggatgccctgggactggcacgtggaccagctcgtctacatcgtctccggcgaggtccgcgtgctcccggccgaggccaccaccggcgaggagtacatgcacttcgtcgccggcgacctcgtccggtaccccaagtggttcgaggccgacctgtacttcgacgggccttacgaggagcgctaccgattcctcgcctatggggatgacaactgaatctaatcgcgttaatccatccatgattggaggggattggggattagtaccaag

SEQ ID NO: 67320 - DNA, 2940 bp, Oryza sativa
  Clone ID: PAT_MRT4530_6818C.1
tcaatgtcgttctcccatcttagcgacgaatctgcttagtgctgccatgcatccggttagcttttgtacctccttgagtcttgtaggcgacttcatgttctcgattgccttgatcttctcggggtttgcttctatccctctgccagagacaaggaatctgagcagcttgcccgacggtactccgaacatgcacttctcaggattgagcatgaggcgatatcgtcggaggttgtcgaacgtttcccgcatatcgtcaatcaatgagttgcctgtcttggttttgacaacgatgtcgtcgacgtaagcctcgacattgttgccaagctggttgctaagtgcgccctggaccgtgcgctggaaagtattcccagctgttatcagtccgaacggcatcttaacatagcaaaataccccaaatggcgtgatgaatgctgtcttctcttcgtcctcttttgccatgctgatttggtggtagccagagtaagcgtcgatgaagctcaataactcgcaaccggctgttgaatccaccagttggtctattcgaggaagtggaaagtgatccttggggcacgccttgttgaggtcggtgaagtcgacactcattctccattttccgttggccttccgcaccatgactggattggctagccactctggatgaagtacttctctgatgaagccagctttgagaagtttgtcgagctcttctcgtatggcttgttttcggtctggtgcaaatctccgcagtctttgctttactggcttggcatcgggtcgcaccatgagtttgggctcaatcacctccctggggacccccggcatgtcggacggccgccaagcgaacacgtcggcattgtcgcggaggaaggtgatgagtgcgagttcggtcttatcggggttggcactggagagtggaacaatcttgatggcgccgtctggtttcggcgtcttgtttgtcttggtcactttcttgggtggctcagtcgtggcgggtggactgggcgtttgctcgaccatgtcgaggctccgcttgtcacattgcaccgccagctttgcgttcccctgaatagtgattgttcccttcggtcccggcatcttaagcacttgatatgcataatgagatgcggccatgaacttcgcaagtgtagttctcccgatgatggtgttgtaagctgtatcgaattcagcaacatcaaaggtgatctgttctgtttggaagttgttggcttggccgaaagtcacgggcaacgtaatcttgcccaaaggtctggacgatgattggggagtaattccatggaagggttgatcagttggtgtcaactcgttttgtggaattcccatcgcgtccaaagtgctggcgaaaagaagattgattgagctgccaccgtcaatgagaactcgcgctaccttgatgttccgaatagtaggttcgaccacgatcggatatcgtcctgggataacggcggtcttggggtggtcttcttccgagaactctatcttctgctcagaccacttcatcttgggtgtagcccctcgcttgcctttttcaaatgccatgtgcttctcgagcgactttttgaaaacaaggcaatcttccagagaatgtctgtccgtcttgtgtatggggcaccatgatttcgttgtgtcactgctttgtgggtctgggcgtttgggagggttcgcgtattctgctgcgaggacttccgcttgagctttccttttcccgtttttgcgatttttcttcttgcttgactcagatgtgtccatggctggtttcttctctcccccggtcttcggcctatcgttcttgcgtcttagcgcatcatcagcgtgggcgcatcgctcaacgatctcgaataatctccgagtggttgtgatgcgtcttgtcgccaactcctgggtagtgtagcgatctctgacaccggatttgaaggcgcgaattacagaagcatcgatgatttcaggaattgtgtttctgcaccgtcgttcgcgatcgttgtgatcgtggtggttgtcgtggtcccggtcctcgtttgagcgatttcctcgatttccgttatcatggcgccgtgaagagacatgacgccgagagcgattcacgttgtctcgtgtgcgtcgtgcttcccggcggccgttgatttgatctcgaagatcgccagtgccgcgaggtggaggggtagcttgttgaggtgattccctccgttccggatcttcaccattggcctctccagttggtggctgctcctggtgtgctgcggtagcggcttcttcaaacgcgttgctgaggttagtcaccgattctcgtagacgttctgtccaacgctcgaggtcaacgttcagaacgggatcgtaaggagtttccctcagtatcgcttgaacggccctgatgtgctgggctggagtagtcgattgattccccgcttctgtgttggcgtgcgctgacgtgccaacgtcatcgatagccaatacctcccgcggcgcgctcgttgtcgatgacccatagtctttgcagctcgagaggacatgattctttgtcttgtgaataggacaatagacatcccgagttggagaagtacgctgaattccacgttctttgcaggcgcgaatttcagcacggacgttgaggaaaacccagcaatcttgcagggtgtgtttcttggttttgtggataggacaccaagaccttgtggcttcgtaagtcatctttgtcggctcgtggttcatgtcggaaggacaaggtttggccgtatcagaatccttcttgagcttggatgtcatcgatattccgttctccgtctcgacgggaggatttttcgacatggaatcgccttggttcgtagccactgcgttctcgtctccggtcattggaggaccggttgagatcggtgtcgtggtgtaaaccgggaagacgatttcgccgacttgagtccataccagcat

SEQ ID NO: 67321 - DNA, 1605 bp, Oryza sativa
  Clone ID: PAT_MRT4530_68190C.1
atggccgccgccgtcctcgtcgccatcgcattgccggtctcgctggcgctgctgctggtggccaaggccgtctgggtcaccgtctcatgctactacctcacgccggcgaggatccggcgggtcctggcgagccagggcgtgcgcggcccgccgccgcggccgctcgtcggcaacctccgcgacgtgtcggcgctcgtcgccgagtccaccgccgccgacatggcctccctcagccacgacatcgtcgcccgcctcctcccccactacgtcctctggtccaacacgtacgggaggcggttcgtgtactggtacgggagcgagccgcgggtgtgcgtgacggaggccggcatggtgcgggagctcctgtcgtcgcggcacgcgcacgtcaccggcaagtcgtggctgcagcggcagggcgccaagcacttcatcggccgtggcctcctcatggccaacggcgccacctggtcgcaccagcgccacgtcgtcgcgccggcgttcatggccgaccggctcaaggggagggtggggcacatggtggagtgcacgaggcagacggtgcgggcgctgagggatgcggtggcgaggtccgggaacgaggtggagatcggcgcgcacatggcgaggctcgccggcgacgtgatcgcgcgcaccgagttcgacacgagctacgagaccggcaagaggatcttcctcctcatcgaggagctccagcgcctcaccgcccgctccagccgctacctctgggtccccggcagccagtattttccgagcaagtacaggagagagataaagcggctgaacggcgagctggagcggctgctcaaggagtccatcgaccggagccgggagatcgccgacgagggccggacgccgtcggcgtcgccgtgcggccgtggcctcctcggcatgctgctggccgagatggagaagaaggaggccggcggcaatggcggcggcgaggtcgggtacgacgcccagatgatgatcgacgagtgcaagaccttcttcttcgccggccacgagacgtcggcgctgctcctcacctgggccatcatgctgctcgccacgcacccggcgtggcaggacaaggcgcgcgccgaggtcgccgccgtctgcggcggcggcgcgccgtcgccggacagcctcccgaagctcgccgtgctccagatggtgatcaacgagacgctgcggctgtacccgccggcgacgctgctgccgcggatggcgttcgaggacatcgagctcggcgggggcgcgctccgggtgccgagtggcgcgtcggtgtggatcccggtgctcgccatccaccacgacgagggcgcgtggggccgcgacgcgcacgagttcaggccggacaggttcgcgccgggacggccgcggccgccggcgggggcgttcctgccgttcgccgccgggccgcgcaactgcgtcgggcaggcgtacgccatggtggaggccaaggtcgcgctcgccatgctcctctccagcttccgcttcgccatctccgacgagtaccggcacgcgccggtgaacgtgctcacgctccggccacgccacggcgtgcccgtccgcctcctgccgctgccgccgccgcgcccatag

SEQ ID NO: 67322 - DNA, 771 bp, Oryza sativa
  Clone ID: PAT_MRT4530_68191C.1
aaatgaaacacaacaaaactttatttgcggaaagtcaatgtgtccacataactgcaatttcgatcatatgagcaatgtgtgacccaacaaaggctatggcaaaacttgaccatgaatgtaaataaaatgtctaaatagaagcaaagtactccttgctgtccttggggtcaggcttcattgacttctccccaggtttccatccagctgggcaaacctcatccgggttttcttggacatactgtagggcctgaagggtcctaagcgtctcatccacgctacggccaatagcaaggttgttaatggtagaatgctgaatcacaccctccttgtcaatgatgaataatcctctcagagcaatcccctgatcagggattagtacaccaaaagactttgaaatcacactgtcaatcgaaacaccgagaacttcagtatttatcttctcaaactcctcatatctgtcgctgaaagcagtgatctctgcagagcttacaaacatgcatttagacttgatgaacccctggtcgaacatggcctccgcctcgaagtccggcgccttgttcccgaccaacggcaggtcccccttcggggaggcgagaggcgccgcggcagaggagacggagaaggcgcacgccatctgatcagggattagtacaccaaaagactttgaaatctattatattattaaaggaatagaaaaagaagcctccacgttcgctctcatggtctagaaattctcacattaatctaagaaaaagaaaaaacagagtccat

SEQ ID NO: 67323 - DNA, 2823 bp, Oryza sativa
  Clone ID: PAT_MRT4530_68192C.1
atggagattaacgagaaaattgacgatagagaagcaaatttacagtacacacagaaaggaatcacaagtttgagcgatttggagaaggaaaaaggtgaagagcaggaaaaatcaacagattcaggcaaaaaatcacagggtctgaagataatgaagcaattagcaggaaaaattgaagctggaactagtactgattctgttaattcaaaatcaggaacagaagagaagattttgaaaatatcaaatgatctaaagaaggctgatgaaaagcaattacaagaagtaaagacatcgagaggttttgaaacagataccgacaaaaaagcacagagatttaagacaatgaagcaattaccaggaattttcgaagatggaacttgtactgctttggttcagtcaaattcaggtctagcattcctagagaagaattacaacacaactcaatcatataaaatgcaagaaaacagagacaacataaaatcagggaacaaggggcacttgtcagatataggaagtaagattgagaagaagaacacaacaaatcagacatgtttagcattgcttgaggagaattacaatacaacactatcttatagagtgcaagaaaacatggacattacaaaaacaggtaagggaaaaattatgaagcaaattgcaggtaacagtaaagacttctcagaaacagaagctaaacttgacaagaccaaaaattcagaagcagacattggatgtagtgctttgaatgaatcagagaaaagtattatagaaaacaatgacaaaggaactataagttgtatgaatatgcaagaaattaattcagaaaatggagctaacaatgcaaaggttgattatgaaaacaatgttctatctctgttggaccaagactacattgcagattcatttatatcatacactagtctaatggaacatattatttcatcacaaccaaaacgttgcaatgaattgaaggataaaagtttagagcaaacaagtgaaattggttacagcaatgttgacaatcagtcacaacatgcatggtcactagatattttcaatttgcaagaatcagttcaggaaccaattttagaacaatcaagtgatattggtaacatcagtggtaatggtgttgatgatgatgttatgaatgatgaattgctaactgaggaagacattgaacaatttttagaagaagaacaacaagaagcattgaaagggaataacgcaatcatagatagaaagtacatacctgaattagatcagaagttcaaatcaattattgaggcacataactatttcaacttctatgcatacatggctggattttcaattgtcaatgttcatagtgctagaactacaagtaagaaaagaaatagagaagttattagagtaacattcaagtgctacaaatatgtcaaagcagattgcaatacaaagccagaaacagtagatgagactgctactggagagagaaaaacaaatgaagttattggaacagagtgcaaatgtgttatggtaatctcagaaagaaatttggaatggattataacaaggttagatttggatcataatcatgagctgagccctccaaacaaagtcagatttctaaggtcacacaagtatttatcaacagaagagcgggtgcttattcgaactttgaaagaatgtcacattcccacaaggaacatgatagttattctgtcagttcttagaggtggtttaacttcattaccttacactaagaaggatatcagcaatgtcagaacagaaatcaacagagaaacaagcagcaatgatatgatgcagtgtttgacatatctgaagaaaaaacaagaaaaagatccaaatttcttttatgaatttgatttggatgaaaataggaaagctcagctcaggaagacattagaattacaagttgaagagattaaaaagttcaagtgttatgcagtgtttgaggcagaaaatgtgatcagcaagcaaatcagaaagagaaaataccttgtgatgatggacttggatacagaagaatacacatgtatttgtgcaatgttccagaaagatggcatactatgctctcatatattgaagattatgcttcaccttagcatcaaagaaataccggagaaatatatcatgcatagatggagaaagaatcataaatcaacagaaataattatagggaaggaaatcatacctgtttcagaatcatcagttctcagatttaatatcctgtcaaggaaatttgctgaaattgcatcaaaaggtgcgaaaacagttgaagcatacaaattcttgatggaagaatcagaaaagattgatgaaaagttgaatactatgttctctcatgaatttgaaggagcagataaacaacagggacatgaagagaacaatagttttagtccaacagcagaagtgaatgaaaaatcagaaaacacacacattcatggagatatcagaaatgaagaagattacattgaagatccagatatagcaaattcaaaagggaggcctaagcaaagatataaaacaattagagagcaaatagaggacaaagaaacaaatcactgcagtcactgcggtaggacagaacatacttttccaacatgtcccttcaagcatattgagtttgatttggcaaggaaaaggaaaagaaaaattccaagtaaaccacaaaagagtggagaagaagagaagaaggaagctacttcaaagaaaagaaaaccaaacaaaaaggagaatacagaaataagcaaaagtcatcaagacgaagtacaacagttgagcaaaagggtcaagaagaaatcagaaatcaacacaagcaagtga

SEQ ID NO: 67324 - DNA, 2221 bp, Oryza sativa
  Clone ID: PAT_MRT4530_68193C.1
gttcaaacaagacaccatactcatataaccatggacaaagaaatacaacaaccaatttgaactacagtcttacaattctaatattgcacctgacatgggtcacattgactttctcaaacaaaaatgaacaaactaactttgcactaacatatttactatctccccctaaaagtttatgaagtatctgcaacaaagtcctggattatggtacgaaccgcaataggaattctcacagagtgtgtgataccatcttgccatgtcaaacttccaaacgtgtagccaccttgcactctctgtcttgtggtgaatgtcaccttaaatgtcacacttctactaccgccattggtgaatttgatcactgaaggttccacagacatggtcataccgactggtgcctcaagcattgcatggtaagttgcttctgccactccgatgttgatgatggttcgccaaaccgtgacagagtacttgagatctggtacgacgatggatgggaggttgagctggtaaagttgcctcatgtatgactcacattcatccttggggttgatactgcagttgtagaacttagcgtactctcttggatctatatcatagactaaaccagggtcaaccgctctatctgattcaatgtggccaccaccgaagtcgaatgggtcagccactttccttggcactccctcggcttggattggtatgccaaaacggtcagtcaccgatgctgtggtgacgatggcggacttaatcatggcaggcgaccaatctgggtgaaccatcttgagcagtgccaccaccgctgatacgtgcgggcatgccatggatgtcccagacatgaactcgtatgagtcacccaaggctgccaggatgctgactcccggtgcagcaatgtcaggcttcagtataccgggaaacaaggagctcggtcctctcgacgagaatgcagccaccctcggtgagagcaccccacttccgaccacggtcatagccggagacacctccaccaccggcatccttgtggaggccacgtaagagcggattctgtttgcgatctcgtagtcgacgagtacacagggcatgctgccattgcaggcgtccagatcttcaagaatgttgacggtgtactgagcgaagatgagacccgcggcgcctgcgttagcgacatcgccaatgattgcaggcagcatcaggcgaggcggatttaacttcgcctgcaacggcgccgagcacagcacaatcttgccagtgacattgatcaacgccagcgtctccttgtcgcagctgaatcctccatcaacgagcatctcaaattttccgctcttcgctggtgctttgtagtaaagagattgccccaccagcttctctttgttcccgagcgatatcacggttgggaatgtccgatcaatcgtgctggcagccaccgtgatgacccatggcaaggtgctccccaccgtctgcggtgtggggccgtcgttcccagcagagaacacgacggggatccctctcgccacggcgtgacgcgacgagaggtactcgacggggcctcctatcgacagggacagcacatccacgccgtcgttgatggcgtcgtcgatggccgcgagcaccgcggcgttgctgcaagagatcccaccgccggcggcgccccagcacgccttgtagactgctacccgtgcgcgcggcgccccaccgtgtgccgacccagcggccaagccgccccgcttgtggctcgcgttccacacctgcccaccaacgatcgttgaggcggtgtgcgtgccgtggccatttgcgtccctcggtgacaagtactcacccttcagcgactcatcctgaatgccacctgagtaccaccgggcaccgatgatctttctgttgcaacttgtggcattgaacgccatgccagtttggcacttgcccttccaccgggtcggtacagagctgtacccactgtcattgaagctttctgattcaggccatatacctgagtcaatgacaccgactatgacatcttcaccatagttggctttctttagaaggcctgattgttcgtaatagttcaggcctaggaaatcccagcttcgagttgtgtgtgcttgatggtaaatgttaggattcacgctgaggacttcaggtaattttgcctgcaatttcttcagcttgagattctgtgagcatcgctgcaaatccagagaacccatgtttgtaactgtacactatacacctc

SEQ ID NO: 67325 - DNA, 421 bp, Oryza sativa
  Clone ID: PAT_MRT4530_68194C.1
aaaaaaggaaggccacctttttttttttttataccccccaagggtccccggggcccaaagggggatttcggggcttattttaaacccccgaccccctttccgggaaaaccccattccaggccccccccgggggggggaaggggccgggggcccccaaaaccccggggggggaccccattttgggggggcccgtaaaaggccaacagggcgggggctgggcccaattcccgaccaagggggggccccccaaccggggggggggggacctgcggcccttgggcccaaacaaggtaaaggccctgaaggggggatgggggccccccccgcgcgggggggggccaaactgggttgtttttaattaaaaccccccttgttggcaagggggggcttccctttttgccaacccgggcggggggggccc

SEQ ID NO: 67326 - DNA, 3639 bp, Oryza sativa
  Clone ID: PAT_MRT4530_68195C.1
atggagattaacgagaaaattgacgatagagaagcaaatttacagtacgcacagaaaggaatcacaagtttgagcgatttggagaagggaaaaggtgaagagaaggaaaaatcaacagattcaggcaaaaaatcacagggtctgaagataatgaagcaattagcaggaaaaattgaagctggaactagtactgattctgttaattcaaaatcaggaacagaagagaagattttgaaaatatcaaatgatctaaagaaggctgatgaaaagcaattacaagaagtaaagacatcgagaggttttgaaacagataccgacaaaaaagcacagggatttaagacaatgaagcaattaccaggaattttcgaagatggaacttgtactgctttggttcagtcaaattcaggtctagcattcctagagaagaattacaacacaactcaatcatataaaatgcaagaaaaacagagacaacataaaatcagggggcacttatcagatataggaagtaagattgagaagaagaacacaacaaatcagacaggtttagcattgcttgaggagaattacaatacaacactatcttatagagtgcaagaaaacatggacattacaaaaacaggtaagggaaaaattatgaagcaaattgcaggtaacagtaaagacttctcagaaacagaagctaaacttgacaagaccaaaaattcagaagcagacattggatgtagtgctttgaatgaatcagagaaaaaaaatggagctaacaatgcaaaggttgattatgaaaacaatgttctatctctgttggaccaagactacattgtagattcatttatatcatacactagtctaatggaacatattatttcatcacaaccaaaacgttgcaatgaattgaaggttgaaggaacacaaaatgatacaatagagactggaattggacaagattatcaaaaggttgatgaaagtttgaattcacacgttgaatatcaatcagaacaaagatgctcaatggatattttaaatttgcaagaatctgtgcaggataaaagtttagagcaaacaagtgaaattggttacagcaatgttgacaatcagtcacaacatgcatggtcactagatattttcaatttgcaagaatcagttcaggaaccaattttagaacaatcaagtgatattggtaacatcagtggtaatggtgttgatgatgctgttttgaatgatgaattgctaactgaggaagacattgaacaatttttagaagaagaacaacaagaagcattgaaagggaataacgcaaacatagatagaaagtacatacctgaattagatcagaagttcaaatcgattattgaggcacagaactatttcaacttctatgcatacatggctggattttcaattgtcaatgttcatagtgctagaactacaagtaagaaaagaaatagagaagttattagagtgacattcaagtgctacaaatatgtcaaagcagattgcaatacaaagccagaaacagtagatgagactgctactggagagagaaaaacaaatgaagttgttggaacagagtgcaaatgtgttatgctgagccctccagacgaagtcagatttctaaggtcacacaagtatttatcaacagaagagcgggtgcttattcgaactttgaaagaatgtcacattcccacaaggaacatgatagttattctgtcagttcttagaggtggtttaacttcattgccatacactaagaaggatatcagcaatgtcagaacagaaatcaacagagaaacaagcagcaatgatatgatgcagtgtttgacatatctgaagaaaaaacaagaagaaaatccaaatttcttttatgaatttgatttggatgaaaataggaaagggagaaatttcttttggacagatggtagatccagagattggtatcacaaatttggtgattgtataagttttgacactacttttttgaccaacagatataacctaccatttgcaccttttgtgggagtttctggtcatggaaatacaatattgtttggttgtgcatttttacatgatgagacaacagagacttttgaatggttgttcataacatttctgaaatgtatgaatgggaagcaaccaaagacaataattacagaccaagatggtgctatgagagcagctatcaaaaatattttcagagaagctaagcatcgaaattgttttttccatataatttcaaaagctttgaaaagatctggatccttattcaaaaagaggcaaggtctttatgcaatatacagtgatatcatacataactgtttgactgaagaggaatttgaggttctttggcaggatatgattcaagaattcaatctgcaagagataaattttctagcacacatgtggcatatcagaaaaaggtttattccagtatatttcaaaacaaatttctgtcttttcattcaatcaacagcattaagtgaaggaactaactcaagattcaagaaaaatgttggcccccaatatagcatcagaagtttcttgacagaatatgaaagggttatggaaactattcaaaatttagaacagcatgacgatcatgaatcaagaacaaaaaggccgactagtttttggtcaaactactccattgagtaccaagcagtgaaattatataacaacaaaatattcaaaagatttcaggctcagctcaggaagacattagaattacaagttgaagagattgaaaagttcaagtgttatgcagtgtttgaggcagaaaatgtgatcagcaagcaaatcagaaagagaaaataccttgtgatcatggacttggatatagaagaatacacatgtatttgtgcaatgttccagaaagatggcatactatgctctcatatattgaagattatgcttgaccttagcatcaaagaaataccggagaaatacatcatgcatagatggagaaagaatcataaatcaacagaaataattaaaggcaaggaaatcatacctgtttcagaatcatcagttctcagatttaatatcctctcaaggaaatttgctgaaattgcatcaaaaggtgcgaaaacagttgaagcatacaaattcttgatggaagaatcagaaaagattgatgaaaagttgaatactatgttctctcatgaatttgaaggagcagataaacaacagggacatgaagagaacaatagtttcagtccaacagcagaagtgaatgaaaaatcagaaaacacacacattcatggagatatcagaaataaagaagattacattgaagatccagatatagcaaattcaaaagggaggactaagcaaagatataaaacaattagagagcaaatagaggacaaagaaacaaatcactgcagtcactgcggtaggacagaacatacttttccaacatgtcccttcaagcatattgagttttatttggcaaggaaaaggaaaagaaaaattccaagtaaaccacaaaagagtggagaagaagagaaaaaggaagctacttcaaagaaaagaaaaccaaacaaaaaggagaatacagaaataggcaaaagtcatcaagacgaagtacaacagttgagcaaaagggtcaagaagaaatcagaaatcaacacaagcaagtga

SEQ ID NO: 67327 - DNA, 3090 bp, Oryza sativa
  Clone ID: PAT_MRT4530_68196C.1
atgaagcaacttgcaggtaacagtaaaaacttctcagaaacagaagctaaacttgacaagaccaaaaattcagaagcagacattggatgtagtgctttgaatgaatcagagaaaagtattatagaaaacaatgacaaaggaactataagttgtatgaatatgcaagaaattaattcagaaaatggagctaacaatgcaaaggttgattatgaaaacaatgttctatctctgttggaccaagactacattgcagattcatttatatcatacactagtctaatggaacatattatttcatcacaaccaaaacgttgcaatgaattgaaggttgaaggaacacaaaatgataaaataaagactggaattggacaagattatcaaaaggttgatgaaagtttgaattcacacgttgaatatcaatcagaacaaagatgctcgatggatattttaaatttgcaagaatctgtgcaggataaaagtttagagcaaacaagtgaaattggttacagcaatgttgacaatcagtcacaacatgcatggtcactagatattttcaatttgcaagaatcagttcaggaaccaattttagaacaatcaagtgatattggtaacatcaatggtaatggtgttgatgatgctgttatgaatgatgaattgctaactgaggaagatattgaacaatttttagaagaagaacaacaagaagcattgaaagggaataacgcaaacatagatagaaagtacatacctgaattagatcagaagttcaaatcgattattgaggcacagaactatttcaacttctatacatacatggctggattttcaattgtcaatgttcatagtgctagaactacaagtaagaaaagaaatagagaagttattagagtgacattcaagtgctacaaatatgtcaaagcagattgcaatacaaagccagaaacagtagatgagactgctactggagagagaaaaacaaatgaagttattggaacagagtgcaaatgtgttatgctgagccctccagacgaagtcagatttctaaggtcacacaagtatttatcaacagaagagtgggtgcttattcgaactttgaaagaatgtcacattcccacaaggaacatgatagttattctgtcagttcttagaggtggtttaacttcattgccttacactaagaaggatatcagcaatgtcagaacagaaatcaacagagaaacaagcagcaatgatatgatccagtgtttgacatatctgaagaaaaaacaagaagaaaatccaaatttcttttatgaatttgatttggatgaaaataggaaagtgagaaatttcttttggacagatggtagatctagagattggtatcacaaatttggtgattgtataagttttgacactacttttttgaccaacagatataacctaccatttgcaccttttgtgggagtttctggtcatggaaatacaatattgtttggttgtgcatttttacatgatgagacaacagagacttttgaatggttgttcacaacatttctgaaatgtatgaatgggaagcaaccaaagacaataattacagaccaagatggtgctatgagagcagctatcaaaaatattttcagagaagctaagcatcgaaattgttttttccatataatttcaaaagctttgaaaagatctggatccttattcaaaaagaggcaaggtctttatgcaatatacagtgatatcatacataactgtttgactgaagaggaatttgaggttctttggcaggatatgattcaagaattcaatctgcaagagataaattttctagcacacatgtggcatatcagaaaaaggtttattccagtatatttcaaaatagatttatgtcctttcattcaatcaacagcattaagtgaaggaactaactcaagattcaagaaaaatgttggcccccaatatagcatcagaagtttcttgacagaatatgaaagggttatggatactattcaaaatttagaacagcatgaccatcatgaatcaagaacaaaaaggccgactagtttttggtcaaactactccattgagtaccaagcagtgaaattatataacaacaaaatattcaaaagatttcaggctcaactcaggaagacatttgaattacaagttgaagagattgaaaagttcaagtgttatgcagtgtttgaggcagaaaatgtgatcagcaagcaaatcagaaagagaaaataccttgtgatgatggacttggatacagaagaatacacatgtatttgtgcaatgttccagaaagatggcatactatgctctcatatattgaagattatgcttcaccttagcatcaaagaaataccggagaaatacatcatgcatagatggagaaagaatcataaatcaacagaaataattaaagggaaggaaatcatacctgtttcagaatcatcagttcttagatttaatatcctgtcaaggaaatttgctgaaattgcatcaaaaggtgcgaaaacagttaaagcatacaaattcttgatggaagaatcagaaaagattgatgaaaagttgaatactatgttctctcatgaatttgaaggagcagataaacaacagggacatgaagagaacaatagtttcagtccaacagcagaagtgaatgaaaaatcagaaaacacacacattcatggagatatcagaaatgaagaagattacattgaagatccagatatagcaaattcaaaagggaggcctaagcaaagatataaaacaattagagagcaaatagaggacaaagaaacaaatcactgcagtcactgcggtaggacagaacatacttttccaacatgtcccttcaagcatattgagtttgatttggcaaggaaaaggaaaagaaaaattccaagtaaaccacaaaagagtggagaagaagagaagaaggaagctacttcaaagaaaagaaaaccaaacaaaaaggagaatacagaaataggcaaaagtcatcaagacgaagtacaacagttgagcaaaagggtcaagaagaaatcagaaatcaacacaagcaagtcatgtgtgatgaaaagaaaagagtag

SEQ ID NO: 67328 - DNA, 399 bp, Oryza sativa
  Clone ID: PAT_MRT4530_68197C.1
gatatcatcagtgtggatttatgcataccaaggaggatagcaagttgctacaagcctagaagtagaagttaatatgtcaaaacgaacatgttaatcaggaaaaaaaaagtttaatctatataatgtacacgtactggtggtgatagaaggtaaaacccagaagcagttttgataagattaacatggcaaatggaagatccaacctacgcaaagagctaactgtaaaactttgtactctcatgctatcagctagcattaatgatcgccagttgatcgaccatcagctacagagcaatattaaacgccagttgatcgaccatcagctgcagagtaatattaatcgccagtttatcgacgtgctatgtggactcttctaactcttctccaaatcgatcaagc

SEQ ID NO: 67329 - DNA, 570 bp, Oryza sativa
  Clone ID: PAT_MRT4530_68198C.1
atggagattaacgagaaaattgacgatagagaagcaaatttacagtacgcacagaatggaatcacaagtttgagcgatttggagaagggaaaaggtgaagagcaggaaaaatcaacaggaacaaaagagaagaaattgaaaatatcaaatgtcctaaagatggcggatgaaaagcaattcgaagcagggaaaacatcaagtggcaaaaaatcacagggtctgaagataatgaagcaattagcaggaaaaattgaagctggaactagtactaattctgttaattcaaaatcaggaacagaagagaagattttgaaaatatcaaatgatctaaagaaggctgatgaaaagcaattacaagaagtaaagacatcgagaggttttgaaacagataccgacaaaaaagcacagggatttaagacaatgaagcaattaccaggaattttcaaagatggaacttgtactgctttggttcaatcaaattcaggtctagcattcctagagaagaagtacaacacaactcaatcatataaaatgcaagaaaacagagacaacataaaatcagctaattaa

SEQ ID NO: 67330 - DNA, 1730 bp, Oryza sativa
  Clone ID: PAT_MRT4530_68199C.1
cggacgcgtgggaacgcctcccgacgccgccgccgcctcctcctcttgtttcgccaccgccgccgccgcctacgaggaagaagaaagaagaggaaggagaagatgagggagatcctccacatccagggtgggcaatgcgggaaccagatcggcgccaagttctgggaggtggtgtgcgcggagcacgggatcgacgccaccgggcgctacgacggcgactccgacctgcagctggagcgcgtcaacgtgtactacaatgaggcctcctgcgggcgcttcgtcccgcgcgccgtgctcatggacctggagccgggcaccatggactccgtccgctccggcccctacggccacatcttccgcccggacaacttcgtcttcggccagtccggcgccggcaacaactgggccaagggacactacaccgagggcgccgagctcatcgacgccgtcctcgacgtcgtacgaaaggaggccgagaactgcgactgcctccaagggttccaggtttgccactcgcttggcggcggcacggggtccggcatgggcacgctcctcatctccaagatccgggaggagtaccccgaccggatgatgctcaccttctccgtcttcccctcgcccaaggtctccgacaccgtggtggagccctacaacgccaccctctccgtccaccagctcgtcgagaacgccgacgagtgcatggtgctcgacaacgaggccctctacgacatctgcttccgcaccctcaagctcaccaccccaagcttcggcgacctcaaccacctcatctccgccaccatgagcggcgtcacctgctgcctccgcttccccggccagctcaactccgacctccgcaagctcgccgtcaacctcatccccttccctcgcctccacttcttcatggtcggcttcgccccgctcacctcccgcggctcgcagcagtaccgcgccctcaccgtcccggagctcacccagcagatgtgggacgccaagaacatgatgtgcgccgccgacccccgccacggccgctacctcaccgcctccgccatgttccgcggcaagatgtccaccaaggaggtggacgagcagatgctcaacgtccagaacaagaactcctcctacttcgtcgagtggatccccaacaatgtcaagtccaccgtctgcgacatcccccccaccggcctcaagatggcctccaccttcatcggcaactccacctccatccaggagatgttccgccgcgtcagcgagcagttcaccgccatgttccgcaggaaggccttcttgcactggtacacgggcgagggcatggacgagatggagttcaccgaggctgagagcaacatgaacgacctcgtctccgagtaccagcagtaccaggacgccaccgccgacgacgagggtgaatacgaggatgaggaagaagaggctgatctccaggactaattactactctactgcaatatcaatgtccaatctaatggggttcggttcacttcttgtgttgcttaggctatcttctcaagtgttgtcgttcttaattattactcctagctgctactctactctacttgatgtattattattactcagctttgattgatgataggcacaataccctgttgccttgtactcgtaggagtatgtgctgttactgtctaactgatctgtatgaattatcatcctatttttgttaatctatcttctagtaaaaagcagagttgctgctt

SEQ ID NO: 67331 - DNA, 1087 bp, Oryza sativa
  Clone ID: PAT_MRT4530_6819C.1
ataaaagaaaaaccttaaaatcccccccctccccctcttgggccggctcggcccatctcccttcccctctccctcctcctccccgcggcccactcggcctctccgagcgcgcgcgccgctgacgggcgggcccgcccgccaccctcactgacgggtggggcccacccgtcatccccgacctcccgccgctcccgccgctccgcctgcgccaagcgccgccgccgccgtcgaatccgccgcatcccgccgtccccgcgtgcatttaagtggggggaatcactccccgtgatcccctctccctttccccccaattttccctccctctctcccttggattcgtttggaaacccctcccctaatcccaccggcgccattgatggagcccgagaacgccgcgccggtttccttcctctctcggccgccctctctctcccctgccctatttaaaccctccccgcgcttctcccgtccgtttccgcctctcgccgcccttcctcctcgccggattcgagctcgcgccgtcgctctctctctccgccgtcgccgccgagctccggtccgccaccgtcgtcgccccggaccgcctcccacctcggcgccgccttcttaagcttcgccgcatccttgccgacctcgtccacccctccgtttcgctcgccgaccaccggagcaccaccgaccccgtcgacccgagccgcgccaccgcctcccttcgctccggccgcctcctccgccgccgccgtcgccccggggtgagccgtggaccgtcgcctcctttcccccttccctcccctctctcggccgccgctccgccgcgccagtggtcgccggcggcgaccatcggggcgcgggcgccgcctcccgccggccgcgtcgacgtggccaccttcgggcgcgccgcgcggttgccgcgtggggcccagctcggccacgtaaggaccggtcttcgggcctctgttgcaaagcactcccgtacttccacatgtctagtgggtaaggcttagtttgtggctcagtcttgcctcctgggacaaggaataatacacgcacgtaaggaacgcccgttgggttatttccggtcgtgaca

SEQ ID NO: 67332 - DNA, 281 bp, Oryza sativa
  Clone ID: PAT_MRT4530_681C.1
cccacgcgtacgctgcggctcgtcgtggccggcccggtcgcggaggcggcgggcagcgcagcctgcccggagcggcagcggcgcccccgctcactcgctcggcctggccgctcggagccagcccatggcgcggtgggtcgtccaggcctcggtggcggctcagcttggtggccgggcagccaggatgccgtcgcggtggccaggtgaggctcggtgggcggacttcgggggcgccggcgggtggtgtcggtccggaacatcagcaccaccggcggccagat

SEQ ID NO: 67333 - DNA, 468 bp, Oryza sativa
  Clone ID: PAT_MRT4530_68200C.1
gaaacagaaggaaggagagaagaacgggaggaagaagaagagacatatgacaagtggcctctgcacattagaccatacaacaagttctatcagcatccaaggagctgacgtggacccagacggcttgcctgccgccgcggccgctcgcgagccgcaagaggaaacgtcctaacaaggagatcggaaggaagcgagattttacggcaacgacaagtttgtctaggctagtctacactcgagcttttgcctgtggagttctttgaattctttggagtttattagctgtagctttagtagttgaagagcttaggagtttagtagtttagcactttagatttttcttgtattttcaaataaggatgttttagtttggatcttttcaccctttaacagttgtataattagcctgtataaccaaatttgtgcaattatcggaagatgttatgtatatcaaaaaaaaaaaaaaaa

SEQ ID NO: 67334 - DNA, 2273 bp, Oryza sativa
  Clone ID: PAT_MRT4530_68201C.1
atggcctccaccgcctctgccctcgtatcatctcaactgtgcgggagctcaagatggtcaacaacgtggatttgggtgcgggtggaaagggaggtccgacaacaacgtaggagggagggcgcggcggtggtggggcttgattatgaggaaaggagagcgcggcggtatgaaggcaaggaagatgcttatgcggtggcggtgggatgctcctgctcctccttctcatgctgtcgccgtgctctcatgctgtcacccgcttcagccccacgctgcttgttgtacgtctcctcgaggcagcgttgccactcgatggctagtcacgcccatgttgctctagctttgtcagcgtctcggccagctacgcgtccgccgcaacctccctcattcgcagctccaccactacctacgccgatcaccatgcgtcgcacactacccctcctccgttccgacctcacatcgcgttgggctaggtcacagttggaggcggaggagtttggtggggacttgggctttggagtgggtaaaaaaggggaggagaagatgagggagatcttgcacatccagggcgggcagtgcgggaaccagatcgggtccaagttctgggaggtggtgtgcgacgagcatggcatcgacccgacggggaggtacgccggcacgtcggacctgcagctggagcgcgtgaacgtctactacaacgaggcgtcgtgcggccggttcgtgccgcgcgccgtgctcatggacctggagccgggcaccatggactccgtccgcacggggccctacggccagatcttccgtcccgacaacttcgtcttcggccagtccggcgccggcaacaactgggccaagggccactacaccgagggcgccgagctcatcgactccgtcctcgacgtcgtccgcaaggaggccgagaattgcgactgcctccaaggtttccaggtgtgccactcgctgggcggcggcacgggctccggcatgggcaccctgctgatctccaagatcagggaggagtacccggacaggatgatgctcaccttctccgtgttcccgtcgcccaaggtgtcggacaccgtggtggagccctacaacgccacgctctcggtccaccagctcgtggagaacgccgacgagtgcatggtgctcgacaacgaggcgctctatgacatctgcttccgcaccctcaagctgacgactcccagctttggtgatctgaaccacttgattagtgccaccatgagcggtgtcacctgctgcctgcgcttcccagggcagctgaactccgacctccgcaagctcgccgtcaacctgatccccttcccgcggctccacttcttcatggtgggcttcgcgccgctcacctcacgcggctcgcagcagtaccgcgccctcactgtccctgagctcacccagcagatgtgggacgccaagaacatgatgtgcgccgccgacccgcgccacggccgctacctgacggcctcggccatgttccgcggcaagatgagcaccaaggaggtggacgagcagatgatcaacgtgcagaacaagaactcgtcctacttcgtggagtggatccccaacaacgtcaagtcgagcgtgtgtgacatcccgccgcgcggcctctccatggcgtctacgttcgtcggcaactccacctccatccaggagatgttccgccgcgtcagcgagcagttcacggccatgttcaggaggaaggcgttcttgcactggtacacgggcgagggcatggacgagatggagttcaccgaggcggagagcaacatgaacgacctcgtctccgagtaccagcagtatcaggacgccaccgccgacgaggccgagtacgaggaagaagaggacgcgatacaggagtagagactgtctgggcaatggtacctcgtatcccctgcccatcgttaccctaatatgtttgcctgaacatcatcgcagttgcatcaccatagctacctccgcaccttaaaatttgatgcttgtttgtatgctatcgcgtgtatcaggagtgcgtactggttccgtatgctaaagtcttggctattgatgttctgtttgcttgcttacaagttactgtgctgagcgaaacattgcaactccgattgaaagagtgatgggatttttttttttttggactggaagatttttataggatttcgttcagttcctttgagaatctttcagaattcttttgttctaaaaatgagactttgcggaacttcgactgaaatagtgaaatgtatggaagcactattcaatct

SEQ ID NO: 67335 - DNA, 1854 bp, Oryza sativa
  Clone ID: PAT_MRT4530_68202C.1
cctctctccatcgatcgatcgcaaaccacctcccaagaacaaccaagaaagagatcggatcaccgatcggcgcgcggcgagcgatcgatcgaggtgcaagcgatcgaagatgagggagatcctgcacatccagggcgggcagtgcggcaaccagatcggcgccaagttctgggaggtgatctgcggcgagcacggcgtcgaccccacggggacgtacaccggcacgtcgccgcagcagctcgagcggatcaacgtctacttcaacgaggcgagcggcggccgccacgtcccgcgcgccgtgctcatggacctcgagccgggcaccatggactcgctccgctccggccccatcggcggcatcttccgccccgacaacttcgtcttcggccagtccggcgccggcaacaactgggccaagggccactacaccgagggcgccgagctcatcgactccgtcctcgacgtcgtccgcaaggaggccgagaactgcgactgcctccaagacaacagagtaatacgccaacttggcagcattgataatgagcaatctggattccaggtgtgccactcgctgggaggaggcacggggtcgggcatgggcacgctgctcatctccaagatcagggaggagtacccggaccgcatgatgctgaccttctccgtgttcccgtcgcccaaggtgtcggacaccgtggtggagccctacaacgcgacgctgtccgtgcaccagctcgtcgagaacgccgacgagtgcatggtcctcgacaacgaggccctctacgacatctgcttccgcaccctcaagctcaccaacccatcatttggtgacctgaaccacctgatatcggcgacgatgagcggggtgacgtgctgcctgcggttcccggggcagctgaactcggacctgaggaaagctgcggtgaaacctgatcccgttcccgcggctgcacttcttcatggtggggttcgcgccgctgacgtcgcgcgggtcgcagcagtacagggcgctgacggtgccggagctgacgcagcagatgtgggacgccaagaacatgatgtgcgccgccgacccgcgccacggccgctacctcacggcgtccgccatgttccggggcaggatgagcaccaaggaggtggacgagcagatgatcaacgtgcagaacaagaactcgtcctacttcgtggagtggatccccaacaacgtcaagtccagcgtctgcgacatcccccccgtcggcctctccatggcgtccaccttcgtcggcaactccacctccatccaggagatgttccgccgcgtcagcgagcagttcaccgccatgttccgccgcaaggccttcctccactggtacaccagcgagggaatggacgagatggagttcaccgaggccgagagcaacatgaacgacctcgtcgccgagtaccagcagtaccaggacgccaccgccgaggacgactacgacgaggacgacgacgccgccgccgccgacgaggcctgatcgatcgatcgatcgatccctcccgctttgcctctctggctctctgctacgctacgctacatatatttcgatcggtacaaacacacaatgtgccgttgccgtgtctgctgctactgctgctgcttgtgtactgtgcgctactacttgttgcatgccttcgttcgttgtcatcgttgttctctgtctaaatttgtttattcatgtacatgaaccgtggtttactcttttctatctctgtatatgttaggaaatgttatctacttcattttcatgggactaaactctactgtgttcatcatgcatctcaatgtgcagtttttttattaaaaaaaaaaaaaaaaaaaaaaaaaaaaaa

SEQ ID NO: 67336 - DNA, 1853 bp, Oryza sativa
  unsure (1)..(1853): unsure at all n locations
  Clone ID: PAT_MRT4530_68203C.1
acgaggcccatttgcacacccacccccccctcttcactcctctcctcttcggccgctgccccgctactcgcttctccgaggcaccaaccggcagccatgagggagatcctgcacatccagggcgggcagtgtggcaaccagatcggctccaagttctgggaggtggtctgcgacgagcacggcatcgaccccaccggccgctacgtcggcacctccgacctccagctcgagcgcgtcaacgtctactacaatgaggcctcctgcggccgcttcgtgccccgcgccgtgctcatggacctcgagccgggtaccatggacagcgtccgcaccggcccctatggccagatcttccgccccgacaacttcgtcttcggccagtccggcgccggcaacaactgggccaaggggcactacaccgagggcgcggagctcatcgactctgtgctcgatgtcgtcaggaaggaggctgagaactgcgactgcctccaaggtttccaagtttgccattcccttggaggaggcactggatctggaatgggcacactcctgatctccaagatcagagaggagtaccctgaccggatgatgctcacattttctgtcttcccttcaccaaaggtctcagacacagttgttgagccttacaatgcaactctctctgtccatcagttggtggagaatgctgatgagtgcatggttcttgacaatgaggcactttatgacatctgcttccgcaccctcaagctgaccactcctagctttggcgacctgaaccacttgatcagtgctacaatgagtggagttacttgctgccttcgcttccctggtcaattgaactctgacctccgcaagctggccgtgaacttgatccctttccctcgcctgcacttcttcatggtgggctttgcgccactcacctcgcgtggctcgcagcagtatcgcgccctcactgtccctgagctcacccagcaaatgtgggacgccaagaacatgatgtgtgccgctgacccgcgccatggccgctacctcacggcctccgccatgttccgtggcaagatgagcaccaaggaggtggacgagcagatgatcaacgtccagaacaagaactcgtcctacttcgtcgagtggatccccaacaacgtgaagtccagcgtgtgcgacatcccgccgcgcggcctctccatggcgtccaccttcatcggcaactccacctccatccaggagatgttccgccgcgtgagcgagcagttcaccgccatgttcaggaggaaggccttcttgcattggtacaccggcgagggcatggacgagatggagttcaccgaggccgagagcaacatgaacgaccttgtctccgagtaccagcagtaccaggatgccaccgccgacgaggagggcgactacgaggacgaagaggagcaggtccccgaagacgagtaatctcgccggagtttctcctgggatcccatcttgagtgtcgcctgttgtgtcctaccgtttgggcaatctttattattgtttcggtatgatgatgcttaattggttatgtgcttttgggtaatgtagtagtagtacaatgctgtgtggtccgtagcgccgctgatgctactgccactttaatccgtttcacctaccagaccatgtttggattcgtatgctatcgcatatgtttggggagtgtattggattcttgtactggttttgattgctcccgttgctgtctcttgtcttgctgcatcgatgagaatcttgctgctgctttgttgctgtctgcccgtctgctgttgagtggtgctaccactgtggtgaatgtntcaaaacanacctgcaaaaaaaaaaaaaaaaaaaaaaaa

SEQ ID NO: 67337 - DNA, 1137 bp, Oryza sativa
  Clone ID: PAT_MRT4530_68204C.1
atggtggttgcgggagttggagggcggcgggaggatggcgtggatgacggtgaggagggtgtggacgaagtagtacgggaggtcagcgatggaggtggagttgcggccaaggagacgtggggggacagcaagcaccgtcttgcgtacctcgccgagacgacggtgatcttcaaggacatcgtgcagatgcgggacgagcagtggtggcgcgcactcacctccggctacgtcacacagtgggaggccatgcacccgcagaagagcggttctgcaccacccccggctgtaaggcttacctcgtcgtgtccggcggtgggcactacccctgcagaggaggcggcgacggtgctcaagtggcccaaggtggtgtgcaaggagaggcggttcaagatcttcgaccttgccgtcggcgcgctctccggcccatcccactccgaggtgcccgtcctccaggccgtctactctagcatgcgtggtatcatccggatgcacaacccgagcgtcatcatcaccgttgccaacgtcgacgccaagatcaaggacgccttccgcatggccgccgactccgccatcaaccacatcgccttcgtcctcctcccccgcaactccatctccaaggttctctggatggccaccctccaccccacctctctgcccaactggaacaggatgcggatctcggggaacatcatcacgcagaaccgtgccaagtcgctgcggcggctgctggcgtcgctgcggaacacgtactacgtcggcgacgaggtgccgatcagcttcaacatggacagccgcgtcgacgcggcgacgctgaacaccgtcaactccttcgactggccgcacggcggcaagacgctacggcagagaatcatccagggcgggctgatccgcacgcagcaggcgggcggccagcagctccgcccccctcgctggctgacgcctttttccctctccgttaccatccaaggcagccacgcgtggctggccgccacatttcctctgcgcgccgaggatggaggctatgggggacagagcgggggacaacgggagcggcttggtcctcctccacgcagaagtgtgggcaaggcgtcgacaatagtgaaggggcatagatggtggtgtgggtctgcacggtag

SEQ ID NO: 67338 - DNA, 462 bp, Oryza sativa
  Clone ID: PAT_MRT4530_68205C.1
atggcggctgactcagcgtggaacccacgtgggccccatatgtcaggatgccacgtcggccagcctctcccttcctttcctgtcccctcctttcgtctcgacttgttaggatgcaacgtcatcagcagggcggccggcggtggggagggggttgccagggtgagaggtccgacggccggcgggcgatgcggcggcggcaacgtggcggctgagacacgagagaaggggaaggcagcggaccagcgttgtggcggagaggcggcagcaggcgtgcgagtgtcgtggcggagagggcggaggcggccgaaggcgacggcgtgggcgagcgtggaggcacgcgacggcgaggctgccgctccgcccgtcgcctcttctctctcaggtttctcctcgtctgggtgggcaggaggcgaggtccggctgccggagccgttccagctgccggcgcccttgcccagctag

SEQ ID NO: 67339 - DNA, 998 bp, Oryza sativa
  Clone ID: PAT_MRT4530_68206C.1
atggcggctgactcagcgtggaacccacgtgggccccatatgtcaggatgccacgtcggccagcctctcccttcctttcctgtcccctcctttcgtctcgacttgttaggatgcaacgtcatcagcagggcggccggcggtggggagggggttgccagggtgagaggtccgacggccggcgggcgatgcggcggcggcaacgtggcggctgagacacgagagaaggggaaggcagcggaccagcgttgtggcggagaggcggcagcaggcgtgcgagtgtcgtggcggagagggcggaggcggccgaaggcgacggcgtgggcgagcgtggaggcacgcgacggcgaggctgccgctccgcccgtcgcctcttctctctcaggtttctcctcgtctgggtgggcaggtcggccggcgggttgggaaggaagggaaggggttggggtgatggcttgctggagctgcttcggctgcagccggtcgatcgcagcaggaggcgaggtccggctgccggagccgttccagctgccggcgcccttgcccagctagccgcaaggaggatgattctctaagggcacaatatgcataggcgagctcgaggttgcaagtattaccaaattccagagtatatggagctgctcaggagctacattctatgagccgcaagaaatccctgatggtttccactgccttgggcactatgcccaacagaatgaccgacctttacagggatttcttcttgtggcaagggaagcggctagctgccaatcgatcaatctcaagcctgctcttgagaaaccattagattacacccttgtttggactagtactgacttgaatgatgatgacaatagtgattgtggttgcttctggtcaccatcaccaccggatggttatgaagctctcggctatgtggttactagaggaccgaagaagccctcattagatgcagttcgatgtgtgcggggtgacctcactgatgaatgtgaaaactttaa

SEQ ID NO: 67340 - DNA, 371 bp, Oryza sativa
  Clone ID: PAT_MRT4530_68207C.1
cgggaccaaaattttggtttccttataggggcaatccccatttactaaagagttccttatggatgtaaaaaaagctttggtttttgtgatgaatgggaaactttcttttccattttttttcccaggtcaaatttttggtttgggggttcccgggaggatttctttttttaaaaaaaaagttttggaagatttttttaacctcagcctagcgggttctcccccgttagctggaccctgcctccccccgcggtcaaaactctccctctccagcccctctggctgggccagaagcctcgtctcctttagctgattcaagtgattcagtcaaaatgaaagtaatctcacagaaaattggattatctaaaacctcg

SEQ ID NO: 67341 - DNA, 341 bp, Oryza sativa
  unsure (1)..(341): unsure at all n locations
  Clone ID: PAT_MRT4530_68208C.1
cagcgaaatcccagagctgatcctgcagatccattctcttgtagatggcatggaaggaggcttaagaggcataggaggaggattacaaggcctgcactccctacgagcattctctatttggggttgccccactttcctctcctcctactactcgacctccttgtcttgtttccccgntccatcctcccttcaaaagatgtatctgagtgatgtgagagcatggagactctgctccctctaaacctcactctctaccagataaccattggaatgatggactagtgggaggctngctctctgtcgacatggcactacagccttncatcaaataccncaaatct

SEQ ID NO: 67342 - DNA, 498 bp, Oryza sativa
  Clone ID: PAT_MRT4530_68209C.1
atggcgacggtgttccggcggtcgacagcgacggcggaggggcggacgaggacggcgacgcgacggcgaccacgacggcgaccttcccgagcagcgatgacgactggagcgacggcggcgcacggctggagctgcggcggcgacggcagcgcgaggtctcacggggctagggctctacgggcgacggcggacgaagacgagggtggcggcggtgttggggcaggggtgtcgcagctcattgggttagtgcagcaggaagtgttaagccagagccgctggagatgggaggaggaaggcagggtgcgggcgaggcgcaaaggagatgctcattggtggggagaatgggaggaactcagatcaagtggtcatggaaggaaaggctgggtgctgattgacttgatggtgaacacatggtggaggatgtgcgtccccaacaactccagcctccagtttttcaacattgtcgatcacgccaagacagccattgatgcaaggtaa

SEQ ID NO: 67343 - DNA, 261 bp, Oryza sativa
  Clone ID: PAT_MRT4530_6820C.1
atgtgggcacggcgcgtggacgcggagtgggcgcgggagacgcggacggcgacgtgggagcggcggttggagctccagcttcaacggctggaggtgggagacgaccgacagggatcagccttctcggcgaggtcaacggttttggcacggttgataaccagaggagacgtggtgctacgattgcggggctcaagagtaaaaaaggaaaccatatgtggggacaaccaatttaggctcggtgtcccaaatatccactcgtga

SEQ ID NO: 67344 - DNA, 1167 bp, Oryza sativa
  Clone ID: PAT_MRT4530_68210C.1
atggcgagcagaaggggcatccccgagctcccatgggagcttcaagacgccatactcgcgcggctgccgctccgcgacgccgcccgctccagcgtcctttccagcagctggggccggtcctggcgccacctcggcgagctcgacttcgtctcgtcgccgccgccggcggcggcgtcgttgccggtggcggcggcgacggcggtggcgtgcgacaaggcggcgatcgacgccatcctgctgcaccagcacccgggccccgtgcagcgcgtccgcctgagggtcaccgacgagctcctccccggcgtgcccgcctggatggcgtccctctccgagaaggggatccagtcgctggacctcaccgtgcgcgccatgtaccggccgccgccgcaccccatgcaccgctccatcttcgcctgccgcgcgctcaggcgcctctccctcggccgcttcgccctgccggccgcgccggagcacttcgccgggttcccggccctcgcgacgctctccctcaccggcaccgcgttccgcaatgcccgcgacctggaggcgctcgtcgctatgtccccgaggctggaggagctcaggatgtgctgcatcgccgtggacgtggactgccgtgaacatggcggcgacgggcgccgcaaggtgaggatggtgtcgtccagcctccggttccttcggatcgacgggatggggaacgtcgagttcgtgggcgcgcgcttgccgcgcgtgtcgcaggcagacttcgcgcaggcctcctatccaagcgccccaaaccttctgtccgccatggttacctcgcttgagacgctcgactattactattatgccttgccgttatcgccgactaaattattgaagggactaccatcttcctacaaaaatttgaagagattgaaagttcatctagacttcaaccatgctccaccgattctgtctacgcttaacttcctaaggaccgctccaaacctgactcaacttgtgattcaggactttactgatgactcatatgcacaatctccataccctttggcagcggagctatatggaaatttatgccccagccttctttttctccaaatgtcttatgtcacttcgcagaacaacgaaatggatttcattcgtctgatcttatcgaaagcgagaatgcttcaggatcctcgttga

SEQ ID NO: 67345 - DNA, 2770 bp, Oryza sativa
  Clone ID: PAT_MRT4530_68211C.1
gctcgccttcccttcgctgaagcatccgtccatctgttcgccttgtcctcttgcaatcattcactctccttgctcgattctataaacacgcagtgaggctccgatccgccatcggcgcaccgccattgctgaggaacacagctttctcttttttttcccacgatgtggcgccatggcgagagatgtgtgatccttgctgtcgccgccgtggctcttgtcgcggcggcgacggcaacggcggcggcggccgttgggggtgagaggaggacgtacatcgtgcacatgtcgcggtcggcgaagccgaacgatttcgtggagcacggcgagtggtacgcggcgtcgctgcagtcggtgtccgacgcggccaccgtgctgtacacctacgacaccatcgtccatggctactcggcgcggctgacgcgcgcggaggccgaggcgctggagtcgcagcctggggtgctcctcgtcaacccggaggtgcggtacgagctgcacacgacgcggacgccggagttcctggggctggaccgcacggacgcgctgttcccgcagtcgaacaccggcagcgacgtcatcgtcggggtgctcgataccggcgtgtggccggagaggccgagctacgacgacgccgggctcggccccgtgccggcgggatggaaggggaagtgcgaggaaggcaacgacttcaacgcctccgcctgcaacaagaagctcatcggcgcgaggttcttcttgaccgggtacgaggcggcgaagggccccgtcgacacgtccaaggagtcgcggtcgccgagggacaacgacgggcacggcacgcacacctccagcacggcggcgggatccgccgtgcgcggcgccgacctgctcgggtacgccgccgggacggccaagggcatggcgccgcacgcgcgcgtcgcgacgtacaaggtttgctgggtcggcgggtgcttcagctccgacatcctcaaggccatggaggtggcggtgaacgacggcgtggacgtgctctcgctctcgctcggcggcggcaccgcggactactaccgcgacagcatcgctgtgggcgcttacagcgccatggaaagggggatcttcgtgtcctgctcggcggggaacgccgggccaggctcggccacgctgtcgaacggcgcgccatggatcaccaccgtcggggccgggacactcgaccgcgacttccccgcccacgtcgtcctcggcaacggcaagaactactccggcgtctccctttacagcggcaaacagctgcccaccacgccggtcccattcatctatgccgggaacgcgtcgaacagcagcatgggcgcgctctgcatgtccggcagcctaatcccggagaaggtcgccggcaagatcgtcctctgcgaccgtggcaccaatgccagggtccagaagggcttcgtcgtcaaggacgccggtggcgccggcatggtgctcgcgaacaccgccgcgaacggcgaggagctcgtcgctgacgcgcacgtcctcccgggcgccggtgtcgggcagaaggccggcgacaccatgagagcgtacgcattgtccgatccgaacccgacggcctccatagtgttcgccggaacacaggttggcatccagccatctcccgtcgtggccgcgttctcgtccagggggccgaacaccgtgacgcccggcatcctcaagccggacctgatcgcgcccggcgtcaacatccttgcggcgtggtccggatccgtcggcccctcggggctcgccggcgacagccgccgcgtcggattcaacatcatctccgggacgtccatgtcgtgcccgcacgtgagcgggctggcggcgttgctccgcgcggcgcaccaggactggagcccggcggcgatccgctcggcgctgatgaccacgtcgtacaacggctaccccaacggcaacggcatcctcgacgtggccaccggcctcccggcgacgccgctcgacgtcggcgccggccacgtcgaccccagcaaggcggtggatccgggcctcgtctacgacatcgccgccgccgactacgtcgacttcctctgcgccatcagctacgggccgatgcagatcgccgcgctcaccaagcacacgacggacgcctgcagcggcaaccgcacgtacgcggtgaccgcgctcaactacccgtcgttctcggtcacgttcccggcgaccggcggcacggagaagcacacccgcacggtgaccaacgtcggccagcccggaacatacaaggtgacagccagcgccgccgcaggcagcacgccggtcacggtgtccgtcgagccgtcgacgctgacgttcaccaagtccggcgagaagcagagctacacggtgagcttcgcggcggccgcgatgccgtccggcacgaacgggttcggccgcctcgtctggtccagcgaccaccacgtcgtctccagcccgatcgccgtgacatggacctgaccgtcgtcgcgctcatagctagatcttctggatgatccatcaatggcgggcgcaagagattatccgggataattagcgtgtaatctgccgattagtgtggcgaagtatcgtttcaatttcttagctccagccttgtttagttgttcgaactgtggcatagcgaggaagtgagtgagtgagtgagagtgatccgagttagctccactcctaacaggagtccaaaaaaattaaaggataatgaatggaccagcaaagcaagtggttgctcgtagtaaaaaaaaaaaaaaaaaaaaaatttatatctgcatttcgt

SEQ ID NO: 67346 - DNA, 252 bp, Oryza sativa
  Clone ID: PAT_MRT4530_68212C.1
gtcgccgagtaaggccatacacaggggttggctctctatggagggctggccatggctcaaccaacgtggccatcaatggttctcctaatgccgctgtcaatggctcgatgaaagtggggacttgtggatcttttcatgggatcagtctggctaaaggcagaaatatgtctgctctagtgaagacccttaagcgaatgatacccaaggcttgatccctttgaacaggatctgcaaggtttgccctctcatgaa

SEQ ID NO: 67347 - DNA, 1678 bp, Oryza sativa
  Clone ID: PAT_MRT4530_68213C.1
cccgcgtccggttccctcttctccgccgagtccagccccggcgcgctcactctcgccgcctcgctcttccccgacgcgccctccccggccttccagggctctttcacccagctcctcgtcggcgccatgggctaccccgccgcctccgcccccgctccgccctcaccgttcccggtgccgcacggactcagccccaccgcgttcctcgggggctcccccggcctcttctccccgacggggaactttgaaatgtcccatcaacaagccttggcacaagtaacagcagaagcagtccattctccgtacagtatgattaatcaatcagatttctcactcccgttctcgtcgacaacgacttcagtgttggcatcacaacatgtcaactcttctgccaatgtgtcatcaccacgagaaataccaactctgccatcccacacagataatagcaacattgaatcaactgaggtttcacatggattccaaactactgccctcactgaggataaacctgctgatgatggctacaactggcggaagtatggccacaaggcagttaagggtggggagtatcccaggagctattataaatgtacccatttaagctgtccagttaagaagaaagtggagcgctcatctgacggacagattactccaatactttatagaggccagcataaccaccaacgaccaaccaaaaagagtccaaagatggtggcgctatacttaaatgaagcagatgtttcccgtgagaaggaagatgcatcaattagatcagaacagggctcccaagattattctggaaaattcaaggcatcaaatgatggtggtccttcatcatccaggaggggagataggggtgagcaaatatcgggctcaagtgatagcaagcatcaaggcgaggaagaagtgaaggttgagggtagagctactagtgatggaaatgcgaacaaaagacatgtgccagctccagctcaaagaatcattgtgcaaacaactagtgaggttgatctttcggatgatggctaccgatggcgcaagtatggtcaaaaagtactaaaagggaatcctcacccaaggagttactacaaatgcacgtaccaaggatgtgatgtgaagaagcatattgagagatcctcacaagacccaaaggctgtgataactacatatgaaggcaagcacagccatgacgtgccagcagccaggaacagtagccattcttccgctaatgccaacgtatcgtcttccagcaatttacctcccaagggacagggggcaacggtcgtcgtgcagagatggttcgcggaatgcatcttcagtttcttccttccagttaaaggagggggggggatggcaggaaatttgggtggggtttagcggggtaaattgttttttttttcagtccatttggggtgtgttgtttcccaagccccgttgggcggggggtctgggctttgtgggtgggttttggcatgggtttagttggggcttgggggttcgttgggtaggggggaatatgttcattttccttttggaattcgacccgtttcatgggaaaataaaatttatgccttccaaacaggcccttggcaaggggaaaccccgcatagcttccttcccaaaaaaaaaaaaaaaaaaaaaaaaaaaaaaaaaaaaaaaaaaaaaaaaaaaaaaaaaaaaa

SEQ ID NO: 67348 - DNA, 273 bp, Oryza sativa
  Clone ID: PAT_MRT4530_68214C.1
atgtgggaccaaggtccaagccaccaactccaaggagacgggagaggcaactgccacggtcaccgactcatcgtcccatgccatgttgaatccaatggcagccgtgtcatcgtcgtcctcctccgtcttcaagcagtggatcgagagctgtcgtcgctcgatatagggccagcgccacctgatcgagggctagtgtcgccgggagcgtcctctgctcttcatgagaggggaatgcccattgtggagaggctcggcatcctcggcgccgcctga

SEQ ID NO: 67349 - DNA, 534 bp, Oryza sativa
  Clone ID: PAT_MRT4530_68215C.1
atgcttatgatagttcataatccgttaacggtccaacaagaacgcatccttaagattagattgataggcgaagaccgatcgaaaaagcgatcggggaaaagctgcgtggggatgaacgatgatatcgaggccatgtcaaaatggtttgggcctgtttgccagatcataaggccgaatacggcccacatactgcccacgcagtttacagatcgtggcccaaatatttcatccaagttgggcttctttgcaggtgtcaaaattagtattcagatttcagaggggggatacatcgatcggttccgaacttccgaactcgtcaatttcgcacggccctacgcagattctgaagatgtaaaatcatcattggttacgatatccttcactccaagcagaattcccatgatgattagcaacagtgccatcatggagtgtgctgaacttatctgtcaaatgttcggcgatcgaactaaccaaccaacgcctgatcaagaacaaggcgacatggccacccgtggctcctgctgcctcgctacc

SEQ ID NO: 67350 - DNA, 298 bp, Oryza sativa
  unsure (1)..(298): unsure at all n locations
  Clone ID: PAT_MRT4530_68216C.1
ctgacctcgccggcgagccgcgccgttncannccgatgncagatccggcaagcccaggccggatctngcacctcgccgccactccnacgacgacgaccctgcggtgttctaccttngcggccggtcggcgcggctnaacttccccnaggagatctccttgctggcttcgccgtcanagggtggnggcgcaggcaagccccgcaagccgacggcggcacgtntccgnggcctcgntccggaagaaggccatcnaggtcggctcccatntngacgcgctccaaaccggcatgatggtcgc

SEQ ID NO: 67351 - DNA, 232 bp, Oryza sativa
  unsure (1)..(232): unsure at all n locations
  Clone ID: PAT_MRT4530_68217C.1
nnnnnnnnnnnnnnagccaganccaaannnccacaaacnananaggggcancaggaannanaaaaagagaacccgnaancgannncgcangananncgaggacacccaagccaaacngacganaacgangaccaacgcgaagaccnacnacaacaccaggngcnggcccnaaaanganaacnngcgcccgcgagaanncnaaggcagaagcagacgcagcagnggcaccgac

SEQ ID NO: 67352 - DNA, 408 bp, Oryza sativa
  Clone ID: PAT_MRT4530_68218C.1
aactaagaccagatcccaagaaacctaatttccatcacggaggttactaaataaacatcccaaatcacaaaatcctaaaaatattcacaaatgaaaccgtcaccatgccacgaaacgccatcgtgtccacataagggaggtgagggggcagccagggaggaaggggcgacggacagttgggcacctgctaccaccatgccgtgcagggaagcacacgcacccgttaccgccaagatgccgggaaagtggatctcgagacaccgatggctccacttttgttaggccaggggtccgacaggtaggagggcgggctcttcagtgaccccgcgcccgagtacaccaactgttggacgtaccaatacacacaaaggcccatgagcaatcgtcccatcctgatttacttgaact

SEQ ID NO: 67353 - DNA, 755 bp, Oryza sativa
  unsure (1)..(755): unsure at all n locations
  Clone ID: PAT_MRT4530_68219C.1
gtnngngctcggtacccttnnnnnnnnttnnnnnnntttntngnnttaaaattanggnangaatannaaccgncccccagntggtntaagggnaaaangggaggggangaggnnntcnagggaanttcnnnagacccctaanangccncatnnnagggnnaangnaacctgtttnnttnnnngaccaacnanntntggggnggnnngnanctccccngaaaaaaaaacctanngnccanaatncnnngaaccattnnggngntggngaccactnaggtngggncnagggtcnnggtncnanctnnnannatncgncnntnncngcctnaaaaggnttnnntgaagggnccctttcccaaagntttggaannananccttntnccnnttttccnnantttnngggctttttggnaaactttnntttngatnnntnnttctttgtcccccnggtgtgnatttcnncccnttnnntctttccttgtngtcccatttgnttttntgttttnatttcccttttnttttggntttnnntcnngttctttgggtnttttttnttncangtcntttnncctttnctnccttntntcnttnttttgtttggcctgnntttcnntntggtnntttttntttttttnnnttttcntntnntntttntttggtgttnttnttnnttnttgttttcttttttttnnntntttcttnttnccttntttttgttnttctttttntntcctnttttttntttttgttttgt

SEQ ID NO: 67354 - DNA, 1022 bp, Oryza sativa
  Clone ID: PAT_MRT4530_6821C.1
agtccttttcctccccttttcccttcttgggccggctcggcccaactcccccccctctctcctctccccgcggcccatcggctcctccccgcgcgcgcgccgctgacgggtgggcccgcccgccaccctcgctgacgggtgggtcccgcctgtcatcttcctcctcgcgccgcgccgccgcccgcccgtgccccccgtgattccctctcccgtttccccctcttttccctctctctctccctcggattcgtccgatttgaatcccgcaatcgtcgccggtgtcttcaatggagccgagatctccgcggccgtttcctccctctccggccgcgctctccccctctcggcgctatatatttgctccccgtgcctctctcctccgtttccgccgctcgccgctcgctctcgccgtcggattcgtgctagcgccgtcctcctctctctccgccgtcgccgccaaccttcggttcgccgccgtcgtcactccggacttcctcccgactcggcgccacctccatcggcttcgccgcgttgtcgtcgaccccgtccgctcctccgtttcgcccgtcgactgccggagcaccgtcgccctcgtcatcccgacccgcgccgccgtctctcgccgcttcggtcgtcgtttccgtcgtcgtcgttgtcccggggtgagccgaggaccgccgttcgctttcccccttccctcctctctctcgggcgccgctccgccgcgccggtggtcgccggcggtgaccatcggggcgcgggcgcgccgctcccgtcggccgcgccggcgaggccgccctcgggcgcgccctcgcggctgccaagtgggcccggccgtcagccgcccgcgcccgcgggtgcggctgacgcgcgggacccacggcgccgaccgccgccagccgcgtgcgcccggtccaccgtggaccgtggggctgacgcgtgggccccacttcccgtggacccggtccgcgcgccctgctcctcttggccatttgaactcggaattggaccgttcaagtctc

SEQ ID NO: 67355 - DNA, 1562 bp, Oryza sativa
  Clone ID: PAT_MRT4530_68220C.1
cccacgcgtccgcccacgcgtccggactcctcgaatcatccgaatcgaatcgcccacttctcctctcgatccgtcctccaaaccctagaagcgaagcagcgagacgccgccattagggttagggtttgctcctcctcctcttccctctacacgaggcggcgctggcgtccatggcgcacgtcggcggccgggggcgaaggtgacgccgaacctggcgatggacgaggaggggacgcgggtgctcaacatcaccgtgctccagcgcctcgaccccgccgtcgaggacatcctcatcaccgccgcccacgtcacgctctacgacttcgacaccgacctcaaccagtggagtcggaaagatgtggaggggtcgctcttcgttgtgaagaggaatgcgcagcccagattccagtttgttgtcatgaatcgtcgtaatacagataatttagttgaagatctcctgggagattttgaatatcagcttcaggttccctatataatgtatcgcaatgctgcacaagaagttattggcatttggttttataattcccaggaatgcgaagaagttgcaaatctttttagcaggatattgaatgcattctccaaagcaactccgaagccaaaggctccctctattaaaagtgaatttgaagagctggaagcagcacctactttggttgaaggtccactagagcctcaaacatcgaatatcataccagctactacccatgtccaggaggatccgttatctgcattcttcagtggagctataaatgttggcagtgcctctggtttatcagttgcaggacagttaaatcaatcttttggatctactcctttatcttcacatgcaccaacaagtatcagtatatctcagcctccagctgtgcaccatttgctcccttctcaaacttcatcagtaatatcccctgatgttcatggtggaactggtgctgtggtcaacaggtcagcaagccttctaaatccatcacttttttcaccattgacatcttctcagacaacaatggcccgcaccaatcctgtggcacctactgctccacctcaacatcctcgcatcactcagcaaccacacagtgctcccttgcttcaaccctttccgttacctacagcatcgccttctccaccatatgggactccgttacttcaaccatttccgccaccaaatccatccccatctcttgcatcagcaccggtgtacagcccagtactgtccagagaaaaagtcagggatgcattacttaggcttgttgagaatgatgatttcatcgatttagtctaccgggagattgtgaaaggatagaattaacatttcaagacagccttccttccaacaggcttggtttatgtttgactagggacttctatcatctttcgtcagctattcaagttgcaggacatgctactgtatatttgttggtgtaagtccataggtgcaccatcctccattggcggagtttgtatttaagtaccattttcatatctgtaaagacgaactgaatctatctgcacgttggaatattatgtgttgtatatccttggtgcag

SEQ ID NO: 67356 - DNA, 289 bp, Oryza sativa
  unsure (1)..(289): unsure at all n locations
  Clone ID: PAT_MRT4530_68221C.1
aaanaattaaattnttcntttaatttaaaccccccataatccaataaaccatttaattaggtaccttttatcaatcactccacaattaacaaaatttctttcccccactttatccaaaatttttaaacttttcattttccaattttttttttggcaactactaccttctttttaattcccggcccatcattctttggcccgaaaaacttttttcggtggcccccccttaatccttctaccgcgccaagttctccctcttttttttttacaaaccaaacacttttacccc

SEQ ID NO: 67357 - DNA, 336 bp, Oryza sativa
  Clone ID: PAT_MRT4530_68222C.1
atcttacccaaagatcaggtcggaggcggaggcaaacacgagaagaagatgccgcggcggcctagcggcggcggtgtatcatgtattaccacagcacctttttgtagacaagaagtaaactacgaaaactactttatttgtcgaattataaagcaccatcataattatgatgtcttatgaaaaactatatattattactatacctaccttagcttgtaatgaagtagagttcttctttaaaagaaaggttataacgagctatgttatgtatattaatgaataggatgatataatgattagcgatctatatgggactcattactcatggtgtatact

SEQ ID NO: 67358 - DNA, 2397 bp, Oryza sativa
  Clone ID: PAT_MRT4530_68223C.1
atgccgccggtgatcggccggaacggcgtggcgtacgaatcgccgtcggcgcagctgcccctcacccaggctgatatgctggacagccatcatctgcagcaagcactccagcagcaatacttcgatcagatcccggtgacgacgacggcggcggcggacagcggcgacaacatgctgcacggccgcgccgacgccggcgggctggttgacgagttcgagagcaagtcgtgcagcgagaacgtcgacggcgccggcgacggcctctccggcgacgaccaggaccccaaccagcggccgcgcaagaagcgttaccaccgccatacccagcaccagatccaagagatggaagctttcttcaaggagtgcccgcacccagacgacaagcagcgcaaggagctgagcagggagctgggtcttgaacctctgcagaaccagcacgagaggcacgagaacgcgcagctgcgggcggagaacgacaagctgcgcgcggagaacatgcgatacaaggaggccctgagcagcgcgtcgtgccccaactgcggcggccccgccgccctcggcgagatgtccttcgacgagcaccacctccgcgtcgagaacgcccgcctccgcgacgagatcgaccgcatctccggcatcgccgccaagcacgtcggcaagccccccatcgtctccttccccgtcctctcctccccgctcgccgtcgccgccgcccgctcccctctcgacctcgccggcgcctacggcgtcgtcacccccggcctcgacatgttcggcggcgccggcgacctcctccgcggcgtgcacccgctcgacgccgacaagcccatgatcgtggagctcgccgtcgccgccatggacgagctcgtccagatggcccagctcgacgagccgctctggtcgtcgtcgtcggagccggcggcggcgttgctcgatgaggaggagtacgcgcgcatgttcccgcgcggcctcggccccaagcagtacggcctcaagtcggaggcgtcccgccatggcgccgtcgtcatcatgacgcacagcaacctcgtcgagatcctcatggatgtgaatcaattcgcgacggtgttctcgagcatcgtgtcgagagcgtccacgcacgaggtgttgtccacaggcgtggcaggcaactacaatggtgcactgcaagtgatgtcaatggagtttcaagtgccgtcgccgctggtgccgacgagggagagctatttcgtcaggtactgcaagaacaactccgacgggacatgggccgtcgtcgatgtctctctcgacagcctccgccccagccctgtccagaaatgccggcgcaggccgtctggctgcctcatccaagaaatgcccaatggctactccaaggtgacatgggtggagcatgtggaggtggacgacagctcggtgcacaacatctacaagccattggtgaactccggcctcgcattcggcgcgaaacggtgggtcggcacgctggaccggcaatgcgagcgcctcgccagcgccatggccagcaacatccccaatggcgaccttggagtgattacaagcgtggaggggaggaagagcatgttgaagctggcggagaggatggtggcgagcttctgcggcggcgtgacggcgtcggtggcgcaccagtggacgacgctgtcgggcagcggggcggaggacgtgcgcgtcatgacgaggaagagcgtcgacgaccccggcaggccaccgggcatcgtgctcaacgccgccacctccttctggctccccgtccctcccgccgccgtcttcgacttcctccgcgacgagacctctcgcagcgaggtgcccaatttgccccccatccctagggaatttatccaatttgctgaccaaattttatacgtgatcaaattcattcctgacgagtttggatttccgcagtgggacattctgtccaacggcggcgccgtccaagaaatggctcacattgccaacggccgtgaccatggcaactctgtctcgcttcttcgtgtcaatagtgcaaattcaaaccagagcaacatgctgatcctgcaagagagctgcacggacgcgtcgggctcctacgtggtgtacgcgccggtggacatcgtggcgatgaacgtggtgctcaacggcggcgacccggactacgtggcgctgctgccgtcggggttcgccatccttcccgacgggccgtcggggaacgcgcaggccgccgtcggggagaacggctccggctccggcggggggtccctcctgacggtggcgttccagatcctcgtcgactccgtgccgacggcgaagctctcgctgggctccgtcgcgacggtgaacagcctcatcgcctgcacggtggagcgcatcaaggccgccgtctgcagggacagcaaccctcagtag

SEQ ID NO: 67359 - DNA, 192 bp, Oryza sativa
  Clone ID: PAT_MRT4530_68224C.1
ctccctagggcggcgccaaccatgttggcgccctcctcctgccacgtcggctcgcgtgtgccacggtggcaggatgacggtgccaaagaggctggcgccgtcccgttagacaatggcgccagctactctggcgccccaaaaagaactatttctgggataagtttttccagaggtctattaacaaaataagtt

SEQ ID NO: 67360 - DNA, 273 bp, Oryza sativa
  unsure (1)..(273): unsure at all n locations
  Clone ID: PAT_MRT4530_68225C.1
gcggacnggnanangacgccaaaggtctctcctagcctcgcctcgccttcttgcgccgcaagaagaaaagcagcagcaaagcaagccagccatggccgccgccgctgcntcctccgccgcctggaagaggtggatccgccccgaggtgtacccgntcttcctcgccaccgggtncgccgtctccatctgcntcggccagctcgtccgnaacatcaccggcaaccccgaagtnagggtnttgaaggagaagagngcggccggtgtgctggagaa

SEQ ID NO: 67361 - DNA, 2346 bp, Oryza sativa
  Clone ID: PAT_MRT4530_68226C.1
atggagaggagggagattttccaagttgctgatcttgcacacatattgagagggaaacctgtagatcatcttcaacagccaaacttgctggataatcaccagttccagcaagcgttccagcatcagcagcagcagcatcatctccttgaccagatcccggcgacgacggcggagagcggcgacaacatgatccgcagccgtgcgtccgaccctctcggcggcgacgagttcgagagcaagtccggcagcgagaacgtcgacggcgtctccgtcgacgaccaggaccccaaccagcggccgcgcaagaagcgctaccaccgccacacccagcatcagatccaggagatggaagcattcttcaaggaatgtccacacccagatgataagcagcgcaaggagctgagccgggagctcggcctggagcctctccaagtgaagttctggttccagaacaagcgcacccaaatgaagaaccagcatgagaggcacgagaactcgcagctgcggtcggataacgagaagctccgggccgagaacatgcggtacaaggaggccctgagcagcgcctcctgccccaactgcggcggccccgccgccctcggcgagatgtccttcgacgagcaccacctccgcatcgagaacgcccgcctccgcgaagagatcgataggatatcggcgatcgcggcgaagtacgtggggaagccaatggtgccgttcccggtgctgtcgaacccgatggcggcggcggcgtcgcgggcgccgctggacctccccgtggcgccgtacggcgtgccgggcgacatgttcggcggcggtggcgccggggagctgctgcgcggggtgcagtcggaggtcgacaagccgatgatcgtggagctcgccgtggcggcgatggaggagctggtccgcatggcgcagctggacgagccgctctggagcgtcgcgccgccgctcgacgccacggcggcggcgatggagacgctcagcgaggaggagtacgcgcgcatgttcccccgagggctcggccccaagcagtacgggctcaggtcggaggcgtcccgcgacagcgccgtcgtcatcatgacgcacgccaacctcgtcgagatcctcatggacgcgaatcagtacgcggcagtgttctcgaacatcgtgtcgagggccatcacgctggaggtgctgtccaccggcgtcgcggggaactacaacggtgcattgcaagtgatgtcagtggagtttcaggtgccatcgccactggtgccaacgagagagagctacttcgtgagatactgcaagcagaacgcagacgggacatgggccgtcgtcgacgtctcgctggacagcctccgccctagccccgtcctcaaatgtcgccgccgtccgtcaggctgcctcatccaagaaatgcccaatggctactccaaggtgacgtgggtggagcatgtggaggtggacgacaggtcggtgcacaacatctacaagctgctggtgaactccgggctggcgttcggcgcgcggcggtgggtcggcacgctggaccgccagtgcgagcgcctcgccagcgtcatggccagcaacatccccaccagcgacatcggcgtgattacgagctcggaggggaggaagagcatgctgaagctggcggagaggatggtggtgagcttctgcggcggcgtgacggcgtcggtggcgcatcagtggacgacgctgtccggcagcggcgccgaggacgtccgcgtcatgacgaggaagagcgtcgacgaccccgggaggccccccggcatcgtcctcaacgccgccacctccttctggctccccgtccctcccaagcgcgtcttcgacttcctccgcgacgaatcctctcgcagtgagtgggacatcctctccaatggcggtatcgttcaagaaatggcccacatcgccaatggccgggatcagggcaactgcgtctcacttcttcgcgtcaacagctcgaactcgaaccagagcaacatgctgatcctgcaggagagctgcacggacgcgtcggggtcgtacgtcatctacgcgccggtggacgtggttgcgatgaacgtcgtgctaaacggcggcgacccggactacgtcgcgctgctgccatcgggcttcgccatcctgcccgatgggccggcgcacgacggtggcgacggcgacggcggcgtcggcgtcggctccggcgggtcgctgctgacggtggcgttccagatactggtggactccgtcccgacggcgaagctctcgctggggtcggtggcgacggtgaacagcctcatcgcctgcacggtggagcgcatcaaggcggccgtctccggcgagagcaatccgcagtag

SEQ ID NO: 67362 - DNA, 4173 bp, Oryza sativa
  Clone ID: PAT_MRT4530_68227C.1
ggatccccgggctgcaggaattcggcacgagggagagagagagagaactagtccgagtttttttttttttttttttgcgcgggacgaggcccgacggctggagatatagagcgaactagtctggattttttttttttgtttttatatatggatgcaaaaagttgtccaaataatcaaactgtccatgagaatcacaaagagaggatacaagacagacttctgcaaatctccaaatgcatgcaaagtttaagcccaatctaatagacaaggagcaaattaagcacaaacatgatagactctttttgcaaactgaatttaaaggtactactatgcagtacacatatgcatgcattagtccagctgatgatgaaattaacaaatcttgcatcagaagaggagttctagagagagagtggcaacccggagagagaaagaggagtcaatacccgaaccaaccaaccaaccttgcaaagtgttgcttgcttccgaactaattaagtctgatgtagtaatgaccaacaagcaacaaccacaagtctacaaatcatcggaaatgtgataaaatccaaaaggggggacatgaatctctctattctcaactcctagctaagggacaggaacctgaagtctgaacaaacagacaacacatcacaacagtacagataaaaatgaggcttcatagccctttttaaacatggtaaaagaagccctaacatagagattcagaaaaacaacaaggtagcagcatccactcttcgatgcatttgatgaaaatcaaaaggtggaagtcaatgcccgaaccatccccccttgcatagtggtgacactatgtatcttcgcgaaaattttctcgcaaacgcgtcggtttcctcgcaaattcttcactagcaagggcaccacatggcaaggagagtttgaggtgcgttcttgactccctactgctgaatcaaactccaaaattttgctgctccttggaacattgttcgtgatcatatttggttgaagccggtgctactactgatcgttgctggcactgcagacggaggccttgatgggcgccaccgtgcaggctgatgcgctggacactgccggggatgaggctggtgagggtggcgacggagccgagcgacagcttggcggtcggcacggagtcgaccagtatgaggcccgccaccatcaggagccaccctccgcgaggggaacatgcggagggaatgaaggcccgacccaaccgcccttgcgtagtggtgacacattttttttgaaatttcccgaatttgcggaaaaactagcgaaaaatgatccaaactatatatgggcaccacatggcaaggacagtctgaggtgcgttcttgactttccactgatgaaagctccaaaattttgctgctcctgaaattgaaagcacaagaagcttttgtttgattcaatgacggagctactgaggattgctctccccgtagacggcggccttgatgcgctccaccgtgcaggcgatgaggctgttcaccgtcgccacggagcccagcgagagcttcgccgtcgggacggagtccaccagtatctggaacgccaccgtcaggagcgacccgccggagccggcgccgacgcccccgtcgccgtcgcccccgttccgcgccggcccgtcgggcaggatggcgaagcccgacggcagcagcgcgacgtagtccgggtcgccgccgttgagcaccacgttcatcgccaccacgtccaccggcgcgtacatcacgtaggaccccgacgcgtccgtgcagctctcttgcaggatcagcatgttgctctggttcgagttcgcactattgacgcgaagaagcgagacacagttgccctggtcccggccgttggcaatgtgagccatttcttggacgacaccgccgttggacagaatgtcccactcgctgcgagaggtctcgtcgcggaggaagtcgaagacgggggcgggagggacggggagccagaaggaggtggcggcgttgagcacgatgccgggtggcctgccggggtcgtcgacgctcttcctcgtcatgacgcgcacgtcctccgccccgctgcccgacagcgtcgtccactggtgcgccaccgacgccgtcacgccgccgcagaagctcgccaccatcctctccgccagcttcaacatgctcttcctcccctccacgcttgtaatcactccaaggtcgctgttggggatgttgctggccatggcgctggcgaggcgctcgcactgccggtccagcgtgccgacccaccgtttcgcgccgaatgcgaggccggagttcaccaatggcttgtagatgttgtgcaccgagctgtcgtccacctccacatgctccacccatgtcaccttggagtagccattgggcatttcttggatgaggcagccagacggcctgcgccggcatttctggacagggctggggcggaggctgtccagagagacatcgacgacggcccatgtcccgtcggagttgttcttgcagtacctcacgaagtagctctctctcgttggcaccagtggcgatggcacctgaaactccactgacatcacttgcaatgcaccgttgtagttccccgcgacgccggtggacaacacctcgtgcgtggacgctctcgacacgatgctcgagaacaccgtcgcgaattgattcacatccatgaggatctcgacgaggttgctgtgcgtcatgatgacgacggcgccgtggcgggacgcctccgacttgaggccgtactgcttggggccgaggccgcgggggaacatgcgcgcgtactcctcctcgtcgagcgtctccaacgccgccgccgcggcgtcgagctccgacgcgacgcaccagagcggctcgtcgagctgcgccatctggaccagctcctccatggccgcgacggcgagctccacgatcatcggcttgtcgacctccgactgcaccccgcgcagcagctcgccggcgccaccgccgccgaacatgtcgcccgggacgccgtacggcgccacggggaggtcgagcggcgcccgcgacgccgccgccgccatcgggttcgacagcaccgggaacggcaccatcggcttccccacgtacttcgccgcgatccccgagatgcggtcgatctcgtcgcggaggcgggcgttctcgacgcggaggtggtgctcgtcgaaggacatctcgccgagggcggcggggccgccgcagttggggcacgacgcgctgctcagggcctccttgtatcgcatgttctcggcgcggagcttctcgttatccgcccgcagctgcgcgttctcgtgcctctcgtgctggttcttcatctgggtgcgcttgttctgcaaccagaatttgccttgcaggggtcatgaacgcaagctcccaactaagctcctacccctgctagccatccaggtgcaaccactccttcatgaacctttcgacaagccgcaagctcctcctcccattcgcttgcatcttcttcttcaccaccagtacagctacacacacagaaatggctatagctagcttgcacgccacgtaacagcaacagtcagaagcagatctagggcaaggtcagcaccaagaactctgatgtgcttccaagaagcgtgtgatatcgcatgcgagaaaaccaccggtggacagctcgaaacgaagcgagatctctccagctagaagcagacgccgatcgccatgggaggaggaggaagaagcagaagaagaagaggggatttgggggaggaatgtgagatggggaggagcatatcagcctgggtgaggggcagctgcgccgacggcgattcgtacgccacgccgttccggccgatcaccggcggcatgcgccttgccggcgtcatgaacgaagccaggtaattaagcacgcaccctagctagctagccacctccaaccccttcttcttcttcctccagccaagcctctagctcctccacccattcgcttgcatcttcttcttcaccaccagtacagctacacacacagaaatggctatagctagcttgcacggccacgtaacagcaacagtcagaagcagatctagggcaaggtcagcaccaagaactctgatgtgcttccaagaagcgtgtgatatcgcatgcgagaaaaccaccggtggacagctcgaaacgaagcgagatctctcctcgtgccgaattc

SEQ ID NO: 67363 - DNA, 513 bp, Oryza sativa
  unsure (1)..(513): unsure at all n locations
  Clone ID: PAT_MRT4530_68228C.1
cttgtttttcttttcggggtcgccttccttggcnaggataccagaatatttggcgacctctccanaatctttgtgctgcttctgtccacaacctttccggcaatttattgagtctgtagtgaacttaaagtttgatgaagaaccaaactatgcaaagtgcatttctctttttgatggcgtgggtggtccaaacccagacataaggcccttcaacactgatggtgctcagaagcttatatatcaggttggtcaananngaggtcgcctaacgatggacgaagatgatgatgagctgccctttatgaagattcgaatgggcctgcctgccnctcactggattagtgtttataatgccagacggcctctgaagcatcggttcacttcaatgttgccgatggtcggtttgctcatctttttccggccgggggtgttgatgggttgttttttcgttcggtggcttcttgttcgtttctgtgggctttcctcctggctgctggccctgggttctcttct

SEQ ID NO: 67364 - DNA, 243 bp, Oryza sativa
  Clone ID: PAT_MRT4530_68229C.1
atggggcctctctccctcctattcttgacagcaatgaagtccatgatcgccctcttgccgtgttcgattgcaggagcagtgtgctcgattatcttaaacttcgacaaggacacgtgggtggcgcatcgcaagatggctgacgccagcgtaggacctacaggacgtcgagaagaatgcggattggagaggatagatgagagaagaggggagtcacttacaaacaggtccactctattttcttaa

SEQ ID NO: 67365 - DNA, 285 bp, Oryza sativa
  Clone ID: PAT_MRT4530_6822C.1
tcgttgcgaggagctcattccccttctccctgctgcgccgtcacgcctgtacaagatggatcactcccatgatatctatcctccttgtctccagtaatggaactgatagggtcaacgctgctttctggagacattaatcccgcagggttgtttgtcgcaagattaacggcagcactaggcacactgttggtttgatcggaaagagccgaaaggacgcttctgttggacactaggcgctttccatgtggggtattttgaccgttaggtaacccctcgtgcagggta

SEQ ID NO: 67366 - DNA, 292 bp, Oryza sativa
  Clone ID: PAT_MRT4530_68230C.1
gcacgaggcgttgatgctttagccttgctgaaatgtgctgtcatgacggggtgatctgacgagttgcaaggtccagagtcaacttcaatataaacttgacttgttggagacttggtaggaaatagtgttgtccaaaactcaggatctgagcccgtccagagttcttgggctgcgctcaggctcgcagtacgtactgagcaattgctatatactcctaatagttagggatctaaggagacatgcgttttcatgaactcaggtaataataaaataatagtaacattttctgttt

SEQ ID NO: 67367 - DNA, 375 bp, Oryza sativa
  unsure (1)..(375): unsure at all n locations
  Clone ID: PAT_MRT4530_68231C.1
ggttttactgaaaactgaaattttgaccgattcccatcagccctggccctgtccagtttcctcaaaaaatgacttgtanctttgaagaatgttgctgctgttacttgcacgtcccctgcgtgagtatgctgtatgcagaatacttgaaattattacaccatctgaaggtgaaggagaaatctgaaccttgacatacacaaaaggatactgctatacatccccagaatgtcagtagtaaactgctcagctgtggactactggatgtaaattgtagtctagcagttgcatatatctcctcctttttacctcctttattaaacaaagatcaaacggtctttagtgtgttaaaaaaaaaaaaaaaaaaaaaaaaaaaaa

SEQ ID NO: 67368 - DNA, 261 bp, Oryza sativa
  Clone ID: PAT_MRT4530_68232C.1
atgcgctgggcagctaagcttcaggtgctgaattatctcctgagagttcaagcaagctggatcaaccccaaggagctcacaaacaccccgaccagactggccaacagcgccaatgctatgggcctcatccagataagtgtctgtgtgtgcgtggttgaccaccagctatctgctctctcaggacctcttccaaatgagcaggggctgatagcagcaggctttccaacaaagcgtgcaaccaactcctccaactcagtgtga

SEQ ID NO: 67369 - DNA, 1483 bp, Oryza sativa
  Clone ID: PAT_MRT4530_68233C.1
ggaatggagggagtaataatcaagatatgatcttgataatcagaataattcggcagttcttaccccgttcatctgactaaacatcacatcaatacaaccaaaagaacggatacacagtgtgttccaccatcaatctcacaggagatgagacgaacaaagcaaaagctaataaaaaccatcctaaacaccacccttcttcaagccagagtctttgaagtcaggtcgggttcgcctgaatcccgccggcgccgccgtggaaccgtcgcctggccagcctctggcgagcccgcctcgccaccgccgagcacctggacgccaccagctccgccgcggcggggatcagccgcgtcccctcgaacaccacgctcctctggtactccaccacccacgtctcggcctccagcctcaccgccggcgagctccgcccaccgtagctccacgagctgccgttgctcgccctcaccgtcggccacaccctcccgtcggaccactcggtgatcttgccggagaggatggtgaggtgccgtgccgggagcgcgcgggggaggaggccggaggtgcggagtgggctcccccacacggtcacctcctccgccgccgacttgtacacggcgcagcgccagtagaacacgcgctgatcattctgctcgaattgccagacggaatcgtgcgagctgcagttggagatccccttctcgccgccgacgagctgcccgagcatccgctccagggcgcggagcttgtggctcaggccgcccggcgcgaggcgcgcctccgtggccagccgtgccacggcctccggcgagagcttggggccgaagcccctcgccgcgatctccgggacgaggccggagtccacccagaggaggaggaggaacccaagaaccgtggccgtgtagagggcccagtcatgcgatcccccgggggtcttcctcccggcgccgccaccgccgccgccggccgcctcctgctgctgccggggcctcctcgacttcgcggtggaccgcatcggcggcgtccacggctccgtgacggaggagccgtgcggcgtcgtgtcggcgccgccgaagagcgggcgcggagcgggcttcctgtccctggccgccgcggcgaaccacctccgcgcggaggcggcctccggcgggaggaggtccctggtggcgttgatgctggcgaggcacatctcgcacgcgcagttggcgtccttgcggcatcccgggtagtagcaccctcctcctcccgcaaccccatcccacggcacgactatggtgggcggcggcgtccgcgccgccgccgccgacacgctggggttggagttcgaggagcaggaggacgcggtggtggagcagcgcgtggcggtggtcggtggcgtggtggcggcgctcggcgctctcctcgccgccatctccctctcgtccatggcttggctggatggtttctcggagctgtgagttaatgcgaggcggcggcttggagaagaaga

SEQ ID NO: 67370 - DNA, 267 bp, Oryza sativa
  Clone ID: PAT_MRT4530_68234C.1
atggttaagggcatcgtcatcgataggcccttcttttccttccacaacgctcgttctccctttgcaatccttttcaccgccactcagggctccgtgccgaaagtggtcgggttgtggggagggcaaagggactacgagcaccacgtcactcagggcacaaatgtccttgccgtgagacaagttccttcgcaagggatggccaaagattatgtgaaggaacgtctccaatgtgggtatattgaagatcgtagagttataaagaaatga

SEQ ID NO: 67371 - DNA, 426 bp, Oryza sativa
  Clone ID: PAT_MRT4530_68235C.1
aaactagggtgggaaaaaagcgggggacccccccccggaggaaaaaaaagggtacaaaccctggcaaatttcccttttacagggcccaaaaaaagaccgtggatacccctaaaaaaaaggggcccccgccccaattttttgaaaggttaaggcaattgggggcaggtttttaggggccaacctaagggaatcacttttctagaggcttaacccgcgccccacaagggagcccgggtttttatttgtgccccagcaaaggttggcataaagagtcgggaaaccctttggctccccccacaaaaggggggcgggggggaggctttttttaaaaagagcccggggatattctttaagaggggggaggaggtaactcctttttccgctttggggaagaggggcccctctttgtggagagaaagcgcgccg

SEQ ID NO: 67372 - DNA, 591 bp, Oryza sativa
  unsure (1)..(591): unsure at all n locations
  Clone ID: PAT_MRT4530_68236C.1
ataaggagtgaggattgagctatctggttcctcctccttcatctcctgaatctctagagaaatggaggacaatctaccactcaatatctatgagcatcacgaaatcgccaagaaagcactgccaaaggtgatttacgattacatcaatagtggagcagaggatgagcacaccctaagaacttgttcgattaatcctaccaagaaggggattgagggggattggaggagaattccctccttcatggggatgaaacgaacaaggcctgagggagaatattgcattatatggaagaataagtttatgacctcacgttcttgtggatgtcagcaaggtagacatgtcaacaatcttactggggttccacccgccttcacccataattgtcgctccaatgtggagccncaaattagcacatccagaatgtnttaaaactaaaccttctttcaagtttgaaattagagtgattttatggttttttanaggtaccncaatttttttcagtgtaagtaatganaagtatcttcttaaggatgtcaaattggtgattaaaaaaaaaaaaaaaaaaaaaaaaaaaaaaaaaaaaaaaaaaa

SEQ ID NO: 67373 - DNA, 262 bp, Oryza sativa
  Clone ID: PAT_MRT4530_68237C.1
cataggtgtttgttagtttggtctcacatcgctggctgggagacccccacaaaaaaaatgaaatcgaggcagaaccaagtgcagttcagtgatcgtgtattatttctgactgctgagagatacctggccgtggtggtggcacatgccgctggactatggtgtgttgaatgttcctggtggtcttgggaatggcttttgaaagtgacatattgaattgttgatattcacatattatactgtgtaaaaaaaaaaaaaaaaaaaa

SEQ ID NO: 67374 - DNA, 249 bp, Oryza sativa
  Clone ID: PAT_MRT4530_68238C.1
atggatcggggtcaccgtggaactgccggccggcggctggggcggaggccgccgggacgggccggcggcagcggcgacgccggcgacgaggacgacgccggcttcatgcgaagctgcagtccgtacctgcatcgcagcgttggcgtccaggtggtgcgcggattcgacgcggagaaatccctaggattcggcaagggggaggaagcccgtgatgaggtgggcaacgagcgaaggaagcagaggcgatga

SEQ ID NO: 67375 - DNA, 211 bp, Oryza sativa
  Clone ID: PAT_MRT4530_68239C.1
atggaggcaggccggcagaaacaccagtcggcggcggcaaaggcaagccggtcggtgaagatgaggacgcccatgaacggtggtgtgaccaaccaaccgtataggcgaggacaccagtcggcggcgacggagacgcccaacaatgatggtgtgaccaaccaactgtgtaggcgggtagaccagtcggcggcgacggaggcaattggcgcgg

SEQ ID NO: 67376 - DNA, 657 bp, Oryza sativa
  Clone ID: PAT_MRT4530_6823C.1
atggatgtcccctacccaggagttgctagtgagggcggaacgtactgtgcgcgttgcccggagatgcggggcaccgcaaggaggaggtccgtaaaaaatactcacccttgctctctatacaaatatattatgacggagctcgtggctcctcaccgggaggccgcgcaggcccccctttgccagttcggccgggggcttagggtgagatctcaagctctcgctgtgtgtggaaagatcgcgtcccaggaaaaaacacgagacacggacgatgtatacaggttcgggccgctgggaagccccatacctgcctccactcccggcggagacaggtgcaacgtgggatcgtggctgcccgttgctgatgcgaccagtgtcagaccgacttctttaaggggtcggggtgcttcggccctcggggccggggcaaacgcaacccgaccccccctcgggggaaatcaggaggagggcggacacctcaccctcgggcccgacgtccccgaaggtgccaggccacgtgggcgattgcgtctgcctcaagcctctggtcatgatactcccggtcccatatcaccgacagtagcccccggcgttataccagagcaatttcccttcccaagggaagcggtcaggtgtgacgccacccctaaagcctggtga

SEQ ID NO: 67377 - DNA, 2514 bp, Oryza sativa
  Clone ID: PAT_MRT4530_68240C.1
tttgtctcatgcccctaggccctgtaatccccaaacatgagtagggtattacctcttatcgaaagggcctgaacctgctaaatcctttgtctccgcatccatctacttttaggcgctactgttgccaactagtgtcctcgcctgcacggttggttggtcacaccaccgttgttaggcatccacgtcttcaccgccggcctgcctttgccacagccgattggtgtcttcgcctacatgattggttggttaattaaaccacagttgttgggcgtccacgttttcaccgccggcctgcctccaccgccgccgactagtgtttccacctgcacggctggcctattatgccaccgttgttaggtgtctacgtcctcaccgccggcctgcctccgtcgccgccgactggtgtcctcgcggcgtcaacgacttcaccgtcggcccgccttcgtcaccgccgactagtgtcctcgcctatacggttggttggtcacaccaccgttcatgggcgtccacgtcttcaccgaccggccttcctccatcgccgccgattggtgcccttgcctatacggttggctggtcacaccaccgtccatgggcgtccacgtcttcaccgaccggcttgccttcgccgccgccgactggtgtctctgcctacacggctggcctattatgccgccgttggtgggcatcttcgctttcaccatcgaccgcttcgtcaccgccgactggtgtcttcattgttattgatggacgactttgttcccacattggccacctctgccatcaccaaggggaatattacgaagctaagtcatcattgattttttttatatgatattttccttttcctctgtttctcaagtactgtatttacatcagatactactcatcatatatgtttgttctgcaggatccagatccagatatgcatcaaagggattcatggctttaagcttatctcctatgttacagaaatggatcagttagaacatcaccaccggcttgccgttgtcgccgccgactggtgtcctcgcctatacggttgggtgatcacaccgccgttgttgggcgtcgttttcttcaccgaccggccacctcatccgccgtcgactggtgttttcgcctatacggttggttggtcacaccaccgttgttaggcgtctacgtcttcaccgactgagccttcgccgccgccgactggtgtctccgcctgcacggctggcctattatgccgccgtttgttgggcgtctacgtcttcaccgaccggcttgccttcgccgccgtcgatcggtgtctccgcctgcacggctggcctattatgccgccgttgttgagcgtctacgtcttcaccgaccggcttgccttcgccgccactgactggtgtctccgcctgcacggctggcctattatgccgccgttgttgggtgtctacgtcttcaccaaccgaccgcctcgtccgccgacgactggtgtttccgcctgcacggctggcctattatgccgccgttgctaggcgtctacgtcttcaccgaccggccgcctcgtcctccgctaactggtatttccgcctgcatggctagcctattatgccgccgttgttgggcgtctacctcttcaccgaccggtagcctcgtccgccgccgactagtatttccgcctacacggctggcctgttatgatgccaactgatgctatcttcttcacggctggctaccctccacggctgcgcgtcttcgttactattgatgggcatcatcatcatcaccagcttgccttcgccgccgccgattgccatcgccgactggtgtttctatcttcacgactatgcgtcttcgccaccggtttgcttatgttgccttcgactcgtgttcacttcatcatgactatgcaactttgtcatcatggtggagcgacttcatttttattatcttcggcaccggcaaactctattgccgctacttcgcaagttttgctacttcaccaaccatgacgtctacaagagcttcaacatctcggcatgcgtcaccaaatatgacaccgtgttattttattacaacaagtggtgttccaatcttcaatatttctactcggacatcttcgacatgcatcttcactcaagcaatgactactcgacgacaagaagctacaattctcgactctatgttaagttgtttcccaactaaccaaagggtcgggggctacacaaatacaagactctcaaaattcgacaagttttttcaccgactttcatcgccgacttgttatttcgttttcacggttggcctactacgcaactaccgatagaggatttcattgttatcatcggctgctacaccactattgactggatcactgacatcgtcatcttcatcaacatcctgtcaagcctcttcaacatagcccactctacttctattgatgggcaacttcgtcatcatatttgatcatctctattgctgccaatcgtcattaccatcggttgcatttgtcatcgtcgactatttcttgcattttca

SEQ ID NO: 67378 - DNA, 219 bp, Oryza sativa
  Clone ID: PAT_MRT4530_68241C.1
atggcgtcgagggcaaagcgaatggaagagccgaggctttcaacactcacaacgtcgtgcctgcgatcggctagggcgaaggctgtgtggaagttccggcattggccagcgctacgcaaagttacgacgcatatttcaatccaacaacctatcatcttaatgactttcttggatttaatgcgtgactctccattcttccacacaagattggctatatag

SEQ ID NO: 67379 - DNA, 3115 bp, Oryza sativa
  Clone ID: PAT_MRT4530_68242C.1
atgccacaacctgatcgtcagatcaatacacatccggcggattcaaatccccaaacaggagtctcgtgcgctaccccttttattattgccgaattcatgttttgacagttggcgcgccaggtaggtgtgcgtcgagtttttctgtcaagaagtgtgatggaatcatcctgagtcgccggcatcatcctcgctttgagtttcatggattaaatcaatctaccaaagagacatcggtcgagatgctgggcgaacacgccggaaggactatgctcaagttctattcatctcggattcaatttgattttcgacatcacctattcaagatcattaatcagatacatgccctgtcatcggaggttcgagctacaggtaaatgtacccgcgccaattgcctccgtcgccgccgactggtctacccgcctacacagttggttggtcacaccatcattgttgggcgtctaaatcttcaccgccggctggccttcgccgctgcggactggtgtttctgcctccacggttggcctattatgctgccgttgttgggcgtctatgacttcactaccggcctacctccgtcgccgccgactggtgtcctcgcctatacggttggttggtcacaccaccgttcatgggcgtcctcatcttcaccgaccggcttgcctttgccgccgccgactggtgtttctgcctgcactgttggcctattatgccgccgttgttgggcgtctacatcttcaccgccggcttgccttcgccgccgcggactggtgtttctacctccacggttggcctattatgccgccgttgttgggcgtctacgacttcactaccggcctgcctccatcgccgccgactggtgtcctcgcctatacggttggttggtcataccaccgttcatgggcgtcctcgtcttcaccgaccggcttgcctttgccaccgtcgactggtgtttctacctgcacggttggcctattatgccgccgttgttgggcgtctacatcttcaccgctggcttgccttcgccgccgtcgactggtgtctctgcctacgcagctggcctattatgccgtcgttattgggcatctacgacttcaccacggcctgcctccgtcgccgccgactggtgtcctcgcctatacggttggttggtcacaccaccgttcatgggcgtccatgtcttcaccgaccggcttgcctttgccgccgccgactggtgtctctgccaacacggctggcctattatgctaccgttgctagatgtctacgtcttcaccgaccggcttgcctttgccgctgccgactggtgtctctgccaacacggccggcctattatgccgtcgttggtgagcatcttcgctttcaccgtcgaccgccttcgtcgtcgccgactggtgtcttcattgttattgatggacgactttgttcccacattggccacctctgccatcaccaaggggaatattacaaagctaagtcatcattagttcgccgttgactagtgagtcgggggctacagatgttatatcttatttttcaataattttcataatatttatcttgattgcttgcgaaataatccaagtaacagtaaagtgcctatcgagttatgaagttctcaaatatgcaagtgcacaggataacaaaggatggcataatagggttccatacccgcccataaccgcgggcacggctattcgaatagttttactctgatcagaggtgtaccactgtacccacaagacacaaccccacatcatgtcaccatgtgcctcaataccaccacggtatctcggaaaggagttgtgacaatacccctcgcataacacaatccactgcagcgcaccttcctggatcataatcacccccttataaacaaggcatggactccccagcgacccccgtgggcttatctccgccacttctcagtctggtgccccgcaatgacgcgctcgcgcgggcggctgcggactgggccttccatttaaacaacaatttatatattttgaattttcagggtgtgacaattatatcgataatatttacattattacaaaggcgcttcaggcctggcaatcaaaaataaacagcagcggactagcgggcctacggctccatcttcacagaccgggccgcagctcgtgtagccttcatttgtcctagagatgtccatcgacccccgacttcgtccatctccatccgtgtacttttgtttataaccagactgggattcatggctttaagcttatctcctacaggaatagatcagtcagaacataaccatcggcttgccatcgtcgccgccgactggtgtcctcgcctatacggttgggtggccacaccgccgttgttgggcgtctttgtcttcaccgactggccgcctcgtccgccaccaactggtgttttcgcctatatggttggttggttacaccattgttgttgggcgtctacgtcttcaccgccggcttgccttcgccaccgccgattggtgtctccgcctgcacggctggcctattatgccgccgttgtaggacgtctacatcttctccaaccggccacctcgtatgacgccaactgttgctatcgtcttcacggctggccacgtcgcagccaccgcaaataggcgtcatcaccttcaacgcaagctgtctacgtctgctgccgactggtttcttcatttccatggctgtaagattctgccaatgttgattggccttatcgtcttcaccgccgctaccactactgatggacgtcatcgttttcattgctggccgccttgtctgacaccgactggcttgttcacttccacggttgcgcgccttcgtcatcattgactggcgtcatcgtcatgatcgttcttccatcgccaactggttatgccgccgccgacttggtggagcgacttcatcttcattatcttcggaaccggcaaaccctattgcctcaacttcgcaagttttgctacttcaccaaccacgacgtctacaagatcttcgacatctcggcacacacttccagattcgacgccgtgatattctactacaacaagtggttctccaattttcaagaattctagtcggacatcttcaacacgtatcttcactcaagtaaagtctac

SEQ ID NO: 67380 - DNA, 2955 bp, Oryza sativa
  Clone ID: PAT_MRT4530_68243C.1
ctgccgcagccagaagatcaccgcccgcaagagcacctccaggcccgagcttgttcgtcagtccctggcgtggacctgcttccgccattgcgaggtgtgcacaggtttcagacaaaagggaagctcgcgcctcggtatgtgggtcccttccgtatcatcgctcgacgcggagaagtcgcctaccagctggaccgctctcgctgacgggtggggcccacctgtcatcgccttcctcccgccgcgcccgccgccgcgcccgtgccctagcgccgccgccgccgcggattgcgccgcatcccgccgtccccgcgcgcattaaagagaggggaatcactccccgtgattccctctcccgtttcccccctcgccgtcggattcgtgctcgcgccgtgctccgctctctccgccatcgccgccgagctccgtttcgccgccgtcgtcgctccggtcctcctcccgactcggcgtcacctccatcgtcttcgccgagtggttgccgaccccgtccgccgctccgcttcgcccgccgaccgccggagcaccgtcgtcatcgtcatcccgagccgcgccgccgtcttcttccgctccgtccgccttgcctccgtcgccgccgactggtctacccgcctacacagttggttggtcacaccatcattgttgggcgtctaaatcttcaccgccggctggccttcgccgctgcggactggtgtttctgcctccacggttggcctattatgctgccgttgttgggcgtctatgacttcactaccggcctacctccgtcgccgccgactggtgtcctcgcctatacggttggttggtcacaccaccgttcatgggcgtcctcatcttcaccgaccggcttgcctttgccgccgccgactggtgtttctgcctgcactgttggcctattatgccgccgttgttgggcgtctacatcttcaccgccggcttgccttcgccgccgcggactggtgtttctacctccacggttggcctattatgccgccgttgttgggcgtctacgacttcactaccggcctgcctccatcgccgccgactggtgtcctcgcctatacggttggttggtcataccaccgttcatgggcgtcctcgtcttcaccgaccggcttgcctttgccaccgtcgactggtgtttctacctgcacggttggcctattatgccgccgttgttgggcgtctacatcttcaccgctggcttgccttcgccgccgtcgactggtgtctctgcctacgcagctggcctattatgccgtcgttattgggcatctacgacttcaccacggcctgcctccgtcgccgccgactggtgtcctcgcctatacggttggttggtcacaccaccgttcatgggcgtccatgtcttcaccgaccggcttgcctttgccgccgccgactggtgtctctgccaacacggctggcctattatgctaccgttgctagatgtctacgtcttcaccgaccggcttgcctttgccgctgccgactggtgtctctgccaacacggccggcctattatgccgtcgttggtgagcatcttcgctttcaccgtcgaccgccttcgtcgtcgccgactggtgtcttcattgttattgatggacgactttgttcccacattggccacctctgccatcaccaaggggaatattacacccgcccataaccgcgggcacggctattcgaatagttttactctgatcagaggtgtaccactggaacctctggaacgacagaagctacgcgaagcacacaagcaaagctacaagcctataaagaagcaataacaatacataaaaagaaagcacacggttctttagagggcgatcttgccgctgcgacgccggaggtggagacggcgacgtcggccggcgcactggcacggcgaaaggggctgccggagtgggtgccgacgagaccgagggagaggcggcgcgcataaaagggattcatggctttaagcttatctcctacaggaatagatcagtcagaacataaccatcggcttgccatcgtcgccgccgactggtgtcctcgcctatacggttgggtggccacaccgccgttgttgggcgtctttgtcttcaccgactggccgcctcgtccgccaccaactggtgttttcgcctatatggttggttggttacaccattgttgttgggcgtctacgtcttcaccgccggcttgccttcgccaccgccgattggtgtctccgcctgcacggctggcctattatgccgccgttgtaggacgtctacatcttctccaaccggccacctcgtatgacgccaactgttgctatcgtcttcacggctggccacgtcgcagccaccgcaaataggcgtcatcaccttcaacgcaagctgtctacgtctgctgccgactggtttcttcatttccatggctgtaagattctgccaatgttgattggccttatcgtcttcaccgccggtcatctcgtctgctgttgactagtgcccttgcctctacggttggtttatactgctaccactactgatggacgtcatcgttttcattgctggccgccttgtctgacaccgactggcttgttcacttccacggttgcgcgccttcgtcatcattgactggcgtcatcgtcatgatcgttcttccatcgccaactggttatgccgccgccgacttggtggagcgacttcatcttcattatcttcggaaccggcaaaccctattgcctcaacttcgcaagttttgctacttcaccaaccacgacgtctacaagatcttcgacatctcggcacacacttccagattcgacgccgtgatattctactacaacaagtggttctccaattttcaagaattctagtcggacatcttcaacacgtatcttcactcaagtaaagtctactcgacgacaagctacagttctcgactctatcacctctgatgagcaat

SEQ ID NO: 67381 - DNA, 174 bp, Oryza sativa
  Clone ID: PAT_MRT4530_68244C.1
atgggagtatgggactggcgccgggcagttaccggcacagaaaaaacaattttctgcgatgacgacgaggtggcgcgcgacggctgcagcggatccaacggaggccaccccacccgtagatccggctgcgcgacggtggcggcggccaccccctgtgcggatctggcggcgtga

SEQ ID NO: 67382 - DNA, 1347 bp, Oryza sativa
  Clone ID: PAT_MRT4530_68245C.1
atggcgctagggcaaggcagggtggcgcggcacgacggtcggcgggggctcggtcaccgcgacatgaacccgaggtgggggatcggtggcaatcgcgatgatgacggctgggaggacgccgcggcggcggcgtcggcgcagctcgcggcgctgtccccgcgggagctgcagctggtgctcgtctacttcgcgcaggagggccgcgacgcctactgcgcgctcgaggtgttcgactggctccgccgcgccaaccgcgtcgacggggagaccatggagctcatggccgccatcgcctgcgggtggatcgagcgcctcgtgggcggcggcggggacgtcgccgacgtcgccgcgctgcttgaaactctgcaagcgactctccgaagctgatctgattggaccggtgcgtcatatatctatacgtgcgcaagttcaaactatggatgatgcacatgctgtgagcctatctggctctgaagttacttatgctcatgtgaagctggagcttcaaatgcttttgagggctctggtgaaggagacgctagaagactctgactgggagggtgaagcagctggtacatatttacggttccttgtatatttttggctgaaaaggagctcgattcgagttgttcatcctcgtcggagctatttgttggacgagactacgagagtacatacagaatttgtaaatcttcagtgctgccatcaccggttggtggtgaaacgaggacaatagttggtgtagggtatcgtacacgagactgtcgatcaatgtacactttgcctttcggaccttctaattgtatagtcctggtatatatgggaaaagaaaagggaacaaatttaaatgataaaaaaaaagaaaaaaacgcttataaaggagaagttgctgccgtccgtcgattgctcgctggagtcgagtcaaccagtgctggaagaaggaagaagtctctgtcatggcttctacgaggctatgtcaaaggcggcttttatctggaggcctcggaaacactcatgaagatgcttgacatgggcttgtatccagagtacctagacagagcagctgtgctgaccgccctgcggagaaacatacaggaatctggcagcctggagtcctacatgaaactctgcaagcgactctccgaaactgatctgattggaccgtgcgtcatatatctatacctggagcttcaaatgcttttgagggctctggtgaaggagacgctagaagactctgactgggagggtgaagcagctgggtttttcatcttaaaaaagaatgaagcgtactgcttactgaagctgaacttggaggatgaagctgaacacacaccttccatcaggtga

SEQ ID NO: 67383 - DNA, 2127 bp, Oryza sativa
  Clone ID: PAT_MRT4530_68246C.1
atggcggcgggcccacgtgcagctgcacggcttgtcgtggaccgcgcgcacgggagggaagacggagggagggtgcggctgaccggattggcccggtcaaagccgaggtggcgccgacgtggcgcctacgtggcagccacgcgggccggcgggaggaggaagaaggggaggccgagatggacggcggacgacggcagtttcaccgggacaccatgcgacggcgagggcgacggggagcacatcagaacgacaaggaggacaagaaagagtgagccaacggctcagattcgccagagggcggccagcggcggcgaatcgcggcggcggcaaccggcagcgagcaaagggggaaacgacgacgagacgacgagggttcgattcgtcggagatggagcatctctaggactcagggaactcgttcccggggttggatggggcagagcggcgccgtggaagtccggcgatgagaggcggcctccgggagcgggtgctgacggtggcaagctcacagcgagtagcgccgacgcttgggcggtgtctaggcacattcgggaagggaaacaaggtggagtcaaggaaggaactcaaatgggaatcaggaacagtttctggggaactaaacatggtctaaatgtcatgaaaaatgacctcccaaatggtgttagagaacgaatcttcctgatattttccgtgacaatgaaaacacatgagagagctgccaatttggctcttgcaggtttgagcttggctccacttgtggttaaagtaaaccccaatgcgaatgttatactgacagcatgccttgccgtctatgtgggctgttaccgttctgttaagccaactccacccgctgagacaatgtccaaagaacatgctatgcggtttcctttggtgggaagtgctatgcttttgtccctcttccttctattcaagtttctctcaaaagatttggtcaatactgttctcactgcctactttttcattcttggcatcgctgctctctgtgcaacattgctgccttccataaaacgatttcttccaaaagaatggaacgataatgccattgtttggcgtgctccacttttccactcgctctcggtggagtttaccagatctcaagtcgttgcatcgatcccaggatttttcttttgcatatggtatgctgcgaagaagcattggctagcaaacaacgttctggggatttctttctgcattcagggaatcgagatgctatcacttggatcattcaaaactggtgctattctcttgagcggactctttttctatgatattttctgggtcttcttcactccagttatggtcagtgttgccaagtcatttgatgctccaataaagcttctatttcctacaggtgatgctgcacgcccgttctctatgcttggccttggtgacattgtaatacctggtatatttgtggcacttgcgctgcgttttgatgtctcaagaggaattaagaaccgctattttaatagtgcatttttgggttataccgtgggtctgactgtgacaataatagtgatgaactggttccaagctgcacagcctgctctgttgtacattgttcctggtgtgattggttttgttgctgttcactgtttgtggaatggtgaagtaaagccgctccttgagtacaacgagtccaaagcggaagaggaggaagcttgtgaagaagatacagatagcaagcaaaacaaaaagaaagagtagggctctaacaagtaacaatcataccttgaggactagaatattcagaaactttatgtaaggtcttcggcatctaagtaggctggatgacctttgggatacaagctcacttagaacttagaaatgattcacatgatagaatctttctggttttgagaattgtttggtctggtgagtagatgaggaatgcatcctaagtggtttagcaatactataaccggtacctcttgtttacacttatttatcctggtggttggaaggatctttcctgaattttggtatggtgaatagcgctctgtgatatctttcttggcacactgtcgtgtctgaaacgagggatctcgcagaaattcatgtgtgctgcactcttttcttgcaaaatacttgtgccattggattttt

SEQ ID NO: 67384 - DNA, 222 bp, Oryza sativa
  Clone ID: PAT_MRT4530_68247C.1
agaaaaaacctaattattcactttttaaaaagccagcaaaaccacagaaagcacactagctaacacactacacgccagtttgaagccccaaagcacccaaaacccatgctggaaattctcccttcacacgaacgactacaaacgcgacaaatgccatattgccggacttgctagcaatcatggcgaccaccaacccccagatctggtttatgctgtccttca

SEQ ID NO: 67385 - DNA, 213 bp, Oryza sativa
  Clone ID: PAT_MRT4530_68248C.1
atggagggtgtggccttgacagcgccttatcaccgggagaagagggcctttggtggcggcggtgtccagcgcagggtgtggagggagctggagcgtagggtgttgatccggacgacagatgctggtggaatgaggcggacatggcgcgacacctggggtgggactggaagtggcccacaactccgagttgggcatcatccccaactgctctag

SEQ ID NO: 67386 - DNA, 242 bp, Oryza sativa
  Clone ID: PAT_MRT4530_68249C.1
ccaacacattcccccacaagccaaccctcgctcaaagccagctaaagggggaaactagccaagggggaggagaagcaccaccaccaccagaaccaccacaagaaggacaacgagacgaccaccagagaagactcccacggggagggcgactacacgcacaagacggcgaccaccgaggaggacgaggccggcacaagacaagaaccagaggcccaagaacgaggacaagcacctcaagcaca

SEQ ID NO: 67387 - DNA, 1475 bp, Oryza sativa
  Clone ID: PAT_MRT4530_6824C.1
cccacgcgtccgagctttaatcaaaagaggactcttcggcacaagcccttaataaaattaaattggatcaggaaaatcgtgtacatacattgagaaaggaggttgaccattccatcaaaatggcagaattaattgagtataatttagaggatgtggatgctgcaattgtagctgtccgcgtttcccttgcaaatggaatgagttgggatgcccttgctcgcatgattaaagaagagaaaaaggctggaaacccagtagcaggtctaatcgataagcttagttttgaaagaaattgcatcactctacttctaagcaataatcttgatgacatggatgaggaggagaaaactgcacctgttgaaaaggtagaggttgacctatcactttctgcgcatgcaaatgccaggcggtggtatgaactaaagaaaaaacaggaaagcaaacaagagaagactgtcacagcacatgagaaagcattcaaagcagcagagaagaagacacgtcttcagcttgctcaggaaaaaactgtcgctgcaatcactcatatgcgcaaagttcactggtttgagaagttcaattggttcatcagcagtgaaaattacctgattattagtggccgcgatgctcaacaaaatgagttgattgtcaagcggtacatgtcgaaaggagatctctacgtgcatgctgagttacatggagcttccagtacaatcatcaagaatcacaaacctgataatcccattccaccattgacattaaaccaagcaggatctttcactgtttgccacagcaaagcatgggattcaaaaattgttaccagtgcttggtgggtgtatccttatcaagttagcaaaacagctcccactggcgagtacctaacagtgggtagttttatgatccgtggcaagaaaaattttctcccacctcacccccttgttatgggatttggtattctattccgtttggatgagagctccttggcatctcatctaaatgaaaggagggtcaggggtgaagacgaggaggcccttcctgatgttgagtctcagaagctggaaagtaatgctgaattggatggtgaacttgacagtgatagtgagactggcaaggagaaacatgatgatgaatcaagcttggataatatcaatgttaaaaaaattgacaatcccatcccttctaatgcaccttatgttaaggataatgctgattcatctgagcagctttctgaaatccgaactgtggtaaacagcactacttccacttccaagggacaaacaagtgatcgcactgtttcatcacaacttgaggatctgcttgataagaatcttggtcttgggccaactaaggtgttaggcagaagctctttgctcagcagtaattctgcaagcgtggcagatgacattgatgatcttgatacgaagaaaacatcagtaagagataaaccatacatatctaaagcagatagaagaaaactg

SEQ ID NO: 67388 - DNA, 705 bp, Oryza sativa
  unsure (1)..(705): unsure at all n locations
  Clone ID: PAT_MRT4530_68250C.1
ccggccgggagtgcctcaaatcccagcctttgcctcaaactctatctctagaacgtcccatcttcatcgcctacaattgcgccatcatattagtctattttgacccttggtatcaggtctactcagtctcatcgaatctatttgcatcaacacactttccacgcctctataacacgtctggatcagccccacgcaatgcctaaacgcatcctctgctcgtacggtgtcgacgttgatgcagttgctggatggctgggctcatacggaggcgaggactctcccagtgacatttctcgtggtctgtttgctggaactcatggaactcgtcgcatgctcaagttgttcgataaatacaatatcaaagcaacttggtttattcctggacatagccttgagacttttccagaagaatgtgctatggtacgcgatgcaggtcatgaaattggcctccatggctattcgcatgagaacccgtcagatatgacgctagagcaacagcgtgatgtcttggataaaacacataagatgctaactgaattctgtgggaaccgnctccgtggatggtctcccccgtggtgggagactagccgagnagggcgtcgatctaatgcttagctatggcatcgaatatgaccactcaatgtctcatgatgactggcacatgtattatttgcgacagggggatagttggaccaagattgacta

SEQ ID NO: 67389 - DNA, 200 bp, Oryza sativa
  Clone ID: PAT_MRT4530_68251C.1
gcaaacccctaactccataagggctgggtattattgactagctattattaccattgggatccatatctctaatccgccaccttattgacgcatactagcgaaagacagcgtgcgtagcctccatcggcggccgagtcaattgagagttgagacaactgctacacacgatggaccttgccgacgacattgagagttttttg

SEQ ID NO: 67390 - DNA, 332 bp, Oryza sativa
  Clone ID: PAT_MRT4530_68252C.1
acaagggggaaactgtttttgcttattattcaacttttaaactggggggtcactttggaaaggtgggtccaaacacaatgggtggtcaagaacacccaattcccttagaaaaactagcttagaagggcttattcactccacaaggtgttcctggtgcacacagggtaccaaagggttcttaagaagcccaatggttggtggttaagaaaacaacctgcttagggaagtgaccaaaagaatctggtgggttctcatggacaagattaggcctgggagagctttccaggaggggattttcttttcaccaatttttcccagggatcggggggttt

SEQ ID NO: 67391 - DNA, 322 bp, Oryza sativa
  Clone ID: PAT_MRT4530_68253C.1
atgcaaacaaacggcacttacactacacgtggaggtgtacggcggaggagaccacctgggaatgggatgtgtgggcaagtggcagtgccggcgaacccccacaagcgtatgaggcaggcggcgttggtggacgggcgggcgtcgccctcgcgtgtggaggagagcagtggcggcggatgggcggcgctgccgagaacgagggctgcgacggccggccccttcatgcgattggacgcgcagcgcagtatcacacaggcagatagcacaaacagcaagcaaagtaaatcactttcttaatgccatactaaaatacagtcagaca

SEQ ID NO: 67392 - DNA, 270 bp, Oryza sativa
  Clone ID: PAT_MRT4530_68254C.1
ccccaagacgggtgctttttttggggccccccctggggttggcggggtaataccatccaaaaaacgtgacccgaaaccgactttatttctaaactggaattatggggaaaccctttttaactttcccccctaccggggtaaccccccctttcacaaaaggcatttttccaggaggggaaacttttacgtttaaggataaaaaaaacccgggtcctggtaactgggccaatttttggggaaaatgactttgggggctttttgaggaacaaa

SEQ ID NO: 67393 - DNA, 338 bp, Oryza sativa
  Clone ID: PAT_MRT4530_68255C.1
gggggaggcaaggccaactggttgagtaagtaaatgacctctgcccagtgtccattaacagtctgtctgacttacttgaactttattatttacagggtttattaagattagattgtattcattcttatcaattaatcttaggtgaatatgttattttttagatttttagaatacttgatcgactttttttttttattcattcattgatctttttcttctctttttcaatatagattcttttttcttttatattttattttttgatttttctgttattactaaatttttctttttatattttattttattttttttttaattttatttaattttattta

SEQ ID NO: 67394 - DNA, 529 bp, Oryza sativa
  Clone ID: PAT_MRT4530_68256C.1
gcacgagggttctggtggtttttattaaatagaaattgggagggagttcatcttgtcattctctgggcaatcagttccacctgacttgatatcaggatatatcttgggattcctcatgctaagaactctattgaaattgtttgtttctagaagtttttaacactttactgtatttgtatcattctagagaatcagcagatgctgagtgggttggcggaaactgtcagattagtttctgaagtctcgcggtaagctaaatcatttgtttctataagtttttctacactagttcatttgtagaggcttgtttcagcctttgtcctaacatagtcctttgggtcagtctattatatttcagatgaaataattttaggtaatgtgggttatttttctaaaaaaaaagtttacagttttttattgctggtttctgctgtgtaagaatttgcaaagctggttgacggtcacttttatcagattctagtttacgcttaaccaaatgttcatttaacattgatctgctgaagcaaaa

SEQ ID NO: 67395 - DNA, 330 bp, Oryza sativa
  Clone ID: PAT_MRT4530_68257C.1
tgtttctttgggtgcactagtatggatcacggggtgtcctgcctacaactagtgatagaaagtgagcgccaccaacaccaggtgactgtggtcgactccatggtcgcccacagcatgacctgtaggcccatgaagggatggttgcctgttagccagaccatgctgaagcggtattaggcgaagaatgaccagacggagcttgagacatgctaccaggatgatcttgccgtcgacaaggaggctctggacctttatgctggtggcgccgacgtcatccacagcgatgaggctgctttgagagaaagtgtcccactgaccaaggtgtaccac

SEQ ID NO: 67396 - DNA, 953 bp, Oryza sativa
  Clone ID: PAT_MRT4530_68258C.1
gagaaccatttggattgaggcaaggtgatccattatcaccatatttgttgctctgtgctgaaggcttttctgctatattactgaaggcaaagaatgaagaaagagttggtggggttaaaatttgccaaggagcaccatgcatctctcacctgctgttgccgatgattctttaattgtgattcgtgcaaacgggaaggatgcaacacaattgcaaggaactccccaattatatgagctgccttcagggcaaatgataaataacgacgagtcggctgtaatttttagcaagaacactagggatcagaagagaagtgaggtgatgcaaatgttgcacataacaaaggaaacacaaaatgagaaatatctggggcttccaatgtagattagaaaatctagagctgaagctcttgagtatctaaaagataagactggcaaacaattcacaggtgaaggagattatgatcaaagctgcacaagctatccctatctacgccatggcatattttgatttaacaaagggcttatgtgaccagataagcactctcatttgtaggtattggtggatccagcaagagaaggagaaaaaacgcattggatcagttgggataatctgaaaaagtcaaagaagcaagatgggctgggtttcagagacatttatgctaggatccttaaagcaagatccaggctctgtgtgctaggatccttaaagcaaggtatttccctactgctgatatcctatctgcccatctgatcgggaatatgtcatacacatagcgaagtattgtaaaaggtgttgagctgctgaaagagggcattatttggagagttgggaatggctaaagcatcaatatttgcaatgatgatccatggttactaataagaggaattacgagaccagtcacacacctaagggacacaatttgatccggacattttctgtaatcctcaaatct

SEQ ID NO: 67397 - DNA, 814 bp, Oryza sativa
  Clone ID: PAT_MRT4530_68259C.1
aatacgacgaattaaatttgaaaatatactgttcatccaagtttttttttagaaatataccgtcgatctcgcacaaccattacgcgaaccatttggattgaggcaaggtgatccattatcaccatatttgttgctctgtgctgaaggctttctgctgtattactgaaggcagagaatgaaggaagaattggcagggttaaaatttgcccaggagcaccaagcatctctcacctgctgttgccgatgattctttaattctgattcgtgcaaatggggaggatgcaatgcaattgcaaggaattctccaattatatgagttgtcttcagggcgaatgatatgagtcagctgtaattttcaacaagaacactagggatcagaagagaagcgaggtgatgcaaacgttgcacataacaaagggaacacaaaatgagaaatatctggggcttccaatgtatattagaaaatctagagctgaagctcttgagtatctaaaagataagagtctggcaaagaattcacaggtgaaaggagattatgatcaaagctgctcaagctatccctatctacaccatggcatattttgatttgacaaaggtgaccagataagcactctcatttctaggtattggtggatccagcaagagaaggagaaaaaaaacgcattggatcagttgggataaactgaaaaaggcaaagaaacaagatggcctgggttttagagacatttatgctaagatccttgcaaaatttctaatcgacttgccgagtttggattggatgctagtgacagatcctaattcgccaatgtgcacc

SEQ ID NO: 67398 - DNA, 2018 bp, Oryza sativa
  Clone ID: PAT_MRT4530_6825C.1
atggataacactggtaacaaaggctatgggaatgatggatccgatgactcaagaacccaagccaatgggaatgagaaaagcatcaacgaaacctcacccgagctaatccaaattgtggttaaccaaaccaacatgttggcaacagcctttcaactattacagaatcggaacaacccagcaggggcaaccaacgttcaagtacctacagtccagcaacaatgcaagttatcagaatttctcaaaacggggcctccaacctttgccatggccgtcgatcctatggaagctagtgattggttgcgcacagtcgagaagaagctagggttgattcagtgcaccgaccaggagcgggttggcttcgcaactcatcagttggttgaaccggcttcagagtggtgggatagctacgaagcatcacggccagaaggacataccatcacctggaacgagttttcatctgtattcaagagatcacatgttcccgcaggaatgatcacactaagaaaacgagagttccgctacctgaagcaaggagatttgaccgtcacagagtacctgcacgagttctatcgtttggctcactatgcaccagaagatgtggaaacggatgaagacaaacaagagaagtttctccaggggttaaaagatgagcttgcagtgcaactacttctagaggattatgaagattttgagaaacttgtggacaaagccatgcaactcgaaagtgagcataatcggatgacgaactgcaagagaaggattgtcaacatcccagtatttccaggtggtaaccaaagacagcgcactgagccacttcagatcaccggatcttctgttgcgcatcaagagtttccgccccaagaagatggacgcaatgcagacaacaacactagcaatactaatgatgatgataccaccaacaaccatggttcttgccccattagtgaccactcgaataaagcgtgccatgtcagtagcattcaccaagatgtcaacgatagtatcaatgatggcacccaaaatgacaaccctagtaattgggactctgggaaggactccaatggtgatagcaataatggtaccactgatgccaatgttagcaaggattcccaaccaccaattccaactccaagtcaaaatgatcgtccccagatggacagctcagtaaagaagacgttgatttgttacaactgcaaagaaccaggtcatttctctagagattgtccacagccgaagcgtaacctgcgccatcactccggccattatgcaagaagaagacaggtcactcgccttgtggtcactggagcaaacgccgtacctgtttcactgaaaggcagcaagccaaaggacctcatcgtcaccagaagcatccacaactctcggagtgaagagtacctggtggacaaagttgacgccaaagatatgaattatgagaagttctggaactgaagtcccatcttcaagtgccacaatccagtcgaagtcagctagaggtgcaaccagggaaaagtcaggtgaagagaagattccatctataacaggagatcgagccaagcagtccagagtggagaagttttgctaggcaagtttgttatagaagacgcgacggaagaagtcagacaagaagagaagaccgcgcaacctatcttcttgctagccacctcgaatctcggggacgagattcttccctctccctcccgggctgcctctccctcctctcctcctgggccgcctccgggcccaagccgaggggcgccctcccgcccgtgccgcgcacgtgcgcgcgctgaccgcgcgcccgcgtggggcccacgtgccaggtcgtcttcctcctcccgcccggcctcctcctctctcctccgtgaaccctagccatttcctccctcaaatccgcgcgattcaaaccgggaattccaaaattgacgccaactccggccgctttccatggctgccggccgccatttccgccgccgttccccactcctcctgtgctcggctcgcttccccgggctgcagga

SEQ ID NO: 67399 - DNA, 297 bp, Oryza sativa
  Clone ID: PAT_MRT4530_68260C.1
atgtgggcatacggcatgacggcccatgtccaaccgcgccagtccctagttccctacgccgcccttcgacgctttgccgaacgaagcccaattcggtggcctagtttcatcccttcgcgctatccagcaccgcggctcgcgctcaagtcggcctgtgtggtgtgctcggctgctcgcgtcgcggtgtgtcgtgtgcgtgacgggggtgggggtgggtcgcgcccccgcatcacagcgtccgttcaaggcttcacgcacatgccgcgccccgtgattggttggtactcctatctctag

SEQ ID NO: 67400 - DNA, 322 bp, Oryza sativa
  unsure (1)..(322): unsure at all n locations
  Clone ID: PAT_MRT4530_68261C.1
nttttttttttttttattttgtttaccagttgaaacaccagcttggaaggttctatgaaacggactaaacaagccgcctataccctgcttgcacagagctttggatgcttcatataaaccatatggatcaagctgcggagaggcttattgggtttttgctatccacgaaggaggctttatgcttcaacatggggccattttttcggttgatccaaggtaccaaccaaattggtggttaaccggtgcgcacagcacagagaagctaccacgttttgcagaatcgggtcttcctcatgtttgcactttgtggagatcattggag

SEQ ID NO: 67401 - DNA, 792 bp, Oryza sativa
  Clone ID: PAT_MRT4530_68262C.1
atggtacggattcccaataaactgatgttgggtgatctaataactgaaggcaaaatgaacttggctaccagtacatgttacaagttcaatcttccacaagcaattgagaaaggttgcagccttggacaatcggaggtcattgagattaaactctgcttgcttcgcatcctccagtaagttatgttcagcatggatggtgactttggtccattgcttgagcttatcaagttacacagaatgtatgggcttttgttggtcatggacgttccttggacagttggagatcattgtgatgttggtgtaattgggcttactaagtgctctgacaatcttggtttgcagccccaagtaaagggcaagtgtacgaatttagccacaaaagcgacgccaacgaggatcgccatcgacggtgaccgctgctccatcgatccttcttcccccgtttgctactctcacttcacagccacaatcatgtcttccgcagtgttcgcatcaatgaggctgaatgcaacaaatcaaagctacttggcagtaacaaaagaaaacctagcagacacctccttctgccaccagattaagctcacagctgaattgaagagttacatcaaagagattgcagattgtctagaagaatcaaacaagttctatgtcgtgcgtatgaacagaacattcatggaacaggacagagtgtactttgcgactgagttttcaaagaaatacattgtgaacttggttcgaggcaagacagcaaacattagagtgcagattgcaggtcgaccctcaacaacttaa

SEQ ID NO: 67402 - DNA, 1965 bp, Oryza sativa
  Clone ID: PAT_MRT4530_68263C.1
atggtgaagagtgggcaggaggcggccccggggagcggcttccttccgccgccgccggcggcgccgcgagggccatggggtacaccaaggagcagctcctcgcgcgactccaggagctcaacattgaattctcgtgctacgatcacccggttgtgttgacggtggaggaacaggccaaacatgttgggcatttaggaggtgctttgagtaaaaatttgctactgaaggacaaagagcataggctgtacgttgtttctgcccttgctgggaccaaagttgacatgaaaattttatcacagcgtcttggtttgggaaaaggtagtctgcggatggctcctgcggcgcctttgcttgcagcccctcaggtaccctcagcgtcggccactccttctccaccacctactgagtctacaaccccgctgccgcgaccaccacgccgccgttccactacggcgccatgtcgtcgtgctcggccgtcagctcgccggagaccgccaactactacggcgccgaccacgacatggtggcgcgcgaggacgacgtggactacgccgcgctcgccgacatcgacgccttcttccagtcgcccaagtgcatggactactccatgatggacccatgcagcacgttcttctcgccggcgccggagtccctcgccgccgagtgggaggacgaagcctcgcatccgaacccgagaggccgagacaccctcgcgttcgccctactcgtctccttccttccttccgccgccgccgccgccgccgcgagggccatggggtacaccaaggagcagctcctcgcgcgactccaggagctcaacattgaattctcgtgctacgatcacccggttgtgttgacggtggaggaacaggccaaacatgttgggcatttaggaggtgctttgagtaaaaatttgctactgaaggacaaaaagcataggctgtacgttgtttctgcccttgctggcaccaaagttgacatgaaaattttatcacagcgtcttggtttgggaaaaggtggtctgcggatggctcctgaggaaaatttgcttgaagtgcttcaggtacccttaggctgtgttactccatttgcactacttaatgagtctgcaagtttttttcatggttatgctattgcctttttaactgattcatataactgtgtatttgcaagcagtgctgtctcactactactggaccaaggtttcaagtcaaaacagagctgctacttccatccactgacaaatgatgtgacaatcgctctcagctcaagcaatctggacaagtttctcatgtccattgggaggcaaccagcttatgtagacttagaggcttcaccagttgtaggcaaggataatcctcctgatctagcagattttgtaccatcaggtgtcccaaattctgcagaaccaattgagaaggtcacacctacaaatgttcctcgtcaaaatgatgtgcccaaagagaaaacatgtcttcctgaagtgaaggctaagcctaaagttcagaacaagggtgcagaaaagacgcagagcaagatacctacaaacggagctaatgttgagaaatttgtaaatgatgtatttgacatcatgtccccgttgttcctttctgaggtatcaaagaaactgaatgttaagcaggaagaactttcttctatatttgatggctttaaagaacaagccactattgatttggagagtgtaacgacgagtctgaagaatgcagcatacaccgctggatttgaggctggcttcgagactatgctcaattcaggtttaaaaggacaggcttctcggaagtaaattgtttcttttaatacaatggacataagtcgattcagtgaattttgtatgacatttagtgtaaaatcgatcaaattataaattatgctttcctttgaccaaaaaaaaaaaaaaaaaaaaaaaaatttttcaagaaggttgagagatcaaccttgtcagtt

SEQ ID NO: 67403 - DNA, 407 bp, Oryza sativa
  unsure (1)..(407): unsure at all n locations
  Clone ID: PAT_MRT4530_68264C.1
cacaggcaagcgggcaggaggaaaaaaggccacccaaaacccacggggagggggnaagcngncactaacnaanagagaaggaagagaacacagnganagaaaaacccggncaanagaaagaaaannnncgnccagnagaaagcccggnaaggnaagaanacagannacaacanngganccancnnanncngagggncacagannannnanagaccnncagaaccncnagccngccnggggcnngaggagnaaggggccgaagacannagnnggnaannagcngaaaaaannnaaacacaaannnagacggaccnanaaaaaaaaaaaaaaaaaaaaaaaaaaaaaaaaaaaaaaaaaaaaaaaaaaaaaaaaaaaaaaaaaaaaaaaaaaaaaaaaaaagggggggc

SEQ ID NO: 67404 - DNA, 1032 bp, Oryza sativa
  Clone ID: PAT_MRT4530_68265C.1
tgcggccgctacttcaccgggatgctgtgtgggccaggaggatcggcggcgccggcgctgaagcacaaggccctgcaggcagaggcgttgggaacggacaacgccatggctgacgtggccgtcgtcgggaacgccagccagctcgaccacccctgcatgccattttcactggaagtttacgtcgtgaacagggagagcaccaagaccgcgcggctgccgcgggacaggtacccgaagccgctcatcttccacgacggccgcctcgccttcctcccgaccccctccgccgcgctcgctttcttcctcttcctccccctcggcgtcatcctctccgtcatccgcatctccatcggcatcctgctcccctacaagatcagcttcggggccggcgccctcttcggcgtccgctaccgcacgtcgggcctccgcgccccggagcccggcgtcaagcgcaggggcgtcctgtacgtgtgcacgcaccggacgctggtcgacccgatcatgctcaccgccgcgctccagaagcccgtgccggccgtgacgtacagcctcagccggctgtccgaggtcatcgcgcccatcaagacggtgcggctgacgcgcgaccgcgagcgcgacgccgagacgatgtcgcggctgctggagcacggcgacctcgcggtctgccccgagggcaccacctgccgcgagccgtacctgctgcggttcagcccgctgttcgcggagctggccgacgacatggagcccgtggcgctggacgcgcaggtgacgacgctgtacggcacgacggcgagcggccacaagtggctggaccccgtggtgttcttcgccaacccgcagcccgcgtaccgggtggacttcctgggcgccgtgccgcgggagtggacccgcgccggtggcagggccggcgccgaggtggcgaactgggtgcagcggcgtctcggcgaggcgctcgggtacgagtgcaccgggctgactcgccgcgacaagtacatgatgctcgccggcaacgacggtgtggtcgccaagtag

SEQ ID NO: 67405 - DNA, 429 bp, Oryza sativa
  Clone ID: PAT_MRT4530_68266C.1
gttgtttgccatggaggtgcgacagcagggcaggtacgatcacatgtatactccattccaaacttataccttcactaggccatgcaaacttggataaaataagttaagtattggatcgatggaagttgcttctatctatactataaaaaaacccttgcagctgattcggtgtggattgttgtgccccttgaaggtacacttggcagccaccgtgtattgatccgatccatgtgtgaccctcttgatcccaggcactaaaaatttatagcggtgacttttttcggtggattaatttgttaaatcaaataccacatttattaaggtaaggtcaggaaggctgtggcttccacttgattggtactccataatagtgccaagtaaaatcagtctcactctgtagtggtagttgaatgaagttcagttccttac

SEQ ID NO: 67406 - DNA, 294 bp, Oryza sativa
  Clone ID: PAT_MRT4530_68267C.1
ctcagacgttcaagcacaacaggggagatgagttcggtgcattcactccaatccaatacaggagctcccaagacgtgtctaatgcggcagactcctcttaggtcggcttgcggataaagaataactcaataaataaattgccagcaatcgttttgctgctatgtactgtccagcctttcgactgatgatgacaaagcctctctctatccttacatcccgcttttcacagctgttgtaacagctgacaggtccgcaaagagggcccttccgaacagctgttcaaactgaatggca

SEQ ID NO: 67407 - DNA, 436 bp, Oryza sativa
  Clone ID: PAT_MRT4530_68268C.1
aattttattagtaaatctatacgatagtgcatgagtaccatagggatgaaaacagagcggatagtttccgtccgctccggataaaaacggatacggatatctttcggatcggataattctcggatagttcggatacgaatatggatattttctcccggatacgaatacggatatggtatcggggtttccgtcggatacggattataattcggatattcgaaaaattggtttccatattcgtgtccgatcatattcgattcttattcgttttcgagataatccgtattcgttttcgtatctggtaaaaaaaatgaaaatgaaaatgccatggttgggtcaactccattttgtgatcatcagtgtggctactggcgaggagcactttacgtatgcttctccgattgctttgtcatgaggtaccaactcgaatccaccc

SEQ ID NO: 67408 - DNA, 722 bp, Oryza sativa
  Clone ID: PAT_MRT4530_68269C.1
ccgggctgcaggattcggcacgaggattcctcctcgtcgtctccagctcgcggcggcggcggcggcgattggcttgtgctctctccggcgaccgcgcctccttccctccacggtgacctccttccggcgaagcactgcctctctcgtagtctcagttctcctcctacgttctactggacttgtgctgcgaggggagatctaccaatctgggcgtggattggtctgtttcttctggtgacaaaccttaagcttgctcggatttgttcggaacaataccatggaggtgagaccaatggttgctttgcgtgctgccctagttggtggggtagcagcatttgcgaagattggtgcggcgatgaaagctgcaggaggtgcgaaggttggtgcagcggctgcagcaatgacagctgcagcaacagctgctgtatctagcaaagacacaaacaaagataatccgaagactgaaacaaaatgatatgtgccttacttagtggagaaaccctgtatggaaatgcctctccagagcttaatatttttttttcctgaattgcacttccaccatcgctgaagagttgtataagctaattgcgacatctgaaatgatgtcattgtaaggatgtcataataagcaactagatgatcaactttcagcttacatgagaaagttatgatcatggtgttttttttaaaaaaaaacttgagaataaaaaaaaaaaaaaaaa

SEQ ID NO: 67409 - DNA, 3589 bp, Oryza sativa
  unsure (1)..(3589): unsure at all n locations
  Clone ID: PAT_MRT4530_6826C.1
atggacttggcggcgtcattactggtctaccgctgccatcgccgtgccctcctcggatgcatcctgtcgttcgccggcagcagcgcccacgttctctcccgcgtagacctcgtcaccgtcaatgccgtctatgccctcgtctgcgtcggattcggtgtacagtttgaggactcagtgacttcgaggcggttgtttgacgacaggagatgcccgatcatgaagggctctgtataagtgaattcatattttcttctttcaaggccagaacgctctggttcccctccaaacaaagcagcacctgacattgtccctcaagcacctgctgaagagaacccaactccaattagagaacatgttgatttttttagagcagctattaacattttgggaacagataatggtactaaggatgttagtctggcagatatatatcctaagcaagtaaataaaatggatattctttcactaggtctacctaaattaagcacagaattgtcagatgacgatataagagaaacagcttatgaggtccttcttgcctcactatttgtcagcggaaaaatactgttctccgaagagaagaaagaaaagaagcctaaattcttaaaaggtctaaggtctaaaacagaagtatcaaatccatctcctcagccagaaaatcattattcccaacttcttgatttgatccgtgtacaaatggaggcaaggcaaatgttctcgaagaattacttctcttcccaggatcgcgtgagtatggattgggtagttagtgtccctgatgggcctgttgaggtattgactatcattgaaagatacaacgcaaaattatgtgaagccccaaagaaattcaaccttaaaggcgagacctatcattggatccagagctatcatctcaactttagactatatgagaaattactttgcatcgtgttcgatattctcgaagatgggcagcttgtggaggaggctgatgaaatactggaaacagtaaagctgacctggactatattgggtatcacccagaaattgcatgacacactctttgcttgggtgcttttcaagaagtttgctgaaactggggaaattcttctacttaagcacacatgccttcaaacacagaagcttcgattacataatgatgctaaagaaatagagttgtatacaaacagctttgtttgttcagcggaagcctgtggcggaaacatggctctaagtttggttgacagtgctattcttaaaataaataagtggtgttttagacaattggagaattatcattcatactttaataaggttgacaactcaatctttgagggcatgctaaacttggtagttatttcagaaacaagccgcactgatgatgatgatgatgatgaaaaagccatgctcattgggaccccactagatgctacacaagaatctaagttgattcacattcttgttgtcagatccattcaagctgcatataagcatgagctatttttggaaaggatggataattcagaaagtttgaaagagatactggcagcaacaaataattttgagctttgtgtagctaagaagctttacttaatgaatgagggagctgttggttctttgctgtccaaatatttaaagccatacatgatcagtcaattttcttcacctctcattcttcaatggctgcatgttcaacatgagaatgtcttggagtggacaaaacgtaccattgagatagaggattgggagcctctatcagctcatgaaagacatgcaacatctgtggttgaagtattccggatagtggaggagaccattgaacagttctttaactcgagtcttcctctggatactgtccacttgcgaagtctacttattggaattactagtagccttcaagtctacttgcatcacatggaaaatcaacaaggtttaactatggacgttaaatctggcatcatttctcaacaggttaatcaggttagcaacctcctcgtaggcattgattccattgttcctagagctaccttgcttcccagtgctccagtcttgacacgttatgcagaatcagtgaacccatttgcaaaaaggaaactcattgtgcctacagttcctgaagagaaggtggctaataaattgaacaatttgacggttcctaaattatgtgcgaaactcaacactcttcaattcattagggatcagctcgataacatagaagaaggtatcaaacaatcttgggtctcagttcagtcagctgtgggattgctagactatttgtcttgcattgctagtggacgaactctcccaaaaaacttatcttctgaagaatcaatcgatgagttgtttacaatatttgatgatgtgcgaaggactgcattgtatattcatcattggaagagcaaaggaacaagggctgtattctgggatatgcgggactcgttacttttctccttgtaccgtgctagtgttgaaagtgcacgtatggagatgtttatccctactattgatcaagttcttgaccaggtatgtgatctgattgttgatgccctacgtgaccaagttgtgctgagagtatttcaagcatgcatggaagggcttatttggatcctactggatggaggcccatcccgagcatttttggagacagatgtggacttgatgcatcaagatcttgctatgatcaaggatctctttatagctgaaggccaaggtttaccattggatttagttgaaaaggaggctagactaactcatcaaatactagacctatttgtgttaaagaaagaaaagttctgcagtagccaactaaatgaaaatgattttcaggctgatacaatcattgacatgttaataaatcaatactatatggtggtgccaaatgggtgtagggatgaaaattatgacgatatttctacaaagaacgcaccatcaaaagcacctatgttttctgacatgctgaaaagtacttctttcaattggtcagaaacaggacagcagagttttagggttatgaagaagaaactgcaagatacctggcagtaattgatcccatgttcaaaaaggaaactcatggtgcctaccgttcctgaagagaaggcggatactaaattgagaaatgagacgcttccttctacttgtgcgcaactaaacagttgacatggcagtgggggacaaactctgcaccatgatgaaaaggtatagagcgacctatcactttctgcgcatgcaaatgccaagcgctggtatgaactaaagaaaaagcaggagagcaaacacgagaagactgtcacagcacatgagaaagcattcaaagcagcagagaagaagacacgtcttcagcttgctcaggaaaaaactgtcgctgcaatcactcatatgcgcaaagttcactggtttgagaagttcaattggttcatcagcagtgaaaattacctgattattagtgggcgcgatgctcaacaaaatgagttgattgtcaagcggtacatgtcgaaaggagatctctacgtgcatgctgagttacatggagcttccagtacantcatcaagaatcacaaacctgagtaatgcattccaccattgacattaaaccagccagagtctttcactg

SEQ ID NO: 67410 - DNA, 178 bp, Oryza sativa
  Clone ID: PAT_MRT4530_68270C.1
gaaagctggcacgcgtgcatgtgctggtacgctatagcagggtcgacctacgctttcggtctttcacaggatcaccaaatacatcttaatggtagcagctctaatgtattgcatgagagcttcagcacgatgagggtaatggataataacgacaacccaaaccttgcttatacataca

SEQ ID NO: 67411 - DNA, 1695 bp, Oryza sativa
  Clone ID: PAT_MRT4530_68271C.1
atgcagcccgacgccgccgccaccgcccaccccagcttgagcttctactccgccgccacgggcctctacagcagcctccaccctcccctacccctcccctccgacccctctctctccctcgtcccccacctcttctcccatctccccctccaccaccattccctcctcgtcgatgcccccaccgccgccaccctctcctgcgccgacttccgccgcctcgtctcctccctcgccgccggcctccgccgccgcctccacatcgccaggggatccctcgtcctgctcctcctccccaactctctcaccttccccgttgccttcctcgccgtcctcgccaccggcgccgtcgccaccaccatgaacccctccagcgcccccgccgagatcgccgcgcgcctgcgggacaccgccccctccctcgtgctcgcctccacccacaacgccgctaagcttccgcctctcgccgccccgctcgtcctcgtgcccgacaccttccagcagcaacatgatgatgatcagttcgacttcttcttccacgcgctgctcgagaccgaccccgaaacgccggtggagatgggggtgggggtggggcaggacgacgccgccgccgtcctctactcgtcggggacgagcgggcggagcaagggcgtggtggtgacgcaccgcaacctgatcgcaatggtggagctgttcgtgcggttcgaggcgtcgcagtacacgcggcctgctcgtgacaatgtctacctggcggcattgcccatgttccacgtctacggcctctccctcttcgccgtgggcctcctctcgctcggctgcacggttgtcgtgatgaggaggttcaacgtcgacgacgccgtcaaggccatccgcaagtacaaggtgacgcacctgccgctcgtgccgcccatcatgtcggcactgctcagggccaacccgcccttggaattggattccttgctgcaggtctccagcggcgctgctcccctcaaccacaccctcattcaccacttccttcacgccttcccccacgttgatttcattcaggggtatggcatgactgaatctactgccgtaggaactcgcggcttcaatacatgcaagcacaagaagtatgcctcagtaggtcttttagcccccaacatgcatgctaaaattgttcatctggaaagtggttcttgtctgcctccaggctcttatggggagttatggctccatggcccggctataatgaaagaattttgcttcgtcacaggttacttgaatgatgatgatgatgctttcactagaaaggatggctggttgaggactggtgatattgcttactttgattcagatgggtatttgttcatagtgggtcgcttgaaagacacaatcaagtacaaaggatttcagatagctccagctgacttggaagctgttctgatccggcaccctgaaattattgatgttgctgtgacatctgatgaagatgaagaagctggagagatacctgtagcttttgtggtgagaaaatctggaagcactctttcttgtacgcatgtcatggagtatgtggccaagcaggtggcgtcgtataagagagtgaggaaggtaatattcgtggaggcgatacctaagtcagctgctggcaaggttctgaggaggcttctcaaggactctcttgttgatgcttccagtggcagatccaggctatga

SEQ ID NO: 67412 - DNA, 3015 bp, Oryza sativa
  Clone ID: PAT_MRT4530_68272C.1
atggccccatccaactcttacgatgatgctatgaagcctgagaggttcaatggagccgcagcccggatgatgtactggctcactgctttggatttgttttcggtcatcactgaccaggagccgcagccaggcgagttctttcctggggctattccatatgctgatttttaccagaccaggaactttaattgtgtgggtagaattttgagcatgctttccgataaattctatgatatctacatgcatcatacctctgctcgtgtattgtgggaaactctagagaagaagtacagtgttccagatgctggaaaagatctgtacttggttgaaaaataccatgacttcaagatgaccaatggaaagtctatggtagagcaaacccaggaactccagcttctagtgggggagctcaaccatagtaagattgctctccctgacaagtttcaggtgggaatggtgattgcaaagctcccaccctcgtggagagattttgctactgctctcaaacatcgcagggaggaaatgactatggatgacctagttgcttccctggacgttgaagagaaagcccgtgcaaaggatgctccattggttaatgaagattataactctagagtgaatctcactgatacacatcagagaaggaacaagaagaacccaaaagagaacaacagtggcatgaagccaagaggaaagattgacaaaggcaacggcaagaaaaatggcaaaggtccgatgagttgcttcgagtgcggcaagcctggccactttgctaggaattgtcgttacaagaaaagaaatgagaaagtccagaaggacaagtctgatgatcagactgatgccaaggtcaatatggttattgacgaagctgaagttgcaagaacaaaagatgaagcttttgagcatttcaaaatttttaaagcagaggctgagaatcagcttgatttgaaaattaaaattttgaggtctgacagaggaggagaatacttatcaattgaattctctaagtttcatcaagaacatggaatcatccatgaaaccacccctccgtattcaccccaatcaaatggggtagttgaaaggaagaatcgtactctcactgatttagtgaatgcaatgctcagcaattcaggtcttccaaacaatatgtggggtgaagctctgtacacagcatgctttgtgctgaatcgtgttcctgcaaaaggaacagaagtaaatatacctgttgtcaagaagagaaagctcggacctaagaccgtcgattgcgtgttcataggatatgcacagaacagtccagcttatcgtttcctggtagttaaatctgaaactacagaagttcgtgaaaatactgtgatggaatcatgtgacgcgacctttttcgaagatacatttccactgaaggtaaaatctccaagttctgaacctatttctgttgaacctagaattagcattttgtcagatgattcccttaatttaaggaggagcaagagatcacgaactgagaaaatgtttggtgaagattttatcatataccttgtcaatgatgtgcccagtactctgtcagaagcatttgcatctgctgaagctgcatactggaaggaagcagtgcaaagtgagatggactctatcctctctaatgacacttgggaaatcacacacttgcctcaaggctgtagggccataggctgcaagtggattttcaaaaagaaactgaaacctgatggaactattgacaagttcaaagccaggttggtcgcaaaggggtacacacaaagacagggagaagattactttgatacattttctccagtggctcgcatgcctacaattcgtgctcttgtagcactggctgctgcatatggctataaaatccatcaaatggatgttaaaaccgccttcctcaacggagagttagaggaagaaatatacatgcagcaaccggatggtttcgtcattcctggacaagaagataaagtgtgtaaacttgagaagtccttgtatggactgaaacaggccccaatgcaatggcatgaaaaattcgacaaaacattgatctctgctggattcactgttaatgatgctgacaaatgtgtatattccaggtttgatggagatatagatttgggtgaagccaaagtaattctgaacattaaaattcaggaaaaggacaaaggttttgaactcaatcagtcacactatgtggagaagcttttgcatcgttttggtcattttaatagcaaatctgcagctactccctatgatccttgtttaaaattgcataaaaatcaaggtcatggtcttgaccaagtgaagtttgcacaaataattgggtctttaatgtatcttgcaaatactactcgtcctaacatttcatatgcagttagcaggctgagcaggtattcgagcaaacctgattcaaatcattggcatgctctagaatgtgttctaaggtatttgaaagggaccataaatcaaggtttgttttactctggtttcccagctgtgctggagggttatagtgatgcaaattggatcacttattctaatgaaatgaaatcaacgagtggttttgtttttactcttggtggagctgccatatcgtggaagtctgcaaaacagactatattaacacgatccaccatggaagcggaactagtagcattggagactgcttgttgcgaagctgaatggcttagggaactattgatggatattccaatagtagaaaaaccaattcctgcagtgctcttgtattgtgacaatcaagctgtgatagctaaagttacaagcaagaaagaaaacatgaaatcttctagacatgtgaagaggagactaaagtctgttagagacttgaggaatactggtgtagttacatttgactatatcaagacagaaaagaatttggctgatccattcacaaaaggattagcacgaaagccaatactagagttgtcgaaagggatggggctgaggcctgccaatgaattattgacagtggcaacccaacctgtttga

SEQ ID NO: 67413 - DNA, 204 bp, Oryza sativa
  Clone ID: PAT_MRT4530_68273C.1
agacagggttatattgggggaggcaaaaatcgccctcccccagggcggcaagggggccacctacaaatttccatgccccctctcgccgcccatttgcaggcggccccccgcacagtgtaaaatcgccctaacggagggcggcaagggggtcgcttgcaaatttcattgatggccgttgcccgagagcgaacggtcgtctgccac

SEQ ID NO: 67414 - DNA, 1150 bp, Oryza sativa
  Clone ID: PAT_MRT4530_68274C.1
ccggccgggataatctcctccgccgccgcacctcgcagagagagagacgccgccgccgtcgccgccgccggcgaccggagagaaagagagagaagagcaacgcccacggcttcgccgccgctgccggcgaccatgtcggtggatacggagcggagctcgacggagtcatcggcggcgtccgggctcgacttcgaggacaccgccctcaccctccgcctcccgggctcctcctcctcctcctcctcctcctcctcgtcatcctcctcctcctcgtcgccgtcggagcccgaccgcaagcgcgcctccgccaccgacgacgaccccgacaaccgcctcggctccaccgccaccgagtcccccccttcccccaagtacgcgctctctctctctctctctctctgacttgattttggcccatttgaggttgcagcctgacatggcgcgtcgcggcgggcgcagggcgcgggtggtcgggtggccgccggtgcgcgcgttccggaagaacgcgctcgcggcgttggcggcggcgtcctccagcaaggccaagttcgtgaaggtggccgtcgacggcgcgccgtacctgcgcaaggtggacctcgaggcgtaccggggctacgaccagctgctcgccgccctccaggacaagttcttctcccacttcaccatccgcaagctcgggaacgaggagatgaagctcgtcgacgcggtgagcggcaacgagtacgtgccgacgtacgaggacaaggacggcgactggatgctcgtcggagacgtcccctggaaaatgtttgtggagacctgccaacgtcttcgtctcatgaaaagctctgaagcagtcaatttagcaccaagatctgcttgatgagtcgcaaatctctgctcctgtctttgagaagcatgagaggaagccatctttgcttgctgaggtttttccatgtctgtgagagaaatgtgtacagtcatcgacttcgacttttggttccatcgtgctattgagtttcagaaaagaaatggtttttagcttgtagctttgttaccagtcagtagtctctccatatagatgagcgaagcggtgatgctttaaaatacacccatagattgttttctcgataaataaaattggtctcactcactgagcccctgttcttcg

SEQ ID NO: 67415 - DNA, 3090 bp, Oryza sativa
  Clone ID: PAT_MRT4530_68275C.1
atggccccatccaactcttacgatgatgctatgaagcctgagaggttcaatggagccgcagcccggatgatgtactggctcactgctttggatttgttttcggtcatcactgaccaggagccgcagccaggcgagttctttcctggggctattccatatgctgatttttaccagaccaggaactttaattgtgtgggtagaattttgagcatgctttccgataaattctatgatatctacatgcatcatacctctgctcgtgtattgtgggaaactctagagaagaagtacagtgttccagatgctggaaaagatctgtacttggttgaaaaataccatgacttcaagatgaccaatggaaagtctatggtagagcaaacccaggaactccagcttctagtgggggagctcaaccatagtaagattgctctccctgacaagtttcaggtgggaatggtgattgcaaagctcccaccctcgtggagagattttgctactgctctcaaacatcgcagggaggaaatgactatggatgacctagttgcttccctggacgttgaagagaaagcccgtgcaaaggatgctccattggttaatgaagattataactctagagtgaatctcactgatacacatcagagaaggaacaagaagaacccaaaagagaacaacagtggcatgaagccaagaggaaagattgacaaaggcaacggcaagaaaaatggcaaaggtccgatgagttgcttcgagtgcggcaagcctggccactttgctaggaattgtcgttacaagaaaagaaatgagaaagtccagaaggacaagtctgatgatcagactgatgccaaggtcaatatggttattgacgaagctgaagttgcaagaacaaaagatgaagcttttgagcatttcaaaatttttaaagcagaggctgagaatcagcttgatttgaaaattaaaattttgaggtctgacagaggaggagaatacttatcaattgaattctctaagtttcatcaagaacatggaatcatccatgaaaccacccctccgtattcaccccaatcaaatggggtagttgaaaggaagaatcgtactctcactgatttagtgaatgcaatgctcagcaattcaggtcttccaaacaatatgtggggtgaagctctgtacacagcatgctttgtgctgaatcgtgttcctgcaaaaggaacagaagttactccatatgaactatggaaaggcagaaaaccaaatctgaattttctgaaagtgtgggggtgccttgccaaggtaaatatacctgttgtcaagaagagaaagctcggacctaagaccgtcgattgcgtgttcataggatatgcacagaacagtccagcttatcgtttcctggtagttaaatctgaaactacagaagttcgtgaaaatactgtgatggaatcatgtgacgcgacctttttcgaagatacatttccactgaaggtaaaatctccaagttctgaacctatttctgttgaacctagaattagcattttgtcagatgattcccttaatttaaggaggagcaagagatcacgaactgagaaaatgtttggtgaagattttatcatataccttgtcaatgatgtgcccagtactctgtcagaagcatttgcatctgctgaagctgcatactggaaggaagcagtgcaaagtgagatggactctatcctctctaatgacacttgggaaatcacacacttgcctcaaggctgtagggccataggctgcaagtggattttcaaaaagaaactgaaacctgatggaactattgacaagttcaaagccaggttggtcgcaaaggggtacacacaaagacagggagaagattactttgatacattttctccagtggctcgcatgcctacaattcgtgctcttgtagcactggctgctgcatatggctataaaatccatcaaatggatgttaaaaccgccttcctcaacggagagttagaggaagaaatatacatgcagcaaccggatggtttcgtcattcctggacaagaagataaagtgtgtaaacttgagaagtccttgtatggactgaaacaggccccaatgcaatggcatgaaaaattcgacaaaacattgatctctgctggattcactgttaatgatgctgacaaatgtgtatattccaggtttgatggagatatagatttgggtgaagccaaagtaattctgaacattaaaattcaggaaaaggacaaaggttttgaactcaatcagtcacactatgtggagaagcttttgcatcgttttggtcattttaatagcaaatctgcagctactccctatgatccttgtttaaaattgcataaaaatcaaggtcatggtcttgaccaagtgaagtttgcacaaataattgggtctttaatgtatcttgcaaatactactcgtcctaacatttcatatgcagttagcaggctgagcaggtattcgagcaaacctgattcaaatcattggcatgctctagaatgtgttctaaggtatttgaaagggaccataaatcaaggtttgttttactctggtttcccagctgtgctggagggttatagtgatgcaaattggatcacttattctaatgaaatgaaatcaacgagtggttttgtttttactcttggtggagctgccatatcgtggaagtctgcaaaacagactatattaacacgatccaccatggaagcggaactagtagcattggagactgcttgttgcgaagctgaatggcttagggaactattgatggatattccaatagtagaaaaaccaattcctgcagtgctcttgtattgtgacaatcaagctgtgatagctaaagttacaagcaagaaagaaaacatgaaatcttctagacatgtgaagaggagactaaagtctgttagagacttgaggaatactggtgtagttacatttgactatatcaagacagaaaagaatttggctgatccattcacaaaaggattagcacgaaagccaatactagagttgtcgaaagggatggggctgaggcctgccaatgaattattgacagtggcaacccaacctgtttga

SEQ ID NO: 67416 - DNA, 1307 bp, Oryza sativa
  Clone ID: PAT_MRT4530_68276C.1
ctctgtccactgccctctcgccgcccacctcgccgtcgccgccgccgcgagggccaacgccggcgaagtccgcgagccgaagcatcacacagctgcgccagcgatgtcggtggagacggagcggagctccacggagtcgtccgccgcgtcggggctcgacttcgaggacaccgccctcaccctccgcctcccgggctccctcgccgccgccgccgcacctgaccccgaccgcaagcgctcctccccctcctcctccgacgccgccgacgccgcagacaactcctcccccctcgccgccgccgccgatgctccccctgctcccaaggcgagggtggtggtggggtggccgccggtgcgctcgttcagggaagacccggctggcgggcaagtgtcgggatggttcccgtgggacggcgtgccgtaacctgcgcaaggtggacctcgatggcctacttccggctacgaccagctcctccgcgcgctccaggacaagttcttctcccacttcaccatactcctacccctcgtctccttacgcaggaagttcgccggacgacgagaggaagctggtggacgcggtgaacgggacggagtacgtgccgacgtacgaggacaaggacggcgactggatgctcgtcggcgacgtcccctggaagatgtttgtggaaacttgccagcgccttcgtctcatgaaaagctcagaggctgtcaacttagcaccaagagccgctcaatgaggcattcccggtgcccatgaccgtgtggttggattgaaagaaagtggaagctttgccccgccgatgttcgcccatgtgtgatatgaacatgtacagttgtctcctactacttttggttccttgatgttgctgagttgagaaaaaggttgtagtttcgttactcgtctgtagtctctccatgctgaggtttttccatgttctgtgagagaaatgtgtacagtcatcgacttcgacttttggttccatcgtgctattgagtttcagaaaagaaatggtttttagcttgtagctttgttaccagtcagtagtctctccatatagatgagcgaagcggtgatgctttaaaatacacccatagattgttttctcgataaataaaattggtctcactcactgagcccctgttcttcgacatgctttctaccactagtttgttcgataatgtgatgtgcatgtgaggcctgtgatggtgccagaatcatataacttgtcatgttaataactattttgttgtaagattatgtttactgcatggtgttataagctatttaaagtctcaaaaaaaaaaaa

SEQ ID NO: 67417 - DNA, 3574 bp, Oryza sativa
  Clone ID: PAT_MRT4530_68277C.1
atggatggaggaggtggtcacactcacgccagggcgcgctatctggtggagaagaaagcctcatgtggagtaacagtttccatggccccatccaactcttacgatgatgctatgaagcctgagaagttcaatggtaatcactttgagcgctggcaaacccggataatgtactggctcactgctttggatttgttttcggtcatcactgaccaggagccgcagccaggcgagttctttcctagggctgtgccatatgctgatttttaccagaccaggaactttaattgtgtgggtagaattttgagcatgctttccgataaattctatgatatctacatgcatcatacctctgctcgtgtactgcgggaaactctagagaagaagtacagtgttccagatgctggaaaagatctgtacttggttgaaaaataccatgacttcaagatgaccaatggaaagtctgtggtagagcaaacccaggaactccagcttctagtgggggagctcaaccatagtaagattgctctccctgacaagtttcaggtgggaatggtgattgcaaagctcccaccctcgtggagagattttgctactgctctcaaacatcgcatggaggaaatgactatggatgacctagttgcttccctggacgttgaagagaaagcccgtgcaaaggatgctccattggttaatgaagatgataactctagagtgaatctcactgatacacatcagagaaggaacaagaagaacccaaaagagaacaacagtggcatgaagccaagaggaaagatcgacaaaggcaacggcaagaaaaatggcaaaggtccgatgagttgcttcgagtgcggcaagcctggccactttgctaggaattgtcgttacaagaaaagaaatgagaaagtccagaaggacaagtctgatgatcagactgatgccaaggtcaatatggttattgacgaagctaaagttgcaaggtgcgtttcgaacatgtctcaaaaatttgataagtgtcaacctgtagattggtgggttgacactggagcaactattcatgaacagcaaggaggccgttctgtgattggtcttgagagcaagtccagggtgctgggtagtggtcgagtggatctgaagctttcttcaagaaaagttctgaccctacacaatgtgctcttcgtaccagcagcgaaagcaaatttgattagtatgaatggaattttgactaaaggaggtagacggtacttcattacttttattgatgattgctctaagtactgctatgtttatctcttaagaacaaaagatgaagcttttgagcatttcaaaatttttaaagcagaggctgagaatcagcttgatttgaaaattaaaattttgaggtctgacagaggaggagaatacttatcaattgaattctctaagtttcatcaagaacatggaatcatccatgaaaccacccctccgtattcaccccaatcaaatggggtagctgaaaggaagaatcgtactctcactaatttagtgaatgcaatgctcagcaattcaggtcttccaaactatatgtggggtgaagctctgtacacagcatgttttgtgctgaatcgtgttcctgcaaaaggaacagaagttactccatatgaactatggaaaggcagaaaaccaaatctgaattttctgaaagtgtgggggtgccttgccaaggtaaatatacctgttgtcaagaagagaaagctcggacctaagaccgtcgattgcgtgttcataggatatgcacagaacagtctagcttatcgtttcctggtagttaaatctgaaactacagaagttcgtgaaaatactgtgatggaatcacgtgacacgacctttttcgaagatacatttccactaaaggtaaaatctccaagttctgaacctatttctgttgaacctagaattagcatttcgtcagatgattcccttaatttaaggaggagcaagagatcacgaactgagaaaacgtttggtgatgattttatcatataccttgtcgatgatgtgcccagtactctgtcagaagcatttgcatctgctgaagctgcatactggaaggaagcagtgcaaagtgagatggactctatcctctctaatggcacttgggaaatcacacacttgcctcaaggctatagggccataggctatagggccataggctgcaagaaactgaaacctgatggaactattgacaagttcaaagccaggttggtcgcaaaggggtacacacaaagacagggagaagattactttgatacattttctccagtggctcacatgcctacaattcgtgctcttgtagcactggctgctgcatatggctataaaatccatcaaatggatgttaaaaccgccttcctcaacggagagttagaggaagaaatatacatgcagcaaccggatggtttcgtcattcctggacaagaagataaagtgtgtaaacttgagaagtccttgtatggactgaaacaggccccaatgcaatggcatgaaaaattcgacaaaacattgatctctgctggattcactgttaatgatgctgacaaatgtgtatattccaggtttgatggagatataggtgtcatactctgtctttatgttgatgatattttaatccttggtacaaatctgaatatcatctctgaaatcaaaagctatttatcaaataaatttgatatgaaagatttgggtgaagccaaagtaattctgaacattaaaattcagaaaaaaggacaaaggttttgaactcaatcagtcacactatgtggagaagcttttgcatcgttttggtcattttaatagcaaatctgcagctactccctatgatccttgtttaaaattgcataaaaatcaaggtcagggtcttgaccaagtgaagtttgcacaaataattgggtctttaatgtatcttgcaaatactactcgtcctgacatttcatatgcagttagcaggctgagcaggtattcgagcaaacctgattcaaatcattggcatgctctagaacgtgttctaaggtatttgaaagggaccatgaatcaaggtttgttttactctggtttcccagctgtgctggagggatatagtgatgcaaattggatcactgattctgatgaaatgaaatcaacgagtggttttgtttttacccttagtggagctgccatatcgtggaagtctgcaaaacagactatattaacacgatccaccatggaagtgaaactagtagcattggagactgcttgttgcgaagctgaatggcttagggaactattgatggatattccaatagtagaaaaaccaattcctgtagtgctcttgtattgtgacaatcaagctgtgatagctaaagttacaagcaagaaagaaaacatgaaatcttctagacatatgaagaggagactaaagtctgttagagacttgaggaatactggtgtagttacatttgactatatcaagacagaaaagaatttggctgatccattcacaaaaggattagcacgaaagccaatattagagttgtcgaaagggatggggctgaggcctgct

SEQ ID NO: 67418 - DNA, 453 bp, Oryza sativa
  Clone ID: PAT_MRT4530_68278C.1
atggccatgccgacgacgacaggcgtggatccgttcctcgccgacctctctcgctccccgcaccccggccatcgcgccctccctcctgtccccgggaaggatgaggacggcggctcgtgcaaccgcggaagacggccggagcagagcgggacgatggtggctgccacaacggaagacggcgcagcggctggtgtcatagcagctcgtggccacagcggggggacggcggcgggcgacggcttgatgaacaaggtagcacagctgatggacggcgtcgacggcgctcgatctgggaaggagacagagacacagatcacctcccggaattcagtcgccttcttccacgtaagtggcaaggcaagaacacttgcagcagcagcagcagcacattgcattgataggttgcaagcagagttagatatgggtcaaagaatcaaaggagagtacgcgtaa

SEQ ID NO: 67419 - DNA, 1482 bp, Oryza sativa
  Clone ID: PAT_MRT4530_68279C.1
gatcgtggcattccagaagggccatttcctcatcttcattctcgattgtgcatgttattggctattgtacctctgtctattgcttccattcttaaggaagagtctgacaagattgaaggtggaatggcgggaaatatgctacatcttattgtggaagcttgtatagcaaggaatttagttgatacatctgtttatttctggcctagctatgttgttccagttaaagacgcatctgctgttgaggaatccccttggtcagccttaatggaagggtcaccccttatgggccttaaggatgcacttatggttacacctgcttcgagcctagcagagttggagaaattgcaaccttttgcagtaagtgggtcagatgaggaaaagttggcggcgtctaagattctgtgtggagcatcccttcttcgtggctggaacattcaggaacatgttatccaaatggtgcttaagttgctgtctacattgctccccctagactctggatcagatgggttctatatacatcacatgcctatgctgcatgctctcatatctgggatttcttcaattgatgtggttcatattctctctatgtatggcttggttccagaactagctgccattctaatgcctttatgcgaaatatttggatcattaccttcgtctgaccataggaattgtagttttgaagaggcctctgtgtactccgtattctcatgtgctttcctgtgtcttcttcgcttgtggaaatttcatagaccccctgtggagtatgcactatcaaaacatggagtctttgtttgctcagagatcagtttggattttctcctgctactacgaaacagtcattttgctttgaatagtccgtatgatgttagcagaaagagcatatttcaactagatccatcgtttcaaaaaccggtgtatattgactcatttccaaagctacgggcatggtactttcagaatcaggcttgcatagcctctactctttctagttcttacaaaaggaaaagtatccttcaagtagccaataagatactgaaaattgtctgccataaaatgtcaaaaagtggcatccctcctgtcagttcccaatcaacatcaagttccagtatgagtggttcatctctaggcacacaagatgatgtctcccaagggccgccagctactgcatgggaagtgctggaagctgttccttttgtgcttgagactgttttagctgcctgcgcacatgggaggctttcgtctcgtgatttgattacaggcttgaggaatcttgcggacttcttgcctgcttcagttgctgttatcgtcagctacttttcggcagaaattactcgtggcttatggaagccagttatgctgaatgggactgactggcccagtcctgctgcaacgcttttagaagttgagtccgatattgagaaggctcttgcatccgctggtgttcatattaacatctctccacgaatactggccttataa

SEQ ID NO: 67420 - DNA, 921 bp, Oryza sativa
  Clone ID: PAT_MRT4530_6827C.1
ttaagctggaagatgagtttgtctggcaaaaaattggcaaccctcacatgtccgcacaattttgtcggcatcggacacagctgtgggccagaaaaaaccttgccggtaagccttgccaacaatggtccgtgcggcagcatgattgccacagatgccggaatgtatatcgtttaacaattgtctcccctcctctaaggacacgcagcattgcaagattcctgatgggcttttcttgtacagctcggtctcatgaataatatagagcctactgcgcctagagattcgctcggcttcatctttatcttgagggagttcttgtttggtcagaaatcgtataaggggctctctccagtcggcttcaatcattgctacatcttgagtgtccatggtgtcacgtcctgataaattcatcccgaaataaaaatcattccctccccgccgtcgtcccctctctcccgtgccgccggccgtcttcagccgcccctgccgccgtattagcacgccggccggccgtgccgtcgcctcctccagcgtcgcagccacctcctcttcgccggcatgccctctgtttcccgcgaagacctccggacgtgcatccccgccggcaacagtggcgttgccgccactgttccgcctccggccgcctctgccgcgtcccctgtgcgccggccgacgttgccaccacctctcccggcatcggaacgccatcctcttccccggccaagccacggcgtcgcccgtatttcgtcggaacgccgtcgcgcgcgccgcctctccctcggtctcgtcggcacccactccggcagcccctttcgccgtgccagtgcaccggccgacgtcgccgtctccacctccggcatcgcagcggcaaggtcgccctcggcctcgcctccccttcgaccgaaccccttcgcggtccat

SEQ ID NO: 67421 - DNA, 4141 bp, Oryza sativa
  unsure (1)..(4141): unsure at all n locations
  Clone ID: PAT_MRT4530_68280C.1
atgggtatgggtacccaatgggtacccgtcacccgtgcgggtgtgggtatgggggaatttttcacccgtgagcgggtgtgggtaatgaagcgggagcatttcatttcaatgggtgtgggtatggggttagtcaaatctattgatgatgctttgcatctttcagatagctatgggtttcagagagtggattttggacatacagttattttgtttgtgttaagcgttatcaaaatattgactgactgtatattggaagattgtggtttgccaactattgatggtgatggacatgacatttcatatgctattggagcagaaaaaagtatgaacatagatggcaagggaagctcatttgataggaaagatgagcaccgtgaatgtctgaggaggaagaacacaattatgactttagaagtagttgagaagatcactgctaacaaaaatactcaagtttttctccgtctagtctatcgtaacacatattatgcaggtagacctgaaaatttcaatattttgctccagaggcttcagcttattggtgctctgaagtcaaagaattttggaactgcacataatctgctaggcagcttgatgatgaatatacgaaaagttgttactacaggacatcaattacacaaaggcaatctattgggaagtattgatcgtggcattccagaagggccatttcctcatcttcattctcgattgtgcatgttattggctattgtacctctgtctattgcttccattcttaaggaagagtctgacaagattgaaggtggaatggtctctgttagaagaggagaattattgtcttcacttcaagttctagggcaattttttggtcttctttctcctccaccagcagtagtgcagtcagcaaatattgcagctaggaaagcattagttgctttatctgttttgaaggatcggaatgagagaggtcacaattattccaaagatatctcctctattaaagcagcgggaaatatgctacatcttattgtggaagcttgtatagcaaggaatttagttgatacatctgtttatttctggcctagctatgttgttccagttaaagacgcatctgctgttgaggaatccccttggtcagccttaatggaagggtcaccccttatgggccttaaggatgcacttatggttacacctgcttcgagcctagcagagttggagaaattgcaaccttttgcagtaagtgggtcagatgaggaaaagttggcggcgtctaagattctgtgtggagcatcccttcttcgtggctggaacattcaggaacatgttatccaaatggtgcttaagttgctgtctacattgctccccctagactctggatcagatgggttctatatacatcacatgcctatgctgcatgctctcatatctgggatttcttcaattgatgtggttcatattctctctatgtatggcttggttccagaactagctgccattctaatgcctttatgcgaaatatttggatcattaccttcgtctgaccataggaattgtagttttgaagaggcctctgtgtactccgtattctcatgtgctttcctgtgtcttcttcgcttgtggaaatttcatagaccccctgtggagtatgcactatcaaaacatggagtctttgtttgctcagagatcagtttggattttctcctgctactacgaaacagtcattttgctttgaatagtccgtatgatgttagcagaaagagcatatttcaactagatccatcgtttcaaaaaccggtgtatattgactcatttccaaagctacgggcatggtactttcagaatcaggcttgcatagcctctactctttctagttcttacaaaaggaaaagtatccttcaagtagccaataagatactgaaaattgtctgccataaaatgtcaaaaagtggcatccctcctgtcagttcccaatcaacatcaagttccagtatgagtggttcatctctaggcacacaagatgatgtctcccaagggccgccagctactgcatgggaagtgctggaagctgttccttttgtgcttgagactgttttagctgcctgcgcacatgggaggctttcgtctcgtgatttgattacaggtttttattcagtatcctgcattttacttgcatatctaacactggtcttcaattacttttcggcagaaattactcgtggcttatggaagccagttatgctgaatgggactgactggcccagtcctgctgcaacgcttttagcagttgagtccgatattgaggaggctcttgcatccgctggtgttcatattaacatctctccacgaatacgagtagtggtggttccatggttgtatgtcacaggtccaccaatcccaatgcttccattaccaatagcaactcttatcagcttatcaataactgttaagatggaggaatttaatcacttacaaggaattattgacaaaggagtggaaatttgtgctacatcaagttcatggcctagcatggcaatcataggggcattctgggcacaaaaagttcggcggtggcatgattatatcatccagtcatgttcagagacaccatttaccagagataaaaatgcagttgctcaactaatcaggagttgcttctcatctttccttgggcctttggttgatgggcgttcttgctttgtagctgacagaggagtgaataggctgctggggcaggctcaccaagaaagaagtccccggttttctttatcgccaggattactttacacacgatgctgccgaatgtttcctgacaactattttgtatgtgaagagattttgaaggttgtcattgagagagctcgtgcattagcaaatgaatgtgactctagtagacctcatcttctgaagtctggtcggatgacactatcttctgccacatgttctgtagagcagatagcatcacttgcagcatctatgctttgtcatgctggtggaataaagttggttcgtcttctgtatgagcagattctgccaacaatgctgctttcagctggtgaagcaaggctgggttctgctggaccagtgtgcagtagtttcgaaggatttgctttggcatatgttctccttgtttctggggccagcacctggggagtaggagaaacctccccagtttatacttccgtatacacatcgaagaggcaacgggttgtagataggcacttggagtttgtcgccaatgtaatgcagggtaacattgagcttggctgtggccaggtcacttggagaacctatgttatatgttttgtgggcttgctggtcgactttgcgccaacatggatccctgaggtgaagctcgagacgctgaagaagctggcgtctgggctttggaaatggcacgagtgcgatcttgccctctctttgctcgagcgagggggtccaaaggccatatctacagtggttgaatacatcctatgatatgcccgtgccaaattggtgctctaatttgccatgtacttatgctctcttgctccagtacaggcatacacatcttacacctgatctgacgtgcagagacccccatcagagaagcatatgttctagtagatggcttgctctgaactagatagaagtctatactacagaaaggatatccagcagttaggtgtttacactttacagtacatttacaggtcagttcttattctggtcttgctgatcacagtgcatgtgtacataattcgtggaatcttctcttggtcgcaatttatattcacaaatgtaattcaaatgtctaagataggatgacatggtgtaaatgatcaagcatagctgccactccaatgacatggtgtaaatgatctttccggctcaattggagatcagattatttttttggttttgctctttcttcaaaggaaccgacaccaagtcttccaagcctgtttcgaccatagcattggtgacagactacagaaaagagaagttacatttacatatagtccactgtattagctgttcatatgatcaatgtacaatctggtaagtacagtagtgactcgctctctagaacatctgganccancaacctgtcatgctattgagcatacaacggtttttttttttctcaaaacagtcaaggcgaaacttgaaaaaaaaaaaaaaaaaa

SEQ ID NO: 67422 - DNA, 2085 bp, Oryza sativa
  Clone ID: PAT_MRT4530_68281C.1
atggccgtggaggccccttggcttgcgcgtaagcaggattctgaatctgagaacgaggagttggattgggggactatggctcagatccccaatctcgacaatgctcctctcaatctcgcggccctcagggagcagtcgcagaaggacctgctaaacatcctcaagagtattagggggaagaagtgtgtagttattgatcccaagctcgcgggtaccctgtctctgattctgcagacctcactgctaaaggaatatggtgcagagttgcggcttctctctgctgaacccctccaaactgagtgcgctaagatcctatatctcgtacgctctgagctgaagttcatgaaattaattgcaagccagattaagaacgatgagcctaaagggcttcagagggaattctttctttactttgtgccacggcgcacagttgcctgcgaaaagattctggaggaggaaaaagttcatcagaaattgacactcggagagtaccccttgtatctagttccattggatgaagatgtgatttgttttgaacttgatcattctctgcaggaatgccttattgaaggggatactagttctgtttggcatgttgcaaaagctatccataagttagagtttgcctttggagtaattcccaatgttcgggccaagggtgttgcatccaccaaagccgcagagttgctgaatagtatgcaacaggaagatcctgtcaacatggatgatatggggactccggagataaacactgttattttgttagacagagaggtggatttagtgacaccgatgtgctctcagttgacatatgaaggtttattagatgagatgttgcaaataaacaatggatctgtggaggttgatgccactattatgggagcccaacaagatggtttctctttctcccatctttgggaggtattctgcctcccactacttggaaggcttacatctcttgcttttcaagtggtgggtagtgataagttgtacaaggaaattcgagatctcaattttgaagttgtagttcaggtcttgcgccaaaaggcaacatctattcagcaagattacgccgaagtaaaatccaccaatactcaatcggtttcggagctgaaggactttgtgaagaggttacattcactgccagagatagctaggcatgttcatttggcacaacacttgcaatcatttactggaaaaccttcctttcatgcccgattagacattgaacaaacaatattggaggtgcaaaactttgaaatatgttttgaatacattgaagagatgatacataagcaggagcctattgaaaatgttcttcgccttctagtgttactttcacttacaaatgctgggttgccaaagaagaattttgactacttgaggcgggaaatactgcacagttatggctttgagcacatgcccttgttatacaatctggaaaaggctggcctatttaagcgccaggaatcaagaagtaactggattggtattacaagggctctacagcttatagttgatgtaaatgatactgcaaaccctagtgatatatcatacatattttctggatacgcccctctcagtattcgccttgttcagcatgctgtgagatctggatggcgatctattgaagaactgttgaaactattgccaggtcctcatctggatttgaaaagaggtagttcggccattaattcttcattggatgtacaccaaggtttggggcttcaacagagtattgacagattatttgctctcagtggtgatgagggatttatgagagatctgatacaaacttatgagagcaaaccagaaacaggggttggacatcgttctctggttttggttgtctttattggtggggttacttttgcagagattgctgctcttcgattccttagttctcaggaagggatgggctatgacttccttgttgcgaccacaaaggttgtcaatgggaacacaatactcaggccaattataaccaatagcaaagagcttgatttgtaccaaaagtccctcaaaggcgttttggaccatgacttgactattaaccgcagatttcgctggaaaagaagggcatag

SEQ ID NO: 67423 - DNA, 1506 bp, Oryza sativa
  Clone ID: PAT_MRT4530_68282C.1
atggaggtcgacggcgaagcccgccccttcctcctcttctccaagcccaagtccagcaagaagaaacccaagcaggaagccgagccccaagtccatacccagccagaagaacccccaaaccctagcccctcccccgccatcgagcccgacctccgcgactccgacgaggcccccgccgccgccgtgaccgagcacgccggcgatgatgctgccgctgccgcggtgccctccaccttcgcggagctcggcctgtcgcagtggctggtcgacgtgtgcgattcgctggggatgcgggtccccacggcggtgcagcggcggtgcatcccgcgggcgctcgaggggagggacgtgctggggatcgcggagacggggagcgggaagacggccgcgttcgcgctgcccatcctccaccgcctcggcgaggacccatacggcgtcgcggcgctcgcgctcgcgcccacgcgggagctggcggcgcagctcgccgagcagttccgcgcgctcggcgcgccgctggggctcaggtgcctcgcggccatcggcgggttcgactcgctcgggcaggccaagggcctcgcgcgccggccgcacgtcgtcgtcgccacccccggccgcatcgccacgctcatcaacgacgaccccgacctcgccaaagtcttcgctcgcaccaagttccttgtgttggatgaggcagatagagttttagatattaattttgaggaggacctgcgagtgatatttggctctttaccaaagaagcgccaaacttttttgttctcagcaacaatttcagacaacctgcgatctttgcttgagctttctggcaacaattcatacttttttgaggcatatgaagggttcaaaacggttgataccttaaagcagctgtatatccatgtacctcctgatgctaaagagctctatcttttctatcttctgtcaaaaatgaacgaagacaatatacgttcggtgattgtgtttgtctcaacctgcaggacatgccaatatttggattttctgttggaagagcttggtcatcctgctgtttccttgcactctcataagcctcagtcgagaaggctggcagcattgcataatttcaaatccagtaaggttccagttttgcttgctactgatgtagccagtcgtggtttggatatccaaacagttgatcttgttatcaactatgacgttccaaggtacccacgagattacatccatagagttggacgaactgcaagagctactaggggagggctctcgataagctttatcacaacccagagagatatacgtctgttacatgagatagaggatgttgtggggaagcaattaggtgcatatgatggcgagatgagagatgtcaataaagatgctacaaaggtattcaaagcgaggcgtcttgcgaatatgaagatggcagatgagggccatgaagacaaggtacaagccagaaaagaacagaagaaaagagctcaagaaagaaagcggaaacacgatgagtga

SEQ ID NO: 67424 - DNA, 1037 bp, Oryza sativa
  unsure (1)..(1037): unsure at all n locations
  Clone ID: PAT_MRT4530_68283C.1
cagcaaacttctaaaattcataactcccaaataaaaagagataaaatagaaattcttttatctaaattcatcttagaccagtacctatcccctgtgcataaatcatgcattttagacattttggatttttcgcatatttcggtgtttaatcgcataacgtgtactttgtttagatgattgcttaaacggtgaagaagtgaattaggtgctgacatttttcagttacaaggaaagtcccacctccctctctctttgatcacttctctctttgttcactttgaacctatcttttggaggttattgaaaatgtttgcaaatcttgcatgtcgattgtacactaataaattaaaattttgttaaacttgttagataaactcctattatttgcattatcaccttaactccacatatatccatattcctcattcctaaccttaggaacaatatggctataccactttatatatgagttttggtgacactaggttactataaagcatagccatgcttagaatggtcttccttgtcattatgggctcatttcaaacatgaaaattgatttttaattaatctggacagaactttaatacttgtgattttgataaataaaatggtggaaagcatggattttaggtttgggcctcaagtggtgcacatatggtgattagttgtgtaccgatagggggagagtgcgcccaaaccgacctaaggacttcactcaatgtcagttcatttcgtatacagtacaaccacatgtgctagtatgggatagtccaagcttagtaaattatttatggtttagccttacattctggtaggccggtgtgtatgagttcggataactcagaggaacttcctatttaccacgacgtggtagtttaggtgactaagtctgtccaatacaatggtatntatgccacgtgggtgggttcccggttgtgtccgccaccacgggcgttaagttcaaggcgtgggcccgccacttaacggttctaggtcatatttccagtatgactaggnatggaggaacacgtatc

SEQ ID NO: 67425 - DNA, 424 bp, Oryza sativa
  Clone ID: PAT_MRT4530_68284C.1
aaaattaaaaccacacatccattaccactatcgagtgcatccagttcagtacaaactgatcgtgtcgtcagctaaaccctagcgtgagctaaggtcgatgaagccactctaaccaaaaggctcctcctggaacggtaccagataaatgttgaaggatttttgtggaaaaaactttgggtgttctaaaagagctaattaagactcaaatttgacattagcaaatcaccgtagccgctctattatcgtctgaaaattcattgcttatgattttatcgaatcccactaatccgtaattcgcccatagctaaggttaataaccgcgacgatgaaacaattgccctcagttttgcagacttggcggtatatcatcattgacggatgcgtaccttgggaagagagtaatgaagcgggcaaagaatcgatc

SEQ ID NO: 67426 - DNA, 577 bp, Oryza sativa
  Clone ID: PAT_MRT4530_68285C.1
aggaattcggcacgagggcgcttccgagatatatcaaaagatcctgaatcttgtcctgatgactgggagtcctttctccattatttaggctgcttgctggagcatgatgtgaacttgcctaaatcaaggacaagtgaacacccttcttcattacctgtagattctgctctggcccttaagacttctttaagcgacgagctggtagagtctcgccttgcaagtgcattgtcattcgtgcaaaagctacaggttaatgacaccagcgactgtgtcagaggacctcatttagccagtattgaaattgaacggcaacggtgccgaagtggaaacccaactgatagaaaattcattgaagctttgataaattactttcacagatttggtcatttgtcttgtgcagcatcagatgttgagatatacctccacatgctatcaagtgatgaaacaactgaattgttagatacaatctccagatcttttgatgcatcatcactttcagtaaaaggactgggtttggcaataaccacttttaaggttcaagaactcctgggaaactttttctcaaaatcaactacag

SEQ ID NO: 67427 - DNA, 238 bp, Oryza sativa
  Clone ID: PAT_MRT4530_68286C.1
ctacacagggtgcggggcgaactctcgtagacgcttggcccctgccagagcccataggccaacctcctctttgattttcgttagcagggagctcgttgccatctctttatggtcaaagatcctccgattcctctctttccagatctcccagacaactaacacggtgagggatataagtcccttcttcagaatgtcgggcgtgtttgccatgttctcccaccgctgctgcaccgagtag

SEQ ID NO: 67428 - DNA, 558 bp, Oryza sativa
  Clone ID: PAT_MRT4530_68287C.1
atgcgggccgcacatgtcatcggctcggatgtgccggtccatggtggactgagtcgacgggacaggggatgggagtaccacgcggcgctgacgtggcaccgacgtgccggccacgcgggcggtggatggacggccccgatctaccctcacgtagttcggacagcagaggcggcgcgcggcatgcagcggtgcggctctagcagcggcggcgctagcggtggcgcaaggcggcagctgacgatggtgaccggcggcaacgcgacggcgacgcggctaggcggcggcgctaggcggcagctgacgatggtgaccggcggcaacgcgacggcgacgcggctaggcggcggcgctaggcggggaagtgctaaatcgcggtatatccgtgcacttgcggattttatctatgatcgtaagattaccaacagcgacatgggggaggtggggcagcggttgtggggcgtgtgggaggtggcgcgggagataaaagacgtgctcacatgctcacctgtgaaaattgagagggattggggccagctctggttcggccgcatctggtag

SEQ ID NO: 67429 - DNA, 520 bp, Oryza sativa
  Clone ID: PAT_MRT4530_68288C.1
cttatgttcaccagaagaaaatgactgacagatggaaagtgctatttcaaatagattttttgtaccatgtgtttttggtgcccatctgatgtacatttgagctgaagcgattatactgcagtcagagcacagaagatgcgcatttggggataaggcagaattctgctgtcagatttgcagcgaaagaaagcccattcttttctcctgataaatgccctcataaagaagaatatcttccgttgacgttgcttagacctcattagctctcctgagatggagactgttcatccaaagtcccaacttctatgtaacatctggcataaggggacagaagacagcaaaatgcaagagctgtcctgtaacttataggaaaatgttctgtaagtttctaggtcaggatgtacattattgattccaaaattttctaggtatcttcagtactaatttcagggatgttgaacgttaattttatttaaattcttttgtaactgtgtttttgaaagttaaaaaaaaaaaaaaa

SEQ ID NO: 67430 - DNA, 1141 bp, Oryza sativa
  Clone ID: PAT_MRT4530_68289C.1
cgggcgcggccgagacgcgcgctcctaaaccccggcggcggcggcggcgaacatcggatcgtggacgaggcctcctccaccgaaaccaaacccctttgccgagtactacgaggcaagaagcacagagatagttgaggcaggggaacctttgggagtgtgctgatatgccactaattgcttaacacaccgagaagcttctcggcatttgccaaatttggcttcccaagacaggtcatgggcatctatttccataggcatggaagtaaaaatgttacttgtgaagacttttgtgcacacatgtgtggtgcaggttgaactttagtcaggaaaggtcttggattccatcgcagctcatgagcatgttgaagtggctgttattccacctgcaggtcaatcaccaaggtccctgcagtttttggtggtattgttttgcataatctggtcactagatgcctaccaactgcttgagatagtgcctggcaagaaaatcactgttctttggctaaatctttacatggcatctctgttctgccattctcaccgacatccagttttcttggagcttggcatcccctccttgtgcaactcgttgcaagaacaagtctctgctggcgttctctgcagttcatctatattcttttgttgatgctctctacttacataatgcgcttctctatctgtagctcaaataaattcgctagtgtatgttgctgttggattgttctgctccctccgcttcctttgcctgtgctctggttggtgttccgccgttcgtgttctcctcggagctgcctttcaaacaagaggatgattgtatacccgagaagggggaaaagagtatctgcatggcagacgcttaatcggagtaggcacaaagctaaatttattatgccaattcgtctgtcggccaaaatttgaggacacctgaccgttactttgttgatcaatatctatacagcaacacatttcgatgaagagcctgcgtcgtggcagaaaatcgcaatcggcaaaggagaaatccaacatatcgtgcgtcggacagaagggactctatcaatgattgaaaagaggcttcgatgctggggccgcgcctactcagggcggacaaaacattgaccccttccgcccattcttccggaca

SEQ ID NO: 67431 - DNA, 257 bp, Oryza sativa
  unsure (1)..(257): unsure at all n locations
  Clone ID: PAT_MRT4530_6828C.1
tttccttttttggttttttttgttcgaaaacatttcattattcattatttgttttgatcactatctcgttgcatgcaacacatcaacggagtgatcctactagctatgaggcaagccagctaagcctattcctggccggcggcgaagatgctgcactgcgggggctcaacccggcacatcgaccgcagctgcgccgcgtactgcctcgtcctggtcagcctcacgcgggtcatccccggntgctgctgcggctcgcc

SEQ ID NO: 67432 - DNA, 228 bp, Oryza sativa
  Clone ID: PAT_MRT4530_68290C.1
ctaaaggagcccaaacgaacggatggctgctgaagcctggagaaagaacaacgttagcgaaccaattggcatcgttccatgagaagctgtgtaaactaagaactggtcgactgttttatcgggcaatcgatcgagggaggaaaagtcgaacggcagctctcgtccacaagagaggcaagattttcgtccatcctgtgtcatctgacgccgacgagtcgacgaacttca

SEQ ID NO: 67433 - DNA, 344 bp, Oryza sativa
  Clone ID: PAT_MRT4530_68291C.1
ctcgaaacgataaaaaagagcacaaattcttctcctgttagtaattctgttcgaattcctctccttccccaaaaaagattggggttcatctccgccacgcggggttaccgataaaaatccccaaaatttccgctcccaccccgtcggattctccccccgaatccgagagttcatcgttttccgccgatttatttttatctggttttgtaaaccagcagcccaattgctctctgccttcgtctacctcgtggaagattccgggtcaaattctagactttttggtgggttgcgtgcgaggggtgggggttgcttcgaaggcaagcgtggtgtgggggggggggggg

SEQ ID NO: 67434 - DNA, 135 bp, Oryza sativa
  Clone ID: PAT_MRT4530_68292C.1
agcgcccggtttttgtatactgacgcctccatggacattgacgtttactgtttgctccttgacgccaagtagaaaaaggttcgtgcattatgcattgttcatttgggcagtgtgaatgacggcattggccctgcg

SEQ ID NO: 67435 - DNA, 374 bp, Oryza sativa
  Clone ID: PAT_MRT4530_68293C.1
atatgagattattttttaacttttacgcaacacaattcatgataaattttgacctttgcaaaacaaataccataaaacttttgcaccacacccccaacacgctgggagtgcttcattaatcttgctagcatataacacaaaaaccataaatttaacacgcccataaaaaaaaggcctctagatcaaaaccgggaaccccattggctcttctgggggaaaccaggagcaaaagggccaatccaaaatgccctatatattttataaacgggcggcttcaaccctcgaaatactaaaagcatgagcaataacatctacaggcaatgcacgaaatatggagttttttccagaaacccaactcaccgtaggaaccaaaa

SEQ ID NO: 67436 - DNA, 322 bp, Oryza sativa
  Clone ID: PAT_MRT4530_68294C.1
cgccgccccgtcgccgcacggcaacgccgccgttggccgctccgtcttcacggccatcgccgtgtccgtgctctccgtcgccgccgctggcctgaagcgtcagtacgatcaacaattttcagagaaaaagctgcagataaaatgcggggcggcgtttggtccacaatgcaaagctgccaagactgccatgtgtaatgccccccgacctgtccgtcaggccggcctgcaccatataacaaggactcctatgctcaggactaaagttaagtccctggatccaaacaccacctcagttgctcgatataacaaggactcatacaat

SEQ ID NO: 67437 - DNA, 421 bp, Oryza sativa
  unsure (1)..(421): unsure at all n locations
  Clone ID: PAT_MRT4530_68295C.1
ctngaatcgcggcggccgccctttttttttttttttttttttttttttttttttttttttttttttttttttttttttttttttttttttggggggccttagcattcaaaactgattttataagaaacttttacaggacatagcagcaacccaatggctggcaattaatttatttatttatttaggtattctttatccgcattgccaactaaagaggattccgccacaaaaaaaacgtcttgggagcccttgtatggggggggggggaatgcacccaacccatctcctctggaaggctggagcccccgagccccttttctggagaagcgaaatgcatttgctaaaacaaaagagggggaagcacgggagaagaaaccctttcccgcaaagggggctaacaaaaaggagggggggggggggg

SEQ ID NO: 67438 - DNA, 639 bp, Oryza sativa
  Clone ID: PAT_MRT4530_68296C.1
ccaccttaagggccccagaaacttctagttattctccagtaggaaaggttctagtgacattgctgctattgctggaagtccagtttcattttggctgggagttctctgtcagctagtgggagtcccgctattctcattgtaggcgtagttgcttctttcatccagcccagcacgccatataatcccttttccatgcccgtgctttgacctacgcctaagttaatgtcgatccaaaggaagccatttagatctgagttaaggaaggaagttaatttaagcaagagagcgataggatagatataaagcttagaccaataggcatcttaggaaagccggtttttagggaaaaaagtatattactatactacctcttggagtttcagttgctatccattctgtttgagtgccatatagcttttcctattcagttctagaactagtggctacagcgaatgagcaatcttgtgtatatccgggcaagagactctgtcaattcatccaatgagtaagcaggacaggttaagttagaaatcctttaagtccctcttgaattttagtacactccggccctcataagtaaacaagttttcaagggttagggttagcgtttactagccagcaagtaggataacaaagctc

SEQ ID NO: 67439 - DNA, 358 bp, Oryza sativa
  unsure (1)..(358): unsure at all n locations
  Clone ID: PAT_MRT4530_68297C.1
agcacatttctcttctccgctccccccgaaatcctcgcgcgagccgccgccagccacgccatggccggcacgtgcgcgcacgccgagttcttccgcgcgcagccggcgtgggcgctggcgctggcgggggttcgcgcgctgnncgncgcccgcgccgcgctccgcctcgcgctctggctctacggggcggtgctccgtctttttaagcccctgcgccgccgctacggcgcctgggcggtcgtctcgggcgccaccgacggcttcggccgcgccatggcgttccgcctcgccgcctcggggctcggtctcgtcctcgttggccggcgtcccgtcttgctgtcctcggtctccgcggtgt

SEQ ID NO: 67440 - DNA, 721 bp, Oryza sativa
  Clone ID: PAT_MRT4530_68298C.1
aacagcgaagaagaaacacagtgattagcataaaaggaagggctttttctacagcaaactgaatttacaacatgttaaaaaacgagtacactacacaaacaggatgtcagcaaaatacagacaattccgtccaaactgcggtcaaagcgccatctctgcttgaagtttggtcagttcagccaaatcattggctggttgagtagtcgtaactctcgctgaaggttccatacttgtcctctgaggtggttcaggcagatcattctcgagctcttcctcctctagatcttccagctctgcttctagctcatcctcgtcaaaatcagcagaagcgccaattggtgttgcaagggcctcctgtatctgcctcatattctctgtgtgttcatttgcctcttcaatggcattttcaatgtcatcgatactcactgactggtgaatagctttgacagcagatgatccagagcgcaaagcatcaacagtatctgtggttgcctttgcactctcaagcattattatctgatcatgaacccgtaattggaagtttgctagctgctcaatctgtgtttcatacaacttctttttctttagacattgaattgcagctcatgaagcctatccaaagtggggagggcagaggaggcagcctccttcttcttcttgctcttgggctttgatagcagtttcttcagcatcttcttgtaacactcacttgatcttcaat

SEQ ID NO: 67441 - DNA, 1025 bp, Oryza sativa
  unsure (1)..(1025): unsure at all n locations
  Clone ID: PAT_MRT4530_68299C.1
atgcccttctctatcttccttggccatctctgccttttccttcctacttttctcaaggaatctgcttccaaccacctttccctttgcttccccttcccctctcttaatcttcaatcctactggagaggctatatacattcatcattcacctctttattcccacacaggctatcgtcacccgagattgaagatcaagtgagtgtgacaagaagatgctgaagaaactgctatcaaagccgaagagcaagaagaaggaggctgcctcctctgcgctccccactttggatagtctccatgagactctagaaatgctggagaagaaagagtgtttccttcagaaaaaggcttctgcagaagtcgaaagggctaaggactatacaaaagctaagaacaaaagcgctgcaattcagtgtctaaagaaaaagaagctgtatgaaacacaaattgagcagctagcaaatttccaattgcgagttcatgatcagataataatgcttgagagcgcaaaggcaaccacagatactgttgatgctttgcgctctggatcatctgctgtcaaagctattcaccagtcagtgagtattgatgacattgaaaatgccattgaagaggcaaatgaacacacagaaaatatgaggcagatacaggaggcacttgcaacaccaattggcgcttctgctgatttcgacgaggatgaactagaagcagagctggaagatctagaggaggaagagctcgaccatgagctgcctgaaccacctcagagtacacgcatggaaccatcagcgagagttacaacttcatctcaaccagccaatgatttggctgaactgaccaaacttcaagcagagatggcgctttaatcacagtttggagggatttgtttgtattttgctgacatcctgtttgtgtagtgtactcggaaataacatgttgtaaattcagtttgttgtagaaaaaaacccttccttttataatttgttcttttctgttgccttgcttgctgngcgcgcgattgtttttgg

SEQ ID NO: 67442 - DNA, 351 bp, Oryza sativa
  Clone ID: PAT_MRT4530_6829C.1
atgcggcgaagccggcggtggtggcggcacaacgcgacggtggctagagcggcgaggagcggtggttggaggcgagcggtgaagccgacggtgagaacggcgcggctcgcggtggctagggcggcggtagcgtgcggccggagggcttcggcgagcggcgaaggtgaggagcggcgtggggagagcgatggaaggcgcggcaagatcggggagttggggaaaaagagagagggaggtgtggtgagcatttttatagctcgagggggagaggagagggccggtgagcggcagatttggagggggagtggggcggtgtcgtggggtggtggcggctcggccggcgccgaatag

SEQ ID NO: 67443 - DNA, 2302 bp, Oryza sativa
  Clone ID: PAT_MRT4530_682C.1
gggtagaagtaccagaatttcatatctttgaggaatctttaagaactttactacaggatctaaaaatatatactgatttgttatttcctaaatttggaacatacatgtcgaatgaaagtagcaaaacaacatgaatatcatttacaactctactcattaatatttttatgtgacatgcattgaacatggtaaaaaaaaaaggtatattgtgctcctatgtaatgaatggaaattttgttttgcgtgaaagctcaacacatacctaaacaaatatggtgtcattagagctcttaaatcattgctaggatgcgaaattgcagaatagcttattgatccattaccagtaatcaccacaggaacaaaaaccactgttgaaatggtgaaacctttgattgtctctcaatattatttctcttcctgtaacaagggagaagtatttgtacgcacaatgacaatcaccacaaacacgaaggttcttcatgatgcggagagtgcctccagaaggagcagccaagtccccaaaagcaaatgccaatttttcacagtgataatacaatgattcttcctttctatccctttgtatattgtgtgcagcaaaactgatatcaggcacatagcctgcaaccttgatagtacttattaatctatctaaattcctatatatctctctggagatggggtgtgatcggtcatcaacaccaaatctatatgttctctgacccatctcaatccagctaaatgcatcatccttataaacacctctctcacccatcagacttctaaccttttctgcttctgtccaccttcctaaccttgcataaatattaccaagaagtatataatttgtggcttcatagggttccatctcaaacagcatctctgcaatgcgcttgccagtttcaatgtcacggtgcttgctgcatgcaccaagaacaatcctccataacggtgcttcagcttcaaagggcatttcattgattgttttcatggctttgccaatctctcctgatcgagccagcatgtcaacaacacaggcataatgttgatacattggttttatgccttcaatatccaccatggaattgaacatctgcaggccttcatgaacaagaccagcatggttgaaagaagagatcagatttaacaaggttacctcgtcaggcataagaccagcaaacttcatctgcctgaaatgctcaagtgcttctttcggatatccgtgctgtccaagagctgaaatcattgaattgtaagaaattacattcacgcaatcatttgaagagaatactttctgtgcgtcattaatgcatccgcaatccgagtacatggtcaaaagcgcgttaaacattgcggcatccttttcagtattgctcttcaggctgtgggcatgaacttgcttgcccatctccagtattcccattcttccacagacagaaaacacggtcgagtagacaaactgagttggcttaatgtcttggcacaacatattgaagaaaatcaacagagcaccctcttcctcctcgcagttcacatacgcagagatcatggatgaccagacgattggatcggaagaacccacttgatcaaaggcgacctttgcatcctccaatgtccttctagccgcatacaaggaaaccagggaagcccccacgaaagggtctctctccagccctgctttgatgacatgcgcatgcagggctcccccgagctccagcgtgcggccagagccaccctctcggccgatgccagaaagcaacgccgggaacgtatacctgtccggagcaacatggctgccctccctcttcatgtctcggaacagcagaatggcctcctccctgcgccccgcctgcgcgtaccccttgatgagcgcgttccaggtgacggcgttcctgcgcggcattccgtcgaacaccttccgcgcgaggtcgggctcccggcacgacgcgtagaagctgagcacggcggtcgccaggatggtgctgtcgtcgccgccgaggaagccgcgcacgacggcctgcgcgtggagctgcgcgcccaggcccagggaggagggccgtcgaggcggggaggcggacgaggaggcggccttgaggagcgcggagaaggcgcggggcgtggggtcgtcggcgaggaggtcccgggcggcggctggcagggtggaccgcgcggaggcggtgcgccggtgccggcttggtggtcggctcgtgctcgggctgcggctccggcgaggggcagcgtggagcgggtcgcgggaagcgcatggtggtgtgggtgtgggaggaggagggagaaggagcggcat

SEQ ID NO: 67444 - DNA, 486 bp, Oryza sativa
  Clone ID: PAT_MRT4530_68300C.1
tctccttgcccgccgccccccgactcccgtctcctcgcattcgctcaccggtgagcatcctaatccatcccatccggcctcggcctcgaatttcgtctcctcgcccgccgcttgcgccgatccccatcctgcgagcagaggtggcgcccggcgtcctcctgcttccaccgcatcgtctatcgccgatggcggagctgaccacagccgctgatgtcaccgccgccccgccgcctccacctgggccaactccaccaccggagcccgtggtcacggccacggtcgttgccgagcagaaggtctctcctactgctcctccgctcgatgtgccggcacccgcaccgccgccgccgaagaagcgtaaggtggaggaggcggggttccataactccgcctactacaagatccgggccaccgtcgccgacctccgtgttcgtttcgtgcaggtttacgaagctactgatttccgaaacagtgatgctgctcgcg

SEQ ID NO: 67445 - DNA, 531 bp, Oryza sativa
  Clone ID: PAT_MRT4530_68301C.1
tatcccctcccctttcctctctctttaattagtatcggcgcccgcacctgcctctctcatctcgatccgatcgacactcctccgatcccgatctcctatccccttcctccccttcccctctcctccccctccccgtcaagtcctctcctctctcgctgtcggggtcggcagcggcggccgggcgagagtggcggtggctgggaggacgcgacagccactgggctgggaaggcgcgcgcggcggcctcgcgctcctctctgccagatccggtggtggcggtggaccggaggggatggcagcggcaggcggaggggatggcacgcgggaggcggatgggagggcggcggcggcggccggcaatgccctctcctgcgcggatatttgtcatttcttttttttttaagaagaatttgtgattcattgtatgaattgagatgtatagtttcttttttgagaatctgtgattcattgtatggatctgagatgtataatttatgatgtatttgatttgtggtaaaaaaaaaaaaaaaa

SEQ ID NO: 67446 - DNA, 435 bp, Oryza sativa
  Clone ID: PAT_MRT4530_68302C.1
atgcggtggaagcaggaggacgccgggcgccaccttgctcgcaggatggggatcggcgcaagcggcgggcgaggagacgaaattcgaggccgaggccggatgggatggattaggatgctcaccggtgtccccgagctccgcctctcgtctgcagaggcacacacgcggttccgccacatcgtcttcgaggtcaacttcatctacaccacattgcggtcgcatcgtccccgacgcatgcgcccttctccccgccgctgccaagcttcttgttggctgccagccttctcccacccatcgtcaggcttctacctaccgccgccgcccaacgaccgccacccttctccctgctggtcatcggccaccacacacctctcccgcgattcagtgtccggcttcctcttcgtgtgcatgcacgaacactcatggagtcagtga

SEQ ID NO: 67447 - DNA, 1105 bp, Oryza sativa
  Clone ID: PAT_MRT4530_68303C.1
ccggccgggtcccgtctcctcgcattcgctcaccggtgagcatcctaatccatcccatccggcctcggcctcgaatttcgtctcctcgcccgccgcttgcgccgatccccatcctgcgagcagaggtggcgcccggcgtcctcctgcttccaccgcatcgtctatcgccggtgaccatccctccctccctatccacacctcatcagatggcggagctgaccacagccgctgatgtcaccgccgccccgccgcctccacctgggccaactccaccaccggagcccgtggtcacggccacggtcgttgccgagcagaaggtctctcctactgctcctccgctcgatgtgccggcacccgcaccgccgccgccgaagaagcgtaaggtggaggaggcggggttccataactccgcctactacaagatccgggccaccgtcgccgacctccgtgttcgtttcgtgcaggtttacgaagctactgatttccgaaacagtgatgctgctcgcgagattctgaaagagatcaaggtagtcatggagctagccaagaaaatgaggcatgacctcggtgccacttttgaacctgctaagccaccagagaagcctttagctggagttgtgaaggatgggccagtggaaccacctccatctgcagaaaacaatcacgctcctcagacagatgggggaaacaccaagaagtgagattgcgcaagggtcttgtgtgacaggtggatctcctatcggctggaattttcttgtgtggcctgggggtgaggtggtttactacgggcggacaaaagaagtgtttcgggcgggtcaagctgaaaattaaaatgtggtgttcaccctgtcttctgactggtaaagtggtaatgtatcattcaattgtggtaggacgatttatagaatgtggtgttcgcattcagtctttctgaccggcaatgtgccaatgtatgcacccccccactgtgcgaggaatggaggatgaatcgtagtagatcttagcattctgttgactgaggtaatgtactactgtattcaattgtgggagggtgatttttgctaaacatctgttagtactatgtactaactgatttctgcatgac

SEQ ID NO: 67448 - DNA, 2544 bp, Oryza sativa
  Clone ID: PAT_MRT4530_68304C.1
tcacttgaggtcccttatcttgtcgccgagtttcaaaattgccctccatgagtgttcgtgcatgcacgcgaagaggaagccagacgctgaatcgcgggagaggtgtgtggtggccgttgaccagcagggagaagggtggcagtcgttgggcggcggtggtaggtagaagcccgacgatggcgcctggcgatgggtggggagaaggctggcagccaacaagatgcttggcagcggcgagcgacggggagaagggcgcatgcatcggggacgatgcgaccgcaatgtggtgtagatggagttgacctcgaagacgatgtagcggaaccgcgcgtgcgcctctgcagacgagaggcggagctcggggacacctaaactcatcagcttttgagcagctcgacggggggcgaccataggcaggcgacaccgcggcggcgcggcagcagagcgctgcacgacctccgcctccccaatccgccccgtctcctcgcccgccgccccccgactcccgtctcctcgcctgccgctggcgccgatctccatcctgctagcagaggtggcgccggcgtcctcctcctgctcccgccgcattcgctcaccggtgagcatcctaatccatcccatccggcctcggcctcggcctcgaatttcttctcctcgcccgccgcttgcgccgatccccatcctgcgagcagaggtggcgcccggcgtcctccttctagcttccaccgcatcgtcgctcgccgatatgacttgttgagtggaaagaatcaatatagtacaatctattttcttctcaatgtgtagaagaaacagtctgtaaccatacatacttattaatacgactagtgaaatctagacatggacgatgagaatggccttgagcttagcttgggtctctctttgggtgggacatcaggaaagtctaaggctagagatgctcctctagaacctaaagcagagcctcaagtggaagagagcagtagcaaaggtgtttcacaaactcctgaggctccttttgtgcattactatcaaacaaatgcagagaaccaagaacacagtagcaagcagagacacagccctgctgcaccaccgtttgggaacttttggggacagccagggagttcttctgttcctgtggcagatggatccaatgaacagaagccagtctctagtaaacggaaattactttctgagggagataagttttcagaagaaacctaatacagctgctgagcaacctgatgcatttagtaaggactctgacggtggtgtaaaaaacgctcctatttcaattagcacggatgatggttcaacaggtgaaaacgaggatgttgcagaatcagaagcagaaggctcaaactcttggttggttgcacagcgtgaagacagtgctaagggatctgttgtcaatagaggatctgacagaaaacgatccagtgatgatgctgcagttggttttcaaggaaagaggcagccaagtttctcaggaagtgaatccagctctggaaaattgccacaaggaaatcctttgtcattgcaagcatcaaatgttgttgctgtgccatatcaagtcccgtctcaggtttcagctcctcccagtattaccaatgcatcaaatttcactccagtatgtacagtgcagttgaggccacctacaaacaatggactagctgttacaatgggcagtacctctcaggtagcttttggttatccagctgtccagctaccaacacttgaaacaagctcttcatgggcttttggtgctccacctcaggctatgtcctcttttactgcaaaagacaaagttgaacgagcaggaatcagtcaagctgacgatggcaagaaaactcaagaggctggtgcttcctcttctgctcttgtggaggatgacaagaagtctgatagggcattacctctcatgggttctgctataaggccaggcattgcaccaaatgtcaaattcggaggatctggatcgtatcctgaccttccctgggtttctaccactggtactgggccaaatggcagaaccatatcaggtgtaacatataagtttggcagaaacgaggtgaagatagtctgtgcctgccatggcacccacatgacgccggaggaatttatgcggcacgcaagtgcagatgctccgggccaagaaaatagtgcaactttgccggcatttcctgtcgggaaccaagcagcctcagcccaaaactaattcaccgatctgtatgacggtttcaatgagtgctggactaatacctgttgcgccctttgtgtttatatcctccattccttatactattattattatgtattggtgctcatatgatatttatcttgtaagtttagacacgtcatgttttatgcttgatgttgaggataaatttgttgtatgtctttaacttattattatgcatcttcttaggaggatcaaacaagtcggagctttaaataacctgaattccgctgtagccatatggaatcatgtggattttttgccaattgatggtgtggtggaataaaatgcggcatgtcttgaattac

SEQ ID NO: 67449 - DNA, 516 bp, Oryza sativa
  Clone ID: PAT_MRT4530_68305C.1
atgtctcataatataaaaaagcagtgggagtcggacctggtggacgcccggtacatcagggagctgggcgacgacctgagcatcgtccacctcaagctcggcgccgacgcctccaagcgcaccgccggcctcttccgccgccgcgacgtcgtcgtctacgagcgccgccagaccatggacgacggcacgctggtggtcgccgtggcgtcgctgcccaaggagatcgccgcgggcctcctgccccccggctcctcctccggcgcccgcggcgccggcctgctgctccagtccggctgggtcgtcgagaagctcgacgccggcgacggcggcgacggcccgccctgctgcgtcgtcacctacgtcgtgcagctcgaccccgccgccgggtggctgccccggtgcttcgtcagccggctcaacagcaagctcgtcatcatgatcgtcgccaagctcaagaagatggccctcgccaccatgcactccgccgccgccgacgacggcgaggtgatgccatga

SEQ ID NO: 67450 - DNA, 1886 bp, Oryza sativa
  Clone ID: PAT_MRT4530_68306C.1
atgcttgtggatgatattggtgatgttaccataacaaatgatggagcaaccattttgaggatgttggaagtcgagcatccagcagccaaggttcttgttgagttggctgagcttcaagacaccagtccggccaggacgtccgcacgcaaaacgtggtggcgtgccaggcggtggccaacatcgttaagtcctcgcttgggcccgtggggctcgacaagatgcttgtggatgatattggtgatgttaccataacaaatgatggagcaaccattttgaggatgttggaagtcgagcatccagcaggctgggttcttgttgagttggctgagcttcaagacagagaggtgggtgatggaacgacatctgttgtgataatagccgcagaattgctaaagcggggcaatgatcttgtgagaaacaaaatccatccgacatctattatcagtggctacaggcttgctatgcgtgaagcttgcaattatttttttgaaaggtcatggtaaaagtgccaaggacagttacctgctgaatgggtatgcactaaacacaggccgtgcagctcaaggaatgcctactagagtaaccccggcaagaattgcatgtcttgattttaaccttcagaagacaaaaatgcaattgggtgttcaagtccttgtaactgatccaagggaacttgagaaaattcgtcagagagaatctgacataacaaaggagcgaattgagaaaattctgaaggctggtgctaatgttgtactgaccactaagggaattgatgatatgtcactgaagtacttcgttgaggctggagcaattgctgtaaggcgtgtgcgtaaggaggatttgcgccatgttgccaaggctactggtgcaactatggtatctacatttgctgatatggaaggtgaagagacattcgattcatcgttccttggacatgctgatgaagttgttgaggaaagaattgctgatgatgatgtaattttggtgaaaggaacaaagaacaccagcgctgtctcaattatacttagaggcgcaaatgacttcatgctagatgagattgacagatcattgcatgatgcattgtgcattgtgaagagaactctggaatccaatatggttgttgctggtggtggtgcagttgaagctgcattgtctgtatacttggagaatcttgctacaacccttgggtccagggaacagttggccattgctgaattcgcggaatctttgttaatcattccaaaggttctttctgtcaatgctgcaaaagatgcaactgagcttgtagcaaagcttagggcatatcatcatactgctcaaacaaaggctgataagcaacacttttcaagcatgggtcttgacctttcaaaaggtatcattcgcaacaaccttgaatatggtgtcattgagccagcaatgagtaaagtaaagattattcagtttgccactgaggcggccattactatcctgaggattgatgacatgatcaaacttacgaaggaagagagcgggaacgaagagtaacaagcattgacactcatttttgtgatcacgagtgatctgctatgtgtgatggttgtgatagacccctagaatgtttgtaagttttttgtttgtctttaattagacattcacttaggatattgtaccaaggagttccgggagaatgtgtatccgtattgtgtttaatgctattttggaacgaccgtcacggtttactctctaagactgttgcgggcaaagctgctctgtttttaaaacgaggacctcttgcagactgttgcggtaaagaaaaaatgtttacaaaaaaaaaaaaaaaaaaaaaaaaaaaaaaaaaaaaaaaaaaaaaaaaaaaaaaaaaaaaaaaaaaataaaaaaaatttaag

SEQ ID NO: 67451 - DNA, 315 bp, Oryza sativa
  Clone ID: PAT_MRT4530_68307C.1
tcagccgaacccatcctagcaccgttggatgcagggttcggcgtggacgtccaggattgcatcccaatgacggttggagggtacttcggacaattccccttccacaaccgtcataactacctctatataaggacttcaccttctcacttcactcacacacctcaagcaatagctctctcatttctctcaagtttagtttagtagtatctagctggtggaataggaatagagtagaaatcaggagttcggaagtcttcggaagagttcggccaaataggctactccctccgtccctaaatataagggattttggtt

SEQ ID NO: 67452 - DNA, 324 bp, Oryza sativa
  Clone ID: PAT_MRT4530_68308C.1
atggcgccattggaggggatgacaggtgtgtactgcgcgcgcatggccagcacacagcgcagtgagagcgccaactttatgctgaagagcataatgcctagaaactccaccttgaaccgtttcatcgagcagtttgcaaagctccagtttgatagagagagtgatgatgccaacgctgagaaggctaacaaacagaagaggttgtggttgaagccaacgttccctgtagacggagaactaggggaatccacccagtacgttgtcaccggtcatgtggatggagttggtgctttgagggtaaggccgtgtttagttcacccctaa

SEQ ID NO: 67453 - DNA, 355 bp, Oryza sativa
  Clone ID: PAT_MRT4530_68309C.1
ccggccgggacactcaacatcatggtcatacaccactacaacatactatggttataccctagattggcccaatgcagcactggacagcatacaccagcacgatcgttgaccggctcgctattaacagcatctttctagcacctgacaattctgcaatgaccaatatgtagtatttgccaccacacatataacgatgggcaccatggatccgagcatgcaagacatgatgcaaacggagggcatagaggctagcctccacatgacatgttatgtggcagtacaagggcaactcctgtggcaccaatgatgctatgcacctacaagcatgagaccttagagccactgtactaccaat

SEQ ID NO: 67454 - DNA, 284 bp, Oryza sativa
  unsure (1)..(284): unsure at all n locations
  Clone ID: PAT_MRT4530_6830C.1
cccacgcgtccggtccattggagaatcgatcgttgttgattgacgaggacgtacggacgttgatcgatcgacgaggatggtggagctcgaatcgcaggaggcggtgacggtcgcctccaccgccgacatcgccgtcgacgtctcgctccggcttctcgccgccgccacgtcgctcgccgccgtcgtcgtcgtngtcgtctaccaccagctgcgctggggcatccgggtcgactttaccctttttcaagtttgggttggcttcatggcgtagaacctggtttcca

SEQ ID NO: 67455 - DNA, 376 bp, Oryza sativa
  Clone ID: PAT_MRT4530_68310C.1
agtctatttttatctcacacaacccaactgcacaagcacaacgctagctcagtgaaggagcagtgtgctctttgcctctttgctatggtttgcttgctgctaagaagctaggcttggttaactcaagctatgagaaccatcacagcaagaaacccccatgattccctctccttctgtaggatgcatttcaagcggccgaatcttggcaagagctacagccatggcgccacgcgaggggcggaggaatacatgaagagctcggaagctcgagaagaagaggatgaaactacaatggcggactcctgtgtctgtccgagatgccatactgaggacttcagttctcctaccaagaagccgccgcgggagcagcattctc

SEQ ID NO: 67456 - DNA, 333 bp, Oryza sativa
  Clone ID: PAT_MRT4530_68311C.1
cctgggatgactgtatctgatcttcaaaacttgatgaatgaggctgctattctggctgctcctctgatctgaaggagaatatcatggatgagatctctgatactaatgcagaggatcattgctggaccagaaaacaaaaatgctgccgtttcacaagagatgaggatacttgtgccttaccacgaggctgtgcatgcccttgtaggagccctaatgcctgaatatgaccctcttgctaacatacacatcattcctcaagctcaaactggcgtactcacattctgtgctccaagcgctgacaggctagacccttgatcgtacatcttgagctac

SEQ ID NO: 67457 - DNA, 807 bp, Oryza sativa
  Clone ID: PAT_MRT4530_68312C.1
ggggggggggggggtttttttttcaatggaaggagaataattcattcatatcagataattaagaatacaaattttacatataactaccaacaaaagtacataatccaccacacaattaaatcacaagcaattcagcatcgacacacaattgccaaacaccttttcaccatgcaaagccatccatccacccatatgaatgcacctgcatgcaactagcttaattagctagctaattaagcacactgatcaatgagagcgatcattcatgatcatggtgatctcgccgagccgacgcctcggtgaccttcacgacgtgctcctccaccttgatctcgtcgtcgacgaccaccgccccggccgccaccgcctccgccaccaccgcggtggtgccgccacttataccgccggcgcctccgcctccgtagccgatggccccaccggccgtcacgccggcgaccccggcctcgccgacgacgccctccacgatgcgcacgtgctccgtcaccttcacctccacgtcctccacctcctccaccttcgcttcctcctcctcctcgtcgcgccgcgcgcgccgccgcctcctgaagacgacgaacagcagcgcggcgaggaggccgaggcagatgacgcccacgatcgggaccacgatgacgatcaccgtgacgtgcgtcgtaggcgacggcggcggcggcggagggggcggcggagtgacgtaggatcgttcgccctccattaaagctatatatatttaagagaaatttggttttgttcttgatatgtgtggcagtttgtgtgagggatttaaaa

SEQ ID NO: 67458 - DNA, 464 bp, Oryza sativa
  Clone ID: PAT_MRT4530_68313C.1
cgggctgcaggtttttttttcgaaacaaaatttatttttacttctatgccttcggcaattggacacaaatatggtggacacacttttacccttacacaacccgtttgttccctgcacactctacagtagaagtacataatttacagcgaggtgtcacatcggttttaaaccggatgcgctatggcagcagcgacttgtgttggttccccttgccctaccccttctcttccctaaggccttatttggtttggagggaattaaagaggattgaaagagattgagggagaataatttcaccccacgcgtccgcccacgcgtcccccctctaatccctcccttatggagattatccgaacaaagcctaaagcagcggcggcgagtgcccccgtcttgccgtctattccatctccagcggctctccaccaccaggtccacaaccgatcacggtgtcctaatcataagct

SEQ ID NO: 67459 - DNA, 486 bp, Oryza sativa
  Clone ID: PAT_MRT4530_68314C.1
atggaggggacaaggagacacttggagaaggacttagagtcatggaggatcatcgaggacgtccaagtcaaggtggaggcccaaaccaagtcgacctctggtgcaactcggagtccaggaccagtctgcactaaaacgggcgcccaggtcgcatacgttcccggattggagcgttctttatatggatggaaatctaagaagataacctttccaatggttttggttccatgttcaaattctttccgagtcaatgggattagccttctcgacgaggtggtgtcacttgcgtccaagccacttccacataaggcttatcctcttctgaggttgattttcttccagatccaactgtggggagccatgtgctacagtggtggctacggtagctatgtggtgtttggtgttcgaggcacaaacattgggtgtgcaggtgattttcaggagctccaacgcttttcggaggtttacctaaaacactttgtgtag

SEQ ID NO: 67460 - DNA, 1138 bp, Oryza sativa
  Clone ID: PAT_MRT4530_68315C.1
tcagcttgtccagtcagcctctatttctttcctctcttctctcccttccccttctgtctctcgctcttctctctggtgactctgggtagcccggcgccgccggccgacaggtggggaggagatcgacggtgcgaggtgggagaggaggtccggcggccggcgacgtggcggcggagacgacgcgggagcaggggagcaaggcggcagcggcggcgagatgtccacggtgaggtactggaggcggagctccgtcggggcggggagcgggtccacggcggcggacggcaggcacgggattgcgtcgcggccccacgctggcgccagcaccggcgtcgcccgcctacgcgcgatctcctccaccgccgtcatgaactgcaacgcgccgagggccgagggccgatgcgccggcggcgacgccaccgatggctgtcgtcgggcggtcccggagaggcgacagaggaaggagagatcgaggatgacggcgccatttcggcgggcgtggcgcagcagtcgagccttttccacctcggtagattgcatctatcttccaccactcatgccgtcgtcgtcttcctcaggcgcggcagctgtaaacctcgctcagggccattccgttacagagaaactcggaaaggcaatcatgcactgtggaaagcgcaagttagcgctgcagctcgccctcaccaacacgaagaagggaacaatgaaggtcgctgaatacgttgccaagatgcgagctcttggtgatgagatggctgccgccggtcgtcctcttgatgaagaggatatggtgcagtacatcatctcagggttacatgaagacttcagcccgatcgtctcggctctctgcaccaagtccgatcccatcacggttggggagctgtactctcaactcctcaactttgaaactctccttgatctctaccgcaacaccggtcagggagggcctgctttcgtcgctaatcgcggcggcgggcgcggcaacaaagacggcgcccgcatcaacttcaacggcggcagcggcaggggagcgctgcgcgcacgcggtggtggccaagcacgcggtggccaggggcgcggcacacggccctggatttttcatattttggtccttttaaaaaacttatttcgcaaatag

SEQ ID NO: 67461 - DNA, 219 bp, Oryza sativa
  Clone ID: PAT_MRT4530_68316C.1
atggatgcaagcaagtccgaagagtgcctcggtgatccagtcggagtcgagtccgaatcggaggtgaagaacgtggcaacctctggaggaggattgctaccgtccagcaattggtaccgggggtaccagtaccgcccggattccccatccgcgtccgcacagcagcgcagcgaaaccaccggcacacacggcccgatctccttcatcggcaccgcatga

SEQ ID NO: 67462 - DNA, 802 bp, Oryza sativa
  Clone ID: PAT_MRT4530_68317C.1
tgtcttcctcaggcgcggcagctgtaaacctcgctcagggccattccgttacagagaaactcggaaaggcaatcatgcactgtggaaagcgcaagttagcgctgcagtgcgcggagcccgtctccagggctacctcaccggcgctgtgaaagctctagacgccgagatttcagtcaccgtcgatgggaagactgtgacaaagccgaacccggcattcgaagattaggaagccaatgatcaacttgttcttggctatctcctgtcatctctttcgagggatgttctgattcaagtcgccatgtgcaagacggcggctgaagcttggtgagccatcgaggaactctactccagccgcacccgtgcaagatcggtgaataccaggctcgccctcaccaacacgaagaagggaacaatgaaggtcgctgaatacgttgccaagatgcgagctcttggtgatgagatggctgccgccggtcgtcctcttgatgaagaggatatggtgcagtacatcatctcagggttagatgaagacttcagcccgatcgtctctgctctctgcaccaagtccgatcccatcacggttggggagctgtactctcaactcctcaactttgaaactctccttgatctctaccgcaacaccggtcagggaggggctgctttcgtcgctaatcgcggcggcgggcgcggcaacaaaaacggcgcccacaacaacttcaacggcggcagcggcaggggagcgctgcgcggacgcggtggtggccaagcacgcggtggccaggggcgcggcacagggccctgg

SEQ ID NO: 67463 - DNA, 137 bp, Oryza sativa
  unsure (1)..(137): unsure at all n locations
  Clone ID: PAT_MRT4530_68318C.1
aaggggctcntnnctaattcngcaccaccttatntgaaattttcaaatttcgtttcatgttactcatatantagcaaaacaagtnacccncttgannnaccctgtcatatataaataaganggtgcaagttcacctt

SEQ ID NO: 67464 - DNA, 498 bp, Oryza sativa
  Clone ID: PAT_MRT4530_68319C.1
atggacgcagccggctcgccgcggaggaagaagaaggcggcggcggcgaagaagcggcgggggggaggggacgagcgggagcgcgggcgcgggcgcgggcgcgacctgtctccggcggcgccacccgtgggcgccggtggagggaaggacgcggcgctcgcggagtgcgcggcggcgtgctgcgtgctgtgcgcgtgcctgcccctggcggcgctctgctgcgtggcgcgcgcgcccgtccgcgtcgcgcggcggtgctggcggtggcggtggaggaggcggaggccgcagcggcgcctcgcgcccggggggtcgtcgtcgttctccgacgccgagctcggtgacttccggcccggacggcccaggcgcgcaatggcggaccaggagttccggccacgggggacgtctccaactccaagcggcagccgccgatccccgtcgccggcgccaccgcatccgcagcagcagcaaccaccccctcatgatcggagaagatag

SEQ ID NO: 67465 - DNA, 1236 bp, Oryza sativa
  Clone ID: PAT_MRT4530_6831C.1
atggccgagaaaccgccagcatcgccatcctcggctggtgaacttggttctgttaaagctaaggtccacaagctgggtctatctgaggttgatgaagccaacattgtgctcgtcactatggacaaattgacacctgaacagcaaaaggatcttgaggtaatgatgcagcaagcacggaatcagttcttgagctcattcacgaagactcgcaagggaacacttgttcagaagtacaaagtaaaaatgactttcaaggagatcaaggtgatggctctcaagaaattcaaggtgatggtgttcagggagttcaaggtggagggtatgattgctccgatcaaggagaaattctcgtctcaagactttgatagcctgtcacatcttggacagaaggtcaatgggaagccgatgtccaagatgatggtcgatggtggggctgcagtgaattctatgccttatgctacattcaggaagttgggcagaaacactgaagatctcatcaagacaaacatggtgctcaaggattttggtggcaatccatcagaaaccaaaggagttttgaatgtggaactaaccgtcggcagtaaaactatacctacaacgttctttgtcatcgatgggaagggttcctacagcttgttgcttggaatggattggattcatgccaattgttgtattccttcaaccatgcatcaatgcttgattcagtggcaaggcgacaagattgaaattgtgccagccgacaggaaatatggcttgaaaatgaacccaacaaagtgtgctttcggcgtatcggctggccagtttttgggatttcttgttcatgagaggggaattgagataactcaaaggagtgttaatgcaatcaagaagattcagtctccaaagaacaagacagagttgcaggagatgatcggcaagataaattttgtgagaagattgagggcccttgcaaaggttaccaaggataaggaacgagttgctcggcattacaacaagagagtggtgcccaaggctttttcggaagccgtcgctgtgtccctcttcctcacgccaccgagtcgcgccgacgtcatcattgtgccgtgcttctcctcctctgccgcccaacatccctggcgtcgccgcgtgtacgcagccgccatcaccagccaatcacgagcggaagccggcaccgtccccttttccttcactaaggaacatgtttcaccgccgacgttgccgtcccccgtcaactag

SEQ ID NO: 67466 - DNA, 282 bp, Oryza sativa
  Clone ID: PAT_MRT4530_68320C.1
atggagctgctccaagccggaggggctgaaccgcgaccaccaggttttggctcgtcagggtctccgtgccgccgccgccaccggcggcgctggtgttcttgggccgcgcgtaggatgggcggaggccggcggcctcaggaatctcctgctgctccggttgctgtagctgcaggctcacagcccttggataagctgaccttgactctggttgcaagcaagggcttgaacttcgtaattaaagactgtgttaaccgcctattaaagaagaatgggggtggctga

SEQ ID NO: 67467 - DNA, 216 bp, Oryza sativa
  Clone ID: PAT_MRT4530_68321C.1
ccggccggaatcccccgccagtcctcgacaccctgctcaacgactgacggtggaggtaaaattcctgcggctatcatggaatctccggcgacgaatcacttcgcggaagacaaagctccagcaattgatccttcagaaagggatcccttcgaggaagaccaagcttcggtgtatggatatttcgagaaaaggtaatgtccttggccgccacacccc

SEQ ID NO: 67468 - DNA, 787 bp, Oryza sativa
  unsure (1)..(787): unsure at all n locations
  Clone ID: PAT_MRT4530_68322C.1
nctggagctccaccgcggtggcgnccgctctagaactagtggatcccccgggctgcaggaggtcggcccgggcctttcatccgatgatattggaaagataaaaagaagaatatcaaacatacttgagccaggcgaaacgataatacaagctttgaaaagattgaagaatacatccagtgataagcgtggcaagatgactgaggggaccaaacgtatctttgatgagttgacagaagctgccatgaagctaatggagaacggagagtataatgtttattcagatgatcgggagacttttgaacgtgaggctgcgggttatgaacgtctggcacgtgctcgtcttggtctgccagaagctgaagaagatatgtttgcagacagtccaaaagataaaaccactgcctcgttactggatatggagcctggtccttcagctgcccatacctctacaaccaccaccacatctaaggaagatgacagtgactttgacatgtttggtgacgatgatgacaagaccgatgtcaaacgtgattctgatgcaaatgctgtaggttcaggttcgaatcctgaacaagtatctcacgatgctaatgaaacctcagaaggtgagaatggaagtgtgagctcagattatgtttatgatccaacttcaggttattactatagcagtatcactggctattactatgattctacatcctgatgtttttgttctgtatctacaggagcctggtactcgtatgacgcacacacttgctaatacaaagagatacagtctgaacaagcc

SEQ ID NO: 67469 - DNA, 926 bp, Oryza sativa
  Clone ID: PAT_MRT4530_68323C.1
ccactaccctcctcttcttggtctcctccatcccgccgccgccgccgcagggccgtcgcggcggcagctctgcaagcccttcacttcctccggcaaggatggcgccgccggcgcctttgacctccgggctgccgtccgctcaggcgggatgccctccacccactccgcggctgttgtggcagtggctacctcgcttgggctagaaaggggctttgcagactccatttttggtatgtcagtggtgttcgcagcaatcgtaatgtatgatgctcagggagtaagaagagaggtgggcaatcatgcaagagttttaaacaagttattgacccttcgcgagaagatcactcaaaacccggacgacaattccttgttgagttccacctctgaactccactcctcaaagcccgagacggttgccgagctcgtttccgtggctgagaagcttggttcttcacaaggttcatccgcgaaccccttcccaatccacagttccgggaccaaatcgtcgagattgaacgcccttcagagttcagaaacagaggtaactgaatttacacagctgaaggaggcttacacagaggaatgtgaccggctgagcgaatcagtcggccacactgagctgcaggttgcagctggtgccctgctaggcttccttgtgaccttagtcgtctatgccacactgtaacacaactatcatcttcacattcttcagttcattatatagattgtttactcaacaatcaatataattacacgaggaattcacagttagcaccacaaaattagcttgctttctgcactcatttattcagtaagaaatgtatgggcattttatggttcttgagaaagcacttgagcacatgtaggtactgaaatttgacagtaaaaccccggtagtaaaattatccacaaaaattacccatgtt

SEQ ID NO: 67470 - DNA, 1417 bp, Oryza sativa
  Clone ID: PAT_MRT4530_68324C.1
atgcccgtcctgccatggctcgcggcggcggcgacgacgcccgtgcgccggtcgccgccgctccccgctactccgcgtgccctgctccgactgccggcctcttccttccctccctggagcaactgcgcgaagagcgggctcccgccgcgggggccattcgccaccgccgctgacacccccctcgggggttcgctccctgagcccgaggaggagcgcgacacgctcctcgacggcgcgctccgggccgcacgattccgcgacgaggagtcccgccgcccagatcctctttttattgacccatatgcagctgttctactttcacttgatgtggcaagtgaagataaagatcttctagctttacatttaatgccaagtgcagaacattataggctagtgaccagatatattgatgacaaattgcaacatttcataagcaattcagatgatcttagacagattgttctgttgacagatggaatggacactcgtccttacaggctaagctggccaaggttgtctgttgtgtatgatgtatcacctagaagagtcttcattactgcatcacagcaactcagagagtctcctgacttgcaagcgggcttgaataaaaatggcttcaatgggaataggccgagcttgtgggtactgcagaaatggttgcaaactggtaggaactgtgtagtgtcttgttttagggttggctcagggtgctgcaattatgcagcgcatgtcattgataaatttgatctgcaagagaggaaatgtgagtggaagagtgcaaaggggggtttacctttgttcacttttaaaagcttggaggaccttttgcttgtcattggcaatttagcaatgaaagggagtatctttataggggaggcctcagagcaagacaggctggaaaaccttttctttactcagggttttcgtgtcagctttgttcactatgaagaagtggcaaaggatgttggcttaggtctagactctccaccggaaatacatggtagagctatttttattgcagaacagctgcgtttctcagatgctcagatggagagcttccggatgcattttgaaagaatagaggatgatgccgatgaagacggattcgaggaactttagtccaatctatcacgctcgctgccgcttgttgcccgttgcccgttgttcgcgatacctggggaggttgttgacccgtgtgggctgggggttcttcccctggcctgtgtctgcccggaaatcgaggctggtgggccctctcgtcgaaacacatgtctcccgtggttgcgcgcgggccgtcaggttccgtccggacacatctttgactcggcatgtgcttctctccccacctatctcccttcccgtgttctgggggggctcggatctccggcattgcctcctttcatcacttatagagtaa

SEQ ID NO: 67471 - DNA, 876 bp, Oryza sativa
  Clone ID: PAT_MRT4530_68325C.1
atggccatggcgcaatcacttctaggagtaccattctctcgcctcctccccccctcctcctcctcttcctccccaccaacaccgacaacaatccctccacctccactaccctcctcttcttggtctcctccatcccgccgccgccgccgcagggccgtcgcggcggcgtcctcgctccacctcgccccggaggacatcgccgagctcgtccggaacaaggttctgattgcggcgacggcggcgagcgcggtcggccagctctgcaagcccttcacttcctccggcaaggatggcgccgccggcgcctttgacctccgggctgccgtccgctcaggcgggatgccctccacccactccgcggctgttgtggcagtggctacctcgcttgggctagaaaggggctttgcagactccatttttggtatgtcagtggtgttcgcagcaatcgtaatgtatgatgctcagggagtaagaagagaggtgggcaatcatgcaagagttttaaacaagttattgacccttcgcgagaagatcactcaaaacccggacgacaattccttgttgagttccacctctgaactccactcctcaaagcccgagacggttgccgagctcgtttccgtggctgagaagcttggttcttcacaaggttcatccgcgaaccccttcccaatccacagttccgggaccaaatcgtcgagattgaacgcccttcagagttcagaaacagaggtaactgaatttacacagctgaaggaggcttacacagaggaatgtgaccggctgagcgaatcagtcggccacactgagctgcaggttgcagctggtgccctgctaggcttccttgtgaccttagtcgtctatgccacactgtaa

SEQ ID NO: 67472 - DNA, 420 bp, Oryza sativa
  Clone ID: PAT_MRT4530_68326C.1
atgatacggcgggtcctcagcccaagggcggtggcagagctctgtccggttgcttgcgcgcgcgtacgctacgtccaaagcacggttttcgtctttgtccgtggtcgcggtcgcgcgggctccaaacgcactatgccgtggatggctgacctgatggagttttgcatcatgcatgcgcgcgcgcggaccaccggcgttttggactttggaggcgtgggaaacggacgcgacacacggtgtacgtgggcggccaatccgtcctggagcgtgtgtgatttgacagtcgtcgatcgcctgagatttgtccggcaacagcgtcgcgacgcctgcgttttatgcccgtggtttgtctctgctgcgccgatccacaagagggatggcaaatgttggggccttgggtgtcggggcgactggaccagc

SEQ ID NO: 67473 - DNA, 291 bp, Oryza sativa
  Clone ID: PAT_MRT4530_68327C.1
atgactacacaaatcaagatagcggccttacatctttttggtcaacatacaagaaggatggaatttattgataatgaaatgccatcaggaacagctatgcccacgagtgttgaaggagttgccctaccgtggccacatgagtccctgaccacccccattgacacctcgaacacggcttcctcattggagcccaggtcgaagccacccaactatgctatgggggtgctcaatgatggttgcattggtgttcatgatagtgtgggggtagcaagcagcagtctaggaaggtga

SEQ ID NO: 67474 - DNA, 523 bp, Oryza sativa
  unsure (1)..(523): unsure at all n locations
  Clone ID: PAT_MRT4530_68328C.1
atcttgttcggccgccctttntttttttttttttttttttttaaagaaaaggtaatcatctatgtataatcagatgaacaaatcaatagaacacaactcgatcgacctcttcccttgctgcagccatggctcatgcgtgtagagccatgcgagcaattaagggaaaattttgtaaaccacctaaattatctacaattttgatgaactaattaatttacaagcctatacatatgcaaaccaagatgattttaagctcatttcggaatttctttttcgattattacgccgtgcaagtgcaaggtcgcgagaggaaaaccctaattggcgaccatgcatcatgcacagcgactgcgtcgccgtcgccgtcgccgttgctccggtgagatttgtatcattattggtgctgcgacggcagcggcccgaagatgtcgaggaaggcggaccggcgagccgagcgcccccggcgcgccgacggggctgaagaaatggtcgccgacgggctgaaaccagccggcgcccgggg

SEQ ID NO: 67475 - DNA, 3074 bp, Oryza sativa
  Clone ID: PAT_MRT4530_68329C.1
tttctgtgccatcattcattggggagttgactaatatgcagaacatgacatttcgcatcaattcattatctggacctattccaaaggagagcggtaaccttacgaatcttgtatcactgggtttaggcaagaacaggcttaatggctcccttccttcagaactggggaacctgtacaagcttcaggaattgtacattgacagtgctggcttaagtggtccactaccatcatcattttccaagcttatcaaaatccaagaaggggagagagagagagagatggatcctaggttgagctactgttgctacctccatggctgtctctgcgtgctgctgctgctgctgctgtgttcttggagagcagcagatgctcaggctcagcaaccaccacctcacactgatccaaccgaagcggcggcgctgaacgcgatgatggcgaggctggggctgagcgcgccgccgtcgtggaacatcagcagcgacccgtgcagcggcgccgcgacggacgacacgccgctggacgacaacccggccttcaacccggccatcaagtgcgactgctccgatcacaacaacacgctctgccacatcaccagactgaaaatcaacacgctggatgtggtcggcccgatcccagaagagctcaggaacctcactcacctcatcaagctgtacatcaagaaaaatctttttaccaggccaataccagcgttcatcggagacctggctgctctcaagtacaatcctctggccatcaatgcttggcctggacctataggaattcagcttggagatgttactcagctcgaatcgcggggattgggtccgaatacttgtaacggatcacttcccgatgagctgggtaaattgacaaaacttcaacagctgtgggcactggataataatttcactgggcaaatacctgattatcttggaagtttgaccaacttaacccaactgaggctccaagggaactcttttcaaggtcctattcctagaagcttatataatcttgtcaagttgagaagctttgtcttgagaaacagcaggatttctgattcacttgcatcagtggacttctccaagtttggaagtttaaatctactggatttgagttttaacaatatcacaggtcaaattcctccgtcaatcgtgaatcttccttctcttacttttctgaatttggtggcaaatgactttgtgattgatggcactgatatgagtggtctgccatggggattgaattgtcttcagcggaataccccctgttttctcggttctccgaagtctgcctctttcgcggtggactgtggtggtagtagaaccatatcaggctcagataatgccatgtatcaggctgataacgccaatcttggtgctgcatcatactatgtggcaggcacacctacgtggggtgttagcaccactggaagattcatggatccacccaatggaagttacataatctacagttcacgccagttcgataaaacactagattctggactgttccaaacagcaaggatgtcaccatcatctttgagatactatggcattggactcgagaatgggaactacactgtaacacttcaatttgccgaggtggatttccctgatgtgcagtcttggaggagcagagggaggaggatttttgacatctacattcaggtggcctgcaaacttacaatttctctgggggagcgtaaggagcagaactttgacataagaaaggcagcaggagggaaatctttcactgttgttaagaagcagtatgttgtccctgtgacaaaaaatttccttgagattcatctcttctgggctggcaagggtacttgctgcattcctcatcaaggctactatgggcctgcaatatcagctttgagcgctactccaatttttgcattggctgcacttgctggacactttatatggagacagaagaagagaaagatattattggagctagaagagctgtacaacatagttggaagaccaaatgtcttcagttataatgagctaaggtcagctacggaaaattttagttctagtaacctacttggtgaaggaggatatggattggttcacaagggtagattaagtgatggaagggcggtgccagtgaagcagctctctcagtcatctaatcaggggaaaaagcaatttgctacagaaatcgaaactatatctcgagtacaacactgtaacctcgtgacattgtatggttgctgccttgagagcaatacgccgctgttggtttatgagtatctggagaatggaagccttgaccaagcactgtttggaaagggaagcttgaacctggattggccaacaagatttgagatatgcttaggcctagcaagaggtatggcttatcttcatgaagagtcaaccgtccgtgtcgtgcacagggacatcaaggccagcaatgtcttacttgacgccaatctcaatcctaagatctcagattttgggctagccaaactttatgatgacaagaagacgcatgtcagcacgaaagttgctggtacatttggctatcttgcacctgagtatgccatgagaggtcatatgactgagaaagttgatgtctttgcatttggcgtggtcttattggagactttagctggacggccgaactacgagaatacacttgaagaagataaaatttacattttcgaatgggcctgggagctgtatgaaaacagcaaccctctgggcattgtagacccaaatctctcggaattcaacagggaggaggtgctccgggccatccacgtcgccctcctctgcacacagggctcccctcacaagcggccgccaatgtcgaaggtagtctccatgctcaccggagacgccgacataaccgaagatgccgcaaagccgagctacatcacggagtggcagatcaaggtcgggagctgccaccacacgggcagcagccaggtcggctcggcgtcgacgccgccgtcctccggtgatggcggcgccggccaggcgagtagccagggcgcaggggaaggcagcccgctgactccctcgccattgttcacctccatcatcgacgagggcaggtga

SEQ ID NO: 67476 - DNA, 4557 bp, Oryza sativa
  Clone ID: PAT_MRT4530_6832C.1
atgcagacccgcaagggaacattggttcagaagtataaagtaaaggtagttgctgatgatcttgggaccagttcttccaaaggtgaagacgggaaacaagctccagatggctcggctcaactgagtgacaaaggtgctaccgacggttctctaggaagtcaaggtgacaactctcaagggatccatggagttcaaggcgatggagtgcatagagttcaaggtgatgctgctcaggggttgcaaaggggaaatcttaatcagaatagtgatgttgcacaagattttttcaataatttccaagaccgggtcgactatgctgtgcaccatgctttgatcaatcagtctggggtgttagtcaataccttatcaaacatgatgaagtcaatagccgatggatcaatagctgagcatcaggctgtaggcccagtttatttgcaaggaggtgtctttccaaattatcggcctttgatcactgatgcccagccatctattcaggcagtttcccccgtcgcaccatcatgtcagccgacagcgccggcatcgacccccttacctactccgtcagcattggcaccaggccagctggtgaaccctcagttgttaatgagagagcagccacagcatagtgggcaggttgtgaatcggccgacgcaagatcagattcaggtggccattgagggaggcaggattaagtttgatgattccaaaaagccgatgagggtcgatgataaccaatttcccgttaacatggtacacaaagctggccgaacagctgatccggggcgcatgaggggttatcaagtaagttcggctagaattataaacaaatgtcaaaggaaatatgacaagcaacaggaaaggcatcatgaagaagataatggtggctttgatcctcattggggctgtgagttcttcaggttctattggaatgaaggtatgaggttaccatctatcgaggattgtcctggatgcagtgatgttgcagggggttcaagccgattgtacgatggaggcagttggccaaaacagacaagagtgcctgttcatcagagattgggcccagtaaaccaacgtggtgattcggaatatgacgaaaataagaagactcaatggtgtcctcctgttatttttacgaagaatcagaaaagaagggttcaaagattgaggagtagggaacgcttccaagaggtcgagcaagaaattaatcatcggctgaagaaaccaaaaccgaggcaggagtggagtgttaagaatcaggctcctgtagccgatgatgttgcagctgatgaggcaaagaggttggcaaaaggaaagagtgttgtgacggcaccagttaacatggtttttaccttgccagccgaattcaggatcggtcaagccgatgtcgacgaggtggaagaggaatcggctaagttggttctatcaccagaacaggcagtgttcgagaaacctgaggggacagagaatcggcatcttaaaccattgtatataaatggctatgtcaatgggaagccgatgtctaaaatgatggttgatggtggggccgcggtgaatttaatgccttttgctacgttcagaaagttgggtagaaatgccgaggatctcatcaagacaaatatggtgctcaaggactttggtggcaatccatcggaaaccaaaggtgttctaaatgtgaagctgacagttggcattcctgtcatcaagaagaatggcaaggtgagggtatgcattgattttagagatctgaataaagctacaccgaaagatgaatatccaatgccagtagccgatcagctggttgatgctgcgtcagggaacaaaattttgagttttatggatggaaacgcagggtataatcaaatttttattgctgaagaagatatccataagacagcttttagatgtcctggtgcaatcggcttatttgaatgggttgttatgactttcggcttgaagaatgctggagctacatatcaacgggctatgaattatatttatcatgatctaatcggctggctggttgaggtctatattgatgatgtggttgttaaatctaaggaaataaaagaccacatagccgatttaagaaaagttttcgagaggaccaggaaatatggcttgaagatgaatccgacgaagtgtgcttttggtgtatcggctggccagttcttgggatttcttgtccatgagaggggaattgagataactcagagaagtataaatacgatcaaaaagattaagcccctagaaaacaagaccgaattgcaggagatgatcggcaagattaattttgttcgaaggtttatttctaatttgtccgagaaattagaaccttttacaccattgttgagattgaaggccgatcagcagtttacttggagggcagagcagcaaaaggctttggataatattaaaggatacctgagttcccctcctattttgattcctccacagaaagggataccttttagattgtatctgtcggccggtgagaagtcaataggctcaatcctaattcaggagttggatggaaaagaacgagttgtattttatctcagttctcgactcttggatctagagactagatattctcctgtggagaagttatgcttatgtctatatttttcatgcacgaggttaaggcattatttactgtccaatgaatgtactattatatgcaaggccgacgttgttagatacatgttatcggctccaatattgaaaggaagggttggaaagtggatattttccttaactgagtttgatcttcggtatgagtctccgaaggctattaagggacaagctgtagccgattttattgtggaacatcgtgatgattcaatcggctcggttgaaatggtgccatggactttattctttgatggatcggtgtgtactcatggttatggtatcggcctagttataatttcccctaggagggcatgttttgagtttgcttatactattacaccttatgcgactaataatcaagctgagtatgaagcagagcttaaagggttgcaattgctcaaggaagttgaagccgatgctattgaaaacattggggattctttgctggtaatcagtcaattggcaggggagtatgaatgcaagaatgatacgttaatagtttataatgagatgtgccaagaactgatgaaggaatttcggctggttactttaaagcatgtatctcgagaacaaaatatggaagctaatgatttggcccaaggggcatcggggtataagccgatgatcaaagatgttcaggttgaaattgcagcaataacagccgatgattggaggtatgatgtgcgtcaatatttacataatccatctcaatcggcttctaggaaattaagatataaggcgttgaagtacattctattggatgatgagctttattatcagatgattgatggagtgttacttaagtgcttgagtgccgatcaggctaaagttgcaatcggcgaagttcatgaaggaatttgtggcactcaccaatcggcccataagatgaagtggctacttcggcgtgcagggtatttttggccgacaatgctggaggattgcttcagatattataaggggtgtcaagattgtcagaagtttggggcaattcaacgagcgccggcgtcggctatgaatcctattattaaaccgtggccatttagaggttggggaattgatatgatcggtatgataaacccacgatcaagtaaagggcataagtttatattggtggcgactgattatttcaccaagtgggtggaggccattcctttgaagaaagttgattctggggatgcaattcgatttgttcaagaacatataatctaccgatttggtattcctcaaactattacaacaaatcaaggttcaatcttcgtgtccgatgagtttgttcagtttgccgatagcgtgggtatcaaattgttgaattcttcacgatattatgcacaagctaatgggcaggctgaggcatctaacaagagcttgatcaaattaattaagcggaagatttctgattatcctcggcaatggcatacctggttggcggaagcattgtggtcttatcgtatggcttgtcatggatcaattcaagttcctccttataagtttgtttatggacatgaagctgttttgccatgggaagttagaatcggctctagaaggatagagttgcaagacagtttgacagccgatgagtattataaccttatggccgatgaaagggaggacttggttcaatcgcgtttacgagcccttgctaaggttaccaaagataaggaacgagttgctaggcattataacaagaaagtagtgcctaaggatttttcggaaggtgaacttgtatggaggttgattttgccgattggaactcgggataacaagttcggcaagtggtcaccaaattgggaaggaccgtttcaaatctataaggttgtgtctaaagggacatatatgttgcaagggcttgatggtgaggtttatggacgagcgctcaatggcaaatacttaaagaagtattacccaagtgtttgggttgacgcatga

SEQ ID NO: 67477 - DNA, 1742 bp, Oryza sativa
  Clone ID: PAT_MRT4530_68330C.1
gcacgagcgcgccgccgtcggctcgggcggtcctcttcgaattggatcttcttcttctactcacatacacacacactcgatcttgtctcgccctccctggccccagcggcacacggtagtgttggttgatggcaaatcctagtcgtcatagcaggtcaggtgatggtaatggttgggctagccccgagcggacgatggtgtggaggacggagctcaagaagaagcagatgaagcaggttgtggtgggcgtggtgtactacctgtgccggcaagacgggcagctggatcacccccatttcgtccacgtccacgtcccctccgactccgactccgatcatccgcggccgcgcctccacctccgcgacttcatcgcccgcctcagcgacctccgcggcgccgccatgcccgccgcctactcctggtccgccaagaccacctacaggaggaacgccggctacgtctggcaagacctcaccgccgacgacctcatccccgcgccatcaaccaaccatgaggagtatgtcctcaagggctccccgctgctccaccataactccaatacgcccccgcagcacaggaggtgcatgacatcctttgacctcgccgactatcaccgcaccaccgaccctgtccctgtcccggcggcggcgcagcagtccttaattggcattgatgagatatcacctccaccgtcttcaagcagccccgacgacaccaccacccagcttgttaccctgaagcagaagcaacaggaggaggatggctgcacgccccagcaacaagcggcgacgacaccggcagggcggatgcggacgtcggcgatgctgatgaagctcatctcgtgcggcgcctcctccatcaaggagctgcagggccaagcacaatcacaacgctgccgtgctactgcttggcataacaacaagccggacatcatggaccaccgtgactacttcagtggaagcttgctggacaacaacacaaccacccaccctatcgacctcaccctcaggagatcatcctcttgcaatgcccacaggggacagagtagtaggcttggcgtggtggatcaggatggcgtcccgaggaggcaacagctgcacgccaaatcgacggcggcgcgcatggacagcccggagacagatcagatcagatcatagaggaggggatcagcaagctaagctaagctaagctaatgctcttgtcaggcaactcatccatcgaatgataccaaaatgtttcttctgttactagtactacactagttagttattttatttccctttttttttcatttcaacaagttagtttgttcgtttgagcgcgcgattcgatcagttggtgtgaaaacgaaaacgaaaacgatggaacacacgtataaaaacatctgtgtaatctcgtcttttattaacttaagggaatcaatcaatgtcagatgattgtcacccagcacatgcctgagtaccgacgcatagcaaatgatgcttcgtactagcactcagcttaccagcctcaacgtaccagccagcgatcgaatgcatcaaaattaagactttggttatttttcgcctttgttccgtcgatgaattaggaggaattgatggcatggcgataacatgtattccaattgattatccttttcctttgttaaaagaaaagaaaggcatgagaaaggagtatgtaggtcttcatggaatggattgtgggggatttaactgtggatgatcttattgatgcctgagaat

SEQ ID NO: 67478 - DNA, 168 bp, Oryza sativa
  Clone ID: PAT_MRT4530_68331C.1
cctcgttgtccgaatcggcacgagggttctcttatgtgtgctctattattccctattattgagttgtattattatactatattatatgctcgtgagcttgtcatccatagttgtgatacactgttattgccgtctccaccaatcaccacatcatacgatctagctaga

SEQ ID NO: 67479 - DNA, 411 bp, Oryza sativa
  Clone ID: PAT_MRT4530_68332C.1
caccaacttcaaacggacctagctgctgatatagaaggaatttcggggcccatgagtactgtcagatggttttgaaaaacttatggagtctactttcagatggttttggtcccacatcaaaattcctaccgagctgtcgggaatctgcaaaacaagccacggattagccttctcgacaaggtcaaccgggtttcggcatggttgataaccagagaaaatatggtgctgcgattatggggcttaagagcgtgtttgttcagaagccggatcgagttgtgtcgctactccaccaaatcgattgttaatcaatacctatcaaaagatcgggacctatttcctcattatttgggagtgacgacgaccttcgccatctccgtttgagtcaaggtcacctccatctctttcgcgttc

SEQ ID NO: 67480 - DNA, 1364 bp, Oryza sativa
  Clone ID: PAT_MRT4530_68333C.1
tcagaaatcaagagattttccaccgtggctgtgtgtaggcccagtgatgtgcataccagagaaatctcccacagattcctgggcacgttgccttcctctggagacatcccttgccttctccacacctccactccattcgattcctcccgccctttcctccccgcttttcctacaaaaacccctgtgtcgctccaaaacctgagctcctctgttctgttcccttctccacctatcacctctcctcggatcgtcagcaacagcggcggcgatgtcggcggcgccggtagtggacgcggagtacatggcggaggtcgagagggcgcgccgcgacctgcgcgccctcatcgccagcaagagctgcgctcccatcatgctccgcctggcgtggcacgacgccggcacgtacgacaaggcgacgaagacgggagggcccaacggctccatcaggttcccgcaggagtacagccacgccgcgaatgcgggcatcaagattgctattgatctgctagaaccgatgaaacagaagcatcccaagattacctatgctgacctgtatcagcttgccggagttgttgccgttgaagtcaccggtgggccaactatagattatgttcctggcaggagggattcttcagattccccagaggaaggccgtttgccagatgctaagaaaggtgctgcgcatctgagggaagtcttctacaggatgggcttatcagacaaggacatagtagcactctcaggcggccatactctcgggaaagctcgtcccgaaagatcaggatttgatggtgcctggacaaaggatccactgaaatttgacaactcctatttcattgagcttctgaaagagaattcagaagggcttctgaagttgcctactgacaaggctcttgttgaagatcctacattccgccgctatgtcgaactatatgccaaggacgaagatgcatttttcagggactatgcagagtcgcacaagaagctatctgagctggggttcacgcctcctcgctctgcattcatctacaaatcatgccagaaaccaaagtccctgttgatgcaaactgcagctggggttgcagttgctgctgcagttgtcgcatgggcttacctctgtgaatccaacaagaggcttggctaatttaatttgcatcgatcacaatgatcgttatttcgtctcaaccactaatggctgtacaaaaagaaggtactcgattggaacatttggatgatgtatatgtgtttgttggtatatatatgtgagtgctgctaagtctgctatgttgtaacggtgtacaaagaatgaaataaaacaacagccaatggttgtagttaaaaaaaaaaaaaaaaaaaaaaaaaaa

SEQ ID NO: 67481 - DNA, 128 bp, Oryza sativa
  unsure (1)..(128): unsure at all n locations
  Clone ID: PAT_MRT4530_68334C.1
taattcccgaatcaacccacccgtccggctganttggtgtggaggcgggaaaatacggggtgggttatatcaaagatgggggggactccaaagtncaaacaacccacttcagtgagactcagtccctt

SEQ ID NO: 67482 - DNA, 102 bp, Oryza sativa
  Clone ID: PAT_MRT4530_68335C.1
gctgttcttcccggctacacttttgcttcgctgactcacaccacaccaccactgaccacactacaccacacacggcacacggtacacacgacacaccacacc

SEQ ID NO: 67483 - DNA, 418 bp, Oryza sativa
  Clone ID: PAT_MRT4530_68336C.1
ttgagtgatgtggcttattgtggtgatgagaaagattaattcttttcggttacgcggagcggagatcgtgcaggcgtccagatatctctatataagttgagtcgctgcctccatgcaacacatgctaaatcaatctagggtttgcctcctcctctgtactgcgacgtcgctcgtagtctactccatcccgcttgttggtgtgcaccggtgatctggagagcaggtctccggaaccttcgccttcgacatattacactgtgagaaggcggcaataaggtttttgggaagcacttcgcgcgactgctccctgttcgaccacaacggttcgtcttcctcttcgctcacgtgctatgcgccgttgtcaacgcccacaaccgcgagtacttcctgctgagcaaccggtcttccggtaccctca

SEQ ID NO: 67484 - DNA, 2058 bp, Oryza sativa
  Clone ID: PAT_MRT4530_68337C.1
gaaaaatctaggaattatagaattaagcaaacagctacgaaaaaggatcattttccactacccttcgttgatgagatgttggaacgtcattcttttttttttgtttccttgatgggtattccgggtatcatcaaattcctatccatccagaggaccaaagtataactacattcacatgtccatacggtacctatgcttatcgtaggatgtccttcggactgtgcaacactcctgcatcttttcaaaggtgtatgatgtctattttctcggacatgatcaaggacattatggaagttttcatggatgacttctctgtctatggaaacaccttcggtcattgtctgcagaatttagacaaagtcttacaatgattccaagagaaggacctggtactcaattggggaaagtgccatttcatggtccgtgaagagatagttcttggtcatcgagtgtccgaatgaggaatcgaagttgatcgtgccaaaatcgatgtaatagatcatcttcctcctcctgtgacatcaaggagatccacagttttcttggacatgcccgctttatagaaggtttctcaaggacttttctacaatcgcccgacctttgaccaaccttttagctatggatgctccctttgagttcgaaaacgcatgcctaaaatcctttgaaattctcaaaaaggcactcgtctccgctccaatcattcaacctcctgattggactctgcccttcaagattatgtgtgatgcaagcgatttcgctattagtgcggtcttgggccaaaccaaagataaaaagcatcatgcaatctgctacgctaggaaaactctaaccggagctcagttcaattatgcaactactgaaaaggaacttgtcgcggttgtttttgctatcgataagtttagatcttacttggtaggagctaaggtgatagtttatactgatgatgctactctaaagtacctgctcactaagaaagatgctaaaccatgtctcttaagatggatcttgctgctccaagaatttgacttagaaattaaggataaaaagggagtagaaaatttcgtagcggatcatttgtctaggctgcaaatcactaacacgcaggaatagccgataaatgatttcttgagagatgacatgctgatgacggttcgcgactccaacccatggtatgccaacatagtgaactacatggtatccaaatacataccaccgggagaaaatcaacggaagctgaaatgcgagagtcgccgtcatatatgggatgagccatagctgtaaagggtctgctccgatggcttactaagaagatgtgtgtcacgcccagaaatttagcccaaatttccagactattttgtgtattaaatccctgtccaggaccagctagggtacacaaaacgacaagtaatatacagttccaaacgtcggaaagaggccgtgacaggacccttcgcataaccccctctagccaagcacaccacacctcaggtttcacccccgtccccagcgggcaacaggcagtcccctctcgtgcctaggtgaatccggaagcgacagaggccgtcgcagggcccgccccgctccatcacgcccacccttgcctggatgcgtcgactagaggagagctacactacaagcctagccgttgcccacgctggcttgtggaccacgcgggtggtccaccgccggtccacgggaccgacggcccagatcgccctcgggccaatcggacgggcggcggtggaggtggccgcggggggctagcggcgacggcgcacgcgcgaacgcgttgccggcgacgacaaccggcggcagaggcgacggcgcaaaagcgacgcgaaagcggcggcagcggacggcggcaacgaccaaaggcgacggcgagcgcgggcggcggcgacgcacggggaatcggggaagtaaagaaaaggggagggagtcctcaccgaaggggacggcggcgaccggcgactaggagcgacggagggaagtcgacacgcggcggacggcgaccgggacgacctaaagaacgaaaagaaagagatttgagaggaagag

SEQ ID NO: 67485 - DNA, 4242 bp, Oryza sativa
  Clone ID: PAT_MRT4530_68338C.1
aacggttcgatcttttccccatctcctcgcattgattgcccacaatttgatggagaaaatccccgagcgtggaagatgaagtgtgaaacatatttccgggttagtggagttagtccagaagtttgggtaggtgtcgctgcgttgcaattcataggtggggcgcttacttggcttcaatccactaatgcacatgttgaattgatgagttggagcgagtttgctgaagcagtttgtgctaagtttgggagagaggagttccagagtttgattaggcaatttaatagggttagacaaattgggtcggtgcttagctatgcggagaagtttaatgaattgatgcaccaactttatgttcatcactcgtcctggaatctagtgttttttgtcactgaattccttgacgggttgaaacctgaaattcgttcggcagtcttgttacatagtcctgccgacatggatactgtcgtggatcttgcctgtttacaggaagaagtgcttgctacgggacgctgtgaactgcgatgggttgaagctgtggtagtagaccgagctggacagcgtcctagaggcaatggtgggcggactgatgacaaaatgcagccgatagaagatcgggttgctgctctgcgggcttatcgcaaggctaagggtttatgtcacaagtgtggtgagaagtggagcagtgagcacaaatgtggacccactgttcagttacatgtggtgggagaactattagaattgttggatgaatctgatgacagaaatgtgccagatgaaactgaagacgattgtgacactgaacctgaccaaatcagtgaagtctagcagatttcaaaggaggcaatgcttggaacagagtcctctggtactttgcgtttgcaaggattaattactcatcatgaggtgatgatgcttgttgattctggaagttctcacagtttcatatctgaggaaatggctgacaaattgggtactacacagaggtctgtaccttctattcgggtgagaattgttgatgggggtattttgcaatgtagcagagaattgattgcctgtggttagttcaaggggtatctttccagaataacctgaaggttctacctcttggaagctatgatgtgattctcggcatggattgggttgagcaacatagcccaatgcagatagattggcgagcaaaaacactaaaatttcagtaccaacaagttgaggtttgtctgaagggagtgagggccaatactcgttcttgtgtcacactcacagctaatcaggttcaaggattgattcatcgagatgcagtcatgcaggtggttgaactctgctcttttggtgactgaaactgaaaattctgaacctctaccagctgctggtactcagctcctagatgagtttgctcacatctttgatgaaccaaaggggttaccaccatccagaatatttgatcatgcaattcctttactgccaggagctaagcctgtcaatttgcgtccttaccattacaatctagcccaaaaggacgagattgaaaaacaagtaactgaaatgttgccacaaggagtgattcaacccagttctagtcccttctcttcaccagtacttttggtgttaaagaaagatctgacttggcgcttttgcatcgactacagacatttgaatgcaattactgttaagaatcgttacccccttcctatcattgatgaactccttgacgagctagctggttctactttgtttaccagtttggatttgagagcggggtatcaccaaatccgaatgagttctgaagatgaacacaagatcactttcaaaactcacaatggtcactatgagtttcgtgtgatgccctatggtcttacgggcgccccagcaacatttcacgggttgatgaatcagattctggcacctctacttaggaagggagttttggtttttattgatgacattttggtgtatagtaagaatctgcaagatcatctcactgttgcggcaggtgtttcagctactcactgatcaccaactcaaagttaagcgcagtaaatgttcttttgcttgtgccagtttgacttatttggggcatgtgatcagtgcagcgggggtgtccactgatccaaagaacattcgggttgttcgttcttggtcagttcctagtaatgtgaaagaagttcgtggatttttgggactggcaggctactaccgaaagtttgtgcgctcttttgggataatcagtcgacctcttactgatttattgaagaagaattttgtgtttgtgtggacttcagaacatcaggcagcatttgaagcacttaaggaagctcttactactgccccagtcttagcgttgctagatttctcaaaggtgtttgaaatcgagaccgatgcttctgataaaggggttggtgctgttcttatgcaggcagggcatccgctggctttccttagcaaatctttggggccttgcaacagaggattatctacctatgagaaggagtacttggccatcttacttgcggtcgatcgctggcgatcatatttgcagtttggtgagtttattattcgaactgatcaacgtagtctcgttcatcttgatgatcaacgtctggcaaccccctggcaacagcgtgcgatgacaaaattgcttgggttacagtttaaactggtatataagaagggtttggagaataaggcagccgatgctctatcccgttgtcactctgaagaagtttgtcagattagtgttgtttcttctgggataccagaatggttagcagatgttcaattgggctataccaatgatccagcttcttctcttttactgaccaaagttctctctcacctgaaacttgtccagattactcattaaaggatggtgttttatactatcaaggtcgaatctggttgggtaataattccactttgcaaactaaagtgttgactgtcttacattgttcggctattggggggcattctggcattcaggcaaccttcagtagggtgaatcggctgtttgcttggccagggatcaggaaagctgtcagacagtttgtttctgagtgttcagtgtgtaaacaagccaaggcagagcgagttcgataccctggtttgctccagcctctgccagttccagaccatgcttggcaaactatttcattggattttgtggaaggtttgccgatgttgtcaggttttgactgcattctagtgattgtggataagttcagtaaatatgctcacttcatcgctctagcacatcctttcactgcatttgatgttgccctgcttatctgaataatgtttataagctacatggactgccccagcatttgatctcagaccgcgatcgcatatttaccagagttctgtgcagaaggagctgttccggctggctgatactcagttacaaatgagttcttcttatcacccctaaaccgatggccaaacggagcgggtaaatcagtttcttgaaacctttctccattgcttctttcatgcttgcccaaagaaatggttgcgttggcttgctctggcagaattttggtacaatactacgcttcattcagcattggataagtctccatttgaagtactatatggtcacccacctcgacattttggtgtggtcgacggtgttgcttgtgcagttccggatttggaagaatggctgaaggaacgtactgttattaccagcttgctttggcaacatttgcttctggaagaaggcgaatgaagtttcaggctaacaaaaggcgctttgatcgggattttgagataggcgattgggtgtttcttaaggcacagcctcatgctcagttttctctggctggtcgcaccaatcacaagctagcgtttcgctattttggtccttttcatatcttggctaaagtgagcaaagtggcatatcacctacagctcccgtcagattgtgctattcatcctgtagtccatgtttctcagcttcgtcaggcttcgccaccatcttatgactctccggtgcgagccttgccagttctgcctgctgaagaggaaattccagttcaaattcttgctcgtcgagcatccaaacggggagccagagctgtggaacaactcaagatacgtttgtcaggtcagccttcttctgaggtaacatgggaagatggagctgcacttcgccaacgattccccgatgcgccggcttggggacaagccgctttttataatttctggaagtcccgtcaaacactgccattatactcctctacggcc

SEQ ID NO: 67486 - DNA, 1259 bp, Oryza sativa
  Clone ID: PAT_MRT4530_68339C.1
gagctgaagtagcatcatattgtgcaaaacgatttcatattgagctttgcaatcatgaagactacgacagcaatctaagtaatgcgatgaggagtgcgttttacagcatggatgaggacctgcaactgtccgatgcttggagggagttagttattcctcgtaataatggatggatgtattttatcaaggctggtgtctgtgctaacctttcgcctttcccgcaggcaacatatactgcgccatcatatgaagggagcacagcatgtgtggttgtcatcagaggtgaccaattgattgttgggcatgctggggacttcgcttgcaagaagaacgaacgtttacctcctgaagatcaaatgctgacatgtaatccggacatcctgactatggacataactgatgacatggagtttcttgtgatagcaactgaaggcctctggtgcaacatgacaaatcaaaatgtggttgatcacacacatgaccgtcttttggagggtgcagaagcgcgtgtcatctgtgaggagcttgttcagtttggcttgccatcgggcgacaacacgaccgtcatcctggttctgttcaagcccggcgcctaccctgctgttccgccggtcgacaccgacactgacactgacagccacaccggcgatgatgtcgacaacaacgaccccgccaacgaggttgatcccactgccaatgccgggtctgatgacagcaacaccagcgatgaggtcaaggtcgacgccactgccactgccgtcggcagcagcagtaccaccgccgtggctgccgacgaagccaccgtggtgtcgttgtcgactgcaaccatcaccattgtggacaactacttcttcattaacaccagcgaggaggttgatcccactgccaatgccgggtctgacgacagcaacaccggcgacgaggtcaaggtcgacgccactgccagttccgcagcagcagccaaggagcggaggggagaagacggcggcactgcgacagcgacggggcgctgcgacgacgacgatgacgacgggggcagcgctgcgacggcggcggcggcggcattgctgcgacgacgacggtggcggcatcgctgcgcgacgaagacggcggcaacaacgctgcgacgacgacgacgacgaagacgggggcggcgctgcgacgacagcggcggcggcagtgctgcgcgacgacgggggcggcagcgctgcgacaacaacgacgacgaccaacacaactatggctgcgaggactattga

SEQ ID NO: 67487 - DNA, 3816 bp, Oryza sativa
  Clone ID: PAT_MRT4530_6833C.1
atggcgccaggccagccggtgaaccctcggttgttaatgagagagcagccacagcatagtgggcaggttgcgaatcggctaacccaagatcaggttgctgccatgtttctcccacctcaacctgttgttgatccaatacagcaacagccgattcagcagcagccgattcagcagacacccccaattcagcagccttaccctgactggtttgagagagttcctctgcccaatcagttcaaagttccagacttatccaaatttttgggacaagatggtgtgtcaacttatgagcacattagccgattcttagctcagtgtggtgaagcatcggctatagacgctttgaagggtatgattgctccgattagggagaagttcttgtctgaagactttgatagcttatcacatccgatacagaaagtaaccttgcatgaacataggttcgcggaagttaggaaaagctctaagaaagttaatcatgtttgtccatacatctatgggttgaatgatgacgaggacgattctgaaatagctgcagccgaatgggtgaggagtaaaaatgtcataccatgccaatgggtaaaaagttctggaaaagaggagaagtatgactttggtattactaaagctgacaagatctttgatctgctactccgagagaagcaaattcaactttctgctggtcatacaatcccatcggctgaggaattaggcaaaaagaggtattgcaaatggcataattctgggtcccattctactaacgattgcaaggtttttagagagcagattcaggtggccattgagggaggcaagattagtgatattgtcgagagttcaagccgatcatataataagggtaatcggctaaggcagacaagagtttccgttcatcaaagattaggtccagtgaatcaagatcatggccaagaggacaatgtaatcaggaagaatcaatggtgtccttctggtattttcacgaagaatcagaagagaagggttcaaagattgaggaacagggagcgccttcaggaggttgaacaagaaattaatcatcggctgaagaaagcaaagccaaggcaggagtggcgtgttaagaatctggttcctgtagccgatgatgttgcagccgatgaggcaaagaggttggcaaaagggaagagtgttgtgacggcaccggttaacatggtctttaccttgctagccgaattcgggatcgatcaagccgatgtcgacgaggcggaagaggaatcggctaagttggttctgtcaccagaacaggcagtgttcgagaaacccgaggggacagagaatcagtatcttaaaccattgtatataaacggctacgtcaatgggaagccgatgtctaaaatgatggttgatggtgaggccgcggtaaatttgatgccttatgctacgttcagaaagttgggtagaaatgccgaggatttcatcaagacaaacatgatgctcaaagactttggtggtaatccatcggaaaccaaaggtgttctgaatgtggagctgacagtcgacagtaagactattcctaccacgttttttgtcatcgatgggaagggttcttacagcttgttgcttggaagggattggattcacgccaattgttgcattccttcaactatgcatcagtgtttgattcaatggcaaggcgacaagatagagatcatgccagccgacagccaatcgaagatggagaacccaagctattattttgagggcgtcgtggagggttcaaatgtctacactaaggatacagtagatgatctcgatgacaagcaaggtcaaggtttcatgtcggccgatgatctggtagaaatagacataggtccaggcgatcggccaaggccgacatttattagtaagaacttatctccagagtttagaaccaagctgatagagctcttaaaagggtttagagattgcttcgcttgggagtattatgagatgcctggagttagccaatcgattgttgaaaatcggctacctatcatactaggggttaggccgcatcaacaacctccgaggaggtacaaggccgatatgcttgaacctgtcaaagctgagattaaacgattgtatgatgctggttgtattcgtccttgccgatacactgaatgggtttctagtatagttcctgttatcaagaaaaacgacaaggtcaggtctaaagaaatagaggaccatataaccgatttgaggaaggttttcgagagaaccagaaaatatggcctgaagatgaacccgacgaaatgtgcttttggtgtatcggctagccagtttttgggatttcttgttcatgaaagggggatcgagttagaaccttttacaccattggttgagattgaaagccgatcagcagtttacttgggggcagagcagcaaaaggctttggataatattaaggaatatctgagctctcctcctgttttgattcctccacaaaaaggaataccgtttaggttatatttatcggccggtgagaagtcaatcggctcagtcttgattcaggagttggaagggaaggaacgagttgtattctatctcagtcgtcgactcttggatgctgaagctcggtactcccctatggagaagttatgcttgtgtttgtatttttcgtgtacaaggttgaggcattatctactatccaatgagtgcactgttatatgcaaggcccacgttgtcaaggacatgctatcggctccaatattgaaaggaagggttgaaaagtggatattttccttaaccgagtttgatcttcggtatgagtcgttgaaggcaattaagggacaagctatggccgattttattgtggaacatcataatgattcaattggctcagttgatatagtgccgtggactttattctttgatagatcgggggcatgcttcgagtttgcttatactattaaaccgtatgcgactaataatcaagctgagtatgaagcagtgctcaaagggttgcaattactcaaggaagttgaagccgatgccattgaaatcatgggggattctttgctaataatcagtcaattggcaggagagtatggatgcaagaatgatacattgatagtttattatgagaagtgccacgaactaatgaaagagtttcggctggttactttaaagcatgtctctcgagaacaaaatgttgaagctaatgatttagctcaaggggcgtcggggtataagccgatgatcaaagatgttaaagttgaaattgcagcgatgacagccgatgattggaggtatgatgtgcatcaatatttgaataatccatctcaatcggcttctaggaaattaagatataagccattaaagtatacactgttggatgatgaggtttattattggacgattgatggagtgttacttaagtgcttgagtgccgatcaggctaaagttgcaatcggcgaagttcatgaaggaatttgtggtactcatcaattggctcataagatgaagtggttactttggtgtgcagggtatttttggccgacaatgctggaggattgtttcagatattataaggggtgtcaagattgtcagaagtttggagcaattcagcgagcgccgacgtcggctatgaatcctattattaagccatggccattcggaggttggggaattgatatgatcggtatgataaacccaccatcgagtaaaggacataaatttatattggtggcaactgattatttcaccaagtgggtgcaggcgattgctttgaagaaagttgattctggggatgccattcaattagttcaagaacatataatctaccgatttggtattccttaa

SEQ ID NO: 67488 - DNA, 729 bp, Oryza sativa
  Clone ID: PAT_MRT4530_68340C.1
atggcgcggagacgaaaggaagaggaagggaaaggtgtcacgcccagaaattcccgaatagaattccaagcagactgtgcattaaaatccccgtccaggaccagccggggcatcctcgacggcacggacgaagcctactcctcggagaaaccttcatctaacccaaactcgaactctggggatcgggggaaaaatagagcaagactgagtactacccactgtactcagcaagtcataccggaatggggggctgacgtcagcacgggggggcgcggcgccgacatgcggggcccactggtcagcgactcaagggtgagcggttcaccgtggaccgggaccacgcgggtggtccaccgccggtccacgggaccgacggcccagatcgccctcgggccgatcggacggcggcggtggaggcagccgccgggctcggctcggcatcaaagccgaccggccgacccggggctgacggcggcggcacgcgcacgtcgcgttgccggcgacggcatccggctgcggaggcgacggcgcaaaagcgacgcgaaagcggcggcagtggacggcggcaacgaccaaaggcgacggcaagcgcggcggcggcgacgcacggagaatcgaggaagtagagaaaaggggaaggagtcctcaccgaaggggacgacggcgtccggcgacgaggagcgacggagggcagtcgacacgcggcggacggtgaccgggactacctaa

SEQ ID NO: 67489 - DNA, 327 bp, Oryza sativa
  Clone ID: PAT_MRT4530_68341C.1
atggcttgcgggctcaagaacgtcagcggtgatctccgccccctctgctccggctccaccgccgtcgaccaacgcttatgcgcggaggaggaccgaccgcccgcgctgtcccttgctcctgcctcatctcccatagcctccatcctcaccacgcggaggaaatacggaggcggtcacctgcttcgacaacgacgccgcaagcgatgggcccccgccgactacttgtgcgactcctgggccagctgcgggagaagggcggcgaccggcgggaaggagctaagcaacggccgcgacgtcaccgagttcgaccgccgcagggaagtctag

SEQ ID NO: 67490 - DNA, 3216 bp, Oryza sativa
  Clone ID: PAT_MRT4530_68342C.1
atggaggaggcagtcgacgcatctgccgctctggatcccaagcttgctcctctgctgctgttcggcggccacggcgacgccacgttcctctacagcgtgccgaagagagcgctgctggcgccaacgccaacgccaacgagggtgggcgacggcggcgtcgacgacatgatgagaggccaccgctggtgggccacggcgcagggctggttgctcatggcgcaccgcggctcgccgtgcactttcctatgggaccctttcaccggccgccgtgtcgggctgccccccgaccacgacggcaccgtcctcgccgccgaaggcagccatctccggaggtgcctcctctcatgctgcggtcccatggacccgaccagctgtgtcgtggtcgtcatcgacctcgccgacacggagctctggtattgccgccccggcgacaaccactgggtgaggctccatcagcatccgtaccagcacagcaacactgagcaccgtgacgtcatcatcaggtttttacgccagtttacggcgatcgacggcaagttctacagcgaactcctcatcggcgatgacgggcttgtcggcgtcctcgagttctcgccggagctgacgctcaccaagatcgccgtacacggcgtcgacgacgacaggagaccaacggtgtacaagaaacgcaccacttgcttcgtggaatcaaacggggagctgcactccgttgtcttctctcacccgatcggatgtgaccggattgtcgcgcgtgtaggcgtttacaggttgagcattaatctgacgacaacgcaggggcaaagatcagcagcgtgggtgaaggtggattcgctaggtggcagagcgttcttcgttaagataggcagttttggagcgtcacttgatacggagggaacgggcttgagagggaactgcgtctactactcggggttcaatgggaaagtgttgtgtgtatacgacatggaacgaggaactacggttgtaatcgatcccggcacaaatcttccgtatcaccagtcgcctcaagtattgatgccaacattttctggatatcatggcggaacaactcgaagtgttgaaaatatctatcaggtagggccaacaattatggaaaatgcttatgaggtaaaagacactaaggtgagtaaggtgaagagggttgttcgatttttcgaggatggttgtacctgtttgccgattcctattcagaatacgagagtgacaaagcagaaagataagttaataaatcagaagaagagtaagcggtctacggctggaagacctccttatcgaggcgaaggggcaagcagccctgaaacgaagaactcataccatggttgtggctttcccttggagccgctcaaacgtcttctagaatggggtcggattgctgacgctgaagagaatttgggtgggattgaagtgcgtgaggcccatctagctgaatccttgtacttcataagtgtcaggcagaagaagctgatcctgatacataatgcatatcactctattccgagatcttcagaaatcacgagcactggaatcggtggatcacaattcataccaaggccaggccagcagcagcagcagcaggtctctgccttgaacaaagccactccggcttctgcactatgtgaggttggtggcgtgggtggcggcgcggctgtcaggaagcggcagctcgcgtcggtggcgcggagagagaggcctatgcgtcgagaagaagagacagaagcgagactgtgggccccacatgtcagctgtgggatgtgcataacggacaccacagctatagttgcaaatgcaatgtgggtcatgcagggcgagaggaggagggcgcgtgctccgtggggaccaccagacacgggcggtgcactcctcgagcgttggatcagccgcgagagacgatccgacagccgagatgcgtccggttcagcaaaacaaaggtctgctatgggtaacagccttcctgtagaatcaaagttcactgatgaaaaagagaatgacagaattaagtatgttgtgtcgtctatgcaaggatggggtgagaaaatggaagatgctcatgcagctattctaaatcttgatgataccatgacgtcattctttggcgtttatgatggccatggaggagctgaagtagcatcatattgtgcaaaacgatttcatattgagctttgcaatcatgaagactacgacagcaatctaagtaatgcgatgaggagtgcgttttacagcatggatgaggacctgcaactgtccgatgcttggagggagttagttattcctcgtaataatggatggatgtattttatcaaggctggtgtctgtgctaacctttcgcctttcccgcaggcaacatatactgcgccatcatatgaagggagcacagcatgtgtggttgtcatcagaggtgaccaattgattgttgggcatgctggtgattctcgttgtgtactctcaagaaatggtcaggccagtgcattatccgtcgatcataaaccagacagggacttcgcttgcaagaagaacgaacgtttacctcctgaagatcaaatgctgacatgtaatccggacatcctgactatggacataactgatgacatggagtttcttgtgatagcaactgaaggcctctggtgcaacatgacaaatcaaaatgtggttgatcacacacatgaccgtcttttggagggtgcagaagcgcgtgtcatctgtgaggagcttgttcagtttggcttgccatcgggcgacaacacgaccgtcatcctggttctgttcaagcccggcgccttccctgctgttccgccggtcgacaccgacactgacactgacagccacattgacgatgatgtcgaccccaccggcagcaacaatgccaccgcgtccgacaacaacgaccccgccaacgaggttgatcccactgccaatgccgggtctgacgacagcaacaccggcgacgaggtcaaggtcgacgccactgccactgccgtcggcagcagcagtaccactgccgtggctgctgacgagggcactggcaatcctcctcatggcgcactagttgacaccgacgacgaggacgggctgacctactcccaggacatggacttacccccggcgtcgacgtcccccccaaccttcccggacgaggacgacctcccccggtctaacccggacaagtcccccccgcacgatgatacttatcataggtggtag

SEQ ID NO: 67491 - DNA, 577 bp, Oryza sativa
  Clone ID: PAT_MRT4530_68343C.1
atccacccggtccacccctccttagtcgaggtccgtcgccgaagagccgttcccgtcgtgcgacggtgagggttgccatgtccgccgcattcggccggcattcccgcctcctatggcccctctctttctctctaatctctttcttttcgctctttaggtcgtcccggtcgccgtcagccgcgtgtcgacttccctccgtcgctcctcgtcgccggtcgccgccgtccccttcggtgaggactccctcccctttcctttacttccccgattccccgtgcgtcgccgccgcccgcgcttgccgtcgcctttggtcgttgccgccgtccgctgccgccgctttcgcgtcgcttttgcgccgtcgcctctgccgccggttgccgtcgccggcaacgcgttcgcacgcgcgccgtcgccgctagccatggctggccggtcggctttgatgccgagccgagccccgcggccacctccaccgccgcccgtccgattggcccgagggcgatctgggccgtcggtcccgtggaccggcggtggaccacccgcgtggtcccggtccacggtgaaccgctccccctga

SEQ ID NO: 67492 - DNA, 1401 bp, Oryza sativa
  Clone ID: PAT_MRT4530_68344C.1
atgtgggtcatgcagggcgagaggaggagggcgcgtgctccgtggggaccaccagacacgggcggtgcactcctcgagcgttggatcagccgcgagagacgatccgacagccgagatgcgtccggttcagcaaaacaaaggtctgctatgggtaacagccttcctgtagaatcaaagttcactgatgaaaaagagaatgacagaattaagtatgttgtgtcgtctatgcaaggatggggtgagaaaatggaagatgctcatgcagctattctaaatcttgatgataccatgacgtcattctttggtgtttatgatggccatggaggagctgaagtagcatcatattgtgcaaaacgatttcatattgagctttgcaatcatgaagactacgacagcaatctaagtaatgcgatgaggagtgcgttttacagcatggatgaggacctgcaactgtccgatgcttggagggagttagttattcctcgtaataatggatggatgtattttctcaaggctgcagcttgtacaagcatttgcaaggcaacttatactgagccagcatatgaagggagcacagcatgtgtggttgtcatcagaggtaaccaattgattgttggacatgctggtgattctcgttgtgtactctcaagaaatggtcaggccagtgcattatccgtcgatcataaaccagacagggactttgcttgcaagaagaacgaacgtttacctcctgaagatcaaatgctgacatgtaatccggacatcctgactatggacataactgatgacatggagtttcttgtgatagcaactgaaggcctctggtgcaacatgacaaatcaaaatgtggttgatcacacacatgaccgtcttttggagggtgcagaagcgcgtgtcatctgtgaggagcttgttcagtttggcttgccatcgggcgacaacacgaccgtcatcctggttctgttcaagcccggcgccttccctgctgttccgccggtcgacaccgacactgacactgacagccacattgacgatgatgtcgaccccaccggcagcaacaatgccaccgcgtccgacaacaacgaccccgccaacgaggttgatcccactgccaatgccgggtctgacgacagcaacaccggcgacgaggtcaaggtcgacgccactgccactgccgtcggcagcagcagtaccactgccgtggctgctgacgagggcactggcaatcctcctcatggcgcactagttgacaccgacgacgaggacgggctgacctactcccaggacatggacttacccccggcgtcgacgtcccccccaaccttcccggacgaggacgacctcccccggtctaacccggacaagtcccccccgcacgatgatacttatcataggtggtag

SEQ ID NO: 67493 - DNA, 1515 bp, Oryza sativa
  Clone ID: PAT_MRT4530_68345C.1
atggctaagcaatccctagtcctaactctaatcatgttagaaccccaagttgacaaagaaacaaggtacaacaatagcatggctacgacaatagggctgacgtcagcacggaggggtcgcggcgccggcaagcgggccccaccggtcagcggctcaggggagagcggttcaccgtggaccgggaccacgcgggtggtccaccgccggtccacgggaccgacggcccagatcgccctcgggccgatcggacgggcggcggtggaggcagccgccgggctcggctcggcatcaaagccgaccggccgacccggggctaacggcggcggcacgcgcgcgtcgcgttgccagcgacggcatccggcggcggaggcgacggcgcaaaagcgacgcgaaagcggcatcagtggacggcggcaacgaccaaaggcgacggcgagcgcgggcggcggcgacgcacggggaaatcgaggaacggcacaaaggggatgggcgcacggtggacatggtccaccgcggccggggcggcaccgtggaccgagaccacgagagtggtccacgggcagccacgggcagggtagccagggcacgggtgcggccaagaccggcccggccgagcagcggcgaacagtggcggcggcttggacggacggccaccggtggcggtggcgcggcacaaggcgggcaacgaaggggagacagaggaagagggaggggagtgctcaccgtgctcgcgcaacggcgagaaggcggcggcggctcctcgtggtggcacggcaaaggtggtccggcattgtttcacgagcgggaactggcggacggcggctggaaggacccggggaacaaggaggaaaggccagcgcccaccctctggtctcctgcctccccatcctccaccatctcccccaagggggcccataacgtcgtcgccgtcgctcggggaggtcgtcatcgtggtcgccgtcgcgtcgccgtcctcgtccgcccctccgccgtcgctgttgaccgccggaacactgccgtcgtcgtcaagccgaaggtcgccgccgcttcttcctcgactccgtcgccgtccgttgatcttccgccgccgttttggtcaccggaccccatagtcttcctctttcgtttgcccctctcccgtggtctcccgtgccccgtagcctttccgccgccgccgccaagttcgccgccgccgccggccgaaattcggccgtgtcgcgccgtcgcctccgccgttgccgtcggtcgccgtcaccgccgtaaggtgcgccgaggtgtgggaaagctcggccgctccctccccgctgtcgccggtcaccggagccccgtcgccgccgtcgaccgaagccgcgccgccgctagacctcgtcgccggccgtcgtcgttcgtcgtttggttcgagggtgagtaccgttgggttcgtctcatcgtcctctacgtgtacttgtcctccaaagtcgcagccaaccatccaatctccggcgaggtcgccatcttggtccggccattgatgag

SEQ ID NO: 67494 - DNA, 1669 bp, Oryza sativa
  unsure (1)..(1669): unsure at all n locations
  Clone ID: PAT_MRT4530_68346C.1
atgtggatggatcatgcagggggagggatccgtggggaccaccagccacaggatgggggcactcctcgagcgttggatcagccgcgagggacgaaccgacggaggagatacgtccgtgcagggggagcgatttcatcctcccctcctcttctgtggtttcgtccgccgcctccatccctaaaccctacttctccgaaagcgcccaaaacaaaggtctgctatgggtaacagccttcctgtagaatcaaagttcactgatgaaaaagagaatgacagaattaagtatgttgtgtcgtctatgcaaggatggggtgagaaaatggaagatgctcatgcagctattctaaatcttgatgataccatgacgtcattctttggtgtttatgatggccatggaggagctgaagtagcatcatattgtgcaaaacgatttcatattgagctttgcaatcatgaagactacgacagcaatctaagtaatgcgatgaggagtgcgttttacagcatggatgaggacctgcaactgtccgatgcttggagggagttagttattcctcgtaataatggatggatgtattttctcaaggctgcagcttgtacaagcatttgcaaggcaacttatactgagccagcatatgaagggagcnacagcatgtgtggttgtcatcagaggtaaccaattgattgttggacatgctggtgattcttcgttgtgtactctcaagaaatggtcaggccagtgcattatcccgtcgatcataaaccagacagggactttgcttgcaagaagaacgaacgtttacctcctgaagatcaaatgctgacatgtaatccggacatcctgactatggacataactgatgacatggagtttcttgtgatagcaactgaaggcctctggtgcaacatgacaaatcaaaatgtggttgatcacacacatgaccgtcttttggagggtgcagaagcgcgtgtcatctgtgaggagcttgttcagtttggcttgccatcgggcgacaacacgaccgtcatcctggttctgttcaagcccggcgcctaccctgctgttccgccggtcgacaccgacactgacactgacagccacaccggcgatgatgtcgacaacaacgaccccgccaacgaggttgatcccactgccaatgccgggtctgatgacagcaacaccagcgaatgaggtcaaggtcgacgccactgccactgccgtcggcagcagcagtaccaccgcccgtggctgccgacgaagccaccgtggtgtcgttgtcgactgcaaccatcaccattgtggacaactacttcttcattaacaccagcgaggaggttgatcccactgccaatgccgggtctgacgacagcaacaccggcgacgaggtcaaggtcgacgccactgccagttccggtctttccgattgggaacttatatattctgaattctgatcctgttagtggtagacgagtaatagccccgacccgttgatagtagtagtttggttgtgctactttgctagactgagaccccttgaattaattgtttacgaatcatctctagcctttttagttctgaaggtgattgatctagtgatgcttttgttgatcttcattttgaatctctgtgcatggtagtggtttatgaactactagtagtatttttccc

SEQ ID NO: 67495 - DNA, 1204 bp, Oryza sativa
  Clone ID: PAT_MRT4530_68347C.1
atggctaagcaatccctagtccaatctctagtcatgttatgaccccaagctgacaaagggacatggtacaacaatagcatggctatgacaatagggctgacgtcagcacggagggggtgcggcgccggcaagcggggcccactggtcagcggctcaggggagagcggttcaacgtggaccgggaccacgcgggtggtccaccgccggtccacggaaccgacggcccagatcgccctcggggccgatcggacgggcggcgatagaggcggccgccgggctcggctcggcatcaaagccgaccggccggccagggctagcggcggcggcacgcgcgcgtcgcgttgccggcgacggcatccggcggcggaggcgacggcgcaaaagcgacgcgaaagcggcggcagcggacggcggcaacgaccgaaggcgacggcgagcgcgagcggtggcgacgcacggggaattagggaagaaaaggaaaggggagggagtcctcaccggaggggacggcggcgtccggcgacgaggagcgacggagggaggtcgacacgcggcggacggcgaccgggacgacctaaagagcgaaaagaaagaggttagagaggaagagaggggccataggagacgggaatgccggccgaaagcggcggacatggcgaccctcaccgacgcacgatgggaatggcgctccggcgacgaacctcgacgaaggaggggtggacggggtggatctcggccccgcgaacccgacggcggcgacggcgcggtgcggcggcgaccccagcggcggctagcagcggccggagtagcggaaacagcggcggcaagaggttgcacggcgcgggagcgatgggaggctcgggagatggggaaggagagagaggcgggattcgaaaatcgaatcccggccatctcgggcgcgggcgcgggcgggagagagaggggagtgggcgcggggaacgcggcgcacgcgcgggcgtggtcgacgtggcccgaaggaggcggagacgtgggcgcggcgacggttgcgggcgcggcggcgcggcgggagcggcgggaggtgggggaaggacccgacaggcttgggaggagaacttcggggtgtgacaagctccacctggaaaaggcgaaggatctcaggcaacagtacgttgcacggaaaccgaagccctgccttgaataccatatccttccttttattttt

SEQ ID NO: 67496 - DNA, 252 bp, Oryza sativa
  Clone ID: PAT_MRT4530_68348C.1
atgtctttcgtgattagtctcacacttctcaccataataaatgatgctataactggtaataatttgattagctcctggtttggaatggtatattcctggtttggagatagatctgtgcagccgggtatggttgttcagaatggttgggcctgtgtagcatgggtgtgctgttcagtgttgattaatattgatgattaattactctattgttttacaaattctcaaatgtttgctaaatgctgtttttgcaaa

SEQ ID NO: 67497 - DNA, 1044 bp, Oryza sativa
  Clone ID: PAT_MRT4530_68349C.1
gaaaattcaaaatccttttttattcatactttctcaaacacaaaatacactctcaaaatggtcaaatgagtgaaaagaaatttgactttcatatactaattaatatcttaacagaattccacataataatgaactaatgatcaatgcattttatatcatcgtcgccatgcctagaataatcctagcaaagagaagatcgatcaatcagcccttcctcccggcggtggtccactcctggtagcggcggaggctcgccggaaagtcggtgaagaggtcaccgacgtcgttgatccagtagtcgtactcggcgtacggatcctgccggaagttgaagtgcaggaactggttctcgttccggtacgtgtaggggtgcacctgcaagcccctggcgtgcgcccttgcgacgaggtccgtcggcgccgccagcttgttgtccgtcgtcggcggcaccaccgtatccttccacggcccgacgccgacgacgtactccctcatgtagtcgaggtgttcgtccgaggtcacctcgtcgtaggactggctcgtgtcctcggtgcgcaccgtggtgtcgtcgacgaggagcaccatgggggagtcggtgaggccggcggcgtagacgagcgacgtcggggcgaacgactggatgaacaccggccgcgccgcccacgccggcgacatgtaccggccgccgtagccgcgacgcttgagcgccgccacgaacttgtcctcgaacttcttgccgtcgcgccaccgcacctgccggttgacgaacaccgggttcttgatctccgggtagatgcccaccaccctcgacgccgcgccagccgcggtgtcgatgaactcgtcgaacgtgatgatccgcgacgactcgccgccgttgtaggacctgtcccggaacgcgtacctctgcttggatctcagcgtcttgagctcggccagggtgaaatcggtgatgaagaagccggtgacgttggtccactggacctcgagggtgcgacggcgggaggcgaactcggggtggtcggcgacgtcggtgcggacgcgtgg

SEQ ID NO: 67498 - DNA, 1968 bp, Oryza sativa
  Clone ID: PAT_MRT4530_6834C.1
atggccgagaagccaccgctgtcaccatcctcggctagcccaagcactgttaaagaaaagatccagaagttggggttgactgacgtcaatgaaggaaacgtcgtgcccatcgatccagagaaattcacacctgagcagaagaaggattttgaagcaatgttgcagcaagcctgggatcagttcttgaactcattcatgcagatccgcaagggaacattggttcagaagtataaagtaaatgtagatcatgggaccagttcttccaaaggtgaagacaggaaacaagctctagatggctcggctcaactgagtgacaaaggtgctaccaacggttctctaggaagtcaaggtgacaactctcaagggatccatggagttcaaggcgatggagtgcatggagttcaaggtgatgccgacggcgctggcatcgactcccttacctgctccgtcagcattggcaccaggccagctgcaaacgccaccaaggcaacagcctccgcggccaattcagtaggcgccgttaagacagcaaatcgttcagccgatttagcaccaaggctcaatgagcacatcggtcagggcatgattgctccgattagggagaaattctcgtccgaagactatgatagcttgtcacatctgatacaaaaggtgaccttgcacgagcataggtctgcggaggctaggaaaagctctaagaaggttaatcatgtttgtccttacatgtatgggtcggatgacgatgaggatgattctgaaatagctgcagccgaatgggtgaggagtaaaaaggtcataccgtgccaatgggtaaagagttctggaaaggaagagagacaacagattcaggtggccattgagggaggcaagattaagtttgatgattacaaaaagccgatgagggtcgatggtaacccatttcctgttaacatggtacacatagctgaccgaatagctgatacggggtgcatgaggggttatcaagtaagtttggctagaattataaacaaatatcaaaggaaatacggcaagcaacaggaaaggcatcatgaagaagataatggtggctttgatcctcattggggctgtgagttcttcaggttctattggaatgaaggtatgaggctaccatctatcgaggattgtcctggatgcagtgatgttgcagggggttcaagccgattagaacgcttccaggaggtcgagaaagaaattaatcatcggctgaagaaagcaaaaccgaggcaggagtggcgtgttaagaatcaggctcctgtagccgatgatgttgcagccgatgaggcaaagaggttggcaaaaggaaagagtgttgtgacggcaccagttaacatggcggtgttcaagaagcctgaggggacagagaatcggcattttaaaccattgtatataaatgactatgtcaatgggaagccgatgtctaaaattatggttgatggtggggccatgttaaatttgatgccttatgctacattcaggaagttgggtagaaatgccgaggatctcatcaagacaaatatggtgctcaaggactttggtggcaatccatcgaaaaacaaaggtgttctaaatgtggagctgatggtcggcagtaagactattcctaccacgttttttgtcatcgatgggaagtgttcttacagcttgttgcttggaagggattggattcacgccaattgttgtattccttcaactatgcatcaatgcttgattcagtggcaaggcgacaaaatagagatcgtgccagccgacagcatagttcctgtcatcaagaagaacggcaaggtgaggttgctcaaggaagttgaagccgatgctattgaaatcatgggggattctttgctgggtatttttggccgacaatgctggaggattgcttcagatattataaggggtgtcaagattgccagaagtttggggcaattcaacgagcgccggcgtcggctatga

SEQ ID NO: 67499 - DNA, 198 bp, Oryza sativa
  Clone ID: PAT_MRT4530_68350C.1
atggcgctcagtagctatgaattcgtgtgtatcagactcttgatccagggaaatggtactgtttacacgattgattcctattataaaaacgggggtccacatgcggcggtgactgtggggcggctgccagaggcagggagcagcgggtggcgtgaggtggagcggcggtgtgagcggcggcgctgggagagagcgtga

SEQ ID NO: 67500 - DNA, 1712 bp, Oryza sativa
  Clone ID: PAT_MRT4530_68351C.1
cggcaccaggcgcaccgacggatggcggcgcggaggtgcttcgcgttgctcttggcgctgtcggcggccgcggcgggggccggagccaagcggacgtgggagccggtgattcggatgccgggggaggtggtggaggaggaggtggccaccgtgccgcgcggcagcgagggcaccgaggaggaggagaaggacggcgtcgggacgaggtgggcggtgctcgtcgcgggctcctccggctacggtaactacaggcaccaggctgatgtatgccatgcataccagatattacggaagggagggctaaaggaggagaacattgtcgtgtttatgtatgacgacattgccaataatatacttaacccgagaccaggggttattgtcaatcatccacagggtgaagatgtttatgcaggagttccgaaggattacactggagacgaagtcactgcaaaaaaacttttacgcggttctcttgggcaataaaactgcagttactgggggtagtaggaaggtcatagatagcaaaccaaatgaccacatatttatcttctactctgatcatgggggtcctggagttcttggtatgcccaatctgccatatctttatgctgctgacttcatgaaggtgttacaagaaaaacatgcctccaatacttacgctaaaatggttatatatgtagaagcgtgtgaaagtggcagtattttcgaaggtttgatgccagaggaccttaatatttatgtcacaacagcgtctaatgcagaagagagtagttgggggacgtactgcccaggaatggaaccatcgcctccttccgagtacatcacctgcttaggtgacctatacagcgtttcttggatggaagacagtgagactcacaatctgaaggaggaatcaattaagaagcagtacgaagtggttaagaagcgtacctctgacatgaacagctacggtgctggctctcatgttatggagtacggggacaggacattcaaggatgacaagctttacctataccaaggtttcgaccctgcaaatgccgaagttaagaacaagctatcatgggaaggcccaaaggctgcagtcaaccaaagagatgcagatcttcttttcctctggagaaggtatgagctgttacatgacaagtccgaagagaagctgaaagctctgagggagatcagtgacactgttatgcataggaagcttcttgacagcagtgttgatcttgtcggaaaacttctctttggatttggaaatgggccttctgtgcttcaagctgttagaccttctggtcagccactcgttgatgattgggattgtttgaagagaatggtacggatctttgagtcgcattgcggaccgctcactcagtacggtatgaagcacatgagggcgtttgctaatatttgcaacaacggtatctctggcgcttcaatgaaggaagcaagcatcgctacttgcagcagtcacaactcgggtagatggagctcgctggtgcaggggtacagtgcttgatctgccgcaacacgtgatatagcctcaaaacttatgccttgtactcgtacttcctcaaaacaataccttcaggactgcaaataaccgtccaaggatgtaccgctgtatgctactgtacctctatgtgtgcaatatagatgccctgtatatacgagtatatgaatgaatcgtgtgcttttacaaaaaagggaaaaaaaaa

SEQ ID NO: 67501 - DNA, 378 bp, Oryza sativa
  Clone ID: PAT_MRT4530_68352C.1
atgacagacgcagcgcacatcgtcagtctccctccctccaaacctagagccgatcccacaacacgcacgattcatcaggtcgggagtggagaggagagacgggaaaccgctcacctacatgatgtttttgtcggcgttcccggcaaaacccagcaggttgatggagcagcagcagcagcgaaaccccgcaggtccattggatcccgcccacctgcaaatcctagcaacagcgaggagcacgctttagtcggatcaccccgcggcccacttcgccgacacggcgacgcggcggctctccggacgagagagctgttacgacctaactccgtcgagatcgccgccagtgatcaccggagttcaggaagaacaagtttctag

SEQ ID NO: 67502 - DNA, 362 bp, Oryza sativa
  Clone ID: PAT_MRT4530_68353C.1
ctcactgtcaccaaaaaccacccacaaacaccccagcacgtcgccgtcggtcccgcgggaccccggcggaccccgcgagacaacaccgcgcccaaaaaacacgccaagccacataccataatccccgcgacactcgtgacatagacaaaaacaagcaagagagcgacaaggaggggatagaggccgtggaccctgccctcacggacatccccccccgcgccaacgcacacgcccgaggggcacagccaacccccgagcgcgacccggcccggacagagggtccgcgcaaccgcacgcgcaccgacccgaagaaagccgcacgctgctgctgggccaagtacgcccaacaacaccccagatag

SEQ ID NO: 67503 - DNA, 270 bp, Oryza sativa
  Clone ID: PAT_MRT4530_68354C.1
gttttccttcgcgccgccgccgccgccgtcgaaggcgggggcgaacaccaagacgttctcgatctacaggtgggatcccgactcgccgtctaccaacccccacctaagggactaccaggtgcaccttgtcacgctgtggtccgatggcccttgaccggctcgtcaagactgagaacgacggggatcccgctggcgaactacaccagctttagcgtctaaaccgtcgagagctacggcgccatgaacatagaacaaggtgatcgcgaccga

SEQ ID NO: 67504 - DNA, 355 bp, Oryza sativa
  Clone ID: PAT_MRT4530_68355C.1
gctccggccaccggttcctgtgggtggtgcggasccgcgtcaggatccggccaacctgctcgagcatctgccggagccagacctggcggcgctgctccccgaggggttcttggagaggacggcggacaaggggatggtggtcaagtcatgggcgccacaggccaaggtgctacggcaccggcgacgggcgcattcgtcacgcactgcggctggaagctcgacgctggaggggatcaccgcgggggtgccgctgctgtgctggccgctgtacgcggasagaggatgaacaaggtgttcatcgtggaggagatgaagatgggcgtggtgatcgatggctacvacgaggaratggtgc

SEQ ID NO: 67505 - DNA, 3093 bp, Oryza sativa
  Clone ID: PAT_MRT4530_68356C.1
atggcgtcggccagacgagcgttcgttgcggcagagctgggagtggtggtgcgttgctggtggtggtgggcggtgacgttcatgtgcttggggacgctgccggtggtggtggggagcgacgggcagccgaggctgtggctgcagccatacgactttgaatgccatagtgtttttgacactgcgcatgttcctgccgtcacaggtagttatacatgtgtcccatgaattttggggtgtaattcgatgaataattcaagaagatagattttgtaactatgacatataaatttaaaggagccttgttgcatcgcatccgaactgtatatagagtcggtgcatagaactgtgattaaataatccttctattggcactatctttgtctggattatacggatcccggataattgatacccatcggagttgggtattctgtagcaatgcaacttttaagatgttataagaaaaacacaacgattgtgttaagaaatgaccagatatctccaggaatatggtacattggttactttaatggccttggacctgctcgcacgcaatcaaagatgattagccgaggcagggcacgttctgtgagcactagtataactgtagaaggatgtccaacttcagcactatggggaccatattgtaaccaaacaatagaaatgattagttgttctcagtcttcaggatataacaactcgagaaatcttatgggtttgaatattgacaagaggaaaactttgaataccagagagcacacaaggcgtattaattttctgtcgcagtggaaccatttagaagaaaagggagttggctccaacagtacaacctattcgagaatggacaactcgatcacttgtgccatttcaaatggctcattatgcttaaggcagggtgatatgaagttctacttcttggatgtggttgacctagcattgcaatttgaaattacagctacgaattttgggttagctcaaaggtcatccttaatttgttacctgcgctacaatgcctttcctcggagagatttgcatgattattcaggtgacatcagcagtgctcctttggttttaaagttgccaaatattggacggtggtatatcgctattgagactgtaaatataacacagatgaatagcacagcatcaacacctttactggatacgacatgcttctcattagagtggcaagtgactggatgcctgaatggaaaagctggaaccaattgctcatgggaggcatatgtgctccagagggttcctaaacgaagtccttctgtccctttcgagtcatattatgttcctagtgatggaaaggcatccctggagtatagtcacttctccctggaacaatttttaagcaactcatcttttgagccatttgcatggacttatttctttctggatattcccgaaggttcagccggtgcgcttatccatgtccagataaaatcagataaagaattgaattatgagttgtactcgagatatggtggtttaccatcaaatgagagtcgggattattatgcaagcaggacaagcagcagtaatggctcagtatatttttcattacaaaattccacaaattcagatatggatctatctattttctatgcaaaggagggaacttggtgctttggtgtgaaacatccaagtgataaatcaaattctcagacgtacatgtccatatctcttcagggatgccataagaactgcaatcagaaaggagcgtgtcattcctcaattgatgaaagtgggctaacgttctacagcttctgcacgtgcgatcgtgatcatggtgggtttgattgcaatgatgaattagtttcacctaatgggcacatctggcagtctgtctttctaattgcatcaaatggtgcagcaattttacctgccttttgggctctccggcaaaaggcatttgcagaatggattctttacacttctagtggaatttctagtgctttataccattcatgtgatgtgggtacctggtgcatactatctttccgtgtattacagtcaaacgtagacactcatgccacgcaagtccttgcgcctactgcatatttaggaatttcgcataggctccagggcctctccgagcatgggcagcttttccactgtatgtcactgtttttggatttctggctttcctttatggctgttgttggtacgttcatatatatggctacaattgatgaaacttcaaagcgagccatgcataccgctgtctttattctcacagctcttttagctgcaacaggtgctaccagatctgcaaatattggtattgtcattgctattggttctcttggcctgcttattggatggctattggagttctctacagcaagaagattcgtatgctggccgtggcgaattaatcttaatgtacctcaaagctggccaaacctcaggagtttattttcgaacagtctggatttgctgaacaaacgattccgttggttctatttacttctgggtttcatcacattagcatttgcgggtacaagctggaagctagaatcaaatcgtagctattgggtttggcacagcctgtggcatattactatttacacgtcctcattcttcttcctgtgctcaatgcgcatcaatacgcttactggacctaccctggaagaagagttgaatgccatattctttttgacagtgtgcatgcaccggcctcttcaggttggacagcttcgagaaggactctggaacctggctggacaagtcacaattgccgccgacgtgcagcgacttgagcagtcgtggctcgccgaggactctgagagctcgctggagaggcagttgtcgaacagctggaggacaaactcatggctggatgacgaaagtggcacggaaagaaggaattcacacccccgatgggacattgaatacacaacatatctgaaatacactagttggttttgtaccaacagtggtattcttccaagttataatccactcctcttcgacattttaggccaaagggagccaacatgtgagaatgcacttaatctatccaaagatgaccacggttttcttagtgtccatgagctaaatgaaggatcaagtgcggcctag

SEQ ID NO: 67506 - DNA, 220 bp, Oryza sativa
  Clone ID: PAT_MRT4530_68357C.1
tctcttcactccccacctgaccttgcctttttagagagagaaagagaagagaacgcgctctaccaggagagagagagagaggagtcacctcacctgcacctgagctcaagagcgagagagagagagagagaacaggcggaggctagatgggtgttaccctttgaaccagtgcccatacttttgcctaaagcaaacacccgaacctattacccttacctgt

SEQ ID NO: 67507 - DNA, 339 bp, Oryza sativa
  Clone ID: PAT_MRT4530_68358C.1
ataaaaaaaaaaaaaaacaaaaaaaaaaaaaaaacaaaaaaaaatgaagagcgttactactgtacccacgctaacatacccaaccaataaaaacgacatacctaattatctcgattaccttaaactgggcggccctttttaagggtcccaatcttccccccccggcaatacaacgtcataactcttcttttgggacccccaattcaattcccttggccgcagtttacccacgtgcgaattggaaaaccccgtgcgtccccccatataatcgcttgcaccaattccccttttacaagctctgtaaatacccaaaatgcccgaccggtgccccttttccac

SEQ ID NO: 67508 - DNA, 1695 bp, Oryza sativa
  Clone ID: PAT_MRT4530_68359C.1
gaatcccctccgcctccactcccctctcccctcctctcaacccccacagctcgcgccgccgccgcagctagggtttctctccgccctagcctacctcgcggagacctaccacccgaagcttcgggaaccctcgcatagccgccatgagcgacggcaaggactccctcgacctctccggcctcggcgccgccgtccccaacgccaaagagctcagcgcggaggacaaggccaacctcgtggagtcgattaagaacacgctgcagggattggcggcgcggcacacggacgtgctcgagagcctcgagcccaaggtcaggaagcgcgtggaggtgcttagggagatccagagccaacacgatgatctagaggcgaagttctttgaggagagagctgcacttgaagctaaatatcagaagatgtatgaaccactttactccaagcgttatgaaatcgtgaatggtgtggttgaggtagatggtgtcaccaaagaagctgcagatgaaacccctgcagagcagaaagaggagaagggtgtaccagagttctggcttaatgccatgaagaaccatgaaattctgtctgaggagatccaggagagggatgaggaagctcttaagtacctcaaggacatcaaatggtacagaattagtgagccaaagggtttcaagcttgaattttacttcgatactaatccattcttcaagaactcggtgcttaccaaaacataccacatgattgatgaagatgaaccaattctggagaaagccattggtactgaaattgaatggttccctgggaagtgtttgacacaaaaggttctcaagaagaaaccaaagaagggctcaaagaacactaaacctatcacaaaaactgaaaactgtgagagcttctttaacttcttcagcccacctcaagttcctgatgatgatgaggaaattgatgaggatacagctgaacagttgcagaaccaaatggagcaagattatgacattggatctaccatcagagacaagatcattccacatgctgtttcatggtttactggagaggctgctcaagatgaggacttcgaaggcattatggatgatgaagatgatgacgatgaagatgacgacgatgatgaagatgaggatgacgagggtgatgatgaagacgacgaggatgaaaagaagggcggacgagttcctgcaggggaagggcagcagggagagcgacctgcagaatgcaagcaacagtaagatgcttcctacctgagcgtttccaaagtccggtcctggagtgaagaagaatgtttggttcggcttgatgcaatgtctcgtccatttggtttggagagccagttggggaagtgttgggattgagttggtttagtggaactggcgggggatatttttttcgggacatggtattatatgtttggtagctttttccattgttgtattgggtcgacatatcttgtgcgaagcttatggttgagtgatgaatatcgccggtttggtattatcatattgccaataccactggcatagtgctgagaaattttgatctaggagaggcaatgtttttgttccacgagaggcaatgtttttgtgcgaccaagttgcatctttgatggcaaggaaattgttctttttttttttttaaaaaaaaaaaaaaaaaaaaaaaaaaaaaaagggggggggcctgcagcccggg

SEQ ID NO: 67509 - DNA, 240 bp, Oryza sativa
  Clone ID: PAT_MRT4530_6835C.1
atggcggcttcggattggaatcggacgcgccgtgccgcgatgggcgacggcgacgaagctggctttgctttgcttcttctccggtggccgcggtggcgccgatcgagctttggaggcagcgtcggtgtagaaggcccgtcggtgagctggatttggacttgcgacgatgatggcctcataggccggtctcgtggtagacggatggccggatgggcgacggtgtcgtccagggcaacgtga

SEQ ID NO: 67510 - DNA, 453 bp, Oryza sativa
  Clone ID: PAT_MRT4530_68360C.1
ctgctcttccaccgcaacgatggcactctccagcctgcagcaatcgagctcagcctacctcgctttgaggccggcagcacactcaactcgtccgtcggcgaggtctacacgccggcgtcagacggcgtggagggccacatctggcagcttgccaaggcctacgtcaccgtcaatgactactcgtggcaccagctcgtcagccactggctcaacacgcacgcggtgatggagccgttcgccattgccacgcaccggcagctcagcgtggcgcaccctatccacaagctcctccacccgcactatcgtgacaacttgtttatcaacgccctcggccgccagagtctgatcaacgccggtggtagctccgagaacaccgtcttcctcggcaagtatgggctctccatgacatcggaggtgtacaggaactggaacttcaccgagcaggcgctcccg

SEQ ID NO: 67511 - DNA, 456 bp, Oryza sativa
  Clone ID: PAT_MRT4530_68361C.1
atggcatcgatgaagtatgatctaccgctgctagactacaagacaagattctcactgtggcaagttaagatgcgggctgttctggtgcaatcttcggatcttgatgaggcgctggaaagcttcgggaagaagaagaaggatgaatggaccgctgagaagaagcggaaagattgtaaggttctgtcgttgattcaacttcatctatgtaatgatattttgcaagaagtgttgcaggaacgaactgctgtagaactttggctcaaactagaatcgatctatggatctaaggatctaaccagtaagaggcatatgaagatgaagttattctcgcagaagttacagaagactggtttagtgttgaaccacatatcggtcttcaaggagattgttgccaacctagtgtcgatggaggtacagtttgatgatgaagatttaggtcttctcctgttatgctaa

SEQ ID NO: 67512 - DNA, 639 bp, Oryza sativa
  Clone ID: PAT_MRT4530_68362C.1
atggggagaggctttgacttgtgtcgggagaccgagaaggcgacggccaggccatctcgcgtcgctgccttgcccctggaaacggagcgtatttacggccgttggccactgattatagtggattacccaatcccgattcccgggtggcttgaaaccgtggtttgggtcggtcgtcggcgcgactttgaccgcggggggacggtgatcggaggaggggagagggtggggggaccaaaggcccccgcggcgccggttgctgcagctgcggcgtctgcggccagcctaccgcctgtacccgtcgccgcatctgtcccagtccactacaccaccgactgctcacacaaggccagtgattcaacatctatatatcagtatctagtgttaagtagtaactccggggtcgccaggccagctactagctttgtacaagtaacacgtgatttgctgtaccgatcgatgattcaggcagcacgtcgtgtcgtggcgagggaacaccggaacagtatccggcagctggtggtcagggttaatactcctatctacggttacgttattaattcggccatgagctcacgcgtgatcgatcctgcatgcgacgccggcccgatcgatcagcagcagcaacccactcgcggtaat

SEQ ID NO: 67513 - DNA, 510 bp, Oryza sativa
  Clone ID: PAT_MRT4530_68363C.1
gttcaagttcattgaattctcgaatcatgttatctagggacaaagaaatagcagcaccaggattgtatatctagacgatactgagtgcctgtggatatttgtgtttatgccaacatctccctccaccagttacgaggattcccacaggctcatagccccaacaactctctttccaagaagttcatgaacagcatcaatccatgcaatcctcttcatccgaacagggacccgtaacagacttggaaaggatgtcaaacctggacactgacaccgtaccaactaagagaatccagagcatgatgtttcaaggccggttttgtctctttgcggtcgaatgtatggtcatgataggaacatgagtgtgtcctcagcacgaatacgcggattgctcgagggatttgggacgcaagtgggctgcaagtagctgtagctccctggatcaacagagtcacctaacgaacacactcataaagtccctccccgtctatcacttcaccccgttcgtaggtc

SEQ ID NO: 67514 - DNA, 1119 bp, Oryza sativa
  Clone ID: PAT_MRT4530_68364C.1
ttttttttttttttttgatcagaaacgagagaagagcattgctaatgcatattcagttcacaactagttctaggaagttgacattcaagtcagaaccgaagatatcttcggtggacttgccacaagtagctaatgtcaagcgttatttactcatttacaacgattcgacaaaataggatagccacaaaattatctaaatatagcttaagagtgtattgatgccatttctccctaggcttcatctgggaacatgcttggtgaccgggtgattatttcattagcctcaggcaatggcgaatctcttgcatcagccgcataaagtatcttctgtacagccttggtcatcggaagatgctccaactctggtctttgacacagtatctcaatgtcgcgcagcttagaaaagtagaagtctctttctttctccgcgctatccatagaaattttcaggcctgcaatcttctcagataattgctgaatctgttctatgtaatgctcttcagagataacattgactttaccaacgcatggacctccatcagctgaatttgcactagacaatctattagcttgtagtgatttggacgacttgttggaacctttgagactgcgttctttgcaacccttagacctcctctctacaggattgtagttttcattcatgattccaccatttacagaatcacaatatcttttcaaccattgcagaaactccaggttatccaatggacgtcccttgacaagcttgttgacctcaatattcttgctcaaccgcagcttgttgaacacatcttgaagaatcttgtagttctggatcatgtcatactcggtcttagcatcaaaattcaccttgtgcattggcaccaccccagggtgaaccatatccatcaactggcactgcaccgcccctgacgccgcctcctcgaccttggcgagggagagctggagggtggcattgatccagctgaggatctcccccctcccgacgaagtacgcgctgtccatcatccctatggtcgccgccgccgccgccgccgccatctcctccgctgctctctctctctctctctctctctctctctctctctctctcgatcggggagagccgagcaaactttt

SEQ ID NO: 67515 - DNA, 196 bp, Oryza sativa
  unsure (1)..(196): unsure at all n locations
  Clone ID: PAT_MRT4530_68365C.1
cttgcctgaagtagttgcttcctgtagtcacagttgaatacagtttttggatccttgatggtaatcgggagcctttacaggtctacccatgtgcatgtgtacatccaccatgtctacggctgctcaactgagttacaacagttgtataaaccctgnagtaatgccagacaaaattacaccaaaaaaaaaaaaaaaa

SEQ ID NO: 67516 - DNA, 684 bp, Oryza sativa
  unsure (1)..(684): unsure at all n locations
  Clone ID: PAT_MRT4530_68366C.1
gcgcgtgttgtttttttggcttctttttcgcttgccattcgcgtggaggcgtttcgaaaagtttgctcggctctccccgatcgagagagagagagagagagagagagagagagagagagagagcagcggaggagatggcggcggcggcggcggcggcgaccatagggatgatggacagcgcgtacttcgtcgggaggggggagatcctcagctggatcaatgccaccctccagctctccctcgccaaggtcgaggaggcggcgtcaggggcggtgcagtgccagttgatggatatggttcaccctggggtggtgccaatgcacaaggtgaattttgatgctaagaccgagtatgacatgatccagaactacaagattcttcaagatgtgttcaacaagctgcggttgagcaaggtattggttctggcctcacaaatgagtgcttggcgtctttgatacataatattgaggtcaacaagcttgtcaagggacgtccattggataacctggagtttctgcaatggttgaaaagatattgtgattctgtaaatggtggaatcatgaatgaaaactacaatcctgtagagaggaggtctaagggttgcaaagaacgcagtctcaaaggttccaacaagtcgtccaaatcactacaagctaatagattgtctagtgcanattcagctga

SEQ ID NO: 67517 - DNA, 182 bp, Oryza sativa
  unsure (1)..(182): unsure at all n locations
  Clone ID: PAT_MRT4530_68367C.1
ngtgttccacaaaatacaccctcactcagcatggttctctatccagcaacacagcattcaacacccactcactnaaccacttacgcacgcatgcttccattcggtccaacaggcagtccgccgaggggaattttacagccctctcacacccgacngcanatccctccctacagccctnagcg

SEQ ID NO: 67518 - DNA, 132 bp, Oryza sativa
  Clone ID: PAT_MRT4530_68368C.1
tttgacggcgaccgtcgatactcgcaccgagtgcaagaatactgaggcgcgaccagaaattaaaggcaagaagataccacttgttagtcataatgaggacctctacttgattgataatgaggacttcactgc

SEQ ID NO: 67519 - DNA, 886 bp, Oryza sativa
  unsure (1)..(886): unsure at all n locations
  Clone ID: PAT_MRT4530_68369C.1
cacattagaatctggaaatgtaacttcttatttctggttggccacatacatcatccaaaaaactttattattgaattacaactaataatcaatctaaaagaggcaccaccaatgatgtgttgttggtaggaggctgctgggtttgtcaaagcaagttggacaaagggcaacaattgttgtagttgtaagagggttgcggggttagccgcaaactgcttgtagaaaggcagcaactgttgctgtgtcaagaaggaagcacgacttgctgcagctagctcgctaaatggcagtagtatttgctgctgcaaataagcagcggggttcagtgcggccaattggttaaatggaagaagttgttgttgctgagagtaggcagtagctagctggctaaatggtaatagttgttgctgcaaataagcagcagggttcagtgtagacagttggttgaatggaagaaattgttgttgctgagagtagggagaaaggtttgccagagctacttggttgatcacaggtagcacgagttgctgcagctgttgtgccctgatggtttgtaccaatgactgcaccaaagataaggctggtgattgttgaaacaacaagggcgataaaggtatgttgcttgctgcgattgcttgttgaagcctatatggttgaagagctgggttttcacatactgaagctataattgatggaaggtatgggggaagaagggaagctataggagcttgtgagcattgagggaaaattgtcgcgttagcaacacatgtagaaagagcaaggagcataaggagggaaaatatcttggtcgccattgttgctctattgttgctaatggattctacttnctatgttgcttgctgcccacgcggccgcggacgctggg

SEQ ID NO: 67520 - DNA, 2256 bp, Oryza sativa
  Clone ID: PAT_MRT4530_6836C.1
atgaagaacccaagctattattttgagggcgtcgtggagggttcaagcgtctacgccaaggacacggtagatgatctcgatgacaagcaaggtcagggttttatgtcggccgatgatttagaagaagtggatataggtccgggtgatcgaccaaggccgacattcattagtaagaatttgttaatagaatttagaaccaagttgatggagcttttgaaagagtttagagattgctttgcttgggagtattatgagatgccaggactcagccgatcgatcgtcgagcatcgattacctttaaaaccagggattagaccacaccagcagcctccgaggagatacaaagccgatatgcttgaacctgtcaaggctgaaatcaaacgtttgtgtgatgctggttttattcgtccttgccgatatgatgaatgggtttctagtatagttcctgttatcaagaaaaatggtaaggtgagggtctgcattgatttcagggatttgaataaagctaccccgaaggatgaatatccgatgccagtggccgatcagttggttgatgttgcttcaggacataagatactaagttttatggatgggaacgcggggtataatcaaatctttatggccgaagaagatatccataagacggccttcagatgtcctggtgcaatcggcttattcgaatgggttgtaatgactttcgacttaaagagcgctggagctacgtaccagagggctatgaattatatatatcatgatctgatcggatggttggttgaggtctatattgatgatgtggttgttaaatccagagaaatagaggaccacatagccgacttgagaaaagttttcgagaggactaggaagtatggtctgaagatgaatccgacaaaatgtgcttttggtgtatcggctggccagttcttgggatttcttgttcatgagagggggattgaaatacctcagaggagtatcaatgcgatcaaaaagattaagcctccgggaaacaagacagagttgcaggagatgatcggcaaaattaattttgttcgaagtcatggttatggtatcggcttggttataattgcgccttggggggcaagttttgaatttgcctatgctattacacaccatgtgactaataatcaggctgagtatgaggcggttttaaaagggttacagttgcttcaggaagttgcagccgatgctattgaaatcatgggtgattcgttgttggtgattagtcaattggcaggagagtatgaatgcaaggatgatacattgatggtttattacgaaaagtgccgaacgttgataagtgaatttcggctggtgactctgaggcacatatctcgagaacagaatatagaggctaatgatttggctcaaggagcgtcgggatataagccaatgacaaaagatatcaagatagagattgctacaattacagccgatgattggagatatgatgtagaggcgattccgttaaagaaagttgattctagggatgctatacagtttgttcaagagcatataatctatcgatttggtattcctcaaactattacgattgatcaaggttcaattttcgtatctgatgagtttgttcaatttgccgatagcatggggattaaattgttgaattcttcaccatattatgcacaagctaatgggcaggccgaggcatctaataagagtttgatcaagttgattaagaggaagatttctgattgtcctcagcaatggcatactcggctggctgaagcattgtgggtttatcggatggcttgtcatgggtcgatacaggttcctccttatagacttgtttatggtcatgaggctgttttaccatgggaagttcgaatcggctcgaggataacagagttgcaagatactttaacagccgatgagtattataaccttatggccgatgaaagggaggatctggttcaatcacggctacgagcccttgcaaaggttactagggataaggagcgggttgcccggcattataataagaaggtagtacccaaggacttttcggaaggtgaacttgtatggaagttgattctgccgattgggactcgggatagcaaatttggcaagtggtcgccgaattgggaaggaccgttccaaattcataaggtagtgtctaagggagcatacatgttgcaaggactcgatggagaagtttatggccaagctctaaatggcaaatacttgaagaaatattatcccagtgtttgggttaatgcatga

SEQ ID NO: 67521 - DNA, 1448 bp, Oryza sativa
  Clone ID: PAT_MRT4530_68370C.1
tttttcccagatcagagccagaatctattgcatttgatatcttctacaatcctgtatactagtttttttttttttggctacagtaaagtattattgttctgtatatctagtaatctttaattgtacaacattccctctctacggtgtaaagtactatcaaggctccagcttgcttttgcactgtgcctgaaatgaatacgtaggagaaaaaatcgcatacaaatgcctaattgttcaatactacaataattctataccgtaccccaatcatcatcgtcgtccatgcttccatccgatcttaatatcgtcggcaagattgttcatgccagtacgtagcatccgtaaattcgatcgactgcgtttgatcgatttccatggccattaattaagctagttaagaatatattcagaatagctgaggaggaagcatctggtggttgagtccggcgaggactgacgacggcgtcgcttgcaagccgcccaccacggactgcggcgccacgtcgaagcatgagccgttgagcctcttcgccggcgtgtggccgccgccggcgtagtctccggccgggctcgccttgcgcttgccgccggcaacggtggccgtggacgccgtcgacgggtagcactccgcgaggaagttgtcgccgacgccgaggagctggttcagggaggggtggacggcgagggcatgctgatggtggtcggccggcgggtcgcgcggcggcgtcgaagatctgggcgagcgcgtgctcgtcgaagagctcggagatggaggggatcttggggagcttggggatgagcgtggtgctgatcatcggcggcgcgtagaagctgtaggcgtcgtcaaggactccggacggctcgtcgtggtcgtagtcggcggcgagcggcggcatcatcggcgacgcctggccggacttcttgtagatccggcagagcacccagtcgtccagcctcatggagacgttgcggaatcgggaggaggaggagggcttgtaggtgtttgcggcggcggcgagagggtcggcggcgaggcggtactcgtgcatgatccagctggtcttggtgcccttgggagggcggccgcggtagaagacgagggccttcttgacgccgacgctctcgccggtggcgctgtcgtggatgggcttgtcggttcccgtcgccttccagtaccccgacccggcggcgcggttcggccggattccgttggggtacttgcggtctcgcgggctgaagaaataccactcactctccccgtacaccgccttcgatggcaggtcccatggatcgaacttgtagatgtcgacgtcggcgatgatggggacggggcactgcccggcggtggcgcggctgcggaggtagtgcaggatcagctcctcgtccgtcgggtggaaccggaaccccggcggcagcgacgtcgccgccgacgacatcgtcatctccat

SEQ ID NO: 67522 - DNA, 495 bp, Oryza sativa
  Clone ID: PAT_MRT4530_68371C.1
atggagagagaggatgaggatgaaaattctgaattgtttagagggaaaagatctagagaggagggagggtttttggactcaacaagtagagcgtatggaagccggaacagcaatgcccatcaggtccacgattggataatctttttgcagaaaatgcagctgctgcgggtggtcgttactcgttacgttgcatattatcagttatggcgatcgagatatatgcctcgctttgcagcggaaacggtaacttctactaacagtgggtcttcacataggcctatggggtgcggggtgcctgccctgcaagacggcaattatgagagtgcaactgaacattcatgcacatgcttgggcattggtggcattcagaaattacttacaacggcaggaatcattgcatggatcattcgttctgcaccctataattgggagcaaacagatgagatggacttggaccctattattgaaggcaccacagcttgctatgaagtatga

SEQ ID NO: 67523 - DNA, 467 bp, Oryza sativa
  Clone ID: PAT_MRT4530_68372C.1
ggagaaacgcagtgcctgcctagcctcagcaggcaggcatgccgatcccggttgatctgggcgagcctgacaacaggaggttcttcgtgtgggtggaagacaatatattgacgatattaccacctgatgccgatgaccatgagtactctggatttaatatgtggaccgtccaaaagccttcagctggctcaaccgccattaacttattatttccaggaggcgcaaccgcagctgaactaatgtacgccgttcctggagcctccaagtgctccaaacccgaggatgatgatgccgtatactgcgtcgaggcccaagaccacagtcattttatttgttccatcactactatagacactatttttcctgtgcgtttgggtttattatctcgtgcggtggatcggcccgcttgcagcgccgtatctgggaaaatcgatatatttgtgtgtgggcgggctgatcgtacgaaa

SEQ ID NO: 67524 - DNA, 1208 bp, Oryza sativa
  unsure (1)..(1208): unsure at all n locations
  Clone ID: PAT_MRT4530_68373C.1
aaaaatgtggtttttttgtgcaaaagagtatttaagtaactccaacattagattataaatagtgaacattgtaagtcactaggtgtatatcttttgtagaaaaagggagagagaaatgagtggttccacaagatacgcacgtgagaaggtacgcncggggggagcatccgatcgtgctccccctgctggacgcccggcaatgagcattttcgatataactggcttatggtaatgtcatcattcttgtcattctcatcgtatctatagttagctccaataacttgggactgcaagagagcagacagtcctgcgagctccaataacctggtaatgaatcctgacgaacagatcaagtaccagtcaacatcgacttgttgctgttacatcctgcttaggtggtgtacattattagaaatactaggggaatttttttcagtctggttgcgaggtctgaattactcaatatgaatcatagtttcatttttttttcttgatccactctatctatttcgtgttccagatactagaataaataatatccgacgaattagaatcatcttgatagagataacaggtgctttctatgtattatcaataggagcaaattctaacaagtcacacactcatattccagagataccgaaaccaaaaaattccacggtcgaactaccagaatgtctagaaatgtagagcttaaagtagaaaggctcttttggatggaaaaactatgacttcgtagttttcgttagtagaaacctaattcattaaaattccgtccagtaaaacggaagaattataaatttctaaaataatagataggaataccgcgaataaagccattgcgacccccataaaaggagtagtcccccaacccggagctactttcccatattccgaattcaagggtttcaataaattacctacgcgagtttgtcttggtccaggtctagaactatcttcaacggtttgtgtagccataaattccatttaatgatttgtgttgactttgtatactattccgttgtagttgtaaatacacgatcttttcgtagatccgttgtaatcttgaaattctataaaaatggaaacagcaactttagtcgccatatccatatctggtttacatgtaagctacactgggtatgccttatataccgcgtttgggcaaccctctcaacaattaagagatccattcgcggacgcgtggg

SEQ ID NO: 67525 - DNA, 457 bp, Oryza sativa
  Clone ID: PAT_MRT4530_68374C.1
cacaagcccaagtcgcgtcgaaccgaagctgagtacagaaggagaggagcgtagcgccatcaggcgtaccatcgagtgatccgatggctatcgctatgtccacctgtgatgatgctgccgctgacgccggagagcggtcgctcgaggcgagggcgacaacgacgaggagttacgccgcgtcggcggagtcgtcgggaatgaggcgtgccagcgcgacgttccaaggcaagggcgctgcgtggatgacgcacgctaaggacggctcgtactcatcacacgacatggaggagtcgtgggagcccgaccgcggaacggatcactaccggaccttcaacttcgccggcagtgacgacaccgacgaccgtcgagcaagacacctcgcccgaagatacgcccgtacgtgatgcgcgcgacctgcccggctaccgaccgacgactacgccatgcatgcatatat

SEQ ID NO: 67526 - DNA, 561 bp, Oryza sativa
  Clone ID: PAT_MRT4530_68375C.1
atggggtgcacaaatatgttgtcgccgtcgcagctctcgaaaataaagacgatgttgcagtcgaggcccgatatctgcaagaggaacagccacctcaagttctgctacagcctccgcaaccgcaatgtgttcgtctccaaaacccacaagccacggctaggccctctccagtacaagaaagggaaggaacctgtgtatgatgggtcatggcagaccccaacatgtgcaaaggttgctctagaacactataacagatcaaatgaggatgaatatgagatggttaaagcactggacagtgtttcttccttcttcaatggtgtgtgggtgcatgtaaatttccttgctaaactcaaaggggccacccaatgtcctgaccttgttcccaagttctttgctgaagtgaaatccgattttgatggaaggtcatgtgtctcttgtgttaagattgacacaggtaatccagaggcaacaccaattcgcggttgtgggatttgccaaaataatgagatctaccatcctgctgttggagggcaccgaggagacaggaagagtgcatcataa

SEQ ID NO: 67527 - DNA, 207 bp, Oryza sativa
  Clone ID: PAT_MRT4530_68376C.1
atgttcagccttctcttcgtcgtcttccccaccactcgccatggcatcggatatccagtggaatccaactccgaccacccgctgcgccaccgcatcgccgaccggatcgtctgcgccgcctccatcaacaagcccgccgcccactggacccacgccgacgtcttcgtctttttacttctacctctggtggcaacgccccgccattga

SEQ ID NO: 67528 - DNA, 189 bp, Oryza sativa
  Clone ID: PAT_MRT4530_68377C.1
atgccgcctggactcccctacctgccaggcatgcgatgggaccgacggcgggcccgcctaatcgcgcccgtgaacatcgcacgccccgcgccgagtgtgccgctgacaggcgcactaaacgcggggcgtgggttcaatgggcgatgtgatgagtggacgcgagaaacgatgaggcaaccgcaggtgtag

SEQ ID NO: 67529 - DNA, 129 bp, Oryza sativa
  Clone ID: PAT_MRT4530_68378C.1
atgccgcctgacacgggggacatccctgtcagcggccgtcaaggggcaaagacttctgggtccatgttcacactgctcgtcgtcgttgcgcttggaggccacaaacgtgaaacagtgaaggacccaccg

SEQ ID NO: 67530 - DNA, 2214 bp, Oryza sativa
  Clone ID: PAT_MRT4530_68379C.1
gctgccaaattttagtaactatataaaaaatcctactaaaatttgggcaagttgccaaaatttagacaactatgccaaaaggttttttttggcatcaaagtgaacaggcccgtagtattatagcccaccctatggcctaaacatgttttttttcccttgcaattcgaagaaagatgacagtgctcagcaactcatcattaatcagagaaattctggattgttaaactagtagtttctaccacatctctccaccaaacgattccacagcatcaactactgtgccatacctcacaacaaaatggcggcagagaggcaaaagtacatgcatcgtatatgacatgtaacgtaagactgaatcaacagagcagctaatggctgttataagggcgaaacgggtgctgctggcctcctccctgcccagcaaagggcatcatcatctggggccccgtaccaggaggaaactgctggtcgccgtacatcggaaactgctgcggcggcataggtggccttggaccttgctgaaactgcggctggcctccatagcctggaggtagatgctgccctcctccatggccatggaacggcattgcttgttgcccaggtgcgtcttgaactggacggcctccgtcgccagggtactgcatgaacgatcctggaggtggttgatggttcatttggccaggcatctgctggcttccctggactggatgttgttgatgcatttgagcttgagctgagcctgggggaaactgtggagatccatagcctggaaattgtgcaggaggaacaccaggggggccttgaagaattccctggctagtgtacagcggagctccaccagagggaacggcaggagtttgcggaagcggctcgctggatgtgtaaggatgagatggtgctccaggtggagtgagagtagtccctggtggcactactgcaccagtcgctgacgaaggagcgttgttgtaagcaccggaatatactggttgaggaccaagaatggaaggttgattgctggtcggtgcagtgttccctccagtgtaatctctaccacgctcattgttaaccttaacattaagatcggtatggcgcgaaaatgtgagatgaagcttgcaatatccaccttcatagatgctgtgcccttctaatgcttcttttgctgcaactgcggtttgaatatctggatactggattaatgcctggaagccagagttcttctcaaagatagcaatcttttgcacaaaaccaaaagcagaaaagacctcgtgaagcacatctattgtaacaacatactgcatgttctcaacagatgcaagcagaacgttgctctctgcttcctgcttcttcccatccggtccagatccatctatagcagaaggagcaaccggaaggtacggattagtgtagtctctactcctgtgactttgaaacttgacatttagaacagtatgtgctgaataatttattctcaaagtgcaaggcacatcaagttctggaagcaaatagctaggaatgcatctaccatccagagcagctttggcagatgatgcagtttcagtatcacagaactgtatcaatgcctgataaccagatgccttctcaaaggtggcaatcttttgaacaaagccaaaagcagaaaataccaggtgtagaacatcgatgctcacagcatctggcagaacaccttccatcgacactagcaaaacattgcctgcagcttcccctgaactcttgctgttgacaatctcttgtctattggagtactgaaggtacacatttttccctcttacctgtgcaggctcagctgatgatgcaaaatatgatatcatagcaattgcctgattttggtcagcgaattcgacgaaggcctggttccggttggcgccgacgttgcatttcgtgttgacgaccttgccgaaggggctcccgagctcgaccagctcctcctccgtgcagtcccacggcaggttcctcaggtggatcaccttcgacggcggctgcgtgtacctgaactgcggctgcccggaagccatccccgcacccacccaagatacgcctcctcgcttcctcgcccgtcaatctttgcgagagctgcgagtctgcgaccgccggcggtggcggcgatgggaagaggcgagatgccggagcggaggaagacggcttcgatttctctctcctctgtccgtatcggtgcggggtcggcctccggctccg

SEQ ID NO: 67531 - DNA, 274 bp, Oryza sativa
  Clone ID: PAT_MRT4530_6837C.1
agaacatggcgagaagccttactaatacatgtgactcacaaacaataaacaggaccgagcctatatacagacacaaaagcgcatgcacaggaacatgaaaaaccaaaccaaatgacacatagctaacaagcacaaccacaatgccctgctatgcagcaagaaagaaagaaagcttcggtgtccttttcatactgttaaaataacacactgtcaaacacttggttaataacctcaaaaacacgggttttgtaaaaacgccccaacttaattaaaa

SEQ ID NO: 67532 - DNA, 330 bp, Oryza sativa
  Clone ID: PAT_MRT4530_68380C.1
tcgacgcacgcgtcacgcgtgcgttcagatgagatgctacaaaatatgccgactttttacattctacaacagtttgagaatcttgcagacccaaaaatgcactatgaaagaactggtcctgagatttaaaaggccactgctaggaaagttgatatgcatgaatgtggcattcataaccgagcctacagaaaccaccacacagaaagtacctgatggagcacaaccctgagatcatgatctatcgtgacgaacccacagaaagcgcaattctatatgatggaagactgcgcccgaacaacatgacacagcgagcagatctgttactgttac

SEQ ID NO: 67533 - DNA, 172 bp, Oryza sativa
  Clone ID: PAT_MRT4530_68381C.1
atacacgtgaccgactaacgtgaccgaacgctaggtggtccacgctatctctaccgtggggatttcggcaggacgacagtgttgagtgactcacctcttaaagcttcgtgaacgtcccgtggagtgagtgtgactcaaaacatttaaaacggtggcacgtcaccggtgtgga

SEQ ID NO: 67534 - DNA, 1193 bp, Oryza sativa
  unsure (1)..(1193): unsure at all n locations
  Clone ID: PAT_MRT4530_68382C.1
ggangcnaaatcggcagaaatggcggcttcttgcgcgctcaccctcccctccgccatctccgtctctgtctccgtctcctccaattcacctcgacggttcaggcgctctaggagggtggtggccatggccagcgtggggcagaaggtgtacgcgcccggcgtggcggtctccgagggcaatggcgggctgccaaagatcgacctcaagtccccgcatgggagtgaggctgaaatttatctatttggagcctgcgtaacatcttggaaagtccccagtggaaaagacctcctatttgtcagaccagatgcggtgttcaacggccagaaacccatcagtggtggaatcccacattgcttcccccaattcggtcctggtaccatgcagcagcatggatttgcaaggaacatgaattggtctatcactgattcagaagctaatgaaggagatccagctgtaactttggaactaaaagatgactcttatagccgttcaatgtgggattttagcttccaagctctgtataaggttgcattgcactctacaagcctgtcaacaacactgaaaataacaaatacagacgataagcctttttcatttaactcggcactccacagctatttcagtgcttcaatttctggtgtttcagtgaaaggtctcaaaggttgtaagaccctaaataaggatcccgatcccaaaaaccctttggaggggaaagaagagagggaagaggtgacttttccaggatttgtcgattgcatttaccttggtgcaccgagtgagctcaccctggacaatggattgggtgacaaaattgtgatatcaaatgcgaattggtcagatgcagtgctgtggaatcctcacttgcagatggaggcttgttacaaagattttgtctgtgttgaaaatgcaaagattgaaacattacaactggggccgaaccaatcttgggtggcagagcagaaaattgaactgatatgaattatgaagctaaactgggcaaaacaatagagtacaacaattatgttgcaaaaatgaacttctctttttctttacatcatgaaatgcaaatgtcatagcccctaatgtatcatctagtaggtggcataagtcatatttttgaaattgttttatgtaataaataagtaaataaataaattcagttctcccattaaaaaaaaaactaaatattatt

SEQ ID NO: 67535 - DNA, 519 bp, Oryza sativa
  Clone ID: PAT_MRT4530_68383C.1
atggcggcttcttgcgcgctcaccctcccctccgccatctccgtctctgtctccgtctcctccaattcacctcgacggttcaggcgctctaggagggtggtggccatggccagcgtggggcagaggtgtacgcgcccggcgtggcggtctccgagggcaatggcgggctgccaaagatcgacctcaagtccccgcatgggaggtgaaatatttggggtggataacttgtgtgagattcttggagggattgtggtagtttggtttatttgtataatttgggatcttgggtacctcctaacttacccttcaaagtttcaagttactatcggtttctttcaattgacacaacaaagtgaggctgaaatttatctatttggagcctgcgtaacatcttggaaagtccccagtggaaaagacctcctatttgtcagaccagatgcggtgttcaacggccagaaacccatcagtggtggaatcccacattgcttcccccaattcggtcctggtaccatgcagcag

SEQ ID NO: 67536 - DNA, 175 bp, Oryza sativa
  Clone ID: PAT_MRT4530_68384C.1
cggacgcgtgggcgatggtgttcaaatactgggtacctactttgatcgtgtgaccctcctgtgggaggtgtatttctccatcgtgtgaatgtttctcatatctcctatttgcgtgcaaaacatccgtgtaacattcacaaatcaccgtgttaataccactggtcagactgataat

SEQ ID NO: 67537 - DNA, 342 bp, Oryza sativa
  Clone ID: PAT_MRT4530_68385C.1
acataaataccaccacaatgattttgtccaaaaagagccaaaaacacaaagggtcaaccttattaacaccgacaaaaagttgggctcccaatgtaccattaccaaatgatcgggcacatacaaataacaccaaaatgcggcttccaaaaaaacgccaaatgtttaagcacttggagaccagtatgtctacgacataataccgattgggtgctgccctatgaaagagaccatctttacaagatgcaagaagcaatgtcaattgattattggagggagggatacgtttataggcccgaaccgcatttcgcaaattgtttgtctccggttgggggccaaagctaa

SEQ ID NO: 67538 - DNA, 541 bp, Oryza sativa
  Clone ID: PAT_MRT4530_68386C.1
gggggcccaaggggcgaaaaaaatttaaaaattaaaaattaaacaacaaaagaacagcacaaccccgttcaaaattttaaaagggatgttacaaaaggaaaaaggggggaggaaaaaaaaaaaaaaaaatatatggaaaaaggtcaaccaaaaaaaaaaagccgggagcaaaaaaagcaaaaacaaaaggccctaaaaaaaaagggttttttatatatatagagagagagaaaaatgtcattctttttttttaaaaacaacaacactgggggacaactcgttcggagcccacaggaagaaagcaaagcagcccccccccccttttggtacaacaaaagcagggaacaccatggccgggggcgccggcaaactcaaaaattcctccggaacaacgggcaggaaccatgcttgaaaaaccagcccgcgatgcacggcacaaggaaaacgggccaacaatccggaaagcccccaaccttttaacctggctggaaaacccggggggaaactgaacatcccgagagggcaccaaggggggtccccc

SEQ ID NO: 67539 - DNA, 334 bp, Oryza sativa
  Clone ID: PAT_MRT4530_68387C.1
gcttttctttgtctgcaggctcctaagccccataggggggctttttaaaatactatgcggggctcactgctaccatccggctacgcctaataggcgccggagccccgcatggaccacccggcctgatccatgcatggcacgcaggacaagaccagagtgctgctccacgaacggcggaattactgactgccacacagcgggtctaaacaacctacagatcaccatgaactgcgcacatctggatcagtcccaaggacctactacctcttagtcggaatcacaccatgtgaacatcccaacgacatacatttccattgaagcgaccctggatatt

SEQ ID NO: 67540 - DNA, 226 bp, Oryza sativa
  Clone ID: PAT_MRT4530_68388C.1
tggatccccgggctgcaggaatcggcacgaggatatcttctgccgctataattcttcatccttatcactgtataatgccacactatcgtattgccgttgccataaactaccggtgaattactagtccattaaggtcgattattgccgtagcaggatgatgcttggtgttatacctagtaaattggtggacatgtctggatgttatacctagtagaactccaataca

SEQ ID NO: 67541 - DNA, 484 bp, Oryza sativa
  unsure (1)..(484): unsure at all n locations
  Clone ID: PAT_MRT4530_68389C.1
tgttgcaatgcatggtgaggngcccactgtggtgtgtgcactggttgaatgtgatgcgccaatgtgcaaatgctgtgaatgtggcctggctggtaaggggaacagggatgatgttggctgctgtgtgcttggtgagctggttggtggtagtagggattgacctaagatgcgccaaaatgggtggctgttgcgcacaatggtggttaaggtgggggctggtgtttggttgttgaagggtaagggaggagataaattcggtaggtgttgttcttggagcatgcaagaggggagcgcanaaaggatgtgttgtggtgaatggatggctctgtcaaaggaaagtatgtgcaatgaattgatggattgataatggtaatatggtgggatttggtggatcttgcatgagnccaagtggcttgctttgtgctccatatggtgtgttgttatctgaaaatagatttatatgattaacatctctaaaaaaaaa

SEQ ID NO: 67542 - DNA, 133 bp, Oryza sativa
  Clone ID: PAT_MRT4530_6838C.1
cccacgcgtccgctcccccactcttctcccagcaaactgaaattggagtgagcggttgcctttagcttattataggagacctacaccacgcaaggagaggggggccccgcgccagttcagatgttcagctgga

SEQ ID NO: 67543 - DNA, 1293 bp, Oryza sativa
  Clone ID: PAT_MRT4530_68390C.1
atggtaggcaagccacatcaccatggctcctcctcgcttgtggcggaggagctcaacctcttgcacggcggcggcgatggcggccgcggcggcggcgggctggggcagtggaagtgccggctgctgggctcgctggccggcctcggccggccgcggcgggcgcggtgcgtcgtgtgcctccaggtgcagcacgtcaccggcctccccccggcggcggaagggcgcggcgtggtggtggggtggcgcaccaggggcggcgagggggagcacacgtcgccggtgcgcgcgtcgcgcggcgccgccgcgttcgacgaggtgttcctcaactatttcgtcgccggcggcgccacgctgcggagcttcgccgtgtgggcggcgctcgtggacgacctggcgtcgacggcgaggggcggcggcgacctcggctccttccccgtcgacctcaccgagatcgccaccgcggagagctccaacccgcggttcggcggcaaggccctcagcttcccgctcggcggcgcggccgccggcgccgtgctcaccgtcagcgtctactgcagagtgatggagcgtgaggaaaaccatggcggcgccaatggccatgcaagagcggagaggaagaacaaggggaagggatcctacgcgtcgtgcctgccggatctgagctgcctccggaaccggccgtctccggcggcggcggcggcgtcggggtcggctcggcgggcggcgtcgctccgatccgatcgaggcgggttcatcacgatcgagaactcggtggcggagatggagggcggcggcgcgttcgggcgcgtggaggacgtggacgaggagggcgcggggttcatcacgatggagaagggcaccatctcgtcttcgcggtcgcggtctcgccggccggcgggcgaggacgacgaggccggcgacatggaggacgagaagccgtgcctgctgatggagctggcgccggaggaggcggcggcggcgttcgaggtggagaaggtggaggaggagttcctggcgatgctggaggacaagtactgggcgaggagcaaggagatcgagaaggggttgggcgtgagcctggacatggggctcgatctggggctggacctcgactcgctcatcaaggacgcggagatggagctcgccaaggcggagcaggcgtggcggagcaaggtcggcgccgccatcgtcgaggaggaggagtacatggacctcgtccgccgctggagcgcccgcgacgccgccgccgcgtgctggccggccgccgccttcgccttcgggagccccatctag

SEQ ID NO: 67544 - DNA, 1634 bp, Oryza sativa
  Clone ID: PAT_MRT4530_68391C.1
atggagccgctgggcgggggcgggggcgggccggcgggcgcgccggagatcttcgcgggcggcacaggggcccgcggctccgtgcggcgcgccgtcgtcatcgggaacggctgcgcgggcgccgagaaccagtgcctcggcctcctccgcgccctcggcctcgccgaccgcctcacgctttaccgtgctataaggccaacaggaggaatcaacaagtggctgcacttcctcccgatctccttgcataagttagtggaccaagtactcagacagatgttttctagtaacaaatttgcaacactatttcaaggggcaaaaatggctcaatatactgtctgtaatggccagtcccttggattatcttctgtcctagaagcagataccaaaaggatagttaccatggtcaatgatacctttgagaaagaaggcctggcactagttgtcgcttgtggacgagataccatatcatatgcaagttcaataaggtgtttggctccagataatgtctttgtcatacagatacaacatcccaggtatcgccttgataggtttgatttggtggtccttactgttggcgcacttcaccaagcagattctgctgcattacgcactgctgcttctgattggcatgatgaacttgctaactcaccaaagccattggttgtagtgaacattggaggaccaacaagaaactgtaattacgatgtaggccttgccaagaagttgataagctcactacacaatgttctgaagacctgtggaagtgtcagggtttcattttccagaagaacacccacataaggtgtctgatcttatattgaaagagttcagtacacacccctaaggtttatatttggaatggtgaaggacccaacccacaccttgggcatcttgcatgggctgatgcttttgtcataacagcagactcaattagtatgctaagtgaggcatgtagcactgggaaacctgtttatgttgttggaactgagcactgcaggtggaaattctcggattttcacaacaggctgcatgaaagaggtgctgtccgccctttcactggactagaagatatgtcagacaactggagctaccctcccctgaacgatgccattgatgtggcggcacgggaatttttgagcagccacagactgcaggaagaggttttaccctttcaaaaagaaaatcaacaggttgttttagtcttgacaagctcattggtgcacttaggttgtgcaacaggacaagagcgagagaacgtgcaatcggacgacttttgtgttgggtggtcattccatgcgcagaccggctgcaggggcctcgtgcaatcgtgtgcagattcccttgggaaagggtgtccaggcggaagtgaccgttctgcccccgctgcggacgaagcaaagcgacatgcccagaatcgtcgggttgatgaactagccaaactcaagcatagccttctgaagtgccgcctaccgttgccttggaatgcagccactatcctcgagcagctcctgcgcaaccatcatcgtgcaactctcgctgctatggcaatggagtgccactggctgccacagtcctcgagcagttccaacatgggggccaggagctgcttcgctgccgtggcccgtggcccttga

SEQ ID NO: 67545 - DNA, 2214 bp, Oryza sativa
  Clone ID: PAT_MRT4530_68392C.1
atggcggcggcggcggcacagggcgagcggccggacctgggcagcctggtggacgagctctgcgccacgggccgcgccgccgaggcgcaccaccgcgtctccctcctcttcctctcctcctcctccgccgccgtgccgtcccgccacctcgacgggcgcgccgccgatggcctgctccgccgcctcctccgcgcccgcaagccgctgctcacgctccgcctcctccaggccgcgccgcccgccgcgctcgtcccctccctccccaactacaaccgcctcctagccctcctctgcggctcctcggccccgctcctcctcgtcctcctcgcccaccgcctcctcctccgcatgcgcgccgccccggacgcggccacctacgccgcgctcctcgacggctacgcccgcatccccgacccgcgcgccgtccggaagctgctcgacgaaatgccacgccgcggggtggctcccagctcactcgcgcgcagttacctcgtcaaggccttgctccgcagccgcgacgtcgacggggctatggcccttgtcgacaaccatctctggtctagcatggagcgcagcaacggagaagaccaggaactgaagaatgccgcgttcgccaacctcgtgcaatgcctctgcatcgaggggttcttccacattgtcttccgaattgccgaggagatgccacagcaacggtgcggtgttgccgacgtgtttgcctactctcagatgattgactccctttgccggtctgggcagcaccatggtgcatccaggatagtgtacatcatggggaagaggggcatgtatccaagcaccgtctcctacaattgcattgttcatgggttgtgcaccagccagaagcctggggggcgcttgagggcgtaccagctagtgatggaaggcgtgcgtttcaggtatcacccaagggaggtaacatacaaggtactagttgatgagctctgcctggagaatgagctcgcaaaggccaaggatgtcatggaactgatgctgaaggttactcctgatgatgacaccaggactaggatatacaatatgtttcttgcagcactccgtgttgtggacaacccaagtgagcagcttgatgtgctagtgtccatgctgcaggaaggatgcaagcccgatgtgatcaccatgaacactgtcatccatggtttctgcaaagttggaagggcccaggaagccaggaggattgtagatgacatgctgaatgggaaattctgtgctccagacgttgtgaccttcaccaccctcatatccggatacctgggtgtaggtgagtttgcagaagccctgcatgtactgtccactctgatgcccaagcaccagtgcttgcctaatgttgtcacttacaattgtgtcctcaagggactgctcagccttgggctacttgacagagcaatggaggcccttgaggaaatgaagtccagtaacgtcattcctgactccgtgactcacacggtaatgatcaaagggttctgcgatgctggagaactagagaaggcaaagtcattttgggacaatgttatctggccatctggaatgcatgatgattatgtgtacagcgcgatcttcagaggcctctgtaaactagggaaactagaacaggcatgtgatttcttatatgaattggtggactctggggttgcacctggtgtcctgtgctacaacattctcgtcgatgctgcctgcaagcagggattgaagaagctggtttatcagttagtgaaggagatgagaaggaatggcatatcaccggatgctgttacttggaggattattgacagattgcacctctacagcgatgaaaaacaggatggggagctccagatgtccgctactgatggggatccaagttctgcggatgacacagtagataccctcatttcaaatagagatgagaagcatacgccgtcattgccatctaaaacatccaaatttgggacggtggtgcgtgacgatagcagcaaatgtgaggaagaagaggttgactactcaccatgtgctagtgaggatccaccaaatattattgaacctgccaaagaagaagcatgtccaatgaataattcaggcgctggtaccacaatgggcaacaggggtatgactagggaagaaggccttatgaagccagataagcagcctttgaaaagagagctgctgtctagagtggccagaaaggtgtttggactgttatag

SEQ ID NO: 67546 - DNA, 174 bp, Oryza sativa
  Clone ID: PAT_MRT4530_68393C.1
aggcattctatccttgggggggttgtggcacacacaacagcaaaccccaaaacacactcacaattttcaagcacccatggtccatcgcatccaatcccatccaaaatctcaaccaccctttggtgccttgctttgcccccactaagggccacacacaggtgcagaacattggcc

SEQ ID NO: 67547 - DNA, 144 bp, Oryza sativa
  Clone ID: PAT_MRT4530_68394C.1
ccaatagtgagggcgagcgaaggccccccacaggaggatcttttagaaggaagtcgggttgtcccaaagacccgcaacgacaagacaaccaggaggggacccagaaaatgattctcacctcgacagcacgcggaaagcaccgac

SEQ ID NO: 67548 - DNA, 1423 bp, Oryza sativa
  Clone ID: PAT_MRT4530_68395C.1
atggcggaggagtcagggaggaggagcggcggcggcgtgcgggtgtgccatgcgtacgaatctgcacacagtgagccgcggctcgccgatctggtactgggtgccagcaggaacgaccatggcggaggagtcagcgtagaggaggaagcggcggcggcgtcagggtgtgcgtcaccggcggcgctgggttcatcggctcgtggctcgtcaagaagctcctcggcgccggctacaccgtgcacgccaccctgcgaagcaggggggacgaggtgaaggtgggcctcctgcggcggctcgtccccggcgacgcgccgccggagcggctgcgcctgttcgaggccgacctctaccacgccgccaccttcgctccggccatcgccggctgccagttcgtcttcctcgtcgccacgccctcggcaatgcgaggaatccagcacggtgaagcgcgtcatctacacgagctccatggctgcgacctcgccgctcaaggaggactccaccggcttcaaggactccatcgacgaatcctgctggacgccgctcgccgtcgactacccttaccggagcgcacggttcgatgagtacatcctgtcgaagctgctgtcggagaaggagctgctggggcacagccacgctggcgagaggcggaggccggcggtcgaggtggtgacggtgccgtgctccgtcgtcgccggcgggacgctgcaggggcagtcgacgacgagcctggactgcgtcgtgtcgccggtgtcccgggacgagggccgcttccgggcgctcaggctgctgcagaggctgatggggtcggtgccgatggtgcacgtcgacgacgtctgcgacgcgctcgtcttctgcatggagcagccgtccctcaccggccggttcctctgctccgccgcgtacccgactctcgacgacatcgtcgaacacttcgccggcaagtaccctcacctcgacctcctcaaagaaacggagacattgccgagcattcaagctcacactgataagctgggggagctggggttcaagtacaagtacggaatggaggagatactggacgagagcgtggaatgcgcggcgttctaaggttgccttgatgcgtccaagcttagtttacaaggatgataatatcatcctgattagtgcaatttaccatcattattgtgttggtgtgcctcttcaggcgttctaattactatacttaaaataaaaaggagcaatggagcattccttggcgtcattggtttacagtcgtgtactcgtgtactaccagcaatctgaaatctgaacttcatttttcactgtcactgtggtttgttgtcatgtatgtactaaaccagcaatctgaaggtctgaacctcatttttcgctgccactgttaaggtggatgattaactaacactaatgggtaatctccggaggc

SEQ ID NO: 67549 - DNA, 371 bp, Oryza sativa
  Clone ID: PAT_MRT4530_68396C.1
gactttaaaagttttggcagcgctgatgaacatcggcagagacgaagaggacaatccaagccggtgggctacccggctgccagctgttgccgactggagttgccctaccaaaagacgggaaagacggtggcgatcgagccagacagggagaactactataacgggcgggccgtctttgagaacggccgggagcagcacaaagaggacttcccagaggggaaagggctggaacagcatgacaaactgctagccaaataaacactggcgccacgccaggcaggaatcgacttcaccttcgtagactcagacgaacccaactacgttaagaaccacgagcagctgatgaaactggtgcgcatcctctggcacat

SEQ ID NO: 67550 - DNA, 2067 bp, Oryza sativa
  Clone ID: PAT_MRT4530_68397C.1
atggcgcctgacctcgacgacgacctcatccgtgcggaggccgaggccgcgctcaggctccaccgcaacggccgccgcgacgaggcgctgtcccgcgcgatggacctcgccatccagcacaagcggtcctccccgctcgcgctcaacctctccggtgacctcaacatggccgcgcaccgccggaaccgccgccgcggccgcggcgccggcgccgacgacaaggcgctggcggagaggcaggcgaagttcgccgccacctgctacaagatgtcgctcgacgccgtcccggactgcgtcgagacgttcgccccctatgccgaggccctcgtcggaccgggaatgggggagagggtggagatggccaaggcgaggctgcgccgcgccatcgactgctactccaacgcgcgctgcgaggacgccgtcgccgaggtgctcgcaaccgtcgagcaccacggcgccgcctccgccgtgcacggcgcggcgaagctcgccgaccgctacccgtcgtcggcgcgggcgcagtgcctcccggcctacgtggccgtggagctagctcgcgagcgccgcggcggcgcggcgtacccggcgacggcggccaccccgaggcacaagacgctgcgccgcgcgctcgccacgatggacaccgccgcccgcaccttcgaccgatcgctcgtggtcgcgctgttccgcgcgaagctgctcgcctgcctccacgactacgacgccgccgaggccgaatgccgccgcgccctcgccgtcgataaccccgacgacccggcggcgcacgaaatccccctcggatctgcgatcggagaagagtacgacgacatggtgtcatccctcaggaaacaactctgtgatcttcagaagaagcttgtcttgttagccgtacacgattgggcatccatggaaagcgagaagcaatctcagatcctctccgtcagcatcgacgaactgcgcgaacactacagcaagatcgaccaaatcgcggcgaacacagtctccgaagcgcggcgcttctccaagacacacggttcatggtgtttctggatttgcccgcgatcttcgggccaatgtgcaggcaagaagttcctggacactgcatctttgctggaacatctgcgcaataagcacccggacgatctatgggtgaatttgaagtcatttcttgacacaaaactgtgtggaaaatttaaaactgagaatgcatcacaggatggctattcatgccacgatgagatgttacagtttcagagcatagatggtatgatcgagctagtgttaaacctacctcctggtggaatgaaatcagagaccctgtcagagatgaggaggaggaaatgcagtgaattagctgagatccttgacagaatcaagaagaagttgagggcttgtcctaaagatttatcaagctctgagtttgatcaggttcgttctgaaatgcaagatctgtggctgaagtttaccgagttgtcggttttcgattaccgtgaagcagtcgtgccccttgcgaggatgtatcaatggaaagagttaaagaaacgcatcagtgaagatgggagcattattgctgcttggagtatcgatgatatatttggtgatgttcctgcagaacatgcctcccttgatgaaaaagttggccatcaaactggggagaacaaagtgacaaataaatcagataacttgaaggcacgggccgaggtccggtttagcctggtccctcaacaccactacgggctgacgctgccgttgggcgaaccgcacgagaagaggttcacgagggtattctactccggggtcacggaggggttcgacaggttcgtcgttaggaaggagctggagaagtcgtggtacctcaaggatgacgggttcgcgatccggtgcgacatcgccgtcgtcaataagttggtcgtgaaggagcccgtggttcggccggccgacctggagaggctggggatggtttgcaactgcaacgacgatatgtgcacgctccaccataccttgagcttcgcccaagttgccaagctcaagtttttggagtttttcttagggtgctttcctctatga

SEQ ID NO: 67551 - DNA, 222 bp, Oryza sativa
  Clone ID: PAT_MRT4530_68398C.1
atggggatgaagactacagctgctgcactgaatcttgaatcatgtacaaaggcgacagtagagaaagcaccaggtcacatggtagagcaggagtccgctccccactttacgatggagtccgacagtcgacagaagcatggcagcataggcgacagcactgtggccttctccctcaccctccattgtctctgcatgtggactgagaaggaagaggcgatctag

SEQ ID NO: 67552 - DNA, 102 bp, Oryza sativa
  Clone ID: PAT_MRT4530_68399C.1
atgagcatgggacccgggatagggctgggcccaaggatttacaaggacagaggtaagcccgggaccaaggacagggctgggtccgaggccatcctctgctaa

SEQ ID NO: 67553 - DNA, 5323 bp, Oryza sativa
  Clone ID: PAT_MRT4530_6839C.1
tgcgttaacccaaacacttgcgtaatatttcttcaaatacttgccattgagcgctcgtccatagacttcaccatcaagcccttgcaacatatacgctcctttagatacaaccttataaatttgaaacggtccttcctaattcggcgaccacttgacaaatttaccatcacgagtaccaatcggcaaaatcaacttccatacaagttctccttccgaaaaatctttaggtaccactttcttattatagtgccgagcaacacgttccttatccttggtaacctttgcaagggcacacaatcgtgactgaaccagatcctccctctcatcggccataaggttgtaatactcatcggccgttaaatcgttttgtaattccgttcttcgagagccgattctaacctcccacggcaaaacagcctcatgtccataaacaagtttgcaaggagggacttggatcgatccatgacaagccatcctataagacaacaacgcttcggccaaccgagtgtgccattgccgcggataatcagaaattttccgcttaatcaatatgatcaaacttttattagatgcctcggcttgcccgttaacttgtgcataataagatgtacatcatacctccaatcatcggctatcattgcagcaatttcaactttaacatctttgatcatcggcttatatcccgatgccccttgagctaaatcattagcttcaatattttgctctcgagaaacatgctttaaagtaaccagccgaaactctttcattagttcttggcacttctcattataaaccatcaatatatcattcttgcattcatattctcctgccaattgactgattactcagcttgattattagtcgcatacggtttaatagtataagcaaactcgaaacatgccccctaggggagattatgactaagccgatagcacagccatgagtacacaccgatccatcaaagaataaagtccacgatactatttcaaccgagctgattgaatcatcacgatgttccacaataaaatcggctatagcttgtcccttaatcgtcttcggcgactcgtaccgaagatcaaactcgggtaaggaaaatatccactttccaacccttcctttcaatattggagccaatagcatgtatttgactacgtcggctcgttcctttccttccaactcctgaatcaaaactgagccgattgacttctcaccggccgataaatataacctaaatggtattcctttctatggaggaatcaaaacaggaggagagctaagatactccttaatataatccaaagccttttgctgctctgccccccaagtaaattgctgatcggctttcaatctcaacaagggtgtaaaaggttctaatcttccagacaaattagaaataaacctcctaacaaaatttatattgccgatcatctcctgtaattctgtcttattctccggaggctgaatcttcttgatcgcattaacactcctttgagttacctcaatccccctttcatgcacaagaaatcccaaaaactggccagccgatacaccaaaagcacattttgtcggattcatctttaggccatattttctggttctctcgaaaaccttcctcaaatcggctatgtggtcacctatttctttagacttaacaaccacatcatcgatgtagacttcaaccaaccagccgattagatcatgatatatgtaattcatggctctttgatatgtagctccagcactcttcaagccgaaagtcatgacaacccattcaaataagccgattgcaccaggacacctaaaagctgtcttatgaatgtcttcttcagccataaagatttgattgtatcccgcgttcccatccataaaactcaaaattttgttccttgatgcagcatcaaccagctgattggctactggcattggatattcatccttcggtgtagctttattcagatctcggaaatcaatgcacacactgaccttgccattcttcttgataactggaactatgctagaaacccattcagcgtatcggcaaggacgaataaaacgagcatcatataatcatttaatctcagctttgacaggctcaagcatatcggctttacatctcttcggaggttgctggcgtggcctaacccctggtttgataggtaaccgatgttcaataatcgatcggctgagtctaggcatctcataatactcccaagcgaagcaatctctaaactcttttaagagctctatcagcttggttctaaactctggagataagttcttactaataaatgtcggccttggccgatcgcctggacctatgtttatttcttccaaatcatcggccgacatgaaaccttgaccttgcttgtcatcgagatcatctactgtatccttagggtagacacttaaaccccccacgacgccctcaaaataatagcttgggttctccatcttcaattggctgtcggctggcacgatctctatcttgtcgccttgccattgaatcaaacaatgatgcatagttgaaggaatgcaataattagcatgaatccaatcccttccaagcaacaagctataagaacccttcccatcgatgacaaaaaacgtagtaggaatagttttactgccgactgtcagctccacattcagaacacctttggtttccaatggattaccaccgaagtctttgagcaccatgtttgtcttgatgagatcctcggcatttctacccaacttcctgaacgtagcataaggcatcaaatttaccgcagccccaccatcaaccatcattttagacatcggcttcccattgacgtagccatttatatacaacggtttaagatgccgatcctctgtcccctcaggtttctcaaacattgcctgtttgcacctagggcagttctcaatagatggcaacctcataccttcattccagcagaatctaaagaactcacaaccccaatgaggatcaaaaccatcatcgtattcttcataatgcttctcctgctgcttgtcatacttccggtgatatttgttgacaatcttagccgaattcacctgaaaaccccttgtgcgggccctatcggttgtttggccagctgtatgcaccatattaacaagaaaaggattaccatcgaccttcatcggctttttggaatcatcaaacctaatcttgcccccctcaatggccacctgaatttgctgtctaaaaaccttgcaatcattagtagaatgagacccagaattatgccatttgcaatacctctttttgcctaactcctcagccgatgggattgtatgactagcaggaagttgaatttgcttctctcggagtagcagatcgaagatcttgtcagctttagtaatatcaaaatcatacttctcctcttttccaaaacttttcacccattggcatggtatgacctttttactccttacccattcggctgcagctatttcaggatcatcctcatcatcatccgatccatacatgtacggacaaacatgattaactctcttagagctcttcctaacttccgcagacctatgctcatgcagggtcactttctgtatcagatgtgacaagctatcaaagtcttcagatgagaacttctccctaatcggagcaatcataccctgaaaggccaaatcggctaactgggcatcagttaaactcaagctgaagcatttgttccacatctccctgaatctctgaatatactcgtgcacaggttcatcatgctgctgcttaatcgccgtcaagtcagataacttcatctcatgaaccccactgtagaaatagctgtggaattgcttctccaaatcggcccaatgcatgacctgttgctggattggttgcacaacttgctgaatttggggtgtctgctgaatcggctgttgctgaattggctgctgctgtattagatcaaccgcatgttgaggcggcaaaaacatagcagcaaccagatcttgggttggccgattcgcaacctgcccactatgttgtggatgctctctcagtaataaccgagggttcattggctggcctccttgcaaatagaccgggcctgcagcctgatgttcagctattgaaccatcggctattgacttcatcatgtttgacagggtattgactaacacccagactgattgatcaaagcatgatgtacagcgtaatcaacccgatcttggaagttattaaaaaagtcctgtgccacgtcactattaagatttcctccctgcagcccctgagcaccgtcaccttgaactccatgcaccccgtcaccttgtcctccatggaccccttgagaattgttgccttgatttcctagagagccatcagtagcacctttgatattcggctgagccgagccgtctggagcttgtttcccatctccatccttagaagaactggttccaggatcatcagcaacaacttttattttgtacttttgaacaagtgtctccttgcgggtctgcatgaatgagttcaagaactgatctcatgcttgctgcaacattgcttcaaactctttcttctgctcaggtgtgaatttttctggatcgatcggcacgacgtttccttcattgacgtcagtcaatcccaacttcagcatcttttcctcaacagagcctgggctagatggggtggtggtggttgtttttcggccatgagggagaattgttggctgacttctgacacgactattatctctaacaaactctaagatatcataagtctttgcggcagacttttgccctaaccatatctctaaggaaattacgtaaaacatcctaaaaactgagcttgaagctctcctctctctcccatgccggccaccatcttgccatggccgatctcctttaccggatcaacactagccaaatcctcgcgccattagcttcgcctcgacgaggtgattccatttttcctgtttcccccttctcccccaccccatagcaaccaccacagccacttcttttatggccggagttgagctcctgccgtcgccgttccggcctcctcctttgtttccttcgctagccgacctcttctctggatgcgcgtcgctcgggaacacgtttcgccgccgacttcgccgccttccggccaccggagagccgacgccccgcttgccctctcctctctcttctctcggctcactgtgaggcagagaaaagaagagacggaggaagaagaagcaaaagaaaaggaagctgacaggtgggcccatgaatagtaacctttcatactttctagatttaattcaaatcctattctttagaagcccatatctcctaaaccgtagatccgattccgatg

SEQ ID NO: 67554 - DNA, 527 bp, Oryza sativa
  Clone ID: PAT_MRT4530_683C.1
cggttagaaaccatccttaggtgccaaatttaaaacaagcgcccgttagacaacactgatgacatggtaacatggatgccggtacctatgagtggtacactttaaaaaaaaaaaacagcatgctcactctaacaagaaatcaagtcgcacaactagtgacaaaagcccaacagaaaagaaaaaaaggcgagctttaccagaagggtcgaggccagggtggagttgtgcgccagtcggctagagagcaggttcagctttggccgcggcggtgccctgcaggaggacggtgtggcggtgaggcagcctgggtggcagagaggaggtcggggagaaaaaaaaagttgttttttattttatctggcagctggtgccaataaaggggagaggaggggcagctggttttatttaaattcatcgtttagtagttcaaaaagtatgcatgtggagaatgagtcagctgctgccgaacgcataattgtaacagttgcgagcaagtgaagaacgcaataaacagagtatgccaatcc

SEQ ID NO: 67555 - DNA, 272 bp, Oryza sativa
  Clone ID: PAT_MRT4530_68400C.1
acattggctgggaaaagcacggcagggggcatttcttgcgagaggagcagagccctactgccgacagaccacgattactctagccactagcctctatatccgtaacctgtgtcgctggcttgataactgcggcggcggaggcaactgtcggacttcgtcgtggcggcgaagctcatggacgaggtgttcgtggtgccaatacctcatcagccactggtagcaccatgcgagtatgcgtgttattgtgctcgtttgctgggccacaccgggtt

SEQ ID NO: 67556 - DNA, 324 bp, Oryza sativa
  Clone ID: PAT_MRT4530_68401C.1
tttgattgtgagcgcgcgccttatgtattttgttacgagaagaacaggactactttatggatgccatgaccatgcatacatgtgggcttttacagaaccatgaagaattcctagtgcgaagccgtaaaatacataagggaaactcactcattttgggtgcagagcgaccgtgcgaagtgcgtactcacacgcaattttatttgatcgagcggggccggaacgggggtgcacacgcttacttggcacgaaacgccgacatgaagcagccgacgaacggtgcctggccgaagcagatcatgttgggcccgaaaccgacgcggagta

SEQ ID NO: 67557 - DNA, 207 bp, Oryza sativa
  Clone ID: PAT_MRT4530_68402C.1
actactatagggaagctgtacgccagcgcgtaccgctccgtgaataaatgaagcgacccacgcggacggacgcctacacacataaagctagtgccgaggaagggactccaatcagatcgagctatggttaaaatggtaactgcgatgagacagaccagtgttctgcatgacaaccggctcaagcatcgcgagaataacgctgcagat

SEQ ID NO: 67558 - DNA, 653 bp, Oryza sativa
  Clone ID: PAT_MRT4530_68403C.1
atggcggccggatcttccgcagccgtttccccctcatccggccgctctctccccctcccaaccctatataaacactccccgtgcctccctccgccgtttccgccactcgccgctctctctctctccgccggaatcgagctcgcgccgtcgctctctctctccgccgtcaccgccgagctccggtccgccgccgacgtcgccccggaccatctcccgcttcggcgtcgccttcttcgggttcgccgcaacctcgccgacctcgtccacctctccgtttcggtcgccgatcgccggaacgccgccgtccccgtcgacccgagccgcgccgccgcctctctccgctccggtcgccgttcccgtcgtcgccgtcgacccggggtgagccgtggaccgccgattcgtttccccctttcctcccctctctcgggcgccgctccgccgcgccggtggtcgccggcggcgaccatcggggcacgagcgcgccgcctcccgttggctgtgccggcgtggccgccttcgggcgcgtcccagggctggcatggggagaccggctgttacaccgcccgcccccatacgggcaacgggacgcatgggacgcaacgcggcccaacactttactaccgggcagccccagcggcggcgaggagcgagag

SEQ ID NO: 67559 - DNA, 954 bp, Oryza sativa
  Clone ID: PAT_MRT4530_68404C.1
cagctattacctgtatacgacctgctatctcggtaccccgcgcccgaggcggccacgccggcacagccgacgggagacggcgcacccgcgccccgatggtcgccgccggtgaccaccggcgcggcggagcggcgcccgagagaggggagggaagggggaagcgaaacggcggtccacggctcaccccgggtcgacggcggcgacgggaacggcgaccggagcggaggaaggcggcggcgcggctcgggtagacggggacggcggcgttccggcggtcggcaaccgaaacggagaggtggacgagatcggcgaggacgcggcggagccgaaggaggcgacgccgaggcgggagaaggtccgaggcgacgacggcggcggaccggagctcgacggtgacggcggagagagagagcgacggcgcgagctcgattccggcggagagagagagcggcgagtggcggaaacggtggagggaggcacggggagcgtttatatagcgttgggagggagagagaccggccggaggagggggaaacgagcgcgggagacccggccgccattaatggcgccggcgaggttaggggaggggtttcccaccgaatccgagggagagagggagggagaaatggggggaaagagggagggaatcacggggaatatttccccccactttattgcgcgcggggacggcgggaggcggcgggattcacggcggcggcggcgctagggcacgggcgaggcggcgggagcggcgggaggacagggatgacaggtgggccccacccgtcagcgagggtggcgggtggcccgcccgtcagcggcgcgcgcgcggggagaggccgagtgggccgcggggaggaggagagagggggaaagagatgggccgagccggcccaagagggggaggggggaggaaaaagactttttagggtttttctttttataaaaatcatt

SEQ ID NO: 67560 - DNA, 646 bp, Oryza sativa
  unsure (1)..(646): unsure at all n locations
  Clone ID: PAT_MRT4530_68405C.1
atggcggccggatcttccgcggccgtttccccctcatccgaccgccctctctcactcccaaccctatataaacgctccccgggcctccctccgccgtttgcgccactcgtcgctctctctccccgccggaatcgagctcgcgccgtcgctctctctctccgccgtcgccgacgagctccggtccgccgccgtcgtcgccccggaccttctcccgtttcggcgtcgccttcttcgggttcgccgcaacctcgccgacctcgtccacctctccgtttcggtcgccgaccgccggaacgccgccgtccccgtcgacccgggccgcgccgncgtctttctccggtccggtcgccgttcccgtcgtcgccgtcgacccggggtgagccgtggaccgccgaattcgcttccccttccctcccctctctcgggcgccgctccgccgcgccggtggtcgccggcggcgaccatcggggcgcgggtgcgccgccttcgggcgcgtgccgcggctgccatgtggggcccggccgtcagccgcccgcgccctcgggtgtggctgacgcatgggacccacagcgccggccggtgtgagccgggtgcgcccggtccaccgtggccccactcccgccacttgaaattgtacccccgtgta

SEQ ID NO: 67561 - DNA, 964 bp, Oryza sativa
  Clone ID: PAT_MRT4530_68406C.1
atgcagaagaccaggcggcggcgatccatggcctccaaattcgtcgtcggatcgagccatggcccccaaattagatccccgcattcgctggaccgagcaaagatgggagggggcagtggagttggggatgaagaggcggaggcggaggcggcagcagcggctgaagtgacggggaggggaggagcaagaggagacgtaggtggaggtggaggtggcgctggtgaggcggcggcggcggtgaggacgggaggggagaggcggcggcgatgcgggcgtgtgggaggagtggagatcccaggcggagtgggctcgcaacttgccgcgaattccgaagtcaacgactcggttgtccccgcgaattccgaagtccgattacgattccaagtagcatgcttgtccggttcggtttctaccggcagatattacactccccaaactcatcctcctcctccacccgagaacacgctcgacgtcttcatggatggcgacaccataccgatccacaccaccatcacgtcgtcgcactccctcgctgcccaatttatcaacgagatagcccgcgaacgtccccagggggggctcatcgtcggcatcgacacggagtggcgcactgaccatctgcccaacggcaaaacatgttacaaggtcgcggtgctccagctctgtgtcggccgccgatgcctcttgttccagatctaccaagccggcaacatggtcccacatgagctcgcggagttcctcgccgacccgagcgttcgcttcgtcggcgttgcagtcaacaacgacatgcaacgtctggccaatgattgcaacctgagggtcgcctgtgcggtggatctgagatatgctgcggcggccgtgctcggtcagccggagcttgcgagggcggggctgaagagactggcgctcacggtgatgggcgcccacatggagaaggagaaaaacattacgaagagcagatggg

SEQ ID NO: 67562 - DNA, 1074 bp, Oryza sativa
  Clone ID: PAT_MRT4530_68407C.1
atgggagggggcagtggagttggggatgaagaggcggaggcggaggcggcagcagcggctgaagtgacggggaggggaggagcaagaggagacgtaggtggaggtggaggtggcgctggtgaggcggcggcggcggtgaggacgggaggggagaggcggcggcgatgcgggcgtgtgggaggagtggagatcccaggcggagtgggctcgcaacttgccgcgaattccgaagtcaacgactcggttgtccccgcgaattccgaagtccgattacgattccaagtagcatgcttgtccggttcggtttctaccggtatgcccgctttaaaaggacacagcagaggccttcttttctcaccgcaaattccaaatttgtcaagtccaaaattgtcccctacaccaatggcaggcagatattacactccccaaactcatcctcctcctccacccgagaacacgctcgacgtcttcatggatggcgacaccataccgatccacaccaccatcacgtcgtcgcactccctcgctgcccaatttatcaacgagatagcccgcgaacgtccccagggggggctcatcgtcggcatcgacacggagtggcgcactgaccatctgcccaacggcaaaacatgttacaaggtcgcggtgctccagctctgtgtcggccgccgatgcctcttgttccagatctaccaagccggcaacatggtcccacatgagctcgcggagttcctcgccgacccgagcgttcgcttcgtcggcgttgcagtcaacaacgacatgcaacgtctggccaatgattgcaacctgagggtcgcctgtgcggtggatctgagatatgctgcggcggccgtgctcggtcagccggagcttgcgagggcggggctgaagagactggcgctcacggtgatgggcgcccacatggagaaggagaaaaacattacgaagagcagatggggtgagccgacgctgacgtgggagcaggtcaactacgcctgcatcgacgcatacgtgtcctatgagattggccggcggctgctctctggtgaacctatactggccgctccgttgtag

SEQ ID NO: 67563 - DNA, 318 bp, Oryza sativa
  Clone ID: PAT_MRT4530_68408C.1
atggtccaggaccatctgaaggcgatggaggagcgcagagaggaagtcgcagatggcgtcgtcgacgacggcgacggcgacggcgccgatagggatgaagagctccttagcatcctactgaggtttcagagggatggtggttttggtcgaaggatgttcccagatttcatatttgcacaatttaacatcgagattgcactcgcaaaccttctataccatttcgattgggaattgccatgtagtgaaaaccgaatggagttggatatgactgagtccgctgggttgacagcttctcggcttactgatctttttggctaa

SEQ ID NO: 67564 - DNA, 1059 bp, Oryza sativa
  Clone ID: PAT_MRT4530_68409C.1
atgaaggatctccggaacaaggtcacagcgctcatggccatgctccatcgatcagccagccagggcgatgaggcactcgctgcacctgcgcggcgcaaaggcatgctgctcgatcgccgggcggccatcctgcaccgagacgtcttcagaggcggcgggggaacggcgaggatacgcgagcgccacgccatgccattacgccgtgtcgtctcgtcagaggttgctgctgccgtcgccggcctggatgaggcagcggaggcggagacgtgcaccataagacaagactggtccccacattactggtgggcccggaccggacaacccaaccagattctgccacctccgcttccatctcttctagaagccgacggttatttatattttataccctctgctctttgcttcattctcgccttccctcgcctgagccccaacctcaatccctccggcgaccggagctcactccaaccccacccccgccgccgccggcaagagggcggcgctctgctgcgacgtgcagagtccagccgccgacaacacggacgcgcgctccgggagggcagggaggcaaggcaagaccgcaagaggccaagaaccctctcaagaatcaagaacacgcggcgcgacatcgatctgctcatggcgacgccaccgccaccacctgttcgtcccggcgagggagctgcagccagcgcgctcacctccctcagctcctggctggcctgggtcaaagtgtcaaacgcggcgcctacgagtggctcgcctcggcggcgctccggctcagctcgtggtgaggaggtggcgcctctgcgtcaaccgccgccaaggcaaggcctttggatatgcgacagctgcgctaccacgacgatgatgtcgcatccttcttttcgatttctttcggtgtccggaagagaagtcgcgtggatccgtgtgaagacagcgtcaagatcaagcacttgtcctttaaggcagcaaacgccaagtgcaagaaaaattacaccatctgcctccaatgattcctggaaaactttgggagcaagtccccggttcgtccgatag

SEQ ID NO: 67565 - DNA, 4818 bp, Oryza sativa
  unsure (1)..(4818): unsure at all n locations
  Clone ID: PAT_MRT4530_6840C.1
atggccgagaagctgccaccgtcgccatcctcggctagcncaggtactgttaaagagaaaatccaaagactaggtttgagcaaaactcgcaagggaacatttattcaaaagtacaaggtaaaggtggttcccgatgagcctgagaccagtacctctaaggaggaagaaggaaaaagagttttagatgactcggctcaagagaatcagggtgacggctctcaggaggtacatgcagttcaatgtgatggtgctcacgagccacaagaaggaaatcttaatcagaatagtgagacagcacaagatttcttcaacaatttccaagatcgagtggactacgccgtacaccatgctttgatcaatcaatctggagtattagtcaacacattgtctaacatgatgaagacgatagccgatggatcaatagctgagcatcaagctgcaggcccggtctacttgcagggaggtgtttttccgaaatatcgacctttgatcactgatgctcagccacctgctcaagcagttcttccgagtgcaccatcggttcagccgatggcaccgctattgacttctttgcctacttcatcagcgttgacaccaagccagctgattaatccttggctattgatgagggaacagccacagcatagcgggcagacgcagacgccaccaaggcaacaagttgtgcagccgattcaacagacttcatcaaggcagcaggttgtgcagtccgttcagccaacacctccgaaacaacaaactatacaaccgattccacagcaagccttgatgaatcaatcggctgggcaatcgactggacacgccgtgaatcagtttgaaccaatacagcaacagtcgcaaggagcagctcaacaacgaccatgggccgatgtaattgccgatgtaatgagagaacaatttgggcttaagccgagagatactggaaaattgtatcggcaaccttaccctgagtggtttgagaaagtccctcttcccaaccgatttaaagttctagacttctccaaattttcgggacaagatggcatgattcctccgattaaggagaaattctcatctgaagattttgatagcttatcgcatctcgtgcagaaggtaacattgcatgaacagaggtttgcagaggccaggagaagctctaagagggttaatcacgtctgcccttacatgtatggatcggatgatgatgacgatgactccgaaatagctgcagccgaatgggtaaggagtaaaaaggttgtaccttgtcagtgggtaaagaattctgggaaagaggagaaatatgattttgatattaccaaagctgacaagatttttgatctgctgctccgggagaagcaaattcaactccccgctggtcatgtttttagacagcagattcaagtggccattgaaggagggaagattaagtttgatgattccaaaaagccgatgaaggtcgatggtaatcctttccctgttaacatggtgcataccgttggtcggacagccgatgtgggacgagcaagaggtttttacgtgaattcggctaaaattataaataagtataagaggaaatacgacaaacaacaagagaggcgttatggagaagataatgatggtttcaatcctcattggagttgtgagttctttcggttctgctggaacgaagagagttcaggccgatcgtacaataaaggcaatcggctgaagcaggcgagaattcccgctcatcaaaggttgggcccagtaaatcaagacgattacttggaggaagacaagaacacaaagacccagtggtgtccttctggtatttttacaaagaatcagaaaagaagggttcaaaggttgaggagcagggagcacttccaggaggtcgagcaagaaattggtcatcggctgagaaaagcaaagccaaggaaggagtggcgtgttaagaatcaagttcttggagccgatgatattgcagccgacgaagcaaagaggttggcaaatgggaaaagtgttgtgacggcaccaattaacatggtctttactttgccagccaaatttgggattggccaggccgatgttgacgaattaaaagagggatcggctaagttggttctatcaccaaaacgagcaatctttgaaaagcctgaggggacagaaaatcggcatcttaaaccattgtatataaatggctatgtcaatggaaagccgatgtctaagatgatggttgatggtggggctgcggtaaatttgataccttatactacgttcagaaagttaggtagaactactgaggatctcatcaagacgaacatggtgcttaaagactttggtggcaacccatcggaaacaaagggcgttttgaatgtagaattgacagtcggcagtaaaactatacctaccatattttttgtcatcgatgggaaaggttcttacagcttgttgctcggaagggattggattcatgccaattgttgtattccttcgaccatgcaccaatgcttgattcaatggcaaggcgacaaggttgagattgtgccagccgacaggtcagttaatgttgccagtgccgatctagctctttgggagatggatggccttgattgtttatccgggaagatttggggttcaagcgtctacgccaaggacacggtagatgatctcgatgacaagcaaggtcagggttttatgtcggccgatgatttagaagaagtggatataggtccgggtgatcgaccaaggccgacattcattagtaagaatttgtcttcagaatttagaaccaagctgatggagcttttgaaagagtttagagattgctttgcttgggaatattatgagatgccaggactcagccgatcgatcgtcgagcatcgattatctttaaaacctgggattagaccacaccaacagcctccgaggagatgcaaggctgatatgcttgaacctgtcaaagctaaaatcaaacgtttgtatgatgctggttttatttatccttgccgatatgctgaatgggtttctagtatagttcctgttatcaagaaaaatggtaaggtgagggtctgcattgatttcagggatttgaataaagctaccccgaaggatgaatatctgatgccagtggccgatcagttggttgatgctgcttctggacataagatactaagttttatggatgggaacgcggggtataatcaaatctttatggccgaagaagatatccataagacggctttcagatgtcctggtgcaatcggcttgttcgaatgggttgtaatgactttcggcttaaagagtgctggagctacgtaccagagggctatgaattatatatatcatgatctgatcggatggttggttgaggtctatattgatgatgtggttgttaaatccagagaaataaaggaccacatagccgacttgagaaaagttttcgagagaactaggaagtatggtctgaagatgaatctgacaaaatgtgcttttggtgtatcggctggccagttcttgggatttcttgttcatgagagggggattgaaatacctcagaggagtatccttgcgatcaaaaagattaagcctccgggaaacaagacagagttgcaggggatgatcggcaaaattaattttgttcgaagtcatggttatggtatcggcttggttataattgcgccttggggggaaagttttgaatttgcctatgctattaaacaccatgtgactaataatcaggctgagtatgaggcggttttaaaagggttacagttgcttcagaaagttgcagccgatgctattgaaatcatgggtgattcgttgctggtgattagtcaattggcaggagagtatgaatgcaaggatgatacattgatggtttattacgaaaagtgccgaacgttgataagtgaatttcggctggtgactctgaggcacatatctcgagaacagaatatagaggctaatgatttggctcaaggagcatcgggatataagccaatgacaaaagatatcgagatagagattgccacaattacagccgatgattggagatatgatgtgtttcagtatttacagaatccatctcaatcggcttcgcggaaattacagaaatatactttattggatgatgacctctattatcggacgattgatggagtgttgcttaaatgtttgagtgccgatcaggcaaaagttgcaatcggcgaagttcatgaagggatatgtggtacacatcagtcggctcataaaatgaagtggttgctccgacgtgctggatatttttggccgacaatgctggaggattgtttcagatattataaaggttgtcaagattgtcagaaatttggagcaatccaaagggcgccggcatcggctatgaatcctattattaaaccgtggccttttagaggttggggaattgatatgatcggtatgattaatcctccctcgagtaaaggacataagtttatattggtggcaaccgattattttaccaagtgggtagaggcgattcctttaaagaaagttgattctggggatgctatacagtttgttcaagagcatataatctatcgatttggtattcctcaaactattacgattgatcaaggttcaattttcgtatctgatgagtttgttcaatttgccgatagcatgggaattaaattgttgacttcttcaccatattatgcacaagctaatgggcaggccgaggcatctaataagagtttggtcaagttgattaagaggaagatttctgattatcctcggcagtggcatactcggctggctgaagcattgtgggcttatcggatggcttgtcatggatcgatatag

SEQ ID NO: 67566 - DNA, 207 bp, Oryza sativa
  Clone ID: PAT_MRT4530_68410C.1
atggcggccaaatcgcgctccggcacggccgccgacgagtccgcatctcgaggcgccgagagggccgaagtgatggcgcacctcacctcgccgtggagcaacggcatcaccaccgcgcgcggcctcacggatcgatcgatcgatcgatctcatggcgccgcgcacccggagacctcttccctcgccatcgccggcggcggcggctga

SEQ ID NO: 67567 - DNA, 147 bp, Oryza sativa
  Clone ID: PAT_MRT4530_68411C.1
atggtggactctatgccacccgcgctatgtttcggcgccaacaacatccaagatgccagtgccgtcgttgtaggcaggttttgcaatggacatagacgaaaccagtggcactgtcagtcgtacgtgctaaggagtgtcggcaactga

SEQ ID NO: 67568 - DNA, 580 bp, Oryza sativa
  Clone ID: PAT_MRT4530_68412C.1
gtggatccccgggctgcaggcgcgacgatcctcccccaaaactcacgcttctcgccgccgcgcctcctcgctcctctcctctccggccatccgccgcgaacccccgaaatctcccgccggcgaagatgcacctgtggccgtcgctccggatccgcgactccttcaaacacgcctaccttgataagctggagttcaacctcgcccgcatgaagcgcgcgcggggcgaggaccaggaccaggaccagcagcagccgcccggcgacgggaaggcgccgctgctcgagggcctccgggctccgaggagctcgttcgtcgccggcgcgcttgagctcgccatggacgccgccatgctcctcacctgctgctgctgttgcttctgctgtggcgcttgtggtgacgaggaagatcatcctattgctcgctgagaatcaccttcagaagagttccctgaagaaaaccagaaaatgcatggacacagtcaaataacatcgtctctgtatatatggatttttggttgttcgctgatgtggctcaaagatgccactggcaaatatacatagaagtattttttttatgtaga

SEQ ID NO: 67569 - DNA, 485 bp, Oryza sativa
  Clone ID: PAT_MRT4530_68413C.1
atggttcttgagtcgcaccactctacaccggctagctggcgctgcctcagaggcggatgaaggctgccttacactttcggcgcctgctcgcggacggacgggcagcacatagccatagatggctgcgagcaatgcgcagataccgtcatcaaggacgacaggcccaccaaaggtacgaggctacggacactgtggctgaacgtgcctatgccgttgctcccgctcgacggccagccgatggcgcacaacccagtatgccgctgtggacgaattcctaagctggctcagatatacctggtcgggccactacgaggagcggtagtaccagctacacgtgtcctggatctctcaacgaggtcaagttgcttgtcagggaccagaaggaggataaggaccatggatcagatggagggctttacaacttacaggagtacatactggatgacagtgcacaccacactgtcctgctgtactgtgatgcatgc

SEQ ID NO: 67570 - DNA, 251 bp, Oryza sativa
  unsure (1)..(251): unsure at all n locations
  Clone ID: PAT_MRT4530_68414C.1
tttntnnttttngggggggtttttttttagagggggggggaaattcnattgagttttntaaacctttttactaggcaaaccacaccaatacaccattgattaatttcactgagaaaagcacgggttccttacattacacaaattcatactttgatacacccataatcccccaaacgaccaacttcttaaataaacgataacacacccgtttaattcaacaataattagcacacacacaaaccacacccaaa

SEQ ID NO: 67571 - DNA, 882 bp, Oryza sativa
  Clone ID: PAT_MRT4530_68415C.1
atggcgccaatgccgcttgcttctagctcctcaaagctatgcagcttgctgatcctgtgcctagccttctcgcggccgtggaccggagcacggcgggcatcttcgatgagatcgagctcatctgggggcgagccgcacctacttcttcatggatggcgactccgaggcgtggcgctctccctcgaccagtcgcagggctcctgcttccgctccagggagaagtacctctacgtccagatcgacgtcgagatcaagctcatcgagggagactccgccggcaccgtctgcacaatctacacgatctcggaggggccgtgggagattcacgacgagatcgacctggagttcctcggcaacgtcaccggcgagccatacacgctccacaccaacatcttcgccaacggcgtcggcggccgcgagcagcagttccgcctctggttcgaccccaccgccgactaccacacctactccatcgtctggaaccccaagcgcatcctgatactggtggacgggaaggctatcagggacttcaagaacaacgaggaccagggcgtgccgttcccgacgtggcagtcgatgcggacgttcgggagcctgtggagcgcggaggactgggcgacgcaggggggccgggtcaagaccgactggaagcaggcgccgttcgtcacctactaccgcaactacaacgtcacctggtgccggccgtcccccggcgtggcgtggtgcggcgacgagcccaaggactcgacgcgcttcgacctggacgccaatacgctctccgacctgcagtgggtgcgctccaactccatgatctacaactactgcgacgacagtgtcaggttcaacgccaccaccctccccaaggagtgcacgctgcaatga

SEQ ID NO: 67572 - DNA, 636 bp, Oryza sativa
  Clone ID: PAT_MRT4530_68416C.1
atggaggttggcaagcccatcaaggactcctccctgcgacctcctgcgcacggccgagacgttcacaagaaaagccggcgggggcggccgccaccctgggcactcctcgacaagaccgcctactttgccgatatctgcaacgccacctccaaaacaagggagggccatgaaatccctcggatgactttgcccctcctggcctcatgggtttcgctgacctttggcgtggcgtcgtgcttgtcaatgtgcttcatgaccaacctgcgccaagctacatcccattgcctccacgaatcaggcataggcattgacgagggcaacgcaagcgatgttcgtgacattgccatcgacttagagggttgcatcaactatgttgagtttgagttcaaaggccttccacacccgcagagagacacattgctgatggctggacggccgctaaatggagttggttgctggcgcatggactgccgcctacgttcctctcaaatctcacatcatatgatgcctaccctgccaaactacgacactgcccgtcgtcctcaaccaagcttgcaaaagctccatgtgggtcatcccgtgctcagcttgcacgacgcccatcttgttcacctcatggccaagatcaataggtag

SEQ ID NO: 67573 - DNA, 729 bp, Oryza sativa
  Clone ID: PAT_MRT4530_68417C.1
atggtcagtgagtacgtcctcaacccggctactctggagccatttgggaccttcccgttcatcacacgaactgtgtgggaggtaggaacttgcacccgcatcggcttggcaccggaggatatgcctgacagtaccctcggcataacacaatttacagcagcgcaccgtatcagaggtggtctctcgaaacaccaggaggacatagttaggggtttttatttatatttttatatcacggcgttctacgactactcattgatggccgcgatcgacacggtcgtgctcctcatcatgatccgggggttggggctcggtggtagtcttgacatgctcaacttcatggcgctcctggcgtggaccgagttcgaccttaactggaacaacttcaccagtgcaatcagagagcagcggggaggcattgtcagcgccgagatttggatggaagaacccgccgccgccgccgcctttcccgatccgccggaggacccctccccctccccctcctccgcgccttctccggccgccgcggcgcctcctccggggccgagggagctggcggcggcgatggaggcggtggagcgggacgtcgccgccatctccgacagctacgcctccctcttcgcctccctccgcgtcgccctcgccaacgtcacctcgacgtcggcggagaacatggagtgcctgggagacgtcgtcggccgcctccaagaatccgttggggtgtcctaa

SEQ ID NO: 67574 - DNA, 129 bp, Oryza sativa
  Clone ID: PAT_MRT4530_68418C.1
atgaacggtccaggacctaaagttgtgactccggttgagcttgtggtggagcaggcctcatgtgacctgggtggcccacgggtcacatgggttgatgtgacggggaagattgttgttcccgatgtgtga

SEQ ID NO: 67575 - DNA, 1184 bp, Oryza sativa
  Clone ID: PAT_MRT4530_68419C.1
tttttttttttttttttttttttttttttttttttttttttttttttaacaaacaataaaaaggatctttattgctttcttttgaatggagttagaacaaagtgatgaagatagtctttatagccaatttacagataatgatattatgtcaccatgggttgaattgaataacccactatacaaatacggagctcataagcacacatatagaagaggaaatgaagtgaaacactggatgtagtattttatattgccacacaaggtaaatcttctcctttgctggtgtgtgccatttcagattatagcatttgctgtcttggagcgcgagttattatgtataattgctgaaacaatgtcattacatgttccttgcattagctactgcctactggataacagcaactgactaggggaggcggagcaactgattgacagccaagtctagtgaatcaacattcttccgtaaaatctttagttgcatggctaggctttccagacctctcatttcctcattcaacctcaagcacgaattgatgtacttatttcctttcgaagaagcttcgagtgcggattcttggaggcggccgacgacgtctcccaggcactccatgttctccgccgacgtcgaggtgacgttggcgagggcgacgcggagggaggcgaagagggaggcgtagctgtcggagatggcggcgacgtcccgctccaccgcctccatcgccgccgccagctccctcggccccggaggaggcgccgcggcggccggagaaggcgcggaggagggggagggggaggggtcctccggcggatcgggcgtgggggcggcggcggcgggttcttccatcttgggttgggcttaccgtgccgtgtgggcaggccgtgtcgtggaacagaagggggatgggagagtgagtattttgtatgtattggatgaaaatgtccccatcttctacctctgtctttcctcattctctcctctttctctgcttatgctcctctcagacccaaatctcggcgctgacaatgcctccccgctgctctctgattgcactggtgaagttgttccagttaaggtcgaactcggtccacgccaggagcgccatgaagttgagcatgtcaagactaccaccgagccccaacccccggatctacagtttcgcataaggcaccatgaggaaacctag

SEQ ID NO: 67576 - DNA, 4656 bp, Oryza sativa
  Clone ID: PAT_MRT4530_6841C.1
atggccgagaagccgccaccatcgccgtcctcggctagcccaggttctgttaaagagaagatccagcaattagaccaatctgacgttaatgagggtaacgttatgaccattactccggacaaattgacacctgatcagaaggagtttgaagcaatgatgcagcaagcacgaaaccagttcttgaactcattcatgcagacccgcaaggggacagtggtgcaaaagtatcaggtgcgagtagtggctgatgtccccgggaccagttcttccaaggatgcgggactgaaacaagccctagatggcttgggtcaaccgagcgacaaaggtgctacagatggatcggctcaggagaatcagggtgaccactctcaaggagtgcatggagttcaagttgatggcactcagggaccacagggaggaaatcttaatcaagatggcagtgcgtcacatgaatttttcaataattttcaagaccgggttgactatgctgtgcacaatgctgtaatcaatcaatctggggtattagtcaataccttgtcaaacatgatgaaggcgatagccactggttcaatagctgaacatcaggctgcaggcccaatttatttgccaagaggtacctttccaaattatcgtcctttgatcaccgatattcatccacctgttcaagcggttcctcccattgcatcatcaacccagccgatggcgccggtatcgatttccccacctgcgccacctgctccatcaacgccggcaccagccaaactaccaaaattaccagggggcaatttaaattatcaatatcaactcccttccccgcaagaccaatatcagcaagaggggttaattcagtctcaatttgctcctcagtacagccaattcgagcccatgcagcaacaatcgcaaggagcagctcaacaacgaccgtgggccgatgtgattgctgacgtgatgagggaacagttcgggcttaaaccaaaagatactggaaatttataccgacaaccatatcctgaatggtttgagagagtccctcttcctaaccggttcaaagttccagatttttcaaagttctcagggcaagatagttcatcaacttatgagcatattagccgatttttagctcagtgtggtgaagcattggctgtagatgccttgagggttaggttgtttcggttgtctttggctggatcggcttttacttggttttcggctgtaccgtgtggatcgattaacagctgggttgatctggagaagcagtttcatagctatttctatagtggggtacatgagatgaagttgtccgatttgacagcaatcaagcagagacacgatgagcccgtgcatgaatatattcaaaggatcagagagatgaggaataagtgctttagcttgagtttaactaatgcccagttagccgatttggcttttcagggtatgattgctccgatcagggagaaattctcatctaaggactttgaaagcttatcgtatcttacacaaaaggtaactttgcacgagcagaggtttgctgaagctaggaggaattctaggaaggttaatcatgtctattcttatatgtgtggatcggatgatgaggatgacgattctgaaatagctgcagccgaatgggtcaggagcaaaaaggttatactatgccaatgggtgaagaattctggaaaagaggagaggtatgattttgatattaccaaggctgacaagatttttgatctgttactccgagaaaagcaaattaaactccctgctggtcataccattccatcggctgaggaattaggcaagaaaaggtattgcaaatggaacaattctggatctcatactaccaatgattgcaaggtctttaggcagcagatccaagcggctatcgaaggtggcaaaatcaagtttgatgattccaagaggccgatgaaggttgatggcaatccttttcctgtcaatatggtgcatacagctggccgaacagccgatgggggccgtgcaagaggttttcaagtgaattcggctaagatcatcaataagtaccaaaggaggtatgataaacaacaggagatgcattatgaggaagatgatgatggcttcgatcctcattggagttgtgagttttttagattttgttggaatgaaggtatgaggctgccatctatcgaagactgtcctgaatgcggcaacgttgcggatggttcaagccggttgtatattaaaggcaatcggctgaagcatgcaagggttcctgttgatcaaagattaggcccggtaaatcaagatcatgacccagaggatgacgaaataggaagactcaatggtgtcctcctggaagttaggcagaaacgccgaagatctcatcaaaacaaacatggcaatccatcagaaaccaagggtgttctagatgtggagctgacagtcggcagcgacaagatagaaatcgtgccagccgacagccaattgaagatggagaacccaagctattactttgagggcgtcgtggagggttcaaatgtctacaccaaggacacagcagatgatctctatgacaagcaaggggttaggtcacatcaacaacctccgaggaggtgcaaagccgacatgctcgaacctgtcaaggctgagattaagagtttatatgatgctggttttattcgtccttgccgatatgccgaatgggtttctagcatagttcctgttatcaagaagaacggcaagagaagtatcaatgcgatcaagaagattaagcctccggagaacaagacagaattgcaggagatgatcggcaaaaaatattttgttcgaaggtttatttctaatttgtctggaaggattggaaagtggatattttcattgactgagtttgatcttcggtgtgagtcaccgaaggcgatcaaaggacaagctgtagccgattttattgttgaccatcgtgatgattctattggctcggttgagattgtgccatggactttattcttcgatgggtcagtttgtacttatggttgtggtatcggcttggttataatctcccctcggggggcatgctttgagtttgcctatattattaaactttatgcaactaataatcaagtagagtatgaggcagttctcaaggggttgcagctacttcagaaagttgaagctgatactattgaaatcatgggggattctttgttggtgatcagtcaattggcaggagaatatgattgtaagaatgatatgttgctggtttataatgagaagtgccaagaactgatgaagaaatttcggctagtaactctgaagcatgtgtctcgagagcagaatattgaagctaatgatttagcccaaggggtgtcaggatataagccgctgatcaaagatgttcagattgaagttgctgccatactagccgatgattggagatatgatgtctatcggtatttacaggatccatctctgtcggcttctcggaagttaagatataaagcgttgaagtatacattgttggacgatgagctttattatcggacgattgatggggtgttgcttaaatgtttgagtaccgatcaggcaaaagttgcaatcggtgaagttcatgaagggatatgtggcactcatcaatcggctcataaaatgaagtggttgcttcgatgtgctggatatttatggccaacaatgctggaggattgtttcagatattataaaggttgtcaagattgtcagaaatttggagcgatccagagagcgccggcatcggctatgaatcctattattaaaccatggccgtttagtagttggggaattgatatgatcggcatgattaatccaccgtcgagtaaaggacataagtttatattggtggcaaccgattattttaccaagtgggtagagacgattcctttgaagaaagttgattctggggatgctatacaaattgttcaagagcatataatctatcgatttggtatccctcaaaccattacgactgaccaaggttcaatttttgtgtctgatgagtttgttcagtttgccgatagcatgggaatcaagttgttgaattcttcaccgtattatgcacaagctaatgggcaggccgaggcatctaacaagagcttgatcaagttgattaagaggaagatttctgattatcctcagcaatggcatacttgtttagccgaagcattgtggtcttatcggatggcttgccgaagcattgtggttcctccttataaacttgtttatggacacgaagctgttttgccatgggaagttagaatcggctctagaagaacggaattgcaaaatgatttaacagcccatgactattacaaccttatggccgatgagagggaggatctggttcaatcacggttacgagcccttgcaaaggttaccaaggataaggagcgagttgcccggcattataacaagaaagtagtacccaaagatttttcagaaggtgaacttgtatggaagttgattttgctgattgggactcgggatagcaaattcggcaaatggtcgccaaattgggaaggaccgttccaaattcataaggtggtatctaagggagcttacatgttgcaaggattcgatggagaagtttatggcagagcactaaatggaaaatatttgaagaaatattacccgagtgtttgggttaatacatga

SEQ ID NO: 67577 - DNA, 146 bp, Oryza sativa
  Clone ID: PAT_MRT4530_68420C.1
ggcgttttcgtactcgcctctctccgcgccctgctcgggcgcccgttgccgccgatcgtgttcgacggcaccgtcgtcgacatgagggagtgcatctcgatccacatcgggcaggccgggatccagggcgggaaaccgtgctggga

SEQ ID NO: 67578 - DNA, 533 bp, Oryza sativa
  unsure (1)..(533): unsure at all n locations
  Clone ID: PAT_MRT4530_68421C.1
gaccgcctcccaacagaccacaatctgaggaacacacgtccanagagnacngcacgtngactactttccagcagtgccgagctgagctgagctgacgtgaccaggtcatgctgcgcgaccttgctccttgatcgnggngggctcttctgaagcacctggacgaggtcacntccgagtcgaccccagcncgggtagagctctgggcgagccgaccgaggagccgtgcccaggcgagcagacgggagcagcggcaggacagctcatggcagcgaccggcgacgcacgccgccgcggccaccgaccagccagggcccgacggcgcccacccacacacggccaccacgcacacccgatcctggaagcctggtgctgtacctgactttactatcccgccacctggacaccaagcatccaaagcctgccaggtgcaaccaaaagtatgctctaaccagcaacgaagtaacctacgtcagatgcactggacccacggtacggacccttccccatcaactaggtcatgtcttaacacaatt

SEQ ID NO: 67579 - DNA, 280 bp, Oryza sativa
  Clone ID: PAT_MRT4530_68422C.1
atatatatgcaaggttgttatgaaatcataatcggggtaaattgcaacataaagaatgtcggttgtgaaaaaaaaaaaaaaaaaaaaaaaaaaaaaaaaaaaaaaaaaaaaaaacaaaaaaaaagaagcacaaaaagggcgggcagtttaacggtaccaaaataaaaaaacacaagcatgcaaaaacaaaactttcaaaaagggacacctaaataaaaataaaaaaaccaccgtttaacaaccctcgtgattgaaaaaacccagcctcctcccaactaaa

SEQ ID NO: 67580 - DNA, 339 bp, Oryza sativa
  Clone ID: PAT_MRT4530_68423C.1
atggaggagcggcagcaggcccgggtggcggctgacgcggaggccggcgcaggcgtggcgaggtggttgcggcggccgacggaggacgcggaggcaggcccgggtggtggcggccggcgcacgcgtggagaggtggcaaggcagcgaggcggtggccggcggcaaccgccggatcccgcgacggcggtggcaacggcggcggtggaggctggcacgagcgatgtggcgttcggcgagcagaaggtgagcgaagtgttggtggctcagcgtgtggccgggagggaggtcgcggcgcggagcaagatgcagtgtgcggtcgccggcatggagctatgctag

SEQ ID NO: 67581 - DNA, 351 bp, Oryza sativa
  Clone ID: PAT_MRT4530_68424C.1
atggagactgggaggtttcaatctctattagggccactggacaaaaagattgggcttcacttcctttctatttttctgtctaaatcctaccatcatcgggaataccaagcaacaatccgctccaagcctgaagttgagctatttatggaaacaaccctacaaaacaggacaaatatattcaaaggacgaaaactacagaagaagtggagaatggattcctgtgctgaaggcagtactggtggaagtaaatctaccaagcgaaagaagattaattccagtactgagaaaaagaagcccttgagtattggaaatgaacctttgaagctcacactgcctcacggttttgtgtag

SEQ ID NO: 67582 - DNA, 475 bp, Oryza sativa
  Clone ID: PAT_MRT4530_68425C.1
gacgtcgtggagccgatcctcctggaggtggaccagatctaccacctggcgtgcccggcgtcccccgtgcactacaagcacaaccccgtcaagaccatcaagaccaacgtcgtcggcaccctcaacatgctcggcctcgccaagcgcgtcggcgcccgcttcctcctcaccagcaccagcgaggtctacggcgacccgctccagcacccccaggtcgagacctactggggcaacgtcaaccccatcggggtgagaagctgctacgacgaggggaagaggacggcggagacactgaccatggactaccaccgtggcgccaacctcgaggtgaggattgctcggatcttcaacacctacggcccccgtatgtgcatcgacgatggccgggtcgtcagcaactttgtcgcccaggcactgaggaaggagcccttgacggtgtacggcgacggtaagcagacgaggagctttcagtacg

SEQ ID NO: 67583 - DNA, 319 bp, Oryza sativa
  Clone ID: PAT_MRT4530_68426C.1
cctcagagagtctgagagaccatatgttattgttgaggatatatgtacttttgcgagcatcaccaatgccatgtctctatggcccaggtactggctgcagacggacatacatggcacagccctcggcaaggaggttataggtagagtagatttgatagactagaaacattagaaccacttcgcagagagaggacaaaacacgggggaacagagtacttggatgagaagaacgaagagagaggggaggaaggaagatttgtgaatccgaccagccattgaggcacaaaggtcttctggggacctgcgatacaggcaatac

SEQ ID NO: 67584 - DNA, 542 bp, Oryza sativa
  Clone ID: PAT_MRT4530_68427C.1
atggctcgcaagaagatgaagcttctgcggatcgtcattgatgtgaagcggcgggtgacatttaggaagcatctgaagggcttgatgaagaaggttagtgagttcgcaacactgttcctcatggtgtacggtgaggttgaggtgcaagcaacgaaggtttggccgtcggtgtgggaggcgaccagagttctcgagcacttcaaggccatgccgcagctgggcagatacaagaagatgatagacctagagggcatcctcaacaagcagatcgacaagctcaaggagaagttgcacaagctgggacgcgaagctgatgaaagcgagaccaagctactcctcattgaagccatcaatggccgccacccaagcctcgatggtctcaccatcgagcagattatcagcctcggaaggatggcaaattcacgcctcaagattgtcaacgaccgcctcaagaagctccgtgccccctcctccttcgccagcgtgttgccctgcccgccgccgccgccgccgccccgccgcccagcgtcgccgccgccgcc

SEQ ID NO: 67585 - DNA, 828 bp, Oryza sativa
  unsure (1)..(828): unsure at all n locations
  Clone ID: PAT_MRT4530_68428C.1
actcctatgggcgattgggatcctcgaggccggccgggacatcaatctaaccatctctcctcaatctacaggtgcattcttgctagaaagtagtgaactgcgtaggccatggctcgcaagaaggtgaagcttcaggggatcgtcattgatgtgaagcagcgggtgacattcatgaagagtctcaagggcttgacgaagaaggttagtgagttcgcaacactattcctcatggtgtacggtgaggttgaggtgcaagcaacgaaggtttggccgtcggtgtgggaggcgaccagagttctcgagcacttcaaggccatgccgcatctggtcagatacaagaagatgacagacctagaggacatcctcaacgagcaggtcaacaagctcaaagagcagttgcacaaggtgggacgtgatgctgatgaaagcgagaccaagctactcctcattgaagccatcaatggccaccgcccgagcctcgagggtctcaccatcgagcaaattaccagcctcggatggatggcaaatgcacacctcaagattgtcaacgaccgcctcaagaagctccgtgaggaaggcctcatacctgcatccgtgtcattgtcgagcacggaagtaccaatccagagggagggattgctggtggatgttgcaaggggcattggctcaatggggtacaatcggttcggaggtagcagtggaagcggcactgctggatccaatggtgacatggcttagcctttcacagtngtacaggattctcacaggccaaatcagaattttcatttgccaccccagtatgcgagactcattatcacttgattgcct

SEQ ID NO: 67586 - DNA, 232 bp, Oryza sativa
  Clone ID: PAT_MRT4530_68429C.1
aatgaagatcattttcgtatttgctctccttgctattgttgcatgcaatcgctctccgcggtttgatcctcttagtcaaagttatagccaatatcaactaagtcgcatctcctactacagcaacaacgtgctcagcccatgcagtcagttcgtaaggcaacagtatagcatagtggcaacccccttctggcaaccagctacgtttcaattgataaacaattaagtcatgcag

SEQ ID NO: 67587 - DNA, 1665 bp, Oryza sativa
  Clone ID: PAT_MRT4530_6842C.1
atggcctccgcctccaccgccgtggccagcgccaccgccgggaccacccgttccttcgagaagctatctgccccatggatgataggccggggacacgtggcgctccccccgtcgccggggcgttatcccgcggtcacggtggccgcggcgtcgcgtcgcaccggcgaaggtgggaggaggcggaggagagccaggggtgctgatcaggaggatggcctctccctcagctccgaaattgaggcaccaagttccactccccccgttcgcactaccgacaaggagagcacgaaacctgcatcagaaaccggaatcacaaagaaaggatcagccattagaagagttactttggtggtccttgctgcggttttcttcggcgttagcatcgccctgagggatggggttgggaaggcatctgaatattttgctggatatttattggaacagagtttgtcagtagacaatctctttgtttttgttctggtcttcaagtattttaaagtgccacaggaataccagaggtttgaagcagtgaacctattattggctttgatcctgctattcacttcatataagttatttgctgaagaagatgaagaatctgatctatctgacaatttcatagtgaaaacatgccaaagattcattcctgtcactgattactacgatggtgatcggtttttcacaactcaagaaggtttatggaaagccacacctttgctgttgactgtggcagtgatcgaactaagtgatattgctttcgctattgactcaataccagcagtttttggtgtcacaagggatccacttatagtgttatcatcaaatatttttgctatttctggtttgaggtcactctacgtactcatttctgaaagcatgtctgaattggactatttgcagcctgcaattggtatagttttgggcttcatagggacaaagatggtctttgacttttttggttatcatataccaactgaagcttcgcttgctattgttaccacgtgtctaagtggtggagtaatattgagtcttaggaaagcatcaactgaagaaaaggacaagtagccggcttgctggagaggaggtaaaagggataaattaacttggtgtttctttcacaggtcgaatgaaaatactgcttcctgagagctgctccttttatctggatgcaggggttcatcaatgcatcatttactttgatcaccagatgtagagcagtagaggaggtccttgaggagttttcacaagacgaccactgggcttgtacgtatagtaatgctcgtgtggttttgaagggcaattcacaaccagtggttttgatgtgtgacccagtatagatttatgaggttgatggactggccaaggcatgaaggactggtgtctgacatccaaattttaaggccatgtacgccttggttcgtcttgaagcagaagggttagtggaagatccaaaacagcagcagcctactaggatgactgactggcatggtaatcataattcttccccttttttttgagcttgtaaaacaagctcacaagcatgacatgcacaagcaatgtcaaattttattgcaacaaaacatatggtgtatagctgaccattatattttggttcgtttaggctactgatccttattatgtggttatattaaactgttgtgatta

SEQ ID NO: 67588 - DNA, 5450 bp, Oryza sativa
  Clone ID: PAT_MRT4530_68430C.1
atgaacctcacttcactatgctgtgctggcctgctcaaatgaatattggtatgacacgtttggtaggttttagaaatagtggaagttttttttttcctttttccctttcccctgcattttgtaaaatagaatgcgcaaacatgctgaatccgataacactatctggctacctgcatgtgtgactgctttattattttcttttcgaactcggaaaacaaccatgttttgttttcactgcaccaatatcttctgttcaatccatcctcaaaattctcctttaaagtaggccgtattcagttggttttataatcatttattcaaaaagtgggtctatcgatgtttccctgttccttccaaacccagtttccagtttgttctccctcaggaaccagttttaaaactggattgttgaggctggtgatgttttgaaatcaggaccatgtacttgatggttactttgataaatgtcagtgacttcttttccaatattcagtttcaatacctcgaaactgtcgtgcaagtgtggtatgtttttatgcgatgcactatgttgttgctgaggtctgcaatgtgcatgtttatcccaagattttagtcactattctgctatgcctgtttctaaccaactgatatgcttctcaactcttcatttgcaaatttgacagagaatttgtagtttgtaagctcaaaacagtagttcctcacttgggaaccacttactcagaaacagtaacaataaataatgtttgaacagtccaagttcccaacaaattaccatattttttattgcgtttagcatggaactgattggaatcaggagatcttgaaacgaattggaggtcatagggataaacctagctccacgaagagaattagagatatccactacctcactggaagtataaaatagtagtttttctcatctcaccatagatttcctacccttatctgaagggacacacttgatgtgcacaaacagaacttgtgcatgatgaaatgttaaagtttctgacaaataccaaattatgttgtttcaactttatttaagtttgacacaagacctggtatccattattttattccataatctggttgggataattgctttctgctgttttctttttacttttttttaatccctagtcccaatggtgttttaatttatgaatgcagacatggtgatctaacaccataatcataagggccttgttatcaccagcacttctacaacctcaatgacacagccatgctcagcctaaatggttttgcttggacacttctgggtaccttgcatcttttagctcacccgctgtatcttgcatgctgtgttgccaagtctttttgttgagcaaaacaaagtcgtaaaggtggccttttttagtgcctgtcaactgttttagtgaaaggccgtctagaaggttgtcaacattaaagatatgtagtgattaagagtacacagaaaaaccttcagcccaatcatgtgtttggatttatggtaaggtgaaaaatttggctacttttgtactactattaatgaatccatctcaagttatgtccaggtaaaataaaattttagtgctgaaagggtccataaaagtcttacaaaacacatttgtattaatttccctatcatgtttacaacatggcgcaggtttacctagtgctttttgtatgctacttgtgcagatgggtggcatggataaaaaccatccttttgggattggacaaatggaaaatggcaatgggagctatgcatctgaggcagttacatctgatgagaattctgcagatggcagtggcattgttgtggagccttacgggatcccatgcatggtggagatttttcatttcctctgctccctcctcaatgttgtcgagcaaattggagttgatgaagatctgccattgtttgctctgaagttgatcaattcagcaattgagcttggtggatcttcaattcgtaagcacccaaaattgctgtcattagttcaagatgagcttttccgaaacctaatgcagtttgggttgtccatgagcccacttatcctttcaatggtgtgcagcattgtgctaaatctttatcatcatctccggactgagctcaaattgcagcttgaggcattcttttcttgtataatcctaaggcttgcacaaccccgattcggagcaacatatcatcagcaggaggttgcaatggaagctcttgttgatttttgtcgacaaaagaatttcatggtggagatgtatgccaatctggactgtgacataacctgcaggaatatttttgaggaacttgcaaatcttctgtcaaagagtgcatttcctattaactgcccattgtcttccatgcacattcttgctctggaaggtctgatctctgtgatccaagggatggctgatcggattgggaatgctacttcacgccctgagctcctgcctgtggagcttgatgaatacactcccttctggactgttaagtgtgagaatttttcagatcctcagcattgggtgaagtttgtccgtcaaagaaagtatgtcaaaagaagactaatgattggtgctgatcacttcaacagagacccaaagaagggtctggaatttcttcaaggcactcatttgttgcctgagaagcttgatccccaaagtgtggcttgttttttccgctatacagctggtttggacaagaatcttgtaggagactttctaggcaatcatgatgagttttgtgttcaggtgcttcatgagtttgctcaaacctttgacttccaggagatgaaccttgatacagctctgagactatttttggagacatttcgtctgcctggagaatctcagaagatacagagggttcttgaggctttctcagacagatactatgagcagtccccacaggctttcgcaaacaaggacactgctttagtgcttgcttactcaattataatgctgaacactgatcagcataacatgcaagtaaagaagaaaatgactgaggaggacttcatcaagaacaacaggaacataaatgggggtagtgaccttccgcgtgagatgctgtctgaactataccactccatatgccgaaatgagattaagaccacaccagagcagggtatgggatattttgaaatgtctcccagccgctggatagatttaatgcggaagtcgaagtcaacatctctgtatatagttggtgattctcagccctttctggatcatgatatgtttgctatcatgtctggtccaactattgctgccattgcagtggtgtttgatcattcggaacatgaagaagttctgttggcctgtgtggatggcttcttgggtgtcgcaaaaatctcagcatttcatcatcttgaagatgttttggatgatcttgtcgtttctctctgcaaattcaccactcttttaaacacctctttggttgaggaaccagttactgcctttggggatgacctgaaggctagattggcaactgagacattgtttaccatagctaatagatatggggactacatacgtactggctggaggaatgttttggattgcatattgaggctgcataagttaggccttcttcctgcccgtgttgctagtgatgcagctgatgattcagaagtttctgctgaaactgtccaaggaaagcctactcatagctcaatttccacatctcatattccagttatgggtacgcctcggaaatcctctggacttatggggagatttagtcagctgctgtcacttgacagcgaagaaccaaggtcacagcccactgagcagcaacttgctgcccatcagagaactctacagacgattcagaaatgccgaatagatagtatatttacagagagcaaattcttgcaacctgattcactattacaacttgctagggcactgatttgggctgcaggacgacctcaaaaggttgccagctcaccagatgatgaggacacagctgtattctgtctggaactgctaatcgcaattacgcttaacaaccgagaccgaattgtgcttctctggcaaggagtttatgagcatattgccaacatagttcagtcaacagttatgccatgtgctcttgtggagaaagctatttttggacttctgcgcatatgccagaggttattaccatataaagagaaccttgcggatgagctgctgaggtcattgcaattagttctcaagctggatgcgcgtgtagcagatgcatactgtgaaaacatcactcaggaggttgcacgccttgtcaaagcaaatgctggacacgtaaaatcacaaatgggctggagaactgtagtgttactgctctccattacagctcgacaccctgatgcttcagaagtaggctttgaggctatcatgtatatcatgtccgagggtgctcacctttcactatcaaattatgctttctgtatcgaagcgtcacggcagtttgctgaatccagggttggtctaattgacagatccattcgtgccctggatctgatggctgattcagccaatagtcttgcccgatggtcacaagagacaaaagggacaggcgaggaaactgacaaagtgttggaagcaatcagggagatgtggctcaaattgctgcaagcactgaaaaagttgagtttggatcagagagaggaggtgagaaatcacgcgctaacttcgcttcagcgatgcctaacagcaacagaaggggtgtgccttcagagctccacatggtcacatgctttcgatctcgtcatattcgcgctgctggatgacttactagagatcagccagaatcactcgcagaaggactacaggaacatggaaggatcccttgtgctcgccatgaaactagtcgcgaaggtctatctgcaactactgccagatctttttgggctaagcagcttctgcaagttgtggctaggagtcctcagccggatggagaagtacatcaagatcaaggtccgtggcaagcgcagcgacaagctgcaagagctgatccctgagctgctcaagaacattctaattgcgatgaagaacagggggatcctcgcaaagaggagcaccattgggggcgacagcttgtgggagttgacatggcttcatgcgaataacatctcgacgagtttgcagtctgatgttttcccaagccaggagtatgagcagcacagcagtgccggtagcccgagaggacccaacggcgttgagtcccgggactagaaagttcagaagttcaggtggtgatggctggttgatggttcggcgtgccgtggagtgtgcaagtttagttattatgttactaggtttaccaattgcttgctttcttatccactgaaacgtaaggttttgatattgtaattgcaatgcgtgcccccattgtaagttgatcttgtaagttttgtagtagtattctggcgagctcgcggaccagtttttaaaaaaaaaaaaaaaaaaaaaaaaaaaaaaaaaaa

SEQ ID NO: 67589 - DNA, 464 bp, Oryza sativa
  Clone ID: PAT_MRT4530_68431C.1
ttaaaataaattatcttttttttttttttttttttggtggtttttttttaatttttttttttttttttcccttttttttttttttaaacgggaatcaaaaggaaaggaaaaaaaaaagggaaaaaaaaacattttaaaatccaaaaaaggcatgttttggaaaaaaaaaaaaccaaaccccttgaaaaaaaaaaaaaaaaaaaacccggccggggggggcaacccggaaaatccggaccggaccccggaggggaaccaattttcccaaaaggggggccaataaaagctgggggaaaaaaaggaaaaaggggtttcctggggaaaaatgttatccgctaaaaattccaaaaaaaaaacgggccggaaaaaaaaaaggaaaaaccgggggggccaaaagggggagccaacccaaaaaaaatgggtaagccaaaatggccgttttaaaaaggaaaaactctctggcc

SEQ ID NO: 67590 - DNA, 525 bp, Oryza sativa
  Clone ID: PAT_MRT4530_68432C.1
gacaaggcaatggccttttttttttaatgtactaatactggctcatttattctcttacatttatctgaacaaggtaactatgaacaaactacatgtcatattatcattgttggctttgttagcctttagttacgacacatttaaactgaaaaactcgaaaaaattgtgctactaattgttagcaacagatcaacttgctttgacatgtagtttaattcttaataaacagaatctgatttgatcagatcagatacggcttcaactgaaatgacctgaacctggacactgcacttcagaaaaccggagatcatctcactgctcatactgcattcctagcattcgttgcatgtaatccaattatccaagtactggaccaaataaaatgccaaagtctggaacaaaaattaatgaggatgtcactttgtttcaagaacattaaaaaaaagaaagaaaaaccaggaggaataggaggccacatgcatgcagcatgctgctgcagctatggagatgagaatccaatgactg

SEQ ID NO: 67591 - DNA, 666 bp, Oryza sativa
  unsure (1)..(666): unsure at all n locations
  Clone ID: PAT_MRT4530_68433C.1
ctnccgatcgtgctgtacaccttcccgggcgtntgcaacagtgtggcctcgactcggacctnatcgccaccctcgcgcnccnccacccgcaggtggtgggcgtcaagctcacctgcggaagcgtcnccaagattgtgcgcctggccnccgagctnccgcagacgagtttnccgtctttgcggccagtcggattttntnctgggagggctggcgtcgggcagcgcggggtgcatcgcggcgtttgccaacgtcttcccgcgctcgctggctaggatctacnanctgtggaaggcggncgagggggacgagncnctgcgnctgcacaaggctaccgcgctggccgagagnccgtncaagaacggcatcnccatgaccaagtactccgcggctgtgttttcggcgaccagggcgggcgtcgaggatgcggagcgcaagatgctgccgaggaggccgtatgcgggccctggggaggcggataaggccaagtgtcgggaggtcatggctgagcttgctaagattgaggaggagctggcggacaagtccacgtagaggactagctcctacgattttgtattttttttttgtctttgtctttttgtagctactcttgaagaaaaagaaaataatgtgtgatgctggttgcggccaaaaaaaaaaaaaaaaaaa

SEQ ID NO: 67592 - DNA, 322 bp, Oryza sativa
  Clone ID: PAT_MRT4530_68434C.1
gcgctcggcgaggacggcgaccaccgtcggtgcaaacaacgtgagcatgacctcgcacgtccagtctagtgcgtacatcctcgactacggtggcgctcggctccccctcctccgccgccgcgagccggcacgccgtcgccgctgccgacatggttcgcctctgggaaagagaggagcagcgctcggctccccctcctcctccgcagccgcgagccggcgcatcgccaccgccgccgctgggaaagagaggagtagcgacggaagccgatgggtggcggcggatctagggcttggggtgctggtgctcggcgtcttcggctag

SEQ ID NO: 67593 - DNA, 620 bp, Oryza sativa
  Clone ID: PAT_MRT4530_68435C.1
gtgagagaggcagccggacctcggacgccatcaaggacgcagccactccggcggcgacctcggccgtcggcaagcaggcggccacaccggcgacctccgtggccggcaaggaaacgaccacaccggggctcagcgacggaactcaagcgcagtcgcatggaagacttctctgcggtggtgttcaggttcgtgtggtaaggtgcagtggcgccgttgcccggcatagtggccggaccaccggatggacagaaaagcgccaccatgaagcaccagagcgcggcggcgtccatgcggtcgcacatccaccagagcgcgccccggacgtcggcgggcggggactcaacaacggccgtggacagtgccgcctcgacctcggcaaggcgcgtggggagccggggacggcggccttgcgggcatcgagcgccgcgagggattcggaggtggaggcgttcgcgacgactagggccacctctctcgccgtcccttcctcttccgcccacagccaccgtgtagccgcctaccgcgcctgcccgcgcctgccgcccgtgtcgccgttccgctccacaccgcccccgccgtcatcgccgtcatcacgacccggccccgccacctccgcgtaa

SEQ ID NO: 67594 - DNA, 187 bp, Oryza sativa
  Clone ID: PAT_MRT4530_68436C.1
aagctgaaccgtgatcgttggtgctaagatgtgacgagggatacatataaggagctccatatagcgccattatagccatgatcagaatagatggctgatgtcttgccaaacattgtacacgcatgcaccatcatgtatagacgacacgtacatattctagacaatcaatctcacactcttatattgt

SEQ ID NO: 67595 - DNA, 691 bp, Oryza sativa
  unsure (1)..(691): unsure at all n locations
  Clone ID: PAT_MRT4530_68437C.1
agtcgtgcaagcgaaaacaccagtcggaggcggcgaaggccagccggtcggtgaagacgtggacgcccatgaacggtggtgtgaccaaccaaccgtataggcgaaggcaccagtcggcggcgacggaggcaggccggnnnnnnnnnnnnnnnnnnnnnnngcaacggcagcggcgcacaccaaccgtggaggtgatgaaaccaatcggcagcgacgaaggcggccggcggtacatgtataaaataatagatcaaataataattatgatcaaggtgaggttataggactattgtagaggacctttgaggatatttggcattaacgtgaaacataactggaacacaacatacctcatgccgcgtcagctgaaagggtatgaggaaataatttatgatttgattgattcattgcacttgataataaattatgccgagatgaggatggtgatgaaaaccaacatgacaaaattttagcttccattgttaaacccatgcatgaaaaattcctcaaatacttcactgctattccaccattattgctttaatttggtacttgatcttcataaaaagttgaaaatcgtggagactactttcatatcattaggtgatgcaattgatctttgattattcaaaagtttatcaacatgctagagatgagttgtttagagttttccatctgtaccaaactaagc

SEQ ID NO: 67596 - DNA, 229 bp, Oryza sativa
  unsure (1)..(229): unsure at all n locations
  Clone ID: PAT_MRT4530_68438C.1
tccctgtttggctncntcnggnatttgtttcccttngttcagtctgtctcntctttngaaaggttggtttggtgtntgntcaatttgttctggggnttntttccctnatntntgtcttttntntntnatnaaatgggtnnttttnnaaaaaaaaaaaaaaaaaaaaaaaaaaaaaaaaaaaaaaaaaaaaaaaaaaanannnnnanaannnnnnnnnnttnnaanaaaa

SEQ ID NO: 67597 - DNA, 488 bp, Oryza sativa
  Clone ID: PAT_MRT4530_68439C.1
tttgtttttttttaacttatcaagaataggtaattttaccagaacccaaatacagaaaatcatgtacagtcagtcagtactgccctgtccgtatattggtacacacatgggaaactcttgtacaaaatggaccctgctctggcatccttaagtaacacaggacgtacatgctaataaacccagcaaattctttcttacaaaaaccaaatcagtactccaacacgacacactaaccagaacatcttgaacgtacagtgcaaatctgatcgatgcatgtagtgcacggttcatgcaattggcacatataaatctcttggcaatttcttgtatgtctggccatgcatatctcgatcgatcttagtaccagtgatgggtgatggtgtgtgtcacgaaaagtcacacgtcgatgccgccctgcgcgacgctatcatccggggggctaatggtgatccagaggagagagactgtgatggagatgaggcccgccc

SEQ ID NO: 67598 - DNA, 2115 bp, Oryza sativa
  Clone ID: PAT_MRT4530_6843C.1
atggccgagaaacaagcaccaccaccatcaagcccaggttccattaaaggcaaggcattgaagccaggattgactgacatcattgatgacaatgtcatgccaatcgatccagagaaattcacacttgagatgaagcaggagtttgaagcaatgatgcagcaagcacgggatcagtatctgagctcgttcatgcaaacccgcaagggaatgctggttcagaagtacaagttaaaactggttgctgatagccctggaaccggcggctccatctgtcgcatccacgactcaaccaacagcgccagcatcaacgcccttacctgctacatcggccacggcgtcagctcagccgatcaaccctcgattgctaatgagggaacatccacagcttgctggacaaacctcgaatcagccgactcaagatcagccgatccaataacaggtcgcgcagccagctcagcagacaccaccaattcagccagtggtacagccgatccagtaacaggtcgtgcagccagttcagcaagcaccatcaacgcagcagcatctccaaccaatccagcaaacaccgccaaggcaacgacctcagctgatccagcagactccgtacatggggggcaacctgcgcagcagtttgtgaatcaagttatcccagagcatttggttcatcatgcacaaccggatggcaccgtgcttccatccccgcaagcccaatatcaaccagcgggatcggcccagcaacagttcactcctcagtttggtcagttcgagcccatgcagcagcaaccacaaggagcagctcagcaacgaccatgggctgatgtcattgctgatggcaagagggtgtgtcaacttaattatgagcacatcagccgataccttgctcagtgtggtgaagcatcggctgtggacgccttgagagttaggatgttccgattatccttatccggtggggtccacgagatgaagttgtctgacttaacggcgatcaagcagaggtatgatgaacccctacacgagtatatccagaggttcagagagatgaggaacaagtgctttagcttgagtttgaccgatgcccagttagccgatctagctttccagggtatgattcctccgatcagggagaaattcttgtccaaagacttcgatagtttgtcgcatctgatacaaaaggtaaccttgcgtgagcataggtcggctgacgtcaggagaagctccaggaagagtcctggaaaggaggaaaagtatgacttcgatatcaccaaagccgataagatgttcgatttgctactccgagaaaagcagattcaacttcctaccggccatatgattccatcggctaaagaattaggcaagaggagatattgtaaatggcataattctgaagaggacattaatcatcggctgaggaaaccaagaccaaggcaggcggtattcgagaagcccgagggaacggagaatcggcatcttaaaccattgtatgtaaacggctacgttaatgggaagccgatgaatgtcgaggatcttatcaagacaaatatggtgctcaaagattttggtggtaatccatcggagaccaaaggtgttttaaatgtggagctgacagtcggcagtaaaactattcctaccacgttttttgtcatcgatggtaaggggaagtatggcttgaagatgaatccgacaaaatgtgcttttggtgtatcggctggccagttcttgggatttctcgttcatgaaagagggattgagtatgtatctcgagaacaaaatcttgaagctaatgatttggctcaaggggcgtcggagtataagccgatggtcaaagatgttaaggttgaaattgcggcaatgtcagccgatgactggagccgagccctgattggaccacagtcgactaccaagctatctagcgatgatgcttctagccgatccaagatacttcttagagttttcctgacatcatcagataaaggagccaatgctttgcttgagcggctggttgttcttctttttcaacatgatgacttcctgcagctgaaggggtctggtcacttgacgattgttgagcagaaggagaaggaggaggtgaaggctgaaaagaaagcgagtgtttaa

SEQ ID NO: 67599 - DNA, 600 bp, Oryza sativa
  Clone ID: PAT_MRT4530_68440C.1
atggcctcgacctgcttccgcgccgccgcccgcatggcctcctccgcctgccgctcggcggcctcccgctcaatcccctccgccgcgcggcgcggcgcccctcgcatctccaggctgccggtggagctcgggtgcagcgcggggttgtcgctgctgccgctgcacagcgcggtggcggcggcgaggctgacgtcgcggctgagcacggcgtcgcggagctgctgcgcgctctctcagggtaccctctgtcgcacctatcccggactttaaatgtcttaaaggtggtgcttggctgttatggcaatgctgcacatgtattactgcgacatccgccttagtcatagaatttatggttttgacactccggattttgtaaaagttattttggtagtgtcagggataaacatcaatgctgtatgcttccacacttataaagttataatgaagcaattgagatattcaaagttctgatgtatgctttatttgtgtttatatagagatgggtcagtctgtcccaaggtgataaatgctggaagacctgctcatgtcgtgctatcagacaattgattttgtagagtgaactaaattggtttctgtgtt

SEQ ID NO: 67600 - DNA, 178 bp, Oryza sativa
  Clone ID: PAT_MRT4530_68441C.1
ggaaacaaaccccaatcttttttatatccacaggagaaaaaaataccagaatcaaacaaactacgaacaagagcccccatctcctatatgagttttttttgggcccaacaaaaagtttttgggggtatgggaccctggggggacaaaatcatttccgatcgggggatctaacgatgcc

SEQ ID NO: 67601 - DNA, 678 bp, Oryza sativa
  Clone ID: PAT_MRT4530_68442C.1
atggaggaagggtggaaggaagcggttgcttcgctttggagagacgatgactcgcggaggcggaggaagaaatttggaagacgcgaccgggtcggagttgagtttcgccgagccgagtcgttcgcttcgactcggtcggtgtccggtcctcaggcctccctcgggtcgcacctgtggtggacgacggtgtggcggggagggcacgacggccggtgggccgagccgaggagaacggtggaggcgacgggctgtgccgaggaggatactcgaggcggcgcgcggcagcgctcgtggggagggcggcggccggtgggctgcgccgaggaggatgccttcacgtcccacgccgccgatcaccgcctgcccccgctcgccgaccacccgtgccgctcacctgcgctcgcgctcgcctcctccgccgccatgctcgcctcgccgccgccttgcctcctccgcctccgcctcgccgccgcgctcgcctcgcctcctccgccgtcgcctcgcctccgcggcgcgtggcgctgctctcaatccgcctctgccatcggtcgccgaggcgagctccgcctccgtcccggcagcccagtccaccactggcctccgcctccgcaccctgccgcttgggcatgctcggcctcaggcgccgccgtcgccgctgaccgcccgctccgccactag

SEQ ID NO: 67602 - DNA, 465 bp, Oryza sativa
  Clone ID: PAT_MRT4530_68443C.1
atggatcgactcaaccagaaaagaaaagagagaatacgtaacgtgtttggtgcctttttgtataggctgtttgttgaacggaagagtccaacctgtagtatactgctacaagctcagcagcacaagccgcgagtccgcaaaaatggtaaagcccaaatgtacaatcacgatgactcgattgaccaagtagccgagagcgcgccagtggctgccaatgacgacgacgacgatgatgatgcgccgggccggggcgcctgcacagtggagcgcaccaccgttggtgaacgcgtgaatagtggcagaacagcaagctatcgcgcacagtacaacaccaagatcggttttggagctcgaatatatgtgggctccggcatatcaccgcgtatttgccttataacacagtatcggaactcatgtgaattcatgtaccaatggtattggaactgccgcacactcgttgctgat

SEQ ID NO: 67603 - DNA, 327 bp, Oryza sativa
  Clone ID: PAT_MRT4530_68444C.1
atggcacgtcatgggcgtgtagcatcgagggcgcatcgggagcacgcagaagctcccaccctgagctcgacctttgatggtcgcggtgatggtgtgctaaggacgatggtggcagtgtgcatcagcaatgatgggggccctccctccccctatatgctctcatgggccgcacgggccagatcccaattaggccaggatgtcagatacaacccctcccccccccaaaggggacccgacgtccccatcggtccaactcacccacatagccggatacccgacgtccccatcggtgagtacagtatagctgcaaaatcaaaggctcggtga

SEQ ID NO: 67604 - DNA, 438 bp, Oryza sativa
  Clone ID: PAT_MRT4530_68445C.1
aaaaaccctagccaccttccccccatccctctcgccgacgaatgcgcggtggctatctctctctctctgtctctctgatgctcatttgtttcgattatcctgttgggtaagaccgtcgcgctgcaggaggagtcctcggacgccatccatatctggatagacttcattgattaccctgttagtatcatcccgcacctgcatcttctcttgttcgccgttccttacatcgaggatggtcgctgcttctttgtgtacggcgttgagaatggaaactacctcctactcaagttgcttgtccggatccatatctatgagctgatgattaaatacttacaccgatatgtttgagatcgctgatcagtattattctgtgaggctacgacgagctccccatctactttccggctaactccaccggatggggccctggctgaccta

SEQ ID NO: 67605 - DNA, 108 bp, Oryza sativa
  Clone ID: PAT_MRT4530_68446C.1
tccaactgtaggtcagccccagttgatcccacctgtgacgggcccaacactctggtccgtcacaggtgatgtcacctgtgagggccccatagttagagcccgtcacag

SEQ ID NO: 67606 - DNA, 354 bp, Oryza sativa
  Clone ID: PAT_MRT4530_68447C.1
atgaacaagctaggtggtttcaggtgtaaaaatcccacgaaaaatcatgaaactttcctgacaagaatacaagttactgaccaaagggtggagagcttcatagagcaacaggatgcgtgtaactctggacgggtgcgcggcgaggccgtgcccgtggtgacgacgctgccggtcatccgtcacgcagcgctgcggcatcatcatcatcatctgccgccgccgccgcctgagcagcagctcctcccggcgtccaccacggcaccgttggccgccgcgttctcgtccaactccacgaccaccacgaccaccgtctcctcctcccacgagcaacacgccaacacgcgattacgatga

SEQ ID NO: 67607 - DNA, 743 bp, Oryza sativa
  Clone ID: PAT_MRT4530_68448C.1
cggcacgaggcccttttttttttttttttttgacgaacatttacatttttcttgcattatcaattgttactatcatgtattgcattttccagcaaggctggctggttcattgacaaatgaaagtgtgaagtccataatattacagagtattgctgcatgtttagaactaccataacattaccgaggactcaccatcccagaaagcacgccgctactacttgcatcaacactagtaaaagtttgagatgaggccaagtaattcccatttgttgaatttgatgtagatttactcatagggtccttgctcatagcacgtcctgagtatgtctgtggagtttccagctggataagatcaccctctggcattatcttcaagatgagctcaagttctctaacaatctctgtcatggatggccgagcgtcagtctcatcccgagagcacttcattgcaagttggaggaagctatccacacactctggagaacacaagcccatccgggtatccatgatttcagatatattgcctgatcggtaagctttttttacctctctcactatgtttttaccatgctcaataggcttcatcccggtcaacaattcaagaaaaacaaccccaaggctgtacacatcacttttatccgtcaatttatgagttaggaagtattctggatcaagatacccaggggtgcccttaacaacggtggagacatgagctggtaaagccccttcaacatctggtactg

SEQ ID NO: 67608 - DNA, 237 bp, Oryza sativa
  Clone ID: PAT_MRT4530_68449C.1
aaagcaagacagcaaatgcacagtgcagaatagtgggttacgcatcgaggctgctagtgacggtaaaagttgacaatgaagggaaaagaagaattgttggattggacaatattgcagatgaggatgattataaccagcacttccatggcataggtcaagaaatacctctagaagaggaggaagaagaagatgacgtgacatcacctgtgacggaccagagtgttgggcccgtcacag

SEQ ID NO: 67609 - DNA, 4173 bp, Oryza sativa
  Clone ID: PAT_MRT4530_6844C.1
atggccgaaaaaccaccaccaccatctagcccaggctctgttaaggaaaagatgctgaagttgggattgactgatgtcaatgaaggaaacgtcgtgccggttaatccagaaaaattcacacctgagcagaagaaagagtttgaagcaatttcttctaaggatggagatgggaaacaagctccagacggctcggctcagccgagtatcaaaggtgctaccggtggctctctaggaaatcaaggagacaattctcaaggggtccatggaggacaaggtgacggggtgcatggagttcaagttgatctaatacagcagcggccgattcagcaacagccgattcagcagacaccccaaattcagcaggttgtgcaaccaatccagcaacaggtcatgcaaccagcacaaccaatccagcaacaggtcatgcatcggcgttgggccgatttggagaagcaattccacagctatttctacagtggggttcatgaaatgaaattatctgacttgacagcgattaagcagcggcatgatgaacctgtgcacgagtatattcagagattcagggagatgaggaacaaatgcttcagcttgagtttaactgatgcccagttagccgatttggcctttcagggtatgattgctccgattagggagaagttctcgtctgaagactttgatagcttgtcacatctgatacagaaagtaaccctgcatgagcatagttctggaaaagaggagaagtatgattttgatattactaaagctaacaagatcttcgatctgctacttcgagagaagcaaattcaacttcctgctggtcatacaatcccatcggctgaggagttaggcaaaaagaggtattgcaaatggcataattctgggtctcattctactaatgattgcaaggtttttagacagcagattcaggtggccattgaggggggcaagattaggtttgatgattccaaaaagctgatgaaggtcgatgataatccttttcctgttaatatggtgcatacagctggccaaacaaccgatagggcccgcgcaaggggttttcaggtgaattcggctaagattatcaacaaatatcagaggaagtatgacaagcagcaggagaagcattatgaagaatacgatgatggttttgatcctcattggggttgtgagttctttagattctgctggaatgaaggtatgaggttgccatctaccgaaaactgccctaggtgcagtgatattgtcgagagctcaagccgatcatataataggggtaatcggctgaggcagacaagagtttctgttcatcaaagattgggtcctgtgaatgaagatcatggccaagaagacagtgtggtcaggaagaatcaatggtgtccttctggtattttcacaaagaatcagaagagaagggttcaaagattgaggaacagagaacgccttcaggaggttgaacaagagattaatcatcggctaaggaaagcaaagccaaggcaggagtggcgtgttaagaatcaggttcatgtagccgatgatgttgcagtcaatgaggcaaagaggttggcaaaagggaagagtattgtgacggcactgattaatatggtctttaccttgccagccgaattcgggattgatcaagccgatgtcgacgaggtggaagaggaatcggctaagttggttctgtcaccagaacaggcagtgtttgagaaacccgaggggacagagaatcggcatcttaaaccattgtatataaatggctacgtcaatgggaagccgatgtttaaaatgatggttgatggtggggctgcggtaaatttgatgctttatgctacgttcaggaagttgggtagaaatgccgaggatctcatcaagacaaacatggtgctcaaagacttcagtggtaatccatcagaaaccaaagatgttctgaatgtggagctgacagtcggcactaaaactattcctactacgttttttgtcatcgatgggaagggttcttacaacttgttgcttggaagggattggattcatgctaattgttgcattccttcaactatgcatcaatgtttgattcaatggcaaggcgacaagatagagatcgtgccagccgacagcccattgaagatggagaacccaagctattattttgagggcgtcgtggagggttcaagtgtctaccctaaggatgcagtagatgatctcgttgacaagcaaggtcaaggtttcatgtcggccgatgatttggaagaaatagacataggtccaggcgatcggccaaggccgacatttattagtaagaacttatctccggagtttagaaccaagttgatagagctcttaaaagtgtttagagattgcttcgcctggaagtattatgagatgcctggactcagccgatcgattgttgaacatcggttacctatcaaaccaggggttaggccacgccagcaacctccgaggagatgtaaagccgatatgcttgaacctgtcaaagctgagattaaacgattcatagttctagttatcaagaagaatggcaaggtcagggtgtgcattgatttccgagatctgaataaagctacaccgaaggatgaagacccaatgccagtagccgatcagctggttgatgctgcatcagggaacaaaattttgagttttatggatgggaacgcaggatataatcaaatctttatggctgaagaagacattcataagacagcttttaggtgtcctagtgcaatcggcttatttgaatgggttgtcatgactttcggcttgaagagtgctggagctacatatcaaagagccatgaattacatatatcatgatctaatcggctggttggttgaagtctacatcgatgatgtggttgttaagtctaaagaaatagaggaccacatagccgatttgaggaaggtttttaagagaaccagaaaatatggcctaaagatgaatccgacaaaatgtgcttttggtgtatcggctggccagtttttgagatttcttgtgcatgaaagggggattgagccgtatgcgactaataatcaagttgagtatgaggcagtgctcaaagggttgcaactattcaaggaagttgaagccgataccattgaaatcatgggggattctctgttagtaatcagtcaattggcaggagaatatgaatgcaagaatgatacattgatggtttataatgagaagtgccaagaactaatgaaagagtttcggctggttactttaaagcatgtttctcgagagcaaaatattgaagctaatgatttagctcaaggggcatcgggatataagccgatgatcaaagatgttaaagttgaaattgcagcaatgacaaccaatgattggaggaaattaagatataaggcattaaagtatactctgttggatgatgagctttattatcggatgattgatggagtattacttaagtgcttgagtgccgatcaggctaaggttgcaatcggcgaggctcataagatgaagtggttgcttcggcgtgcagggtacttttggccgacaatgctggaagattgtttcagatattataaggggtgtcaagattgtcagaagtttggagcaattcagcgagcaccggcgtcggctatgaatcctattattaagccatggccgtttagaggatggggcattgatatgatcggtatgataaacccaccatcgagtaaaggacataagtttatattggtggcaactgattatttcactaagtgggtggagacgattcctttgaagaaagttgattctggggatgccattcaattcgttcaggcatatataatctaccgatttggtattcctcaaactattattaccgaccagggttcaatcttcgtgtctgatgagtttgttcagtttgccgatagcatgggtatcaagttgttgcattcttcaccttattatgcacaagctaacgggcaagccgaggcatctaataaaagtttgataaaattgattaagcggaaaatttctaattatccgcggaaatggcacactcggttggccaagcgttgtggtcttataggatggcttgtcatggatcgatccaagtccctccttacaaacttgtttatggacatgaggctgttttgccgtgggaggttagaatcggctctcgaagaacggaattacaaaacaatttaa

SEQ ID NO: 67610 - DNA, 681 bp, Oryza sativa
  Clone ID: PAT_MRT4530_68450C.1
atggcggcctccatccgcgcgcgcgcgcgcctcggtgtccgcgccttctacctccgcctctcgtccccggcgccggccgagctcacgctcgtctacctcccggccatcggcggcgccgcgctggagctcggcgggcgggcgctcccgccggccgcgcccgccgaggtgccgctccggagggtgggcgccggcggcaccgacgcggcggcgtacgcgagcgccgaccgcgtctgcgtcgccgagggggcgcgcttcgaggtgtacgccgccgggaaggatctggtggcggacggcgtcttctcgcgccgccgcggcgggggaggagggtggcgcgtcgagtgccgccgtgcggctgcggcggcggcggtggccgaggttgtggtgctcgaggagggcggcgcgctgatgagggccacggcgaaggcgtcggcgagggggctcgggtgcggcggcacgaggctggaggggataccggaggaagggtgggggtgcgactgcgagtgcgggacgtgcggggatgacgagtgggaggtggtcggagacgacggcgagctcgacacgccggagatggaggcggagacgttgacgtgggcgctggagatgggagcatgggctgtctgcgtcggagtcggacttctcgccacggcgaggcgattccggcggaaacgggcgttctggtga

SEQ ID NO: 67611 - DNA, 280 bp, Oryza sativa
  Clone ID: PAT_MRT4530_68451C.1
ctgcaattgcaagttcatattggtgaggagtcgctggtgtgactagagtaggaattgggaccatcacgccagtccgccaacatatattctgctggagagctaagggaagagaagacaacagaaggggcgcatttcctggtgatgagatacttatgcatacgaacctctggttctctttttcgcattgtacttcgtctcttcactctcaataatctgttggcagacgcaagaaatatatatgctagaggtacaactcagcaaataacccattattaattgg

SEQ ID NO: 67612 - DNA, 970 bp, Oryza sativa
  Clone ID: PAT_MRT4530_68452C.1
gccggtgctggtgctctcgatttccggcaagcggatggaccaggcggggcggaagaagtacgtcaagcaggtgaccggccggcacaacgacacggagctccacctcgccgcgcagcgcggggaccttgaagctgtgcgccagatcatcgctgaaatcaacgcgcagatgaccggcaccggggaggagttcgacagcgaggtcgcggagatccgcgccgccgtcgtgaacgagcccaacgaggtggaggagaccgcgctgctcatcgccgctgagaaggggtttctcgacatcgtcgtcgagctgctcaagcactccgacaaggagagcctcacgaggaagaacaagtccggattcgatgttctacacgttgccgcaaaagaaggccaccgagatattgtgaaggtactcctggatcatgatccatcccttgggaaaacgtttggccaatcaaatgtgacacctctgataactgctgcgattagaggccacattgaggtagtgaaccttctactagagagagtttctgggttggttgagctatcaaaggggaatggaaagaacgccttgcattttgctggccgtcaggggcatgttgaaattgttaaggctttgctggacgcagatcctcagcttgctcggaggactgataagaaaggccagactgctttgcacatggctgtgaaaggaactagtgctgcggttgttagggcactagtgaatgctgatccagctattgtcatgctgcctgacagaaatggcaacttagctttgcatgttgctaccaggaaaaaaagatcagagattgtaaatgagcttctccttcttccagacatgaatgtgaatgcacttactagggatcgcaagactgcgtttgacatagcggagggtcttccactttcggaggaatctgcagagataaaggattgtttgtctcgtgctggtgcagtcagagcaaatgatctaaaccag

SEQ ID NO: 67613 - DNA, 558 bp, Oryza sativa
  Clone ID: PAT_MRT4530_68453C.1
atgcctcctgcacaccgaagggtacttgtagtatatacaccacctgcacgacgatcggattctgcatcacccttgaccccgactgagaacgtgtcggatatggacctaggaaagcccaaaccggccgtcctcctttcaccaccatcgccagccgagacagctgtcggcgccgaacgctccatccaccaccggacgccgtgccaccaccggatccgggtgcgccgccgccggatccgttcactccaccgccgccgtcgccaaccccgccgcccggcgcaatacaccactgccgccgtcgcccattgccgccccaccagatctggccggagcgatgcggatctggcggtttaccgccaccgcttcctagggagactcccctggtctcctaaggacgacgcgaaagaggatccctgccaccgccgaccttgcggctgcacgactttgccggcggccactcgggcggcggcgaggtggaggagggaggtgggggagagaaggggaggccgggtcgtcgcctcccgtgctgcccctaggggaggacgacgtgagagtctataa

SEQ ID NO: 67614 - DNA, 384 bp, Oryza sativa
  Clone ID: PAT_MRT4530_68454C.1
gttcgatcccccctcatctacttctcccttaaaaaccttccgtcttcctaatcctactcccaatgatccaccaaaggacgacgataccgaagggacggggaaaaaaatagagctggaataaaaagcaggaggaacagagagagggggaagggaaaggaaaggaggaggggaagagagacaggacaggagagcaaaggaaggggagggggaaagaaaggaggaaagagagaggagagggaggagaacgaggacacaagcagggggaagaacaagaacaggaactgcggagaggaggggatcgagaggggcgggaagagcaacgagagagaagggctgcagggcggaagcgaatgaggggaaagagacaaggcgaaaggcaacaaa

SEQ ID NO: 67615 - DNA, 789 bp, Oryza sativa
  unsure (1)..(789): unsure at all n locations
  Clone ID: PAT_MRT4530_68455C.1
aaaaaaaaaaagcggcnagcaaggccgagaacaacacgggaaaaagagggaggcggccgcccctttttttttttttttttctgaccacaatcagaatgtcacatatagtagtagtaagttgtaacagtttaacaacagtaccagcatcacatataatagcttagcaatgaaaagtatccaagataacacagacgtttacatgccagttcctactcgggcattctcacgaacacaaggtggacaccaccaacatcactaagatttccaactaacaaacgaaagtaaattagcagtatcgcgaaccccctttaagagatgtaaaggggctagggtttcgcacatttcaaccccgggtcgccgccatcgccgcgtggagggggcagtcacttgggcagcatctgcgccgctgcagccgcggctgcctcctgctgctgctggaagttgagcgggcggcggaacagcatgatgtgcggctccggccggtggatcgcgtagtgcacccacccgcggctctgctgcactccgatcgcgcgccactcgttctcggagagaaggcgattcttggggaggagcttggcgacctccggcggaaggacgacgtgcctgtactcgtaggtgtcgtcgaagtacttctcggagtactggatctggcccatctcaaccccaactcctcgatcaactcctcacgaaagaaacttggagcggcgcggcggcgagcggggaggatgcggatggtgtgaagcagcggccgaaaagggaggaggagcggacggggtggcccccggccgg

SEQ ID NO: 67616 - DNA, 135 bp, Oryza sativa
  Clone ID: PAT_MRT4530_68456C.1
atggtccccaagcaattttctcttccacgcggcagcaggctgctcgagcgtcttgataggcatgaagctactcggggcgaggccattgtggtgacacatgttggggggaggttgttgctcctgtatgggccctag

SEQ ID NO: 67617 - DNA, 1340 bp, Oryza sativa
  Clone ID: PAT_MRT4530_68457C.1
tagtggatccccgggctgcaggaattcgacgagggcgcgagggcgcgaactagtctcttttttttttttttttttttttagtgacagtcatgcagaaagaatgatcatcaatcagctcaaacatacaacagtagtttgttggcatgcaaatacaccaaccaacacagtgagtagggcagaagaaacagcaatcgtaggcaccatccaacactccaaacagcatctccaacaaacatcaaatactgttacaactctcaacacacaaccaatgcacagacaaacccagaaaggccggtatgattgtagctatgctccggaatgagacaccggtgaggtgatgaattgcccgtctttgaagctgtggatgtactgttggggcaaagcatgttccacccaatcaccatcagtagcaccacttggaaccatcacattgatttcactagatttagctgaagtgatggaggctccaagtgaatcattgcttaagtacaattgacatccagatgtgttgtcgattgatattgttggtgctgtaccctggcattgcacctcaacaccattgcaattgacaacttcaaaagctgctacaacatgcttgaaaacgattccaactttggtgcatttgtcaacagtgatattgttcactttaccatttacttgaaggacagaatccttgcatccatacacatatacagattgtctagcatcacaatcatcgattgcaaggttctttttaccaacttgattttcgaccacccatttgcgccccatctgaagctccaattttggaggcccagacttgaaggagaaagaccctgcacgagaggtcttctcaggagcagcagccggagcagcagtgctgctgctaacaacaccacttctatcagaccggtttttagtcttcatgtcatcagtaacctttcgcaatcctgtggtcacagctttgcctgaactaatctcctgaaagacagctgacattccttctttaggctgtgcagatttaggagatttctctgtggtaaaaaggggtgccgaaggtagagcaggtggagggggagccttagcccctggtgctttaggagctggagcagtagcctttggttgggatacaggtgcacctccaactggaccccaggaaggaccaagagggtaatgtttcttaacaaaatcccgtaaaccaggcatgtatagctccttcaaagctttagcccactcaacatggtcagcatctttgttcctgtactccacaagaaccttgttattgtagaactcagccatctgccaactttcttcaacatgtgctgtagggaaacacatgccacaatcctttcctaggaagc

SEQ ID NO: 67618 - DNA, 405 bp, Oryza sativa
  Clone ID: PAT_MRT4530_68458C.1
gcactaggggggtgcaaagacagccatgaggtttgcctataatcagatcaccctttatagagtgcgaaatatattactgatcgagcgcccttgtgctgaatatgaaaggggctaaccgatctgacgacactgtgtcatgttcaaaagcatcgctagcgcattgttccgccttattgggaggaaaccctcaatgttgcgtgccttgacagttgatgtagactgtaatgcgtatcgcatctcacgggagcaagaccgaagtctcacgaacaacaggggataacagcacggggccttcactcctagatttaaacaacaatactacccaggattatcgaatgagtccgaaagcgagacctcaagtaatgtaattgacaactagtatcggcgtgagttaaataaaacacc

SEQ ID NO: 67619 - DNA, 363 bp, Oryza sativa
  Clone ID: PAT_MRT4530_68459C.1
atgcccagaaggaggccgggggaggcggtagcggtgcactggctgcgccacgccatgttcgacgcggccggggacgacggcgccgccggcggcggccacgggcgcttcatggacagaaacaagaaattcagtttcttgtcagaaattatgttgttacagtatgaattgacttgcttaactagattgaattttgacgacgaacggatcaacagtgaagaggcgtctacattcatggttcgttcccatgaagatgtacaggtgcaaaatctgccgtccgttcgtcttcatcgacctcctacgccccgtcccagtgcaggcgtcggtgggagagtgcggctgtggagaggcggcggcgacaggtga

SEQ ID NO: 67620 - DNA, 1523 bp, Oryza sativa
  Clone ID: PAT_MRT4530_6845C.1
ccggccgcggttcttcttcccaagttctcatcgagggttttcctctctctctctcgcatcgcatccatcccctcgtgtcgccgccggcggaggctgcggcgagccttcaccccccacccgcccaccgccggcgagccacggcgtgggcgacctcctctcctctcccgatcccctctcgcccttaggtaggggcttctccccagtccccaccacacgcgcgtgcgtggccgacgagcaccccaggttcggatcggatggaagaccagaagaaaaatgcaaaaccagaggggtcttctggctcgcaaaggggagctcccccggcacctgatgcaggccttcccaatccttttgatttttctcagtttagcaacttgctcaatgatccatctataaaggagatggcagagcagattgcaagcgaccctgtgttcacccagatggcagagcagctgcagaagagtgctcatgtgaccggggaacagggtggccctgcattggatcctcagcagtacatggaaacaatgacacaagtcatgcaaaaccctcaattcatgtcaatggcagaacgtcttgggaatactcttatgcaggatcctggaatgtccagtatgctcgagagtttgactagtccttctcataaggagctgcttgaagagcggatgtcccgtattaaagaagatccctctttgaaggggattcttgatgagatagagagtggtggtccatctgctatggtgaagtactggaatgaccctgaagttcttcaaaagattggtcaggctatgtcaattaattttccaggagatgctgctacttccactacattgtctggacctgaagaaactgaagaggatggtggagatgatgatgagtccattgtccatcatactgccagtgttggcgatgcggagggtctgaagaaagctttagaggatggagcagacatggatgaagaagacgctgagggaagaagggccttacattttgcgtgtggttacggtgagttgaaatgcgcagagatccttctggaggcaggtgctgctgtaaacgcactggataagaacaagaacaccccactgcattacgctgctggatatggtcggaaagaatgtgtggatcttctgctgaagcatggcgctgctgtcacgccccagaatctggacgggaagacccccatcgaggtggccaagctgaacaaccaggatgaggtcctcaaggtgctcgagatggacgctttcctataaagaaaccaatgccaaatctcacgctcatcatcaccggctcgtcgctttacagttcagctttttacggcaaacccaaatcatcatcgactcttttagctttggttttggtgtgggggtcgaacatccatgaatcgttgctatgtttggagaaccgatttgtaatctgtttcacttccccgttacactgcatcactccgtttcatcctttgtattcctatgttgctgagtctggtggtgcagaaaaaaaaaaaaaaaaaaaaaaaaaaacccccccacaac

SEQ ID NO: 67621 - DNA, 229 bp, Oryza sativa
  Clone ID: PAT_MRT4530_68460C.1
tcctcttcctcttcttcctcaatatgtagcatcatccgggcccctttcggcggcggcttaatcggaacaaccccgtttttcgccgccccgttttcccctgcggggatgaaccccgccgtcaacggcttaaaggttgggtcggccaagtccaagaccgtgttttatgacaggaagccgaagcttttcaagccgttaagggccggccagccccccagttccttgtggtttt

SEQ ID NO: 67622 - DNA, 1095 bp, Oryza sativa
  Clone ID: PAT_MRT4530_68461C.1
gtggattacacctacactaaaggcgaaaataagaagtgcccttctgttgctctgatgttccaaattggagagaaagcaacgtactataatatgggagggtgtaaagatatgcctggttcatgcacaagcaaaagttgcagaggtcaagaggttgacattatgcacttttctgttggaaatgctatccctggacgtctttatggtggaaatcacatagataatgcagacggaaatggcggtgatagattcggtcatcttgttgatttgtattcatggaatccgcattgccgataccttgatgggataggccctaaagagaataattcaaatgctcagaatgattggcatggggcatggtggcatagctctctgacctttcactcaggctttgtggatgatgacagtccttacggaaaacaagatgagaagggcacatattattttgagttttcaaggcccctaagaacaatggatcgattacagcaggatgcacagttcacgataggtgggcccaacagtatggctgtggctttctggtacccaaacgatggcaaaccatggagcaagtccgagcattattcggccagctgcgactggttggttcttgatattcaaccatccatggaagctgcacattaccgcccagctccaaatcgttcatgggatgctgcaactgcctttgccttgcttctttcggtagtagcaatctgtatatccgtttttgtgggctacggggcttctaagaacaggagcagcgtccaatttacaccacttgagcagatctagttcgtttgctggagaaaagaatttgatggtctcgagtttcattatttgtgatgcgacaagggacgctatttcatctgttgctgatgcactttcatgatcctacataacacttctacgtcgagggattgctgtgttgcatctttgtaatctagtgtaggacactgaaaatacatacgattcagaatttcagactagattttggttttatacttgtacggttcattttctgtaaatgatgtatgtcggctacatgcacatctagaacttcacttttaagttcttaaatttgagcacagatgattttcatac

SEQ ID NO: 67623 - DNA, 2631 bp, Oryza sativa
  Clone ID: PAT_MRT4530_68462C.1
gttggagcaacggcaagcactttgatgggggtgatgaatccactcctaggaaagctctctaccctactcgaagaggagtatggcaagcttaaaggtctgcatagtgggatcgcctctctgagagatgagctacgtagcatggaggctgctctggaggacttatcacagttggaggaacccagccagcaagtgaaggagtggatgcatcaattgcgggagctttcttacgacattgaggactgcatcgatgtcttcgtgcaacaccttggtcaggatgatgctcatgatgggcttattagcaagattattggttggatcaggacgatgaaagtttgccatcatactgcagggcagattggtaagctgaaggagcatgctgtggaaattagtgaccggcgtaagaggctcaaattggacattgtcccctccagttctgcctatgtgcccattgatcctaggttgtcggcattctttgaggaggcaggcagaatcataggtattgatgtcccaagagatgagctcatagagtgggtcaccagtgacaccaattcaattgttggatttggaggcttaggaaaaacaacactcgcctgtcaggtgtaccaaatgataaaaagccaattcgattgcacagcttttgtatctgtatcacggaatcctaatatcaataagatcttgagagacatactttcagaagttctttatacaagcaacccgatgtcagattatcagaaggatcacttctggaggatcaaggaaaatcttaatcaaccattggaagatcaccagtacttcatagtaattgatgacatatggagtaaatcagcatggcaagttatccaatgtgcttttccatataacagcaatgcgagcaggataatgacaaccactcgcattcaagacgttgcacaatcttgctgctttacacatgaagattatatttatgatattaaacctcttggtagtgacgactcaagaaaattatttttgaaaaggattttcggcaatgaagataatcaccctacagaactcaaagaagtaactgatgaaatcctaagaaaatgtagtggtttaccgctggccataattaatatagctagcctattatcaaccaaaccagttaccaagcacgagtggaaaaaagtgtggaattctatcggctccatgctcaagcaaaaccaagatctagaaatagtaaagaggatactatttctaagttattatgacctacctcatcaactgaagctctgtttgttgcatataagtgtatttccagaggatcatgtgatcaagagagagcgtttgatatggagatggatagctgaaggattgattactgaagaacaaggactgaatctggaagaagtaggagaaaagtacttcaatgagttggtcaatagaaatatggtgcaaccagtggacatcgactatactggtagagcaaaggcttgccgagtgcatgatatcatgctagatctcattatatgcttgtcaattgaggagaactttattactataattgatgaccagaagtccatgctttcaactaacaaggttaggcgtctttccctccaaacaaaccatgaaaaaaccaatatatggcttggaaccaacagattttctcaggttcggtcacttagtgtctttggtgatctgaagcagatgccccctttctttgacctacaagttttacgagttctggatctagaggattgttctagtttgaaggatggagacatcgagaatattgcaagtttatttcaattgaggtatctaagtctccgaaactgccacattagcagggtcccagcacaaattgggaagctacaacttttgcaaacactcgacctcagagggacgagaataaaagaattgccagagaccataactcaactacagcaattggttcgcctactgttgggacgctttggtgtaaaaatgccaaatgggatcagcaacatgagatctcttgaggagctagtggtgcttgatggaagcaagaactccgtggatgttgtggttgagttgggtaatttaaccaatttgaaggtattttctatatattggcatcctaatggtgaaattcacgatgagggaagctacacaaagtcaattatctcatcactctgcaagataggagagcacaacctccgatcccttcacattacacacggttacagtcttttactggatttcttggttgattcatggtaccctcctccatgtcatcttgagatgtttcggatggtttctcacttttattttcctaggcttcctaattggatgtcttccctctctgagctcacatttttagacatcaacgtaaaacagtttggagtggaagatatgaagatcttacaaaacatgcctgcgttgctatctcttaaactttaccttgaggaatccccacaagaaacactagtcattagtcgctgtggattccaatctttaaagttgttcttgatgtttcggaaaaacaaaaaggatggattgggtttgatgtttgaagaaggagcaacaccaaagctccagcggcttgagtttcgatattgtgctcatgatgcaatgtctgcatatggcgttgattttgatttcggtatcaagcaacttacctccctcaagcatctcggt

SEQ ID NO: 67624 - DNA, 3495 bp, Oryza sativa
  Clone ID: PAT_MRT4530_68463C.1
ctagacgtcgatgccgtcgtagatggtcgtgcccctgactgtcgacaccgacatggatggccgtgtgttgccatcgacaccaatgcccacgcctagccgctgctggttcgccagcggtagacgggccgaccgccggtggagagtggcggctgggtggcttccacagctgtgagacttgagaggcaacgcgatagtgcgataacggccacgagccgcggctgcaggaggagctctggaagcgttgggcttggagaacggaacgcggtgcagctgggtgaacgccttgagctcgggccgcagcccccaccgccccacgtcgccgcgcgatttggcgctgcggcctcgccggttttcaggaaggagcttggcatagtgggagtggaagcaaggggagagggaacgacggagcctgatggtatgccttcttcccacatacatgacaacttgatgagcggtatgaaacatccccttgaaaaccaaacttccttcttaaatgatcacatagccgtagcccacaaagatagcaagatggtaggagtaacagccatcgcattgatgggggtgacgaactccctccttgggaagctcaccgttctacttgggagggagtacagcaagctcagaggtgttcaagccggcatcacatccctgagagacgagctgatcatcatgaaggctgcacttgaggacttatcacagttggaggactgtaactcacaggtgaagttgtggatacatcagttgcgggagctatcctatgacattgaggactgcatcgacatttttctgcacagcctagaccatggaagtgttagtgatgggctcattaacaagattattagttggctcaggacactgaaagtgtacagacacactggtaagcagattgctgcactgaaggaacgtgctgtagaggtaaatgaccgacgcaagaggctaaagcttgatgtagatatccttacttcgaaggcagtggccatcgaccccaggctaccagcactctttgaggaagcggatagactagtgggaatcgatggcccaagggatgagcttgtcgaatggcttaccaagggcaatggttttgcacaaaatcgcaaggttatctcaattgttggatttggaggcttaggaaaaacaacactcgcctgtcaggtgtaccaaatgataaaaagccaattcgattgcacagcttttgtatctgtatcacggaatcctaatatcaataagatcttgagagacatactttcagaagttctttatacaagcaacccgatgtcagattatcagaaggatcacttctggaggatcaaggaaaatcttaatcaaccattggaagatcaccaactcatcaacatgattaaagaatatctaaaaaataacaggtacttcatagtaattgatgacatatggagtaaatcagcatggcaagttatccaatgtgcttttccatataacagcaatgcgagcaggataatgacaaccactcgcattcaagacgttgcacaatcttgctgctttacacatgaagattatatttatgatattaaacctcttggtagtgacgactcaagaaaattatttttgaaaaggattttcggcaatgaagataatcaccctacagaactcaaagaagtaactgatgaaatcctaagaaaatgtagtggtttaccgctggccataattaatatagctagcctattatcaaccaaaccagttaccaagcacgagtggaaaaaagtgtggaattctatcggctccatgctcaagcaaaaccaagatctagaaatagtaaagaggatactatttctaagttattatgacctacctcatcaactgaagctctgtttgttgcatataagtgtatttccagaggatcatgtgatcaagagagagcgtttgatatggagatggatagctgaaggattgattactgaagaacaaggactgaatctggaagaagtaggagaaaagtacttcaatgagttggtcaatagaaatatggtgcaaccagtggacatcgactatactggtagagcaaaggcttgccgagtgcatgatatcatgctagatctcattatatgcttgtcaattgaggagaactttattactataattgatgaccagaagtccatgctttcaactaacaaggttaggcgtctttccctccaaacaaaccatgaaaaaaccaatatatggcttggaaccaacagattttctcaggttcggtcacttagtgtctttggtgatctgaagcagatgccccctttctttgacctacaagttttacgagttctggatctagaggattgttctagtttgaaggatggagacatcgagaatattgcaagtttatttcaattgaggtatctaagtctccgaaactgccacattagcagggtcccagcacaaattgggaagctacaacttttgcaaacactcgacctcagagggacgagaataaaagaattgccagagaccataactcaactacagcaattggttcgcctactgttgggacgctttggtgtaaaaatgccaaatgggatcagcaacatgagatctcttgaggagctagtggtgcttgatggaagcaagaactccgtggatgttgtggttgagttgggtaatttaaccaatttgaaggtattttctatatattggcatcctaatggtgaaattcacgatgagggaagctacacaaagtcaattatctcatcactctgcaagataggagagcacaacctccgatcccttcacattacacacggttacagtcttttactggatttcttggttgattcatggtaccctcctccatgtcatcttgagatgtttcggatggtttctcacttttattttcctaggcttcctaattggatgtcttccctctctgagctcacatttttagacatcaacgtaaaacagtttggagtggaagatatgaagatcttacaaaacatgcctgcgttgctatctcttaaactttaccttgaggaatccccacaagaaacactagtcattagtcgctgtggattccaatctttaaagttgttctatttttatccagtgaatggtgagcttggtttgatgtttcggaaaaacaaaaaggatggattgggtttgatgtttgaagaaggagcaacaccaaagctccagcggcttgagtttcgatattgtgctcatgatgcaatgtctgcatatggcgttgattttgatttcggtatcaagcaacttacctccctcaagcatctcggtgtcagcattcattgcagaggtgcaaggaattgggaggtggaggctgctgagtctgcaattagaaatgcagtctaccttcttcccaaccatcctacacttgaaatgtatagactgtcagaacatgaaatagtgaaagatgaggaggaatgggatgatgatactggatatgatggggatgagcacagtggatcaacaagatgggaccaaacaaatgaatatttccagcaacaactaagttga

SEQ ID NO: 67625 - DNA, 511 bp, Oryza sativa
  Clone ID: PAT_MRT4530_68464C.1
ccacgcgtccggcttcatttatgagttccatcgtgatatgtatgaacttcagtgccttccccctactcatgagccacgtgtaacaaagcacattgagcagataatagatttgataaccaagataatggacaatgggaaagcctatacaattgaaggagatgtgtatttctctgttgataacttccctgattatctgagtttatctggaaggaaggtagaccaaaaccgtcctggaacacgagtcgctgttgatgcaagaaagcgaaatcctgcagactttgcattatggaagtctgctaaggagggtgagccatcttgggagagcccttggggtcgtggaaggccaggatggcatattgagtgcagtgcgatgagcgctcattatttgggtaatatttttgatattcatggtggaggaaaagatttgatctttcctcatcatgagaatgagctcgcacaaagccaaacagcttatcctgagagtgagggaaaatgctggatgcataacggg

SEQ ID NO: 67626 - DNA, 1056 bp, Oryza sativa
  Clone ID: PAT_MRT4530_68465C.1
ggcacgaggtgcgggggcggcatcacgctgccgtcgacgggcgcgccgctccccccgctgcacccgacgccgacgtcgccgacgacacggcctcaccaccactactacctcttctccatcaagcagctcaactcgttcggcgccgcggccgtgctcgccttctccaccaccgtgccactctccgacatcgccttcgccctcctcgtcatcccttacctcgtcgtcctctccgtcctcgccttcccgcagaagcacggcaagcccaacccgggcgcgccggtcttcctctgccgcgggcgcttcctcctcaagggccacgaagcgctcggcttcctcgtcggcgccgcgctcccggcgctctacatccctcgaacggcctccgctcgggcgacacggcgggcgtcgccgcggcgtccccgcacgcgttcctcctcgccgcgcagatctttaccgagggcctcgccgcggcgtggcccgggcggttctccctccccgtgcgtgccgccgtggtggtgatgtacggcgcgcggaagatgttcgcggcgtcggagtggctccgccaggagatggagaagcgggaccagttcggcggcggcgtcggcggcgcgcccgccgtggcgcgccgcagggtggtggcggggagggtgctggcggtggcgaacctcgcctactgggggatcaacctcttcgccttcctgctgccgttctacctgcccaaggcgctcaacaggtactactgcggcagcgacagcaaggaggacgacgccaccgccgccgccggcgccattgatgccgacgacgccaagaagaaggattcctagagtgtgtttgatcgttcgtcgctgctttctcactcgcgtttgtgcagcttggtgtattaactcttcttcttaatttttttttgaaaaattcacgcatgttttagctcttttttttctcggaaatttcacgcatgtattagctcaacttgcgtttcgtttggtgaagaccaactttttgagtttccaaaaaaccaaaaaaaaaaaaaaaaaaaaaaaaaaaaaaaaaaaaaaaaaa

SEQ ID NO: 67627 - DNA, 351 bp, Oryza sativa
  Clone ID: PAT_MRT4530_68466C.1
atgtccgtctatgaacatctgggtagggttccctggatcaaggcggcgaaggcggctagggtttctaggcgggccacatggcctctccggcgacggcggtggactcccttagcgcgtggctcgctgagctggatcggcagcagcagctgctggtgagctgcacgaggctgatcaagcaggtggaggagcacttcgcgtcggtggagccctggctggctgagaggtcatgactcgctaacaacaagggcacctcggatgatgcacgggccttggccgtcatggactcgctccgtcgtcgggaggcctacattgatggcttctgtttccgcgcgcttgaccaccttgacgacc

SEQ ID NO: 67628 - DNA, 933 bp, Oryza sativa
  Clone ID: PAT_MRT4530_68467C.1
atgaattccaacgccgagtccgtccacaacccaccggagatcatcatccacgtcgtcgacgatctcgcgccgccgccgccaaacgccattgcagtacctcctcgcatcttgccgccggcgacggcgtttcgacgacgtcctccgcctcctagtgaggcggtcagagcggcccgtggcattctttttatttttaaggtcagctgcttcgccgcgatcgcgatggcatcgagtgtgacgatctacttcatggtgcaccctatcaaaggggacagcatcgccgatgaacgatcaggtgtgcggctcatgtgtggcttcatcctagcagttgctgtgatctggctgctcctttcctacttcagctgcgatgacaagtgcgtaatcctagacgacgaagaacaacaagctggcaacccagtagctgagacaaggggccatgttcagtggcctggtggggcaggcactgtggtggagcccagcggcatgcatcatctcctcctggtggctggcggcgctgcccacctaagcgaggctcccctccatgccgtgaaggcggcgacaaggcagcagggccgcacgcaaggccaggacggccgcacgcggctacttcggctggggttgcagggagatgacgtggtcggcaccgaccacccatgccccacggcggcgtcggccctccccctaatcctccagcaccaaccttccccctaccccttccctctggaggcgaagtcctgcttcgccgtcgtggaacttgacgatggccacataggcggggatcggggaggccgcggtggcacaggagtcgacgaggttggtggcggcggagcacgagactgcggtggcacgggtgccttccgccgtccctcttccgtggcaaaggagcgcataggcatggcgtccgtcggagccgacgcccccttgtcacgattctag

SEQ ID NO: 67629 - DNA, 509 bp, Oryza sativa
  Clone ID: PAT_MRT4530_68468C.1
tacaatggccggtattgttatatcgcccttagctgtgttattgtaatcggttgtggtttgctgatgtacaatggccgatattgttatatcgctcttagttgtttcgtatttttatcaatgctcttgacattgtaaaactaggggggcatatatatacacatatatatatatatatacacatatatatatatatatatatacacacatatatatatatatacacatatatatatatgtatatatatatatatacacatatatatatatatatatatatacacatatatatacacacacacacatatatatatatatatatatatatatatatatatatacacacacacacacacacacacacacacacatatatatatatatatatatatatatatatatatatatatatatatatatatatatatatatatatatatatatatatatatatatatatatcacaatacagtacaacatttttgagcaaagcttatacttttgaaaattcc

SEQ ID NO: 67630 - DNA, 122 bp, Oryza sativa
  Clone ID: PAT_MRT4530_68469C.1
aggcttcaaacgtcccaactaaattatagcagccaagagcgaatcgcctctgggcctctgggggtttttcatcccccgcacggaaggatatctcaattgtgaatcgtatcgcatggtgtccg

SEQ ID NO: 67631 - DNA, 2303 bp, Oryza sativa
  Clone ID: PAT_MRT4530_6846C.1
ctgcaggaattcggcacgaggctagcgagtcacaggtttgctagctcacttactctcttgtgagtgtgagtgagctagcgagtcacaggtttgctccaaagctgagccaccccatcccatcctctggactcatctgcttggctctcctcacaccacccttggattcttgcacttgggagcaagctatagctttgctttgccttcctctcttcaaccctcactctcagcattgttaagctcaggatttggccacctttctcctatagggatcacacaaacaccggtagaaaaaagctcttcttggagctctctgcttggcctctctctctttagtttagccgcaaacaatttcctctcattttttctttgatggccgcgttgcatgggcatggcttcgcggtcaccgtgctactggtggtgttgttggtgcaatgtgacgcggcggaggcgacgacgtgcgccggtgcggcgccgccctcgcccccgcccgcgccggtgtccatcgccgcgtgcggcgcactgggcggcgcccgggcggtgcccccccggcccatcctctggactcatctgcttggctctcctcacaccacccttggattcttgcacttgggagcaagctatagctttgctttgccttcctctcttcaaccctcactctcagcattgttaagctcaggatttggccacctttctcctatagggatcacacaaacaccggtagaaaaaagctcttcttggagctctctgcttggcctctctctctttagtttagccgcaaacaatttcctctcattttttctttgatggccgcgttgcatgggcatggcttcgcggtcaccgtgctactggtggtgttgttggtgcaatgtgacgcggcggaggcgacgacgtgcgccggtgcggtgccggcgaggccacggccggagacggtgtccatcgccgagttcggcggcgtgggcgacggccggacggtgaacacgtgggcgttccacaaggcagtgtaccgcatccagcaccagcgccgccgcggcggcaccacgctgctcgtgccggccggaacgtggctcaccggcagcttcaacctcaccagccacatgaccctcttcctcgccaggggcgccgtcctcaaggccacacaggagacgaggagctggccgctggcggagccgctgccgtcgtacggaagggggagggagctgccgggggcgaggtacaccagcttcatccacggcgacggcctccgcgacatcgtgattacaggtgaagaattgaagctcagcttagctcagctccgagaatattcaaagagacatgcatacatcctgcaaaaaagaattctgcacacaccgaggaaaaaaagattatatgatagcatgggacaattttctctgactgttcctgcaaaagaactcattaagattgatgcaagtgacaagggaatcatcgatggacaaggtgatgtatggtggaacatgtggaggcaaaggacacttcagcataccaggcccaaccttctggaattcatgcattccagtggcattcacatctccaacattgttctcaagaattcacccttctggaacatccatcctgtttattgcgacaatgtggtcataaccaacatgatgatcatcgcaccacatgactcgcccaacaccgatggagttgatccagattctagcaccaacgtatgcatcgaggactcctacatctcaaccggcgacgatctcgtggccatcaagagcggctgggacgagtacggcatcgcctacgggcggccgagctcgggcatcaccatcaggcgcgtcaggggctcgtcccccttcagcggcatcgccatcggcagcgaggcatcgggaggcgtcagcaacgtgctggtggaggactgcagcatcttcaacagcggctacggcatccacatcaagaccaacattgggaggggcggcttcatcaggaacatcaccgttgacaacgtccgcatgaacagcgtccgcaacgggctgcgcatcgccggcgatgtcggtgaccacccagatgagcacttcagccagctcgcgctgcccaccgtggatgctgtcagcatcaagaacgtgtggggtgtcaatgtgcagcagcccgggtcgatcgaggggatcaggaactcgccgttcacgaggatatgcctcgccaacgtgaagctgtttgggtggaggaataatgcagcttggaagtgcagggacgtccatggcgcggcgctgggtgtgcagccggggccgtgtgcagagctcacgaccagcctttcttcagggttctgcagctattag

SEQ ID NO: 67632 - DNA, 223 bp, Oryza sativa
  Clone ID: PAT_MRT4530_68470C.1
tggtgcttcatcatcaatctccagccaccgctggccttcgtcagccattttgcctcttcgcccacagttgtccagcaggaactcaacctctggccgcttccagtcgcccacgcaacaatctcagatggaagcggtgggctgcaccgcgcctcctcagcggttggcaaccaggaggatggaggtggccacgacatgagccccagtcaagaaatcaaagatgaat

SEQ ID NO: 67633 - DNA, 1333 bp, Oryza sativa
  Clone ID: PAT_MRT4530_68471C.1
atgaacgcgctagccgccaccagccgcaacttccggcaggcggcgaggctactcggcctcgactccaaactccagaagagccttctgatccctctccgcgagatcaaggttgaatgcaccatccccaaagacgatggcaccttggcgacgtttgttgggttcagagtgcagcatgacaattcccgtggcccgatgaaaggcggcatcaggtatcaccctgaggttgacccagatgaagtgaatgcacttgctcagctgatgacatggaagactgctgttgctgctgtgccttatggtggagcaaagggaggcattgggtgcactcctggtgaactgagtagaagtgaacttgagcgtttaacgcgcgtgtttacccagaaaattcatgacctcattgggatcaatacagatgttccagcccctgacatgggaacaaatgcacagaccatggcatggatactagatgaatactcaaagttccatggccactccccagctgttgtcacgggaaagccaattgatcttggaggatccttaggaagagatgctgcgactggccgcggtgttatgtatgctactgaggctttattgactgaatacagcgagtcaatttcaggatcaacctttgttatccagggtttggggaatgttggttcttgggcagccaagctcatccatcagaaaggtggcaagatagttgcagttggagatgtaacaggtgcaatcagaaataaatccgggatagacatacctgctctcttgaagcacaggagcgagggtggatctttggaggacttctacggtgcagaagttatggacgctgcagagctgcttgtgcatgaatgtgatgttctcgtcccgtgcgccttgggtggtgttctcaacagagaaaatgcagctgaagtgaaggccagattcataattgagggggctaatcatcccactgatacagaagctgatgagatactcgcaaagaagggagtcattgtgctgccagatatctatgcaaattcaggcggcgtggtcgtcagctattttgagtgggttcagaacattcagggcttcatgtgggatgaagagaaggtgaacagggagctccaaaagtacatgaagaacgcttttcagaacatcaaggacatgtgcaaatcccaaaactgcaaccttaggatgggggcattcactttgggggttaaccgggttgcaaaggctactctgttgaggggatgggaggcatgagaatctgttgaggaatcacctcaattttgtaattcaaaatcttcattcggtaatatattggcacaatctggtacaaaaaaaaaaaaaaaaaaaaaaa

SEQ ID NO: 67634 - DNA, 394 bp, Oryza sativa
  Clone ID: PAT_MRT4530_68472C.1
gtgaactttcaccatgagatgcactgtgtatggtgtgaggagattttgatcaactgaagatgtttttaagatgaaaggtattctccacctagcggacgtagtcattttttcctctattccaaccgttgttgtgagttgtaactgctagagttaattaatctagatacatgcaacccgggttgcaagggtttaagagcaacgctatgttgattatcgtgattggcagatagaattctgtcatattcaagtgaaaatgtagccacctgccgttcaaaattctgatgtgtgacctgaagattagctgtgtcagctcttgacaaaactgtaatacgattgcaagtacctgtttccttggcatttttttatcatgtccagtacaaatttatatttcctt

SEQ ID NO: 67635 - DNA, 545 bp, Oryza sativa
  Clone ID: PAT_MRT4530_68473C.1
acacacacacacacacacacacacacacacacacacacacacacacacacacacacacacacaratatatatatatatatatatatatatatatatatatatatatatatatatatatatatatatatatcatactatacttttattatctttcattcactaaccatatcaacatcgtgtatataatttcgtgtacgtgtgtacctagcattatttatattttcacctacacataccacctcatttacgctttccgcacttacacatatcatcccacttacgttttcatccttatttcatataaaaaggttaactagcaatgatatatatatatatatgtatatctatatatatacatatatatatatgtatatctatatatacatatatatacatacatatatatatacacacacatatatatatacatatatatatatatatatatatatatatatatatatatatatatatatatatatatatatatatatatatatatatatgtgtgtgcatggttgtataattataattactattatagt

SEQ ID NO: 67636 - DNA, 425 bp, Oryza sativa
  Clone ID: PAT_MRT4530_68474C.1
tgtgtttttttattgattggggtttttaacgccactctttgggaaaaggctcaccggctatatttaattcactcgaaaaaaagagtgaagctgataccaccgttccaaagctcaaccaccttgacagatgaaacaaaacaccggcattgcatcatacactaattaaggattctccaagtaaaaaaactccacatgttcggggatcgtaagggtacagagcgcgaggacaggtaacaacctattgggccaacgaacgaaattgggctgtgcagagaccgagcctttccttggggtttttggccctcaccaaaagttggacatgttcatcttccttttcaggggtctgatgattctgccatagagccgtcagggggagaacctccagaatgctcccaacgctctcagcagttttgagggcaaaaggg

SEQ ID NO: 67637 - DNA, 574 bp, Oryza sativa
  Clone ID: PAT_MRT4530_68475C.1
ttttttttttttttttttttttttttttttttttttttttttttttttttttttttttttttttttttttttttttttttttttttttttggaaaacccaaaaacttttttaagcaggaacaaatttggggaaaaaacccctttacatatccaaaaaaaagagccctccttaaaaagggggggttaacggaaccacaaaagcacccttccggaaaaaccccaacatcaaaaaagggggcagggcgacggggatttgggggaaaacccgaaaaacggttccccggggcctaaaaaaaggggcagcccgttggaaaaaccggaaacccccatggggggcccccacggaaacggcaaaaaaccggggtttgaggctgaccccaaaatttgggggggggcgcccccggccccaaaaaaggaccccccgggggctaaaaaggggggccgggcccaccccgaaggaaaaaccccacagggtttttttgggtggggaacaacgggataaatgaatccgaaaaacacccacccttaaaggaaaaaacccttgaaggggggaaaaaaaacttttgccctgctg

SEQ ID NO: 67638 - DNA, 474 bp, Oryza sativa
  Clone ID: PAT_MRT4530_68476C.1
atggcaactaacgaggaggatacgaccatcaagccaaggaggtcccgagttcaaagaaaagaagagtggaaactggctaaacacgcaaaggacaagctaaaacttagtactaggaagctagctttcaaaatcgtgctcaaacatatcaaggctaatcatgctcaagcattcaagctatacacctatacggctatacctggtggacctggcaacggtggcaaactcaatattgctccgttgttgccgtcggatggatccagatggatgtggcgttttcttccaacaggtgccatcgtgcttctccggcaagggacgtggcgaggcgtgagggtacgatggctaggactagcaagcagcggcgtggcggcgtggttgcggtggcagcggcgtggcggcgtggttacggcggcagcggtcggcggaggtagaggtggcgaagagctgtgcgagagtcgcgatacagggataggatga

SEQ ID NO: 67639 - DNA, 655 bp, Oryza sativa
  Clone ID: PAT_MRT4530_68477C.1
ccggccggccgcccgcgctcttcctccgccgccgccgccgccgccctcctctccgggaagaagagaccagagcgagcgcgcgcgccgccggagcaaacccctcctcctacccttcagatggtgctctccaacgacatcgacctgctgaacccgcccgcggagctggagaagctcaagcacaagaagaagcgcctcgtccagtcccccaactccttcttcatggatgtcaagtgccagggctgcttcagcatcactactgtgttcagccactcccagacagtggtggtctgcccgggctgccaaaccgtgctttgccagcctacaggtggaaaggccaggctaacggaggggtgctccttccgccgcaagaatgattaagatctaaatatctgaaagcaaaaaaaagaaaaggcttgaacgagcttagtttctccaggatgtagtctgaaaattttgcaatgcctgtcaagtgaaccccatgtttggtaatttaatctctgggattatgtcatgactctggtactttgttggttggtctggagagtaagatgagatgtagggctacgtgaacaaccgtatgcttggcatgaatgaattgatattcctggttaaaaaaaaaaaaaaaaagaaaaaaaaaaaaaagcggcccgcggcc

SEQ ID NO: 67640 - DNA, 2992 bp, Oryza sativa
  Clone ID: PAT_MRT4530_68478C.1
ctaagcttgactgccgccttctggtaaccgagaaggctgatcatttccttgcccctgttgctgagaccttctgacaaatgacaaaaacttgtggattgcagcacagcctagtgcaccaataacaaatgcaatgacatatccagaaggttcccatctcatgctcgacccagccacgtaggctagcagtaggccgagcaagtccagcacaattgtaatattcatcacccttagccacctgttcttctttagcagttccgtcggtagcaataggatgataacaacaatagatgccacaaaagaagttgagttgctgtagaagaaggtgaggtagcgatacctcttattgtcatgcataaccgagtgacccacaccatgcccgtcactattaccctgccacacaccgccaggtgggttcagaccagcctgggagtaagtaacacttgcagccaggacccctagcaacatcaagtacttgcgcttggcatggtatttggctctgtccttgtctttctcaacgggctccttggatatgtcatctcgcttctctttgctctcactttgatagaaacacaccaggagtatgatcataatgaaaagcaccacagctaccaacacaaagacataaatggatgttttcagatgttgagtgcttccggcagcataggctcccagaagagcaaacaagcctgctacagtgcaaaccgaaagagcatagctttgtatagctggcctatacagatttgggttcacgaggagtatgatgagggaaagagatgacatgaagcttaccgagttacaatagagaaatgccttgtaacggcgtggaaagttgtaaaagagtattggatcaccagcatggcgcccaaaaccatcatccacaactctgaacccacccggtggggtcaacccagcttgataagtgagggtcgcgcccaaaacagcgaaaaggagcagcctcttgcgccttttgtcaatacatgaatctttctcagcaagattgccctcagctgaattattttgggtgcgcacaactgaaccatttcgtacagaattcgtgttcccaacttccttctccttgtcattgtcttcaagcgtgaagaacacaacatgaatcaccacatagactagaacaccgcctgccaaggcaatgatgtaaactgatgtggttatgtcccggcagcttccagcagcatatgcacccatgagaccaaacagatccaaaatcatagttatctctagaatgcggcgcctgagcaaaggtttataccggaccaaaactatgacaaccaatgatgctgcaaaggctgtcgagttacagtaaaagaacaccttgtaacgtttggcttgtgtggataagagtattggttcgccagccatgtgcccatcttggtttttctgccagacaccacctggtgggactagccctgcttggtaagtaacagttgccacaagagtggcaagcagtacaacaagagattgggccttctccagaatatctgtcttactgcttgtattctttctggaactgctatctgatggccctcccggtgaacatgataactttgcaattattggcaagcaggatatgtttgaaagttgtggcagaaaaaataggactgcctggagggcgcctatgcataaaagaacagcaccaaccagactgagtacatagatggtagtgtcaggctttctgcagctgccagccacataggcccccacaaggcctaaaagagcaatggtgatgtacgcgtagagcacataagtccgtacggtgatggtgatctttatcttgtcgaggggtaagaagatccgctgcttcttgtccagaagcagcatgatgatgagcagggatgcgacaaatgcaattgtgttgcagacaaagaacgccctcagacggcgagagtggtgttcccacaggacgggatcgcctggatggtggccctcctggttgttatcccagtagccacccggtgcgctcagcccagccatgtatgtgatgcttgccacaaatgttgcgagaagcatcagtaccttgcggtgccgttttttcttctcatcacctgagcttatatcctgagtctgtttcttgtcaagccataaagttaccaccatctgtgccaccatatagatgaaagtagccacaagtgcagagacgttgccggctgtgagaacaccccgactggtccctgcagcataggccccaatgaggcttagcaggtccagcaccatggctgctcgcagtggaagcatggggatctgtaacttccccttctcatgcaggatagcaaggatgaagatgaggatgatgaccacgatggacagcgcgaatgcagtcgcgttgcagtagaagaacataaggtatcggcgatactggctatcccggatgatggagtcaccagcgaggtgcccggcctcggtgtcctgccagacaccccccggcgggctgaatcctgcaccatatgtcaccgtggccacaagggtggccaacagaaggaggtacttcctcaaatcatactccaatggtgagtccgtcctctcttgctcgctattctccatttgcaggagagatagaagcagaaaggaggtactccaagttgtgaatggatcaatgctaataaggtgctttgctatgcataatgatgtatatagctgtgcttctcttgcctaatagtgatgccatggatgggcttagcattatcaatgaagatgtagactggaagactttgcccaagtcgtctttttatattgatctgtctcatcttctttattccttgtggggttctcacatcccactgtttcaaattgactagcattgtcgtctgaaagaaacgtgcaatgatttgaggcttaccatagttcacgagagcagaaagagacttttattgtttttattgtgtcatgctgtgtgagctggacatatcaatactttacatgactacaaagacttgttcctatgcatgttccaggaatgactccatggaatctattatcc

SEQ ID NO: 67641 - DNA, 394 bp, Oryza sativa
  Clone ID: PAT_MRT4530_68479C.1
ctagcaacagcagcagacatcggtggcagtgtcggtgcagcagctctcaatagcattgcacatccaggagatcgtcggtcggttgatcgcggggaggagctcttcggtcgcgggctcgcggagtcggaactcccactggccgccaccaccgacctcccgggtcagatcattacttctcggctcccagagccattccacttgattaaatcggctcccagagccttttttcattttctcggactcccagagtccagctgcccagcagcacaacaatccgcttccactcgggaagccctggcccacgtccccccctgacatcccgaatcacatagattcgtttctgaccactcaggtcatccatcgtgggcacgctgttcgaacagtaagttaacct

SEQ ID NO: 67642 - DNA, 349 bp, Oryza sativa
  Clone ID: PAT_MRT4530_6847C.1
cccacgcgtccgaacaaacccaactaatggcttagactgatcaagctagggcgagagggatacagaccgtgcatgaaaccattaatgagccatcagtaactgcaactgctatgaattgagaggctgatcaaatgagcaaaatagtttatgagctggattgcattcatttatccattaaaaaggcatgacacatggggaaagaaacagggacgcacgtagcaactgaacgatgcatcatggcctcaatctctattattgttgctagagtcataagaacaactgctggtactattgaaaacgcaccaaagacgtctatacgtaacattcctggtgtcgctccaccaggtag

SEQ ID NO: 67643 - DNA, 752 bp, Oryza sativa
  Clone ID: PAT_MRT4530_68480C.1
tcctgcaccgacgagcgtcaagtggtggagggactagtgaggaagtgttggttttctccccttttgagtcccctgaatccctcctcgaagatgatgccaatgcactcgtcaaggaagatgacaatcttgcagagttggtagagttacccaaaaccaatccaactttacggcctccagttgaactcaaaccacttccttcagttcttcgctatgcttttctacatggtgatacggagtcgcccatcatcataagttacaaattgattgatatgagacctctcgactcacggccgtgctagaaaagcatcgctttgttctaggctactctcttcaagatcttaaagggattagtccggctctttgcacacaccatatccctttagatccttcttatgcgtcccctcgggagccgtaatgaaggctaaacaatacaatgagagaggtcgtaaaaataaaaagaggtcttgaaactcctacacgccaggataatctatcctgtgtcatatagtgagtgggttagtacagttcaggtagtgcctaagaagggaggaacaacagttgttgaaaactcgaagaacaagttgatcccataacatatatcttgggatggaggatgtgtattgactatagaaatctcaataaggctacgaagaagaacaacttcacgctacccttcgctgataaaatgttagagcgactggcaaatcattccttcttatatttcctttatgggtattctgggtatattgatg

SEQ ID NO: 67644 - DNA, 619 bp, Oryza sativa
  Clone ID: PAT_MRT4530_68481C.1
cccacgcgtccgaacgattgctagatagccaaagctcttttgttgtttcggtgctcttcggcttcgtcgtcggcgagggagggtttggtttgggaagttgggggggatggatcggtcgatggagacggtggaggaggaggtggaggagtacagctggagggaggtgctgctgccgcggctcgtcccggtggtgtcggacgcggcgccggagctggagcgggagacgggggagcgccgccggggcagggagctcctcgtcgccgtcgacttcgggcccaactccaagcacgccttcgactgggcgctcgtgcacttcgcccgcatggccgacacgctccacctcgtccacgccgtctccagtgtcaataatgatctagtatatgagaaaagtcaggaactcatggaggatttagccattgaggcattgaagacatcactggtccggaccaaggcaaggattgttgaaggggatgctggaaaggttatttgccgagaggcagagcggctaaagcctgcagcagtcattctgggcactcgtggaagaggtctaattcagagaataaccactgacattaatggaagaggtatttcaactctagggagcataataatcaattga

SEQ ID NO: 67645 - DNA, 483 bp, Oryza sativa
  unsure (1)..(483): unsure at all n locations
  Clone ID: PAT_MRT4530_68482C.1
aaanccccnacttggtaagttttngttnccggattcccgagaggttccttaaanggggaanaattctnaagntncncctnttgacganttttaaaaaaacgggnggcagaaccaaaactaaaggtcctggagccangcctttcccgagcccnntctgggttcganaccgangcccagtcttacntnangtcacttaanctgggcattncacnacacatggnccctgacanggatatacaatgttncttacagggtcgttntcccatgacntatgccaattgtgagtctcagcatcccattcgaaatcncttgaattgtantnccccattanatttttatcaatagtgtgtagtcactcgnatanatnctgaatatgtgntctcatcgcatccnnnggatgctattcnagctntnnaaattcctttcccatatatntccttaaatagtgnncttcgntanttattnntgttcnnaaaaaaaaaa

SEQ ID NO: 67646 - DNA, 484 bp, Oryza sativa
  Clone ID: PAT_MRT4530_68483C.1
ttttttttttcaaacagcaattatatcgatattaagtatcgctttgttctcaacaacataccacaagccgccctaatcaaccagcaaaatgcaattttcgcgaaattgcacagctgttgcatttctaaacgaccgaaaaaaactatagctgagacaccagataacaacagatactacaaattgctggaaacggttgtccccatcacagaaactgagagcgactactcagtaatgaaggtgccaaagctagatcagcttgttgctaaacagctacagacatcccagaaacaaatgactccaagataaaagctaaacgagcatgttctacaactccaaaggcacagtagttgtgtaaacatgcagctccactgtcgcgccagtttaatgtttagggtaacaagcttggatttgctgctccagctgaagcatagcctgaaacttgttacgaagatcatagaattcagtcctcaccaaatccaaagtc

SEQ ID NO: 67647 - DNA, 321 bp, Oryza sativa
  Clone ID: PAT_MRT4530_68484C.1
atgtgctccccgagaaagcgacgatccgacgacgcctccgacccaaaaaaaccagcggcagaatcgaccggagttgcgatcagaaagacttcgtgctttgaactggacaagaagggtaatgtgtacgcacgcaggggagacaggccggagctgctgcccagagaagagcagggctgcgtgcatcaatggcgccgcattaatcgcggccccgcggcgtctgccattgccatggatggccttggcgtggagagatccgactcgcccaccaaccagccactaattgcagcagctgctgctgctcgcatctcatcaatgccatga

SEQ ID NO: 67648 - DNA, 404 bp, Oryza sativa
  unsure (1)..(404): unsure at all n locations
  Clone ID: PAT_MRT4530_68485C.1
cactggagctgaagagactgcattagatgatgtgaaactaggatatctacacttccttgtggcccttctgagaagctaccaccntacagcgcagcgaagaagaagataacgaagtacggtgatgattgagtgtgtacgcatgccctggtgctgancgtggacgtaatgcacccggtgcgatatcgcgattggctctntgtgtcgtggcgggaggcgtaaggaatttgccgaagtacactcggttttcgtacggaagaaaagggaagagaaccaaatgacatgcgagtgttaggctctgttatttggttgagttggaacccatcccttgtacgataaaacgaagcagtctattagcatatgattaattaattattngctaatnttgttaaaaaaaaaaaaaaaaa

SEQ ID NO: 67649 - DNA, 223 bp, Oryza sativa
  Clone ID: PAT_MRT4530_68486C.1
aaagtaaaaccgacactgcctgcattcgtggggactatacattggatacgcgtgcacttacttaaccataccttactataatgggtgtaaccaaacattctaaaaacatatatccaaagtccaactatacaagctatgtactacatattaataaaattcaaagggccttttcgaccccaagattagaccataacccaaatctaaattctcttctccactcctt

SEQ ID NO: 67650 - DNA, 387 bp, Oryza sativa
  Clone ID: PAT_MRT4530_68487C.1
atggtggaaaggggcgtcgcaacatcggcgctaggacagtgtgtggtgcccatcggcgtcaatgatatgtttcttcctctgacccaccacggctactggcagctgggcttcgtgctggagctgcaacacctttgcctcgccctcggctactccgacgaggtgaagtacacgggggtgcggctcccgcctaccggtgacgatgacgctccccaggcaagatgggagagcgccgctctcctgctcatcggcatgctggggatgacgtacaactccaagctgcagcacactctgttccgctaccaccctcgccgcctggacccgaacaactacaccagcttcagggggatcagcctggaggacgacaccacccttcgccacctcgcgtga

SEQ ID NO: 67651 - DNA, 132 bp, Oryza sativa
  Clone ID: PAT_MRT4530_68488C.1
gcacgagggaaggatgtgccttcacatgagttacaagtgttgatatgttgccgaatatgtcatatgtgtacttggcatactgccagtagagttcacaagttatttttcttttcaccaggtattatgatggtg

SEQ ID NO: 67652 - DNA, 159 bp, Oryza sativa
  Clone ID: PAT_MRT4530_68489C.1
atggctgatgagaagaggcaggaacagtcgccactgccttgcttttccgtggaagtaacagctgatagccgttggtttcacgatggacggatcctgatcaagatcgtgattgctttagtcgttggaaaggaggatgaacggcagcagtggcggatctag

SEQ ID NO: 67653 - DNA, 604 bp, Oryza sativa
  Clone ID: PAT_MRT4530_6848C.1
atgttgtccagcgaaccaggtgtgctgaccggacggtatggcccaccgttcagcgagacaagaaaggaacaaaaagagcagcgaaacctcgctccgcacgctctctcccgccgctacttatcccgcgcgggtcacggcgtggtcgcgctctggcctggccccccattcgatctctccctgctcctccactcctcctcctcgtacagcgccgaagaacggaggcggcgccgccgccgcgccggcgagaggagagcgagggaggacatgggccggcggaagttcaggctctccgacatgatgcccaacgcgtggttctacaagctccgcgacatgcgcgcgcggggcggccgcggtgcaactgcgatgcagccgccgtcgtcgtcgtcgttgatgagggggagcagggcggcgcagcagcaggcgggcacgtggaggctggggacgtcgtcgtcgtcgtcgtcgttgctgccgcacagggcgtcgtactactacaccacccgggacagggaggtcccgccgctgccgccgccgccaccgccgaggggcgtggatgatcaattcccttccctcacgctgtcgccgccgttgccgacgaggaacagca

SEQ ID NO: 67654 - DNA, 587 bp, Oryza sativa
  Clone ID: PAT_MRT4530_68490C.1
tcacctctccatcctacattccaggtacttcttcgagaactgccgacatttttcggactgaaatccagttgatttaaggcacgcaagataatctttcttctccaagtcacactcgtgcaagtgatccagtgggaacactcccttttcgggaggcacaggcctcacgccccgatttccaccaaacgcaccgccaggatcccctcccctgccctgctctgctcgccagatggagatcggcgcctctcccctccccggcttctcctcgccgacgacggctttcccctcacgctctcccgtaccctcctcctctcttggcgctccctccatcacccccctcccagtagagcaaggggatttagggactggatggcgcagcgttggatttgggtgcggtgatggagtttcgccggcgacggcctccccctcgcgctcttccatgtcctgcccatctcctgccgcaccctcaagcactctccgcccgtttctcctcgccacccgttgcagcagttaccctgttttgtgttgggctccacggagattggcctgtgatgggaaacaagctcgaggatgccaggttcggtcgccat

SEQ ID NO: 67655 - DNA, 780 bp, Oryza sativa
  unsure (1)..(780): unsure at all n locations
  Clone ID: PAT_MRT4530_68491C.1
ccggccgggttcccctgaaccccccggcatcactgttctcccgccctttctcttcctttcccctgcccttgcgccgccgccgccttgccttacctccccggcttctccccgccgacgacggctttcccctcacgctctcccgtaccctcctcctctcttggcgctccctccatcacccccctcccagtagagcaaggggatttagggactggatggcgcagcgttggatttgggtgcggtgatggagtttcgccggcgacggcctccccctcgcgctcttccatgtcctgcccatctcctgccgcaccctcaagcactctccgcctgtttctcctcgccacccgttgcagcagttaccctgttttgtgttgggctccacggagctgcgacgacggtagcctcggccaggaagcgacccatggaccaatggtgggagcatttggcaaggacacactcactcaagaaccagacattggcctgcgatgggaaacaagctcgaggatgccaggttcggtcgccattgagatggctacagacttgatccttccactctcacagccgtcaacaacatcggggcgattcgttttgctgcctggtgggctattgtttactgctgtctgcttgctgctgaatgaagcagctagcanatattgttccaaactaaaagttgtagtggttttggtgtgatgaggaagccanganaataatggttaggattcagtggcctttcattntatctttatataggacttcattcccctaaatcttgcctttatatat

SEQ ID NO: 67656 - DNA, 166 bp, Oryza sativa
  Clone ID: PAT_MRT4530_68492C.1
gcatgaataaaacagttgtagcattttattattgcttttggacccgaaagaggccacataaaaatttttatatacttttcaaaccccatttttttttaaaggggcgattctagagcctgcaatcatatatacattgcccaaaattttaccccttaaaataacactt

SEQ ID NO: 67657 - DNA, 416 bp, Oryza sativa
  Clone ID: PAT_MRT4530_68493C.1
ggggccaaaggggtttcctatgccactgggcaagcgggcaagggtggtacattgaaaagctcacgtgaacgagctaagaaataactaggcaggtgtgtgttgaccttgaaattttcttcaggattgatccaggctccagtccaggtcaggttgtgaaaaaacttcataatccgtggggccatctacaaagctattaactgcctgcatcccttccaacaaggatggctggaagcgatcacttctagagggcagcaatttataaaagactaacaaactaagaggacatattgcctgtagcttcataggatcaccttggactgcaaagaatagtaacattgcacaaggaagaaaataacgcagaattgcctgatgcagatcccatgtccctcagcttcccatcattgcctgcaggaaac

SEQ ID NO: 67658 - DNA, 345 bp, Oryza sativa
  Clone ID: PAT_MRT4530_68494C.1
attcattgctacacattactattaccctaaatttttttctcgaacgcactattaccctaaattgttgaactacatctctgccctcctccatgtccaactcggggtagaaaccaaaggaaacccgaaacatgccttcccgagtaaggaaacctcgagacccgacgaaacacagtcggactcggacctgccgatcagaccggccacacaccgccggtctgaccggctctcaaccagcggtctgaccgcccaacacacgctggtcagaccggcccactcggaggaaaccaatagacttccaaattttggcaatatactgctcggggttgccggtcagaccggcagcat

SEQ ID NO: 67659 - DNA, 159 bp, Oryza sativa
  Clone ID: PAT_MRT4530_68495C.1
atggcttggatgacgaggggctacaaggcgtctgagtacgccatcagaggggagctcatggcatggaggctgtacgagcaatccaaggtaatggagctcatcgacgcgaagatgcaggccaatgggttcgacgagaagcggcaagtgatgcagggctag

SEQ ID NO: 67660 - DNA, 4226 bp, Oryza sativa
  Clone ID: PAT_MRT4530_68496C.1
tttgttgcccattgtagtggagactgattgtttggtggcggtttgaattcccggttgcctaagttggattttccccaatttgatggatccgatccacagaattggtggatgagttgtgagcattattttggggtttatggcacccatccgaggctttgggtgcgggttgctaccatttacttcattgggagggttgcatcctgattgcgttcctcgtgtgcgcatctcattcattcagattgggtagtattctctgaagcggtgaatcagaagtttgatcataatcaacatcaacatctgattcgtcagattgatcacattaagcaaaccggctcggtcagtgaattttatgagcggtttgatgatctgatgaatcaattgttggtgtatgatcctacgtataacactttgaatctggttcatcggttcacagaaggattgcatgcagacattcgccactctgttttgatgcatagacctgtggatttggagtctgctctggttttggctttgttacaggaggagttggtggatgcagcaaagacaactgagtctcgcaaatttggtgatcatggtgctaaattcaaaggggcttattcacttcctctccctcctagcaagaccattgtttttcctgatcgaggggtgtacaaggctgatgagaagaaaattgttgatggacaacgctctgttcaaacttcaggtaagaccagtgcaatgaaggctcacaggagagctcagggactttgctatttgtgtgctgagaaatggtcactgtcacacaaatgttcaggaacagtacaactacatgctgtttaggagttgtttgccttgtttccagctgatgaccattccagttgcagttctgacgacaatgatcaggctactcttttggctctgtcaattcatgctattcagggtatagtttcttcttctaccaagcggctgcatggtaaaattcaaggcagagatgtgttaattctagttgactcggggagttccactagttttctcagtgttgcttttgctgatcagttggaaggggttcagccattgcgacggcctttgtcagttaaagtggctaatggggagatgttgcgttgtttgacagaattaccaaacacagtctggtctgcacaaggttttggtttttgtactactttcaaggtgatcaccatggggggttatgatgccatactaggtatggattggttaactcaacacagtcccatggatattgattggcaagctaagactattcgtttgacactgggaacacatcaggtgaccatccaaggtgtctaaaatgaagtgactagttatgatgtgatctctcaggaacagctagttgctttgaaactcaggaattcggtggaaggtttggttcagttatgtgcagttcaataggagcatactgatctgccagtgccaccgcaaattcagacattgatatctgaattttctgttctctttgaagaacctactgcattaccaccagagcgcccttatgatcacaccactccattgttacctttggctgttcctgttaatgttagaccataccgttatacaccaacttaaaaagatgagattgaaaggcaagttaaagacaagttgcaaaaaggaattattcagccaagtgctagtcccttttcctccccagttttgcttgtgaagaaaaaggatggttcatggcatttttgtgtggattatcgtcacttgaatgccataacagtcaagaataagtaccccttgccaatcattgatgaattgttggatgaattggccggtgcttgtcggttttctaaattggacttacgctccggttatcatcaaattcgaatggcagctggagaagagccgaaaactgcttttaaaactcataatggacattatgagtttaaggtaattcctttcggtcttacaagtgcacctgcaacttttcaaggtgtcatgaattcagttttggtcgaacatttgcgtcacagtgtgctagtttttgtcgatgatatcctcatttatagtaaaacattggctgaacatgagaagcatttgcaacaagtatttgagatcttacacaccaatcagatgcaagtcaagttatctaaatgctcgtttgctcaaccaagtctagcttatctgggacatatcataagtgagcatggtgttgctactgatcctgagaagattcaggtagttaagacttggccggttccagtaaatgtgaaagaggttcgaagttttctgggtttagctggatattaccgcaaatttgtgtgtcattttggcattatagtagactttaatgtggactgttcatcatcaggaagcttttgatattctgaagtctgccttcatctctgctcctgttttggcgttacttgattttcggaagcagtttgttgttgagactgatgcttcggatcaaggtattggtgctgtcttgatgcaagatcagcacccattagcttttctcagtaaagctttgggtcctcgcacacaatcgttgtcgacatatgagaaggaaagtttggccattatattagcagtggagcaatggcgttcatatttgcaacatgacgaatttgtgatacgcattgatcatagaagtttgtcttttttggatgatcagcgtttgtctactccttggcaacaaaaggcactgaccaaactcttgggtctacgctatcgtattgtttacaagcatggtttggacaatgcggctactgatgcgttatctcgcagagtacctgatggattgtcggttttgtgtgctctgtcagtttcttttccggcttggttgcaggatgtgatacagggatattcggttgattctgacaaacagaaaattattgcctcttttgctcttggtgcttctcctaactctaattttgagttataggatggtctgatgtattttaagcgccgtgtctgggttggtaataatgtccagttgcagcagcagattttggccaacttacatgcttctgctgtgggaggacactctggtattcaagtgacatatcaaagagtgaagcagctttttgcttggccaggactacgcaaatgtgtgcatgattttgttcagagttgtgatacctatcaaagagctaaacctgaacatgttgcttaccctagacttctgcagctgctgcaaattcctgagcatgcttagcaagtaatatctatggattttggggaagggctgccgtgttcagcttcttataactgtatctttgtggtggtggacaagttcactaaatttgctcattttcttccacttcggcatcctttcacatctataatagtggctcagttgtttatgaacacaattcaatgcattcatggcttacctcaggctattgtctctggtcgagatcgtgttttcaccagtaatttgtggaaggaattacttcttcgtgctggtacccaattgcgcatgagttcatcttatcatccacagtcggatgggcagacagagcgcgttaatcaatgtcttgagatgtttcttcgctgctttgttcatgcgtgccctgctcgttggagtcagtggttggctttggcccaattttggtacaacacatcattccattctgctctggtgattcagtgggtatgcctagttctttggattcttggcttcaagatcgcaacaatatgaaacttttgattcaccatcatttgatgcgtgctcagcaatgtatgaaacatcaagctgattccaaacgaactgagaggatttttgccgtgggtgattgggtgtttatgaaattgcagccatatgtgcagcagtccgtgatgactcgttccaatcagaaactagccttcaaattttatggcccttttcaagttctgcagcgcattggctctgttgcttatcagttggagctaccggccactatacttattcatccggtggtacatgtctctcaactcaagaaagcagtggctccttctgaacaagttcagtcttatttgcctcgtttggatccggatactggtcatcttgatgtgcttgttttggtgcttcagcgtcgtctgcgccgtaagggcgacaagatgattgtgcaggttttggtatagtggtctggatcctcttctgctacagccacttgggaggactttgaagctcttaaacatcaattttctatggctacagcttggggtcaagttgcttttcaaggagggaggaatgtcacgcctagcagctcacctcaagtcaatga

SEQ ID NO: 67661 - DNA, 413 bp, Oryza sativa
  Clone ID: PAT_MRT4530_68497C.1
atggtatatccgcacgagtacggacgttctctatatgcgctaaggaaattcatcacgaagttcaccgataggaagattcctacccgtatagtactgggtcgtcactgtatcatgcagggtccgatgtctccaagttctacttggaaaccacctgacctgcgatataaaagggaccccctgggaggacctagggcatcgaatctcatagccaagacaaccaccacagcctacgaagccgagcctgcaggagccaagtcgccgggtgatctagtcgaaccaactcaactacgatctcgttgatatcatcgtaccccaataccctctaaatccggtctacgggtatcccccaccttactttttcaggtttacttatttgatcccaatttttaaaatcaaagttgccctctgacctc

SEQ ID NO: 67662 - DNA, 756 bp, Oryza sativa
  Clone ID: PAT_MRT4530_68498C.1
gccccaacttaaggcccgtttgagatatggaatgttatctcaatcgggcctaaagttggtgtccgtcacggatcgctggcagggccgaaattctgaaaacgacaaaccaggctccaaacttgtcggacgtaagggcattcattgaaaaggtggtttgtgtcttcgaacgcacaggtgcaaaggcagcaaatcagttgcatggccaatgcctatgcagcaagatttgggcagttaatgtttttttatggaactagccaaccaaaaaaatctcattttaggttctgtcggggccgtccaaagggagctgaagtcaattgaggcaaacgaaccttaaaattgaaagagatacgcactctttgaagagtacgatccagagcttgttaatttccaagagatgtcatccggttcttgagaaagagatacagattggagtaggccaccgagttggaccaattcgtgaagctcttcaacggaggtgaattggcgaaacgaggaaagccatttgttatcatttagttcgaattgtactgatctctactttcgctttgccaatctgaaacagtttggggcaaagtcttttaggcattgattttgcagccaattgtcgttccaaaaactcgtctttgctccattacctaccgagatggtggtggctgcttggaaaagcttcacatccaggccgtcacggggaagttccatgcctacccagggcttttcgtcctccttccatttaaaccacagccattgcaggcgtag

SEQ ID NO: 67663 - DNA, 1109 bp, Oryza sativa
  Clone ID: PAT_MRT4530_68499C.1
ggctcgcaatggtgacatgatattattctcagaagtcgcaagtatgacctcaagcaggtgatattgtgtgttacatcatacctcctatacattgctggatggaacccagtaaaatgaactcattgcaatagcgggagaaggctaggggggaaacatgatatgaagtgaaggcaccaaacagctagcggaatagagtgcaacttggcctccatataactgcctacagagcctatctatgtgctagccaggtgtttcaggaagtagtggattagacactcccccgtttgtctactcttcttcaggattaaaaaagaaccagatctaggttttactttggacgtttgcggtaaggatacatgatatcatccatggtgtctttaatgtaggccccaactttatttaagttccttgctacaccattagccacaagtccagcattcctctgaaatttggttaagaaatcatctcctctctgtgcaggcttatatcgccgtggttggggagcttcctttttatggtgagatgaagcctgattagtcgaagtttttctatcagccaatagctcgattccaacacaaataggcagttgcgggtgcttgtcacctttcccttcagaactcttcttgtcatccagatacatggaatagccgatacatccatatctgaagtcggaaaggctgcgaccttcctggatagcttccatctcaatttctccaaccatgtgatcagggacttgggggatggcgcgggtgatgccggcgcagacgggaccgcggtctcgcgacctgagcgacgacgagtagaagaggtagcccttgcaggacttccccttcaccgccccgcccccgccccctgccgccaccggcggcggcggcggcgcgtctgcaccccgcgcctcgccggctcctcctccgccgccgccggcgacgcgctccatgccgggctggcgggcggcgagctggagggatacgcgtgtgcgggatcgggcaccggcggcggcggcgtgaggcggcggagttgggaggagtggagcggggggcttcacctctttggctactccaacttccgtttatttaccatttcagcctcccaaggaaacataatggatg

SEQ ID NO: 67664 - DNA, 951 bp, Oryza sativa
  Clone ID: PAT_MRT4530_6849C.1
atgggactaatagcgcaacacttaataatcatcatcatcatcaacaaaaacaataatgggaccaataactcagctcttaataatcaacaacaacaagaggttcaacaactcgggggaaccccacagtcagcaagtaaaaggaagcccgatatagcccactggtacgacccagcatcacaaagtccctctccgcctctcctcatcaatcgctcgcagctctccccttcatggcgatacggaggacggcatcgaggttccggttcgggggcaggcggcgagatcgaggtacggcgaggtctccggcacatgagcacacacggcagcagaaaaagaaaaaaaaattgaaggcgtctcttgctgcgattcctgcgctggctccgccgcggctgcctcgccgccgccggcggcggattcgtcggctagggtttcgtccattggcaaacgatgcaaaactcagttcaggcgaaggaaaaagaaaagagaaaaaaaaaaggtacctaagtctgacggatttgatcgatcgaaccggccgtccaacgacgcagcacgcgttcggtttggatacatccttgacgttttaacgacgacgtgccatgcaaaccccgccgtcgcgtatagtcgtacgcccacggctacgtacgcacgcacgcatgcacgcacggcccgcgcgcgcgagaccaaccgagccaacacggccgcgaccgcgaccgcgaggttgtgtgtgttgggagtgaaacgccgagacgtacgcctgatcaccggttcgctctctgctgtgctgcctgccacgcgcgcgcgcgcacggtgacgctgacgcagtgcaccacggtcacacgcagtcacccaccgcagcacgcgtgccgctgttgtttttaccgcgccctgcgttacgtcacgtactcaaatgggtgctcaaagggcataactactccctccgtcccaaagcttacg

SEQ ID NO: 67665 - DNA, 285 bp, Oryza sativa
  Clone ID: PAT_MRT4530_684C.1
atggaggggataggacggtggcacggcgtggacagcggggaggccggaggggaggacgcgcggcgccggcgcagaggaggggaggggatggcggtggcggcgtcagcgcccggcgcggagtcgcagaaggaggggaggggatggcgcagcgccggcgcggatagcggggagcctgccagccgagggcggcaccgagcgtggagtcgaggaggctggcggtgtcgggctcgggcgaacaggaactggcgctactggctgtcccgagcccaccaggactacccctag

SEQ ID NO: 67666 - DNA, 357 bp, Oryza sativa
  Clone ID: PAT_MRT4530_68500C.1
ggggcgcgggggcggccccttgggcggccctttgtttttccccgggatttttggcccggttctttgggggttcccttttttttttttttggggggtttttaaagtttggggtaataatggacataattttttcctttgtaaaattttttttctttcaaatttccacaaaaatttcgggccggaaggtttaagtttaaaccctggggtgccttatgggggggctaactcattttttttggttggcgttcattgcccgtttttaattgggaaaaacttttttgcccgtttttttttttaattggccaacccccggggggggggggttttctttttttgccccagggggttttttttttt

SEQ ID NO: 67667 - DNA, 648 bp, Oryza sativa
  Clone ID: PAT_MRT4530_68501C.1
agcacaaactagcccacgttccggatcaaactttacttagctcaatgtcgtcgtggtatgtactactaccaaacagacaatacattatacagctattttttttcctagcaacaaatcacagccgcagcagcgtaagaacatcagcatcacggtgacagggggaggagaaagacggcaaccggaggcggctaaaacggtgcccacaggcgtcgcctttcagaagaaccatcacaaaggaagaaccgcatactaactgacaaacagggcatgatgcaaaacacaatgtgcaccagaaaatgtacatacaaccgcagcacggggtttgaagttgcggaggatcagaggatgatgagcaccggtggtggcgcgctcgcgtttcttcaccatggagtcttgtcgcctggaccggcaaggatgatattgcaatctatggcgaatcgccgggtgagcatgattgcggtgttgcgttctctcgtcgtttcgaaggccaggaccatgctgaggtcattcctcggccgccagaacatcgcctgagaagctgcttcaccgccacctcggacaccgcatagctgcattgatgacgaatagaattccttggcacccactgggtttttccttaaaaagcctcatcctcaattttccatattg

SEQ ID NO: 67668 - DNA, 624 bp, Oryza sativa
  Clone ID: PAT_MRT4530_68502C.1
atggatctgactatcgaagcacggcaagccaacgtcaccgtgagcgcccacacgccgctgcaccgctgccaccgtcgccaccacaaccgccggtgggcgcagcaggcccccgcctctgtcacgcgcgcccgactccctccttggctgacctcccgtagccattcccgcgccgcgcgaggctacgctggcccccacctcgcattggcagctcaccatcgtcatccaggcggcggatctggccaaggggcgccagaaccggccatccccatcagcgggccgagggccaccatcgccgcggccttcccgacacgtcgtcgacctcctccccgtgcgtcgccggccttctccatgcgcacaacgaccacctccgcctacacactagttgggacgccggatccggccatgagaggcccagatctgtccccaccgtcgtcgaagctggtcgccgacgaccaccacttgggatcctccctccatcttggcagcgccccgagccgccatgcccgagagaggaggcaaggagccctgccgccaccatcttgggcagcggcgaggcggaggggaggaggagaagtggttggcggtggcgctcggtggtcgccgcccgtgccgtcccagggctga

SEQ ID NO: 67669 - DNA, 594 bp, Oryza sativa
  Clone ID: PAT_MRT4530_68503C.1
gcacagcctgctgacacacgcaccaacacttactggagcggcagatcaccgaccgatgaatgacacagacggtgttccgacggcccagaccgctcggactacagatgcactgatagcagcagacacaacacataagaccgaagggccgataactccgtcataccgctaatccaaacgagctactaggagagcacgccgatgctcctgcagcagggctgatcatcatgcacaggctgacaatacatgatgaacaggtcatcatcaaccacagctactacgcagacagagcaaaaacacgagcttactattgctgaacatgacagatcttataaaaagaacacaatgatgcttatcatagcaagtcaagacactgctctacttgagtcgatgtgccggtttgacaccaatccatgcaacatattcaacaccggcccgtactagaattatctcactagcctcatacctagaaggatcacaccgctgatgtgtcacatgctgcgagatgtggatcttgacgtgttatgaatagagatatgtttttctttcatatttgctggtgataaagtactatatatgattttgtgcgttctggac

SEQ ID NO: 67670 - DNA, 610 bp, Oryza sativa
  unsure (1)..(610): unsure at all n locations
  Clone ID: PAT_MRT4530_68504C.1
aaaaaaggcctcaacttctccagaaactgctcgtgcatcctcccgccgccgcttccccaccaacgccgccggctgcgcggctgcgacggcgacggcgacgctctcccccggctatctcgaggtttagtgcaagaatgggtcggaaggcgggtgcgctttacataaacccaaagaagttcggtggtgtcacgaagccttgcatgatcgagatggtttccttcctcaattgcctggccttgaacaaacagaacgatgacaagtgtgtccgacagaaggatctcttggttgcttgtgctcaggctcagaaaggaaggccaaagaatgcagcaaagaccatcaattaccatcttcagcgacttgcacgagacaagggcatttagttccggtaatatggaatctttgttgatcatgatgtttgttgccttgatgatatggagtcgtaatgcaatggcctatttgtaataatctttatatctcagactaggcatttcaacacaatatcgatattattttcctctgaacttctttacactataaaacgtggtttgcggcttttgcgacaaaaaaaaaaaaaaaaaacccgcggcccctgcagcaaaaaaaaaaaaan

SEQ ID NO: 67671 - DNA, 354 bp, Oryza sativa
  Clone ID: PAT_MRT4530_68505C.1
atgcgtgatgtggatctagctcctgagtttcttgtaaccggacctccaacgccggactggccaacacgttcttcaccattggatgaagagaggtttcgagaagagttgtaccgagactacgatgatggctcttctcgaaacctctcttcatccgatggtgaaggaggtgccggccagtctggcattggtggcccgattacaggaaactcgggaggcactggccaacatgctgctcccaaatatcgctctacgacgcaccctgacaaggaggacttcagtgatattgagggctgtcaccatctctacacccacctcacacctactgtgggatacggagcaaacaccggaaattaa

SEQ ID NO: 67672 - DNA, 656 bp, Oryza sativa
  Clone ID: PAT_MRT4530_68506C.1
ccactcaccgtgaatcatatggtggtgaaatattcaccactattttcgtttagaagtcatatctttaccacattaccattttgactgcacgctttacggtgatctccatggaaactatacagtttctcatgaaatgaaattcctgcattttgaataagctctaaggcatcatttgaatggtggagttttaaaaagacatggagaaactgaacaaaattctacaaaaatcatgtaaaatttacgtattccaaagaatctctaagaagcgtggacgctacatttttctccaaagaaaagtgcatcaacaatcctagatagctactcttcatgttccatattataggtcatattagatttgttttaagtcaaacttctctaatttttgatcgaatttatagaaaaatgcaccaacatgtacaatgacaaataaatgtattattatcgatggatttaatgaaactaatttaatatcatagatgttaatgactttttttaataaactcagttaaagctaaaaaaagtttaacttaggacaatactaaaatgacttgcaacatggaacataagggaatagatacctggatgacctgatcaaagctagccagtggcaaggagaatcccagttttgagtgattggattgccaatcatggacggc

SEQ ID NO: 67673 - DNA, 471 bp, Oryza sativa
  Clone ID: PAT_MRT4530_68507C.1
tcagccgttgccaccgccgccgtcggtcgtcaccacgccatccatctgcggccaccgccgacgccaccactgctcttggtgggagaagagaggcggcggagggacttccgccggatccgccctcggccattgccaccgcggccctcggccactgccaccgccgccgtcggtcgtcgccacgccatccatctgcggccgctgccacgccttccatccgtggccgccgccgacgcgaccaccgatatgttgccgttgcttgcccgaggccgaggctaaggacgccaccgctcccgctacctgccaaggccaaggccgctgcacatcggggtcatcgccacctgtaccgacgccatcacctctcccgccgcccgacgaggccgaggtcactactcgctgtggtgaggccatcgcctctcctgctgctcgacgaggctgatgtctctgctcgccagttggggccaccaccgccat

SEQ ID NO: 67674 - DNA, 567 bp, Oryza sativa
  unsure (1)..(567): unsure at all n locations
  Clone ID: PAT_MRT4530_68508C.1
aactagtggatcccccgggctgcaggccaagaagaagccagccccgaacccgaccccgactcagaagcgtagcaacaagagaaagcggtcgtggtcganggccgacgagctcaggattctggaggccatggccaaccacgccaacgcccatggcggcgctctgccggagacctccgatctctttgccgcccttgccagcagcctcgagagaggagatgccgacctgcccaagctcgccgacaaggtccacaagctcaagagatggtatgacaatgcacgcctgccgcagcgctgcccgactgacgatgacgacgatacgcgtcgattgttccagctatgtgggaaggtttggggtcccccttcaactgtgctgcgcacgagcccacgccaacgccacaaggtagtaggagtacttgtccaaggaaatggtgccaatccccagccggcagcagcactcaaggtcaaggagaagagagtcaggagggagttatctgagctttatgtcctgtatccttgtctcgcccaggaggtcaaggcgcatgctaacgaatacggcgagctcatcgg

SEQ ID NO: 67675 - DNA, 1471 bp, Oryza sativa
  Clone ID: PAT_MRT4530_68509C.1
cgactcctataggggattgggatcctactagccggccgggttccccatcggtctaattgcgccccttatgcattagagcccccggagtcccctctgtttcgcagataagtcctttggttcccatctttttattacattcaggtcctcctagtttcttttcctttcgagtctactccttgcattcttgcgaggaagcccctcgggttggtcgaattttagtttccactccctctcctcgcggagtcgttgctgttcttgttcttggtcgaggttgaggttggtggcgtagatccgatctgaggaatgtttacctatcctttcctctaacgttcgccgtactccgatgaagttgaacgtgctccgccgccgccgttcccactccttctccgtcgccttcctctactggttctacgtcttctcatgaactcatcgccttcctcccaagaacaccatctccagcctctaattgattatatcttgatttctttttcatcctcctactagtttctttcttgtttctttggaatttttttgatctcttgaagagatccggttcttggattaagttttggacaagaaccgtactgtgaccatgtcgtcgccttcgcgccggagctccagcccggagagcaacaccagcggcggcggcggtggcgccgacgagcggaagaggaagaggatgctgtcgaacagggagtcggcgaggcggtccagggcgaggaagcagcagaggctggaggagctgatcgccgaggcggcgcgcctccaggccgagaacgcgcgcgtcgaggcgcagatcggggcctacgcgggggagctgagcaaggtcgacggcgagaacgcggtgctccgcgcccgccacggcgagctcgccgggcgcctccaggcgctcggcagcgtcctggagatcctccaggtggccggcgcgcccgtcgacatcccggagatccccgacgacccgctgctccgcccatggcagccgccgttcgcggcccagcccatcgtcgccaccgccatggccgacgccttccagttctgagccaccatggagagctcgcacgccatggccattggcatcaatggcatggttgcagctgcattacaactagtagtactagcctctgtggttgtgtctgatgatgcttattatgtttaattatggtttgcttcatgttgttttcattaatctagaccattaataagcaatgtgtgttgtaatcttgtctagtcttatgtgagatgtgttcatctccagtgctccttgctaataagggtggaagagaacaatccgatttgatgtaattcttggagagcacatgtgtgctggtttgtgatgtgatgaactgatgattgtaatattttgacattgaacctatgctataatgtttgcagcaatgaataaaaaaaaaaaaaaaaaaaaaaaaaaaaaaaagggggcccagcccgcagcccggggatccactagttctag

SEQ ID NO: 67676 - DNA, 246 bp, Oryza sativa
  Clone ID: PAT_MRT4530_6850C.1
tcatttgacttttatcttatccgtaaccttgacagtagcccccgacttctgcttaaatgagctcatgttatcgatcgcaacttctgatgtcggaattgttgtcgctctcatctggtcgatctcggtgtgaaaacttgagaaatcttcctcgaacaccgcatccatgaagaagctacaggacgacggtgccctccccggtcgcgggaccatgcagagggaggctagaggtacagaacctaaacccat

SEQ ID NO: 67677 - DNA, 2306 bp, Oryza sativa
  Clone ID: PAT_MRT4530_68510C.1
actgctctctgtgacagcacccaagaggtccgtgaatctgcagggttagcatttagtactctggtacaagagtgctggactgcaagccattgatgagattgtccccactctgctacgggctttggaagacgacgaaacatctgcgacagcccttgatggtctaaaacagattctaagtgtcaggactgcagctgttttaccccatatattgcccaaattagtccagcctcctctctcttcattcaatgcacatgcattaggagctttagcagaggttgctgggccaggtttgaattcacatattggaactgtcctcccagcattgatacttgccatggatgatgaagatgctgatgtacaaaactcggctaggaaggctgctgaaactgttgtgttggttattgatgaggaaggaattgaaacattaataccagagcttcttaaaggagtcaatgatagtcaggcatccatgcggcgtggctcagcctatctgattggtttcctctttaaaaacagtaaattgtatttggctgatgaggctccagatattatgtccaccctaattactttgttgagtgataccgataaggctactgtatcagcttgcttttggaagcattttcgcggagttgttagctcctgttccaagggaacagctttcctacacatataaaacctagtacgtgatgctgtctccactgccagggataaagaacgtagaaggagaaagggtgtgcctattctcgtccctggcttatgtcttccgaaagcactgcagccctttcttcctatatttcagcagggtttaattagtggatcagccgagacaaaggaacaggcagcagaaggtctgggggagttaattgatgttacaagtgagaaaactcttaagggggccccgggccccaggactcggcccctggtccgtattcttggagatcgatttccgtggcaagtcaagtcagctatcctatcaactctgactatcatcatttctaaaggggggcttgcacttaagcctttccttccacaacttcagactacatttgtcaagtgtctgcaggataacaatagatctgttcgaacaagggctgcatctgctcttggaaagcttagtgcacttagcacgcgagtggatcctttagttagcgatctgttgtccatgttgcagtcaggggatgatgcagtcaaagaaagcgtactttctgcacttaaaggtgttgtcaggcatgctggcaaaagtgttagccctgtagtcagatctcgcgggtgtgatcttctcaaagatctacttcaggctgatgctgatgacgtccgcagttctgcggcaaaggcaattggtacattatgtcagtacatggaggagaacgagacttctgacctggtgcaaaccttgttgaatatgggaaccttaccagactggtgtaccaggcatggtgctttgttaacattctgttcgatatcgatgcattgttcatctaagttgtgccgttcgatgtcatttccttctattgttgatcttctgaaagattctctgaaagatgacaagttccctgttcgtgaagcctcgacaaaaactttggggaggctactctgttaccagttgcagtctgaagctagcaccttgcaacttatccagttacttgccttggcattgcgcgatgattcaagtgaagttcgaaggagatctttgtctcgtctcaaagctgctgcaaagataaataacccagcccttgctacgcatctctcaatattgggcccagcaatagctgaagctttgaaggatacgaacacgcctgtgcgtgtagcagcagagcgttgtgcccttcatgttttccagttgacaaaaggagcagacaatgttacaattgctcaaaagcacctgaacatgacaggtttggaagtaaggaaaattgcaaaacttccagaggagagtgatggcagtgagagcagtgacgatgacaagaggaaataaaacgcattactcactgcagccactcggaccaaattttgcttctgtttgttgtccacccatatatgatcttttcttcatagttgtggaaatatggtcatttttctcctcctggccattggtataaacactcttttttgacaaaatacagtagcagaggaagacagttcggcgttgttcatattcttcttactagaaatcaacgttgttcataatacaatgatagtgttaatgaagattaattaatcccagatgctgactctaccgaggacttttggtgatcatagtaaagctagagtagcattgcaaaaataaaaaaaaaaaaaaaaaaaaa

SEQ ID NO: 67678 - DNA, 255 bp, Oryza sativa
  Clone ID: PAT_MRT4530_68511C.1
atgggtgagaggacaatggtgacgaagaggcaacgtggtggccgttatccgtcgtggcgacgcgacggcgacgggatggcgatggcgcagctccgtgtttcctggagggaatctgggagatcggttggaggtgcggcacgggcgtggctggcgctggcggatgcggcgcatgggcatggtagcggatgttacacaaatgaacaccttaatcttcatgacacactttgtcttctagatccatctaaaaggccttga

SEQ ID NO: 67679 - DNA, 2077 bp, Oryza sativa
  Clone ID: PAT_MRT4530_68512C.1
ccacgcgtccgaagtgaattcatgtgaaccgagttggtggccaccagactttttggcaaagatagaatctgtttccttatctagaaaacaaagtgtattttctgataaagaacctcgaagcaatttgcgatcctcatcatggaaggcttctcaattactgtggtcaacagggacttattcagggttcatccctaatggtttctactcaataattccggataaaaagctgaaggaaaatttcccaacaataccatcattggatgaccttcaaactcttgaagcagatggacttaaggctgacataattattgtggacgttgagagagataagaagcttttcatgttgaaacagcttagtggcgcacttgtgaaaggattaaactctagtccagctttggtgataaagaaaatagctggcttggtttttgactgcttcaagagcctagatcctgatgtaagtcctgcaagatctccaactgaagataatcatttctttggaaacaaagggtcacaacttctagggcagataaagcatggatcatgccgaccccgagctatcctgtttaaggttcttgcagatgctgttggtcttgagagtaaacttgtagtgggtctacctgatgatggtggagttggatttgtggattcctacaaacacatgtcccgggttgtttcactgaactctatggaactgctagttgatcttatgcgatttccagggcaattaatcccgttctcagccaaggctatctttatatcgcatatctctgctgctggcgagagtgattcagccgaaaatgactcatgtgattcccctcttgagcccaacagtcctctgtatggattatcagataaagttgaagctgaaggtgcattttctaagaaggtactggttgcttggttctttgaaacagcacatcatgcagcgagccaaatattgcaaatgccttttggaggcgaagccagagaagaggagttgctgaagaacctcgcggtgctagttcaagtttcttttaccctttttgtgaaccttcttattcatttgacaagccaagaacacacttgcagatcagatggtctaggtggtgcatcaacatctaaaactcgaagaatacggggaagaagcattagcatcacgcctgagattggagatgacattgtgagggcggttcgggctatgaatgaaacactaaagcaaaatcgcctccaaagggaccatgttaatgaaggttcaccctcgtatgttggggaggaccaaaacaatgcaagtgattgcccaaataatgatgatacatctggaggagttgttgctaccaacaatggcccaaggaaccgaaatggttccactcagaaagctatgtcattgccttcttctcctcatgaatatagggcgcaaatttctgaaacaatcaatccttgtgattttgtaagattctttggagaggttttccgtggtatatggaatggcactgatgttgctatcaaagtatttctagagcaggatctgacaactgaaaacatggaggatttttgcaatgagatatatatcctgagccttctttttaatcataatatgcacactaactttgagaacttcacaatttcctttcagccggctgcggcatccaaatggggtttgatgtgcatacaccgcatgaagatagttcacagggacctgaaaagtgcaaattgcctggtgaataagcattggaccgtcaagatatgtgatttcggcctttcccgagtgatgactgatagtcctatgactgacaactcctctgctggcaccccagaatggatggcccctgagcttataaggaacgaaccctttacagagaaatgtgatattttcagccttggtgtgatcatgtgggagctatgcacattgagtcgtccttgggatgggatctccccagttcaagtggtatatactgttgcaaacgaaggttcacggctcgagattcctgaaggacctcttggcaagttaattgcagattgttgggcagagccccaagatcggccgagctgtcaggagatccttacccgcttgctcgactgcgaatatgccgtcagctga

SEQ ID NO: 67680 - DNA, 346 bp, Oryza sativa
  Clone ID: PAT_MRT4530_68513C.1
cccacgcgtccgaggacgcgtgggtccgtatcctcctacagatagcggcggctgcctagcattctccgacgagctacaacgccgagtggccgccccttgacagtacaggatggtggcggccacggcggaaacggcggcctagtgcttatacaccactaaggatgcactacagcgggaacaagccggcgtcatccgtcttggaggagggcatgcagccattggttgcctcctggaatacggctaccaatgggtgagcaccccgccttttgggatgcatcgcaacctaggaggctcgatctattgtcacatgttgtctggagtaagcgctcacatgggcgttgaggga

SEQ ID NO: 67681 - DNA, 428 bp, Oryza sativa
  unsure (1)..(428): unsure at all n locations
  Clone ID: PAT_MRT4530_68514C.1
cggntntgtgccccaanncgcccnatgtgtgtnagggngccaanaccncagntccnngcaantttgggcaccgttgccganccancaaggctgattacnccntggncntcatcntgtnccgccgtncaaggganaaaaatcnctggacancttancatgcncnacnaaaagttcatcacagctttagcattcagtttcggtcgcncatttgnncttgcagcccgntctggcnctgaaancgattgntcncccgtttntccngnacaactaacttgtccaccnctnggttcnagataccctgccncaaaattgcncggttntttatgtnggaattgttatgtatgtanccgtttgactttatgcnatgcntgaactcttcgggaaaaaaaaaaaaaaaaaaaaaaaaaaaaaaaaaaaaaaaaaaaaaa

SEQ ID NO: 67682 - DNA, 1722 bp, Oryza sativa
  Clone ID: PAT_MRT4530_68515C.1
atggtgaagcggcagcgggaggaggagccggcgacggccagccaatccggcgacgacgattccaactccgacgagtggaaggactttctaaacctagatggtggcgaagaggcggcggaggtggacgacgactgcaacctggcgccgccggagaaggatgcagaggcggcgaaggcgagccaatccggcgacgacgattctaacaccgaccagtggaagggctatctaaatctagaagatggcgaagaggcggcggaggtggacgacgaccgcaacctggatcagccgccggagaaggatgcggaggcggcgaaggtggacgtcgaccgcaagctggatcagctgccggagaaggatgcggaggcggcgaaggtggacggcgaccgcatcacggcgctgcaggagaaggctcgggtgcgcatcctcgacttcctcccgatcaagtcggtgatcctcatgggttcgctctgcaaacggtggcgggagatgtacggcctctactggagggatgtcgccgtcgacgtcgagctccccaccgacggcgatgcgctgagcaagctagaggaacgcgcggggcagcaggagccgaaacgccgcctccgctacttcttcctcctcgtcgtcgagagaaaaaatgttcagagagaatacttcaattcctgcctcgaatacgccggcaagtgctctcccgaggtcatccacatcagtgatcgaggaggagcgggccgcaagtttaagatgcacctgacgagcaaacagctcgtgcgcctctcgataatcggcgtcgcgttgggtcatttccagggcaagttttgtgaaggcgtctccttccccacgctcgaggaaatccacatcaagaactccactatcaataaaatggacgacctcaagaatctagtcggcgcgtgccccatcctccgcgtcctcgacctgcgcggatgcaaaaccatcacccaaatcgacgtcgacaccgctggagagcacctgatgagcctcaccgtcatggactgcgaacgcgtccgacggctgaccgccggcaaacacctgcgctcctttcgctacagcggtaacttcctgacgtcactgtcccttccggacaacgactcgcttgccgacctcttcatcggcttcccgagaagccaatctaccaccccggggcccgaaaattcgttcaaacgcctcccagatctctcgaacctcaccttcctcaccctgtgcagcacttctctccgggctgtaactgtggcgggtaataccattcagacaaacttgaggagtttaagagagcttcagttgctcatgttcaaattggaaccgatcaacctcagtgacgttcgtcgattcctgaacacctgcggctactaccctcagctgacgaagctctttgtgcagctcccagaaagagattgcacatacacggagaacactagctcagagaatgtggagggggaacaacaggatggcttcgaaaagcttgatgtggtaaagatgacgaacttcaagtacgactggaatgagattcggctgctgcagtttctgttcaagaaggccaaactcctccagaagctgatactagttcgtcccataccagtaccggtagatcgccccttccgactccaggttcccgcaaatgtccagctaactgattgtgctgatgattctacagtcaagattgcagttcctgcattaggggatcacactgtaacatctggattcgagtga

SEQ ID NO: 67683 - DNA, 1171 bp, Oryza sativa
  Clone ID: PAT_MRT4530_68516C.1
atggccagcagctggaataatccggccatcttcctcgccgccgcgctggcggtggcgacggcggcgcaggtcgtcacggccggtttcaccacagacttgtactggcagcaacagccggcgcctggtgccgtcaccccctacaagacatcggactggcacgacggctccgccaccttctacggcgacccctccggcatgggcgacgacttcggtggcgcgtgcgggtacgtgtcgaacgacatcgtgtcgctctactcgacgaagacggcggcgctgagcacgccgctgttcgccgacggcaacgggtgcgggcagtgctacgagctgcggtgcgtcaagtcgccgtggtgcaacccggggtcgccgtcggtggtcatcacggggaccaacctgtgcccgcccaactggtacctccccaacgacgacggcggctggtgcaacccgccgcggcaccacttcgacatggcgccgccctccttcctcaagctcgcgcagagggtcgccgggatcgtgccggtgcagtaccgccgcgtgccgtgccagaggaccggcggcgtcaggttctgcctccaggggaaccactactggttgctgctctacgtcatgaacgtcggcggcgccggcgacgtctcctccctctccgtcaagacctccggtggcggcggcgcctggatccaggcggcgcacaactggggcatcacgtaccaggtgttcgccgcgctggacaactccgacggcctcaccgtcaagctcaccacctacagcacgccgcagcagaccatcatcgtctccgacgccatctccccctggtggatcaccggactctgctaccagggatccaacaacttctactaatcatcaatcgatcgatcatcagatcgagttcaaagttgcagtggttcatctcttcattttgtttcttcttcttggcttgctctgctatgcgatgcgatgctagctattgtcaaagttcatggactctctgtttctttcttttgttcatagaacgggatgcatttctagttcaatgtttatgctaatccatcttctgttgagagaattctttttccctttttcaaaactttcaaaaatggtggattgattatgatgtatacttgatctccgcataagttcagtacatatatatatccctgaaaacaaagtttggttt

SEQ ID NO: 67684 - DNA, 432 bp, Oryza sativa
  Clone ID: PAT_MRT4530_68517C.1
atggagctcttccttcacaattttgcatgcataaatccatcacaaattaaggcgggccatataagcggcgcctgcaaagatcaatctttgcaggcggaccgccccctccaccccggtggtggcccgccggcggcgacccagtggatgaggttcttggtggcgctaggtggcccgatgagctccgcgctaccatggcttgtctacaacctcgccacgcaccgacgcgccgtgtccgccttgcgggaggagctcgcacccatcgccgcacgcaaatccaaaggcgacgatggcgccgccgccgtcatcttcgagtctcaagagaccaaacacctggcgtaccagcaggcggcgctgcttgagtccctgagactgtacaccggttgttctgcagatgaaggatggattcatggtgaaggtgacgaaaatacatga

SEQ ID NO: 67685 - DNA, 182 bp, Oryza sativa
  Clone ID: PAT_MRT4530_68518C.1
gaaaggaaaaattttcacaaatcatgttttcggaaaatcagtcctgaaggtttggccatttggcttatcctacagtcgagatgactctgataccaacttgtcacgcccagaaattcattagtaatttccgaactaatttgtgcataaaatcgtcgtccagtaatcagccgaggtacacaaac

SEQ ID NO: 67686 - DNA, 152 bp, Oryza sativa
  Clone ID: PAT_MRT4530_68519C.1
cggtatcggagctttgcaaggtggtggcgacggcggggggtggaagcggttcggatacggcaaaggcattggaggtttgcaaggcagtggatgtgatgcacaaggaggtggcagcgcccgtggatctgatgcaggaggggacagcagcgtag

SEQ ID NO: 67687 - DNA, 276 bp, Oryza sativa
  Clone ID: PAT_MRT4530_6851C.1
atgcaaggagaggagaggaagaggacacaggtggtggtgggcaagaagcagggcaggcagagaccgaaaagggcagggggggagctttggaaggaaggggattttgcaggcaaagcagcagcactgacacctttctacttcctccattcctgctatgttggcacggcgctacgatacagtgaaaaggaagttcaggtccttgaagtaggagtagggtctggactctggagagacagaggagcaacaacattactggcgggagcagcactgcactag

SEQ ID NO: 67688 - DNA, 651 bp, Oryza sativa
  Clone ID: PAT_MRT4530_68520C.1
ccacgcgtccggcggcgggagggaaccagcgatgcaggcactggcacgggcggcgcgggggatcctgccggcgacggcggcggcgcctgcggcgcgagtgcagcaggcgcgggggatcgtggtacatgtgaaggacggcaacctggagcgcgcgctgggggtaatggcgcgcaagatgcggtcgagcggcatcgagaggctgatccgggcccggagccagatccaccaccacgtcaaggactcggagaagcgggtgctcgcccgcaaggccctcatgcagcgcgtccgctcccaggagctcggcaagaagctccgcgacatcctcatcaagaagatcaggggccagtgagtgcatatttcatgaggtggcaggaggattaccggtactccatggtcattttaatccatacccagcggtgaactgtaggaaatgaacggatgttttcttatttggatccattcatatataaaaaaagaactcccacttttgctgtcttgtatcaaaaagtggtaaactgaggattttatcatggcataatatttagtatctctgattggactatttgagaatgtgttacttgcgtactaatgttatatggaagtcaaaatgtctcataatactaaaaaaaaaaaaaaaaacacaccgcaaca

SEQ ID NO: 67689 - DNA, 411 bp, Oryza sativa
  unsure (1)..(411): unsure at all n locations
  Clone ID: PAT_MRT4530_68521C.1
tttgntgccgctcttcttctcaactgtatgtgtatgcattctataccttctttacaccattacataatgcttaatgcacataacatgataccaaatcctcctcctcctctatggaaaatattcacacacaatacccttatatgtacttattattaggaaagttgcgtgcattggcataaattgcagctgggggcaggttaagaatcacaatgctgagcagcgaggaaacaaaacaccataatgggacagagcaaaagcttccgaaatggagcttttaggcagatggcttctcccacttgatgggcttcaccacctcccatgtgaagtctgggcgtcccctccgtagtgacccaagnngtccgtcttgaggtagcgtccgctgccgcctttcttgaggtcaaggttgatgat

SEQ ID NO: 67690 - DNA, 2310 bp, Oryza sativa
  Clone ID: PAT_MRT4530_68522C.1
atgcctggatggatgattggcttgcagctcttctggaatgcgtggatgatccggttggcaatactctccagcttcgtggcacaactcctcctcgtcttcctcgccgatgttcgccgccgtaaagccacaggcatggagacgttggtcctgtggctggcgtaccagttggctaattgggccccgacgttcgcgcttggcaagctgtcctccatcggcggcagcacaccgtcgtcccagtcggtgcagctggtgacgatctgggccgcattgctgatgttccatgctggtggtccggacaacatcacctcctactccttggaagacaacatcctatcatggcgcgacatgatagggtttttcatgcaggtgttgggaacaatctatatactgtacaagaatgtattcttcagtagcggcggcacgattgtccgggtgtcctcatcagtcatgttcatcatgggcattgtcaagtatggggagagagcattcgctctgcggcgcgccaagctagagaagatgcgaagttcaagccaaaaggaggccgagcagaagaagccaataaaactaagcaatagcatccgaaacttaaggcgtataggccgcaggaagatggacaataacgagcaaatcctgctggcggctcatgacatgctccatatcaccaagggcgccttcatcgacaatatggcttacgagcatgatgtcgacaaacaagagattgtccgccctgaaacctggaatgagaatgagatgttgtacgatgtggtggacatggagctctccctcatgtatgacatcttgtacaccaaggcagccatggtccacacatggggtggctatgccatccgtttctcctcccatttcatcacatctgcaatgttcttgctgttttggtctcagagcaaggaaggtctgcagcagcctgacgttttgatcacctatatcgtactgggtggcatcgtcatcctggatatcaaatggctcctcagagcagtggcctcgacatggacctattccttcttgcatgataggccacgctcctggcttcaccattcccttctgtgctcagggaaatggcgcatgattcgccgttccatcgtctccctggatccgtcgaggttcttttccaaggatcatccaacaactagctataggaggtggctaggaatcattgggcaatacaacttgtttgacgagtgcactcgtgacataacatggaagttgaagatgtggaaatcagtgttggaattagtttcactggatgaccgttggatggagtacagataccacaactcgttgggctttcatatgttatgctatcagtcatcagatgttaggaaccttatgttcgaaagtatatgggaatgtctcaagtcagcgtacccgcctattattcctgacaagcagccgcccatggtgcccgcattggaattaccagaacaagtagcggcggtgttggcggaaccgcaagcagcaatgcatcgggaactagaagaggctctggactttgcacctgcattccaagagaccatccttatcttgcacatcaccacagacatcttcctcttgatcagtggtgaatatgcatcatcgttgcggcatgtacgggcgatcaaggcactgtcgaattacatggtgttcctcgtcgtggtgcgcccaagcatgctaccaggccttaagctacgcagcctgtacgaaggtgccctcaaagcactgaacgaaattaagggcaaccaattacaatcttctgttaataacagcgtggaaggaaagaagaatctcgcccaactcctaatagacaaggagaaacagcccaaacccatgaggccgatgaatatcagcaactggaggccaggatatagtacccacaagtcgaggccagaactcgcaagtgctcttttcgaccagaatataattctctctgacggaactagcttcgccttggcgctgctaagtcgggtaatgaaaatcccaggagaaaagtccaacattacgacgcccaaaaccttcagctccgaatcccctggcttcgataggtataaaagacttaagcagttgattcctgaactgaaaaaatgggacaaggaggacttctctatgtcggaaatgctggaacatatcttcatggcatgggtgcgtcttctgatgtttgcgtcggtccgatgcacaagggattcccatgccaagcagctcgcctgtggcggcgagctcacaaccatcctctggatcctcaatgaacatgctggcgtatttcgcattgatcacagggatggcaaaaagaaaaagcctgaagagttcttttcctactaa

SEQ ID NO: 67691 - DNA, 222 bp, Oryza sativa
  Clone ID: PAT_MRT4530_68523C.1
atgtgcgatctggcgcacacagggacctccgtggagaccgcagagacgagaggatcagaagctagacgcctcgtggatcgcggactgccgccgtggatggagcggtcggcggaggcggcggcgcagggagcattccagaggcggaggcgcggtcaccgggagcagtcggcagaggtggcggcgcagggagagatccagatgcggaggagagcttgccggtga

SEQ ID NO: 67692 - DNA, 2264 bp, Oryza sativa
  Clone ID: PAT_MRT4530_68524C.1
acaggcaaacaaaactcataataatttacacgcaaaagactctaattacacagcaagaaaagaaaataaattggagcattgccaacacactgctcgatggttttttttgtttgtatgtcctggatctcctgttctatacacttcctatacgcccaaaaagtaaaaaaaatctgtaacaaattcattctcttaatcctatctgctcccaagtcccaaaccaaaatcctgatcgatgaaacctaacaaagaccagcaaagctgtgatgaactgctgtgatatgtacaaacaaacggcgaaaatctcaattcagcagcccatgcccttgatcaccaccggccatcgtcgccgtcgccggctgcgtgccgtcgtagttgagcagcgcgaacttgacgttgagcccgatcttgccgccgtccttgacgagcttggcggcggtgaccagccagtgccccggcacgtcgtgggggcccttcaccacctccgacatgtcgacgaacttgagcagcttcctcgactggagcggcacgggcggaccgtccgggtacacgccggagttgagcagcgccgcgggcgccggctcgttcctcggcggcgccgccggcgcggcggcggcctgcagctgcgtgaacggcgagctcagcgtcgtgctgatcgtcgtcaggaagctcccccgctgcgacgccgcgggcgccgccgcccactccgtgcgctggatggcgcacccggggacgtgcgtgtagtgcagccggaggtggagcaccttcctcgaccacgtccccttggtcaccagctgcgcgccggtgacgacgaacacgccgcggccgccggggacgcgcttgagccactccgggttgtagtccaccttggacgtgcagacgcaggagtagctcttccactggatgggctcgatgtacccggcgcccacctcctccgactcgcgccactccgacatggacgacgacagcgagtccccgagcatgctgggggcgctggacaggtgctggacgtggatggccagccggttgcacttcctcccctccaggtataaccgtaagcctactacaggcttatgagaactagatacctgagaagtgctaacttgaagtttgggaccaagaaatctgaactgcaatgaaggataggagccttttctcttttgaggcccaaggataagctcgttgaacaaaggcgcccattgtaggggcacttgaaactccaagaaatgttgcaagtcttcaggatcaggtttatagcgaagatacaaattaatggcatggctgaggtaaccactaccaggaatgccggtaagaagagaggtgataggaacaaatttaaacattatagcatcaggaacccttggaacggtttgtaaccatttggaatggctggctatagaggcatctccacctcttttcgagcatgtaattgtcaggccatctttggttgatgattctgagtagctagaaagatgtaggttattaggctgctgttccatcctgacaaaaacatcaggcaccttgctcttgccatccctggtcttgcgatgtatcggggaatgattcctcccatcagaaaacaggaaatcaccaagatcttccaggtgtagctttaggtccgctgatgaaatggttgaagaaggactttgcttaacacaaatgacatcctgacccccaactgccatttcaacaattatgtgtgtcccataagttttgataaaccgtgatagtgctgcagggtcccatttcggtggaacagcacttctaacttcatctcgaagaaccaatggagaagtttttaggtgcaacttgtacaacgagatgaaatatccatcaaatgctagatgtttagtctctttagcatctgtcatccaagctccacttaaatcgaaaagagtgttaaaatagcctgaaggcaccttcccttggactgaagatttctgattaagtaactcggacattctttgccaattctgctcgctgtccgtagagttcttctccttcttcccaaagaagatctcgttagaaacagaaatggtgaactggttgaactcgaggacgtcggagcggaagcggatgcggtcgcccttgtcgacgccgacgtcgcgcggcaccccgcgtagcaccgccgccgcgccgccgccgacgccgccacccggcacgggcacgtccctggccccggcctcgtcgagctccaccagccgcccttccttggcgaacttgagcctgaagtccgacgtgaggtcgaaccccgctcccagcgccat

SEQ ID NO: 67693 - DNA, 360 bp, Oryza sativa
  Clone ID: PAT_MRT4530_68525C.1
ccggattcccgggtcgacccacgcgtccgcgatacgccgctccgccccgccgccgccgccgccgcgtccgcgtccgccgccgatggggtacgtgctgtcggcggtggcgagggtcctggagcagccgacggcgtggggcgcggcctgcgagatggccgtgctggccggcccgctctgggccgccgcgctcctcggcctcctgctcggctgggcgtggcgcccgcgctgggccgccggcctcgtcgccaccgccgacagccaccccgcgccgctgacggtctgcacactcgagttctggaggacccagctccccgcccgcatccgagccccgctcgcgcagtacgttggcgccgccggaca

SEQ ID NO: 67694 - DNA, 321 bp, Oryza sativa
  Clone ID: PAT_MRT4530_68526C.1
atggagccgctgcggcgcttgtcgccgcgcgcgcgcgcgccgcctcgccggaccgccgtcgccatcgccgccgctcgctcactcgcccgggctggcgatttcatcggcgcaagatcaatccgagccatccatcggatcggatggcaaagatcaaccccgcgtcgggccgtagccgtcatgggccgcgccgatctgggccgcgtccgcctaagcgccacgcgcgcacataatgggccggtccattttgggctggccttttcaataagagtgggccttttatttattattaagcccgtgaatttaattttctcagaatttatt

SEQ ID NO: 67695 - DNA, 1008 bp, Oryza sativa
  Clone ID: PAT_MRT4530_68527C.1
atgtcgtcgacgatgccggcgcagggcggcgtgcggcaccaccggacgtgccgcatgtactggtgctaccagtgcggccgcgccatccgcatcatctcctacccgtccaccgacgtcttctgcccgcgctgcttcggcaggttcctccacgagatcgacccgccgccgcgccccgcgccgcccccgccacacttcttcccgcagccttaccacccgcactacgacggccacccgcgccgctggctcatatacggtggcgaggcgccccccgtggcggcgccgggccgcgcgttccgccagcctgcgcccgcggtgccaggacgcgcgttccgccagcccgggcccgcgcccgcgccctctccagcgccggcgccgcctcgccgacgcatgccgtccccaccgccggtggcgcggcggccgtctactccaccggccatcgaccctgggaactatttcaatgggcccaacctgaacaacctcatcgaggagctaacccagaacgaccggccggggccggcgcccgcgccgtcgtcggccatcgactcgctcccgacggtgcagatcaccggagcgcacctgtccgacggctcgcagtgccccgtctgcaaggaggacttcgagctcggggaggccgcgcggcagatgccgtgcaagcacgtgtaccactccgactgcatcgtgccgtggctccgcctccacaactcctgccccgtctgccggtaccagctgctgtcctccgccgccgccgggtccaacgccaacagccgagctcgccgcggcagcgccaacaacggtggcggcggcggcggcggcgatggccgggacagggagcagacgatcgtgaggtgggggcccttctcgtggatgtggccgccgcgggggctcgaagaccccgacgacgggtgggagtacggacggcgaggaaggccagaggcgggcgacgccggcggtagaatgtgtaacgaccatggaaatttccgaaagttggtgacaatgatggatggctga

SEQ ID NO: 67696 - DNA, 265 bp, Oryza sativa
  Clone ID: PAT_MRT4530_68528C.1
gggctgaggcttccaacaagtttatgttgatcaaccttcagttgaagatacaatctcaatactccgtggattacgggagagatatgaattgcaccatggggtacgcatatcagacagtgcacttgtggcagcagctcttctctcagaccgttacattagtggacgatttctgccggacaaagcaattgatttggttgatgagtcagctgcccaattgaaaatggagattacttccaagccaactgctctagatgagattgatcgt

SEQ ID NO: 67697 - DNA, 492 bp, Oryza sativa
  Clone ID: PAT_MRT4530_68529C.1
cgaaccccgccgccgctgccagatcggaggcgagagctccgatcccaaaacccccccgcccctcggcgatggcgccgccgcgccatctcctcctcctcctcctcctcggcttcctcgccgccgcctccctcgcgttcacgctcaccgccgccgtgtacgaggaccaggtcggcctcgcggactggcatcagaagtacatcggcaaagtaaagcaggcagtctaccacagtcagaaaagtggaaggagacgtgttgtggtgttgacagaggaaaatgttattgcttctcttgatcttcgttcaggagatatattttggaggcacgtcattgagaagaatgatcctgtggatgagcttagtttatcacttggaaaatatgttgtaactctttcttcgggaggtagtatattgagggcatggaatcttcctgatggccagatgatctgggaaactactcttcaagtttccaaatcatcaaaacctcttctgcatg

SEQ ID NO: 67698 - DNA, 664 bp, Oryza sativa
  Clone ID: PAT_MRT4530_6852C.1
ttactcatctctcttctctataacccttctttctctctcccctgctctacagtctgcaaggagcggtggcgagcggcggcgcgcgaagccggcggggcgacggcaaccggagcggcggcgcgccaagccgacggggcggcgggcgagcggagcagcagcagcgagcccgcgggggtcgaggtcgtctgggaaagcagtggcgccggccttggatcccaacggcaaggtcgcgctcggtcgttgcgcacctctcccttcgcccgtcgccatcgagcccccacccacggcgcccggccatccttggcgaggagctctgttttcagcgggtgtcggcggggttggaacggaggaggaggtcgttctcagcatcaatgccgccatctccaccctccaccatcaccgccaaccttccccctcccccccactgccgacctctcctcggcgtcgagaaaatcctcgcccaacctcggcaacaagagcgacgagcggcgagcggtggcgggaggagataaccagccacagctgccgcgctcgccggcgacctccttttctgcctcctcctcctcctcctcctcctccagccacctccgtcgcccgcggcttgccgccgccgccactctgccgacatgcttcggccgccgtcgtcgttgcgccgcgacgcgac

SEQ ID NO: 67699 - DNA, 267 bp, Oryza sativa
  Clone ID: PAT_MRT4530_68530C.1
atggtggggagggtgaaggccttccgtagccctgacggcaattttagtgggcaacatatttatgcattgctagaagctgtatccgggcagaccccaccgccacgtgcgtttctcgaggtatgcatgtttctagcgtttccctccaacggtggccaggaagaaaattgcatgcgttatgcggatcgatcctctaaatatgctaaggcttggaggtactctttccatttcaaaatgtatgatgccattgacttttcgcataatgtttga

SEQ ID NO: 67700 - DNA, 477 bp, Oryza sativa
  Clone ID: PAT_MRT4530_68531C.1
atggcggcagtagcggtagtggaagagacgacatgtgcgttaactactcccctcccatactctacctccgcccctgcctccactggaggcggcgctggaaccaaggcctctggcggtggcgttgaagcacgggggcgcggcggtggagcatgggggcgtggtgccggcgacgagcgacgacgaggaggtgctgcccgggctgctctatttcatgctcctggcctccatgcggcggcggtctctacaggcggcgtcgacgacctccgcttctttcttccgcaagctaatgagctggtggtcgccaccgtcgcccgctggtggtcgttgccgccgctcctttttgcaatgctctctctccaaaaccgtgctccaacaacgacgggcaatgtttggatacaaattaatcgtcaaagctatcgcattcacaggaattcagttgcttcctcgaaattttgcaagtctattgtgatattttaa

SEQ ID NO: 67701 - DNA, 294 bp, Oryza sativa
  unsure (1)..(294): unsure at all n locations
  Clone ID: PAT_MRT4530_68532C.1
aacaatttgtgcttcatagcagttcaaaatattgatattaaagtacaaaagaagtaaagaacagtatgggtaaggcaatatcactaataggggctatatcatgacagaatcttccaatgccatccattatttttattctactaggtgaaaatatacaaaatatcaatcactcatcagtaatgggggctatatcactaatgaagttcccatgttaccggccattgcatgatgtcaagtatcacataaaagggaacgccttgatctgatcacctgatcaccttttcctaagagaan

SEQ ID NO: 67702 - DNA, 288 bp, Oryza sativa
  Clone ID: PAT_MRT4530_68533C.1
atggagatgtcgtgttggaggctgctggatcggtaccaggagccacatcactacagcagaggcggctcttcattcttgctaaaaggttttatgatgaggaaacttgctgcaaaggcatactcgttcaaggggaggctacctacaaatcctgacctaacccgtactgattgtaactatgatctatatattaatacagacgtgggcatgcgggaggctgcatgcagcgttacgtcactgagatgtttccattgtactttggatgagtttcttgaagatgtcgttgatgaa

SEQ ID NO: 67703 - DNA, 610 bp, Oryza sativa
  Clone ID: PAT_MRT4530_68534C.1
ccggccggggtccgcgtccccttccaggagggagttagggtttaactccgactgaacgatcccccccgccgcgcgtcgccctcgccggcgtcgatccgatacggcgtgcgcctggtcgctgcaccatggggtacctgcaggaggccagggagaatcacgtcaagaagaaggtcgaggaagctttgcggagcaaaatgaagcagaaggcccttaaggagtgtgatttctactgctcaaaatatgctgagtgtgctcgaggtagaactttttcggtggtatggcaatgccgcaaacaagcaaaagagttgaatgattgccttcatcaattcacaaatgatgcagtcctggaagaaatgaagaaggcttacatggttgagcaagagagcaaggaaaagaaccaataagcattatgcaatggccaatggccaatgggtttctccatgcttgtacgtacattgctccttttggaatttgttagttgcttattggtcatcttaattgatttgatgccgagttcctggagacttgaaaacattgattttgttccacatgcataatctggtataacatcaaggtccctatgcgaagaaaaaaaaaaaaaaaagcggcc

SEQ ID NO: 67704 - DNA, 419 bp, Oryza sativa
  Clone ID: PAT_MRT4530_68535C.1
aacaacgtcccacatgggggggggggaaggaaagaaaaaaaggaatcggaaaaatatggaagcttggtagtaaacacaattactacttgacaagatggaaccccaaaggctttatacaatggggacttcacaaaaggcccttgaaaaaatctggaaaaaaaaccttgccctgccccatgtttcttacggggggaaaaaaacttcaattaaaaccaggaccggacattttttttttttggggagggatcttcagaaaacccttcatgggggcataggcgggaaaaccaatagccacagggggccccccctttgagggaatgggggctcaagccaaaaaacaatggcccccatcccggggttgggtggaggaccaaaaaaccttggaaggtcccccttatctggggcccaccaaatttatc

SEQ ID NO: 67705 - DNA, 654 bp, Oryza sativa
  Clone ID: PAT_MRT4530_68536C.1
atgaagaaggcgtccaggttcttgaagggtctcttgtcggccatcgtggcggcggtgaaggcgaggtcggcggcggtgcgcgccaagacgagcgccgtgaggacgcgcctcatcgtcttgggcatcctccgcaacaagaagctcctcctcagcgccatcaacaggaagatccacgccatcgtcagcagcggcggcggcggcggcagcagccatggcgagtacggcggcggcggcgagagctatggcggcgagcagcagcagcacctgagtggcatccaccttgtcggcggcggcggttacaggaaggccgccgtgctgcatagcctgccgagcttcgtggtggagcaggagaggagcgccgtcgtgctgctcagcagcctgccgagcttcgccatggacagggacgtctacggcggcggcggcgaggcggaggcggaggaggagcaaggagtgggtgggaagcagcagcagcagtcggtgatcgagctggcgcgcggcgcggccgctgcggaggcaggcggcggcgcggagttcaggctggaggacgaaatcgaccacgtcgccgacgtattcatccggaggttccacgagcagatgaagctgcagaagctcgagtccttcaagaggctctgcgagatgctcgacaggagctaa

SEQ ID NO: 67706 - DNA, 520 bp, Oryza sativa
  Clone ID: PAT_MRT4530_68537C.1
ggggtggtttgcacgtctccatctgcatctgccccggctgtaatctacaccatcaatttgtttccttcaattaattggaggatttcaattcgatccatcatatccatgcgtcatgcatgcatccggattaagcagctagcagaaacgaatttgccaagaaaattaataagctcgatcagctacaaaatatggagtacagctaaacaaaaacaatttaatgaatcgattaatcaacggctaatatatcgattgatgtgtactgatgaccacttttagttcgattctagctagtagcaagcaagtctagcttgttaagtacttatgcctttatatggggccatgtcgaatataggcgtacaactaaagaaacattagttagttaattaatacatgtcacggtgctttaacttaattataatcttcatccacgaacgtttgtacgtacggcatactacacgttgaactggcattataatctttgccttttccgacacatgtacgctagtgattaattttgtgg

SEQ ID NO: 67707 - DNA, 420 bp, Oryza sativa
  Clone ID: PAT_MRT4530_68538C.1
ccacgcgtccgggggcctgatggaggaatcagtgcatcaagatattgttatatgggaggatttgatgcaacaagcaatgttgcagcaggatggttatttgggataccaatacgtgggactcattctcatgcattcgtgagctctttcatgggtcttgatgacatcattgacaggacactcgctagttctgatggttcaaacaaatgcgaagactttgtttctctggtgcagaattggcttgccaggattaaggatgctggttcattgcgtcgcccccttcgtgaaacaaatctaagtgagttggctgcattcacgtcatatgcgctggcatttacaaattccttcctggctttggtggacacatatgatgtcatgagaagtggagtgccaaacttctgtgctggtgctttagccctcaat

SEQ ID NO: 67708 - DNA, 238 bp, Oryza sativa
  Clone ID: PAT_MRT4530_68539C.1
acagtagtatggaagcagaaagcgtagcttgccagtactacactgaccatacacacagggtacatatagcttgagttcaccgcaccatacagcctacggatcgtacaattatccaacacagtactagctggctagctacccacatgtgtatatactatatggtacattcggaactacatttgtccttgaagtagaaccgacgaacctacggttaaacacttgttggggagaagaaaaa

SEQ ID NO: 67709 - DNA, 541 bp, Oryza sativa
  Clone ID: PAT_MRT4530_6853C.1
cccacgcgtccgcccacgcgtccgcccacgcgtccgcccacgcgtccggtcaaaatggcaatgatacggggagattgatcgatccagtggccaaaccaatggcgatttggtctgaaacaatttttcgtcgtcagcgatatctgtgcatagataattctcataatgttctttaggcatgtggatcgacaaagggaatcagttcatcatgcatatgaacctttatcgctggcaatctcacgggcgaaatatgattaattatctcttttttttttttttttttttttttctgaaagaatacatgtctacagtgaagtagctgtagttttttcgtgataaaaaaaaaaaaaaaaaaaaaaaaaaaaaaaaaaaaaaaaaaaaagaaaaaaaaaggggcggccgccctttttttttttttttttttataccacccaatattcaataatataacaaaaaatggggggcggctttttaaaggattccaactttccgggcgggggagggctagaattttctttttttatgggcccacaaaaagaaattt

SEQ ID NO: 67710 - DNA, 930 bp, Oryza sativa
  Clone ID: PAT_MRT4530_68540C.1
atgccgtcaactccccttcaaggtcccctaccccgcgcccaccagatcagccgaggtatcgggagttcgggacatggaagcggcggaggcggcagcggcggtggcggtggcggtggcggtggtggtggcggtggcggtggcggcggcgtcttggccgttgggggcggctccaccgacgacggccatcggcaccgcctccgcagctttttctctgagctggacaggcgccgcggccggatacatccatcttcggtgaagttctccggtggagtcatggggtgctctctagtctctacagcacgcccatgttcctgcggccctggaggcgacgccgtcgaccacaacagcgatggccacggagctgagggatcatgggatgagcaaactacagtcctgctcaagaatgagagcatctttgtggtccagcaaagagtaccggctggtactggtactgctcggtgccagtacacatctggccgttcattcctgtatgggccaaacttcttactaaacttccttttttttacgcaaaaggtagagaggctctaccttattaccattgtattaatggtggtcaatggtttacatggccaagtggccaattacaaaaggaaaggaagagagaaaatacagagagttgccaaagtgttcatgaggaggttgagttctgtctgtgcctggtttgataacactgggtggagattaatcgctcagaattgcaccgaaaggtcgcttcccagcgaaactttggttgatgctattgttggttccaatgctccacagatcatcttccaaaccggtgtatcagttggtcttgctaggataggaatctcgttctgcaggtgctgtgctctgagccagtggaagcatggctccggggagccagatagcagcttgcttgcaagtttcattagtagcgacaggttgtga

SEQ ID NO: 67711 - DNA, 181 bp, Oryza sativa
  Clone ID: PAT_MRT4530_68541C.1
tgtgtcacggaatagaaatttcattcttacaagtggaaaggataacgtgcacaacctttttgatcctagaacaatggaagtttgtggaaaattcaaggccatgggtaacagagtgattgaaaaaggatggggtaccgacgatcctacagggccattcttcgtcggtagtttcaagttcatg

SEQ ID NO: 67712 - DNA, 102 bp, Oryza sativa
  Clone ID: PAT_MRT4530_68542C.1
tccccacaatcgaatcgaatcgaatctcctcctccaggctcaagccgaaacaaacctagccccgtcgatctcctctcctcgcatggcggctcccaagcccat

SEQ ID NO: 67713 - DNA, 930 bp, Oryza sativa
  Clone ID: PAT_MRT4530_68544C.1
atggcgtacataatagtaatcaagctgctaaaagaagacttcgtccgcaaactaattcacgtgctccaagtgatggacaagtttgaaaatgaagatccagatattaaaattgatgtatacaaagatgagataatggaacatgccaagtctctttggattaactggcgtggagatttgcatcgacattttgtgaaaccagcaaaaactatgcagcaggctataaaaaataagccaaaggattttgacccatctgattggcaatggcttgtccaggagcatttttatagcaaagattttattgcagaacttgtggatgtagttagttcagatcctaatctctccaatgttgaagttatggataaatgttacaacggtaataagcggcgtgatcatttaattggatttggtggtggtgtcaaagcaagagataatgaatgggctgagatgaggagagactattatgctaactgtgaaaatagaagtgacactggctcacaaagacgtcatgagaggatccacagtgaaagagatgactatgatgcaaatgaagatgcggcggtggtggcggcgacgacggtgacggcgacgcaggcgacacggcacccggcgcggtgcggcgtcactgagggcagcggcgcggcggctcaaatgcggcggcgcggcggcgcgaaggcggcggcgcggtggaggaagagggggaaagataagggggagaggggagagaggggagggcgggtgacgcgacggcggcgcggcacggcggcggcgatggcgacagcgcgcggcgacgcgacggcgcgacgggatggcgacgtcgacggcgcggcagcggcggcacggggcgcgaggcggtggcacagggctcggggcgacgcgacgggcggcagcggcgacgtgacggtgggcggcgtggcacggggcgcgaggtga

SEQ ID NO: 67714 - DNA, 171 bp, Oryza sativa
  Clone ID: PAT_MRT4530_68546C.1
ggggggaatcaccataagaccttcagaggccacctttttttcataaaaccggcccccaaaaaaaaggaaacacaatttttttagtacccaaatcacccacatgaacagccaataacctgcttcatacaaaaggctaggacccagtccccggtagccagtaacaaacaccgc

SEQ ID NO: 67715 - DNA, 240 bp, Oryza sativa
  Clone ID: PAT_MRT4530_68547C.1
gagcggattgtttcggatgtcggagtcagtgcggaatcggttcggaaatggattaaatttattggatgttacgtagagtggttatatgtgttgataattttagattatccggcaaatggtctatcggataatccggtagaaatgtcggataatctgcatctgccagattttagagataacatatccgcatccgcatctgcatcatactatccgcatccgcatctatattcgccggatttc

SEQ ID NO: 67716 - DNA, 393 bp, Oryza sativa
  unsure (1)..(393): unsure at all n locations
  Clone ID: PAT_MRT4530_68548C.1
ccaagttagtgatgtcctcattacgtctcctccctcacgtaccaaatattggattcctccttagtcggcacaatgagtggttgtggaaggattagacaccgatggtcgtgagcggcgctgagagaagaaccgatggtggccaagcggattggctagggatgaggcttcatgaccaagacatggcttgcgatggagatggagagggaggccggagagttgtggaagtgagcgacacgagcaaagaggagcctatagcagtcgccattggcgaagccatagcaagtgagcaacgtcacgaggacaattctaggcttcatggcggcgggggcatcatagaagccacacccacactgatgagacacaatgctcacagtcannnnngtcnnnnnnttc

SEQ ID NO: 67717 - DNA, 138 bp, Oryza sativa
  Clone ID: PAT_MRT4530_68549C.1
atggagagtggatggaggggcgtgaagtcaatcgcacacaaggtgttcgaccgacgggcggaagtggttgatggtatgggccagaagaagtggatgagctcgggcgccatcaacgccattgatgagcttggaaattga

SEQ ID NO: 67718 - DNA, 6162 bp, Oryza sativa
  Clone ID: PAT_MRT4530_6854C.1
tacatagaattcacgtagttggtcaatgttccatgagtttaacaactcgcggctatcaccgtctgcaattttgaatgcgcctggtcgaagacttgtgtgattgtgtatggtccttcccatttgggtgagagcttgtttcgccctgcttggctttgaacccttcggaggacgtagtcgccgatcgaaagtatgcgtgcttgaatgcgcttctcgtggtagcggtgaagggcttgttggtaggcggctgctcgaacggcaactcgtttgcgatgttcctcgagtagatttacatcgtcgtttcgctgctcctcctgttcctcgtcggaatacttctgtgctcgtgtactctgatgtcgtagcttgctggggagcatggcctcagagccgtgcacgaggaagaagggtgtttccttgttagacgttgtcggtgtggtgcgtatggcccatagtagggtcttgatcccttgtagtactatgccgtttgccctctcgacttgtctgttgctttgaggatgggaaaccgaagtgaagcatattttgactctcccagcccgatgcagtcatcctggaagtcggcactgatgaactgggagccgttgtcggtaatgatgcgatgcagtagtctgtatctgcaaaatatccccttgatgaacttgatggcgttggcggccttgatttcccccgtgggtaccgcttcgatccatttagtgaatttgtcgatcgccacgaattggaacttgtagccgccctgtcctcgtgggaatggcccgtgtatatctagcccccagcacgagaacggccaagtaagagggatggtctggagcgcttgtgtaggtagctttctgtgcttgtatgtcaaatgcgtctttgagggtggttggccagaaaaacccttgtcgaaaggctttcccgaccaatgtgcgaccgacggcatgtgacccacagatgccttcatgtatatcgaggaggagttgtctgccgtcgtcggacgagacgcacttgagaagtactccatttggcgctttcttgtatagatcgttgccgatcatgtagtagatttttgctttacgggttattttctcagcctctgcgtcgtcctcgggcaactctttgctgttgatgaatttgatcggtggggtgtgcaagtcgtctgtggtctcgatatcggcgatggcgcgttccgcctctgtggcctccgagctgatgtcgggggcggctgtgttgatctcgctgattgcctctttcactgatggcttcgtcaggatgtccagaaaagtgccgggctcgagtggttctcgtctggatgcacgtcgcgctaggtcatctggctcgatgttgtccttacggtatacgtgtcggacctcgatcccattgagccttttctccagcttcctgacttttgcgaggtacttagataactcagggttagagcatttataatctttgtgtacctggttcgcgactagctcggagtcccctttcacgatcagtcgtttgaccccaagtgcggctgctgctcttatcccggcgagtagtccttcgtactcggctgtgttattggacgccctgaagttgaggtggatcacgtgcttgaattgatctccagaaggagatgtcaagatgaatcctgcccctgctccttggctgttgagtgcaccgttgaacgccattgtccacgtttcgttgttgatctggttgtttgattgattatcaggcatggtccagttagctacaaaatcggcgagtacttgggacttgatggctgttcgtggtacaaagtggacatcaaactgacttagctcgactacccatttcgcaatatgaccgacaacgtctttgtttctcaccacttcaccgagggggaatgaggagacaactgtgactctgtgggcttggaagtagtgtcgtagctttcttgatgtcatgattactgcgtagagcagcttttggatctgtggatatctggtctttgcatcgtggagagcttcgctgacatagtatactggtcgttggactttctctctctcgacgacaattacagtgctgacggagtatggcgtggcggcaatataaaggaataattcttcattaggttggggagcaacgagtacagggggatttgataggtagcgcttgagtgcaataaatgcctcttcggcttcctgtgtccatacaaatttatcttgcttcttcagcagagcgaagaagggttgtccttgttctcccatcctagcgacgaatctgcttagtgctgccgtgcatccggttagcttctgttcttccttgagtcttgtgggcgacttcatgttctcgattgccttgatcttctcgggattcacttctattcctctaccagagacgaggaagccgagcagcttgcccgacggtactccgaaggtgcacttctctggattgagcatggggaaatatcgtcggaggttgtccatcatttcccgtaggtcatcaatcaatgagtcgcttttcttggtcttgacaacaatgtcatccacgtatgcctcgaacagtgtgatgaatgctgtcttctcttcatcctctctcgccatgctgatttggtggtagccggagtaagcgtcgaggaagctcagcagctcatagccggctgttgagtccaccagttggtctattcgaggaagagggaagtgatccttggggcacaccttgttgaggtcggtgaagtcgacacacattctccatttcccgttggccttccgcaccatgactgggttggctagccactctggatgaagtacttctctgataaagccagctttgagaagtttgtcgagctcttctcgtatggcttatcttcggtctggtgcaaatcttcgcagtctttgctttactagcttggcatcgggtcgcaccatgagtttgtgttcgatcacctccctggggacccccggcatatcagacggctgccaagcgaacacgtcagcattgtcgcggaggaaggtgatgagcgcgagttcggtcttgtcggggttggcactagagagaggaacggtcgtgattgcgccgtccggtttcagcgtcttgtttgtcttgctcattttcttgggtggctcggttgtggcgggtggacttggtgtttgctcgaccatgtcgaggctccacttgtcacattgtaccgcccgctttgcgttcccttggatgatgattgttcccttcggccctggcatcttgagcacttgatacgcgtagtgagatgcggccatgaacttcacaagtgcagttctcccgatgatggcgttatacgctgtatcgaatttagcgacatcaaaggtgatctgctctgtccggaagttgtttgcttggccgaaagtcataggcagcgtgattttgcccattggtttggacgaagactggggagtaattccatggaaaggttgatcagtgggtgtcaactcgcttcgtggtattcccatggcgtccaatgtgctggcgaagaggaggttgattgagctgccaccgtcgatgagaacccgcgcgaccttgatgttccgaatagtgggttcgaccacgatcggatagcgtgctctagagcctccgaaaatgtgtgagacgtggaggtcagagtctggatacgctgggtccgactcctgagcggtcatctctgtatccttcttgaccacgcgtactcgttttccttgttccgatgtcatgtgcttctcgagcgattttttgaaaacaaggcagtcttccaaagaatgtctgttcaatttgtgtatgggacaccatgctttccttgcgtcactaccttgtgggtctgggcgcttgggagggttagcatattctgctgcgagtacttctgcttgagctttcctttccgcgttcttgcaatttttttttttgcttgactcaggtgtgtccgtggttgatttcttctcgaccccggtcttcggcttgtcgttcttgcgtctaagtgcatcgtcaacgtgggcgcatcgctcaacaatctagaacagtctccgagtagttgtgatgcgtctcgttgctaactcctgggtagtgtagcgatctctgacaccggacttgaaggcgcgaattacagaagcatcggtgatttcggggattgtatttctgcactcattaaagtgccgaacatattccctcaaggattcacccgagctctgtgtcaatgcgtgtaagtcgtcttcaatcgcgtggcgtttgtaggttccctggaagttggcgacgaactgctgccataggtctgcccacgaagaaatcgagtagggcggaaggtgcatcaaccatgaacgcgcagagccttttaacgcagttggcaaataattcgccaacgcgttgtcgtccgatccgacagcatagagtactgtggagtagacttgaagaaattcttctgggtcagtgctcccatcgtacttctctactgctcccggtcggaacctcttaggccatcggacatcgtgcaacgaacgaccgaaagccctacacccagcactgggggcagtgggttgtcggcgatcgtatgtccttcgtggatgtctgtctgacgatgtggaggaggaagaagatgaggacgacgatgggtcgcttggttctggtgtaggattacgagaacgccggccgtgttctcgagaatcctgtcgtcgccctccgttgttgtcccggcgccgttctctgtcgtcttcgtcatgatggcggcgccctcgactggtatcggccggcgtccgtcgctcacgatcgtcgcgaatatgacggttgtggtggtgatcaccattgtcgtgatgtcgtgaagaaacgtgatgccggggacggttctcgttttcccgtgtgcgacgagcttctcggttaccgtttgggtgatcacagagattgctggtgccgtgaggtggagggctggctcgatagggtgattcccgctgttcggggttttcgccattggcaccagcagttggttgctgttccgggtgggttgcagcggcggcctcttcgaacgcgttgctgaggttggtcactgactcccgtaaccgttccgtctattgtgtgaggtcatcgtgtagaacggggtcataaggggtctccctcagtattgcgttgagggtcctgatgtgctgagccggtgtagacgtcatattttccgccccggtgttagcgcgtgccaatgtgcctgtctcgtcgatagccaatacctcacgtcgcgtacttgtcgacgaggagtcgtagtcctcaagtaggtgcaggactaacggttcggaagaaccgatgtcgataacatcgatgaaacaatctggggtcagcgtcattcctcgttctttgtcttcgtctctaagggtcttgcctggctgctgaaccttgggagatggcatctttgtgacgctgagaaaaaatttacagctcgagaggtcgtggttctttgtcttgtgaataggacaatacacaccacgagttggagaaacacgctgaattccacgctccttgcaggcgcgaatcttggtgcgggcgttgaggaaaacccagcaggcttgcaaagtatgtttcctggatttctgaatagggcaccaggaccctgtcgctttggaagttattctcgtcagcttgtgtttcttgtcggaacgacaaggtttggccgcattagaattcttcttgagttcggatgtcgtcgatgttccgttctctacttcgccgggaggaactttcgacgtggagccgtcttgggttacagccactgcgttctcgtttctggtcatcgatggcccagctgagatcggcatcgtggtgtaaaccggaaagacaatttcgccgacttgagtccacgctagcattgttgaggcaggaagcccgtagttgaggttggtgttgacgctgttgtcgacgaggctggatgacatagtagtagaaccttgagcaccaagtccccctacctggcgcgccactgtcgacgggtgatacccgtagaccggatatagagagtattggggtacgctggtacaagggtttcgtaggctgtggtggtgatgttggctattagattccccctttaggtcctcccaggggatcccttttatatcgcaggtcacgccgtttccaagtagaactcggagacatcggaccctgcacgatgcactgacgacccagtcttgtccgagtaggactctttccatctgtgaactccatgat

SEQ ID NO: 67719 - DNA, 473 bp, Oryza sativa
  unsure (1)..(473): unsure at all n locations
  Clone ID: PAT_MRT4530_68550C.1
ccagcctctgcttcgcgccgttcaaggacgaggcgttcaacgccagccccccccgccgtggcgtcagggcctccgacgtcgcctgcctgcccatctccctcggctggtacggcccagcggaggagaaccggcgactcatcaagagccagtgcttctccaccgagggcacggccaacttctacatgcgccccatcgagggcctcaccgtgctggtcgacatggacacggcggaggtcctccacgtctccgaccgcggcgccggcatccccatccccgccgccgcgaacaccgactanccggcacggacactcggcgccgactccggcggaggcgcaagcgcaaggggcggcacgggtaccagaccgtccgcgtgccgttcgatggagccgccggcgcgcgcgcccgcgcgttcgagctggttcgacgggcacaccgggcggtggggcgcgctgggagttccacctgaagcccga

SEQ ID NO: 67720 - DNA, 616 bp, Oryza sativa
  unsure (1)..(616): unsure at all n locations
  Clone ID: PAT_MRT4530_68551C.1
ggccgcccttttttttttttttttttacccgcctggcgtgctttggttgtccttgtctgtcaaaaactttgctgggtttccttctctgcacctcttttacacctaagcgtcgtgggctgtgctccgtgtgtgaactattccacccagcgaatgaactgggtaacgattcttcctgtccccgnggcggagggtgcgccgttttctatctttgcccactgtgtcaattttttctagcgctttatttcacgttattgctnttccttttcttccccgngtgtccggtgtgtctttccttcgtggaggagcttctcccggccgagcgggccatcttcgtgatcaacgatttggctgttccctctcttgccggcggtggtgctctttgttttcacccgcntatcngcttcntctcttattctcgctggtccctctggcctcggtcttctgtccttttccngccgagtgttgtccctctggcctctgtccttgtntggcgtggcctctgtttcggccttgttggggtcgttggtcccggggttcgtgggcttgccctccccccagtcttggtggcttccggtgtgccctcgctcgtttgttcccccctgggttgttggattgc

SEQ ID NO: 67721 - DNA, 600 bp, Oryza sativa
  Clone ID: PAT_MRT4530_68552C.1
cgatcgagcgaggggagcttaaattcttgacaacaaaaaatagaagcacgggaagatctaacaacttcagccactaaagacctcttgcctacttgattgaggccccttacattccaattcaagatgcagcatgacgacataaagaaaaaacgaagggctacaacatcacgcagaggacgcgcacgacagattagcagaccccgtcgccctccacccccttctcctcaaggttgcacagcgccgtcaacgcctggacatggcaaggtgccagcggggtcctgaacagcaggtcgaaggtgaggcacttcttctccgctggtggcgcgggcggcgcctcaaagacgagagcctcgaacgtgtcagcatcgtcaacctccggctctctccaccgatcttgcatcggctccggaatgtccagggcaaactccttcgggatcttggagggatcgctggaccacgcgagcacctgggtcatgcacgcatctaccggctcaaaccactcgatgaactggcagccaatcttgttgagtaattgcttgattgcttcagcctccacggcgtgagctggcagcccctcgattgctaggcgcacaacatgag

SEQ ID NO: 67722 - DNA, 2331 bp, Oryza sativa
  Clone ID: PAT_MRT4530_68553C.1
atggcggcggcgagcggcgagaaggaggaggaggagaagaagctgcaggagagggcgccgatccggcgcacggcgtggatgctggccaatttcgtcgtactcttcctcctcctcgccctcctcgtccgccgcgccaccgccgccgacgccgaggagcgcggcgtcggcggcgcggcgtggcgcgtggcgttcgcctgcgaggcgtggttcgcgttcgtgtggctgctcaacatgaacgccaagtggagccccgcccggttcgacacctacccggagaacctcgccggaaggtgtggcgccgcccatcgtcctagaaagtcgtcgtgcatctccggccatctcgatctcatgcggagacagtgtgctttgatgcaggatcgacgagctgccggcggtcgacatgttcgtgacgacggcggacccggcgctcgagccgccggtggtgacggtgaacaaggtgctctcgctgctcgccgtcgactactacccgggcggcggcggcgccggcggcggcgaaggctggcctgctacgtctctgacgacgggtgctcgccggtgacgtactacgcgctgcgggaggccgccgggttcgcgaggacgtgggtgcccttctgccggcggcacggcgtcgccgtcagggcccccttccggtacttcgcctccgcgccggagttcggcccggccgaccggaagttcttagacgattggacattcatgaagagtgagtacgacaagctagtccgtcggatcgaggacgccgacgagaccacccttctgcggcaaggcggcggcgagttcgccgagttcatggacgccaagaggacgaaccaccgcgccattgtcaaggttatatgggataataacagcaagaacaggataggcgaagaaggagggttcccgcatctcatatacgtctcaagggagaagagccccggacaccaccatcactacaaggccggcgccatgaacgccctgacgagggtgtcagccgtgatgaccaacgcaccgatcatgctgaacgtggactgcgacatgttcgcgaacgatccccaggtcgtcctccacgcgatgtgcctgctgctggggttcgacgacgagatctccagcgggttcgttcaggtgccgcagagtttctacggcgacctcaaggacgatcctttcgggaacaagctggaggttatttacaagggcttattttatggtggaacgggttgcttccactgtagaaaagccatttacggcatcgaaccagactccattgtggtaggaagagagggcgccgcaggttcgccatcttacaaggagcttcagttcaagtttgaaagttcagaggagttgaaggaatcagctcggtacatcatttctggggatatgtccggtgagccaatagtagatatatcaagtcacattgaggttgcaaaagaagtttcttcctgcaactatgagagtggcacacattggggtctggagcggatccatgcagcaggttggagatctgcaaagttggaaaccgaaccaccagcattcttgggctgcgcaccaacgggtggaccagcttgcctaacccagttcaagagatgggcaacgggtttgtttgagatactcataagccagaataacccactccttctgagcatattcaagcatctccaattccgacaatgccttgcgtacctgactctttatgtgtgggctgtgaggggatttgttgagctatgctatgaattgttggttccttattgcctactcacaaatcaatccttcttgtcaaaggcatcagaaaattgtttcaacatcacattagcactattcttgacctataatacatacaacttcgtggagtacatggaatgtgggctctctgtacgtgcctggtggaacaaccacagaatgcaacggatcatttcagcctctgcatggctactagcattttttactgtgctcctcaagaccataggcctctccgagactgtgttcgaggtcacccgtaaggagaagagcacatcggatggcaatggccaaaacgatgaggttgacccggagagattcacctttgacgcatcaccagtgttcatccccgttacggcgctgacaatgttgaacattgttgcaatcacaattggtacatggagggcagtttttgggacaacagaagacgtgcctggtggtccgggtataagtgaattcatgtcttgtggatggctgctactgtgcttattgccatttgtgagagggctagtgggcaagggaagctatggtatcccatggagtgtcaagctgaaggctagtttgctggtggccttgttcctgttctgctccaatagaaattag

SEQ ID NO: 67723 - DNA, 336 bp, Oryza sativa
  unsure (1)..(336): unsure at all n locations
  Clone ID: PAT_MRT4530_68554C.1
caggaagaggggganccagctggcggcgctcacctctagcagcagcggcgaacggagcaggagagccatcgaggggagggggaggccggcggcggcgccgatggcggtgtttgttttttgttgactggaaatattttcgtaggcgggtggatttaccgcctatgaaaatagatgccgcctgcaaatacattttttctagtagtgcgacaaacggtgaatcatgctcacttcctatcttcagtcttaaatttgatctgagacatcttgccaaacaaaattggatcgctcaaacaaaattcgatggctccttaactggcaaaaaaaaaaaaaaaaaaa

SEQ ID NO: 67724 - DNA, 374 bp, Oryza sativa
  Clone ID: PAT_MRT4530_68555C.1
aattataacgaggcacatttgcaaatgcattattaaagtgctaactagaacacattatacagcgtaaacacaactacatagtgagaaaaaaagagaactgaaatcttaagagaagagacgagagttgcaggggaacattatacacaaattcactcttcattcagtcacataagtgagactagaacacatctacagaagcacgctagcgcctcatgttggacagcaccagtaagactaaaggagtcacaaggaacataatcacactgcgtctggaccactcattggtcatacagagtggaagtgaaactatgaccatcctatggacagggtgaggctttcaagaatgaactgaagagcatcagcatgacaccaaa

SEQ ID NO: 67725 - DNA, 2389 bp, Oryza sativa
  Clone ID: PAT_MRT4530_68556C.1
atggcggcggcgagcggcgagaaggaggaggaggagaagaagctgcaggagagggcgccgatccggcgcacggcgtggatgctggccaatttcgtcgtactcttcctcctcctcgccctcctcgtccgccgcgccaccgccgccgacgccgaggagcgcggcgtcggcggcgcggcgtggcgcgtggcgttcgcctgcgaggcgtggttcgcgttcgtgtggctgctcaacatgaacgccaagtggagccccgcccggttcgacacctacccggagaacctcgccggaaggtgtggcgccgcccatcgtcctagaaagtcgtcgtgcatctccggccatctcgatctcatgcggagacagtgtgctttgatgcaggatcgacgagctgccggcggtcgacatgttcgtgacgacggcggacccggcgctcgagccgccggtggtgacggtgaacaaggtgctctcgctgctcgccgtcgactactacccgggcggcggcggcgccggcggcggcgaaggctggcctgctacgtctctgacgacgggtgctcgccggtgacgtactacgcgctgcgggaggccgccgggttcgcgaggacgtgggtgcccttctgccggcggcacggcgtcgccgtcagggcccccttccggtacttcgcctccgcgccggagttcggcccggccgaccggaagttcttagacgattggacattcatgaagagtgagtacgacaagctagtccgtcggatcgaggacgccgacgagaccacccttctgcggcaaggcggcggcgagttcgccgagttcatggacgccaagaggacgaaccaccgcgccattgtcaaggttatatgggataataacagcaagaacaggataggcgaagaaggagggttcccgcatctcatatacgtctcaagggagaagagccccggacaccaccatcactacaaggccggcgccatgaacgccctgacgagggtgtcagccgtgatgaccaacgcaccgatcatgctgaacgtggactgcgacatgttcgcgaacgatccccaggtcgtcctccacgcgatgtgcctgctgctggggttcgacgacgagatctccagcgggttcgttcaggtgccgcagagtttctacggcgacctcaaggacgatcctttcgggaacaagctggaggttatttacaagggcttattttatggtggaacgggttgcttccactgtagaaaagccatttacggcatcgaaccagactccattgtggtaggaagagagggcgccgcaggttcgccatcttacaaggagcttcagttcaagtttgaaagttcagaggagttgaaggaatcagctcggtacatcatttctggggatatgtccggtgagccaatagtagatatatcaagtcacattgaggttgcaaaagaagtttcttcctgcaactatgagagtggcacacattggggtctggaggttggttgggcctatggatcaatgaccgaagacattttgactgggcagcggatccatgcagcaggttggagatctgcaaagttggaaaccgaaccaccagcattcttgggctgcgcaccaacgggtggaccagcttgcctaacccagttcaagagatgggcaacgggtttgtttgagatactcataagccagaataacccactccttctgagcatattcaagcatctccaattccgacaatgccttgcgtacctgactctttatgtgtgggctgtgaggggatttgttgagctatgctatgaattgttggttccttattgcctactcacaaatcaatccttcttgtcaaaggcatcagaaaattgtttcaacatcacattagcactattcttgacctataatacatacaacttcgtggagtacatggaatgtgggctctctgtacgtgcctggtggaacaaccacagaatgcaacggatcatttcagcctctgcatggctactagcattttttactgtgctcctcaagaccataggcctctccgagactgtgttcgaggtcacccgtaaggagaagagcacatcggatggcaatggccaaaacgatgaggttgacccggagagattcacctttgacgcatcaccagtgttcatccccgttacggcgctgacaatgttgaacattgttgcagtcactatcggagcatggagggcagttttcgggacaacagaaggtgtgccttgtgccccgggtataagtgaattcatgtgttgtgggtggctggtactgtgcttcttcccgtttgtgagagggctagtgtggggcaagggaagctatgggatcccttggagtgtcaagctgaaggctagcttacttgtggccttgtttgtgttcttctccaatagaaattaatttcacc

SEQ ID NO: 67726 - DNA, 640 bp, Oryza sativa
  Clone ID: PAT_MRT4530_68557C.1
agggttagctaccacttcggcttgagggacgacgacgaagtctcttatctgcaacatgcaaaaaaatgtattagtctaaacgcaaagacgtttcgttcacgtgccttcacgttcgttcacgtttcattcacacgtttcgttcaagtgaattcacgttcattcgcgttcgttcacgtttcctccacgttcgttcgtgtttcgttcacgttcgttcgtgttcgttcacgttaagttcgagttcgttcacgttcgtttgcgttcgttcgcgttttgttcacgtttcattcgcgtccgttcgcgttcgttcatgtccgttcgcattcgttcacgttcggcattgatgggtcggcagcgaaaagggcggcggcggtttggagagagagagagagagttcgcgcaggcagcggcggcaaccccagagatatggtggcggtggcggcggcggtgatgacgacgacgacagcgagatgatggcgagagacgacggcggcgtcggcgcgggggatgccctaggcagtggcatcaaaggagaagccgagatcagagaaaaacatctaagtgttggtggagaagacgagtgcgcctcaggcatatatataccccgggatctttagtcccggttggtgagaccaaccgggac

SEQ ID NO: 67727 - DNA, 234 bp, Oryza sativa
  Clone ID: PAT_MRT4530_68558C.1
atgaagcttgtggtgtgtgcaatgctcatgctcgtgatcatcagctcttgcactgctgcaacgtccaaggagaagaaaggtgcagaaatgaatcaactgaaggacgccgtcgatcaggcactggccaaagctggtcagcatgcaatatatgttggtctctgccatctctacacgtccgtgagaaaattgcaatatttggactgcaaacattggtcagacaatagattcacatag

SEQ ID NO: 67728 - DNA, 258 bp, Oryza sativa
  unsure (1)..(258): unsure at all n locations
  Clone ID: PAT_MRT4530_68559C.1
aaaaaaactccagctcgccatagctcgccataggagaggggatttcgaagctgctcttgcttagctgcggctgcnagtnatacggagtagttccggtgatggagcgagcggaggagacgccgagggcgccgtcgacgggcgtcgggagtggtgtcgatctgggagtcggtgcgcgcntncggggtgtgggggaaggaggtggacaaggccgagctgcggaggcaggtcgtcatgcacatgtacgcgcggcgtgcggtc

SEQ ID NO: 67729 - DNA, 819 bp, Oryza sativa
  Clone ID: PAT_MRT4530_6855C.1
tttaaaagggtttattgcgtcagccgaggggaaggggcgcgcggaccgggtccacgggagtggggcccacgcggcagcctcacggtccacggtggaccgggtgcactcgggctcacaccggccggcgccgtgggtcccacgcgtcagccgcacccaagggcgcgggcggctgacggccgggccccacgcggcagccgctcggtgcgcccgaaggcggccacgtcggcgcggccggcgggaggcggcgcgcccgcgcccctatggtcgtcggcggcggccatgggcacatcggagcggcggccgagagaggggagggaaagagggaaacgaggcggcggtccacggctcaccctaggtcgacggcgacgacgaaaaggcagccggagcggaggaaggcggcggagcggctcgggtcgacggggacggcggcgctccggcggtcgacgagcgaaacggaggggtggacgaggtcggcgagcatgcagcgaagccgaaggaggcggcgccgaggtgggaggtggtttggggcgacgacggtggtggaccggagctcggcggcgacggcggagagagagagcgacggcgcgagctcgattccggcgaggaggaagggcggcgagaggcggaaacggacggaggagggcgcgggcgaggcggcgggagcggcgggaggaaggggatgacgggtgggccccacccgtcagcgaggttggcgggcgggcccgcccgtcagcggcgcgcgcgcggggagaggagacggagggggagggagatgggccgagccggcccaagagggagagggagggaaaggggactttt

SEQ ID NO: 67730 - DNA, 491 bp, Oryza sativa
  Clone ID: PAT_MRT4530_68560C.1
ggagttcctgcccacaacgggggagacactggacctgtagccttacatcaccctgtctagaaggcacttgtcgctgagtaacgcctgctacagagtgccggttgctatctatgccctttatgacctctgggcacccgcacttaggcggaggacctgcatctgtgttgatccgaaccactggatcatggcacatatgatgcacagtcactggcatgggaggacaagatacccggagatgatctcccacctcaaggcgttccatgaggacctgatgccattgcaccgggactgattcgtcatggagcattgaacacagctcaagtcatatacatgccagaaggaccgtgccctcactgtctttgtttttgcccacatgatggcgtactcgcggagaccaatgcagcgcagacgacccgcacacctgccgttatctaacgggctaatcactgatgggcgtgaagaacagcagccttgaaggggacaatcaggag

SEQ ID NO: 67731 - DNA, 259 bp, Oryza sativa
  Clone ID: PAT_MRT4530_68561C.1
cgctgagctgcttcttcgacggctacgtcgttgttagggcgtcatggcttactgtcgtggtcggcaacacgccggcgcatggctagtctgctgcccttggtgctgcagggctcgtagtcatcctcaacgtctgcctcacaatgtacggcgtcgacttcttacgcgagggcgagccgttcacagcgccgacgctgacgctcaccgggcgtaagaaggaggccgacaagctgaagaccgtcgactgctgggccaagttcac

SEQ ID NO: 67732 - DNA, 380 bp, Oryza sativa
  Clone ID: PAT_MRT4530_68562C.1
tatatttggctgtccccttctccttccctgccaccaccgccacgccgccgactccccccatgtctctgatggcatcaattccttttgaccccaaagtcctcattgcgctcacgcgcgcccgagcgagagagagagagatagggtatgctctaagctgggctcgttgtggtggtggtggcttggatttgggaatttgggattggattttgcggcggggaatcagggggagtgatgtgaagcaggtgggccctatgcgggaggacaggtgtgggcccaacctgacagtgactattgccctcgtcctcctaagcccgacgatcaactcattcggtggggctacaagaagtaggggtgaaaacagattggattcagacgaatag

SEQ ID NO: 67733 - DNA, 2971 bp, Oryza sativa
  Clone ID: PAT_MRT4530_68563C.1
ctgtttgggtgtcctgtcttcaggcattgtatggctttctctgttcaccatctttgtcagtataccattagctaccagtgatgatcatgaaaatgatcgacaaactctcctttgcttcaagtcccagctctcaggtccaacaggagtactagattcatggagcaatgcatccttggagttctgcagttggcatggtgttacttgcagtacacaatctccccgtcgtgtcgcttcaatagacttggcatcagaaggcatctctggcttcatatcaccctgcattgccaacctcaccttccttacaaggttgcaactatcaaacaatagcttccatggcagcataccatctgagctcggcctactcagccaactcaacaccctcaacctcagcacgaacgctctagaaggtaacattccttctgaactttcttcgtgctcccaacttgaaatcctagatttgtcaaacaatttcatccaaggaacaataccttcctccttaggaaatctttcctccttacttgatctgagccttacacggaacaatttagtcgggaacgtcccagatagtttaggtcttattccaaaactagatctgctgaacttgaatgcaaacaacttaattgggcatgttccatcatctatcttcaacatgtcatccctgacaattctaaccatggcaaacaactcactcataggggaattaccatcaaacttaggttacacactcccaaacattgaaacattagttctgtccaataataggttcaaaggattcatcccacctactcttctgaatgcttccgacctgagtttgctttacatgcgcaataatagtcttactgggctcattccattctttggatcattgaaaaatttgaaggaacttatgctgtcatacaacaagctggaagcagctgactggagctttatttcttcactatcaaattgctccaaattgactaaactattgatagatgggaacaatctcaaaggcaaactgccccactccattggcaatctttccagtagtctcaagtggttgtggataagagacaacaaaatttctgggaatataccaccagagataggcaatctaaagagcttagaaatgttgtacatggattacaatcttttgacgggtgatatacccccaacgattggaaatttgcacaacttggttgttctagccattgcccaaaacaaattatcaggtcaaatccctgatacgattggcaaccttgttaagctaactgacctgaagttggatcggaataactttagtggaggaatacctgtgactctagagcattgtactcaactggaaatactcaaccttgcccataattcactagatgggagaataccaaaccagatcttcaaaatttcctccttttcccaggagttggacctgtcacacaactacttatatggaggaataccagaggaagttggcaatctcattaatctgaaaaaacttagcatctcagacaacaggttgtccggcaacattccatccactctcggccagtgtgttgttctggagtctcttgagatgcaaagcaacttgtttgcaggaagcataccaaattcttttgagaacttggtaggcatccagaagttagatatttcacggaacaacatgtctggaaaaataccagattttcttggaaacttcagtttactatatgatctcaatttatcattcaacaattttgatggagaagttccagcaaacggtatttttgccaatgctagtgtggtatcaattgaaggaaatgattatctgtgcacaaaaactccaatgagaggtgtgcctctttgttcaaaatcggttgacaagaaaaggaaccataggtcattggttctagtcctaacgacagtaataccaattgttgctatcactttcactttgttatgccttgcaaaatatatttggacgaagagaatgcaagcagagccacatgtacaacagctgaatgagcacaggaacataacgtatgaagatgttctaaaggccacaaatagattctcttcaactaacttacttggctcaggatcatttggaacagtttataagggcaatctgcatcttcctttcaaagaaaaggacaatctgcatcttcaggaagaacatatcgccatcaagatttttaaccttgatatccatggatctaataagagctttgttgccgagtgtgaaaccctacaaaatgtccgccaccgaaatctcgtgaaaattattactctatgctcttctgtggattcaactggggcagacttcaaggctatagtgttcccatattttccaaatgggaacctagatatgtggttacatccaaaatcccatgaacatattagtcaaacaaaggtgctgactttaagacaaagaattaatatagccttggatgtagcacttgctttggattatcttcataaccagtgtgaattgccattagtacattgtgatttgaagccaagcaatattctgttggatagtgacatggttgcacacgtcagtgactttggcttagcaagatttgtatacactagatcaaacgcacatcaatatacatcaacaagcttggcttgtctaaaaggatctattggatatattccaccagagtatggcatgagcaaagatatctcaaccaagggtgatgtctacagcttcggaatccttctcttagaaatggtaacaggtagtagtcctattgatgaaaaatttaatggtggcactaccctgcatgaatttgttgatgcagcattgtccaatagcattcacgaggttgttgatcccacaatgctacaagatgatgtcagtgtagccgatgtaatggagaggtgtgtcattccattggttaaaataggcctctcatgttcaatggcattgcctagagagcggccagaaatggggcaagtttctaacatgattcttcgaatcaagcatgcagcctcaaacatgagcgtcaaa

SEQ ID NO: 67734 - DNA, 356 bp, Oryza sativa
  Clone ID: PAT_MRT4530_68564C.1
cccacgcgtccgaatgggccatctccctacaggactggctccattccctcacagtaaatccctctttgcatagttggttgtgcaaaaatagtacgaggaatgtggatggctagtaaaaaaaaaaaaaaaaaaaaaaaaaaaaaaaaaaaaaaaaaaaaaaaaaaaaagttataaaatatatagaaaagaaaattaaagggcggggaaaaacataaaaggagaataaattaaaaataaaatctgaatacatttaaatatgtggggggttgacataaaaaatgactcaaaaaaaacatgtctggataaaacaaaataccttttaacaaaactgcctaaaaacaaattggggctcaacc

SEQ ID NO: 67735 - DNA, 1106 bp, Oryza sativa
  Clone ID: PAT_MRT4530_68565C.1
catagtgaagcgcaagaagaatggagacggggatttcaatttgccaactttttcataaaaataaaataaaattatgggatttatgagaaacttgatagggttttaatgtccacagagtgggaacaaaaatttcctcttttgatacatggtgatgcaaatttaaaatcgcatattactacttattataagggtctttttggtctacctaaggaatctcaacttcaattgatgagagtaaagttgctgatattcctcaagtttctcatatagagaatgaggctttaatacaggaatttactgaaacagagattaaggaggctatctttcagatggagcacaataaagccccggatcccgatggttttcctgctgaattttgtcaagttttctggagtgttattaaaaatgatttacttgacttgtttaaagagtttcataatggttctttacctttattctcgcttaactttggtaccatcattcttttacctaagtatgtagaggccatgaaaattcaacaatataggcttatatgcttacttaatgttagtttcaatttttttaccaaagttgccacaaatagaataatgtgtgttgcccaaaaggtcattagtcctactcaaactgcttttattcctgggagaaatatcatggaaggtgtggttattttgcatgagactttacatgagttatcgtaaaaataatagtggtgttatcttaaagattgactttgagaaagcttatgataaggttaaatggccctttgttcaatagactttgcggatgaagggcttctctcctaaatggtgtgagtggatagcctcttatatccaaggaggtcatattggtattaaagtcaatgatcaaattgacgataattttcaaacttataaaggctttggacaaggatgacccgttatctccaattctttttaatatagtagctaatatgttagctttgctaattaaagggctaaagagaatggttctcttaatgggggtaattcctcatcttgtggctgatggtttgtctatcttgcaatatgcatgatactatcattttcttggagcatgacttacaacaagcaaagaacttgaaattgatt

SEQ ID NO: 67736 - DNA, 423 bp, Oryza sativa
  Clone ID: PAT_MRT4530_68566C.1
atggcggcgacagcagctgggcaaaaagaggtggctccgctctcgcccgccttcttcgtctccacctccactgctcccgaggacatggggacggcagtgacgacggcactcgtgcagaggtcgatgttggctccactgccagcggcaggtttgtcgacgtgttccacggggcggttctggtacgccattttggggttctcgagggtgaagatggcgcttaacatggggtccgagcggcggccttgcgagtccatcgccatcgtccacgactttgccgaccgcatcatccacgtcgtcgtcgtcctcaaatcccatcccccgcaacgccgcacaccacccatggcacaacgagctaggcttggcgctctcctcgccgccatctccctctcatccatgcctgggttgggtggttcggagcactga

SEQ ID NO: 67737 - DNA, 2004 bp, Oryza sativa
  Clone ID: PAT_MRT4530_68567C.1
atgacgaaacatgacatggactgcgtcgacaaggcaaatctgagcttgacgggaagtcctttcacattctctaacagtgccaacaagttcacggtctttggatgtcgaatgcttggttacctcggtcctggtgggcagagcgccgtaggcagtaacctaacaattggctgtgccaccagttgtggccagggtgatgatcttttaagcatcaatggtgaaggatgctctgggataggctgctgtcagacggccatccccaaagggatcaagcactacaaggtttggtttgacacacacttcaacacatcagtcatccacaattggtcccgttgcagttatggagcgttagtggaggaggccagcttcaaattctccacgatttatgccacgtcatcgaatttcagcaaccctttcggtggtgagcctccatttgtggtggactgggttgtagcaaacaatacctgcgccgaagcaagaaaacatttagattcatatgcatgtgctagcagcaacagcgtgtgtattgactcgagcaatggaccaggatacttctgcaaatgttctcaaggatttgaggggaatccttaccttcagggtcatgatggttgccaagatattaacgagtgtgaggattctaataagtacccttgctatgggaagtgcatcaacaaacttggaggattcgattgtttttgccctgcgggtactcgaggagatgcttctgttggaccatgccgaaaagagtttccactagcattcggtattgcaattggcctaggagttggtttcggaattcttcttcttgtcttaaccgtagcattccttgtccgtaaaagaaagaatgatatccaaaagcaattaaggaagaaatattttcgaaaaaatcaaggccttcttctagagcaacttatatcatctgatgaatgcgctactgatagcacaaaaattttcaccctagaagagctgaaagaggcaacaaataactttgatccagcacgtgttcttggtagtggagggcatggtatggtttacaagggcatattgtccgaccagcgtgtggtagctataaaaaaaccaaacatcattagggaagaagagattagtcagttcatcaacgaagttgcaatactatcgcagataaatcatcggaacattgtaaaactatttggatgttgtcttgaaaccgaagtccctctactggtgtatgactttgtcccaaatggctcactaaattgcattattcacgctgatccaagtatgagagaattcacattgtcctgggatcagtgcttgagaattgccaccgaagctgcgggagctttatattacctccactctgcagcatcagtatctgttttacatcgtgacgtgaaatcttcgaatatacttttggatgccaactacaccgctaaggtatcagattttggggtatcaagactgattcctaatgatcaaacccatgtttttacaaatatccaaggcacatttgggtacttagatcctgagtactaccataccgggcatctaaatgagaagagtgatgtctacagttttggtgttgttcttttagagctgcttctcaggaagcaacctatttttgacagtgaatctggttcaaagaaaaatttatctatttacttcctttctgagctaaaaggaaggccagttgcagagatagctgctcctgaagttcttgaagaagcaactgaggatgaaattaacattgtcgcctcaattgcccgggcatgcttgaggcttagaggtgaagaacggccaactatgaagcaagtagagatgtcattacaatctataagaaataaaggtttcagatcaggcacagtttctccagaagatagcgatgagctgcaaactccacaatcagaaggacatgtagattatcatcaagctacggggattggaatcaacagtatggctaatttagcatctccaggttgctatagcctgcaggaagaatttatgttatccggaagtcttccacggtaa

SEQ ID NO: 67738 - DNA, 213 bp, Oryza sativa
  unsure (1)..(213): unsure at all n locations
  Clone ID: PAT_MRT4530_68568C.1
tcancgaatgggcctttttattcatcatgagaccggtaaccccctttggctggaaatgtaggtagaaanccaaagagaaatttgctctggagctatcccttgggtatntcatgtcgatgttgttgcntgatgagatgtcancggctgcaccctnggtcctgagtgttntagctctatgtgaaaggaaatctgcgtacacgagggatgngagtt

SEQ ID NO: 67739 - DNA, 335 bp, Oryza sativa
  Clone ID: PAT_MRT4530_68569C.1
catgattcagagcagcagctctttccacaagccattacatggttccctttgaagaaggtagagatcttggcacaagccaaaaacattgagcgtgtttgaggacctggaactggaaccaagatcatctatgaaggaaagtagccaacacaatccaaaatgccaagagcgggagcgtcaatggttgttttgttagagggcttgcattaggcaaccatggatatgcatctggaggtggcatgacacaattgtcaccattgaagtacacacggtgggggaaggcccattccttgtcaaaggtgaaagccatagaattcttccgcagaagtagttctgac

SEQ ID NO: 67740 - DNA, 237 bp, Oryza sativa
  Clone ID: PAT_MRT4530_6856C.1
tcgttataacaaacgctcaatgtttggactgttgcggagcccttcaatgtcgagcactggtaaagatactggtacgtgcatagctacagacacggatgggcatgtctcacgaagtgaacagggcgtgctaacagacatcgtcgaataacactcacacgaggatctatagcacttacatatgcaccataacttctatgccaacctacaaatacacgcacagatgcttcacgcacaaat

SEQ ID NO: 67741 - DNA, 783 bp, Oryza sativa
  Clone ID: PAT_MRT4530_68570C.1
atggagatggaccacgcggcggcggagaaggcgcggtggcgcttctcggacggcggcgtcaccgacctcctgcaagcccgaagtctccacggcaccgctggtcacctaggttgtgtcaatgctattgcatggaattcaaagggctcacttctgctatcaggttcagatgacactagaatcggcatctggagttatgctaatcgagagttgttgcatgacattgatacgggtcattcagcaaacatattttgcacaaaatttgtccctgaaacatctgatgaagtaatagtctcaggagcaggagatgcagaggttcgtgtttttaatttgtcccgtttaagtggaaaaaggcctgtagaaatttctatggaaccatcagcagtttaccaatgccactcaaggaggatcaagaaattagctgttgaaattggtaaccctaatatagtctggagtgcaagtgaggatggaactctaagacagcatgattttcgggagtgcagttcctgtcctcgtgcaagatctactaatcaggaatgccgtaatgtgcttctagatctacgatggggagcaaagaaatctttagctgatattcccagacagccattggcactgaagtcttgtgatatcagcactgttcgtccccatcagctccttgttggtggaagtgatgcatttgcacgactgtatgataggagaatgcttccaccattgagcacatgccaaacaaaaaaggaaccacctccatgtattaaaatgttctgtccaatgcaccttgctgatact

SEQ ID NO: 67742 - DNA, 242 bp, Oryza sativa
  Clone ID: PAT_MRT4530_68572C.1
aaaaaaaaaggggccctatgtgttttttcaaggagtccaacccaaagtgggccccccccgaaagttcccgcccaaaaaaaaaaaggtgtcccgagcaatgtcccttgtgctaccccggcaccccgcttttaaacagagctgtgccccccagtgctttttttaacgtggactttttgcccccaaaaaatgcctcagccttggccggagaaggggcccgcccccgggcccctgccaattgtgcc

SEQ ID NO: 67743 - DNA, 414 bp, Oryza sativa
  unsure (1)..(414): unsure at all n locations
  Clone ID: PAT_MRT4530_68573C.1
tccggagttccgagggacgacgtcacgcgtacgcgtacgcccagcggcgaccgcccacgcgtccggaatattctatgaatattccttattcccagaatttgaggactctagcatggacatcctaggagttcctacactggatattaactacgtcattcagatcccacagtaagctaattacgcccaacgatctaacacaattcctttctcagctaattatgcactcttttgtcaggaagagctgcattcctggttctgctgtaactgagggttgatctgcctgatgttgatgtgctgttcagctgttgctgttatgaagtgggaatctctattaccaaatgatacctntcttattgttgcctcctctgatggcgcatttgagaaaatgactatgcaggatgtctgggatctgat

SEQ ID NO: 67744 - DNA, 1026 bp, Oryza sativa
  Clone ID: PAT_MRT4530_68574C.1
gtggggccccccggccgccggcgtgtttttttttttttgctgttcgcgtcccgtccccttcagctgaatgttctccgcttcgtatctcactttgtcccctcttttattttcctttttttcaccactaataaattccttaattgcagtaacctttatatacatgcatctatactactgtatggcaacatatcctatgcatgcacaacagtcatcgtgaataaatcatgtattcgcttcatttcctgaagttcacttcgctcctcgcgagaaactgaatgaatccggcaatcgccgcgccgatgatgaaccatgtcacggaggctaggacgatcttgagctcgaagctgttcacgagacccagagcggcggcgcctccggcgtgcccctggatgccgtcgctttcgacttccgccttttcctctctgttttatactattgaaaggacatatatgaatttcattagaatttgctctgataaatatttgttgttgtacacggtaataacatccttggttgcggttgcctttatatacaggcttcgatactactatgtatacttcatctatcctatgtatctttatgtcatcgtgaataaatcatgtattcgcttcatttcctgaagttcacttcgctcctcgcgagaaactgaatgaatccggcaatcgccgcgccgatgatgaaccatgtcacggaggctaggacgatcttgagctcgaagctgttcacgagacccagagcggcggcgccaccgacgtgctcctggatgccgccgccgccgactccggccacctcctccctgttgtaacccacgaacccggccgagatgatcgccatcagcagcggcgccgtcaggtcgatgctgcccaatgtcaccccgccatcgccggtgggggttgctcgccgcgtctggctgcggggaggagaagcgctctgcctccggtgaggtcgctccggcggcgatgctagggacggcaggttcagctgcggagtccagtagtcgtcgcggcgggcgtacgaagccaccgt

SEQ ID NO: 67745 - DNA, 171 bp, Oryza sativa
  Clone ID: PAT_MRT4530_68575C.1
atggtggagatttgccgaagctccaccaccgtggttgcctccaagcaatcctctccgtccccttcctcctccgccggagcgtcccaaggcggtgccttgggcgaagctgctttcgcagtcctcacggcggtgcatgccttgagtgtccagcggtcaagacaagcagactag

SEQ ID NO: 67746 - DNA, 349 bp, Oryza sativa
  Clone ID: PAT_MRT4530_68576C.1
tttctctaatttctatcccctctctgaaatgaagagggtattagagcaagagatcctaaaaccctagccaccaaatccggtcatcgcaggcgcgccggcggcgctcgccgccggcgagccatcgtctcatcctcccgtcattagttggctgtcttcgagttgtagcagttttgctttttgtctcttctcttcgcatcaaagcagcagcaacaatcgcctcctcctgctgccgccggcctagccaccggctacctcgtccatccgtcggcctccgcgaccgatcccgttgcagatctcgcgggcggtggcggtcgtcgtcgtcgtcgtcgtccgttgtcatatgtcgcat

SEQ ID NO: 67747 - DNA, 670 bp, Oryza sativa
  Clone ID: PAT_MRT4530_68577C.1
ctagtggatccccgggctgcaggtgctctctctcttgccctcacggcggcgacggccggccggccatcgctcgcttttctccgccgttgacgaccactcccacgtgccctccactacactctgccatcgacaccccctccagatcatgccactccattgctgccccgaccggcgccatggtggagatttgccgaagctccaccaccgtggttgcctccaagcaatcctccccgtccccttcctcctccgccggagcgtcccaaggtgagaccctcccacgcggatcagaaatgattcctccggcggtcactgtggcggagagctcgcgctggaaggagcagcaacatcagcagcaggcggtgccttgggcgaagctgctttcgcagtcctcacggcggtgcatgccttgagtgtccagcggtcaagacaagcagactagcagagcccacgctagcgtggccccgcgtggtggagcgaaggagccgcatgggcaggcgctggtcgttcctattagaagaaaccagatctggtccatagtaaggctaatctggacttccgtgcttgctccttctgctactatcttattaagcagctaagagagtacacatagctgatgaagcaacaacaatggcttagcattgagcagctggtggctctgctgcagtcacct

SEQ ID NO: 67748 - DNA, 1491 bp, Oryza sativa
  Clone ID: PAT_MRT4530_68578C.1
atgggtgtcaagctgttggctgacggctgcgccggcgcctcgtcgtcgcctgcgctgtcgcgggtggcgacctccgcggcgcacggcgagggctccccctacttcgccgggtggaaggcctacgacgaagacccctacgacgccgccgcgaacccggacggcgtcatccagatgggcctcgccgagaaccaggtctccatcgacctcctcgagggctacctccgggagcacccggaggccgccgcctggggcgtcgccggcgacggcggcggcgacagcttcagggacaatgcgctgttccaggactaccatggcctcgccaacttcaggaaggcgatggcaagattcatggagaagataatgggtggcaaggcgacgttcgaccccgaccgcatcgtcctcactgccggagcgacggcggccaacgagctcctcaccttcatcctcgccgaccccagagacgccctgctgatccctaccccttactatccagggttcgacagggacctgaggtggaggacgggcgtcaacgtcgtgccggtgcactgcgacagcgcgaacgggttccaggtcacggccgccgcgctccaggcggcgcacgacgaggccgccgcggcgggcatgcgcgtccgcggcgtcctgatcacgaacccgtccaacccgctcggcaccacggcgaggcgcgaggcgctcgagggcatcctcggcttcgtggcgcgcaacgacatccacctcgtctccgacgagatctactccggctccgtcttcgccgcgccggacctcgtcagcgtggcggagctcgtcgagtcgtcgtcctcgcgcgcacggcaccgcggcgaggacgacgacggcgacgtcggcgtcgccgaccgcgtgcacgtcgtgtacagcctgtccaaggacctgggcctcccggggttccgcgtcggcgtggtgtactcgcgcaacgacgccgtggtcgccgcggcgcggcgcatgtcgagcttcaccctcgtgtcgtcgcagacgcagaggacgctggccgccgtgctgtccgacgaggcgttcgtcgacgcctacgtcgccgccaaccgggcgcgcctccgggagcggcacgaccacgtcgtggcggggctggcccgcgccggcgtgccgtgcctgcgcggcaacgccgggctgttcgtgtggatggacatgcggcggctcctgctcggcgacggcggcgacgccgcgaccttcgccggcgagctgaggctgtgggacaggctgctgcgcgaggtgaagctcaacgtctcgccgggctcgtcgtgccattgctcggagcccggctggttcagggtgtgcttcgcgaacatgagcctggccaccctggatgttgcgctggagaggataagccgcttcatggacgcgtggtgcaaagcaacaattgggaaatttaaccatttgcaacccaacagatgtgaggtgaattattttgcacttgagaggtaccaagggcatgtgcaacagtaa

SEQ ID NO: 67749 - DNA, 246 bp, Oryza sativa
  Clone ID: PAT_MRT4530_68579C.1
cgctctataactagtggatccccgggctgcaggtttttttttattttttttttacatgccagtttggcacctttagtcggcacttatgaagataagtgataggtggcgggttagaaatcggcacctataacatcccacaataaaaaaaaaaaaatcggctcgatgcagccactccccatcatccctcgtagcatctcaagaacacattcatcatccaaacaacaacatatagacacctgagattca

SEQ ID NO: 67750 - DNA, 480 bp, Oryza sativa
  Clone ID: PAT_MRT4530_6857C.1
atgggtgtccatattctgaaccgaggagaagaagcttttgcactaagcagcgcgcgtgcatgcatccaaataatgcatcagtttgctttgtcaacctctcttggacttgcagaaacacgccgtggtgtggacaagcgtggcaggcacgtactacagattaccagccaactttgccgcatgatgtccggaggtagtgccacttgttttttgttgcatggacagcaaaaggtgtttgcaactttgcgtcgacgtatcatgatccctgccactatctccacttcacaaaaatcacaaaatgggagaccacacacaccatggaaaatggctgactcatctattggacatttgggcctacaggaaaaagaaactgacgatgatgttctgaagatatgtattatcttttgttttgcaagacccgctcgatcgtcggtggttggtgctcatcgatcaattaagttcgaattggtgcctttcactgtc

SEQ ID NO: 67751 - DNA, 1836 bp, Oryza sativa
  Clone ID: PAT_MRT4530_68580C.1
atgcttctctcgctgtgtctccggctgctgccgctcctcctcgtcttggttgccgcttcccatggcgatgcttccggcgacacctacgacacctccatgtgcctgcagaaaccaaccacctgcgggaacgtcagtatcagctacccgttctactttgctacgaagacgaaagatatcaacgggtccagcaactcatactgcggataccccggcttggcgatcgattgtgacgacggcaagcccatcctgcaactcaacggcaccgagaagtacaaggttaactacatcaactacgggagcatcaccaacgtgtccctagccgatctggaggtcgtcgacgacagcagcggctgcccaagagtggatcacaacgtgacgatcccacagatctcttggttgttcttctccggcatatcggtcgattacctcgtcttctttctccgctgctccttcacgacgttcgcccccaaaccggcaaacttcaacccgatcgcctgcggaagcttcatcaatctcactagaccgtcgttcgtgttcccggacgagctagtgccccctgggaactggtcgcagctttgtgaggaaaccttcgaagttcctgtgctcaaatatcaactgatggagatggactcaaatggcaatgcatggaataacagtggatacgcccagccaaatcttttgtacccttatcagtattcaggctatgctgtaatggataagactagatattccattctgatgcctttctctgtcccaaattttctacatgcaaatataatagcaggcacctcaagcgtgcttttgctatgtctactttcctttgcgtgtttgttcggtctcaagaagtctaggtacagaaggatttcaaagggaacaccaaggattgagtccttcctacaaaggaatggaaccttacatccaaagagatacacttacacagaagtaaaaaggatgacaaaatcttttgctgaaaagctaggtcatggtggatttggtgctgtttacagaggcaacctatctgatggccgccaggtagcagtcaagatgttaaaggactccaagggtgacggcgaagaattcatcaatgaggttgctagtattagtagaacttctcacgtcaacgtggtgactctgttaggattttgtttgcatggatccaaaagggttctgatctatgagtatatgccaaatggttcacttgaaagatatgctttccgcaataactctgaaggcgaacattcattaacttgggagaagttatttgatgtagtagttggaattgcccgagggcttgagtatcttcaccgtgggtgcaacacccgtatcgtgcattttgatattaaaccccacaacattctacttgatcaagaattctgccctaagatctcagattttggaatggctaagctttgttctaacaaagagagtatcatctcaatagccggtgcaagaggaacaataggctatattgccccggaggtctattcaaagcaatttggagcaataagtagcaagtctgatgtctatagctatggaatgatgatccttgagatggttggggcaagggagaggaacatagatgccaatagtgaatctagtagccactatttcccacaatggatttacgaacatctagatgaatattgcatcaattcttctgagattgatggtgagaccacagagcttgttgacctcggactgtattcatcaccaagttatggtatcattgacaccttctgcgaggacgatgtcgttgttccatacctggtagacaacctcaaagaattccttgacaagctcgactgtgaggttgtgcctaatatctgctattgttga

SEQ ID NO: 67752 - DNA, 271 bp, Oryza sativa
  Clone ID: PAT_MRT4530_68581C.1
ctaatccttatcgtcatcattctcttcttcatcatcatcaccaccacgagaaacgtctaagggtattttggctagctcaccgaggtgataagctagtcggtatgggtttatagcctcaccccttcgtctagcagtttgaaaatcgtgcatgcggaaaacgagggaaagaacatagcccttctcgacgaactggaggagcaccccctccttgtactccatgtgagctcgaattacggctgtgttcttttggaggggcttaggaccttttccc

SEQ ID NO: 67753 - DNA, 342 bp, Oryza sativa
  Clone ID: PAT_MRT4530_68582C.1
atgacgggggcggcggagtcgtcggcgacaggcggagggcgaccgggcgctgacctcgccggcaagccgccgtcgtcgctgcccgaggccagatccggcaagcccaggccggatctggccaccctgccgccactccgacggcgacggcgacgaccccggcggagggagaggggatctggcaaccgaagtcgtcgggcaccccccgcgcccgtcatcgtcggccacccctcgcgcccatcgccgtcgccgacctcgcgaggcgctcgccgttcgccacggcaccccgtcaaagacaaagagcaatgcagtgcaaagttcaaccacgatcaggcactccattga

SEQ ID NO: 67754 - DNA, 434 bp, Oryza sativa
  Clone ID: PAT_MRT4530_68583C.1
aacccccaacaagctctataaagttctaggcgggccattcaaaaggtagaggacacccaagcccatcaaaaaccccaattaacaggaggggagttttttttggggggggggtttaaataaaccctaaaattccaccaaaccagggttggccgggcggaaactctgatcttgaacttgggaaccttcccaattcacaggtagctaaacaaaaatttgctttcgcaggagtttccaggaaaaaactttagccacatcactaacagcactacccggggtgggggataaagcaaattccttgggggggacatcattttattaaaactcattcggatccccaatcccatttaaaggaaaacatcatcggtggcctccccaaggattgacaaaaaaaagggggcaattgccacattgaatggaaacaacccagctttggg

SEQ ID NO: 67755 - DNA, 375 bp, Oryza sativa
  Clone ID: PAT_MRT4530_68584C.1
atggcgacggtggcgcggcggcaggcgacgatggcgacggcgcacggcggctcggggcgcgaggcggcgacgcgcggtgacgggatgggcggtgacggggcgcgtgggcgcgcggggtggcgggacagcggcgcgacggcttggggcgcgaggcgcgcgcggcaggcggcgatggcgcggctcggggcggctaggggcagaggatgttacacgctgatggtgactgctcagtacgagtattcctctacgcgtgtatatagtcctaatttaatttcttggggagggtattcctccgtatttaacctcggttgtatggccatgacgggctgtcgtgaggaactcggcagtcaggggtggcttctcgaaataccatga

SEQ ID NO: 67756 - DNA, 628 bp, Oryza sativa
  Clone ID: PAT_MRT4530_68585C.1
aaaatcgtgatttttttcatgcgggtgaggcaccacacgggaaaataaaaggttgaaacaaaaaaagaaaagaaaatcaaaaccaaaaccctaaccctaatccagccaccgccgccaccctagccgaggcccgccgccatcacccccgcggttgccggcgacggatccagacgctgggagaccgctgccaccaccaccgccgtcgtcgcccgctaccgacgctggattcgccgcccgctcccgtcgccgacactggatccgccgccccccatgcctccctaccgccgccgacgccaccctcccctccggccatcgtccccgtggtcgttggccaaagacgcccctcccctccaccggatatccaaggggagggaggggaggggccgcgcactgccgccgcctacgcccaccgccggatccgccgcccccatgcctccccaccaccgacgacgccaccctagctcccttcggccgtcgtccccgtggtcgccggccgaagacccccccccccccctcgccggatctgcaaggggagggcggcgagccggcagcctcccgcccgcgccccgcgctcagagaagaggggaggagaggagatgagagaatgagtgatggagtgacgagagag

SEQ ID NO: 67757 - DNA, 792 bp, Oryza sativa
  Clone ID: PAT_MRT4530_68586C.1
atgcaccggcgccggcaacacggtagctccggcgagctggacgtgttcggagcgacgcgctacttcgccggcgttgctacggccgcccgtcccatcgccgtcgtcgtcgtcagggagcccgaagacatgatcatccaagtgaagacgacgacgacgacgagcagcgacaagaagacgacggagaaggaaggccatcatcacgccggccagctggatgtggtcggagtcgccaagacgacccaccggagcaagctcgccgccttcctcggctccttggtgtcgccggaatcgacgagcttccgcaagaagccgccgccggcggcgagcagcgagaccacgacctacaactacaacgacgacgacaacctgcccaagatgcaggtaccctcgtcgtcgtccacctcgagcggccgtgctagcatcgacgtcgccgcggctgcagctaccgtgcacggcggcggcggtggccgccatgacgacgacgatctgggcgtggatgcgatgtgggaggatcggaggctgcagggtgtcagggttgtgaggtgcgggcgctgcgacgaggagcggtgggtggtgaggtgcggcgcttgttgtgcttgggaggaggaggaggaggagcaccaccatggccatgaaaagaaggccattcttgctgctgcggcgacatcaacaaggtacggatctcatcaggtgctagcaggtgatcgagaggttgtcggcgatggtgcatgttctgattgggagagcgactctagctctgatctgttcgagctggatcttgaaatcacctga

SEQ ID NO: 67758 - DNA, 1473 bp, Oryza sativa
  Clone ID: PAT_MRT4530_68587C.1
atgcgtccgtacatccccaagcaaaccttcgctttctgccactccctcctctcctcgcgtctcctcctcccgtccgccgccgccgcccccacggcgccggccctacccgtgcaggcgctactcaccaccgccggcctcctgccgcgccaccccgacctctccctggtcgcgctcaactcgctcctccgcgtcctctcccggcgcgcctcctccccggcccacccgctcctcgcgctccgcctcctcctgctcatgctctcccccgcctctcccctcccgccgcccgaccacctctcctttcccttcgcgctctccgccgccgccaccgtctccccgtcccccggggcccagctccacgcgctcctcgtgaagaatggccacttcccctccgaccactacgtcaccaccgcgctgctgcagctgcagctgcacgcggcccggccggatgacgcgcgaagggtgttcgacgaattgcccaggcgggaggctatacattacgacctggtgatcggcgcgtacacgcgcacggggatggcgggcgaggggctgggggtgttcagggcgatgtttgtggatggggtggcgccggacgccgttgtgctcacgacggccatcgcggcatgcgcgcaggctggcgcgctggagtgcggggagtgggtgcaccggtacgtggaggcgagcgcgccgtggctgctcggggacgcgttcgtcgggtcggcgctggtgagcatgtacgccaagtgcggctgcctggagcaggcggtgcgggtgttcgacggcatgccggagcggaacgactacgtctggggcaccatggtcggcgcgtttgcggtgcacggcatggcggaggaggccgtgtcgtgcctggacaggatggcgagggaggacggcgtgcgaccggatggcgtggcggtgcttggagcgctctccgcgtgtgcgcacgccggcaaggtggaggacgggctcaggctgctcaaggagatgcgccgccggtatggcgtcgcgccggggcacgagcactacgcctgcacagtggacatgctctgccgtgtcggtcggctggaggacgcggtggcactgatcgagacaatgccaatggccccgctcgcctccgtctggggctccgtcttgaccggctgccggacatacgccaacgtggagctggcggaggtggccgccgccgagctcggcaagctcggcgccgacgagggtgtgtatgtgcagctctccaacatctacctcgactccaaccggaaggacgacgcgcggagggtcaggaagctgatcggcagccgcggcatcaggaaggtccccgcgtacagcgcggtggaggtcgacggcgtggtgaggtcgttcgtcgccgacgaccaggcgcacccgcagcgcgtggagatatgggaggtgctcgggctgcttgccgaccaaatgggagaggagccggacgaggaggaggccatggccgcgctctcgtga

SEQ ID NO: 67759 - DNA, 267 bp, Oryza sativa
  Clone ID: PAT_MRT4530_68588C.1
atggacacaggcaggatacagcgcattcgcaggtctaaactccaaagccatcatcattcggaggaggaaaacgtcccgcgagcaacagtgcgcatgctctcccagccgcaaagtgacacgcacgaatcaactgacatgggaaaacctcctccactgcattccagagacgaccagagcaacgacaagaaggcgatagcagcagatgtccacacctgggggtacccgatgaggacggcggtgccggaaagcggcggcggcttttgtatc

SEQ ID NO: 67760 - DNA, 451 bp, Oryza sativa
  Clone ID: PAT_MRT4530_68589C.1
ttttttttttttttttttttttttttttttttttttttttttttttttttttttttttttttttttttttttttttttttttttttttttttttttaaaaggggggggaaaaacactttggggccgaaaaaaaaaaatttgggaaaaaccgttcaataaaaagggccaaaccccgaaataacacattggtatttgggggaaaaggggggcaaataaaaaaacacacacatttttgagggagggaaaaagcccaaaatcgggtagggggagacccctttcgagcacctctaagtgccgcagggggggggggctttttccaccccaaggagaaaaagacccctcgccccctcagtgtagggggagcccccctgggccaaaaaaaaacttttcgttctaaacgtttaaaaaaaaaagagttttccccctcttgacgggccccccccacccgggg

SEQ ID NO: 67761 - DNA, 3420 bp, Oryza sativa
  Clone ID: PAT_MRT4530_6858C.1
ttatgcacccggtttgcgactagttcggaatcccctttcacgatcagtcgcctgactccgagcagttgcagctcttatcccggcgagtagtccttcgtattcggctatgttattggtcgccctaaagttgaggtgaattgcatgcttgaattgatctcccgaaggtgatgtcaagatgaatcctgcccctgctctctggctgttgagtgcaccgtcgaacgccattgtccatgtttcgttgtcgatttggttgtttgacctgcttagtgccgccatgcatccggttagcttatgtacttccttgagtcttgtaggcgacttcatgttctcgattgccttgatcttctcagaatttgcttctattcctctgccagaaacgaggaaaccgagcagcttgcccgatggtactctgaacgtgcacttctcctgattgagcatgaggcgatatcgtcggaggttgtcgaacgtttcccgcagatcatcaatcaatgagtcgcttgtcttggtcttgacaacaatgtcattaacgtaggcctcgacattgtttccgagttggttgctaaacgtgccctggaccgtgctctggaaagtgtttcctgcagttattagtccgaacggcatcttaacatagtagaataccccgaacggcgtgatgaatgctgtcttttcctcgtcctctttcgccatgctgatttggtggtagccggagtaagcgtcgagaaagctcaacaactcacaaccggctgttgagtccaccagttggtctattcgaggaagagggaagtgatccttgggacactccttgttgaggtcggtgaaatcgacacacattctccatttcccgttggccttccgcaccatgactgggttggctagccactctggatggagtacctctctgatgaaaccagctttgagaagcttgtcgagctcttctcgtatggcttgttttcgatctggtgcaaatctccgcagtttttgctttactggcttggcatcgggtcgcaccatgagtttgtgctcaatcacctccctgggtacccccggcatgtcggacggcccgatcttgacggtcttgtcggggttggcactagagagtggaacgatcttgattgcgccgtctggtttcagcgtcttgttcatcttgcccactttcttgggtggttctgctgtggcaggtgggctgggcatgtgctcaaccatgtcgaggctccgtttgtcgcattgcactaccagcttagcattctcttgaatagtgattgttcccttcggtcccggcatcttgagcacttgatatgcgttgtgagatgcggccatgaacttcgcgagtgtggttctcccaatgatggcattgtatgctgtatcgaattcagtgacatcaaaggtgatcttctccgttcggaagttatttgcttggccgaaagtcacaggcagcgtaattttgcccaatggtttggatgatgactgaggagtgattccatggaagggttgatcggtgggtgtcaactcgcttcgtgggatccccatcgtgtccaaggtgctggcgaagagaaggttgattgagctgccaccgtcgatcagaactcgtgcaaccttgatattccgaatagtgggttcgaccacaattggatatcgccctgggatgacagcagtcttagggtggtcttcttcagagaattctatcttctgttcagaccacttcatcttgggcgcagctccctgccacatcgaacagacttcacgttccactttcttatattctcgctttgaggagtatgccgcggaacttccgaagatgtgtgagacatggagatcggaatctgggtatgctgagtccgattcctgagtagccgcctcagcgtccttcttgaccacgcgtactcgcttgcctttttccgatgccatgtgttttgcgagcgactttttgaagacgaggcaatcttctagagagtgtctgtccgacttgtgtatagggcaccatgttttcttcgtgccgctgctttgtgggtctgcgcgcttgggagggtccgcgtattctgttgcgagaacttccgtttgagctttccttttcccactcttgcgatttttcttcttgcttgactcaggtgcatccttggttgatttcttctctcctccggtcttcggtttgtcgttcttgcgtctcagtgcgtcgtccgcgtgagcgcatcgatcgacaatttcgaataatctccgagtagtcgtgatatgcctcgttgccagctcctgggtagtatagcgatctttgacaccggacttgaaggcgcggattacagaagcatcggtgatctcggggattgtattcctgcactcattaaagcgccgaacataatccctcaaggattcatccgagttctgcgttaacgcatgtaggtcgtcctcgatcacgtggcgcttgtaagttccttggaagttggcgacgaactgctgccacaggtcatcgccgtcattatggcgacgtccttgaccagtatcgcccagcacccgccgttcgtgatcgtcatgatcgtggcggttgtggcggttatcacggcctcggtcttcactcgaacggcctcctcgttcttcattaccgtgacgccgtgaagagacgtgacgtcgggaacggttctcgttgtctcgtgtgcgtcgcgcctctcggcggccattcaggtgatcgcggagatcgccggtgccgcgaggtggaggggtggctcgatgaggcgattcccgctgttcagggttttcaccgttagcatcaccagttggtggctgttccgggtgtgctgcggcagcgacctcttcgaacgcgttggtgccggactcgtcgatagccagaacctcgcgcggcgtactcgttgatgataagccatagtcttcgagcaggtgcaagactgatggttcgtggggatcgatatcgattaccccaacaaatcgatctgaaatcagcgtcgctccttgttccttgtccttatccctgagggggatgcgtgactgctggaccttaggaggtggcgtcttcatggcgctgagaaagaccttgcagcttgagatgtcgtgattctttgccttgtgaataggacaatggacatcacgagttggagaagtacgctgaattccacgctctttgcaggcacgaatttcagcgtggacgttgagaaaaacccagctggcttgcaaggtgtgttttctggttttgtggataggacaccaggaccttgtcacctcggaagtcatcctcgtcggctcgtgattcttgtcaaaaagacaaggtttggccgcactaggatccttctcgggctcggatgtcgtcgacgttccaatctccgctccggcgggagggtccttcgacagggagttgttctgggttgtacccactacgttctcgtttccggccattgatggactagctgagatcggcat

SEQ ID NO: 67762 - DNA, 272 bp, Oryza sativa
  unsure (1)..(272): unsure at all n locations
  Clone ID: PAT_MRT4530_68590C.1
cctacacganccacggtttganccggttgttgtgtaaaaaattgtgtaaaatgatggctagttaattgaatgccagaatgctgtgatgtttgcttgatgtgctggcattgagccctgtgtgtaatgagtgaactgctttgtgtgctgcattgatgctgccacctgttggttgcttaaggcttggaatggcgccttttttttttctctgttgcccccatctctttacatcgtagtagtacatctatctttgataaaaaaaaaaaaaaaaaaaa

SEQ ID NO: 67763 - DNA, 225 bp, Oryza sativa
  Clone ID: PAT_MRT4530_68591C.1
tacaacagacgcgccaaggggaaggagccgtgctgcactgtggatctcgggcagcggattggaccggagcatgggcagcgaggtcatccatatcaacatagctcgactgctgctgtacgggaagcaactcgttcatggacgggaactagactccatccggttacaggccgagcattcaatcagggaatagcggcttagcattacaaggactgaggacactggacg

SEQ ID NO: 67764 - DNA, 408 bp, Oryza sativa
  Clone ID: PAT_MRT4530_68592C.1
atggccgagatcgaatcggtctaccgcgggtctatggggacatcgacggtgacgtcggcgatgtcgtcatcaccggcagcgacttggcctcgcatgctcgccggcgaacgacggcgcggcggcgtaaacggagggcatctatgcgtagagggagacgcggcgaactcaccgagggcttggacgacgacggacggcaacggacggcgacggcggcgaggtcgaagcggcggtgacgtttgggtcaacgacgacggcggtgctccggcgctcttcggtggaaacggaggacgggacgaggacggcgacgacttggcgatcccgacggcggtcttctcaagcgacgacgacgaccgagacgacggcggcgcacggctggacacgcggcgacgacggcggcgcaagagctaa

SEQ ID NO: 67765 - DNA, 2906 bp, Oryza sativa
  Clone ID: PAT_MRT4530_68593C.1
ttagttcttgctattcgatcctacacccgctggttcggttgtagagtgtgtgttcgtctcactgctgaaagcccttgtcaggccgaaatctgaaatctttgccttgaaatttgcagtaagaaggatgttgtgggccttcacatctctatggatcaatggtggactgcaggacctgtgcaggtattccagtccattggcagagtccaacgcaatgttaaggcgttgcaaccaagtgaggggttcagtgtgaagatcttcttgacctctcaagtggtctgctaggcttcccccatccatgtactcatacacaagggctagatgtttcttatcgttgcaatagcctattaatgacaccaggtttctgtgatggaccctggctaagtgctgagcctcagccaaaaactctgttttcccttgattagatgtttgtgatctcatcttcacagcaacgggagttccattctctagatagccaaggtatacaggaccaaacccaccccttccaattatggttttgaaactatctgcgatgagcttgagttccttgtacttgaatctccggttctcaaatggattagttgcaccagtaacatctgctggtctcttctttctgcagtaccaaaatatagcaagtataagtagaactacaaacacaagtacgactgggggaacaacctcaagcacaagttttgtctttctcttgctttgattcagaatcagatcgcatttgtcagttccacaaagattcggattattctcggtccttagtgtcagtaatccttcctgagacttttgtagaagattagttgggattgatccactgaagttgttgcttgataaatctagaaatatcagcgatggcacttggcccagaaaatcaggtataggtcccgacagattgttgtgagatagatccaagccagttattcttggtggaccatggggagtgtaactgcagttcaagtcatcccatgaaaaggttgccggggagcatggatcacctgcccagtttctcttcacagaaaactttgtctggatgatcatcatagaatgtgcgtcttcagaataagtggaagattcattcagtgggcgcaccacgaatatctccattgcgctaatcaaaggcggaagattggagattgatgtcgccacaagggagatgccatgactgccagaaccttgaacaatgcccgagaaaacactagtcatcatggagattggactgaatgcactaactaatgtgttattatccagaataatatcaaattgacgcaatgcattcccttggatggcctccacctcagcaaaatacagaacaacaaagaacttggtggcaatgtcaacgttcatggaagaatctgaactccatgacaggtccattcttgaatcattcaacggagtggatacactgcgcatcactgcagatggcacgttgtatgtatcgttgggagagttctggactatcccattgacggtatctggcacatccgtccattctgagacatcttcatacttctgccatatcctatcgcggggatcatctgggaacctgatttgatgatcatcagttccaaagtggtagcgattgggcccgaatttgaccgtgttacggaagaagctgagcaagactagagcatgcgtcatattggaacctggataaattttttcctggaatggcctcaagtcaagcctggcattgacaatccttactgttgtccagtagttcacccctaggtagagatcaaaggtagggagcctgtttatcctatcatagttcccatagccaaaggcagccctcagcaagtacttgcaccacggacgtcgtcttatccccaagccgactcccagtccatcaccgcaaatactctcccgagacatcgagtcacctacacatggaacaaacaaagaaaccatattccgagacagattcttccaaaggaggacgcgctactcgtagatccctgcaaacatccgccatggcgtcgcaatggctgttgagatacgagttctacagccagatcttgcgtcctcagagcgtctcaacgtcttgatcctttttggcgatctcgatggaaagctcaagcttggccacctcaaatttcgtcttccaatatgtggcacggcactttctctcttcaagtgcatcctcgaggcccagatgggacgagcacattgtcgggtccaccgccactagagcgcgttcgttgacattcgaggcggacaaagtcacgggagaaacaggctcgacatcgagaacatcaggacctcctccatgctggacatcctcgtcaacaataccttcctcaaagaaggggatcatgctttcccctaagtccgccacccccgacaacacgtcctcgcgcgtcgggtcggccccacccttttcaaggacctccatgaggtcgatctcgtggtgcatgtgccggacgcaagtgaggacatggctgggaccggtgcgcaagccggtgcagatttcctcggttacgtggtccgcatgcttaccatggactgtttccagtcccttgataagatccatgagcgaggaaaccagcgtcgtatcgtcgaagtgtggtgggaccttcacgtttacccctaggttccgcgccagctggtcaagtcatgtataattttgcctcaagccatcccggattgactctaggtgccctatcgttgttggtcgtgtccggcaacgaggttcctcatcttttgaaggtcctcacacgtctcattgagttcactctcgagttgagcctcccgcccatctgacgacgtggagattgaactcataagggcgagctcagacagcacctcctgagtaccgacttcgatgagacggtgctcttccgccaacttctgtggcctaagtaagcaatcaacgggactaaatatcatctttagtcccggtt

SEQ ID NO: 67766 - DNA, 918 bp, Oryza sativa
  unsure (1)..(918): unsure at all n locations
  Clone ID: PAT_MRT4530_68594C.1
gatagcaccttactttaccattacgggtgctcttatgggttcgttttcatgatctgggcacgctagatggatcaggtggaatcgtggtcctcttgcgatctgcggtttgtgctgcaaaagtttggggagatttggtgatatgaagatatttcatgaataacctgcaggcttcgatctgattttaatttattaactgaattaacctggcgtggttgctgttcttattgacttcattggaacgtgttacacaatcacgaacctttcgaggatgtttccgttgtttggcatgcctgtctgtagattatgctgctgatattattcatggtagaaaaatattttttcagttagggttacctggtcatgtcctcaactcttatctttgtaattcttgtcaggaatgttaccatctatgtgatggtacataaaaaaaagccatctgtttgatatcgtcagcagaagccctttcatctttgtgattatcagttcagtcttcagtctgttcttttacatgcattatgttacttgcttctccaaaataggtctccatcatgcatgttactgagtccatgatgcaaacttagttggtagtatttcttttaatttagtaccatcactgttttagcaaagttcatcaatcctgcagatttcagatgcagtcttgcttggttcttgcaccctgtaataaatttgaacatcatgctaagtttgcaatttttttgtcactgggttgatgtagctatttactgcttgctgttgggagtcattcatagaacacttcacagtattgagtttgttgtgtgctgattgaatttggtgccaaaccaaacctgggagagatcaangcagagaatcagcatgataacggagactgagctatgctcttctggattctgtgtctggcttggtacgatagtggat

SEQ ID NO: 67767 - DNA, 509 bp, Oryza sativa
  Clone ID: PAT_MRT4530_68595C.1
tctgagcttgggaagctctctaatatatatacgttgttcttgggtaacaataacctttctggggaagtcccgaaagccctgtataatttgtcttctcttcagtacctaggtttggagattaataatctgggtggtacagtgccacataatattggcgatatcctccctaatctcaacttgcttggtctgaatcgaaacaagtttcagggtcagatccctatttccctaggagacatctccgggttggaaagaatagaattagggaacaacaatttctctggacaaattccttaacaagaataaacatgagaggtgaaaggggatcaccttgtcttaaagctctgaaatactttatttcctctcctggtgaaccattgaggagaatctttgaagaggaggaggaaagcaaatttgacacccaattacgccatcttgatccgaaacccaaagattgtaggactttcaacaggtaaggccagcttacagagtcaaatgcttttgaaatgtcg

SEQ ID NO: 67768 - DNA, 117 bp, Oryza sativa
  Clone ID: PAT_MRT4530_68596C.1
gacagagagggctacccggaggttctggccgaaacttccgggcgccgtttaattgcaaaaattttcctaagtgctgcccggaagttcctggcacttttgcccggaacctcatggcag

SEQ ID NO: 67769 - DNA, 501 bp, Oryza sativa
  Clone ID: PAT_MRT4530_68597C.1
atggcgaagctggcaggccgcggcagcaacggcgccaccgacgaggcgctgcgggagtggcggcatcacggcagcaagttctacgatacgttcaccgtctctggcctccgcgtcgacgccatccagcccggccgcgtcctctgctccttcaccgtccctcctcgcctcacggaggagatcgagatggaggcgagggttctgggcatcggcgagacgaccgggtgcgtcaccgtggaggtgaggaggaagggcgccggcgaggtgctggcgcacggccggatcaccaagtctcttggtggttttgacccgattttgtctgacgtgacggctgaatcagcatggatccatgccggccggtgggtggggaggaggtcgccgacagcgggatgcagtggctgcggcgcgtacctagccgtgccgccgggggcgcggtcggtgcgatgcgcgctctgccacgccgtgacgcgcgtccctcggccgcgccaaccacagcgagcttag

SEQ ID NO: 67770 - DNA, 350 bp, Oryza sativa
  Clone ID: PAT_MRT4530_68598C.1
tatttttttttctttttccttttcattttcttttatactctttgctgcaagtggggaggagggcgtgtgggcccctcttccggcggcggagaccttgccgtcggctagaaatggatcggtgattcgagcgttcgctttgcgccatcctagattgcaaggatggagaaactggttacacataaaaaggaacatgtcttggatgaaattttctgcctggagcttgtataagaatttaattgatcttcaggccgagttggaagtaaagtactacaggctttgcaggttcaataatggttttctcaaaatgttctctgcatttactgtcatacctccatgttatgcctactggc

SEQ ID NO: 67771 - DNA, 606 bp, Oryza sativa
  Clone ID: PAT_MRT4530_68599C.1
cccccgggctgcaggaattcggcacgagggagagtttgtgctgttttcattatagactatatctgtgctgaactttgatcccatttgtggtttaggtttatgtttttaactttgtattgtggattgttccattagcagtctatgaaaatttagctatattattgtgttgactctatcatgatattgaagttagcagtaatttgcatggctgtacgcctgcacgcgtccgtagttctagatcgcgagcggccccttttttttttttttttcctgtgctgctttattatgcagtaatgcacataatgtttttgttatggcacgttttagaacacacttcaaccattctcattatatactcatattgttcattttgtcatatgatgactgtttatcttccatggtggtgctctagcaaattgttataactctattattgtattttgagaaatctatggtccagtcttcatttggcatgaaaatcaaaatgttgctgttactctaaggatgtagttgtatgattgatagtagtagttctaattgtgtttcgtttgaagtatgattgattgctagtggtagttcaaattgtggattggtgcatgtgttggt

SEQ ID NO: 67772 - DNA, 282 bp, Oryza sativa
  Clone ID: PAT_MRT4530_6859C.1
atggatcgcttccagcccaaggcatgggcgctctttaataaaggggggcctcacagcctcccgctagagaggatcacccctcgacagttgggcctcggccaacctcacctgggccggatcgttatcattaatgatgaggacatcctccactattacccgctggcaaagacgcaacaaggggccaagggtgagaatgatgaggacatcctccactattacccgctggcaaagacgcaacaaggggccaagtggtccagttgtagtcgggcggcgaccgtgtga

SEQ ID NO: 67773 - DNA, 1756 bp, Oryza sativa
  Clone ID: PAT_MRT4530_685C.1
cgggctgcaggcagttggggaggtagcgaagctccgagaaaaatggccacgcggcactcgctgctccactcttcttcctcgccgccgcttctgctcccctctcaaaaccccacctccctctcctcctcctcctcacctccgccgcctccaaaccctaacccgcgcgctcgcctcctcctcctcagccatggcgtcgccgcccgcgaagaaggtgctggtgccgatcgcgagcgggacggagccgatggaggccgtcatcaccgtcgacgtgctccgccgcgccggggccgacgtctccgtcgcctccgtcgaccccggctccgcgcaggtcggcggagcctggggcgtcaagctggccgcggacgcgctgctcgacgacctcgccgacgccgaattcgacctcatctcgctcccgggaggtatgccagggtcttccaatcttagagactgcaaacttctggagaacatggttaaaaagcacgcaggaaagggcaaactttatgctgcaatatgtgctgcaccagctgtcgctctaggatcatggggtttgctgaatggattgaaggcaacttgttatccttcattcatggataaacttccttcagaggtcaatgctgtagaatcgagggtgcagattgatgggaactgtgtgaccagtcgaggaccaggaacggccatggagtattctgttgttttggtcgaacaattatatggcaaagaaaaagctgatgaagttgctggtccaatgctgatgcttgcatttaatttagtgcttacatcttttaaggtcatgcgcccccagcatggtgtggagttctcattgaaagagttgaattcaactagttggaatgttggtgaaacacctcagattcttgtaccaattgctaatgggacagaggagatggaagcaactatgataatcgacatcctcagaagggcgaaagcaaatgttgtcgttgcgtccttggaggaaactttggagattgttgcatccaggaaagtgaagatggttgctgatgttctgttggatgatgctcttaagcagcaatatgatctcattttgttaccaggtggtcttggtggtgcccaagcatatgcaaagtcagataaactgattggtctgatcaagaagcaagctgaggcaaacaagctatatggagctatatgtgcctcgccagcaatcgcccttgaaccacatggcctgctgaagggaaagaaggctacatcctttcctggtatgtggaacaagctctcggaccaaagcgaatgcaagaacagggttgtcgttgatggcaacctaatcaccagccaaggtccaggcacatccatggagttctctctcgccatcgtggagaagctgtttggtcgggagagggccgtcgagctcgccaaaaccatggtcttcatgtgagttgtgttgttacatactacgtgtaagacaacaccatagtcagactctgaatatgaggcatccttttgctcgtagctggtgtggtggaaagcacttcgtaatccttttttttggctttctcttccacaataacacgacgtcttgttatgtgtacaaccgtacaaatgcaataaaaagagatggatattgcaccaaaaaaaaaaaaaaaaaacattctatagtactggcgctagtaatggagcttgggtggcctcccgaatcatgaccagctcaagtgttggctccgctgctaatgatagtaaggacttaaaggagagcatcaggaagcacctgaagagaggctag

SEQ ID NO: 67774 - DNA, 2166 bp, Oryza sativa
  Clone ID: PAT_MRT4530_68600C.1
atgccggcaccctccacggactctcccgcggcggaccagtccccggggaggggaaggccgcgccggaggctgggacgcaagccggggcccaggcaggggtgcgtccccgcgccagcggccgcagagcagctcgccgcggggtggccgccgtggctcgtcgccgtcgccggggaggccctccgcgggtggacgccccgccgcgccgacaccttcgagaagctcaacaagatagggtcgggcacctatagcaacgtgtaccgcgcgagggacaccgtctccggccgcatcgtggcgctgaagaaggtccggttcgacaatctcgagcccgagagcgtcaaattcatggccagggagatcctgatcctgaggaaactcgaccatcccaatgttatcaagctggaggggttggtcacgtcgaggatgtcatgcagcctgtacctggtgttcgagtatatggagcatgaccttgctggcctggcagcgagcccggacgtcaagtttactctgccgcagataaaatgctatgtgcagcagctattgtcagggcttgagcattgccacaataataatgtattgcatcgggatatcaagggatcaaacttattgttggataacaatgggattcttaagatcgccgactttggcctggcaacattctttgacccacgacataaacgaccaatgacgagccgcgtggtcacgttgtggtaccggccacctgaattgttgttgggggcgacagactatggtgttggtgtggatttgtggagtgccgggtgcattctggcagagctcttgcatgggaagcccatcatgcctgggcgtactgaggagaaaattaaagaaagttgtcaatccatgattgccatagaggtagaacagttgcacaagattttcaagctatgtggctccccctcagaggagtattggaaaaagtccaagctgccacatgctacaatattcaaacctcagcagccctataagcgttgtatcagagaagcatttaaagattttcctccatcttccttgccgttggttgaaactctgcttgcaattgatccagctgagcgccaaactgctacatctgccttgcaaagtgaagtatgtccatatcttttcctccttagcattgtaacagagaatgttagtgtgaaatttggtttgtaccaaggacctcatctttatgaaggtctaaatggctactttgacttccagtataggttccaaaagttctttgcaactgagccttatgcatgtgatccatcaagcttgccgacatatccaccaagtaaggagatggatgctaagatgagagatgaggaagctagaaggctacgagcagctgcaaaggccaaaggagagggggtaaaaaggactcgaacgcgggatcgatctcaaagggcaggaccagctccagaggctaatgcagagcttcaagcaaacctagatcagaggcgacgcatgataacgcatgccaatgccaagagcaaaagtgagaagttccccccacctcatcaggatggagctatgggtaacccattgggatccagtcgtcatatggagcctatgtatgagcaccaggatgcttccttcagcacagtagtccccatccagaaggggtcctcacaaacatggtctggaccattggttgatccagcagctctagggcaatcgaggcggaagaagcaaactgccctagatgcgaaggctgcagcttattcaaagcagctccagaaggacaagggcggaacaagagcacgataagaggaactcaatacagtttcttttacatgtttttcatcgagtttaaggggaagtttttagaatggtcagtctgtagatgaattatttccttctgttttgttcctttcgtgcggaaagaaagcggtagtgcttcagtaggaagaaattcatccagcttatgtatatgtggtagtgttttctgttcatctcaggtgcttctgaacaaattggtgtccggaaccaaaggtatttaagctcaacgtgacaattcggttgcccttgtgtatatatggagtattctttcttctgtaaataaacggatggttcatgcatctcagtggaattactgtcttgtctttttggtgcatcggactggttccgtatgttgcgtgatattgcttatttgaatgtcgctggttatat

SEQ ID NO: 67775 - DNA, 426 bp, Oryza sativa
  Clone ID: PAT_MRT4530_68601C.1
atgccgatgcgaggccattccggccgtaaatgcgcgccgcgccaccgagcggtgcgtggtcacgcatacacggtacacccccacccgcgtttactcctactggagtacggagtacgtgcgcgcacggtgcatccccgtctcggccatttgcgagtcgatcccaacaatcgcctcgccttgcagtttgcagaggacgacgcgtgtgcgccgtgcgccgctcgctcgctcgcgctcgcgtacgagccacaggtgcggtggggaggtgacaggtcgcgagcggcgcgtacggcggcggagtacgcgaaaacaaccgtgcgttccccgcgagaggggagagaggccgcggcccgcgtccccgcctcgtcaagtgcatttcgcgctcgcgatttgtttttctaccaccaccactatctctctctggcgtga

SEQ ID NO: 67776 - DNA, 275 bp, Oryza sativa
  Clone ID: PAT_MRT4530_68602C.1
acgcgtacgcctgggcaggtggtgcacagcctcggtgagggttgccagtcaggaagggtatacccgatttgctcgctaccacactaacggccggttgtgaagcgaccccgcgtgggccatacgcacacctggtgtttaccgtggacagatcaccattagttcggaatcctagagtaacctaaacggtgcaagtctacagccaagccccctggaggaggggctacaaccacagaactccaggcggctacagggagctcggtcccaccgatgtatct

SEQ ID NO: 67777 - DNA, 180 bp, Oryza sativa
  Clone ID: PAT_MRT4530_68603C.1
acatggtctgagatgggagtgtgtggaccagggtttacaattgcgacagacgcttccgtttcgggcaccggtggaattcggaatttcccgaaatccggtggaaaactggatttcatcggaatcgtaaaccctggcgtggacgatcgcgggatccgacgggagaacgcgcgaaccagacag

SEQ ID NO: 67778 - DNA, 223 bp, Oryza sativa
  Clone ID: PAT_MRT4530_68604C.1
gcggacaacggatattgtcaatgaactgcatgccatgcgagaatctctcttgagagaatacaggattgaagatggaagttatgtcaatgtaacattggaatgatcatgtggagataccatgcagcggtaatttttaaaatattgcagacattgctgtactcccttttaaagtacacaaattttactatggtctctactagactgtaggtaaaagatacgcccc

SEQ ID NO: 67779 - DNA, 513 bp, Oryza sativa
  Clone ID: PAT_MRT4530_68605C.1
atgccggtgtcctccccaagctctcgcaccagcggcctccttcagcgccaccgcagcctcctcaagcagcagtggcctcctccagctccattgcacgccaccaacctcatcatgctcgtgcgcgaatatcctcatggagctctgccgccagctgtcctcatcgggagagtgcggttccgggctcataaggggccgactttcctggagttctcatgtttagactctgttggcgaagtagctgctgctgttgtaattggtttctctgcaaaggcagattctttagaatctgttgttgttgttgctgctgttgctgctgcatttgcaatatccgttgctgttgcaaaaggttcagttgagcagccgcagcagcttgagggttctgctttgtcagctgcagcaaatgttgctgctgctgttgctgttgcaggaatgctgatgggtctgaagtcggctgctccatcttcaccgcactcaaacttcttagagcttgcaactgctgaggctcaattttaa

SEQ ID NO: 67780 - DNA, 2796 bp, Oryza sativa
  Clone ID: PAT_MRT4530_68606C.1
atggtgccgtcggggccgccgaacccgatgggtcctgggcagccggttggcgcggcctcgttgctcaggacgagctccagcctgctcagcggcggccagcaggggatgggcagtggcggaggcatgcttccttcgcagtcgcccttctcgtccctcgtgtcgccgcgcacgcagtttggtgctaatggcctgctgggaggtggctccaatgtttcctccctgctcaaccggccgtttgggaatgggggacatatgctcggtccggggtcgatgccaggtggtggtgggcttccaatgaataccctccagcagcagagaggagggcttgatggtgctggcgatttggttggcgcgggaggttctgattctctctcgttcccttcatcgtcgcaagttagtttgggcaatcagctgggttcagataatctgcatccaccaccgcaacatcagcagcaacaacaacacctggatgctatgcaggacttgcagcaccagcatcagcatcagcagcaactgccaatgtcttacaaccaacaacagttgccaccgcaaccgccacagcagccgcaggctacagtgaagttggagaatggtggcagcacaggtggggtcaaattggaaccgcagatggggcagcctgaccagaatagcacagcccagatgatgcgcaatgctagcaatgttaaaattgagccgccgcagttgcaagctttgaggagtttgagtgcggtgaagatggagcagcagagttcagacccatcagcattcctgcaacagcaacagcagcagcaacatttgctgcagctgacaaagcagaatcctcaagctgctgcggcagctcaactgaaccttttgcaacagcaacggatattgcaaatgcagcaacaacagcagcaacaacaacagattctaaagaatctgcctttgcagagaaaccaattacaacagcaacaacagcagcagcagcaacagcagcagctacttcgccaacagagtctaaacatgagaactccaggaaaatcggctccttatgagccaggaacctgtgcaaagagattgactcattacatgtatcatcaacaaaacaggccacaggataacaatatcgagtactggagaaactttgtcaatgagtatttttctccaaatgctaaaaaaaggtggatgtatggcattgtgagatatgcaatcggaagcctgggcgaggctttgaatgcctctggtcagattgttttggactataccaaagcaatccaggaaagtgtctttgagcagttgcgtgtggtacgcgaaggacatctaaggatagtttttaatcctgatctcaagatcgcttcttgggagttttgtgcaaggcgtcacgaggagcttattccacgtagatcaataatcccacaggttagtcaactgggcgcagttgtgcaaaaataccagagtgctgttcaaaattcgacaaatttgtcaactcaagacatgcagaataattgcaactcgcacctgcctagtgtccaagtgcccccaaagtgccagaagacacagtgctgtgcgaatggcatgagccttaaatacgtgaaaaactataagcgtaaagcattctggatctatgggtgtatggttattcttactgttctagcaccgtttgttgcatgtgcccgccaattggctaaagcactggaggtgcctttggtaaatgatctgggatacacaaaacgatatgtgcgctgccttcagattgctgaggtggtaaactgtatgaaagatttgattgattatagcaggcaaaatgggtctggaccaattgctagtttgcatagctttcctcggaggacttcatcaggaggggtaaaccctcaacagtcacagcagcaacagcctgaagaacagcaatctatcccgcagagttcaaaccagagtggtcaaaatgctgctcccatgactggtgtgcaggcttctgcctctgcaaatgcagatgtgacatcaaataattctctcagctgtgcaccctcaacgtctgcaccttcaccgtccgttgttgggctcctccaaggttcaatgaactctagacaagatcatccaatgagcagtgctaatggtccatataccagtggaaacagtgctgcaattcccaaggtgaactcgacaacctcactgcagtcaactccatctacctcttttccttcaccagtgccaacaacatccaataacaacatgatgcctgcccctcagaacacaaaccaactcagctccccaaccgcatcatcaaacctaccgccaatgcagccacctgctactcgacctcaggagcctgatccaaatgagtcccaaagctcggttcagagaatattgcaagatttgatgatgtcaccgcagatgaatggtgttggccagcttgggaatgacatgaaaagaccgaacggacttacatctagtgttaacggagttaattgtttagttggtaatgctgttacaaataactcaggaatgggaggaatggggtttggggccatgggtgggcttggtccaaatcatgcagctagtggattgagaactgcaatagcgaacaatgcgatggcaattagtggtaggatgggaatgaatcacagtgcacatgacctatcacagttgggccaactacagcagcaacagcaacatcaacatcaacatcaacatcaacatcaacagcaacagcagcagcagcagcagcagcaacatgacttaggaaaccaactgttgagtggacttagagcagcaaacagcttcaataaccttcagtatgactggaaaccatctcaataa

SEQ ID NO: 67781 - DNA, 228 bp, Oryza sativa
  Clone ID: PAT_MRT4530_68607C.1
atggatcttggtcgggcaagaaagcaagaaccaatcagcaatccgttgggagctactgtcccccgtgggatcggggatccaggtagccttaccgcgggatctgggaggccgcggagggtgaggcaggcagcaggctgctgcggcggccgggaggaggggaaaggttttggttgcggcagcggcaggggcacggcggcggggagccaacggattgagacggggatgtga

SEQ ID NO: 67782 - DNA, 327 bp, Oryza sativa
  Clone ID: PAT_MRT4530_68608C.1
atgaagggaacgagagagaatcagaacctcccgcgccaaccaaatcgccagcaccatcaagccctcctctctgctgctggaggggaggaaacattggagccacctcccagcaggccattagcaccaaactgcgtgcgcggcgacacgagggacgagaagggcgactgcgaaggaagcatgcctccgccactgcccatcccctgctggccgccgctgagcaggctggagctcgtcctgagcaacgaggccgcgccaaccggctgcccaggacccatcgggttcggcggccccgacggcaccatccttgccggcaatgacaaagggtga

SEQ ID NO: 67783 - DNA, 996 bp, Oryza sativa
  Clone ID: PAT_MRT4530_68609C.1
atggcgggagcggcgacagtggctggtggaagagagccgacgagtagcggagctcgggctcgcggcgtggggcggctagagagcgtgacagctggtggaaaatgggggaaacggaagagggtcgcatggggagggtttttgtgggcgcgagaaggcggaaccgcgatcgggagtagcggagttgtcggccggagtagggtggggacgtggagatcttaccacctcaaggctttggatgcccggcaggatgcacatcatgtgcattaccggttctgggcgcggctttgcatcgagggcatcccaatgcatgcgcgcactgaggtcacgacagtcaagttgatcgggcccagatgtgccatctacttcattgaagagtactcgcgccgccacaactacaaccgcaccttcgacctctggatttggacaaacgaccccgacgccatcccaaaaatggcttggctggggttggtaaatccggacgatgagccggtccccattgatacccctgtgcctgacattgaccccatgcacaacccccatctttcggggcccaaagatgggtggtcatccccggtcattatccacttggataccatagaagatcatcaacctcggccaatgttgtataagcagtatgagtggtcctatggggcctatgatgatgtttctcattcccgctcgcgccctctgcctattccatgcaggcaggagaccagtgcggtgcagggactagatgaggacccagatggcaacggcggtcgcccacacccgcgttaccggagccgctctagggggaccagggaagccaggagcagcaagaagaccccaagagagtcgaagcggctatcatcttctcgccagatggtgatcaggtgtttcaagcagccactcactccgcggtccctcaagatgattgctgacttggtgaagaagggcggctgcaagaaactgaagctgaaggctaccaagggaaaggcggctgttgccccggcttaa

SEQ ID NO: 67784 - DNA, 1200 bp, Oryza sativa
  unsure (1)..(1200): unsure at all n locations
  Clone ID: PAT_MRT4530_6860C.1
gctagctaactaagcttaccacactcacatactcctatatattttggcacgcattgattacctgctagctccttgagcaatatcaatatggctcagccgacttggtcagcaaggcgcgtcactgccgccctggtcgtgatggtggtggtggtggtgcacgcgtccagccaccctcccccaaattccccaactccgggcctccggcaagccaagaaacccccaacccaactccggcgatggcgtcgcagctggtggaggagcaccggtcgggcgcggaggtccacacggggcacgagctctgcgagcggaaggcccgggagctgctggtggagctcggcctccccgacgggctcctcccgctgccgtccctggaggaggtcgggtacaaccgcgccgccgggttcgtgtggctccggcagacccaggcgggcggcgccacccacacgttcgacaccatcgggaagcaggtgtggtacgcgggcgaggtgacggcgttcgtggagcaggggcggatgcacggcgtcgccggggtgaagagcaaggagctcctcatctgggtctccatctccgagatcgtcctcagcccctccggcaccaagctcgtcttccgcaccccggccggcctcggccgcgccctccccgtcaccgccttccagctcaacccggcgcccccggagccggagaagaaggacgccgccgccgccgacgaggccgacgccgccgccaccaactgatccaagaagacatgggcgttgcgttttagcagcggtaagtaagtagtgagatccgggccgtcgtggtgaaaaagattgtagttgttgttatatgcttggaattcgtgagcctacgagctcgatctgatctcccatctctctccagtctccagtgtgtctgtccatggatgatgctgaaataaatatatgttcttgtggattcctaataatgaaattcctaaaaaaaaaaaaaaatgccagcttgatcgatggcttggtgatctaaaaaaaaaaaaaaaaaaaacaaacccaggaggacggtgtcatccataagcctcggcgccaacctcttcgaccgcccgcagcccaactcccccaccgtctacgactggctgtacagcgacgagaccaggagcagccatcgctgaactaaatnntnnnnttgatcggaggctggtcgatctctctgtcacgccacgtttgctgg

SEQ ID NO: 67785 - DNA, 450 bp, Oryza sativa
  Clone ID: PAT_MRT4530_68610C.1
gtattactatatgtcgacatgccacgtgaatcgcagaatgcctctggtcagattgttttggactataccaaagcaatccaggaaagtgtctttgagcagttgcgtgtggtacgcgaaggacatctaaggatagtttttaatcctgatctcaagatcgcttcttgggagttttgtgcatggcgtcacgaggagcttattccacgtagatcaataatcccacaggttagtcaactgggcgcagttgtgcaaaaataccagagtgctgttcaaaattcgacaaatttgtcaactcaagacatgcagaataattgcaactcgtttgttgcatgtgcccgccaattggctaaagcactggaggtgcctttggtaaatgatctgggatacacaaaacgatatgtgcgcttgcttcagattgctgaggtggtaaactgtttgaaagatttgattggt

SEQ ID NO: 67786 - DNA, 609 bp, Oryza sativa
  Clone ID: PAT_MRT4530_68611C.1
atgctcacacttatgttcttcctctctcgcactttcttcccggctgttctcctgttccggaactccgtctgcttgcgtacttgcacgagtaggcaggcaatcaagtttttggggagcgtattggcgcaactgctcctgttctgcttcgacttcttcctctgcatcgcgatggcttccattggagatggcgcaccaggagctgtagggaacggcagtgctccaggaggaggagggaacggcagtgctccaggagacaataccaacgaaggcaatacaaatgcctcaacctcctctgcactgttttctggtggggaggaagctgatcatggacgtcggcggcaggcagaggcgccgctgctagagaagaagggcagcaccggcatcggcaatgggtactgcattgagaggtgcccaggtgcggcgtcgaccggcgtaaggccgcgagctccggcatcccctacaggagcttcctcttcgtctggatcatcacgctctgcacagattcgtgaacctcaaccaactattgaatttgggcatgacactgagggcttttttggagagattctgaataactatagcttctctcataatcagaagctctccaaataa

SEQ ID NO: 67787 - DNA, 399 bp, Oryza sativa
  Clone ID: PAT_MRT4530_68612C.1
atggccacccgagctgcccacgtcgtcgccgattccgcgccaccccgcccacctcctcagccccacgcgttcgctctcgcccgtgagaccgcgtcgccccacgttcccgcacttctcccccaatcctcctcgcaaaaactagctatcaatacctccacgtccccaccctactccggccgacaactccgctactcccgatcgcggttccgccttctcgcgcccacaaaaaccctccccatgcgaccctcttccgtttcccccattttccaccagctgtcacgctctctagccgccccacgccgcgagcccgagctccgctactcgtcggctctcttccaccagccactgtcgccgctcccgccatcgccgccctccagccgcccgccaccactgctctag

SEQ ID NO: 67788 - DNA, 4300 bp, Oryza sativa
  Clone ID: PAT_MRT4530_68613C.1
tttttttttttttttttctgggttatcatgaaagattgacggtattcttgccagtcgaatctcgcgatattgcctacgaaaacattcctgatactttttccactactaaattatggcagcttatacaaagtcaagtaaggctacaaagagagagaatccttaggcaaagaaagatatcagcacatatgcttgctaagggtggaaggcggaggggatgataaattacatatcggatgtcatctgacatggaaaaaaagggagggaaaacttcttttccgggtaaggagtaacaccgtaccatcaaggatggtggcagatgcaaggcaaggctctaatccttttaactctatctttcggtaagacaactgaagcaggcagcaaaatgccatagttgcacaatacacaagcagctaaacgaacagttacaacatacagttgacagggctcagatgctttgctgtcgcgaatgttacctttttccatgacagcattattgcaaagcccaaatgctttgacacagttcgaggtgtcggcactgttacttatgcttcataagcaatgaacccaatgagagcagccaagtcgtcatatcaaacttgtaatgttctatctttattgagatggtttccagtcatactgaaggttattgaagctgtttgctgctctaagtccactcaacagttggtttcctaagtcatgttgctgctgctgctgctgctggaataagttcctcgtgtcgtcttgcacatgatgttgatgttgctgttgctgctgtagttggcccaactgtgataggtcatgtgcactgtgattcattcccatcctaccactgattgccatcgcattgttcaccattgcagttctcaatccactagctgcatgatttggacctagcccacccatggccccaaaccccattcctcccattcctcccattcctgagttatttgtaacagcattaccaactaaacaattaactccgttaacactagatgtaagtccgttcggtcttttcatgtcattcccaagctggccaataccattcatctgcggtgacatcatcaaatcttgcaatattctctgaaccgagctttgggactcatttggctcaggctcctgaggccgagtagcaggtggctgcattggcggtaggtttgatgatgtggttggggagctgagttggtttgtgctctgaggggcaggcatcatgttgttattggatgttgttggcatgggtgaaggaaaagaggtagatggatttgactgcagtgaggttgtcgagttcaccttgggaattgcagcactgtttccactggtatatggaccattagcactgctcattggatgatcttgtctagagttcattgaaccttggaggagcccaacaacggatggtgaaggtgcagacgttgagggtgcacagctgagagaattatttgatgtcacatctgcatttgcagaggcagaagcctgcacaccggtcatgggagcagcattttgaccgctttggtttgaactctgcggtatagattgctgctcttcaggctgttgctgctgtgactggtgagggctgacccctgatgaagtcctccgaggaaagctatgcaaactagcaattggtccagatccattttgtctgctgtaatcaattaaatctttcatacagtttaccacctctgcaatctgaaggcagcgcacatatcgttttgtgtatcccagatcattaaccaatggcacctccagtgctttagccaattggcgggcacatgcaacaaaccatacacccataggtccagaatactttgcactgatattttttctcttcacatgctgctgctgctgctccgctttctcaagcttactggtggcagcatcaagccaacagacaagtctgccatggattgaggcagaaacagaggagaacaactcaagctcctgcatcgccgcccgtaccaccggccttttccagcttccatgccggtgtcctccccaagctctcgcaccagcggcctccttcagcgccaccgcagcctcctcaagcagcagtggcctcctccagctccattgcacgccaccaacctcatcatgctcgtgcgcgaatatcctcatggagctctgccgccagctgtcctcatcgggagagtgcggtggcgtgcggtgggtgcacaacggcgttggtcccatccttcctgatgcggggtggccagagctcagtaatggcgccgcattgctgacggcagccacagcccagcgagacagagagagagaacgagcgtgacgtattttggtcagctcatcaagaaaaacagggcaaaattcatttgattgagaataaatggaagaaatggcattgtggtgtgttgccgagttgcaattattctgcatgtcttgagttgacagatttgtcgaattttgaacagcgctttggtatttttgcacaactgcgcccagttgactaacctgtggtattattgatctccgtggaataagttcctcgtgtcgcctagcacaaaactcccaagacgcgatcttgagatctggattaaaaactatccttagatgtccttcgcgtaccacacgcaattgctcgaatacactttcctggatagctttggtatagtccaaaacaatctggccagaggcattcaaagcctcgcccaggcttccgattgcatatctcacaatgccatacatcctgagggaaaactccagtagtttggcgaccacttccatagagagatacacaccacctctttttagcatttggagaaaaatactcattgacaaaatttctccagtactcaatattgttatcttgttaggaataacccaaaaacttgcctgtggcctgttctgttgatgatacatgtaatgggtcaatctctttgcgcaggttccgggctcataaggggccgactttcctggagttctcatgtttagactctgttggcgaagtagctgctgctgttgtaattggtttctctgcaaaggcagattctttagaatctgttgttgttgttgctgctgttgctgctgcatttgcaatatccgttgctgttgcaaaaggttcagttgagcagccgcagcagcttgagggttctgctttgtcagctgcagcaaatgttgctgctgctgttgctgttgcaggaatgctgatgggtctgaagtcggctgctccatcttcaccgcactcaaacttcttagagcttgcaactgctgaggctcaattttaacattgctagcatggcgcatcatctgggctgagctgttctggtcaggctgccccatctgcggttccaatttgaccccacctgtgctgccaccattctccaacttcactgtagcctgtggctgctgtggtggttgcggtggcaaatgttgttggttgtaagacattggcagttgctgatgatgctgctgctgctgcaagtcgtgcatagcatccagctgctgttgttgttgctgatgttgcggtggttgatgcagattatctgaacccagctgattgcccaaactaacttgcgacgatgaaggaaacgagagaggatcagaacctcccacgccaaccaaatcgccagcaccatcaagccctcctctctgctgctggagggtattcattggaatcccaccaccacctggcatcaaccccggaccgagcatatgtccaccattcccaaacggccggttgagcagggaggaaacattggagccacctcccagcaggccattagcaccaaactgcgtgcgcggcgacacaagggatgagaagggcgactgcgaaggaatcatgcctccgccactgcccatcccctgctgaccaccactaagcaggcttgagctcgtccggagcagcgaggcggcggcgcccaccggctgcccgggacccatcgggttcggcggccccgacggcaccatccttgccggcaatgacaaagtgctccgaacctcccccgcacaaaccgctgcaagatctcgcgcgccttcactcagctcgccatccttccaccgtaagatccaccggcattgagcaagaacgagcggtcatccccctcccccccccgccccccgcgatccgccccccgcccccccgccaaatcgccgccgccgccgcccaccaccggcaccgccacttcggctagggtttagccccgccgccgccgccaactccgccgccgccgccgtgggccaaatttacacaataaaataaaataaaataaaacctcgcgagtttattactcctctcgctttttttcttctctctctctctctctcgccttcgcgatgggatttggttttctcc

SEQ ID NO: 67789 - DNA, 167 bp, Oryza sativa
  Clone ID: PAT_MRT4530_68614C.1
cgggaccgggccgggaatcccggggcgagcccacgcgcgcggttataacaccagcatccacaacacactccgcggctactatagcaacgtgtgtagacacttaccgcccccctgcggagacgcgaagagctactctaacaagccgatggggaggcccgccagcgaca

SEQ ID NO: 67790 - DNA, 300 bp, Oryza sativa
  Clone ID: PAT_MRT4530_68615C.1
atggatgagactgttgctccccatccctctacaaatcatgcaattccaagatctgctctcaacccagccaaaccaagctcacgaatgacgcagctgacgcctccgccgtcgtcgctgcaccgctgccaccgagccgtactaggcctgccgcggcggagaaggctggcgctgcgcaagccgtcgacgctgtggcacgccgtcgccaagccaccccggggccgccgctgcaagccgtcgacgcagccgcacgccatcgccgagccacctggggaccgccgccacgtgatctggccgccctag

SEQ ID NO: 67791 - DNA, 372 bp, Oryza sativa
  Clone ID: PAT_MRT4530_68616C.1
atggagatttgcctcgtgggcctcgtgggcggtggccggcggccggcgggggagcccgcgcactgcccctccgctgccgcgtcgcccgtcgccgacgccctcctctcccgcctcgcactgtcggcctcgcagcgacttctccaccccggctcgcagcgcccgcctcgccgccagcaggctcgtcgtaacgcgtccctcctcctcctgatccatcccgatcccgtgcctaccgccacagccgccattcaacgaccggccgccgccaccatcaccgcctcgtgggcctcgtgggcggtgggcgacagccgacctgctattgaacatgataaaacatttatccttcctgatctagctcagttaagagtaaagtag

SEQ ID NO: 67792 - DNA, 412 bp, Oryza sativa
  unsure (1)..(412): unsure at all n locations
  Clone ID: PAT_MRT4530_68617C.1
ttgttttttatatgatcataactatttttatttatattggataaatcatcgaagttacagctcaacggtacatttaaaccaaaaaaaaaaggtgcaatggcaaaaaaaaaatgaagttcacacaattgtctcactaattaaagctatctacagctttctacatgtagaactgattaattggccgtttctcttttcccntgtaatctgtaaatcatttagtnttctatatcctgcaaaaacaaaaatcaggcaaggtatattaatgattcatttgaggtagtgaccatgtcgaaagtcagtgttcacatttcaacagaaatattcaaaatccaagtaaagactaagtgttctaaaatgatgtgcatgtcatcaaggaattactagatagcatgctctataccaactttttgga

SEQ ID NO: 67793 - DNA, 162 bp, Oryza sativa
  Clone ID: PAT_MRT4530_68618C.1
atggcgctgagaaagaccttgcagctcgagagcatggacgttgaggaaaacccagcaggcttgcaaggaggatccttcgacatggagtcgccccgggttgtagccactgcgttctcgtttccggtcattggcggactagctgagatcggcactgtggtgtaa

SEQ ID NO: 67794 - DNA, 560 bp, Oryza sativa
  Clone ID: PAT_MRT4530_68619C.1
acagcccgccacatcctgccctgaacggcgctggcgagtctactacccgccatcgtcgagagggtggcgagaagttctctcagcgccccaccatgctcgaggaggtcgatccgaggccaagtcgccggcaagaagatctactccgagggtgacgagctcgcccacaaggtcgccgagctctccgagaaggtcgaggacctcatcgccgacgagctcaaggacatgttccggcgagctcaagcgcgagtaagacgatatggtggattaagataccacgtttaccagaaggtcacgtcctaaatcgaggaggtttcctggaaggccgacctataggaggtctctggccgaatgtgcatacagagcacgagcttggttttggttttctcttgcataagccctgatggtactgcaatgtctttttcagttggattgatatttctcgggtagtagtcgtcaggatgtatcggcccgtgtcgcatgtatacacgcacgcacgcagggtactcagtcagggaaatgcaaatggatcttatatctttgaaaaaaaaaaaaaaaaaaaa

SEQ ID NO: 67795 - DNA, 5605 bp, Oryza sativa
  Clone ID: PAT_MRT4530_6861C.1
atgtctttcgtgattagtctcacccttctcaccataatagaagatgctataactggtaataatttgattagctcctggtttggaatgatgccgcgctacaagcctgagtacttgtttggtgttgagtgttttgtccaggagttgtgtacgatgtcctttgtcattggatttgggactgcccctttttatgcccagattcctcatgatcgtcacgaagagaagtgccgagtcaaagtcaccttgaacagtaatagtgaagatatcccctcagtaatgttcgaagctggaggaagaaactacatccatgcatgtcaggaggtggcaaggatcgccataggagagctccgcgatcattatagtgatcagttggccgacactgagtatcgctaccatcctcgtcaaccccagggaagtgaccgtggcagttaccttgagactgaaggaattgagaatgatgctaccacaaggcatttggttgagatgctgtgggctatggatgaaagtcgtgcggagactgtgttagcggctcaagatcgtgaagaccggaatcgtggtaagatttgcaagttagaagacaaggtggatcgtttggagaaggaactagccacattgaagggagaagcaccaccgcagaaggccaggattcgtcttaccgcaaggaagagagctctatttgtccctcgctatcaattggcgccaaagtttcccccggtttctcttcttgtgccctgtccatgccagatggtgaacactcgcagcaacgggaatggccccaacaaccccaataacaacaacaatggagagaatcccacacttacccaagttcttgttcaacagactcagttaatgaacatgatgatgcagcaactccagaatcagcaaaaccaaggaaataaccatgcacctccccagaacaagttagcagaatttcttcgtgtgaggccgcctattttctctagtaccactaatcctgttgaagctggcgattggctgcatgccatagagaagaagttggatttgcttcagtgcactgatcaggagaaggtctcatttgcatcacatcagttgcatggcccagcctctgaatggtgggatcacttccgccttaacaggactactgctgaacctatcacttggcttgaattcaccgctgctttccggaagacgcatataccatcgggagtggtgtctctcaagaagaaggaattcagatcgctcacccagggatctcgctctgttacggagtatttgcacgagttcaatcgtttggctcgttatgctccggaagatgtgcgcaatgatgaagagcgtcaggagaagttcttggaaggacttaatgatgagctttcttacccactcatgactggggattatcatgatttccagaagttagtggataaggctattcgtctggaagacaagtacaaccgcatggagcagaagaaacgccggattgctcaattcaagacacaacaggggaataatcagaagccgcgtcttactttaggaccccagaccatgccacatggaggttcttcatctgttgttcgtccgcagcgtcagttcttcaacaacaatgctggcaataacatccgtaatcaagctccacgccctgttgcagctccaacacagcaacaacctgccaagagggagcaaggcagcaagcccgtggttgtccctgcccagaataactctgctgtaccagcatcaaaggcccgtgtcaatcatgtcgctgctgcagaagctcaagatgctccagatgtgattttgggtacgtttcttgttaactcagttcctgcaacagtgcttttcgattctggtgctacgcattcattcttatctatgagttttgcgggaaatcatgggatggaagtagaagatcttagacgtcctttgatggttagtaccccaagtaatcaagcactctctttgcaacgtagcccctctgtcagaatagaaattcaaggcgtaccatttctggccaatcttatcctgttagaatccaaagaccttgatgtcatcctagggatggactggttagccagacataaaggtgtgatagactgtgccaacagaaaagtaactctcaccagcaatgatggtcgagttgtaactgttcatgcattgtcttctgagtctttaaggtcaagactgaacccaataactttggaagagattcctatagtccgggagtatcccgatgtgttcccagataatttacctggtatgccgcctaaaagagatatagagttcagaatagatttggtacctggaacaactccgatccataagagaccttatagaatggcagccaatgagttggcagaagtcaagaggcaagtagatgatttgcttcagaaaggatacatcagaccgagttcatcaccatggggagctccggttatttttgtggaaaagaaagatcatacccagaggatgtgtgtggactatcgtgcattaaatgatgtgactatcaagaataagtacccgctacccagaattgatgatttgtttgatcagcttaaaggtgctactgttttctccaagatagatcttcgatcagggtatcaccagttaagaatcaaagaggaagatatacctaagacagcttttaccactaggtatgggttgttcgaatgtattgttatgtcttttggacttaccaatgcccctgctttcttcatgaacttgatgaataaggtgtttatggaatacctagacaagttcgtggtggtctttattgatgatattcttatctactctcgaaccaaagaagagcatgaagaacatcttcgccttgcattggagaagctacgagaacatgaactatatgctaagtttagcaagtgtgaattctggttgtctgaagtgaagttccttggtcacgtcatttcagccggtggagttgccgtcgatcctagtaatgtggaatccgtaaccaactggaaacaaccgaagacagtttcagagatccgcagtttcctaggcctcgcaggatattatcggaggtttatagagaatttttccaagattgctaagcctatgacacgactgcttcagaaagatgtgaggtacaagtggtcggaagaatgtgagcagagttttcaagagttgaagaatcgcttgatatcagctcctattttgattttgcctgatccaaagaagggtttccaggtgtattgtgatgcatccaaacttgggttaggttgtgtactgatgcaagatgggaaggtggttgcctatgcatctcgtcagttacgtccgtatgagaagaactaccctactcatgatcttgagttacctgcagtagttcatgcgttgaagatttggcgtcattatctcttcggtactcgtacagagatgtacaccgatcacaagagtttaaagtatatctttactcagccggatctgaacatgagacaaaggagatggttggaattaattaaggattatgacataggaattcattatcacccaggaagggctaatgttgtagcagacgctcttagcaggaaaggctattgcaatgctacggaaggacgacaattgccattagaattatgcaaggaatttgaaagattaaatttgggaattgtcagtagaggtttcgttgcagccttagaagcgaagcccactctaattgatcaagttagagaagcccaaattaatgatcctgatattcaagaaatcaagaagaatatgagaagaggaaaagctatcggtttcttggaggatgagcaaggaactgtatggttgggtgagagaatctgtgttcccgacaacaaagatttaaaagatgcaattctgaaagaagctcatgatactttatactccattcaccctggtagtaccaagatgtaccaagatctcaaggaaagattttggtgggcaagtatgaagcgtgaaatcgcagaatacgtagcagtatgtgatgtttgtcagcgagtcaaggcagaacatcagaaacccgcaggtttgctgcagcctttgaagattcctgaatggaagtgggaagaaatcggtatggattttatcactggtttacccagaacgtcatcaggccatgactctatttgggtaatagtcgatagacttaccaaagtggcacatttcattccggtaaagacaacttattccggaagtcgcttagcggaattgtatatggcaaggattgtgtgtttgcatggcgttcctaagaaaatagtgtctgatcgaggcagtcagtttacttcaaatttttggaagaaacttcaggaagagatgggttctaagctgaactttagtactgcttaccatccgcagacagacggacaaaccgaaagggtgaatcagattttggaagacatgttgagagcttgtgctttagatttcggtggaagttgggataagaatctaccctatgcagaattttcgtacaacaacagttatcaagctagtcttcagatggctccttacgaagcactgtatggtcggaagtgccgcactccgcttttgtgggatcaaacgggagaacgtcaggtttttgggacggatatcctaagggaagcagaagaaaaggtgaaaatcattcaagaaagattgcgtgtggcccagtctcgtcataagagttatgccgacaatcgccgcagagatttgagttttgaagaaggagattatgtgtatcttcgtgtcacgcctcttcgaggagttcatcgttttcagaccaaaggaaaattggcaccgcgttttgtgggaccttataagattgtcagcagaagaggagaggttgcttatcagttggagttacctcaatccttggcaggagtccataatgtgttccatgtgtcgcaattgaaaaagtgtttaagggtacctaccgaagaagctaatattgaccagatagaagtccaagaggatttgacttatgttgagaaaccaatccgtatactggaaacaaatgagagaagaaccaggaatcgagttatccgtttctgcaaagttcaatggagtaatcactcggaagaagaatcaacttgggaacgagaagatgaattaaactttggaatcgagttcgattcggatcggttttccctctttccaagccgcgagtttccttcgccgttgccgtcgccgtgggccttcgccgccgcctccgagcccctttaaaaggacccccggtgtctcctctacccgtcgcagccctcgccttcgcctctcgtcgccggagtagctctagcgccccgtgctccgccgtcgctccagctgtcgccgccgctcgggaagaccgccgtcgtcatcgccaagtcgccgccgtcctcgtccgccccttcgcagccgtcggaacccgctggagcttcgtcgccgtcgacaacccgaaggtagccgccgcttccttctcgtcgccgtcgccgtccgttgcttctccgccgtcgttttggtcgtcgcgccgccgttcgccggtgagcgtgcgccgcccgagccgtctgccgagccgagccgccgccgccgtcggtgacgtcattgctggcgtcatcaaggccgtccgccattccgtcgtttccggagagtccgttttcgcggaagaagagtttgaagagttccaaggccagcaaggcaagtcacacag

SEQ ID NO: 67796 - DNA, 456 bp, Oryza sativa
  Clone ID: PAT_MRT4530_68620C.1
atggaggaggacgaagatgggattctccactccaatcgccccggcagtgaatcagggaagatgacattggtggcgaaaggggcgtgggcttgttggtacgaagaggaggcggcaccacatggcgcagctgacacatttggcgactcccccaacaccatccatcacgccggtgaggacgaagcgatggcggtggggaggcattcaccaagagcttggccggaccgctgcccctcgccatgtgcgcaaagccggcgtgtgcggttcaccaatgtcatctgcccggggaagttgacatacgtccatggcatgccgaatggccactacagaccgcggcagctacgagacgcggcagcggcggcgcaaggcggcggcggcgcggcaacagaaggcggtggcggcggcacaaccgacggcggcagcggcaactgggcgtcgacggcggcacagagcggctag

SEQ ID NO: 67797 - DNA, 675 bp, Oryza sativa
  Clone ID: PAT_MRT4530_68621C.1
atggccgttgtcttgacttgctcgcgctcgctctccggcctcgaccctcctggcctggcctcccctcgtcaaggtcacttgctcgtcgccagcaagaggtacaatgcaggaggtgggggcttcatgccgttggatggatcccgcgattggtgcggtgttttcgacggacatgccgtccctggtgttccccctttctcccccgcgcccctccgcccccaccccccgcttagcctcgccgacacggcggcgatggcgtccacgccgcagactaaccggaagctggctgttctacaccatgccatcggcgatggatgcacagcggcagatgagtcttggtgtggagattgcccgtatagctacttgatggagattgtggaacagcaagcagcgaatgtggggggcgtcgtgcagagtgatcttactggcgtgtgcgaacaacaaaaacatacctattctgaccaggagaattgctatgcagagaatgcgagtgagccgcctgagtccagcaatccttcgtgtgcttattggttgccaacattgaaagagagcactcctggcgccgcaatgctaattgatgagatggagctgaggcaagctgatgagcagcatccaggcgttcacgccccgcaaagtccagcagccgtgtccggtgtcacccgacgagctccggactga

SEQ ID NO: 67798 - DNA, 331 bp, Oryza sativa
  Clone ID: PAT_MRT4530_68622C.1
actgtcctgctacagcaacaggtgcttagcccatataatgagttcggaaggcaccatattggcatagcgcctagcccctccttgcaatcagctgtgtttccactgagaaacaaccaagtatggcaccagctcgcgctggtggcgcatcattctcactatcctgacattaacattggtcatgccatagcgcaggatgtaccactacagcaagctggtgacctatactgtgatcggaatctggctcaagctcaagctctgttggctggtaacgcgccatgtagatatggtgtctaccctacgtactatggtgcacccagtaccattaccaccc

SEQ ID NO: 67799 - DNA, 513 bp, Oryza sativa
  Clone ID: PAT_MRT4530_68623C.1
gcgatcggtacctcgagccagccaggccccgcgcccctccgcccccaccccccgcttagcctcgccgacacggcggcgatggcgtccacgccgcagactaaccggaagctggctgttctacaccatgccatcggcgatggatgcacagcggcagatgaggttggtgtgtcgagcaacaagcccgctcaagaagagcttgcgagctcaatgtcctatacatatctcatcctgagttgcggctcgtcgtccggatctcccatggtcggattcgctggagattgcccgtatagctacttgatggagattgtggaacagcaagcagcgaatgtggggggcgtcgtgcagagtgatcttactggcgtgtgcgaacaacaaaaacatacctattctgaccaggagaattgctatgcagagaatgcgagtgagccgcctgagtccagcaatccttcgtgattgggttgtttcttcggatcaggctgtagatgatgatatactgtcctttggatcaagctg

SEQ ID NO: 67800 - DNA, 346 bp, Oryza sativa
  Clone ID: PAT_MRT4530_68624C.1
ccgccttttatttttgtctctcgctcctaccaccccagggggggggttataattaaaagggggggtccgacacctccctggctccctcccaggggctcacgtacactgggggcctcccggtgaaccgccgctccagcagctcgagcttcggcaacctcagcaatggcggaaggatcacatgcatgcaggtggggcccatcgagggccattaagaacctcgagactctgtcgcacctgccgccattgaccgaggaggaccttttgaaccacatcgagtccctgctcccatctacgcgggcgcctcgcttggagctcaccaaggccggaatcctcctaccgtgagaat

SEQ ID NO: 67801 - DNA, 647 bp, Oryza sativa
  Clone ID: PAT_MRT4530_68625C.1
cccacgccttctccaaccctcctccatctcacgtcgcgcgccgccgccgcctgacacctcgcctgggcgtatacacctccctctgcagcacctgatgcgatgactgccgcgtctccacctcaaggtccacctggaggcctccgccgacacccactcgatctgagcaccggctcgtcgccgccgcgggaggcgcctcctcgggcggcgggggccagtgcctacttctccatggactccccctgctacggctggttgctgtgatcatagactgctgaacggcgggggcgctgaccttcgtacgccctggtggcgtggatgccgctgccgccgaatctgacggcgagcgctacacctccgactacaacatcgacgacgagaacgacctagccttcaccaccttggatcctgcctctttgattagatggtgctttcctatatccagcgtattaggcatgggactctctgcatcaccatcggcgctagatagcccatgctcgggcaggaatcactatgtttgatgctcatgctcttgcatgaatggtggggtgtgatgctcgtgaccgcattagcacccagatcgctgctggacagagaacataatgggcggggaatacagatggtcctcttgaccggtcgaagtgaatggc

SEQ ID NO: 67802 - DNA, 612 bp, Oryza sativa
  Clone ID: PAT_MRT4530_68626C.1
atgccttcagctagagtgcaagctggcggcggcggcaacggcggcgccggcggcggcggctcggggaggttcaagcgggcgctgctccggaacctcatcctagggctcaggaagggcggcgtggcgtccggggagatgggtttccacgagaggaagagcgccatcaagcgcgccgccgacgccgcgctcgccgccgccaggggcgccgcgccgtgctggagccggtcgctggcggcggagctcgcgcaggcgccgcagcagcaccgttcgccgccgtcgccgtcgccgaggaagatgatctgcaggaagatcgtgaggaggagcctgatccgccggcggcggcggccgatcaggccggcgaacaacaccacggcggccaccacaaaggcgtacggcggcggcggcggcggcggcggtggcgtcgcgagggccatggtgaggaagagggcgagcgtgctgaaagagatcgtgccgggagggaaagctctcgacatgtgcgcgttgctgggggaaaccctagactatgccgtgtctctgaaagctcaggtcgatgtaatgcagcttcttgtgaggactctccaagaacaaaaactcaaaaactcaggtaactag

SEQ ID NO: 67803 - DNA, 159 bp, Oryza sativa
  Clone ID: PAT_MRT4530_68627C.1
atgtgcgcggcaaggatggccctatggtgttcggcgctggccgcataggcctgcgcaaatgtgttcggaaagggacgcatgaccatgcgcaaggcgggtggtaaggccaagaccgcctggtctaggtgcccgtggtatggggccaaccgcgtgctttac

SEQ ID NO: 67804 - DNA, 329 bp, Oryza sativa
  Clone ID: PAT_MRT4530_68628C.1
atgttttgggagaagatttcaggctcagaagcagtcgccttcgtcttagccgacgtgccttccccccgtcgaccgtgatcttccagtccgcaccccgccgcgatggccgacgccggtaagcccgaccccgtgttgtcgtcggaggcgccgtcggtgaagaagggggtcttcatgcgccgcatcttccctgttcctcctcgccgccaacattttcatcggagtttacgtttttgcaaagacctacaagagagacccggaaaagaagaacgctcatattgttgctgctgcagctgcagatgtagcattgtcaatctccagttgccccagtt

SEQ ID NO: 67805 - DNA, 761 bp, Oryza sativa
  unsure (1)..(761): unsure at all n locations
  Clone ID: PAT_MRT4530_68629C.1
gggccttttcgtttgtaccccagcgggttttactggtatgtctttcaattgggttaagccgggtttttccctgtttttcccatttaaaaagttgtacaatggcggccactggattgaatttttgtacagctatagagtcgcccccccgttgcatgcagctgtgagtaatttttggagcccccacatcggccgcccttttttttttttttttttttttttcnttttttttttttttttttttttttttttnaanataagaaatattaaataagtggagataaccatcttgtacatggattgaaatacctgattataaattatagcttgttttactaacttgctgcagccatacatcaagaaatcaaatagtagtacattgcaaactctgagaaatcaccatgtgggtgctcaccggcactgagatggtcctggctcatgccacgctttatggtagaatttggttgaagatagcaaacccaatgctgggaggtactgttggcgatgccggattcaggactaatgaattaagttaggaatgatgaccaaatcaatgaagaacaggttacttaagccccatctatcagccattgctattaattccattgaacaactatgctcaacatccaagttgttatttgcttgccatagtggtactgcaagcccttgtggtggcataactttatattttgcatgtcccattagtatttcatcactggccaagtttactctcgcaaaatttactccaaggtttagtaatatgc

SEQ ID NO: 67806 - DNA, 4128 bp, Oryza sativa
  Clone ID: PAT_MRT4530_6862C.1
ctatccattgctctgagggtgagaaaccgatgcgaagcagatcttgactcccagcctgatgcagtaatcctggaaatcggcactaatgaactgggagccgttgtccgttatgatacggtgaggcaatccgaatctgcagaatatccctttgatgaatttgatggcgttgtaggccttgatttcccccgtgggtgtcgcttcaatccacttagcgaatttgtcgatcgccacgaataggaacctgtagccaccctgtcctcgtgggaatggcccgagtatgtctagcccccagcacgagaacggccaagtaagagggatagtctggagtgcttgcgctggtagccttgtgtgtttactgtggaattgacaggcttcacaccgctgaaccatgtcgcaagcgtctttgagggtggttggccagaaaaactcttgtcgaaaagcttttccgactaatgttcgaccggcggcatgtgacccacatatcccttcatgtatgtcgaggaggagatgtctgccatcgtcggacgagacgcattttaggagtaccccgtttggcgccttcttgtatagatcgttgccgatcatacagtagatttttgctttacgggttattttctcggcttctgctgcgtcctcgggcaactcttcgctgcctatgaatttaatgagtggggtgcgccagtcgtctgtggtcttgatatcggcaacggcgcgatctgcctctgtagcccccgagctgttgttgagggcgaccgggctatcttcgccgcttgcctctttcactgatggccttgtcagaacatctagaaaggtgccaggttcgagtggctctcgtctggacgcacgccgtgctagaccatccggttcaatgttgtccttgcggtatacatgttggaccccgatcccatcgaaacttttttccagcttcctgacttctgcgagatacttggataactcggggctagagcagaccagtcgcttgactccgagtgtagctgcagctcttatcccggcgagtagtccttcgtactcggctgtgttattggtcgccctgaagttgaggtgaattgcatgcttgaattgatcttccgaaggtgatgtcaagatgaatcctgcccctgctccttggatgttgagtgcgccgtcgaatgccattgtccacatttcgttgtcgatttggttgtctgacctgattattactgccatgcatccggttagcttctgtacttccttgagtcttgtaggcgacttcatgttctcgattgccttgatcttcttgggatttgcttctattcctctgccagagacgaggaaaccgagcagcttgcccgatggtattccgaacgtgtacttcgtgcgctggaaagtgtttcctgcagttattagtcctaacggcatcttaacgtagcagaataccccgaatggcgtgatgaatgttgttttctcctcgtcctctttcgccatgctgatttggtggtaaccggagtaagcgtcgagaaagctcaacaactcacaaccagctgttgagtccacaagttggtctattcgaggaagagggaagtgatccttgggacacgccttgttgaggtcggtgaaatcgacacacattctccatttcccgttggccttccgcaccatgactgggttggctagccactctggatggagtacctctctgatgaaaccagctttgagaagcttgtcgagctcttctcgtatggcttgtttttgatctggtgcaaatcttttcttgggtggctcagctgtggtaggtgggctgggcgtgtgctcgaccatgtcgaggctccgcttgtcgcattgcactgccagcttagcattcccttgaatagtgattgttcccttcagtcccggcatcttgagcacttgatacgcgtagtgagatgcggccataaacttcgcgagtgcagttcttccaatgatggcattgtatgttgtattgaattcagcgacatcaaaggtgatctgctctgttcggaagttatttgcttggccgaaagtcacaggcaacgtaattttgcccaatggtttggacgacgactgaggagtgattccatggaagggttgatcggttggtgtcaactcgcttcgtgggatccccatcgcgtccaaggtgatggcgaagagaaggttgattgagctgccgccgtcgatcagaactcgcgtgaccttgatattccgaatagtgggttcgaccacgatcggatatcgccctaggataacagcagtcttggggtggtcctcttctgagaattctatcttctgttcagaccacttcatcttgggcgcagctcctcgcttgcctttttccaatgccatgtgttttgcgagcgactttttgaagacgaggcaatcttctagagagtgtctgtccgacttgtgtatagggcaccatgttttcttcgtgtcgctgccttgtgggtctaggcgcttgggagggtctgcgtattctgttgtgagaacttccgcttgagctttccttttcccactcttgcgatttttcttcttgcttgactcaggtgcgtccttggctggtttcttctctcctccggtcttcggtttgtcgttgttgcgtctcagtgcgtcgtccgtgtgagcgcatcgatcgacaatttcgaataatctccgagtagtcgtgacgcgcctcgttgccaactcctgggtagtatagcgatctctgacaccggacttgaaggcgcggattacagaagcgtcggtgatttcggggattgtatttctgcactcattaaagcgccaaacataatcactcaaggattcacccgggttctgtgtcaacgcatgtaggtcgtcttcaatcgcgtggcgcttgtaagttccttggaagttggcgacgaactgctgccacaggtctgcccacaaagaaatcgagtagggcgggagatgcatcagccatgaacgcgcagagcctttcaatgcagttggcaaataattcaccaatgcgctgtcgtccgctccggcagcgtagagtaccgtggagtaaacctgaaggaattcttctgggttggtactcccatcgtacttctctattgctcctggtcggaatctctcaggccatcggacatcacgcagcgaacgactaaaagctctacacccagcgctgggggcggtgggttgtcggcgatcgtacgtccttcgtggatgtctatcgccagttggtggctgttccgggtgcgctgcagtagtggcctcttcaaacgcgttgctgaggttggttactgattcccgtagccgttctatccaccgtgcgagatcgtcattcagaacgggatcatagggggtttccctcagtattgcgttgatggccctgatgtgctgggccggtgtagtcacttgattttctgcttccgcattagcgcgcgctgacgtgctggtcccgtcaatagccaatacctcgcgtggcgtacttgttgacgatgagccatagtcttcgagcaggtgcaggactgacggttcgtggggatcgatgtcgattaccccaacgaatcgatctgagatcagcgtcgctccttgttccttgtcctcatccctgagggggatacatgactgctggaccttaggaggtgacgtcttcatggcgctgagaaagaccttgaagcttgagaggtcgtgattctttgtcttgtgaataggacaatagacatcacgagttggagaagtacgctgaattccacactctttgtaggcacgaattttagcgtagacgttgagaaaaacccaacaggcttgcaaggtgtgttttctggttttatggataggacaccaggaccttgtcacctcggaagtcatcctcatcggctcgtgattcttgtaggaaagacaaggtttggccgcactaggatccttctcgggctcggatgtcgtcgacgttccattctccgctttggcgggaggatccttcgacatggagtcgtcctgggttgtagccactgcgttctcgcttccggtcattgatggaccagccgagatcggcaccgtggtgtaaaccgggaagacgatttcgccgacttgagtccacaccagcattgttgaaataggaactccttggttgaggttggtgttgacgctgttgtcgacgaagctagatgacat

SEQ ID NO: 67807 - DNA, 3648 bp, Oryza sativa
  Clone ID: PAT_MRT4530_68630C.1
atggccgagcccggaatgttccgcccctctctcaaaattcaaaatactacacggtttggtggtgaggtgctgaggaagggaggtggggggtggaaaatgttctactcgcagttcatcttggccaagaaggggcccctcgggaccatatggatcgcggcgcatttggagcggaagctgcggaagaatcaggtcgcggatacggatatcggcgtctccgtagattcaattatattccctgaagttccgattgcacttcgattatcaagccatcttatgcttggtgtggtcaggatctattctcgcaaggtgaactacctattccatgattgcagtgaagcgttgctgaagataaaacaagcctttaggtctactgccgttgatcttccccctgaagaatcaactgctccttatcattctataacacttccagagacattccatctggatgattttgaattaccggaggctgcatttcagggtgacattgatcatcatgtaagcacaaaagaacagatcaccttgcaagacaacccagagaaaactggatactcaacatcccaatttggcttagatgaaagatttggtgatggcaattcttcacatattgggttggatttggaagaggaattaatgctgaacaaggaccagtcaattcaacttgaggctgatgatggcattattattcaaggtcgatcagcagttcatcctaccgatatggaagttgatgataaccaaaataaagatgaaagcgctgaaggatacaacatggaggatggaccttccagtcacaacaaactaaatccgttaagtgcagatggtctagtaggaaacagtcttcctaattggcatacatacaatgtgcaaacacctgatctgaatgatatgctattgaacaatgatgggaatgcaggaccatcagcttcatactatcaacctagtcccttcccttgtgatgagcctgcatcaccagagtttgtaagtgcccaggccccggctacacctggcctaatggaagagactgttccttccagagtgcatgaaagtcctgttctgagtccacagcgaaaagcttcaccatcaagcaatgatgaaactgcaaagacagctgaaaatgctaatgatcttgtgggtgctgagacgactgaacttgcattgacaaagcctgtgcaaattgaatcttctggtgctgtacaggagattgattccttgagtcaacaatgtgcaactgaggaattgccaccccaagctgaaacctcaaacttggaagctaccatggacaagtcaatgataaatactgatggtgtagctgcatcaggtgaagctacagctgctaaagaaaccactgaagtgtcattggttgaaaattctttagagctatgcgctgatggtcctactgaacctgtgattgagaaccaaacacagtttaatgatggatcagttgatgtgcaagggggcggtcagcatgcacctcatgctatcttagcaactgcagattcccaagtgaatgtagaagcatcaacacaagaaatggcatctaacgatataccaagtgacctaccaaccttggaatttccagaacgtgagaaaatgctgtcagctccagacgttgaattgtaccaggcaaatgacttgggccaggtaactgcagaaaagggaaccactgaatctgatggaagtaacaaagtaggtagtctcactagcagaaaaagacacttggaggacagtttgccagctctcgaaagtgcaactactgaaaaattgtctagcagaccacgtggtaaaagaaccattgatggtattcctgatgatgatgatttactggcgtctatattagttggtagaaggacccctggactgaggcttgattcaacaccaataccacctaagacgtcatctttgaaacgtccaaggttgacgtcaaagagtaccacaccgaagagaaaagtgcaaatggatgatgccatggttatacatgctgataccatacggcagcagttgatcagcactgaggatataaggcgcattcgtaaaaaggctccatgtacccgttccgaaatatggatgatcgagaaaggttccttagaagatgatatattccatgagcccatcttttcctgcatgtgcaaggagctaaacgatttgcaatatcggacctatgagattgttgctcatcccaccattcataatatggaaatacatgtacggctagacatgtcccaaactatggcagatggcagcaatgatgttggcacctctggcgcaaaggacagtggaaatcaccaagatcatgtagtgctaccagatggagctgagtcagatgcgatgcatcctgaagcaactgatgcagcagatactagaactgattttgattcacacatgccatctgacaaacaggttaacaatgttgaaggagtaactgaacaattaactgataatgagaaagaaactgcagttgttgagaaagcaaccactaatatgggtgacagtgctcaagttgattcacttgataaggaatatcttcaagatgttccagctgatctgcagaggagcacaaatacaaatacacctctgtttgtgctagatgacatgcctggtccagatgtggttctggatagctctgatccagtttctgcacaagcagtggatgatatgaaaggggagttgagtgacattgtccatgacaatgtcaatgcatttgacaataaggatatgccgacttctgagattaccgtactggaatttactcaaaacgcttctggttttcctcagccaacagaggatgaaaatgttctgtccgcaatgggtgaaaattctggattgcaagaaaatcatgtaggatctgttatggatctggacaatatggggcatgacttttcactaaaggaatgcagtgattttggcagtgcgattcagggtgttgacacagattttctgatgtatgatgatgaggtggactgtgatgaggctaatgatgatgagcctaatcctgaggaattccagtctcttgataacagtggatggtcttcacgtactaggggtgttgcaagatatctcaaaactttatttgatgaggaatctggtctgggaagaaagagtgtggccattgatcatctgttaagtggaaagactaggaaagaagcatcaaggatgttttttgagacattggttctgacaacaaaggacttcataagtgtggatcaaccaaactcctttgattttgtcagcgttaagccagggccaaagctcctgaagtcagatttctagatcaaaaaccagctagcgtggcgcgatacatacaatcttaccatatctgtcacattaccaacaacatacagatctcgcatcgccgtgaccgtcatttttgttttgttctttttaatttatcctccctctgtagtatccccgcactaatctgtgtttactaggcttcttgggtaggattctgttgtacccccctccgtgttggctattcagtgtatatatgattagctcttgtaaagttgcttgtgtaatgtgatagcatcagctcctaagtccccgtctattgttgctttgaataaaccttcaaacctgtatacttctctgactttgagcaacctgtcgattaatttcaaatttattcagattcgtaggtcaaaaaaaaaaaaa

SEQ ID NO: 67808 - DNA, 174 bp, Oryza sativa
  Clone ID: PAT_MRT4530_68631C.1
atgacgcgcggcaggcaaccgtatcgtggtggtggccggccggtcggtgaggtcgatctcggtggcagcggcagcgcaggaccaaccaacggtgtggcagcatcgcagctagccaagctcagccgcgggaaaggagcagagcagtgcaagataaaaaaaaatctatttatctaa

SEQ ID NO: 67809 - DNA, 644 bp, Oryza sativa
  Clone ID: PAT_MRT4530_68632C.1
atagtttggagaccattgacctcactgccaataggcttgaagggctcattcctgggaatttctctcggagcctctaccacctgagactcggttgcaacttgctaagcgggagcatccctgaatcaataggtaatgccatcagattggcttacctggagttggatgacaatcagctaagtggacctataccctcacaactcggcaaatgcaataacatggtgctcatggatctgtcaacaaacaagctgcaaggtgttgtccctgatgagctgagaaatcttcagcaacttgaggtcatcaagctccaaaccaacaatttcagtggatatatcccaagaatattttctgacaaccacttgtccggtcaggtgccatcctcgtttgcaaacctgaagggattgatctacttgtctctttgctataaccagctctctggccccatgcctgagttgcctagaggggtaaaggttgatgtatctggcaatccaggtctcacaatatgtacagaagactctgacagtcaatacaatatggctagcactgaagatgacttcaggtcaactacatgggttgcaacagtttcttttgtagttggcttcatcatctccttctattgggctggtatcaggaagtattgctattga

SEQ ID NO: 67810 - DNA, 253 bp, Oryza sativa
  Clone ID: PAT_MRT4530_68633C.1
atcacgcgttcgactgtctgacccgtggcggtgcgtcgcgttccaggccaacctgggcaggagccgagatccggctctggacttgctggagcagagctgcgcgcccgccatgaccaagcgggtaccctgacttagtctacgcttgcggacacacgagctgcaacgctggcactctatctagatgcagccaaacccggggcgcgtctccagcgggctacggtcatctacaccaacatgttcgacgccagctgga

SEQ ID NO: 67811 - DNA, 555 bp, Oryza sativa
  unsure (1)..(555): unsure at all n locations
  Clone ID: PAT_MRT4530_68634C.1
tttggtaggatttagctagaactgaggtgtagttgctcctgtattagttggcaatgtaccgctctgtagtctgaagtttcattttgggagatgtcctttttctctagcttgtgagagatcaactctacagtcttgagatgtccccccctcttgtacaacttgagaaaaattgatatggaaaatcacttcttaattgccctacaacttgatggttccgtttgctgttgatgatgatngccactgtggaaacttgcaagttgcaagacttgaaattgagtgatggcactttacttcttttttcgaaactgcactttttaaatgtttgcagtgatttgtatcagatgctttgtactttgcaccttcgatggaaaaaaatggaattagttttttctttttgtcatactattaatgctctatctatatgtgtgaagtcttatgcaccattgaacttgatgcatattacaaatatctgtataccatacacaagagaaagtaatatattgtgcatacagtaaggaggcacaaagctcttacctaattctttgcttcatatgt

SEQ ID NO: 67812 - DNA, 183 bp, Oryza sativa
  Clone ID: PAT_MRT4530_68635C.1
atggcgttcatccttttcatctatcgcgcccgctcggatcctgcagagagagtggtgaaggcggcatggtacaagggcgctgtcgtcactcataggccgaagcctgtttcgcctatcgttaaccagagcaagaacaagaacaagcaagccaagaagcccaaaccagctgcacccagcaagaag

SEQ ID NO: 67813 - DNA, 1029 bp, Oryza sativa
  Clone ID: PAT_MRT4530_68636C.1
atggcacaggctagcccgttctgtggcaagcctaacgaggatgccaatgctcatctacagcagttcctggagatttgcagcacgtacaccataaagggtgtcagtccagacgccgtcaggctgcggctgttcaagttttccctcctcgggaaagcgaagcagtggttttatgccaaccgtgctacgatcaacacctgggacaaatggtccttggcattcctctcaaagttcttcccgatgggcaaaactaacgctcttcgggggagaatttctagcttccagcagacaagggatgagtccattcttgaagcatgggaacgacttcaggaatacgtggtcgcctgtcctcatcatgggatggacaactggctgatcctgcagaacttttataatgggctcactctcatatcccgtgaccacctggacgcggcagctggaggagctttcttctctaagacgggagttcagaacattcaacaaaaggaggagaatgatgtcactgagaagaaagaggagaagcatgaagcacccgcgatatatgaagatagttttcaagtacctgcaaatgaatctgggaggattccggggcagcccgactcctccattgaaaatgtcaaggcaatcacaatgaggggagaggacaagaagcagctacagtcgttgatcggcaaggctcttggatgcagaaacaagttgctaaaggaggtcgaagccgatgctgttgaaatcatgggggattccttgttggtgatcagtcaattggcaggagaatatgaatgcaagaataatgtgttgatggtctacaacgagaagtgccgagaattaatggacagttttcggctggtaaccttgagtcatgtctctcgggagcagaatgttgaagctaatgatttggctcagggggcatcaggatacaagccgatggcgaaggatattgacgtagaggtcgctatgattgcagccgatgaatggagggtatttttggccaacaatgttagaggattgcttccgatattacaaagggtgtga

SEQ ID NO: 67814 - DNA, 246 bp, Oryza sativa
  Clone ID: PAT_MRT4530_68637C.1
atgagtaagaagcaatccaattcaaacaagcaagaagcagaagcaaccaaggttgccagccgctcgagcttgcgacggcctgccgccggctgttcgggctccgccgtcccgattcgccatcatctatggcggcaactcgctcttggcgcaatcgccgcctcacttgctctgtctggtacgcgctccgtcgatgggcgcgccaattttgctccgctagtcaccgagctcgccatctccgttgcttga

SEQ ID NO: 67815 - DNA, 438 bp, Oryza sativa
  Clone ID: PAT_MRT4530_68638C.1
atgatggttgcggacatcactgaaaaatcatttttgcaaggaacctgccgccgctacgtagcccacgctgtcaccgtttccacgccgtcggcgccgccgccggccacctcggccgcgccgcctcgcctcctcgccgctgccgcccttcgccgccaccgaccgccgccgccgccgggagccgccgccggggagagtagaagtgaggggaggggagaggaggagaggggaggggaggggccggtggcggaccacttaagcggcgcttgcgaaaatgattttcgcagtcgccccttcgccgccaccgaccgccgccgccgccgggagccgccgccagggagagtagaagcggaccacttaagcggtgcctgcgaaaatgatttttgcagtcgccccttaagtgctccccctgcgaaaatgattttcgcaggcgccgcttaa

SEQ ID NO: 67816 - DNA, 455 bp, Oryza sativa
  unsure (1)..(455): unsure at all n locations
  Clone ID: PAT_MRT4530_68639C.1
ttnttttttttttttttttttttttttttttttttggggtttttttttttttttttttggttttttcaaaaaacagagctggggggggttccggttttcacacagcccacaaacggtttatttaaattggtatggaaatggttgggtataaggggcttgctccccaccccactttttgtttttccaggcagaaaatttttggggtaaaaagaattcgggattttaacatacagggggggattttttcctgtcctaaacccgattggttggtaccttaacaacccagttttttccaggccgtttttagagggcgggcattctgcaaagtttggttggttttgcccacatggaaaagaaccccccagggggaagatttgtcccagttaggggttttttggccgtgcctttttccagggtttttttaggaagctaaaaggccccagcacaggcttttt

SEQ ID NO: 67817 - DNA, 900 bp, Oryza sativa
  Clone ID: PAT_MRT4530_6863C.1
gccaaaaaaaacgctcccggtgcctccctccaccatttccggccattgcaggctctctttccccgtggaaaaaaagctggggcagtggcccttttctttctgccgttgccacgaagtccaggtccccccccggtgttcgcccgggaccttctcccgtttggggttcgccttcttggggtttacagaaccctagcagacctggtccacctttcggtttgggtcgccgaacggcggaaccccgccgtcctcttctacccaagccggtccagccgccttcatcagctcggttgccggtttccgcggtcgccgtcgaaccggggtgagccgtggcccgcccatttcgtttccctctcccctcccttttttcggccgccgttcctccgtgcctatgtccgccgccggcgaccataggggcgcgggcgcgccgcctcccgtcggctgtgccggcaagaccgctttcgggcgcgccccgcggctgccatgtggggcccggccgtcagccgcccgagccttcgggtgcggttgacgcgtgggacccacggcgccggccggtgtaatccgcgtgcacccggtccaccgtggacccacctcggccatataaggaccggtcttcgggcctctgttgcaaagcactaccgtacttccacatgtctagtgggacaaatgaaggctatacgagctgcggcccggtagtcgagatgtcatggcacagggccggtgtcctgctgctaggggttcagtcctgcctgcctgtcccgggggttccggccgtaggtgggattgggtcgatgtacacctctgatcagagtataatctattcgaatagccgcgccctcggttatgggcaagccgtgcaatgtacccaagttagtgttttaattcttaaaacctgcttaacaa

SEQ ID NO: 67818 - DNA, 387 bp, Oryza sativa
  Clone ID: PAT_MRT4530_68640C.1
ttagcccgactcagacccagccgatcctaaccgtagccgatctggattccagccgattcctgctctgcttccgaactcgatctccgcctccaacttcgctttgatcaagtcctctttcccgacacagatgttaccaaatttggttgttaacacatgccccccaagtccgggatattcgataatgttccggatttgccgtatgccgactccgagcgagttttgcactccgccgcttttgaccgttattccagcgcgctcaagcgaaaccttttctctctcttctccggcgattcctccggtgcaaaggtgattcctaggcgacctcctcttcgacgagatctccgcccgcggccatgtcgtcctccgccagcccatctggtgcaccat

SEQ ID NO: 67819 - DNA, 626 bp, Oryza sativa
  Clone ID: PAT_MRT4530_68641C.1
aattgagagtgtgcaccaaacctggtcccatgttggcacctagcaagacgccatttaggccccaacataaaattgctgttcaaggactccaaattccactcggagctcctcggccaatgttgccagtctgatgatgaacagctaagggaaactgcatcctgggtccagggggtgatcacacgcgtcctggtttcatgagggaagatttctcaagtaaaactgctggtttcatgagggaagacttctcaagtaaaactgctggtcgtgtactatcaggttatttttcttttccaatgccaggtgaattgttttagaagtgcgttacacatttgtcccgttgtgttgcaaatagaaaacttttaccaaaggcgagaggttacataacttacattacacaagatgatttttctactggcagccgtttgccattcttcagaaactaggccggtgtcccctgggtctctgttgcgttttattcagttgtccatgtggatcgattgtaatcgcagcaatgctatttggcttgttgctctctgaaatggtaaagtcctgttagcatcatcgctcattgcgatgatgatagcgctcagttaaaaagttgtctcttgaaaaaaaaaaaaaaaaaa

SEQ ID NO: 67820 - DNA, 315 bp, Oryza sativa
  Clone ID: PAT_MRT4530_68642C.1
atggaggcggccaccatgtcgacgacggggagggggttgcagggcgacgggggccggtggctgagaaccgagcgccccacgaggttggcggagcggcgtcgcggcggcttgggtggagcagatcggcaagggccggcgggaggggggtgggacgagctcgaggcggcgacggcggaagggaagccggtggaggccgtgggcagagaacggcgggcgcccgtcgtcgtcgtggagcctgcttccagatccaggcgggggcaccgagatccggaagttgacaacatcgacgtcttcgagtttctccatcaagattaa

SEQ ID NO: 67821 - DNA, 540 bp, Oryza sativa
  Clone ID: PAT_MRT4530_68643C.1
atgttccctatggtaactgggttcatgagttatggtcaacaaacaatacgcgcagcaaggtacattggtcaaagtttcataattaccttatcccacacaaatcgtttacctataacgattcactacccctatgaaaaatcaattacatcggagcgtttccgggggcgaatccactttgaatttgataaatgtattgcttgtgaagtatgtgttcgcgtatgccctatagatctacctcttgtggattggagatttgaaaaggatattaaaaggaaacaattgcttaattatagtattgatttcggagtttgtatattttgtggtaattgtgttgagtactgtccgacaaactgtttatcaatgactgaagaatatgaactttctacttatgatcgtcatgaattgaattacaatcaaattgctttgagtcggttaccaatctccataatgggagattacacaattcaaacaattaggaattcaactcaaagtaaaatagacgaagaaaaatcttggaattcaagaacgattactgattac

SEQ ID NO: 67822 - DNA, 831 bp, Oryza sativa
  Clone ID: PAT_MRT4530_68644C.1
atgggcgcggcccaagggaaatggagcggaccggccaagctaaatgggccggccggcccaaggcggcccaagcgcgcgcgcgcgcgcgggagggaggagagagagggccggtggaccgggctcaccacgcgcggtcccgggtgggacccgcttgtcggcggctcggctcaccgtgagcggggtgcacgcggcgtgctagggtttggggaggggaggcgcggcgcatgcgcgcggctcgcggtgagggcggaggcggcgggcccacgtgcagcctcacggcttaccgcggaccacgcgcacggggagaaacggagggagcggctggccgggtcggcttatctggtcgcggccgaggtggcgccgacgtggcgcctacgtggcagccacgcgggtcggcggaaggtagacgaaggcccagccgaaacggacggcgggcggcggcggcgatcggcggagcgagccacggcgatacaagcgacagcgagtacaccgggtggttgcacgggacgcggggaggcgagccaacggctcggattcaccggagggagcttgacggcggcgaatcgcggcggcgacaaccggcggcgggaggagagggaaacggcgacgaggtcacgaggggccgattcccggcggtgggagcatctacgcggccacgggaactcgatgctagcgtcggatttggagggaacacgccgagggaggctggcgacgtgcgggtgctacggaactcgggcggcgacggcggcgagcacatggcgagcaacggcatcggtcggggcggcgccggccaactacgggaggtctactcgagctaaaaccgaagtctaa

SEQ ID NO: 67823 - DNA, 2944 bp, Oryza sativa
  Clone ID: PAT_MRT4530_68645C.1
atggggaagggaggggaaggggcggttcccgtgggggagagcggcgggcggcggcggaggaggccgggcgaggacggaggcgacgacgacgacgaggagtatgtggtggaggaggatgaggaggaagagtgcgacgaggatctgtctgcctcgagcgccggcgagggaggagagggcacagacgaggaatacgaagagggtgatgaggacgaagaggaggatgagaccccgcggccgaggcagcctgtcaagagccgcgagaatgggcggaaggggaaggcagacccacccgttgcgcgatctcgtcgacgtaagtacgaggatgacgatgactactcggaagaagaagacgatcgggtcgacgagtacggcgaggatcttgaggaggaggaagaggatcttgaggaggaggaagaggaggacgatgaggcgccacgatccaagcgcatgaagaaacgtggtggccgcaacgtggaggggaagcttcctctggagcgatcaaatcgccggaggtatgaggaggacatggactttgaccctgacatggatgaggaggaagaggaggaggatgttgatttcgatcctgaagtggaggacgaggaggaagaagattttgaggatgaggaagatgatgaattggaagcgactaaggtgagggttaagaatatggggcggcgaaagtctactttgaatcagcgacgagggaagatgaagagcagctctaaggtggccagtcggaaggtgggttcagtcaaggcaaggaacgctgcgtctataagacggaggcagaaaaaacgttcaatgcttgatcgttatgaggatgacgacttcattgtggaggacgaggttatggctgattggcaaccaaggaaaaaggctagaattaggaagcagatggaggttgatcctccgacaccagtttttgaggctgagatatggcctactattgattcagacacgacagacttcgaatttgtaacatccgatgaggaagcagccattgctgagcctactagggttattaagaaggggaggaagaaaagggtatttgtgtcagattcatcctcagattctgaattcgttgtatcagataaggaattggggaatttgaaggagtctgagcctccagagtctctgaaagtgctgccttcatcacccaggaagatttctgttacaggtaatggggagcacaaggggaaggagaaaaaggaaccacaggaggctggaagggcaacgtgcgggatttgcctttctgaagaacagagagtgactgtgcagggtgtgctggattgctgttcacactatttttgctttgcatgcatcatgcaatggtctaaggttgagtcaaggtgtccgttgtgtaaacggcggttcacaacaatcacaaagtcgtcaaaggaggatactggtttggaactgacaaattctgtaattagggttgaagaacgtgatcaggtttatcagcctacggaagaggaaataagacgttggctagatccatacgagaatgttgtgtgcatagagtgcaatcaaggtggtgatgacagtctcatgttactatgcgatatttgtgactcctcagcacatacttactgtgttggtttgggaagagaagtacctgaaggaaattggtactgtggaggttgtagactcgatggcgaagcacattcataccataatcatgtgaatggcaattctgggatgtttggtgcaatttcaccaattggcacttttgaaaggcaggggattgatctaaatgtatctccaagagagattcctaggggaaatcattctgttgagtctcaagcttctactgcaggagcatcaactccatctggaaggcagacaaacgcaacgaattttagaagacgtcaaatgcatgactggatacgcagtttgctttctagaccaaggacaacacttgggccagttatgcatcataatggtgtgcatcagagtggttttgtaccaagcactgaaccagaccacatgaacttttgcgcaccattagaatctgacactttacacaacactgggtctgtaccacaaagtgaaccaagccagaacttccatgttatgtcagaagccaacacttcagagacttcctttggaaggcatgcagctctttctgaaagacgtcaaatttatgaacgttttttcatgttgctatctagaccaagcccgactattagaccggacttgtgccataatgcctcagagcatggtagttctgtaccaagagttgaaccaaaccacatgaactttcatgctccgccagtagccaacagtccacaaactctgcttgatggcattccaaaccgcagcaatggtttttcttttactcaggctcacagtaattttgtagatggaaacaacttccaaggaactgaaggtgtctagagcaacagcaacttgtcaagcaaatatgtatgcagagtacaagtacttgctagaagaaacccacaaacatattcaggggagtaaaatgtgcccatcgatgagaggcttatggaaatcgagacaaggggacgctggttgtcatcccttcatgtcctcctagcaattgctgtcattctccgggcaattattcttgttgaaaatagctgttcatcatgctgcttatctgtcagcaatgtgatcgatgacataaacggcatgcttttgtaaagtttttctgttttagactaggcatttatatctgctgttactgccatttgttcagtcgtaaaggcgacctaaaagatcacacaacggccaagataatttggatagcttagaatgtatagattgtgccattggggaaatcaggttttaggaaggccattcattctgttgacacgctctttcgcccatgaatatttttttttctaattgaattgccctatttgtctcaaaaaaaaaaaaaaaaaaaaaaaaaaaaaaaaaaaaaaaaaaaaaaaaaaaa

SEQ ID NO: 67824 - DNA, 504 bp, Oryza sativa
  Clone ID: PAT_MRT4530_68646C.1
ctaaacctcgcccttcgtctccgcctccgtcgcctccatctcgccgcgatccctctccccggggccagtgccggggtccgcgaggaagctggtgcaggggctgaaggagatcgtgaaccggcccgacgcggagatctacgcggcgctgcgggactgcggcatggaccccgacgaggcggtcagccgcctcctctcccaagatacgtttcaagaggtaaagagcaagcgcgacaagaaaaaggaggttaataaggaggcgcttgagccaaaatctagaggagcagttaactccaatagtcgagccactagagctggtgcagaccgtagtggacgaagcagttcagttcagtctggatcaagtggtgctgataacatgtcctcaaggtcatcaatattgggacctggcgtgctagcaactaattctacacagaagcaaactgttccaagttctactgtaaacagggatgttctttacgatggatcttttgagcaatgcaccatcgt

SEQ ID NO: 67825 - DNA, 3715 bp, Oryza sativa
  Clone ID: PAT_MRT4530_68647C.1
atggttatcagcagaagcatgacgggaattcttaacttgaggaataggatcttgaagaacaggaaatctttgctcaaatgttgttggtggggcagtgcttgcagatttgcatgggttctggttacccacacttgagaaagatgaggtttggccagaatagacgtagtctgttgaagccacaggctcgctagaagacctcacttgaggtatgcccatcttcacaatatcagccattgacatctgacctggcaccccacaccaactgttctggtatccaggcgaaggccgcactgctccaaaagatacatagagaagaacagccctgtgctacagtagacacagggaacagttgtgcctcgaagaagaatcagttgtgagcaaaccaggtcccaataatgatgaccgagagaccacgttaagagcatcatcagaaacagacaaatgggagtaggatcgaacgagcaggtgggcaccatcttgagtgggtcgatcacctcctcccctcctcctccctctcccccttcctcctccgccccgacggtggcggcggcggcggcggggttctcctccatgacctcgtcggggtcctcgaacctcagcctcgacgccgtcgcctccgccaggccgccgttggcgtcggagatgtgcagcgaccagcatgtaaaattagtggggcatcaagaacataaaggttgaatcacacagggtataagaagcagctcttgttagatgaaattaggacttaccgttacaacatagcaactcactatcgagtaaactcgtaacagctgaaattagtccccggacacacgcaacaagtgaagaagaaaagaagaaaaaacagcaacatacttcgaaactgtagaaagcattgtccactcttctccgcgcgcaagacggcagctcagctagtctgctcatttcatggcgcatgccaggtcaccagatcacctggcagtgtagaggggcttctcccacgagggcaggactcagtagatgtgttgccagatctggtgcgatggctgagatggagtggtctgagagctgttcaaggttccctcagtaaggttctgcgggtgctcctgcggtaaaccagcctgtgactggtagaagcttgggtacccaaggccaccgtattgagagggctgctgcccctggcggaagccacctggctgattctggccctggaaaccatagaagttgccaggtggtaccgctgaaacggcccttgaaccagcagctccatgaagccacattgcagagttgtcgttctgctgcaaggcaatgtattgactgttatctttgaactgtgtgcttaaagcttcttcaaaccccatagttgtgggtgcagaggggacattctgatttaagccgaaatttccaggaatattatttgagctaccaaaacctccaaatccggagaccactgatgaaggctgtggtgggcttgtagcaggaaggctgctcttgtattgtggcatcgaatatttcatactgacaccaggcaccccagtggtagcagcagattgatggaaaggtccattacttgagaaagattgctgaaaggctgctgatggtagatagtagttttgaggcaaatatggatagccaaccagattggaaaaaggtccaaggggcagagttggctgagggtacggatgtacagataattgttgtgggagaggaggcccagatggaatgctcgcgctgggaagattttgtgtaggttgtgcattcgagaatccccctggcttcaatgtctcctgcatggagattgctggtaagctggtagtcggtactggtgggttatattttgtagctaattgtgttgatagcaatggtgaaaagtcaaagtcccgaaggttgggaagatttgatcccagcaagttgttgtgtagagtatttgcttgcagtaaacttgaaaactgaggaagatgttgcacttgtatgtctccctgtgagctctccatcgtacttggttgtgttgtgtttgaatatacatgatctgaaactgatggcagattgtattgtagacttgacacatctacagcaccctgcgtcagaatatcaggctgtgaaactgaaggttcatcagtattctccatgctagtgccaattctggcttcaacgtccccatttgttgaagaatttagagcaacattgttgtcttgattcctgacatcttcttgatcaactgatggagattcatctggaacaggcacttcctccactccatttttgtggacctttgatggaagcaacccagagaaggcaccagatccaaaactaccaaagctcagatgcccacagtctgcatttgcaagttgtagatgatcagggattataaccgctggattatcttcggtagatttacttgcaactagatcttcagtctgtaggcttaggtgctgaatgtttgccgaagcagattccacatcaacattagaaacttcagctctcaaccaaacacctctaaaagtgggttcatcccatcccatcccatcccatccttgcaaccaaacactacctaagtcttcatcatcatcatcatcgttatcatcatagtgattccctcgagactggtatgcacttgagttgtgcaataaaccattattaaaatggttgttgccatcaataatttccaggtgtctatcagaaggtatagctgagctgctctctcctacatgagaattattatacgagttcgcatcgtcagcaaccaacgttgatgattccaaagatgccacaggtaaagatatgtcacgggatgtctcagggactgttaattgactccctggtagtgtcccatcctgttgaaaccaatcactctcttgtgtctcatggttatcagcagaagcatgactggaattcttaacttgaggaataggatcttgaagaacaggaaatctttgctcaaatgttgttggtggggcagtgcttgcagatttgtttgggttctggtttaccacacttgagaaagatgaggtttggccagaataggcgttgtctgttgaagccacaggcttgctagaagacctcacttgaggtctgcccattttcacaatatcagccattgacatctgacctggcaccccacaccaactgttctgaaatcccgacgatggttgcattgctccaaaagatccatcgtgaagaacatccttgtttacagtagaacttggaacagtttgcttctgtgtagaattagttgctagcacgccaggtcccaatattgatgaccttgaggacatgttatcagcaccacttgatccagactgaactgaactgcttcgtccactacggtctgcaccagctctagtggctcgactattggagttaactgctcctctagattttggctcaagcgcctccttattaaccaggccaactgaaactacattaaacttgtcaaactggaagtaaaaactagtcctgacctcctttttcttgtcgcgcttgctctttacctcttgaaacgtatcttgggagaggaggcggctgaccgcctcgtcggggtccatgccgcagtcccgcagcgccgcgtagatctccgcgtcgggccggttcacgatctccttcagcccctgcaccagcttcctcgcggaccccggcactggccccgccgccgcccccctccctccccctccccctcctcctcctcctccgccgccgccgctcatgtgattggctggcgcgccgcaaagcaggggaagga

SEQ ID NO: 67826 - DNA, 550 bp, Oryza sativa
  Clone ID: PAT_MRT4530_68648C.1
atgctggatccgcgtgggacaggctactggcgccggttccaagccaaggaagcctgccgtcagccaatgtgcccgaggaagcccaccatcagctgcacccgaggaagcccaccgtacccattggtagtggtgccggggatggagccgcccgctcccgaccgcacgcctcctcatcgtcggcggcagcgctaccgcccgtcgctgcccactcaaagggagagagagattgagcagaggagaccgtgcgccgccgccgttccagtcatcgtcgtcgctcgggaagaccgccgtcgtgctcgccaagtcgtcgccgtcctcgtccgccgcttcgccaccgtcggagaccgccggagcatcgtcgccgtcgtcaagccgaagagcgccgccgtttcaacctcgtcgccgtcgccgtccgttggtcttccgccgtcgctttggtcgccgcatggttcattgcggggcaccagactgagaattggcggagataagcccacgggggtcgctgggagtccatgccttgtttttaagggggtgattatgatccaggaag

SEQ ID NO: 67827 - DNA, 417 bp, Oryza sativa
  Clone ID: PAT_MRT4530_68649C.1
ctagcttcgagtgcttgggctcttgggctcttttgagatatcgaagatgatggtgtagtggctcgtcttggagtccaccggagcgccagaacgtggccgtgcagcagctagggctcgtcggcggcgagagtgtgaattgcgattaagcgacgatttggaccttcgcaacggcactgatgaagatgcttccgttcccggcgagcgaaggatggatttccttggctcttccacgtaacagactcggggtgagaggaggagactttcggtggagtggcgggttgaatggtggagatcgtcaaggtggttgacgtggagagaactcggccggcgtgtgcgacgtgtgggaggcatggcgcacgcgtcgtagatggtggggccgggtgaagggcttgtgaggctttccagtgggtcccacat

SEQ ID NO: 67828 - DNA, 350 bp, Oryza sativa
  unsure (1)..(350): unsure at all n locations
  Clone ID: PAT_MRT4530_6864C.1
tctcatnaangtntacaaccaaaccctgnatnncctcngaaanctatatnctccgggcntnaaacgggnaaaaaaanaataccccacaatcctctccccccatctangngggtgaggcnttcnnacnacncccttangggntttaaatggttaaaatccccccccgtaaananaccnacnacttncgggnaagcaaataantncngggnggaaccnnctaatcccgcncacccccnttcctnngttcccnnctnggaagggacnggcctcntccnnttntataanannttaaannnnancnctttntnctnccccccctantnnncnttttntntttccnnttccnggtc

SEQ ID NO: 67829 - DNA, 1918 bp, Oryza sativa
  Clone ID: PAT_MRT4530_68650C.1
ctaatcgcaattttggccgacggcggcagacggcgtggtcgacccaccgtctgccacgtcagcttgccgcccaccattggggcggcaggggctattttcgacggagacgacgacggcccagtagtgattcttcatattgggctttatactgggcccagtagcttttagccttcttcccaccgcattggcgccgaaaacccccccaaccagcgaaagaggcggacacacggcgatggcggcggcggcggcgggggaggaggcggagagctctgccgccggcgagcagcggcgcatgcccttcgctcgtggcgggcccgtgttcgtccccttcatggtcggacccgtctccacggtccccgagttcatgtcctccgcgctccacgagctgcagtcgctgaaagatgaattgggcgatcctggtgatgaattcgacgaagagctctgcgtagatgagttgagggtcctctcagaggaggagctggtggagcgcgctctccgggaggctatggaggagggctgggattccactgctttgtcacagctggaggatcagaggattgatggaggaatgtcagctagttccacctttggaaatggtgctatcacatcaagctcatcaggtgagagagagacttccagatcacctactgaggatacggcaagcataccacatgtgcatggaaacaacggtaaaacaagaggggtaaaaggggaaactagaggcaggaagcgaaaaaatgtcactccgaccttaaattcgtcagttgaaacggagatacctggaccatctgttgacacggcagttgtaccatacgtaccacaacaaggcatcgaagggaaaacaggtggcatgaaggggaaatccagaggaagaatgaaaaaaggtggaaataccacttcaaattcattaggcgagaatctggaagttgtttcacatgagtctgtaccacctgtcgaggatctggaagttgtttcacatgatgctgcaggcgcagatggagatacaaaatgcggaaagggcaaaaagagaggcaggcattttgatagagaagttcgagcacatattttacaagggagctatcttactaaagcagtgaagatggcagaaattaaggccaaacaagaggaagacaaacatgcagccagcttgcactcattcagtggtgattctgtgttggccaaagtttctaagccatcagctgagaaagttgatgttgcaaaatctcttaggtacatcagcacaacttggaagagccaggaatttctagtgttgggaagccagctccttacagatcttagagacaatatttactgtttcaaagacaagctgatgaatgtggcaaagcaacacgttcattctggttattttcttattgaggacacattctataatgacacaaggcgttctactgttgattatagtaaacctatacttgactggattaaaaattccagaaatgaggcggaagagaagtgggatgccattacttctggtgtgctgaagaaacgacaaaaggatttactgatgggtttgaatgtttcaaatgttcctgattttaaatctgcaaaaatggaaaagactcgcttttctgatctgaacttccgtctcggtgctgggtacctctactgtcatcagggaaactgcaaacacatgattgtgatcagggacatgaggttgatccacccggaggacacacagaaccaagcggaataccctctcatgacattccagatgcagaggcggctacagaagtgttcggtgtgccagatcttccatgccacgaagatgacggtggacgacaagtggactctgaacaatccctgttatttctgcgacaaatgctactacctcctccactacaaagaggacaactcactactttatcaccatactgtatatgattacctccaggagtaa

SEQ ID NO: 67830 - DNA, 722 bp, Oryza sativa
  Clone ID: PAT_MRT4530_68651C.1
atatattagttcggtcgttccaattggagcaatgtttgcaatgatacactgtctagggagcagtgcgtacctctacatatctgttgcatttgcgcagatgttgaaggaaataattgtagtagctgtgtttcttctcagagctgcctttggccttgaagaaatgagctgttaaatgcttgctatcgtgcctgtcatcagcgttggggttattgtggcatctgttggtgaaaatacaatcagctgggtctgtgtggtttaccggatggggtgagtcatcacagaagcccttagactgatcttcatgagatttttctgaaaaaaaaaagggtgttaggcttaacttgatttccatgtactatgttagcccttgcaatattgttttcctgcactttgtgtgtctttatttagagaacccaagatgaatgaaagtctcatagaacttcccaccattcacattgttcttaaactgcatatgcactttcacccaaaatcccacagtcttccttgtcatttccagaactagtgcactgacagctcgtgttactggaattgtgagggattggactgtggtgttgctgtcagctcttatcgttgcagatacacagcttacctttataaatataattggttatttgatagcaatagcaggtgttgttgcatataataatcataagctcaaagtgaaaacccatgggaacgagcagcagggtgctgatagcaaa

SEQ ID NO: 67831 - DNA, 315 bp, Oryza sativa
  Clone ID: PAT_MRT4530_68652C.1
atggcgacatggtacaacatcaaggaggagatggacgcggagatgaatgatggatcctggcagcggcgaggcaatggtgttcccctggtgtcattgagctataaaaagcacaaggagatgaggcggcccccactgcggtgctccctcgatgctagcctctcctcgaactcccctctcctagcggttgcagacagaaacaatagacggtaccaggcattgagcgcaacacccgagtggaagaggaagacaagccgtggtgaggattctgaggagctgctctacccatcgtcggtgcatgccagcaagtgggactga

SEQ ID NO: 67832 - DNA, 798 bp, Oryza sativa
  Clone ID: PAT_MRT4530_68653C.1
atagtttattactaccatatgacttgcaagcaaattagttttctttagtcgagattgatgatgtctcaacatcttgaggacctcctgctgctcgttccattggggtttcactttgagcttatgattattatatgcaacaacacctgctattgctatcaaataaccaattatatttataaaggtaagctgtgtatctgcaaagatagcagctgacagcaacaccacagtccaatccctcacaattccagtaacacgagctgtcagtgcactagttctggaaatgacaaggaagactgagggatttagggtgaaagtgcatatgcagtttaagaacaattttcaagttaattaattatgagatcaagtggtcaagatatatgcaagggctcacatagtacatcatggaaatcaagttaagcctctccctttttcttcagaaaaatctcatgaagatcagtctaagggcttctgtgacgattccacccatctggtaaaccacacagatcaagctgattgtattttcaccaacagatgccacaataaccccaatgctgatgacaggcatgatagcaagcattttacagctcatttcttcaaggccaagggcagctccgaggagaaacacagctactacaattatttccttcaacatctgtgcaaatgcaacagatatgtaaaggtacgcactgctccctagacagtgtgtcattgaaaacattgctccaattgcaatgaccgaactaacatatatacgtcgatttaatctacatgtatgctggagcgatggttgttcgcatg

SEQ ID NO: 67833 - DNA, 2064 bp, Oryza sativa
  Clone ID: PAT_MRT4530_68654C.1
ttttttttaatggggatataatttactctttttccatatataagcattagctaccaagaattatgagttgctacaactaattaagctttaccagatcaataccaaactcactcaccaaatggaaaatgaaaaaaatggaaaaagagcgcgaattaattaagtgaccgatttggtgacggcaataatgtcgcggcatcccctggtctaacgccaggcggaggcgacggtgaccacgcgccccatccatccgagccggagcacgccgttctccgccttgacggcgaaccctgccgcgacggggccctgccgggccaacacctggtcagcaatgcccggtccgagcgccaccggccggaatcccgccatgccgaaccgggagcgccacttgccgaacacctcgcaccgctccagccggtcggcgccttccctggccaccgcgttcgccgccctcccgcccagcgccgcctcagcacgcgccctctccgcgctctcccgggggatcgtggcgtccagcgactccaggatggccccgtagtgcgcgcacgcgtcggtgaagcgcgtggtcagcggggccgtgttggagttcagctcctgctccacgagggccaccacctgcgggccgagggcgcgcacccgccggaggatctcgtcgcgcgggttcgccggcgagacgctctcgtcggggacgtgggagagcgcgaacgccaggttgacagccagcgcctccccggcctcgcaccccagcttggatgcttctatctcccctgctctgcagctcaccattttgaaccggtaatctatgcccgctcgctcggcgagcttctggaggtggagtgttgctgttacagactgcgtgaatggtgaggcgggatcggtgacggcggtgaccttcagggaggttccgggcaaccggcgagcagcgaggcacctgatgaggtcggcgtgctgcggggcactgacgtcgaagtccaccaggtgtatggcgcggtggtcgccgacggcgtcgacgatggccacgtttgcagcgtggagggcgaggcggaagcacggggatatgtcgtggaggagttgggacccggcgcgcgtctcgccgccgcagatgtccgggactgaggcggtctgaccaatgcgggaggacaacgccgccaccatcatagcaaccagccgctgctccacgtcgccgcgtgagttcgccgcgcgcttgagggcggtcagatgagtggccgccgtttcattgtgtccgtcggcgatggcagccgccgcctcggagagtagttgccgcgacgtggtggccgaggtcggcggcgaacaggaagccgaggaagacgccgtggaggtggacgagttcgagggcgaccgcgtcatacccacggcgttattgttgttgttcggggtcgtcgccgcagtaagtgggggcgacggcgccgcggtgatggagttgagttgctcctcccactcggacccggtgaccgcggagccggtcccgctcatcgcggcctccacctcatcgtcgtctccgagaagctgcttctcgagctcctgcaggatggacaggtcgctcgtcgccggcgctggaggcagcgccctcgccgttccaaaggcctgaacctgtggcgaggacgccatgtatgtcacctgctgctgccgctgcagctgtggctgcatgagcggcatcgccaccgccctggacgcggtggtgatggacgacagcgtcgacgacggcgatccgaaggcccctcccatgctggacccggatagaaccagaggctgggacggtggcccgcctagaacagccgcgatatccgccgaggtgagcggcgagacggccgccgacgccgcggccgtgcgctgcctcacggttcgcaggtacagctgctgctgcatcgcaatctgtcgctgctgatgctggtgctgctgccacctctccatgtcgccgaggctcctcttgagcaccccgccggccgcggccgcgtcggagcgctgctgcatcggcatctgcaccgccgatccgacgccatacaggtacccctggcgcggatcgcgccacggcgcgcctggctccat

SEQ ID NO: 67834 - DNA, 250 bp, Oryza sativa
  Clone ID: PAT_MRT4530_68655C.1
acgtggcgtggtgaaggtgtcgacggcggaggaaggcatagccggtgacggcggatgcagtgaggagaggtgcgccaacgacgaggggctgcaaggaggctcgcgaatccggctgccgatgttgtcgcagattgccgacgacggcggccaccaggcggatgaagtcgagggaggtgaggtccgcaagcggcgatgacttattctccaggagtcctgccgttggaggtggcttcttgctgctgcttgacgc

SEQ ID NO: 67835 - DNA, 384 bp, Oryza sativa
  Clone ID: PAT_MRT4530_68656C.1
atggcgcgggggcgcggctggtgggaggagaggagccgtaggcagagaccgagaggggaggagagggagaggcgaccgccacccgcggctcctctcctcccgctgcggcaacatccgacttctctttctacttcctctcccaccgctgccctcaccgtcaccaccagcaagtgccatggccggccgctcctccttccccgccgttggacgcctccttccccacctcctctctggccgtcgacgtgccggcccatcgcgtcctcctcctgtgcgccagacgccgcaggggaggccggttccaggggaacgccgcagcgctcgagcggaaggaggcagaaggggattcatagcttcgccaaatgccacaagggaggccggatctag

SEQ ID NO: 67836 - DNA, 1959 bp, Oryza sativa
  Clone ID: PAT_MRT4530_68657C.1
atggggtgcgtgtgctccaggcggtttcgggacgacgccgcgccgcgctcggtgcagccgctcgccgccgcctacgaggcgcgccggggtcgctacggccctggcgacttcgactccggcgagctcgccatcccgccgcccaagctactcacctcccacaaggtaccagaaacaggtacacttttaggaagagccagcattgctgctgtcgaggtgttagataccctcgggagtagcatgacaaatttaaatcatggcagtggatttctctctgggggaacaaatcgaggcaatagagtctgtattttagcatttgaagtcgcaaacacaatagctaaagcttccaatttgtggagatcttgctccggacaaactccagctcctcctcctcctccgcgctcgagatcccgcctccgcctccgcctcccccagtcgccggcgagcaactccggtgaagcgcgagctacggattaagaagtgcaccatggccaaggtcaagccaaaggcactgctggcacaaagcaagcagaagaagagccccactcaaattggcgcaactacaataatcacctacatcgtcctgggagcccttgtcgtctcttccgtttactatgctctcaaatattggcagaacagaggaccagcagcagcagaaggcattgtgggcaactaaggcagctgtgtaaaatgttgttgtatcatcttgttgggtaattttggttgttacagttcagtaaatgaaacatagacagaaggcctcatgttgaagctttagttttatctcctggtaaattgcattaatatttatttgatatgtcgttcttcgacatggatgactctgttgggccgatcttgttaagagtgacatacatgacagttgcagctgtgaaagttgcatgtgatgccatcaaaacgctgaataagaagctttggtaaaacgttttcccatcaaaaaaaaaaaaaaaaaaaaaaaaaaaatattgtctctagaccactctctctccctcctagtgctacgggacaatctgtatcatggtctgccagtaacagtgaagtcagctctcagatgcgcgattgccaatcagttaatgcccaagaagagccgtactgtagctcaaattaaagctgaaatgcagaaaactcttcgctggattctaccgattgctgaaaatacaataagaagcacctgtacgtctaagctagaggtagagggggcgagtgctcgttgcgaaatgaacaagaaatcaggctcccagctcagtatcacccgtgtccagactcttcattacgccgataaggcaaagacggagcaatacatgctcgatctggtggtgctgctccaccatttagttgtccaggtgaagaacagaggctatgggagcaagtcctcaaagcacgaccagtcccgatcccgcaagggaatggatcttcaacctgaatccaagctcaacacatctccagtgaacaacgccacatatccgagcccgttgtcggagtccgaacgcgagacgctggaccacctgagcttcaagaggacgggctacggtaggagcaagagctgcgagcctccacccaatagagggaagaaggcacatcgaacctgggattcatgccggagccatggcagctcgccggcgagggaattcggtaggaactcagcttcagagcttgacaagacgatggacctggatgtaatagatgggttagatagactgacttcttaccacccaacatcccccacattttgttaggtatatgctgcacaaaaataggtattcttttggtgttcctacggttgattgatcgtatatatatcttgtaaatgtgtgtgatctacctatatattctcttacatgtacatatatacatagcttagtagtacagccctgagtttgagtggaaatatagcaagatcacaagtgatactctaaggctgacaggcgtgaagagtagctgcgt

SEQ ID NO: 67837 - DNA, 327 bp, Oryza sativa
  Clone ID: PAT_MRT4530_68658C.1
atgaggggcgacggggtgtacaccgggatgacgagggagaacgagagggagcgagccaacggcttggattcaccggagggagtgcgtcggcggcggattgcagcggcggcaaccggcggagagaaaagggggaaacgacgacgaggtcacgaggggccgattcccggcggcgcggcaggcgctgacggcggcggcgactggccggtcagccaccaaggcgcgcgcgcgcgtgggcggcgcggcgatttgggcggcatcggcgggaacggccgcgagagtggagagggagagctcgacgcggctcacgggcagagcggggagagatag

SEQ ID NO: 67838 - DNA, 300 bp, Oryza sativa
  Clone ID: PAT_MRT4530_68659C.1
atgacggttatggcgattggaaaggtcggtaataccctccaaccgccataggggagcaatccacaccgcccatccaaaccctgcatccagcggcttcacggcaggttcggccgaacccccaggttcagccgaaccaggggccggcccaaccagcccacattttggctggtggtctcgtccgctgcttcacttcatagacttatgaattttggcccaattcatcgtgtcaattttgagttcttggcccattcatacataagtctggttatcgacatcgtccgattgatgtatcgtctgagt

SEQ ID NO: 67839 - DNA, 962 bp, Oryza sativa
  Clone ID: PAT_MRT4530_6865C.1
atggcggccggacctcccgcgccggtttccttcctccccggccgctctctcccccttccaaccctatttaaaccctccccgcacttccttcgcccgtttccaccatttgccgcgccttctcctcgccggaatcgagctcacgccgtcgctctctctctccgccgccgccgccgagctccggtccgccgccgtcgtcgccccggaccgcctcccgcctcggcgccgcctccttcggcttcgccgcaccgtcgccgtccccgtccaccccctcatcgagctcgccgaccgccggagcgccgccgtccccgtcgacccgagccgcgccgccgccttcctccactccgggcgcctcctccgtcgccgccgtcgcctcggggtgagccatggaccgccgcctcgtttccccctctccctcccctctctcggccgccgctccgccgtgcctatggccgccgccgacgaccataggggcgcgggcgccgcctcccgccggccgcgccggcatggccgccttcgggcccgccgagtggctgccgcgtggggcccggccgtgagccgcccgcgccctcgggtgcggctgacgcgtggggcccgcggcgccggccggtgcgagcccgggtgcgcccggtccaccgtggacccacttcggccatataaggaccggtcttcgggcctctgttgcaaagcactaccgtacttccacatgtctagtggggcaaatgaaggctacacgagctgcggctcggtagtcgagatgtcatggtacagggctggtgtcctgctgctaggggctcagtcctgcctacctgtcccgggggttccggccgtaggtggggttgggtcgatgtacacctctgatcagagtataacctattcgaatagccgcgccctcggttatgggcaagccgagcaatgtacccaagttactgacaagggtgcaaggaatggattacaagtcaagc

SEQ ID NO: 67840 - DNA, 312 bp, Oryza sativa
  unsure (1)..(312): unsure at all n locations
  Clone ID: PAT_MRT4530_68660C.1
agangaggcncgggcgccactctccctngggcctacccagcctcntcgtggatcgcgcacccctggtgtcgctggggatcctgctggcctccgacaagtgcctgaagcagggcgttcgcngcngcctccatnantttccccaannaccctcttcngcatgtcctgcntcttctccgtctatcatcgtctntcgacgcctttactccccctcggctcgccaagggggttcattagtattatcctcccaatcnggccaccccccttcattccaaanggttggctggcccaccttcctaacantcccctcccctg

SEQ ID NO: 67841 - DNA, 537 bp, Oryza sativa
  Clone ID: PAT_MRT4530_68661C.1
atggccataaggcctgtccggcatggcccggcccagatatgggctaggcacggcctaaggccatcgggccggcacggtatggtcggcacttcgggacgtgccgtgccagcccacgtgctgcacctcaagctcaggcacagcccaccagtagtcgggccgtggcgtgatgacccgaaggcacgggcgacctatcgtgaattttgccccagggaaattaagatgttgcagggggaagttaatgagttgaagaaagagttcaaggaccgggagcactgccgcgatgacaactccgcacaccacccagccctatccccgccgccgccgccgcactacgatgactcgccccctgctagccctatccctgccgcccccgctccaccgccgtcgccgtccgccgatgccctcctcctcgcatgtggcctctgccccgccggcctcctctcccgtctcgtcccgccggccttctccccacccggcacagtgccctgctcctgcgttgtcgctgccgccaccgtgtcgcttgtcgccagccactag

SEQ ID NO: 67842 - DNA, 462 bp, Oryza sativa
  unsure (1)..(462): unsure at all n locations
  Clone ID: PAT_MRT4530_68662C.1
attcggcncgaggggatcgtcganggctaccgcntcggcggcggcccgctcggcgaaggcctcgacaangtgttcccnngcggcgccttctacccgctcggcctcnccgacnaccctgacaccttcgccnanctcaaggtgaaggagctcaanaanngccgcctcnccatgttctccatgttcggcttcttcntccaggccatcntcaccggcaagggccccatcnagaacctcttcgaccacgtcgccnaaccgtcgccaacaacgcctgngcatnctccaccaacttcgtccccggcaagttancncancnacacnatccanatggtgcccaccnacgtttcntgtgttcacttgtantanccacccacccaccctgctnttncagttgcancaatgcatgtttgtttgtncttaattgtgtgtntgtgtgtgatccatccaagaaattctcccnnantt

SEQ ID NO: 67843 - DNA, 575 bp, Oryza sativa
  unsure (1)..(575): unsure at all n locations
  Clone ID: PAT_MRT4530_68663C.1
ctacccccggcgtcccgtgtnttcaaacccgctctggctttcgggtctcagagcgaggcggagattgtaaggagctcaagctcaaggagatcatagtatggcagtctcgccatgctcgccttcctcggtcttcgtccgtccaggcgctcntcaccggggntggccccgtgcagaacctgcttggatgcacctcgctgatgccactgtgccaacaaactatacatgcactgcacccaagcctgcaagtgtgccattgaggaggatggccaatgcaaactgacgtgatttgaatntaaatgtgagcagagtgttgttgaattgatgtaatggtgatggtaacagtggctgtatggcgtataatgtgtggtnacgggatggtgacggtctcgccactgcgtgccccccgtcgcagctcgcggccccggcgatcgagaggggtatgtatgtacgtacgtatatacgatgtattattatgcatgggtgtagggtgtgggtgtaacatgtaaatttgtgctccaactgatttgcacgcattggtcgcatggatcgatttgctaaaaaaaaaaaaaaaaaaa

SEQ ID NO: 67844 - DNA, 248 bp, Oryza sativa
  Clone ID: PAT_MRT4530_68664C.1
gaaaacacgacataaaaaaagtggctaggatcacacagagcccgagagctaactgtgcagcgtgcggtggaggtcaagggaatagtgaagctctgaccgctgtacgcatcaaggcgtggggtgccaagagcagcacttaaaccttgggtttggttctaccgggctttacaaccaatgatctgacatcgggacccgtagaccgcatgaacgtccccatggaagacgtaaagttccaaccggcggctttt

SEQ ID NO: 67845 - DNA, 1155 bp, Oryza sativa
  Clone ID: PAT_MRT4530_68665C.1
atggaggtggccgccgcctccctctccctcttccgcacgccgcaggcgcaccacctcgccgagctccgcgtcgacggcgccgaccagtcgccggtcgccttctccgacccctgcgccgtcggccgcaagcgccgctgcctcttcccgcccttctccccgcgcaagaggatgctgctggagctcccgcccttcgcctccacgccgaccgcgcccgcgccggggagcgcctccccgggggctctctcgtcggggggtgatcggtcgacgaggaccggcgggagcggaggcggaggcggaggcggtgggggttcgtcgttctccgctatggcggagagggtgttggcgccgccatcggtgtccagcgggagcggcgccgcgttcgcgttcgcgttcttggccgcgtcgccgaagcagcagcagccgttgacgcccatgggatccaccgccagctgcggcggcgcgggatccgggttcttgccccctgatccgtcgtcgtcgctcacccccatgggctccaagtccaacggcattggcgcctccgcgttcttggcttccccgaggccggcgaccaggagcgccaacgatgggggcggattcgcgttcttccgttcgccggagccagagcgcaccgccggcgacaccacccgcagcggtgccccgttctcggctcctccgaatctggtgtccgggccggctggttccccagcgtctgcggcggctaaggagccatctcagattatcggcgatggtggtctcgtcgcgccgccgtacaccatctcgtcgtcgccggcgcggaagtcccggagcagcaccctctggtcacgccgcctcgcccacgccgcagccgagggccgtacgagcccgcagccgccgcgcgacgagcagctgcagatcaccctgccgccgccgccgcagaaggtcaccaagacggtactagccccggccaccggcgagccctcccgtggcgccaccctgtcctcgtcggcggccaccacgtgctgcacgttcctcacctcgccggcgaaggcgaccaaccaggagcgggaggcgcgagcgtcctccaggatgggcggcggagagggcgccaccaccgcggcggcggcggcggcggcggtggcctgcgccggcggcgaggtggtgattcggttgaactga

SEQ ID NO: 67846 - DNA, 2723 bp, Oryza sativa
  unsure (1)..(2723): unsure at all n locations
  Clone ID: PAT_MRT4530_68666C.1
cttacagtnaggagatatgaagcggcgaaaaattcacaaatcgacagcaagccgggggctcagatccggcgtgcaatccccaaaaatccagggaagagagcagcgagtcggagcggcgcctcctcctccgatggcccccgcttcggcagattcacctgttaccacggggaggaggagaagcgatggcaccctccggccaacgaaatcctccggtccatacagaagctgtacgacgaggcggcgcggcggctgcccttggacgagatcccggagctcgccgaccccctcagcaacatcatcctcaacgtcatcgccgccgaccccgtcagcaacatcatcctcaacgccatcgcccacctctccggatcaccgcccctccaactccaagaccacccaccgccgctcccccggaagaggacccgcaggagctacagcgagtggtgggggttcatctcatccacctctctcaacggcctcatcgccttcatgaaggtctatttccgctacctcaccggcgaccaggccaggcgctacctctacctcgcctcctacgacctcctcctcgccatcaagttggtccaccatgaccgccatctcccactcccgccatcccccctcctccccgacggtggcaagatgaagaacgccctccggatcgccgcgctcaaagcaggccaccccgcgcccgacgacctggcgcgcaccatgaccgcgcagtacccctctcatctactctcccctatcgtccacaagcttcaggggtcggacctgctcaccacccatgacgtccagtccatcaaggacctgctcctcaacgcattccaatggcccccgcccaacatggacttcttgtgctgcccaaatggtgagtcttgtgctcaagccgcccccgaccgttttgctggaatctcaccaaatcatgttcaatttcagaaactcctatacatctcggatcttacgatagatagcgcagccatagagacaaagctatcaaaatgcgtagcgaaagtgcttggtggttgtgaagaacatggacatgtgaactatgatgcctccccgccatgtgagcacatattgtccctgaacatgtgcctcctcgacaccatccattgcttctacatcagggcacttgccgtgctgcccctgcccgtatcagatgactccatgcgccgcggacgcctcctccgcgcaatcctcatgtctggacaatgcttcggccccttggatcccgtatcaaacatcatcatcaacaccctctggtacgacgccgcataccctcccctgtatccaaaggatggcggtggcggcgattgtgaggttgagttgccgcaggatatctctgacacccaagccatgtctcgcattgcatcccgttccctcaacggccttgtcgccctactccgtgccatcaccaccaccaccactggctgctcgctctccaagcatgaggccgtggagtacctttggtccaggcagtgtgacctcactgacaagctacagcagacggtgatgacgaacaagaacccctactctgctgcagccaaggcttcagagcacccgcagcacaccatgcttgggtcattcctcatgtccctctgcggcgagaagcttgatcgcctgcagcacttgctgagatccattagtgatggctccggctgtgtaatctccaacgctgattgggagcagcttaacgcaatgatccaagagcagctaaccacgatgattggcagaaaaagactgcctccatttgatacacaagctttagcagcattatcgaggagaaggtcagactatgtgaaccggcaaaggtttgttcgcagcaagctggaagaattgctagtcacatactccagacagcatccttgggaaccaagatataagcttgacctcatatgtggagtggaggaacctcaatcccactactggagatgctaccatgctaacttcttggcaagcacccatggcactgtgctcaaactaaatcgtgaggcaaccacaacaccaaaccctaagcgcacactcttctttgctcaattctgggactcacaacctggtcgatttaatgaatcaaactcgaagcccatctgctgccctgttcaagatagcacatgttttggtctttgcaccacttgtgagggcaatgcaagtacaattttgcacccaccatctggatatctttttgaggatgatgttgatgacgccattgaagtttatgatgttaatgctgctattgatgtgtttggttctgcttcgtgcagtcttagtaaagataaagataaaggcctgctagagtcagatttcatatattttgatcatggaaggaatgcaaatcttacaaagattctgaatgacgactctattttatgatgaagacaatggtgatgatatagctctgctgttagatttggaggggatttattgacatatattgaggtgtggaattatttatcctcgaacccctccaatccctctgaacaaggcttaatatggatgaggaggggatcattattcaggttacaagtttgtctagtcattgtaataacagaagaatctatatttgcttttggacaatgagtcgcaacactgtatatttgtatatttgctgtaactagcaatggggccgtgctttactacggaaattacagtaacccatacagaaaaactgtatcccgtcggagggacaatgtagagtgttcacgccgccaaaattgaaagtttggttg

SEQ ID NO: 67847 - DNA, 195 bp, Oryza sativa
  Clone ID: PAT_MRT4530_68667C.1
ggatccccgggctgcaggaattcggcagaggatttgatctttgtatctgtttaggtagtagccatgtgatgacaaattgttcgttgtgatatggtttgagattttgtgaaatttttggtgaattttcagtgatcggttaggagggaggaggaatggggaaggcggggagatggctgaggagcttcttggccggcg

SEQ ID NO: 67848 - DNA, 1358 bp, Oryza sativa
  Clone ID: PAT_MRT4530_68668C.1
atggagtgccaagggtgtgacatccctatggatgctaccgtggatgagctgttcaaaagaaggatattcacccgagctagtcaagaagaggcccgcaccatccaagaacccgtactcccggtctatagttggtgctacccttgaagtcatccagaagaagagagctgagaaagccagaggttcgtgatgcagcaagggaatccgctcttcgtgagatcaaggagcgcatcaagaagaacgaagggaccgagaagaaagcgaagaaggcagaggtgtcaaaatcgcagaaggcttctgggaaaggcaatgctcccaagcctgggaaaggcccgaagctcggtggtggtggtgggaagcggtagatgctcccatttccagagctgatcttctagatctaaaaatctaatgcttatttatccagacccttttttggaagaaatttttgcaccatcagttgtcctgagtaccatacaagtggagaacttagtttgaaccagcgcgagagaataaagatcatcttccccccatggatttgcttcgctgctcgctgccatggcgttgctgcgccgtctcgttgttgggctgaagaggagagatctttgtggtctgtacattgcaatgcatttatattctgctctagcgatgattcctgacgttgtaatttgcaggacagagctgtgccgtttcagcggcgccaagatttacccagggaagggtatcagattcatccgtgcagactcccaggtgttcctgttttcaaactcgaagtgcaagcgctacttccacaaccgtctgaagccagccaagcttacatggacagccatgtacagaaagcagcacaagaaggatattcacgccgaggcagtcaagaagaggcgccgcaccaccaagaaaccgtactcccggtctatagttggtgctacccttgaagtcatccagaagaagagagctgagaagccagaggttcgtgatgcagcaagggaatccgctcttcgtgagatcaaggagcgcatcaagaagacaaaggacgagaagaaagcgaagaaggcagaggtggcaaaatcgccccacgcgtccggtaaaggcaatgctcccaagcctgggaaaggcccaaagctcggtggtggtggtgggaagcggtagatgctcccatttccagagctgatattatcttctagatcaaaaatctaatgttatttatccagacccttttttggaagaaaattttgcaccatcagttgtcctgagtaccatacaaatggagaacttagtttgaagcaaaaaaaaaaaaaaaagcggccttatcttgttctatctgaagttggtacttttgacatgattcaaaaaaaaaaaaaaaa

SEQ ID NO: 67849 - DNA, 476 bp, Oryza sativa
  Clone ID: PAT_MRT4530_68669C.1
ctccaggaattattatatcccctgaaagcagaagtgtagatcaaatttaatggcacaagttctccttcagtatcaatctgatcaaatagcggggaatatgatggcatgcagggatcatccgatgaaagcctgtacaaagttatccagtatagaaaaagaaaaaagagaatcagcaaacttagctcttccttagttgtgactcgttaaatttgctcttggtcttctgatatagtacatggttcattcatttaaattggaggaattgaaatgcatgggtggatggaattaagtagcagtcgtaaaagaaggccaaacatatagtctggtgactgctcgttgtgatattggtgttgcctgtccaacttgaactgatttttaaatggagatatcaactgatttaacttggtagctcgattcccagatggtggaatcgcaattgctcccatttcaaaaaaaaaaaaaaaaaaaaaaaaaaa

SEQ ID NO: 67850 - DNA, 4419 bp, Oryza sativa
  Clone ID: PAT_MRT4530_6866C.1
atggtgaatactcgcagcaacgggaatggtcccaacaaccccaataacaataacaatggagagaacccaactctggcccaagttcttgctcaacagactcagctaatgaacatgatgatgcagcaatttcagaatcagcagaaccaaggaaataaccatgtacctccccagagcaagttagcagaatttcttcgtctgaggccgcctgttttctctagtaccactaatcctgttgaagctggtgattggctgcatgccatagagaagaagttggatttgcttcagtgcactgatcaggagaaggtctcatttgcatcccatcagttgcatggccctgcctctgaatggtgggatcacttccgcttgaataggattaatgctgaacctatcacttggcttgaattcaccgctgctttccggaagacgcatataccatcgggagtggtgtctcttaagaagaaggagttcaggtcgcttacccagggatctcgctctgtcacggagtatttacacgagttcaatcgtcttgcacgttatgctccggaagatgtgcgcaatgatgaagagcgccaggagaagtttttgggaggactcaatgatgagctttcttacccacttatggttggagattatcctgatttccagaagttagtggataaggctattcgtcaggaggacaagtacaatttcatggagcagaagaaacgccggattgctcacttcaaggcacaacaggggaataatcagaagccgcgtcttactataggaccccaatctgtgccacagggaggttcttcgtctgttgttcgtccgcagcgccagttcttcaacaacaatgctggcaacaacatccgcaatcaagttccacgtcctgttgcagctccaacccagcaacagcctgccaagagggagcaaggcagcaagcccgtggtgtgtttcaactgtggagacccaggacattacgctgacaagtgtccgaagccccgacgcgtgaaggttgtccctgcacagaacaactctgctgtaccagtatccaaggcccgtgtcaatcatgtcgctgctgcagaagctcaagatgctccagatgtgattttgggtatgttccctgttaactcagttcctgcaacagtacttttcgattctggtgctacacattcattcttatctatgagttttgcgggaaatcatgggatggaagtagaagatcttagacgtcctttgatggttagtaccccaagtaatcaagcactctctttgcaacgtagccccttggtcagaatagaaattaagggagtaccatttctggccaatcttatcttgttagaatccaaagaccttgatgtcatcctagggatggactggttagccagacataaaggcgttatagactgtgctaacagaaaaataactctcaccagtaatgatggtcgagttgtaactgttcatgcattgtcttctgagtctttaaggtcaagactgaatcagataactttggaagaaattcctatagtccgggagtattccgatgtgttcccagatgatttacctggtatgccgcctaaaagggatatagagttcagaatagatctggtaccaggaacaactccgatccataagagaccttatagaatggcagccaatgagttggcagaggtcaaaaggcaagtagacgatttgcttcagaaaggatacatcagaccgagttcatcaccatggggagctccggttatttttgtggaaaagaaagatcatacccagagaatgtgtgtggattatcgtgctctaaatgatgtgactatcaagaataagtatccgttacccagaattgatgatttgtttgatcagcttaaaggtgccactgttttctccaagatagatcttcgatcagggtatcaccagttgagaatcaaagaggaagatatccctaagacagcttttaccactaggtatggattgttttaatgtactgttatgtcttttggacttaccaatgcccccgctttcttcatgaacctgatgaataaagtgtttatggaatacctagacaagtttgtggtggtctttatagatgatattcttatctactctcgaaccaaagaagagcatgaagaacatcttcgccttgcattggagaagctacgagaacatcaactgtatgctaagtttagcaagtgtgaattttggttgtctgaagtgaagttccttggtcacgtcatctcagccggaggagttgccgtcgatcctagtaatgtggaatccgtaaccaattggaagcaaccaaagacagtttcagagattcgcagttttctaggcctcgcaggttattatcggaggtttatagagaatttttccaagattgctaagcccatgacacgactgcttcagaaagatgtgaagtacaagtggtcggaagaatgtgagaagagttttcaagagttgaaaagtcgcttagtatcagctcctattttgattttgcctgatccaaagaaaggtttccaggtgtattgcgatgcatccaaacttgggttaggttgtgttctgatgcaagatgggaaggtggttgcctatgcatctcgtcagttgcgtccgcatgagaagaactaccctactcgtgatattgagttagctgcagtagttcatgcgttgaagatttggcgtcattatcttttcggtactcgtacaaaagtgtacaccgatcataagagtttaaagtatatctttactcagccggatctgaacatgagacaaaggagatggttggaattaattaaggattatgacatgggaattcattatcacccgggaaaggctaatgttgtagcagacgctcttagcaggaaaggctattgcaatgctacagaaggacgacaattgccattggaattatgcaaggattttgaaagattaaatttgggaattgtcagtagaggtttcgttacagctttagaagcgaagcccactctaattgatcaagttagagaagcccaaattagtgatcctgatattcaagaaattaagaagaatatgagaagaggaaaagctatcggtttcttggaggatgagcaaggaactgtatggttgggcgagagaatctgtgtccccgacaacaaagatttaaaggatgcaattctgaaagaagctcatgatactttatactccattcaccctggtagtactaagatgtatcaggatctcaaggaaagattttggtgggcgagtatgaagcgtgaaatcgcagagtacgtagcagtatgtgatgtttgtcagcgagtcaaggcagaacatcagaaacctgccggtttgctgcagcctttaaagattcctgaatggaaatgggaagaaatcggtatggattttatcaccggtttacccagaacgtcatcaggccatgattctatttgggtgatagtcgatagacttaccaaagtggctcattttattccagtaaagacaacttattccggaagccgcttggcagaattgtacatggcaaggattgtgtgttcgcatggcgtccctaagaaaatagtgtctgatcgaggcagtcagtttacctcaaatttctggaagaaaactcaggaagagatgggttctaagctgaactttagtactgcttatcatccgcagacagacggacaaaccgaaagggtgaatcagattctggaagacatgttgagagcttgtgctttagatttcggtggaagttgggataagaatctaccttatgcagaattttcatacaacaacagttatcaagctagtatacagatggccccttatgaagcactgtatggtcgtaagtgccgcactccacttttgtgggatcaaacgggagaacgtcaggtttttgggacggatattctaagagaagcagaagaaaaggtgaaaatcattcaagaaagattgagagtggctcagtctcgtcataagagttatgccgacaatcgccgtagagatttgagttttgaagaaggagattatgtgtatcttcgtgtcacgccttttcgaggagttcatcgttttcgcaccaaagggaaattggcaccgcgttttgtgggaccttataagatcgttagtagaaggggagaggttgcttatcagttagagttacctcaatctttggcaggagtccataatgtgttccatgtgtcgcaattgaagaagtgtttaagagtacctaccgaagaagctaatcttgaacagatagaagtccaagaggatttgacctatgttgagaaaccaatcagtatcttggaaacaaatgagagaagaaccaggaatcgagttatccgtttctgcaaagttcaatggagtaatcactcggaagaagaatcaacttgggaacgagaagatgaattgaagtcagctcatccgcatctgttcgccggttcttccgaatctcgaggacgagattctgtt

SEQ ID NO: 67851 - DNA, 1133 bp, Oryza sativa
  Clone ID: PAT_MRT4530_68670C.1
gaggctgttctcgacgagctccttgacggcggaggagaggtcgaagatgacctggattcttccatattattatcatcttatttgagtgatgtgatacctatgtataatttgactaaagtttttcctttaacatgacgtatgcttaactttataattgatgagcatattagtgatagtgacagttagatggatgatgctgcatctactactggccaatatgatcagcaagataaagattggagctgcttcatatctccacttcatcaaatttatagaaggaggtatttgttacggtaaagtgctttagagctattcatggtagataggtcaaatttcttcgatttcgaggatacagaaagcatgtaaacatgcttatttatcgggcaaccattcatacaaaacctccttatttgaacaacattttcctagctacccagagacctgagtaaatatgtaagaagttgcaattgacagagtgctgggctagatgggagattagcaattttgactacctgatggaactgaacactcttgctgggcgcagttacaacgacattgcacaataccctgtttttccatggatattagcagattaccactccaaaacattttggatctggaagatctgtctggcgtccgcatactgagatcttccaaaaccggttggcgctctgaatcctgcatgactggagaaaccccaagaacattactctagtttcaacgacccaatcatcccaaaatttcacctaccgttcacattgctcctgtcctggcatggtgttatattatcttgtcaggatagagccttttacggccctttctattcagcagcaatgtggcaggtttggtcaatatgatcacacgttttcttgtatcaacagaacatggaacagtgtccttgaagacatgaataatgtaaaaaagttaattccagagatattttaccttactgagttacactaatgtgaatttggttgacttagggtcaactcaactttctggaaagctatgctccgtggaattgcctccttggtctcaaccctgttgatttcatatgtaaacacaggaaagctcttgagagtgatcatgtctccgctcatttgcatgaatggatcgacctaatatttgggtat

SEQ ID NO: 67852 - DNA, 462 bp, Oryza sativa
  unsure (1)..(462): unsure at all n locations
  Clone ID: PAT_MRT4530_68671C.1
cccacgcggccgggcccctccactctggtgaccctatttttcgaggtctacaggaggtggcgatnccggcgggggaaccggtagcatcganccgccggacgggcgnagttcttgatgnacgaccaccaccaccctggggcaagggagtatcctaggcggcggcaacgacgactcgatcggaaggcttctccactgcttcagccagccctctaactccggcgtcggcttcgttgacgcagatcgggaggtggccattgatggggatcgacagcggcgatggcgcaatactcaggaaattaggaatgcgtcgatggtggttgtttgatttctcaagaatggggccatcgaccatggcatccaaagcagagtcttgcaagtgtggaggacagtgcctagacaccgccccatgaagtngcccgccctgcaggtcacgtgggcactccggcaagggcgacgagcagc

SEQ ID NO: 67853 - DNA, 437 bp, Oryza sativa
  Clone ID: PAT_MRT4530_68672C.1
ggaggacgggtttaaacatttcatgtttcccggggcaagacaacccaaaaatacaaaaaattcatgcgggaaaaaacaggccatggttttttaaaaaaggggggctactggtaccctacaaattcaattcaacaggggaaaacgggggggaggggctacaaccgggttgactgctccgacggtttttgattttgcaaagaggattcatcaccaccagtaccagggtcatgcgaagaaattgattcccttgaggaaggctttgccccattcaaaaagatgttcttgaaccaagccccctggaaaggggggccatttctgctttggttacttggggaccctgggtgggggttttgatttttcgaagccaggcctgccataaatcgggaggctactctacgggcattgactatttctggtttagcctggcggaacttaac

SEQ ID NO: 67854 - DNA, 190 bp, Oryza sativa
  unsure (1)..(190): unsure at all n locations
  Clone ID: PAT_MRT4530_68673C.1
aatcacattagaccctaatcgacataagaacgaacaaacatacaccaacagacggacaccacgacacaaacaacgtagcccaagcagagagcgacgaaacgagancgaacaaaaagaagaaataaaacagtacgaaacgacgaccatccacaccgacaaggacgaagacaaccacgacaaaagagagtga

SEQ ID NO: 67855 - DNA, 1173 bp, Oryza sativa
  Clone ID: PAT_MRT4530_68674C.1
atgaggacgaacaccaccgccaccgtgctcctcgccgcggccgtggcgctgctgctcgccacggcggcgcgcggcgacggcggcgacggcgggtgcgggaaggaggatgcggcggcggggcgggaccgggcgcgggcgagggggctcaagatcgcggccttcttctccatcctggtgtgcggcgcgctggggtgcggcctcccctcgctggggcgccacgtccctgcgctgcgccccgacggcgacgtgttcttcctcgtcaaggcgttcgcggcgggcgtcatcctcgccacggggttcatccacatcctccccgacgcgttcgacaacctcaccgacgactgcctccccgccggcgggccgtggaaggagttccccttcgccggcttcggcgccatggtcggcgccatcggcacgctcgtcgtcgacaccctcgccaccggctacttcacgcgtgcgctgtccaagaaggacgccgccaccgccgccgccgtcgcggacgaggagaagcagagcgccgccgcgacgcagcagcacaaccaccaccacaatcaccacgtcgtcggcgatggcggcggcggcggcgaggagcacgagggacaggtgcacgtgcacacccacgcgacgcacggccacgcgcacggctcgtcggcgctcgtcgcggccgtcggcgaggacgacaaggagacaactctccggcatcgtgtcatctctcaggttctagagctagggatcgtggtgcactcggtgatcattggcatctccctcggcgcgtcacagaatccggaaaccatcaagccgctggtggtcgccctcagcttccaccaaatgttcgagggcatgggactcggtggctgcatcgtgcaggcgaagttcaaggtgaggtcgatcgtgacgatggtcctcttcttctgcctgacgacgccggtggggatcgccgtcggcgtgggcatctcgtcggtgtacaacgagagcagcccgacggcgctggtggtggagggcatcctcaactccgtcgcggcggggatcctcatctacatggccctcgtcgacctcctcgccgaggacttcatgaaccccagggtgcagagcaaaggcaagctccagctcggcatcaacctcgccatgctcgccggcgccggcctcatgtccatgctcgccaaatgggcctag

SEQ ID NO: 67856 - DNA, 306 bp, Oryza sativa
  Clone ID: PAT_MRT4530_68675C.1
gatacccgcagaccggatatatagggtattggggtccgttgatacgaggatctatgtaagacgacatcaggcagataaaagacaagaattatactggttcaggcccattgatgggtaatagccctaatccagttggtatgggattatatgatggaaaccacagattacaaagggaatagcagaactcgatgataccgacaagatcgtagtcgagcaggctgtggtggttgtgttggcagtaagattcaatgccttaggtcctgcccagggggtcccttatataccacgggtcagttgatctccaag

SEQ ID NO: 67857 - DNA, 372 bp, Oryza sativa
  Clone ID: PAT_MRT4530_68676C.1
ggacgattgaaaaaaagtaaaaatccagcattataaaattacagatacatgaacgggaaaactggcaaatttaaaaacagaaggatcgggtatataggagcacttttattccacttggttaaccccaaaaacaaacgaattttttggggggaaaagaaaaggcaattacatcaaaggataaaatagactaaatataaactttccattttcaagggatacggggagaaacaaattttcaaataagggggcaatcaaaaacacatgcttggggttggagcagcagccccaccagaggcccgtcccgccataattttaattggggggggatcccatgccttgcccttgggggaactgcaatttcaagttttgttg

SEQ ID NO: 67858 - DNA, 447 bp, Oryza sativa
  Clone ID: PAT_MRT4530_68677C.1
cgacggatagtaatgctgccataaacgagatttctggtgggggctaagccgtccaaatgactgcacgagatggagtccttagtaggcaaggtaaggaatcagggcacccctctggaggccatccacggtttcttccatgctcgctcccgccgctgcgagctgactgacaaccacagcctatccccaagggtgcaaaagtgggactattcgcacgtgtatgatccggatcctcgatcttgcgcgacgtttcaacatgcaggttgtatatgttgaatgacaccaagaagcctgagcctatcttcgagagaagcttcggctggttctacccaaatgcataaagggggcctgtaggaatctttagtggccttgaccatttcgcctctcctcctacataaacatatgcacgagtgatacgaccagatgctgagattgcatttttcactacag

SEQ ID NO: 67859 - DNA, 2373 bp, Oryza sativa
  Clone ID: PAT_MRT4530_68678C.1
atggcgccacgtctttctgcctgccttgtgttcttactcatattggttctttcactccaagagtctcccttgcatgctgctgatactctcactgcggaacagccgctctctgctgatcagaaattgatctctcaggatggcaagttcgctctggggttcttccagcctgcagctggaggatcttctagcaggtggtacataggcatatggtacaacaaaatcccagtgcaaactgtagtctgggtagctaacagagataaaccgatcactgatccaacctcatcaaatcttaccatcttaaatgatggaaatattgttctcctagtgaatcattctgaatctcctgtatggtctaccaatattgtaaacaatacaatcgccagttccccagttgctgtgctccttgacagcgggaacctagtagtcagacatgagtccaacacatctgaggtgttatggcagagtttcgacgattttacagacacatggctgccaggtaataagctcagtcggaacaagaaaaccggagttatcaaacggatgatctcttggaaagaccgtgctgatccagcaccaggaatgttttccattcagttggatcctagtggtgccactcaatatattctcctgtggaatagctcgtcagtttactgggcttcaggcaactggactggcaacacatacactggtgtgccagagttgtcacctaccaatagcgatcccaattcagcatacacgttccagtttgttgacaatgaccaggagacgtacttcaactacactgttaagaatgatgcacaattaacaaggggcgtcattgatgtgtcaggtcattttcaagcttgggtatgggcagatgcagcgcaagcatggcaacttttttttgcacaaccaaaagctaagtgcagtgtttatgggatgtgcggcacatatagtaaatgtagcgaaaatgctgaattatcatgcagttgtctcaagggcttcagtgaaagttatccaaacagttggagactaggtgatcagacagcaggctgcaggagaaacctcccattgcagtgtggtaacaatggctcagtgaaggcaaagcaagatagattctttatgattagcagcgtcaagttgccagatatggcacacaccagagatgtaaccaatgttcacaactgtgaattaacctgcctgaagaattgttcttgctctgcttactcttataacggtacttgcttggtttggtacaacggtttgataaatttgcaagataacatgggtgaattgagtaatagcatctttattagattgtctgcctcagaattaccccagtcaggaaaaatgaaatggtggattgttgggattatcattggtggacttgttctcagttctggggtgagtatattatatttcctaggtaggcgaagaacaattggaataaaccgagatgatgggaaattgatcactttcaaatacaatgaactacagtttctaacaagaaacttttctgagagattgggtgtaggttcttttggctctgtgtacaaagggattctaccagatgcaacaacattggcagttaagaaactagaggggcttcgtcagggggagaagcaattcagggcggaagtgagcaccattgggaatattcagcacataaacttgattcgacttctaggattttgttccgaaggggcgaagagattacttgtctacgagtatatgcccaacggttcgcttgatcatcacttgtttcagaacaattctgcgatttcgagttggaaaagaagatatcaaatagctataggaattgccaagggattggcttatctgcatgatgggtgccgagattgcatcatacattgtgatattaaaccacagaatatactactggacatgtcatttaccccaaaagtggcagattttgggatggcaaagctcttaggccgggatttcagtagggttttgacttcaattaggggcacaataggatatcttgcaccggagtggataagtggtgagtccataacaacaaaggcagatgttttcagctatgggatgatgctatttgagatcatttccagaaagagaaatctaacacaaacagagacaagaacagaaatattctttcctgtgctagttgcaaggaagcttgtacaaggagaagtgcttacactgttggattctgaattggtggatgatgtgaacttagaggagcttgaaagggcgtgcaaggttgcttgctggtgcattcaagacgacgagagctccaggccaacaatggcagaagttcttcaaatgctagaaggattggtagatatcgaagtgccacctgccccaagatacctccaggttcttgctgaaggtgcagcgagtaaaacttaa

SEQ ID NO: 67860 - DNA, 1959 bp, Oryza sativa
  Clone ID: PAT_MRT4530_68679C.1
ctaatgaggcaagtggggagaaggcggcgagctcgggtggcaaccgtggagggacgagaaccaatatctgtcgttgagtacaaatttggtcattgctttcttttctaggagcaagtggcggagatgctcgacggctgagcaggtgagacgatccgccgtcctagagaggagatgggaggcgatcttgtacgccttggagaagagcgagagcatctccgaggccactctgctcgggtcgcggtgacccgcggcccccgcggcgcaccggagggcagtcctggcggtgcatgagccgatgtcgaacgcgcacgacatgcaacgttctgcctcgacgaggtggacagcggcgaggaggtccccctcagcggcgcacaggaagtttagcgcctctagtgtgggtaggtagcggaagcaggaggtcatgaaccccacgagggccttgagtgacccccgcgccttagtcttcaagcctcgccgcatctcaatctcatccacatctgcaccggaatcctcaccggtggtgaggtgcctgatggcgttggtgatgatgttggagacgggatccagggggccgaagcagaagccgccgtcaaggacggcgggcagcagctccggcttctcgtccacgggggaggcgctcaattgcagcgctggatttgaggaatcaggctcttctggctgctgccgtcggcccatcgccggctcgatgccaatgcgcgccaccgccgccccccggaggacacatgctgccgacgagacgggcggtgaccagactccctccaacccgaagctccacaccgcaccggccatgaaccacaagggagccaccgcctccaccagcgccacaggggaaacacaagcgaggccaactccgacgtggtgctcctcttggagcgtgtaaagccgacccactacaggggcataacattctgaaaattcttcacgcgagcaatcgccgggccgcgccgcacgcccggcgtcgagcacgtggagtgcgtgcgccgtgctgtcatcatgtgactccatcaaccgaagccggtggcggggtagggtggaggcatccacacgagctcgctgccactgaggaaggagaccgaagaccgttggattccaaggaccgcacgtcgaacacctccggcagccaccgtcgtcgttcgcccctgcgttgaccgcaccacaaccgtgcgccaccacccttcgctgttgctccacttcggggtaagccctcgcgcccacattactcctccggagcctcgtctccaggtactcgaccacgtcgccgacggccgggagcaccttcctggcggcgtcgagctcgccgaaccgctccgcccacgccgccagcagcggcgtcctggcggcgtcgagcaccctggtccccgtgagcgcctcgttcgccctcgtccgcgggatcaccgaccccagcgtgacgtcgacgagccccggggcgtcgccgccgaagaagggcttcccctccgcggcggcgagggccccctccagcgcccccaccgcggcggccatccgcgccatcccctccgccctctccccctccgtgctccccaggtacgccggcctccacgacgccacgaactcgtcgtcgacgtgggcggcccagaagcgggcggcggcgcgggcgagggggtcgtcggcgggggggaggagcggggcgccgccgccgccggggaaggggaaggcgtcgtcgatgtactcgaggatgacccgggactcgcagacggggcggccgcggtggatgaggacggggaccttggcgtggacggggttggcggcgaggaggaggtcggtcttgcggtcgaggtcgacggcgacgaggtcgtaggtgaggcctcgcagggcgagggcgagctccaccctggtgacgaacgggctagggttcgtgctgccgagcagcttcagctcgtgatccggtgatcctcctcctccggcggcggcggcggccat

SEQ ID NO: 67861 - DNA, 2073 bp, Oryza sativa
  Clone ID: PAT_MRT4530_6867C.1
gtcatatggcagagggttggtgccctgctgctaggggctcagttctgcctgcctgtcccgggtatcccggctgcaggtgggattgggtcggtactcttgtttatggctaggatgggttgggaactatgtcacgtcttccgtccgtataccgtggtgatggataacactggtaacaaaggctatgggaatgatggatccgatgactcaagaacccaagccaatgggaatgagaaaagcatcaacaaaacctcaccagagctaatccaaaaagtggttaaccaaaccaacatgttgacaacagcttttcaactattacagaattggaacaacccagcaggggcaaccaacgttcaagtacctacagtccagcaacagttcaagttatcagaatttctcaaaactgagcctccaacctttgccattgccgtcgatcctatggaagccagtgattggttgcgcacagtcgagaagaagctagggttgattcagtgcaccgaccaggagcgggttggcttcgcaactcatcagttggttggaccggcttcagagtggtgggatagctacgaagcatcacggccagaaggacataccatcacctggaacgagttttcatctgtattcaagagatcacatgttcccgcaggaatgatcacactaagaaaacgagagtttcgctacctgaagcaaggagatttgaccgtcacagagtacctgcacgagttctatcgtttggctcgctatgcaccagaagatgtggaaacggatgaagacaaacaagagaagtttctccaggggttaaaagatgagcttgtagtgcaactacttctagaggattatgaagattttgagaaacttgtggacaaagccatgcaactcgaaagtgagcataatcggatgacgaactgcaagagaaggattgtcaacatcccagtaattccaggtggtaaccaaagacagcgcactgagccacttcagatcaccggaccttctgttgtgcatcaagagtccccgccccaagaagatggacgcaatgcagacaacaacactagcaatactaatgatgatgataccaccaacaaccatggttcttgccccattagtgaccactcgaacaaagcgtgcaatgtcagtagcattcaccaagatgtcaacgatagtatcaatgttggaacccagaatgacaaccttagcaattttgacactgagaaagactccaatggtgatagcaactatggtaccactgatgccaatgttagcaaggatttccaaccaccaattccaactccaagtcacaatgatcatccccagatggacagctcagcaaagaagacgttgatttgttacaactgcaaagaaccaggtcatttctctagagattgtccacagccgaagcgtaacctgcgccatccctccggccattatgcaagaagaagacaggtcactcgccttgtggtcactggagcaaacgccgtacccgcagcaagccaaaggacctcatcatccccagaagcgtccgcaatccacattaaagaataccacctgttagagataagccgaaagatgattgataaaaagagattggcaaagatgttctctagcataaaagaagtaggccgaaaggtgattgataaacagaaacatgctctgcatcgctcaaggaagacccctgattgtaattgccccgcaacagtcaccttgtcattaagtaagcaagatgacctaggtaaaagtgtttctatgaaggcaaggagtgaaatcttcaactcggtatcagatgctacacgaagtgaaaagtgcaagcaccggttaccagttgataacttgtctgaggttgactccgaagatatgaatcatgagaagttctggaacggaagcatcactgaactaccgcaacctagtctgagtcagccaaaaggtgcaccctggtccaagtcaggtgaagagaagattccatccgcaacaggaggtcaagccaagcagttccgagtggtaaagttttgctggaagttcgtcaagacgcaacggaagaagtcagacaagaagagaagaccgcccaacctaccttcttgctag

SEQ ID NO: 67862 - DNA, 345 bp, Oryza sativa
  Clone ID: PAT_MRT4530_68680C.1
atgccggaccttcagacgccgaatgcagatctgcgtctagatgtattcaccgcctccaccaccggacccaacgccaacaggcacaatgccgccgtagcagccactgacttcctgctcccgaaaatgacgtatccccgtatcgacgtatcgcgtatccgtatccgtatccccgtatctgggaactacgggcgaaagcctagccttcaggccggcaatggcgacgcctacgggcgtcgctttccccatgattcgacggctgcgcccctcaagagtggcggcttcggcgcccacaatcaccgggaacaaagtggtggatcgatcgacggcggcatgctcgagaggtag

SEQ ID NO: 67863 - DNA, 3036 bp, Oryza sativa
  unsure (1)..(3036): unsure at all n locations
  Clone ID: PAT_MRT4530_68681C.1
cggcacgaggcgccgatttcgaagccgcggtcgggggagtcgcctccacggccaccgacatccgccgcaatgctgtgtctcacctcctcttcctcctccgcgcccgctccgctccttccctctctcgctgatcgaccgagcccgggaatcgcgggcgggggtggcaatgttcgcctgagcgtggtttcttcgccgcgccggtcgtggcctggaaaggtcaagaccaatttctcagttcctgcgactgcgcgaaaaaacaaaaccatggtgactgttgtggaggaggtcgaccaccttcctatatatgatctggaccctaagttggaggaattcaaggatcacttcaactataggataaaaagatacctcgaccagaaatgcctgattgaaaaacatgaggggggccttgaagaattttctaaaggctatttgaagtttgggattaatacagttgatggtgccacaatatatcgtgaatgggcgcctgctgcacaagaagcacagctcattggtgagttcaataactggaatggtgcaaaacacaagatggagaaggataaatttggcatttggtcaatcaagatttcacatgtcaatgggaagcctgccatccctcacaattccaaggttaaatttcgctttaggcatgggggtggagcatgggttgatcgtattcccgcatggattcgttatgcaacttttgatgcctctaaatttggagctccatatgatggtgtacactgggatcctccagcctgtgaaaggtacgtgtttaagcatcctcgacctccaaaacctgatgctccacgcatctatgaggctcatgtggggatgagtggtgaagagccagaagtaagcacatacagagaatttgcagacaatgtgttaccacgcatacgggcaaataactacaacacagttcagttaatggcaatcatggaacattcctactatgcttcttttgggtatcacgtgacaaattttttcgcagtcagcagcagatcaggaacaccagaggatctgaaatatcttgttgacaaggcacatagtttaggattacgagttctgatggatgttgtccatagccatgcgagtaataatgtgaccgatggtctaaatggctatgacgttggacaaaacactcatgagtcttattttcatacaggagataggggctaccataaactctgggatagtcgtctgttcaactatgccaattgggaggtcttaagatttcttctttctaatttgagatattggatggacgaattcatgtttgatggcttccgatttgatggggttacatcaatgctataccatcaccatggtatcaataagggatttactggaaactacaaggagtatttcagtttggataccgatgtggatgcaattgtttacatgatgctcgcaaaccatttaatgcataaactcttgccggaagcaactattgttgctgaagatgtttcgggcatgccagtgctttgtcggccagttgatgaaggtggagtagggtttgacttccgcctggcaatggccattcctgatagatggattgactacctgaagaacaaagaggaccgcaaatggtcaatgagtgaaatagtgcaaactttgactaacaggagatatacagaaaaatgcattgcctatgccgagagccatgatcagtccattgttggtgacaagactatagcatttctcttgatggacaaggaaatgtacactggcatgtcagacttgcagcctgcttcacctaccatcaaccgtggcattgcactccaaaagatgattcacttcattacgatggcccttggaggtgatggctacttaaattttatgggcaatgagtttggccatccagaatggattgactttccaagagaaggcaacaactggagctatgataaatgcagacgtcagtggagccttgtcgacactgatcaccttcgatacaaggttgtgcctaagtatatcaattatatgaatgcatttgatcaagcaatgaatgcactcgaggaggaattttccttcctgtcatcatcaaagcagattgttagcgacatgaacgagaaagataaggttattgtctttgaacgtggagatttggtttttgttttcaattttcatcccaacaaaacttacaagggttacaaagtcggatgtgacttgcccgggaagtacagagtagctctggactctgatgctttggtctttggtggccatggaagagttggccatgatgtggatcacttcacgtctcccgagggaatgccaggagtaccagaaacaaatttcaacaaccgccctaactcattcaaagtcctttccccgccccgtacctgtgtggcttactatcgcgttgatgaagatcgtgaagagctcaggaggggtggagcagttgcttctggaaagattgttacagagtatatcgatgttgaagcaacaagtggggagactatctctggtggctggaagggctccgagaaggacgattgtggcaagaaagggatgaagtttgtgtttcggtcttctgacgaagactgcaaatgaagcatcagatttcttgatcaggagcaactgttggtgcccttgtaatctggagatcctggcttgccttggacttggttgtggttctttagcagttgctatgtacctatctatgatatgaactttatgtatagttcgccttaaagaaagaataagcagtgatgatgtggccttaaacctgagctgcacaagcctaatgtaaaaataaagtttcaggctttcatccagaataaaacagctgttcatttaccaaaaaaaaaaaaaaaaacacgatgggcacgattaaaattcgcaataccctctgcggcaacaaaaaaaaaaacaatacgccaccggggggccggtnccaattccccctatagtgagtcgttttaaaattccctggccgtccntttactaacgtcttnnctgggaaaaccctgncgtttccccacttnatcgccttgctgcacatcccntttcccntctggcttanaatnnaaaaag

SEQ ID NO: 67864 - DNA, 316 bp, Oryza sativa
  Clone ID: PAT_MRT4530_68682C.1
atggtccttttcgggacgccagagtggctggcgccgtaccccaacatagcggcgccagccacactggcgccgtgcccgtgccaccgtggcaatagggctgtcgtggaggcaacggctggcgccccccccgaccgcggcgccagggtggctggcgcccccctcctccacccatcgaagcccttctgcctccgggcctcggctggcgccgccctcatggaccacggcgcctgggtagctggcgccgccctcccccagcccgaaacccttctgccacgcggcactggctggcgctgcccttctcaacctcggcgccagg

SEQ ID NO: 67865 - DNA, 576 bp, Oryza sativa
  Clone ID: PAT_MRT4530_68683C.1
atgcacatcaggctggcgcagccgctgtacgtcaagaacttcaccaccatcgacggccgcggcgccgacgtgcacgtcgccggcggggccggcatcgtgggcaacatgatgccggccgtggcacgcggcggcggcggcggcggcggcggcggcggcggcgggaaggatcagtggcactggcactcggtcggcgacgcgttcgagaatggcgcgttcttccggcaggtgggcaacagggagctagggcagaagcccccatttccattactagaaacgagatgtcaggtacaaaaaacagggttcagagaaaaagaaaaaaacaaaagaaaaaccgggaaaagcgcaaaccccctacaggagaagcacccggacatgaaggacatacagttttcctacaggagaagcacccggacaggaaggacatacagttttctgcagggctacaaaactctcggaaatcattcagaacacagacagcagaatgaaaagaaaagaaacccagccgactatcaaagcttgcttctctctgtgtttacaaagtgcaccaacagcacttcttataaaaatctcgactaa

SEQ ID NO: 67866 - DNA, 378 bp, Oryza sativa
  Clone ID: PAT_MRT4530_68684C.1
atggtcctttttgggacgccagagtggctggcgccgtaccccaacatggcggcgccatccacactggcgccgtgcccgtgccaccgtggcactagggctgtcgtggaggtgctgactaggccgaagggggcgccagccaaagtggcgccgcccctcataccacggcgccagcatggctggcgcgcccacttctttgcgggccccaccaactttctcccccctaaaaattttcgccctgttctgcctccgggcaacggctggcgcccctccccgaccgcggcgccagggtggctggcgctcccctcctccccccatcgaagcccttctgcctccgggcctcggctggcgccgccctcatggaccacggcgccagggtag

SEQ ID NO: 67867 - DNA, 273 bp, Oryza sativa
  Clone ID: PAT_MRT4530_68685C.1
atggcgacgatgcagcatcagctacagtgctccggcgagggcgcggcgtccccgtcggcgagccagagcgcgagccagagcggtgacgacagccgccaccgccgccacggcaattgcccagacgctggagggctcgacggagacgagcaagatggccaccggtggcgccgggcccgcgccggtgttctcgatgctagagagctggctgctctgacgacggcggcatggggcatggaacggggaggtcgggaggatgatgaagggatagactga

SEQ ID NO: 67868 - DNA, 237 bp, Oryza sativa
  Clone ID: PAT_MRT4530_68686C.1
atgagctactccggcggctgctcgacctgcctcgagaccatcttctccgtcgtgctcccgccgctcggcgtcttcttccgctacggcttctgcagctcggagttcgtcgtctcgtcggcgctgacggcgctgttctacgtccccggcatcgtctactccgtctgggtcgtcatcctcaagacgccgccggagccgccggggatcgacggggagcggccgtactacatcctcgcctga

SEQ ID NO: 67869 - DNA, 2724 bp, Oryza sativa
  Clone ID: PAT_MRT4530_68687C.1
atgtccgagctaggtgatgaggagtcggagctgatcagttacagtcgatctgagcgaacaaatcgccacggccagcggcagcggcagcccatggacgagctgtggccggaagtagtcaacatcaacaagtatgcggtgctcatggggtacttgtcgatggcagtcaggggcctggccttcttgatgttcacctggaccaccgttgttctccttggtggcttcgtctctgcgttgaacaagaaggacttttggtgtctcacgatgattaccctcatccagactgccggggttggcctcggccccccggcgggccgccccggcttgcttgtcccccgtctgcgctgccgctgcctccgtcccacgcactcgggtttgcttcgtgagtcccccagcggctcttgccgcgggacctccccggggatgctgcagccgcgctgcgccaaggaggtggcctactcggacctcctggctggcctccgcgcgggcgccgtcaccgtcgtcgcattcgaggaggaatcccaccgcatctacttccatagggttgtggacgatgggggcggtggcaaggatgtcgacacaggcgcgagcgaggcctgcagaagcgccgcggaggcgaggtggccgtgctacgcgaggagcgtgccgcatgacgaggggttcttgctggggctgatgcgggacggcggcgcggactatcggtcggtgccgcggctggcggccgggaggctgctggtggatatgctgaacacactgctcacgctgtgggaggagtggcggcggcgagcgagcgccgtgatgataggcgaagcggcgggagagggtcttcgatgtcttcatgaaagaaaagctgagcagtatttgggatggctacagaggcttgttacagacaacagagagggggacaccaacataacaccagccttggacgtcttctactcgttggctatcttccagggcgtcatcttcacctacagggtcagctattcatctgcagcagaagcaatagtgaatgatgtatgccgatattaccacatggacgcgcgggagtcggtgtgggactacctgcgggacaccatgatcggatgcgaggaggacccctcgttcgctcgagggagaaacatggtcacctacgccgttgagcaggtggagtcgtcgagctcacctgatggctacctctccgggctcaggatactgagcacgctcgtcggggagatagcgtccagctacgcttgtaccacgactcacgttgagcagcacaggatgatcaaacatatgctcatttctcgccaccatgtcgtgatgctgaaactgatacagacgctggagccacgaggcccgcacgacgcggaggcgagggagcgcgccacggtgatagtggcttacatcgccggtggcgttcacctagaacggctaccccgagcgctctgctgcgtaacctcactgctcgacgacgagtaccgcctcgccgagccatacgaccgtgatttggtgctcgagaagctgcaattgagaccaccaccatgccctgatgaggaggttgagttcgtggagatgtacaggctggtctacgagcgtgagcctccccatctgtcactcgagaagtacaagaatctggtggtgcagggccagcgcatcctcgggaagctcgccgccgacgaggacaactgcaggatcatgagcgacacccgaggccttgacgaccacgacgacgaccatagatatgaactctcagtcatggcaaaggggtcgataacacttattggtcagcttgtctctgttcctttccaagactcccgcgtgaagctacgccgccaaatcacgagctgcaagcctgcaatcagcaccatggagagcatcctcaggtgcgacggttgtgatgcagagcttcggaggctagctgcacagctgctcacagttctctctctcgacaagtcttctggtggtatgagcagtgaaaacatacagggtctcatcaggatcctcacagacatctttgttcatgacagcaaacgcagctccgtcaggaaatgtgcaggcgaagagctggtgaagctgtctctcgagagcgaaagcaacgcctcgatcatcctgaagttgaagctaaatgatagtattgttgtcgatcgcctttctgagatggttgtagatgtcgaggacaacacattcaggacaagtgcggcagatatcttgaaacatctttgtatcaaccacactacggacgatgaacattgggacaaactgaagaactccatgaccattgcaataccaaaggtcctcagagaattacttggctgtgactggagacgaccagagagacaaacagtagctacacaggcgaacaattctgggaatttctcgccaccagatgcagacatagaagccctaccagacggtgatccttcacgagttagcaatggaggcaacaacgcctcatcttgttccaatcagcagaatggcaagcaatatactccagaggaaatagaagtgcaggaggcgttggcgtccctctgcgtgacggtatgcgacaagctgatctccacggatccagttctggctgatcggttcgacaagatcgcagccgacgtctgcttggattcaagtataactgccaacacgactgccaacacggccttcgctgccctcgtgaaagaagcaggagaagtcgtggagaagaggaaggcacaatcgatcgttggcattgcgcctgcgcagctggttaggtag

SEQ ID NO: 67870 - DNA, 678 bp, Oryza sativa
  Clone ID: PAT_MRT4530_68688C.1
atggggagcggtgtggagcggggagagatgtgtggggaggagcgggacgaaggagcggcattcacagtcagtcgggcacccatccatcccatcccaacccgcaccacccgccgcctcgagcgcctgacacaccggcgactcatccctagccacgttgacaagttgcgcgtgcacgactccgcccgcgccttcgccaacgtccgcggcacacgtcgccctgctacacggctaacggctgagatgtcgcagagcgccttcctcctcccggtcgcccagtgccgtgggtatcgagctcacgccgcccgctgcccctctcctccccgacacagcagtagcatcggcagccggcgggcgagcgtggcggcggttgaggcggaggtggaggtggagggggcctctccccctcccccatctcctgttggctcgcgcgacggtgatggccggcggagctttcccgccgccaatccactcctcctccgctcgccgccgatctgccccttctgctccgcccacccaccgcccgctgctggtgaacttattctcctaaaaattaaaaaggtgtgcaacgataaaatctccaccgggaaatctactttgggctctatcctcccaccagatcgcgtgtgcgatctcttcccgcgcgtgaagtggcgtgattgggagccaaagtgtccctag

SEQ ID NO: 67871 - DNA, 428 bp, Oryza sativa
  Clone ID: PAT_MRT4530_68689C.1
ctattgcatctgcaagagcgatcgagagagaaaaacaagatctatctatagcagctagctagctagcacaagaacgatatgccggtcttcactgcatcattccagtgtgtcaccttgtttgggcagccagcatcggcggccgacgcccagccattgctgcaagggcaacggccgttcctacaccttcacgctcgccgccgtcgaccatgcgggcccatgctaataagcaaatcaccgccgtacccggcctcggaagaaacacgcgaatgggaagcagatggacaacatgaacacacggatgaactaagagagacgacgacaaccatgatcgatggcatcaggacagcactgagatcaatcggagagggagagattagcatctcagcctatgacacttcgttggttgcccttctgaagaggctagatgg

SEQ ID NO: 67872 - DNA, 2329 bp, Oryza sativa
  Clone ID: PAT_MRT4530_6868C.1
atggatcccgcgccggcgacccctcgctggaacctggagcggccgtacctcaccggccgcttccatcaggaggccaaggtggctgcggcggcgcagggggccggatccaagccttactccctcgactccttcagccgcggcggcggcggcggcggcggcgctgagagtgtcatctgatcatacacagccttagttcaggaacttttggtcattgatgatttgtgagcaggtctattgcgtgttgagggacggtacatttcgattaagagaagacgagggaaggaggggtatgtgggtatctaaattggttcttcagtggaccttatactcgaggaattgatgctcctgattttgcatttatgattggtgaaagtcttggtataccattttatagagtccatatcacttttgaagataggtatgggcaaccatgctctagcttcagcgttgggggcattcctcttcgtttctaagttgatggttgctcaactggagctcgaattccttctaaggagactggcagttcagggattgtggttcttttgtcagtggaagatgatttcatggaacggagttgctgttcaaatcaagaaaactatctctgattccaccagtggtattacttcactagtggtaattcctagtctggaatagaaaataactagcaatagagctgttcgatcattactggagaagatgacagagtgtgcaagtgcagcgtatcttaggatgttagaaaggtgggtctatgagggcgttatagatgatccttatggtgaattcttcattgctgaaaacaaatccttgcagaaggagagccttactcaagattatgatgctaaatattggcagcaaagatacagtctaaaagatggcatccctagtttccttaccaatgttgccgccacaatactgacaactggaaaatatcttaatgttatgagagaatgtgagtacactgtccaggttcccttgtcagagagttctaagctgatgggctttggttcaaaccaccaatatcttgaatgcatcaaatctgcgtatgactttgcaagtggtgaactcttgactctaatgaaagataagtatgatctcattgggaaactgcgatccctcaagcgatatctacttcttgaccaaggtgattttctggttcactttatggatattgcccgagaggagcttacaaagaaaccagaagaaatatctgttgaaaaacttcagtctcttgttgacatcgcgttgcgaagtacggcagctgcttcagatccaagtcatgaagacttgacttgctgtgtggaaagaagttccctccttaagaaattgagcaccctgaaagacttggattgtgcatatccttcagacaagcttgtggcagctgatgttgaccatcccatgccgttaagtgtgactggcttggaaactttctgcctgagctacaagggtttccgttctgtcaaaatcctaggaacaccagtcctacggtcatcaattctttgccgcagcatgctcaagtttgtaaacagccttttacattatctaacctttgaggtcatacagattcatgatttcttcctgcagaagtgtctaaaagaatgcttattgttgttgcctgaactccttgtggttcgtcttcttgctcttttatatacagaagtgtttgtcgctgctaaaatcgagaagctgaaagctctgtgtctccagtatgcgacttccatccagctattgataccatccattgatgttgctaagcctgaaaatacatcaaaatctagaatgccaagatcaaaaataaaagaaaccaaaaacagaggccagcaactgaaattggcatcggaaaatgttgtaatgtcagagtcaatcttgaaattcgaggcagaattcaattcagagcttcaaagtcttattcctacgctgagtaacagttcacaggcagaaccatacttgactcatcttgggcagtgcattcttggtgtgggagttgatcaatgattgttgcgcgccatgttccgcggacttcagacgaatgctaagtttgcatgtgcagtgtggaattcctcattcccgtcaaggcggtgttcttgtgaatgtattgaatattgatgaaatatgcatggtatgcttcaacaagatagatagtactgtaggatttatgtagtgttagttctcttggtggtgttgggccgtgggtagtttaggcgtttctagtttgttctgtttgaagattatgattgaactcctacgaagagaaactgccctgtggtactgctgccaccaatgtaacttgaactagatgtgatgaattagtgacaccactaacaatttgtct

SEQ ID NO: 67873 - DNA, 181 bp, Oryza sativa
  Clone ID: PAT_MRT4530_68690C.1
aataaatcctcttggatgatgtatcttccatcctttgccttgaattgctctggaaatttatctgcataacattctgtacctcttctgtcttccagtttcttgtcaaatttgcttttagttttgtatagttcaaatatcataatttattcatgtaccttttgataaaaaaaaaaaaaaaaaa

SEQ ID NO: 67874 - DNA, 370 bp, Oryza sativa
  Clone ID: PAT_MRT4530_68691C.1
atggaccactacccggaccggcttcctcgagcttccgccgccgtgcgctgccgctgtgagcctccgccgtcgtgcgccgccaccgtgcgttgtcgccctcgtctgcaacaaggtccgccggaggtcaagagagggggaagagacaatgggggaggaaagaaaagaggggaaaggagaggggatttgagagcgcacctgctcaccgctgccaccggttcgtcgccgtcgctggtgtgcctcaggcagatgcgctgcgccgccgcctccttttttttcgcaagcgagactcgctggtgcggcggactgaggggatgcgatacaggcaaggggagggggaggggtggagggagtagttcgatggcatttgcgg

SEQ ID NO: 67875 - DNA, 438 bp, Oryza sativa
  Clone ID: PAT_MRT4530_68692C.1
cccacgcgtccgggatctataaaaaagctacaggacctcttgacccgacaacgcacaccgaggccgccgaggaggaggaggaacaggaggctatcgaggctggtctttagtctcttccatccgcggcctgtgttgttgcggagggagcggcagccttgctggccttttcttatcgggttggacggcaccattgccgtactatctatgacgaccaggtgataggctgaggcggcccgtcagaactgcaatgggcaacagctacatgaagacctctgatcatgcactagcacacatggtgtactagcgagaaccctagcctagttggctcactcaaactatcttacagtaacaagtgacgccagcagggaactgttatctcttcttctctagcatctggctgaggtgaatcatatgagtagcatgggagtcgatatacca

SEQ ID NO: 67876 - DNA, 114 bp, Oryza sativa
  Clone ID: PAT_MRT4530_68693C.1
tttgttctcatttgccagacagagattacagtctgagctggattaccacccgtagctatagttaaacactactcgttaacctattatccttcagcttgctcggtgatcttagat

SEQ ID NO: 67877 - DNA, 207 bp, Oryza sativa
  Clone ID: PAT_MRT4530_68694C.1
actactgcctatatcacaggcatgtctttgtgcaccatactatggtgagaccacattgatcgacaggcccatactcctgcagagcttatgacgcacataacacctacgctgtggtgtgggatcaaccttacgtatgaaaaacaaactgtttaaaccatactgatgataagaaggaatacatgcaacatgcttgttatcaaggaccaa

SEQ ID NO: 67878 - DNA, 132 bp, Oryza sativa
  Clone ID: PAT_MRT4530_68695C.1
atgtatgtatggaccgacataaaagtagaggtcaagttcacatgtggaaacgttgatgctagtattagatatggggtgaaagaattagattgtaccattcaaactctgaaaagatctagattaattgagtaa

SEQ ID NO: 67879 - DNA, 2409 bp, Oryza sativa
  Clone ID: PAT_MRT4530_68697C.1
atgactgtgctatctgtcttggcttcatcaatactgtcaaaggtcaccacgtttgctgttgaatatgctctcgacgacattaaatttgcttggaatgttaagagtgagctggaaaagttgaaaaactcattgggagctatttgtgctgttctgaaagatgcagaaagaaagcaatctacacacagttcacttaagcattggcttgaaaatctcaaagatgttgtctatgacatagatgatgttctggatgatgttgggacacgagtgttgcagcagaaagttagaaaaggtgaaatctgtacttattttgcccaactaaccatctttccttttgaactgggaagaaaaataagaaaggtccgtgaaaggctaaatgaaatagctgcgcttaaaagagattttgaattgaaagaagaaccaatagacacaccttcagatcaatttgcccagagagaaacacactcccttataggcgagcaaaatatttttggaagagataaagctaaaaatgatattgtcaagatgatttcagaagctgctgaatctaattctaataccctgtcagtgcttccactaattggaatgggaggtgtaggcaagactgccctagcaaaactggtatttaatgataaatcaaccaaagataagtttgataagatgctatgggcatctgtatctaatgcgtttgacctaaaacatattgtaaatataatcatacaatcagatagcggtgaaagcaataaccaattaaccctagaagcattaacaaagaaacttcatgagcttttaagggacaagagatacttgctagtgttagatgacatatcaaatgataatgtcaactgggaagaattgataaacctgctaccgagtggtagaagtggatgcatgattttaatcactacacgtcttacaaaaattgcatcagaattgaagacattagaaccatacgaagtgccaaaacttccacatgaagaatgcaggaaaatatttgttcgatatgctttcagaggagaaaaggcgaaggatagagagttactaaaaattggagaatccattgtacagaaatgtgatggccttcctttagcagctagaacattgggatccctattgttcagaaaagacatttctatgtggcaagaagtaaaggaaaataatttgctgagtactgggaaaggtaaagatgatatcttgtcagtattaaaactcagttatgatgcacttccatctgatttaaaaacttgtttttcctggttatccacttttccaaaggactatgatattttcagagaacttataataatgtattggatggcaatgggtctattgaatccagctagtcgaactaaggaggcaataagagtgggagagaaatactttaatgagcttgctggaagatctcttttccaggactatgtttttaatcatgatggcagcatctcacattgcaaaatgcatagccttgttcatgatctagcaatatctgtgtctcaaaatgagcatgcaattgttggctgtgaaaattttactgcctccgaaagagttaagcaccttgtgtgggaccacaaggacttctcaacggacctaaaatttccaacacaactgagaagggcaaggaaggctaggacatttgcgtgtaggcacaactatggtactgtgagcaaatcctttcttgaagatctcttggcaaccttcacacgcctacgagtcttggttttctctgaagttgagtttgaggagttaccaagttcaattggaaatttgaagcacctaaggtacctagacctgcaatggaatatgaagatcaaattccttcccaattctctgtgtaagctggtgaatttgcaaacacttcaactcgcttggtgcaaagaactggaggagctgccaagagatgtgaaaagacttgtcagcttgaggtacttgatcctcacatctaagcaacaatatcttcctaatgatgccctcgggggttggacttccatggtatttctacagattagtgcctgcccaatgttgacatcactgacagaaggatttggcagcctcagtgcactcagagagctatttgtcttcaattgtccaaagttgccctctctcccctccagcatgaaccggcttgtcacccttcagaaattggtgattcataactgtgatgagttagatttgatggaaccagaggaagcaatgggtgggctgaagagtctcgaatcaattgaacttgcggggcttcccaagtttgagacctttccagatagctttgcatcagctgcttcctctcttcaatacctgaaggttagtgactgcccacaattcgaggagttgccagatttcattaagagattctcctctctgaagaaaattgagatccctaaaagccgtgcaccttccactataacctgggcatag

SEQ ID NO: 67880 - DNA, 417 bp, Oryza sativa
  Clone ID: PAT_MRT4530_68698C.1
atggctccaccatataggggcagtttgaaaaggttccatttccaatccaaatcgcccaagatctttgctgatgtctgcaaccggacgaatgcaaatcatgtgacggttcaagatctgccatggctgcataggctggtgctgatgcattcatggctaggaacgcacgtgttctgtgaccggagtccggagaagatcagacaggtcctcttcatcggtgacgaactttgccgctctcgacactctttcaagcagctgccattgtttgaaacgacccagatgcctccggccagcctgcagggctgccaggcgctctcttggacgccaaatcctgacatccagggcagcagagggtgctttggcaaccaacaggaaccccaaagagcagagagggcttggggctcatgggcttccatctag

SEQ ID NO: 67881 - DNA, 126 bp, Oryza sativa
  Clone ID: PAT_MRT4530_68699C.1
ttgataagtaccacattggagcaccaccgttttcaaggtgtttgatggaattgatatggatatcacccagccaagcaagaggctacatgtctgttaatgaaatactcataagcaaaatctgtaatg

SEQ ID NO: 67882 - DNA, 1058 bp, Oryza sativa
  Clone ID: PAT_MRT4530_6869C.1
atggatttattgcgtcagccgaggggaggggcgcgcggaccgggtccacgggggtggggcccacgcggcagcctcacggtccacggtggaccgggtgcacccgggctcgcaccgaccggcgccgtgggtcccacgcgtcagccgcacccgagggcgcgggcggctgacggccgggccccacgcggcagccgcggggcgcgcccgaaggcggccacgccggcacagccgacgggaggcggcgcactcgtgccccgatggggagggaagggggaaacgaatcggcgatccacggctcaccccgggtcgacggcgacgacgggaacggcgaccggagcggatagaggcggcggcgcggctcgggtcgacggggacggcggcgttccggcggtcggcgaccgaaacggagaggtggacgaggtcggcgaggttgcggcgaacccgaagaaggtgacgccgaagcgggagaaggtccggggcgacgacggcggcggaccggagctcggcggcgacggcggagagagagagcgatggcgcgagctcgattccggcggggagagagagcggcgagtggcggaaacggtggagggaggcacggggaaggtttatatagggttgggagtgggagagggcggccggacgagggggaaacgggcgcggaagatccggccgccattgatgcgccggcgaggttagggggaaagtttccgaacgaatccgagggagagagggagggaaaaatgggggggaaagagggagggaatcacggggaatatttcccccctcttgattgcacgcgggacggacgggagcggcgggattcgcggcggcggcggcgctagggcacgggcgaggcggcgggagcggcgggaggaaggggatgacgggtgggccccacccgtcagcgagggtggcgggcgggcccgcccgtcagcggcgcgcgcgcggggaggaggccgaatgggccgcggggaagaggggagagagggaaagggatgggccgagccggcccaagagggagagggggagggaaagggaactttttagggtttttcttttta

SEQ ID NO: 67883 - DNA, 370 bp, Oryza sativa
  unsure (1)..(370): unsure at all n locations
  Clone ID: PAT_MRT4530_686C.1
ttgtggagatcccagtgacnccaatcgcacaagccncctattctcaagtngcagcagccngccatccgctncccaaagggcgcttcagtcnnccggagctgagctgaggtcctcgtcgttgtccaagacgcgtaagngctcacgtgatgatcccnccatacggagcttcgagatgctctcactcagcgctnacaggnggaaataaggnacggatgtattgatgttactggcaagagactnttntttggggtgcagtgttagtgagtgccgctccactattggtacgttgaaatgcaatcataatgaacagatgtgtcgaaaaaaaaaaaaaaaaaaaaaaaaaaaaaaaaaaaaaaaaannaaaaaaaaa

SEQ ID NO: 67884 - DNA, 269 bp, Oryza sativa
  Clone ID: PAT_MRT4530_68700C.1
gggggggatttggagacgggcggacctatgggaatcggatcgccggcaaggccacagttaggttggatggaacgacatgagccggcccaaactaatcagcctcccaaatacaaagcataccaatatgctatgggggcgggggaatccgatcggatgataggcggggatggggcctaactagggaaggtcttaaaggggaagaacggaaacgacggatgccactggggccactacctgaaccgaggacctgcccgggcgggcgctggaaa

SEQ ID NO: 67885 - DNA, 228 bp, Oryza sativa
  Clone ID: PAT_MRT4530_68701C.1
atggcgaacccaagcaacgtcgcaactaatggtaatgtcaccaaggggagttgctgcctactgacactttgggtgatttacaaattgttgcagaagattcaaataaagaaattggcaatatcgatacacagagagcttgctggtggtggcaatgcgatgcaagctgccagggccagggcagggcaggggttgcagctctgtgaaagaggacgcgacgcacagcagtag

SEQ ID NO: 67886 - DNA, 360 bp, Oryza sativa
  Clone ID: PAT_MRT4530_68702C.1
atggctcgcaacagacgcgtgattctaggactgatgtacgggtactacgaggaggcgctcgacgcgctgtcgctggaccgcgtctacttcggcttcgccgaccctgtcaacaacatcatcgccaacaccctccgcgtcgtccccagcgaactccccgactccgacggtgccatgattccgaagcgggagaccaccatggcctcacggtcgcgggtggcaagagcaagtggggagatggtcctctctaagatcgtcaccggcggcgacgtcccctcccctccagaggcgcacaccgtcgcggagcgctcgctggaaggcctgatcaccttgacatcgtactaccactatctccccacctag

SEQ ID NO: 67887 - DNA, 567 bp, Oryza sativa
  Clone ID: PAT_MRT4530_68703C.1
ctcctcctccgccttgccgcgaccatcgcgaaatcggaaggcggcggcgcgatggagcggaagcccgacgagccggagaaggcagcctccggcgccggcgccggcgaccctcctccaccgccgttcttggaggtgaagtgcaggagctccggcgaggtgcggcggttcgcgttcgggacgacggcgcggtacgcgctgcacgccgtgaaccgcaagctcgcccccggcgcaccggcggcgctgcacgtcgaggccgtgaaggacggcgaggagcccgtcagcttcggccccgccgcgccgctcgccgactacggcgacggatggaagctgcagaccatcaccgagcaggacgcgccgggttactaccagacgccggcgtccgacacgagacgagatgacacgaagcagtcggcgaagaatcctcgcgaccaggagacgatggcagcgtacatcaccaagatcgtgctcgcgttcgtgttcatcttcttgctgggcgggctgttcacctacctgctcgagacgctccccgacatgttccagcctgcatctgaacctcaacctctgtag

SEQ ID NO: 67888 - DNA, 1149 bp, Oryza sativa
  Clone ID: PAT_MRT4530_68704C.1
ggcggtattacagaggcaattgtggttgtggtgtggcacatctaatatgtgcagggcaaacaatacacggtgttcccttgcttacaggctatttaatggtcggagttgacgacgtgccaagccaatacagaggtcatgtgctagaatttcctctagaggaaggtgtagacagtctaggcgatacttttcatgatgtgatcctatggcccaaacgctacatcgttgtcacgtcgaacgaatggactggcgatccaagtaacggcggttccagccatacaggcgagtggtgtccaggtgtagcaccttctccgcatcgatagaggaaccccagcccaccccctcctcatgataacacaccgagtcaaccacggcctccagagaagtcccgagtccacccccaccccaaaaaaggactcaacaacaagtgcatcgcaaaggtctacttcatcgaacaagtcgtgacgccatccaaccaaggcagactcagtttcagtgccgacaacgggcctgcctaagaagatggtgagtggcagcgccagtttgctttttggccctaagaagcctgaggaactgaagattccaattccaaagtcagcgatcgatcattttataaagtgcgcacggctgaagccaccgaagaaacctatatcggacttttggggaactattagaaacaaggatctgcatgatcaggctaaggagtagttcattgcagagaaagcggccaatgaagtgacattctgtaaatcagccggtcaagacaacctagaagatctagataatcatctagaagctgaagtggtattgcagtactaacctggaaaacccctggtcgttaacttatgcatctccccctttctctcgccagatcggctcctcatccaagtgaccagtgtccatcaacgaacacctgaattgtgatgttcagatgccttccgcttgttctttctccattcccacggcttctcagggttatcatatgcccaaagcccttgtcgtgcatcaccattggaatctttgcattttcaaccctgaattttcaagaaaacatacaaataactctctgcatttgggataattgtttgaatggcattcggaatttgcaaatatcaccaaaatcatattctcgcataaaagaaccacgggaca

SEQ ID NO: 67889 - DNA, 1139 bp, Oryza sativa
  Clone ID: PAT_MRT4530_68705C.1
cccccgtccgtccgctccttcctgcaaaggagatcatcaatggcgcttacttttacgcgccatagcttggtcgtcattgtgggcgcgcttcttctccagctcttcttcctcgccggcttggccccggcggcggcggctgcggggccgacggggcaggtgacggtgttctggggccggaacaaggacgaggggtctctccgggaggcgtgcgacaccggcttgtacaccatggtcgtcatgtccttcctcaacgtctacggcgcccgcggcggcgagtaccgcctcgacctcgccggacacccggtgggctgcatcggcggcgacgtcaagcactgccagcgcaagggcgtcctcgtctccctcgccatcggcggcggcgcctactcgctcccgaccaaccagtcggcgctcgatctcttcgaacacctctggaacacctacctcggcggcggcggcggcaagggcgccgtggcggcggcgcggccgttcggcgacgccgtgctcgacggcgtcgacttcttcctcgaccgcgccacgccggcggagcgctacgacgtgctcgccacggagctcgccaagcgcggcaagccgccgcgccgcgcgctgcacctgacggccacgacgcggtgcgcgttcccggaccgcggcgccgcgcgggcgctcgccacgggcgccttcgagcgcgtccacgtgcggttctacggcggcggcggcggcggcgacgacaactgcaccgtgtactgggaggacgcgtgggacaggtggacggcggcgtacccgcgcagccggatctacttcggcctgccggcggcgccggcggtggcggaggaggagcaggacggccggagcgggtacgtctaccccaagacgctctactaccgctacgtgccggagttgcagaaggcggccaactacggcggcttcatgatctgggatcgctacagcgacaagcagagcgggtacagtggctacgtcaagaactgggcttgagcctgtacgttcgttgcattgcgttcaccttagcaaaatatttcatttcatcactttatgatgtactagtacttcaatttgatctatgcaacgcgtatatagcagatgtaagtgaaagaacaagtcgatcgagagatcaatctccgtgc

SEQ ID NO: 67890 - DNA, 6299 bp, Oryza sativa
  Clone ID: PAT_MRT4530_68706C.1
atggccgaggaccacgacgcggaaggggtccggatgacaggcgagggcgcggccgacggctgcgacgcccacagcctcgccggcggagaggaggagatcggcgaccagcgccgccgccgccgcgcttcctccacgcaccggccaccaccgcctccaaggggatatctccgtgggcggtggccatcgtcgacctcgccgcccttagggccctccacgccggcgcacgaagggctcgccacggaggacgagcggagtggagctccagacgcgccgccagcggtaggcgagcgcggtggtgcgagtcgcgtccttgacggggaggcgggcgacgcggaggtcgtcggggagagtgctaacgctgtcctggccgtcatacccctcggcggcggaaagcgtggcaccgatgccggaggcgggatggccgaggaaccaccggagacggcctctgacttggaggcggccttggacgtcgcgaggacagcggcgagcccctcgacggaggtcgccatgaaggtcgtgtcgctgtcgcacgacgcggagcaggggatgaggcagttcgtcaccgaggtcgtcagcgtcggccgcttccgccaccgcaacgtcgtgccgctgctcggctactgccgccggagaggcgagctcctgcttgtctacgactacatgccgaacggcggcctggaccagtggttgcacggccaggttcatctaagaagacgttgtcctgtccttcgggcaaccatatacctgcaacgatgtctcggaatagcttctagtccactccagcgtgttgccggcatgctgggtgataacgcctgggagaggatccagctgctgtggaacttccaagaggatgtccaagatatgaagagcaagatgactgacctcaaggttgcacttagctatgcagacaagcactctagagagactgacgacgacgcattggtgctacgacattggctcaacaagtacaagtctgttgcctacgacatggaagacacgttggatgagttgttgactaatgcgatgatatgggaaaataacccatgcacggttaaattgttcttctcatcaatcaacccactcattgtgcgcatcaccatgtcaagtaagatgagaaatattcggatgaagttagataagattgctgaggaccagaagaaattcccctctatgcaattggctaacccaactggacaagacagtaccgataagtggagagaaacctttattggtcacacagacgaaattgagatggtagggagggcaagagagaagaaagagatattaatcaaggtgttgcagaacgatggaggccaagaaatctctatcattcctgttgttggccttggtggtatgggtaagactacattggccaaagctgtttacactgacaaggagacacatatgtttgatgtgaaagcatgggtccatgtctcaatggaatttcagctaaataagattgtgtctggcattatatctcatgtagagggcagcactccagctaatattgctgatctacaatatttaaaatctcagctggatcgcatactctgcaacaagttatatctcataatcctagatgacttatgggaggaagggtggtctaagttggagaagctgatggaaatgttgcaatctggaaagaaaggaagcaagataatagtgaccacccgtagtgaaaaggttgtaaatacattatctaccattcgtttatcatattttcataccgttgatccaattaaactggtgggtatgtcaattgatgaatgttggtttatcatgaagcctcgcaatatggaaaattgtgaattctctgaccttgtagacattggaaaagaaattgcacaacgatgcagtggagtacctctagttgctaaggctcttggttatgtgatgcagaagcaccgcacaagagaagaatggatggaaattaaaaatagtaacattctggataccaaggatgatgaggaaggaattctgaagggatttattcaagatactgatgggcaaccacttcagaaggttgctatggaatatgttaatgaattattggggatgtccttccttacaatcttcacttctcctacagtgctggcttcaaggatgttattcaagcccacactcaaacttcatatgcatgatatggtacatgagcttgcaagacatgttgctgaaaacagaaatactaaaagggacaatttgaatttccactatcatttattgttaaatcaaaacgagacatcatcagcctataagtctttggcaacaaaggtcagggccctgcattttaggggatgcgataaaatgcatcttcctaagcaagcattttcacatacattatgtttgagagttttggatttgggtggacgccaagtgtcagagctaccaagttctgtttataaactaaagctattaagatatcttgatgcttctagccttcgtatctcaagcttttctaaatccttcaaccatctattgaacttgcaagccttgatactttcaaatacttacctaaagacattgcccacaaacattggttgcctccaaaagctgcaatactttgacctatcagggtgtgccaaccttaatgagcttcccacctcttttggggaccttagtagtcttctcttcctaaacttagcaagttgccatgaattggaggcgcttccaatgtccttcggcaatctgaatagacttcagtttctgagcctatcagattgctacaaactcaactcactgccagaatcttgttgtcaacttcatgatctggcacatcttgatctgtcggattgctataaccttggaaagctcccagactgcattgatcaactctctaagcttgagtatttgaacatgacaagttgttccaaggttcaagcgttgcccgagtctctatgcaagctcacgatgttaaggcatctaaatttgtcatattgtctaaggctagaaaatctgccctcatgtattggtgatttacagcttcaaagtttagacattcaaggctcctttctccttagagacctgccgaatagcatttttaacatgtccacacttaaaactgttgatggaacattcacatatttagtatcttctaaagtagaaaaactgagggagaatctgaaattggaaggctgttgtaagctggatggaggaagcactgacctatgcagtcggattacggaactaaaaaagacacactgccatgaattagagatacaaggtcttgaggattttaagcatttggaagggatagagcatgctatacttctcaacagcttgaagcttacaaagttgattttttcatggcaaccgaagcagtatacaaatgaaacggctcatcacaaaacggtgcttgggatgctcgtgcctcctagaagtgtccatcaccttgctatcaaaggttattgtggcatcgagttacctaagtggatgttggatattcgttcctacctacctcatcttaccaccatctttctgcacggtctgatggaatgcaaccgcctccctccacttgggtgcctaccacacctgagagcattgttaatgaccaaaatgcctaaaatcaagagtgttggtccagaattttatggagactacggaagctgccagaagctaagaatgattatcttggcttcaatggacaatttggaagagtggtggacaactagatcatctaaacaagataacgaattatcattaatccctgatttacagatgttgtgggcttccgattgtccaaagttgaaattcctgccttatccaccaaggagcttgacatggttcatagagaatagcaatcacgtgttgccagaacatgggtttgggaaccttacatctgctacttatccacttcatctttccatcgagcgtgcacccaattctcgcgaaatgtggcgtagggctcagcacctttcttcaatcgagtctcttactctcatgtctatagctggccttagagccctgccagaggctattcagtgcttcacgtccctctggagactcagtatattgggatgtggtgagttggagacgctgccggaatggctaggagattatttcacttgtctggaagagatttcgatcgacacttgcccaatgctgtcttcactgccggaaagcatacgacgcctcactaagctgaagaagttacggatcaccaactgccctgtattgtcagagaagtgccaaggagaggacaggcacaagattgctcatattctagagcccatattcctgttggctgatactgttagcagggttcttgtaacagcaaactggagatctaaaccactggatttccgttggcacttgtctctcttgaagaaacgaaagggttggctcagttgtcgttcatcactctcagtggctgcttaccaggctggattaaatctcgatatctgtttgtcagtaagacaagttagcagatggggatcagagaagttcagaactggtggaggtgctcatatccgcgagtcagtaccacctaatcatatggaggattatccaagtgggagatcaaaagcagctattggatttctcagaagaggtggtggtttctcttcgagaaatcaaagcactgaagagaggaccattcagaactatgatggaccaggaatcaccacaagactcaatccgatgaaaaccaggctgtctgataatcaggagagaccaagatacctacgtgactcattcagatcttcaacctcaatggccattcatggaagctcttccaaagttccgcttaggaaattcggtgacgaaaaacgaaggcaaacgttgttggcaggggtagacattgctgaaagtagcagcagaaatgctgggggcaaacatctggagggtagtaataagagaatcgttgtcgatgataggagttcagatgttctgcatactgaaacagaaggcttggctactgaacaagaccaattgatagcacccaatgctggagtttctgattctgctagttcgtcagatatttctgaacatgcagttgaatccttggtaaggagtgctgctccaagttctagaacccgtagacagaaggacaaagaattgaatttgggtcaatcaggagtttgctcttcgtcatgtactaacaggcctactatatcaagatatgctcctgccgatgtgaagcgaccgtgtaatcatgctagcggagtacaacagcatggtcataacaatctggactgtacttcagtacctaattttctgccatcaggttgctcatctggttctgtttatagcaggaggtttgatgcaatgagaaaaaggacttctgatgggggaagtttttctagatcaaggggcttaagtggaacggctagcttagacgattcacctcctgcataccctgccattgctggtcctagaatcagaacaactacaactgaacgggcttcacaacaaaatgcactaagaagcagaaggaattttcaggattcagcagtgtcagtaaggacaagaagacctccttggggtgctaggttcaggatctctgaggaaagagaggatggcatgatttctcagcgtgattcttccatagggaatcaacagtcagatcaggtgcattcatcttcggaagaggcctctacagagagctcctcaagaccattctctgcagaattacctcatgcaatttactcatctagaggagagggatcaaatgctttcactgcaaggagaagaagatcaagctccctttatgaggaaagacctccacagacattccatgatcttttcagagaaagaaatggccgaagacacatatccatagaaggaattgcagaggtattactagctctggacaggattgaacaagaagcagaactgacttatgagcaattgatggtgttggagacaaatatattgcttggtgctttcacctcccatgatcagcatagtgacatgcgcatggatatcgacaacatgtcctatgaggaattattagcattaggagacagaataggctctgttagcaccgctctttctgaggagcaatttgtgaaatgcctcagaagaagtatatatataccagtggctacaaaagcaaacgcgcaagttgtagacgacatcaaatgcagcatatgccagggagtctactgctactaagagggtgaagaagttggacggctgggatgtgagcatcagtaccatgtgtgctgcattcaccagtggctcatgcagaagaactggtgtccaatatgcaaagcttcagctgaaccttctactgtgagctaatcccacctgggagattcaagcctgtaaatatttatcatggatttggcgtccatcttttt

SEQ ID NO: 67891 - DNA, 352 bp, Oryza sativa
  Clone ID: PAT_MRT4530_68707C.1
caaggccgcctccaagtcagaggccgcctccggtggttcctcggccatcccgcctccggcaacggcgccacgctttccgccgccgagggctatgacggcgaggacagcgttagcactctccccgacgacctccgcgtcgcccgcctccccgtcaaggacgcgactcgcaccgccgcgctcgcctcccgctggcggcgcgtctggagctccacgccgctcgtcctccgcggcgccgatctcctcctctccgccggcgaggctgtgggcgtcgcagccgtcggccgcgccctcgcctgtcatccggaccccttccgcgtcgtggtcctcggccattgcatgtttgcgtgttaca

SEQ ID NO: 67892 - DNA, 1836 bp, Oryza sativa
  Clone ID: PAT_MRT4530_68708C.1
atggcgaagcaagagcagagcagggacaccgagaccaacaacgttgccgcggccctgcagtggctgcggcacggcgagttgaccaccccatataacggcatcggcatgtcctttggtggttttgacccgattttatccgacgtggcggctgaatcagcgtgggatccacgtgggccccacatgtcagacatccacgtccatcgcgggagcgccgccggccgagtcctggccgtggcgctcgcccttgccggccgcgtcccggcgcccgtacgtgccgctcgccctcgccgcccgagtccaccgaggtctcctccctacgcgccagcgtacacgaggtccacctgcacgccgtggaacctcgtcttgatcactggcacgtgcgcgccgggcacgggctggaggctggagctcggcgacagccgccgtctccgccagcgcggcggcaagcgcgccgaagaagtcgcggtcgacgtaggatgggccgacgacgagcacatcgatgtcggagccgcggctgtggacgccgaggtggtaggagccgaaggagagcaccagggcggtggcctggtcggccatgccgtcggggagcaccgggccgccgtctcctcggcgctctcatacaggccctcctcgcggaggagactctccagtcgtgccgtgctctccaggtcggccggcgtcgggcgcctctctcgccttgccccaccgtgccactccgtcgatcagcaacctgagcgcagccgtattgccagaagagcgcggccacgacaatggcgccgcacggccctcctctccgccgcgctcgttccccgtcagccgccggccacgccggccctcctccccgccgcgtcgaaggagacggagtggagctccacggagtcgtccgcggcgtcggggctcgacttcgaggacaccgccctcaccctccgccttccgtgctccctcgccgccgccgtccccgacccgaccgcaagcgctcctcctccaaagccgacacggccgacaactcctcccccctcgccgcctccggctacgaccatcggcttccccactgcggctgccgccgccaccgccgacagggcgatgccgacgccggcctccccgcgcctccgccatggcacttcaaagaaacaatatctatatgaggaattgatgtcaggtcatcaacccaaaacaagctctgttaaccatccatcatgtcattccagcagattaaagatgcaaggaattacaaaagcactacgcttccatgggaagcaacttaagctcacggttttacaacatatgaacaaggggatcttctcatgggcgaccctgatttcgcgcatacaaactgaatctccgactgtaattattcctcacattggactagagaacatcagagtcagagagattctgaatgcgaaaggggaggctaaagctggagccgtctactggtgctgcaccagtcattttgtacatgaagccatcaagcatatgacagcccataatgtcggagctctggtggtgctcaagtctggggatgagaagcagctggcaggaatcgtaactgagagagatttcgctaggaagatccttttaccaggacggccttcagaagaaacaagagttggagacattatgacagaagaggacaagctaataacagtgtcgagcaataccaatattctgcaggcaatggagctaatgacagagaggcatattcgccatgttcctgtttttgatgagaaggtagtcggcatgattaccatcggtgacgttgtcaagacaatcgtggaccagcagcaccaagaagtaaaacaattgaagaaatacattagaggagattactattag

SEQ ID NO: 67893 - DNA, 744 bp, Oryza sativa
  unsure (1)..(744): unsure at all n locations
  Clone ID: PAT_MRT4530_68709C.1
ccggccggggaagaaggaatccaagccaagccaaaggtggcccatttctcggcttctcgctgctcttgctttgcttcgcttctcctcctcttcctcctccttcctcggcggctgctccggctcggattccggtgagccgtcgcgttcgtggtacggcggaggaagcgaggttgcgccctttccgaccgtttcttggctatccgccccgattggagaaagctgggtgtttcttttttctttctttttttggttcagggatcagagaagttcagaactggtggaggtgctcatatccgcgagtcagtaccacctaatcatatggaggattatccaagtgggagatcaaaagcagctattggatttctcagaagaggtggtggtttctcttcgagaaatcaaagcactgaagagaggaccattcagaactatgatggaccaggaatcaccacaagactcaatccgatgaaaaccaggctgtctgataatcaggagagaccaagatacctacgtgactcattcagatcttcaacctcaatggccattcatggaagctcttccaaagttccgcttaggaaattcggtgacgaanaacgaaggcaaacgttgttggcaggggtagacattgctgaaagtagcagcagaaatgctgngggcannacatctggagggtagtaaataagagaatcgttgtcgatgatagggaagttcagatggtctgcatactgaaacagaaggcttggctac

SEQ ID NO: 67894 - DNA, 504 bp, Oryza sativa
  unsure (1)..(504): unsure at all n locations
  Clone ID: PAT_MRT4530_6870C.1
cccacgcgtccgcccacgcgtccggaattagtgacaccactaacaatttgtctaaaaaaaaaaagaaaccaatttcagttgctggcctctgtttttggtttcttttatttttgatcttggcattctagattttgatgtattttcaggcttagcaacatcaatggatggtatcaatagctggatggaagtcgcatactggagacacagagctttcagcttctcgattttcacaaggagttcaggcaacaacaataagcattcttttagacacttctgcaggaagaaatcatgaatctgtatgacctcatctatgctccttgcagtttgaagccgatcatgcatcaaatgccaatttggttcaagaacctcaaaggttagataatgtaaaaggctgtttacaaacttgagcatgctgcggcaaagaattgatgaccgtaggatttatgtantgttagttctcttggtggggttgggcccggggttgtttagggcgttntagtttgg

SEQ ID NO: 67895 - DNA, 159 bp, Oryza sativa
  unsure (1)..(159): unsure at all n locations
  Clone ID: PAT_MRT4530_68710C.1
agcagtccggtcttcctctatttttcttttcttcaggtgggtggttgggagtaggacaagagtagctgtgcagtgagtacgtgagcagccatgtgagagctcgagagcancctcctagctcgacccgagcggctgctaggccgtctacttgagctagac

SEQ ID NO: 67896 - DNA, 624 bp, Oryza sativa
  Clone ID: PAT_MRT4530_68711C.1
atggccgaccaggccaccgccctggtgctctccttcggctcctaccacctcggcgtccacagccgcggctccgacatcgatgtgctcgtcgtcggcccatcctacgtcgaccgcgacttcttcggcgcgcttgccgccgcgctggcggagacggcggctgtcgccgagctccagcctccagcccgtgcccggcgcgcacgtgccagtgatcaagacgaggttccacggcgtgcaggtggacctcgtgtacgctggcgcgtagggaggagacctcggtggactcgggcggcgagggcgagcggcacgtacgggcgccgggacgcggccggcaagggcgagcgccacggccaggactcggccggcggcgctcccgcgatggacctgcggtcgccgctgccgccgcgtcgccggccgccagttctcctctcccgccgatctcctccccacccgtcgcacgccatgcccagagagaagagtgagagagagagagatgaggaagggagagaagagggaaaaagagagctgacgtggatgtctgacatgtggggcccacgtggatcccacgctgattcagccgccacgtcggataaaatcgggtcaaaaccaccaaaggacctaaagtaa

SEQ ID NO: 67897 - DNA, 605 bp, Oryza sativa
  unsure (1)..(605): unsure at all n locations
  Clone ID: PAT_MRT4530_68712C.1
ccggccggtagacgattcacctcctgcataccctgccattgctggtcctagaatcagaacaactacaactgaacgggcttcacaacaaaatgcactaagaagcagaaggaattttcaggattcagcagtgtcagtaaggacaagaagacctccttggggtgctaggttcaggatctctgaggaaagagaggatggcatgatttctcagcgtgattcttccatagggaatcaacagtcagatcaggtgcattcatcttcggaagaggcccctacagagagctcctcaagaccattctctgcagaattacctcatgcaatttactcatctagaggagagggatcaaatgctttcactgcaaggagaagaagatcaagctccctttatgaggaaagacctccacagacattccatgatcttttcagagaaagaaatggccgaagacacatatccatagaaggaattgcagaggtcattttatagcagctccgttcttttctctctttccgaagatagattttatgtangattacatcactatttttactccacatgcaggtattactagctctggacaggattgaacaagaagcagaactgacttatg

SEQ ID NO: 67898 - DNA, 447 bp, Oryza sativa
  Clone ID: PAT_MRT4530_68713C.1
atggcacggtattttggcccggcccaagcacggcacggcccgacagaggtcgggcccgtgccggcccgggccgaccaccgggccgtgcctgggcccctccaccggcatgttgggccggcccggcacgatgggccggcagctaggcccgcccaaagaggaggaacgaaaaatatacttattttaaaaaaggcccgatggaccacccatgccttcaggccggcacggcacggcccgacagctggtgggccgtgcctgggcgggaggtgcagcccatgggccggcacggcccggcacgaagtgcctatcgagccgtgccggcccgatggctgctgggccgtacctagccgggccagggccgggccgtgccgggcgggccctttggccatctataaccacgcctgcaatgtgatctgttctagtcttcggttaaattattttttaaccaaa

SEQ ID NO: 67899 - DNA, 362 bp, Oryza sativa
  Clone ID: PAT_MRT4530_68714C.1
ggcggagcggggggggcggtcgtatgggggtccggggtgtcgtgggggaaaatggtttagggggtgaatctggggtatcatgggatcttggatgtggtgggcggggcgtatgtgtcggggtggcgtcgggattttgtgggaagcttggggtgtggtttgggggcggtgtaagtaattcgatgtgttggggcgggtgggtgggtggcgcggacgggttggggagttgtggcggggatggtgatgggcgacgggggctagtcgggggcctaggcctcgcatggggtccgcgtacgcgggctagggggttggtcacggcggcggtatggctggatgttgtggggttgggtatgggggaactataa

SEQ ID NO: 67900 - DNA, 402 bp, Oryza sativa
  Clone ID: PAT_MRT4530_68715C.1
tggttttgacctgaaactgggttatcctttgggcccacaaaaaaattttttttaattgtgaggggtaacttgaaattggggagatgatggacctgacacattaaccaaaaggggggggaaggctatgccccaatggtgatgggtgggtttaacccaaaacgggggaaaaaaaaagacactttcattgggcccaaagggggagtttgaatgggattaaagcaaaacattccgtttttcccagagggggatgttcggtttgaaaaaaaaaccctttttcctttggaccgtgtgtacttcaggaattttgttacgggatttgggctcatcggcttgcgaaaaccttgggtccgggcaagggcccaccttgatctatttcacttggggatgcacagaggaaacttt

SEQ ID NO: 67901 - DNA, 482 bp, Oryza sativa
  Clone ID: PAT_MRT4530_68716C.1
aaccaaaccactaacctttaaaaaaaatccagtttttaaaattttcaaaggtccacaggaagggaacccaacgaatgggggggcacacaaaatttaaaatgggaacgacggggccccaaaagggggcaattaatcaaggaacaaacaatggggggggaaaggagggcacaatgttttaaaaaaacgggcttgaagaaactcattgacaaaccgagtggcccaaaaaactgaaagccaatttttttatttggcaaaaattggggacaaggggggtcgccggatcttcagggacccaaatttggcagccccgggggatgacccatcaaaaaggatggggaggaaaccagtggctgccttgaaccttgggggaatctggaggaaccccccactggtttggagggagtttttccccatgacgcaaacggagcctccggaacctcctccgggattcttagccccaaaaagactaggactttcacctt

SEQ ID NO: 67902 - DNA, 2667 bp, Oryza sativa
  Clone ID: PAT_MRT4530_68717C.1
atggctgttggccttccaattgtttttggctgccacgattattcagggttcacaaacattgactgtggcttcgtagacggcgagagttacacggacagcacaacaaatttaacatacgtacctgatcatgaattcgttgaaggcggcacacaccatgaagttgtgccaaagctaattagtggatccaccgatgagcaagagaaaaccttgagaagcttccctgatggccaacgcaactgttacacaataccgtccactagtggtaagaagtatctcatcagaacaaccttcacttacggaaactacgatggactcaggtcgtcagagaacggttccttatttctgtttggactccacatcggcgtcaacttctggacaacggtgaacttgacaaaacaggactcatcagacactatctggaaagaggtgctcacggttgctccggacgagttcatatatgtgtgcctggtaaactttggatcaggaacccctttcatttctgcattggagttgcggcaattggatgatccaatgtacccattcctgaatctttttgtgtctgtaagctactttactcgaatgagatttggggcagtcgatgatttcatcacaagatatccaactgatctctttgatcgtttctgggaagcagcccaatgctactcctatccctggctcaacctgaccaccaaccaaacagtgaacaagctcccaggaaatgacaacttccaggtgccaacactcatcgtccagaaggcatccaccatcaacagcggtttttcatggctcaacatcagcataacggccggtgataacctgaatggccagagcctggagcttctcccgatcttccactttgctgagatagaaaagaaccgcccaaatcggacgttccaaatctatagtgatggcaacgagctgcaccaggccttctcaccgtcctacttgcaggtggacagcgtgtacctgagggaccggtacctacatgagtcaggtacaactttcaccctgtgcaagacaaacagctcggagctcccaccactcatcaacgcctttgaggcttactcgcttgttcggatggaaaacctcaccactgacaccatcgatgtcagttccatgaaacaagtaaagacgcagtacaatgtgcaacgaagaagttggaatggagatccatgttctccaaaagagtatacctgggaaggtgtgaaatgcaactactatgatggcaaacagaatcccaggatcatcctagtgaatttatctgcaagcagactgagtggttggataaatccatcgttcagaaacatgtcgctggaaatattggatctatcacacaacaacttgtcaggcactattccatataatcaagtaaactcactgaaatctctaaatctatcatataaccagctcattggatcggttcctgactatcttttcaaaagatataaagctggtttgcttgaactaagattagaaggaaatcccatgtgctcaaatataagtgaaagctactgtgccatgcaagcagataaggcgaagaagaatacagcaacattgctcattgcagtgatagttcctgttgtagctattacacttatgttatttctatggatgctctgctgtaaaggaaaaccaaaagaacatgatgattatgatatgtatgaagaggaaaatcccctgcatagcgacaccagaagattcacatatacagagttgaggactataacgaacaacttccagtctatcattggaaatggaggatttggtacagtttatcatggcatattggggaatggagaggaagtcgcagtcaaggtgcttcgggagacatctagagccctatcaaaggacttcctccctgaggtgcaaacattgtcaaaagttcatcacaagaatctcgtcacatttttaggatattgcctaaacaagaaatgccttgcccttgtgtacgatttcatgtctagaggaaacttacaagaagttttaagaggaggactggagtatctacatgaatcatgcaccccagcaattgttcacagagatgtaaaaacggcaaacatacttctcgatgagaatcttgtggccatgatatctgactttggtctttcacgatcttacactcccgcacacacacacatatcaactattgctgccggtactgttggctaccttgacccagagtaccatgctactttccaactcactgtgaaagcagatgtctacagttttggcattgtccttctagagatcattaccggccaaccttcggttttagtggacccagaaccagtgcatctaccaaactgggtacgccaaaagattgctagaggaagcattcatgatgctgtggacagtagactgatgcatcagtatgatgccacttctgtacagagtgtcatagaccttgccatgaactgtgtgggaaatgtgtccattgataggccgagcatgaccgaaattgttatcaagctcaaagagtgcttactggcaggtacaggtaaaaagcaactggtgtctggctcctataaacagaaggacgccatggacgctggcattgcaaggcagttccagctgctgatttctggagttccaatagatggagatggctgtgcctgtgctacacatagagaagagatgattaaccactgcaatggaaagatgaaataa

SEQ ID NO: 67903 - DNA, 556 bp, Oryza sativa
  Clone ID: PAT_MRT4530_68718C.1
ggccccaaacccccaaaattttaaaggtagggggaaaaaaaagggttttaaaccccaacattaggggggaaaaaggaaaaaaagttcaaaaaaaaacaacagggccaaaaaaaaggaagttcccccccccaaaattttggtcaaaccgcaaaaaaaagggaacccccattttttttcttaagggtttaaaaaaaaagcccccgggaaaggccgccccggggcccaaaactggggaaaagctcacccccccccttgggggtttgaaaaacctttttttataaacccaccccccccaattttccaaaccggggggggtgggttttccccggaaaaataaaaaaaaccaaacgggcaaaatgggggccttttcttttttttttttcccgggaacgggtccaaatttgggaaaacaccctttttcccccaaaaaacccaactttgggttttttaaaaccaaaaaagcccttcctaaaaaaggggaaaaaggagggggggttttggcttggggaaaaccaggggaaaaaaaaaaaaaatcccagggcctgggccctgggac

SEQ ID NO: 67904 - DNA, 168 bp, Oryza sativa
  Clone ID: PAT_MRT4530_68719C.1
aaacccaccaaagcacacttctttacacgacgggtttatttattaagggcactggcacacacccacatatccaccttttccatacacagctcaagtacaccaaactcacacttagcctccctaattgctctaaactaatctctaataaatttccataactaaatcaaa

SEQ ID NO: 67905 - DNA, 471 bp, Oryza sativa
  Clone ID: PAT_MRT4530_6871C.1
ccacgcgtccggttatttactgatgaccaggatgttctacatcatatttacctaggcataccgtttgtctctctgactcaaccaatcaatgcgttagcttttgtttttgatggtatcaattatggagcatcagattttggatatgctgcttattcaatggcaagtcaactagtcaacacctatgtccttctatctgtattttcaatcctttttttttcacatatttttgttgaattcattgtcctcagattcttgtggcaattgtcagcatcatcttcatagtcacactagcaagttacaatggttttgtcggaatttggatagctttgacagtctacatgagcctccgaatgcttgcaggattcttaaggatagggactgcacgaggaccatggactttctatgcagctcaacgcatgcattcttattgaggggttggactttgtgaacaatactataggaagacaccat

SEQ ID NO: 67906 - DNA, 2883 bp, Oryza sativa
  Clone ID: PAT_MRT4530_68720C.1
atgggaagaacttccatcatggagaagaaggaggcggcgttgaaggagttggagcccctccttgagagtgtctctaagctgctgaagagtggacgcttcaccgacgcccacgaaaggcacggtttggcgttcctggagatggaactgggcgccattgtcgcatacctgaggatgccgatgtcgccttccattggggatcatgatgatggtgcccattatgacctgatgacctggatgagtgttctgatcggagtgcggaatacggtcacggctatcgtgaaatttctatctaatcagccttgcgtgccgctgcgaaaagccacgcggcgcttccgccgccgaaggtcattcggctatgacattccgcggaaggtataccctctctaccttgtgttcaatggtctacgctctgagctcatgccatcaccgcctcaagcagcccaagtcgaggcctgtaccgtccatgatcatcttgttgccatcgacggcacggcaaacgagctgctcggatggctcatggccgccgacgagagcctccgggtcatggccattgctggacctgccggcattggcaagaccactcttgccatggagctccaccgtcgactccggtgccaaactcatttccagtgccacattgtggctaacttctcccggaggcctcacgggagcaagcttgttcctcaaaccatcctgaagcagatcatagagcaactggaggcaccatcatcaccaaacagctcagaaatcacgatgttgggggacgacctggagctgttggctcgcaacatatcagaacgcctcaaggataagagatacttcgctttgatcgataatatattcaacgaatcagatttggaattgatcaagggtgcatttcctaataataactgtggtagcagaatattgtttacggctggcgatgagcggatagcagggtggtgtttgtcaaattataatgggattgtgcataagatgaagcctctgagtcactcagattcagagaagctgctccacataaaagcttttggttccatggacgattgccctccagaaaatctgaagctattatgtgatgaaatattgatgaaatgtagaggaataccatcgttcataactggtatggctgattggttgaaacaacatcaacagcaacacggcagctcagcaattcctagggtggaagaagtacgcctgctgctgaaacagtttgaacactggctatcatttgattacagtgatgagttgagacaatcgttactctacctaagcatgttgccacagggatatgtgtttgagaaggatcgtcttgtcatgaaatggctagacgaagggctgttgtctgagttgcatttctctgagatggttgacaggaatataatcaccccagcagcaaggaactgtggacacaatcttgatgaagatgacttgtgcctgtggcaggtcaatcctttcatactgaggtttcttgcttacagagcagcagagaagggttatgtcattaccagcgcaactctcaactcagcaccaagaggtggtggcaagaacactcggatagcacgtcgtctagctctccaccatcccgatccacagctcccagaaatgctgcaagaaatggatttgtctcatactcgttcactactcatatctggtgcagtcaacagaacaacagtccctctagacaagtttggatatctggtgtcgttggatcttcaaggctgggagaatttgaaggatgaggacctactgcagatatgcaaaatgcttgtgctgagttatctgagcgtcagtaacacaaaggtcagcaagctcccaccacaaatcaaagagctgcgcaccctgaatgcattggacatcagccacacccacataagtgagatcccatcagaagtgtgcgagccaggatctttgcggatgctggacctaagaggcacacaaataaagcacatgccagagcaaattgtgcggctaaaaatgttgaaacattttctcattgatttaagtgaattctccgaaaggtcagtaaagtatctcggtgatctacacgacttgaagatcctcgcaataacatgggcctttcaccagtgcaatgacaaagcctaccaacaagccctattgtcatccttaggaaaatggaggcaacttaagtccttaaccattcattgtgggctcggttgttccatggagttcctgcgttctctaagtgatccacctaaatttcttgatgaatttaaagtaacagccggaaaattcgccaatgttccccaatggattgaagggctcgagcatcttactttcttgcagatcacggtctgtaaacaagtggcaggtgatgtgaagatcctcgcgggcttggtcaaattacagcgcctgatactaggcttggagttcattcctgaagaagctatagtgattgagagcaaagggttcaaagaactagagaaattctcccttgattgccctgtcccacggctgaccttcgaagaagaggctatgccgaagctcacatatctgcgactgaatttgcacacatcccctatgagcgagatgagtgttccttcaggtatcggaaaccttaaaatgctttcagaggtagctctttgctacaacgtacggtacatgaacagccccaatattaagaggaaagtagaggcagtgagcaaggaggtcgccaagcatcgcaaccctattgaccttttcatcagaggcatgcaaatagaagttaatcaagctggtgaggaggaggcagagggtgcaacaagattcaaccaagtcaattcgccggaggatgttgttcaggcagcagatgaagcggcaccgaggagagaaacagagtttcagagcgagatagaagatgaaggtgaaacagagtgccatgcctag

SEQ ID NO: 67907 - DNA, 2316 bp, Oryza sativa
  Clone ID: PAT_MRT4530_68721C.1
atggatggatttgttgccctggggaatgtcacccaggttgcgaagcaattcgccgcgagctctgttgggcagcttgcccggatcgaggggctggtcacactgagctgcctcctcgtcgtcatcctcgtcttctccaactcccgtcggcgccatcagagcaacggcttcctgggcttcctcgtgtgggcggccttcatgttcaactacccggtgatctcctacaccatcggcctcatgcagtcatcgtccgtccgcaacgagctcttcgttgtctgggcctgcttcctcctcctcctcctcggcagcgccgacgcgatgacggccttcagcttcaacgacacccagcaacacgccaggtcgatgatgaaccaagcactccacatcatctacctgctctttctcatcctgtactacaaggcccagcttaggatgaacctcaaggtccccctgttcatcctctggagcttgagcgtcgcgcggttggttctgaggatcaacgcgtaccgcacgacgagccgagataacgggctgatcagggagaaccagatcgtgttcgagtacatgaaacacaagctgttagatggctccatcgtcggtaagtacgatcccgacccgtccagtatgaaggagtacatctacctcgtcgatgggaaggaagaggagtcgtcgtcgatggcgatacacttgcggtacgatgcgcctgacacggtgagcgttgataaggtgtgggagtgcaagggcgagctgctgagctgcagctcatctgcagggagccgcggcgcggcgaggcggcgagacttgtgcctctcttttgcgctcttcaggctgatgcgcctgaggttcggggcagaccatgttggtgatctcaacttccattctaataacgacctatcaagaactctcgtcgtcgataggctcctctcggatgatcgcgatcttgacagagcctttcgggtggttgaggctgagctgggcttcctgtttgatttcttctatgctcggtatccttccttgaaagataatctcgttttcgatttgatcctttatttgctcaccatggttaccagccttttcaccctcttctcttccgttcttcttcactaccgacccagtactacagccaaagtaaacatcatcatccatagcttcaaccttgatctttttgttactcgtctggtcgttgccctctacatctttttagagtcataccagcttctttcgttggtgttgtccgattggcacaaggttaaattgatgtgtcagtacgtgctaaaagtgtcatggcaccgtgcaagggtcgacactccgttgaaggtgctgtgccatttcaacgtctccagatactggaagaatgccattaatcagtactccctgcttgataatgctggttatctataccgtgtgcaactcttgctatcaactctgacacttcagttgcttgacccgtggattatggcgtcatccattgtcttgccaccgcaagtgaagcaagccgtcctgtgcgccctcaaggacgccctgaaacctaccaatggcaaaattaccgatggaagaaggtggctacaccagaatggcattttggaccgagacctggattacgacctctttagccataaaacatacgccccctacattttggtatggcacatagccacaagcatctgctgctatggggagtccaagtttgacatggcgcaggctgatgcagagttgaggtatcactacgaagtagccacagtgctctcgggatactgctcctacctcgtagctttcgcaccggatctcataccagatgggacttacacaagccagctactgtcttgccgtgtgctaaaggatgcacacgcatacctcgcagaatgcaggacaaccagtgacaagtatgacaagttgatgaagctgggtcgcgatggttggaaggagcaagaagcaggatgccctctgctgtacgagggagcggtgctcgcgctcaatcttgtggaccgaaagaaggatgcggaggagaggtggaaggtgctcgcccatttctgggcaaacctgttgctgtacatcgcgccgtctgatcgagcgtctgtgcacgcctccaagctggcgaccggcggcgagcttttgaccatcgtctgggctttgctgaatcatgccggagttgtcaacaagcttcaggagaataacggctgccagccattggatacgctgcctagggcgccgaggactccaatttttcatcggcaaggaacgatagttgattccaatgaagacgatggagatggagattatcccatgtatgagatcatgcaagaagactattctgtgtag

SEQ ID NO: 67908 - DNA, 1080 bp, Oryza sativa
  Clone ID: PAT_MRT4530_68722C.1
atggacatctctagggcaaatgaaggctacatgagctgcggcccggtagtcaagatgtcatggcacagggccggatgggttggaaactatgtcacgtcttccgtccgtataccgtggtggtatgtggcacgtggttacacgatccagatccagatatgcataatagggattcatggctttaagcttatctcctatgcttcaggaatgtatcaatcaaaacatcaccatcggcttgttgtcgtcgccgccgactggtgtcctcgcctatacgattgggtggtcacaccaccgttgttgggcgtcatcgtcttcaccgatcggtcgcctcgtccgccgtagactgcctattatgccgctgttgttgggcgtctacgtcttcaccgccggcttgccttccccgccatcgactggtgtctccgcctgcacggctggcctattatgccgccgttgatgggcatctacgtcttcaccgccggctcgcctccgtcgccgccgactggtgtttccgcctgcacggctggcctattatgccgccgttgatgggcgtctacatctttaccgatcggcttgtcatcgccgccgccgactggtgtctccgcctgcacggctggcctattataccaccgttgttaggcgtctacgtctttaccgaccggccgcctcgtctgccgccgaatggtgtctccgcctgcacggctgacctattatgccgccgttgataggcgttaacgtctttaccgaccggccgcctcgtctgccgccgactggtgtctccgcttgcacggctggcctatcatgccgtcgttgttgggcatctacatcttcaccgaccggccgcctcgtatgacaccaactggagctattgtcttcacagctggccacgtcgccgtcgccgctaataggcgtcatcatcttcaacgcacgtcatcgtcttcattgttggccgccttgtctgatgccgactggtttgttcgcctccacagctgcgcgtcttcatcatcattgactggcgtaatcgtcattgcctgttgttcgccgccgccaatggtttctcgactctatgttcagttgtttcccaac

SEQ ID NO: 67909 - DNA, 863 bp, Oryza sativa
  Clone ID: PAT_MRT4530_68723C.1
tagcccatataggcgttttttcagatacttgtgaccgagctttgagccacgcttgggatggcacgcatgttgggttaactggtcaatcttttgcatgtaactgcccacgttctgcgctgataaaaggaagagaaaaaaaggcagaaaagctgctgaagttggcagcacaaaatcctgtttggctctgttctcgtttcttcagttttactgatcacatacgaaaatattcagagtgtgagcgagttccagaggacgatctcggttgatcattgacagagaaaacattataggtacacagtacatatgttctgtatgcacgcatcaggtacatctcctgaaactaaaccatcatttttttcttaacgaacacctaaatattttgtacatatatttccctacaaaaaagaatcattcagaacttgatgtccatcctctgcgcattgagagtattacatcctctgaccaatcgagtataggatggaaaacctctattttctttttctcgaaaacataggagaactgtgtttcattttttttattaagaagaaagaaatatttacaaacaagtgatctggtactctttaacttccatggaatctggtactctgccattagtcatccgcacctgaggtggcttcaccgtcgctgctgtggaggtagatcgcagacgcacgatgggaagcagcggtgaggcggaggaaaggggctgacgcagaagagggatgcggatatgggtgctgactgctgagaatatgggactcaactcaacttcctcagaggacgaaactgcccctccataacgacgtttactctattaagttactatctataaaccggatgagactccctaactttgtgcagtt

SEQ ID NO: 67910 - DNA, 438 bp, Oryza sativa
  Clone ID: PAT_MRT4530_68724C.1
atggaagtgatgaaaccaatcgacagcagacgtagacagcttgcgttgaagatgatgacgcctattagcggcgacggcgacgtggccagctgtgaagacaatagctccagttggtgtcatacgaggcggccggtcggtgaagatgtagatgcccaacaacgacggcatgataggccagccgtgcaagcggagacaccagtcggcggcagacgaggcggccggtcggtaaagacgttaacgcctatcaacggcggcataatagccgaggtggccgatgtgggaacaaagtcgtccatcaatggcaatgaaaacatcagccatagaagcagcttgagtcgactaaggatgaaagtgaagacgcccatgaacagtggcataataggccagctgtctaggcagaaacaccagtcggcgacaacgaaggcgagccagcggtga

SEQ ID NO: 67911 - DNA, 196 bp, Oryza sativa
  unsure (1)..(196): unsure at all n locations
  Clone ID: PAT_MRT4530_68725C.1
gccacccgagcgcgaggagacaaggagcgccccaccgccaccgtccttgcggccgcgcggcttcaccggcgcccgctcgggtgacggcaagncgnaaaagggggtgggggtggggaagaggnacgnccggagcagtagcaaagatttgaggaacaacaggcaagacatcggcacggcacctgcagactgcggatga

SEQ ID NO: 67912 - DNA, 356 bp, Oryza sativa
  Clone ID: PAT_MRT4530_68726C.1
caactgaaagtccttaaattcagcagggagctgaagacttttgtttctgattggttttgttaaaccaaacataatgctctagaacttcaaatgatagctccaagggaagaaatcacaagtccaatccttgacctggtagtctatgactctatgttacaaagagatcaccatgtcccaacctgtcgacttttgaacaatagctgaagcatggatcttttttttttttgaaagtagaaacatggatcatttattcaatgacaatcttttttttgtccctcgcaatttcgacaaggtctaacacaggtacttagtcaggcgtggatcggattgccatggtaggccagatcgtgcgccga

SEQ ID NO: 67913 - DNA, 396 bp, Oryza sativa
  Clone ID: PAT_MRT4530_68727C.1
atgaacgtcataaggtaaaaacatgaacgtcatacgtagcaccggaactgaaagcttttgctactcagtaatattcccgtcggatgacctacaaatcaattactagcaatcaaccaatcgtgcaatgagcataggcatatgtccgatgactaccctctctacccattaacaagcaagaaagtctttctagtttctacgaacaactgggcaactggcgagcgtatgaaccaggtctttgaggcagggtactggtagcagagacacaagattcacataccagcagcaccaacgaatcacaagctaaccagaaaaaaccgaatgtatgggtctaagtttctttggaggagacccggtatcccttggagagatccaacttcagcagcaaagcgacgatca

SEQ ID NO: 67914 - DNA, 361 bp, Oryza sativa
  unsure (1)..(361): unsure at all n locations
  Clone ID: PAT_MRT4530_68728C.1
gttcctactactgtagtgtactgcgagtaatgtggtgatcagttaattagttgattgcggtttgaagtagcttagctattactacctccatttcaatttcaggctataagactttatagcattgtccacattcatatagatgctaatgaatctaggcacatatatgtttagattcatatatgaatatgggtaatgctagaaagtcttatgatatgaaatggaggaagtatcttttggtacatatctggttgtgtatatcgtcattgatccttgtttttatcttaagtatgatggtatcaccnatatatgagaaactgaatgtatgtaaaaaaaaaaatnnnnnntnntnnnnaaannttnt

SEQ ID NO: 67915 - DNA, 2632 bp, Oryza sativa
  Clone ID: PAT_MRT4530_68729C.1
atggatgccgcagctcttcagtatgagacgttctcgtcgtctcctccgctccgctcgttgcgccgccgccaagacgagcaggggagggccgggcggcgatctccatccggcgagcagcggaggggaggggatcctgtttgtttgaataactcttcagtatgagaaccagaagctggtgcagcaattggaggcacagaagtccgaaatgcgtgcagtgtaagaccagttcaaggtgaagagatatgagaaaagttcttacgatcatgtatttattagtttgaattaaacgtgaaatcagctgattgatgatttattgctacttaggagtacgagatgctggggatattaattgatgtggctctgcgcttggatcattcagcgatgtcagaagtaattctttgcgtcaaagactccttaggtgtacagttggctagaagtgaatttttatcataagctttaaatggacagaactccagtgaagacgttattgtggcccttgaaaaccataatgattacttgaaagaagtggttgacaatttacgtcaagctgtgtctatcatcaacaggaagcacgaaaagtatctggatgagattgaggctttcaaaaacaatcaatcaagagaactacatgaagtaaagtgtctttcaggtgagctagaggaaagcatggcagagcttgaggaaagccgtcgaaagttggctgttctccagttgcaaacgggtggaggctcactgatgaacacatctgctcctaacggtgtgaacggtagtgtttcaactgataaatcttcagacaagggtatgggctggcgagatctgaaagatgctgttgaggaggctaagactcttgctgcaaaccgcctatttgaactccatgagactcaagaggataatctgatactatccaagcagttggaagatattcaggatcaattaaaagatgagaactatattgttacatcaaaaccatatacgattctcagtgaccagttacaccatctgaatgctgagatagagcgatacagggggttagttgaagtgctacaggccaaaattgaggacctggaacatgaaatccagaaacttatggctgaaaagaatgatcttgagatcaaggctgaggaagccttgcaagattcagggaaaaaagacttcaaggacgagattcatgttatggctgcatcgtgctacagaatgaaaggaaccagctcctgccaaaggaagaaaaaatgcttgcaaaggcagaatcagtggacgctgttcaacaatccattaccacttacaaggccaaaattgaggacctggaacatgaaatccagaaacttatggctgaaaagaatgaatcttgagatcaaggggctgaggaagcctgggcaagattcagggtcaaaaagacaacaaggagaagatccatcttgtgagcgagccactcactaaagagaaggaattgtaggacattctattgaatagatccaagaatgcggctactgaaccacttgtgcttcgtgagaaagctgactatttaagaaattagcaatctaagaagaaaggggcacaatggatgcaatctgataagaacttatgaaacttaacgagtcaaaaagaattaaaaacgctgaattagatggccgtctatctgaaattgagactataggtcaaacataataagatatgcaaacactaaatcagcaccatcttaaacaggttgctgatagagatgattttaacataaagctagtatcagatagtgtaaagatgaagcaagcctatggttcccttcttgctgaaaagaatatgctacagaagcaacttcagcatgtcaacagttcactggagtcatctaaactaaaaatcaccagtggtgaagagcagatgaagacctatgtagcacaagctatgaaatcttcttcagagaataggcatcttgcaattagccttgaaaggactatgctggaggtatcagatgcagagaaggagctcaagtggcttcggtccgctactggatctgctgagaaagaatatgagataaatcagaaaaaaatagctgagctaaaaatggagctagagcgtgagagaaatgagaggataaagcttgaggaagaatacgaagaggtgaaaaacgaagtcagtgagctaacctcagaaactgaagagactactatacagaagctccaagatgaaataaaagaatgcaaggctattctcaagtgtggggtgtgcttcgaccggccgaaagaggtcgtgatcaccaaatgcttccacttattctgctcgccatgtatccagaggaaccttgagatccgccaccgcaaatgcccaggttgtggcaccccctttggacagagtgacgttcgggaggtgaagatctgaagcgtcagcaaaacagcttgaatgactgacttggtagcgagcatgtaaatatatagtagtagtgctagtttctgttttcttggaggacagatattagatcgaattgtcttggtgtgcctctgccaagactgccatgtagaaactattattattatcacctaaaaatagtgcaattgcggggatctgatactgactgtgtctgttttgcgtgttgtatcattaatttatctgttaattgaggtaccggctaaagttgttttac

SEQ ID NO: 67916 - DNA, 228 bp, Oryza sativa
  Clone ID: PAT_MRT4530_6872C.1
atggggtggctccggtcgctcctgtccccgctgaggaggctctggtgccacatgaacgccgtgcagcgaaagaagagagggatctacatcctgtacgacgatgtcaagtcgtgcccgtgcgaggacgtgcacgtgctgtggtcgatcctcgtggagtcccacggcctgccgccgccaaccccgatgacgacgccggcgccggcgccggcgctgaggccgacgcggtga

SEQ ID NO: 67917 - DNA, 737 bp, Oryza sativa
  Clone ID: PAT_MRT4530_68730C.1
atgcccaagcccgagcgcgacgagctcctccgccgccgagcacctccgtcgccgggcgccaccaccccgccgccgagcgtcgcccccacgccgccgagcgccgccaccccaccgccgagcacctctgtcgccgggcgccaccaccccgccgccgagcgtcgcccccacgccgccgagcgccgccaccccgccggtgaccaccggaccctggcgccgcccccagctctctggcctgggaatacaagggccctgggtccagagattcgctatggccccagcctgcggaccattcacaggttccacgggtctggcctaaggcacctcggcaatgtgtgcctttcctcctggtcgcgcccgcctccggtccagggttcggacccgcacgggagcgtaatttcgccccaccgccgcagctcgccgggcgcatttattgcggaggcgcccgttgggcagtgacttgtgcgtggtgtatgaccgcctccgctttcgcgtcgctctcgtcgcgtagtttgcacctccatccccccctcttttgtccccacgtcgccctccgttgaagtcccctgtgccgcatgccgcggacccccatgttaccgtcccggtgtcccgccggtgtctacttgccgcgcacgcgtattccccggcggcgagtgattgcgcccgaatgggatgattcgcggaacgcgcgcggtggcggagtttactcgccagtctttcgccgttccgccccccgaccc

SEQ ID NO: 67918 - DNA, 136 bp, Oryza sativa
  unsure (1)..(136): unsure at all n locations
  Clone ID: PAT_MRT4530_68731C.1
atgtcccagagcacggggagctcgtcgacgaggaagacgccgcgccagagagatcataaacgcgacggtgccggccttcgcgccgacggcgatggtctcttgccggtctcgtggtacagcctgtcgacggattntg

SEQ ID NO: 67919 - DNA, 1380 bp, Oryza sativa
  Clone ID: PAT_MRT4530_68732C.1
atgcttgcaaagccagaatcagtggacgctgttcaacaatccattaccacttacaaggccaaaattgaggacctggaacatgaaatccagaaacttatggctgaaaagaatgatcttgagatcaaggctgaggaagccttgcaagattcagggaaaaaagacttcaaggacgagattcatgttatggctgcatcactctccaaagagatggaattgttggacaatcaaatgaatagatccaaggatgcggcttctgaagcacttgcactacgtgaggaagctgactatttaagaactttgctagctaagaagattgagacactggaccaggaaaagcaggagttacaatttatagtggatatgctcggtaaagaatgttctgagtcgagggcaatttcagagattgaagaatcagaaaaccgagctcgcaagcaagctgaatatttgagaaaatgtttagaagagcataatcttgaacttcgagtaaaagcagcaaatgaagcggaaactgcatgccaacaaaggctttcaattgctgaagcagaactggaagacttaagggccaaagtggatgcatcggaaagagatgttatgaaactcaaggagtcaataagaattaaagaagctgaagtagatggccatatttctgaaattgagacaattggtcaagcatatgaagacatgcaaacccaaaatcagcaccttcttcaacaggttgctgatagagatgattttaacataaagctagtatcagatagtgtaaagatgaagcaagcctatggttcccttcttgctgaaaagaatatgctacagaagcaacttcagcatgtcaacagttcactggagtcatctaaactaaaaatcaccagtggtgaagagcagatgaagacctatgtagcacaagctatgaaatcttcttcagagaataggcatcttgcaattagccttgaaaggactatgctggaggtatcagatgcagagaaggagctcaagtggcttcggtccgctactggatctgctgagaaagaatatgagataaatcagaaaaaaatagctgagctaaaaatggagctagagcgtgagagaaatgagaggataaagcttgaggaagaatacgaagaggtgaaaaacgaagtcagtgagctaacctcagaaactgaagagactactatacagaagctccaagatgaaataaaagaatgcaaggctattctcaagtgtggggtgtgcttcgaccggccgaaagaggtcgtgatcaccaaatgcttccacttattctgctcgccatgtatccagaggaaccttgagatccgccaccgcaaatgcccaggttgtggcaccccctttggacagagtgacgttcgggaggtgaagatctga

SEQ ID NO: 67920 - DNA, 1109 bp, Oryza sativa
  Clone ID: PAT_MRT4530_68733C.1
atggatgccgcagctcttcagtatgagaaccagaagctggtgcagcaattggaggcacagaagtccaaaatgcgtgcattggaaggcaagttcaaggagctgagggatgagcaatgttcttacgacaatacattgatttgtttgaataaaatgtggaatcagctgattgatgatttagtgctgcttggggttcgagctggtggggatttaaacggtttgcaagcgcttgatcatgaagagatgtcagaagaatctcttgagtcatgtccttctgaggagatatttctcttcagactcttgaattccaggaatttcagaaataatgatgacagtagcctgtcaaaattagttgaggaagctcttgccttgcgctattcaacaacagttactctgatgaagtccctgcaagaggcttttgctgtacagcaggctagaagtgaatctttatcattagctttaaatggacagaactccagtgaagacgttattgtggcccttgaaaaccataatgattacttgaaagaagtggttgacaatttacgtcaagctgtgtctatcatcaacaggaagcacgaaaagtatctggatgagattgaggctttcaaaaacaatcaatcaagagaactacatgaagtaaagtgtctttcaggtgagctagaggaaagcatggcagagcttgaggaaagccgtcgaaagttggctgttctccagttgcaaacgggtggaggctcactgatgaacacatctgctcctaacggtgtgaacggtagtgtttcaactgataaatcttcagacaagggtatgggctggcgagatctgaaagatgctgttgaggaggctaagactcttgctgcaaaccgcctatttgaactccatgagactcaagaggataatctgatactatccaagcagttggaagatattcaggatcaattaaaagatgagaactatattgttacatcaaaaccatatacgattctcagtgaccagttacaccatctgaatgctgagatagagcgatacagggggttagttgaagtgctacaggtatgctgcttttcctcagttgtgctgttttacaatggtattgttgtttgatcaaacccctg

SEQ ID NO: 67921 - DNA, 135 bp, Oryza sativa
  Clone ID: PAT_MRT4530_68734C.1
atgtggttgggttaccaaattaccatgaagaaggctgatggcgaactgcgtcgagtcagacgaaggagacgggcacaaaatcaagcagttttcagggctctgacgagttcaattctcaagaacccggaggtgtaa

SEQ ID NO: 67922 - DNA, 639 bp, Oryza sativa
  Clone ID: PAT_MRT4530_68735C.1
atgacggcgggtggcggtcgttctctgggaggaccccgggagcgcgggtggctgccgccgtgcgcgtgcggtccctccggctccctccactcctcgccccttctcccctacgacctcgtccgcctctgcctccgcctccaccctagccgccgctgccaccaccacctcctcgaagcgccaccgcccggaggtgctccccgtccttccccgtccgaggtcaatgaggacgtcgaggccacgctctcgctcaacgtccgcgcggtggcgatggctcagctgggcggagacagaggtcgccgaggttgggtggagcggcggctcaagcggaggggatccggtggcatcggctcgtcggggcgtggcggcggcagcaacatggccttccatggcggggcgggggtgggggcgggctgggcggcggatcgagggatcgacctcgaacggcggcgacatgtcggcggcgggcgcccgagttggagcgggggacgactacgagtggacgagcgacgtccggcctccgtgcctcccccttcctcctccggcctccgcgccgtggcccgagcagtgacggcgttgagcggctgcgcggcgcgggcggcgtgggtcgacgccctcctccctcagccagcccgccgatga

SEQ ID NO: 67923 - DNA, 105 bp, Oryza sativa
  Clone ID: PAT_MRT4530_68736C.1
atggcggagctatgcccctccatggcttcatctggcactgaccaagcacggtcaagaactcaagatcttgatttgaggatattgcttgaacgtggtcaggcatag

SEQ ID NO: 67924 - DNA, 327 bp, Oryza sativa
  Clone ID: PAT_MRT4530_68737C.1
atgacttacattgtgaaacagagggagtactgcggatctgaggagagcggctggatgggtggacgtgcttcggcgccggcgcacgggctcgggtggtgggcaagtgcgacggcgaaagcttcctcctctcccatctcctccctcccgacaacggtggagggctcgggcagcgggggagggcgggggagggaggtgtggccgccctactcctgcgcggcggcggaggatcgggaacgggcgaatccagccgcccctagcccccttcgtccccatgacactgacgagaacgaggtcgacggcaacgacaatgacagtggcttcaagtaa

SEQ ID NO: 67925 - DNA, 1653 bp, Oryza sativa
  Clone ID: PAT_MRT4530_68738C.1
atggaggagtatgagaataggagggttgaagcggaagagagggcgcatgtggatttggtggacattaagaaggtgcttgaggtgaggctacccgtggtggagaaggtcggcggcaccagggccacggggcaggggcgcaggcgggaggtcggcgcggatggcggcgctcatggtggcacgcccggcgcagcggcgcgcactgcggcacgctcaggatggagaagaggtggaggggaggggggagggagtgctgtttgccgtcgtcgtggatctgggagctgcttcgttcacatcctcatgctcgacctcatcatctcctatggcgtcttcggccagaggaacgccgacttcgaggtggccgccgtggctgccaccaagaccgtcgacgacgatgaagctaacgccgccggcaaggagggcgtccaggcgtggagctctctgtacttcccagacgatcccctcatcgtcgtcgccgatgtcgtcccccacgcctcccccgcactgccgctgtcccccacacctcccccatgcctcctcacgggccatgtgcgccgaccgccagcccacccttgcgcgccgctgcccgccttcgcctccgctgccagccgcccgcacgacctccgcgtccgccgccggccgcccgcgagacctccgcctgcatcctcggtggcgccgtggcctgtgctgctgaggagaaaatttacatttagccattctcaggcgtcgatctctctccccgacgaggttggagcgggcaagcggctggacgccgtggagtggagctggctacggctgcacgcgcgagcaggttgcctcgacgaggagctccgccgcgagtcgctgcccacgtcgaggagctcatcggagaaggaagtgacgccgtggcgcgcggtcaggtcgagcgcttggtgcgccacgccgccgagccgaaccgtcgtcctcgtccacgccgacgccttccccgttcccagtcgcgccgccgtgccgccttccccgttcccggtcaccatcgccaccgccggaaacctacgcgcgaacccggtgagctacgccgtcgagctggtgagggcgccgaagggcggcgtcggtgccatccccggcgtggccagctttctcatcccgtaccgagtcactggtgccatcctcctaccgacgtggcagggcggtgctgaggtggcgggggagcgcgccaagtcactggcgccgtcgtccaacaggacggcgccagagaggctagcgccgtcctcctgccacagtggcggatcggtgtcacggtggggagggggaaggtggcgctgggagggggaagtggggatcgggtttagaggaagggcctgggaggcggcggaccagcggtgggtggctgacaagggcgggcgacgaggcggggcagtggggttggctgcgggcggtgggccggtgatggtggcgggggcaaagcgaggcaaaggggaggaggccggccggccggggccgcgccggcgaggccagggcggcagcacggtggggaaggagtcactagcgccgtcatccaacgggatggagccagagaggctggcgccattctcctgccaccgtggcgggtcggcgctaaggtggcagggagagcgcgccaatgcgctcaactggggtataagccaggactccacctaa

SEQ ID NO: 67926 - DNA, 1018 bp, Oryza sativa
  Clone ID: PAT_MRT4530_68739C.1
tagcctgctattgcacatgctcttatcgaccattgttcggcaagcggcgcgggcggtgggaactgagaacgcaggaagaaaggcgatggacgaggtggcgcatggacgacgtccagagaccagaatgagttggtcacgtttgtaggtggtctgttccttgggactagcaagtgggaacatgtgtgcggtgcggtgtgccgctttcgtcagagtcaggtacccgctgcctgccgaacaaacaggcagccacccgtgcgtgctgctgatgcatgcatgcttccttgtgatagatccgaaagtatttgatggccatgctaaaccgggcacttttcttcaaacccactgttttacagcaacgggtcagtactgagatcctggattcgttccaggatttaacggcgttgtgctttcagtggtaggcgacgtacccgtcgacagcgagacgcctgtgataactttgtcaatctttctagaatttgccggtccagtcttcgaagatgctcataggggtaggtttgcgtgcgtgtgttcataggggtgagtgcgcgtgcgttgtgagtgtttgcattgtactgtgtaattcgggagtgccgacttgtagtgaagtgggagtaaacccttgaatcctcgctttccgttcgttttcggcgatcatcgtggactcgtggtggacggatgcccgcgttcttgcgaatagtaccactccaggcaaccggcccatcacgataatcagaattctgtttcggcctagcagtacgttggtgagaaggaatcccgtcccggcccaacgaaatcctccaaagcaagacacgctgcttccggcccagtaggggaccaaggcgtggcatcgtaattcagttttgtccatgggccgttgagtcaagcttcgatggcccagatcgtcgcccgagcacctgcggtttgaccacatgtcattgttcggtggccacacaatggcggtcggaccgtcctttatgggaaagactcggtagttttcgaatttggcaataacttgcta

SEQ ID NO: 67927 - DNA, 724 bp, Oryza sativa
  Clone ID: PAT_MRT4530_6873C.1
atggcgctggatctgcatcttgtttgctcctcgccctgtgttttgcacataacacttgctgctggtagaacaacaagaactcatggcggaaagaatcagaggaccgaggaagaagaggggaaggaggagactggaaaagctgacctggaacccttggcgatggcggcggcgacgccagactcctacggcatcggcccgagcttgagcttgagcttgcaccagcaccacaccggtgtgggcggcgccggcgaccagaccacggtgttcgccggcggcgacacgctcgccgcgaactacctatacagctacgcgacaccggttgcttactctgctcaagattggcaccgcatcgatgcggggggcggccagaacacggtgttccccaacgtcgatcacgctttcggcgtgctcgccccttactttgctacggcggatctccatcacatcggtggaggtggcgaccacaacacggtgttcttccccaacatcgacgcccgcgccatgaacgctttcagccgcgccgcaccaaaccagtactctgctgcggaattcgactacaacggtgtaggcagcgagcagaattacgaggaattctactacaacggtgtgagcggtgtgcagaacatagtgccgcacaacatggacaacctcaccgcgaatgctttcagcttcgccacaccggcccattactctgctgtggaattctactacaatggtgtagggg

SEQ ID NO: 67928 - DNA, 218 bp, Oryza sativa
  Clone ID: PAT_MRT4530_68740C.1
cccacgcgtccgtacagatcgtgtttcagatggaattgttctgatcgatctagctaggccggagtgtccgtgtaaataaaccgatttttatcgtgctcagatggtagtgctgatgtgaatgttgattttcctgtggtaaactacaggggtgtgctacggaattcgatgaaatatgaacaggatgtcgattacttgcaaaagttgcaatcctagcttga

SEQ ID NO: 67929 - DNA, 3135 bp, Oryza sativa
  Clone ID: PAT_MRT4530_68741C.1
ttttgttgtgctttgtcgtggcatgcccccgtcacacccctggatccccccgcgggttgcatgtttttgttcttttcttgttatatttttagctgcaattcacagtaatccattgaaaatctggtccaatctgacccaacacatcaccacatatatatattgaatgatccatgcatcaatcagtagagaaatctgcaagctagcaaaaataccaatctatctttacagcaagctacacccccttctcatatacagttttacaattacacccctgatcacccctacttcgttcactttacttacccccccaacacaacacacgagtgtacgtgtatattgcttgtatacctgtataccctcgccgacggcgccggccggccggcccaggcttctgacgccgtcttgcgttattccccgccgccgcgccgccgccaccgccgccgccgcagacgatgcatcctgcgcgcgccgcgcttacgatcacgcgacgaaatcgtgcagcagctgcgacgccgggccgaaccgctgccggtcgtcggagccgttgatgtagtcgaagtcgccggcgctgccgtagagcaggccctgctgctcggccgggacggggccggcgttgttgcagtgctgcaggcccagcgtcagcgacacgctgccgccgtcgtagccgccgccgccgccgaagtcggccatgtcgccgtaggagacgaacctggcgtcgccgccgccgccgtggtggtggtggtgcagcgcgtcgtgcagtaggctggtgccgccggcgccggggtggtgcacgtggtggttcaggttgaggccggtggcgtacgtgcccatggcgccgccgaggcagctggacaggccgacgacgccgacgccgacgtccagggcggcgccgcccatcgcctccgacttgaacgggttgttgagctggcccgcgacgccggcgtgcctcgccgcggcggcgctcgacgggctctggaactcgtcgcggtcctccgacgagatcgcctcgtccttgcccttgccgccgccgccgccgccgttctccgacgacgagttggagtccatctccgcgccgaactcctccttgtacatctcctcgatcattggcttccacagccgcacgcgcgcgttgatgaaccagttcgatacctgccccctggacaatcccgtctgcctcgcaagcatcagcttctcggaatctttcggatacgggtggaggaagtgctcgaagagccaggcgcggaggacggagacggcggactccgggaggccgcgctgggggcgccacgcgtgctgcggctgctgcatcatgccgaactgctgcatggcgcgctgctgccgcagctgctggtcgatgtagcgcagccgggagaggccgccgccgccctgcgccgacgcgtcctgctcgccgaggccccgccgcgccgcctgcgcctgcgcgccgatcgcgtcccgcagcgaccggaagtggcgggagatcgtctgcagcgccagcgccgtgtacggcctcgccgcgccgccgccggccaccgcgtcgaacgacgacatcacgatctgcatctggtggtggtagtgcctgtacctccgatcaacctgatcgagcatggccatgagcgcggtgaccttgttctggagatcctgcctctccgacggcgagagctcgggggctgaattgctctcctgctcctgcgggttcgagccggccttgtcgtcgccggcggcgtcaccgcccttgcactcgccggaatccttgccctggttcttgtcacccttccgcttgatcgcgtcgcggacattgacaacctcgtcgagcagctcgcgcgccgccctgagaaacctcgagttctgcacgtagatgctgttctgcgcgctcctccccgccatcggcgacgactggctcgggctgagcagcgaggcggccgccatgcccgccggcctgtactggtagagagacaccggcacctgcgtgccgaggctaagcgatagcccgccctggtgtccccgcgccgccgcgccgtgcgccatgagcagctgcgtctgcaggcccatctcgccgccgtccgccgtcgccgcttccctgaacgccgccggctcgtcgccgccgccgtgcgcaatgtggctatgcgacacgatgctcgccgggagcgggatcaggccgccggccgacgagtccgagtaagggttagacggcggtgggtagtgctggaacgacatgtcgcctccgtcgccgccgccgccggtgaggtctctctgattggtggaagaggagaagaatgtggccatcgtcttcagaagcagaagaagagacagacttggacagtaagcttcagattgctgcgctttctgcaatactattcccaaagctttcgcagtacctgtgcagaaatcgactttcagaccaagcaaagagctagaacaagacagttcctggagtatgacagaaaccacccagaacggggacagagatgatcccaaggattcttgcagttgggttgtttctcttgtcgtctttttctgacttcttcttttctttttcgccgaagcagccttgtggaagttgctactagtggagatagccaaccgggttccagcagctgttcgattcgccacggcgctctcctccgcagtaatggtcgcgcggcgtccacatccctcttcggcgaggcccgcatcaccatccgtaagtccgccgcgaagcccaagccgtccgcctttggcagcccgtggtacggacccaaccgcgtaatccgctccaccgatcggggcaggtgcgtgcggagcccggcgaggagggaggaagatgggggcggccttcgccactagctctctccccgctagccaccaccggccgccaggctctccgccgacccgccgtcgctccggccctcgaccgcctgccatctcctctgtcgccgcctccgcctccatccacgccaactctagcccgaagcgccgccgccactccggtccccgtccgtcgccgccaccgctccagtgcctccagcgcctaccctcgcgccaccgccgccgtcgctgccgctgccgccatcgcctcttgcagaaggccgaagtggagagagagaagggaaagagagggaggaagaagagagagaggatgacatgtagggtccacat

SEQ ID NO: 67930 - DNA, 198 bp, Oryza sativa
  Clone ID: PAT_MRT4530_68742C.1
atgttcactggggacctcttcggcgacatggttcctcgcacctcactctccatcacggggtgctggagggcaagaagggccttgagctattggtcctattgtagccaagaaggtgttgttgagcaagttgaccgcaataaggcgttcgacaggagttcgaacggggtccgagggttctctaagagcaccaagagctag

SEQ ID NO: 67931 - DNA, 1963 bp, Oryza sativa
  Clone ID: PAT_MRT4530_68743C.1
cccgatcggatcaagtcgattcttcctgctggcgaattccccatctccgtcttcctctccaaaccctaatccccccgccatggccgccgccacggcctcctcgccggcgaccgccgccgccgccaactccgatgacgaagacaactacgaggagtacatccccgtcgccaagcgccgggccatggaggccgaccgcctccgccgcctccgcctctccaagcccgcgcccccatcctcctccgccgcggaggccgcctcggatctcccgcctccccctcccccaccgccgaaccagccctcagccggcggtggcggtggcggcctcgaagcctccgcgaagcccagcctcctcgtcaaggcgacgcagctcaagcgggccgcgccggaggtgacccacacggagcagctcatcatgcaggagaaggagatgatcgagcacctctccgaccgcaagacgctcatgtcggtgcgcgagctcgccaaggggatcacctactccgacccgctcaagacggggtggaagccgccgctccgcctccgccgcatgccgcgcgccaaggccgacgagctccgccgcaagtggcacatcctcgtggacggggacgacgtgccgccgcccgctcgggacttccgcgacctccgcctgcccgagcccatgctgcgcaagctccgcgagaagggcatcgtccagcccactcccatccaggtgcagggattgcccgtggtgctctccgggcgcgacatgattggcattgccttcacagggtccgggaagacgttggtgtttgtgctgccgctcatcatggtggcattacaggaggagatgatgatgccaatcgtgccgggtgaagggccatttgggatgatcatctgtccatcgcgagagctggccaagcaaacgtacgatgtcattgagcagttccttgttccacttaaggaggctgggtacccggagatacgcccgttgctttgcattgggggtgtcgatatgagggcgcagctggatgtggtcaagaagggagtacatattgtggtggctacacctggccgactcaaggatttacttgccaagaaaaagatgaacctcgacaattgcaggtacttgaccttggatgaagctgataggcttgtcgatcttgggtttgaggatgatatccgtgaggtttttgaccatttcaaggcacaaaggcagacacttctattttctgccactatgccgaagaagattcaaaactttgcgaagagtgcccttgtgaaacctgttattgtgaatgttggtagagctggtgcggcaaatctggatgtcatccaagaagttgagtatgtcaaggaggatgccagaattatatatctcctggaatgcctccagaagactccacctccagttcttgtcttttgtgaaaacaaagctgatgtcgactatatccatgagtatcttcttctgaagggtgtagaggctgttgcaatccatggaggaaaggatcaagaggaaagagagaatgcaatcgagttcttcaagaatggaaagaaggatgttttggtggctactgatgttgcctcgaaaggtcttgatttccctgatatccagcatgtgattaactatgatatgcctgctgaaatagaaaactatgttcaccggattggtcgaactggtcgatgtgggaaaactggaatagcaacaaccttcataaacaagaatcaaacggagactacccttcttgaccttaagcacttgcttaaggaagctaagcaaagaataccgccagtgttggctgagctcaatgacccattggaagatgaggaaaccatggccaaggagagcggtgttaagggatgtgcatactgtggtggtcttggccatcgtgttaccgactgtccaaagctggagcaccagaagtccatggcgatcgcgggctctagaagagattactatggcggtggaggctacagaggagaaatatga

SEQ ID NO: 67932 - DNA, 1290 bp, Oryza sativa
  Clone ID: PAT_MRT4530_68744C.1
atggagcgcggcggcggcggcggtggcggcggcatggacgcgctccccgacggcgtggtgcagcacatcctgtcgcagctcagcagcgcccgcgacgtcgcggcgtgcgccggcgtctcgcgcggcatgcgcggctgcgtgccgttcctcccggcgctctacttcccgcggggcgccttcgacgcggcgggcggcgcggccgcggccgacgacgccatcgggcggatggtggaggccgcggcgcggctggaggagctcgtcatctactgccccttctccgccgcgcgcctgccgcgctggctcgccgcgcggagcgcctcgctgcgggtgctcgagctgaggatggactccgccgtgtcctccggcgcgggatccggacacctggactgcatcggggccgtcgcgaacctcgaggagctgaggctgtgggggctcacgatgacgcgcgccccggcgtggggccagctggagcggctccgcgtgctggagatcgtcggcgccgcagtgcgggacgtcgcggtgaacggcgccgtcggcgcgtgccccaacctcaccgacctcgccctcatcgggtgcgagtgctccggcgcggtggccatgacgctccccctggtcgagcgctgccgcctcgacttcgtcggctccggcaactgctcgctcgctctcgccgcgccactcgtcgagtcccttgaaatccagggcttctgctggatctcgctgcagggaggcatcagactcaagcaccttacaattgccaagaacactggtactgggagcgtgtacaatatagagattgggaagctcccagagttggagaagctctcgctgcgcggtgttcagtggagctggggagcaatcagctcggtgctgcagtgcgcaagagaggtgaagtatcttgtgatgaagattgagttctgcggtgatcatgatactctcgagccattcccggaggtggatcttgttgatttcttcaacagccacccgaagctcatcaagtttgagatccatggcgccatgtttgctgccatgtgccagaagaacagcctgaaaaatttggattcaaggttctcgatcccttgcttggaggaggttctgatcactgtgcgttcacctctgaacgctgagctgaagctgaacactcttgagtccctagtcaagtacagtcccaggatgcggaggatggtcgtcaggatttctcagatgaagaactgccatgggtccgcagatggcttcttcgaagagatttgcaagttcatgtatatgaataacgggagagtgcggatcgaatga

SEQ ID NO: 67933 - DNA, 900 bp, Oryza sativa
  Clone ID: PAT_MRT4530_68745C.1
atgaactcaattgtgatcaatatattaccaggagcacaggctgcgacgttcaccataagcaaccggtgcggctacacggtgtggccgggcatcctctccaacgccggcgtcgcgccgccgtccaccaccggcttcgccctctccccgggccagacgctcgccgtctccgtcgccgccgcctggtccggccgcatctggggccgcacgctctgcggccaggactcctccggcaagttcacctgcgccaccggcgactgcggctcgggcgccgtcgagtgctccggccgcggagccgccccgccggccacgctggcggagttcactctcgccggcggcagcggcggcggcggcggcgatgacttctacgacgtcagcctcgtggacgggtacaacctgccgatgcttgtggcgccgtcgacgccgccgccggcgagcggcggcgcggcgagtaataacgggagcagctgccaggtgacggggtgcgtgatggacctgaacaagtcgtgcccggcggagctgcaggtggtggcggcgtcggcggcgaggagagcggtggcggcgtgcaagagcgcgtgcgaggcgttcgggacggcggagtactgctgcagcggcgcgcacgggtcgccggcgacgtgcgcggcgacggcgtactcgaggttcttcaagggcgcgtgcccgcgagcctacagctacgcgtacgacgacgcgacgtcgacgttcacctgcgcggccgccggcggcggctacgacgtcgtcttctgccccggcatgtccagcaatgtcggaaaaatcacagtgatcatcatcagccaatattgtgtggggttcaatggacataaactccagggcaacggcattctcaaggatgaaatagaccagctcctcctgaggacggcctag

SEQ ID NO: 67934 - DNA, 275 bp, Oryza sativa
  Clone ID: PAT_MRT4530_68746C.1
caaaaaggggggaggacctgaacaaaaaggggggcacatgataccagcaaaacagaatccacatgacaaaactgtatctgtcaaggcccacctacccaatttcacccaatcgaatcattatctatgggcaaaagctaacgtttttctattcctccccttcactagtcaaaaacaataaaccccacaacatatcctaaaaagggacggcatataagatgatcaaatcaagaggacgatactccagaagagaaatttcttgcgttaagttgacactt

SEQ ID NO: 67935 - DNA, 626 bp, Oryza sativa
  Clone ID: PAT_MRT4530_68747C.1
agaacggagagagcatggctgcaaaggatgcctcgtgacggaaaggagcgacaaatgcaataaggtcatcatccccaaaccgctgcacaaaactgtcgcttctactaaacctgaacccaccaacagaggctccaccaccaacactccgcttgggccgagttgggaacttcctggtccgagaaggcctcgtccacagagtcgaacaccgcacccacgcgcggaacgagggcctcctccagcgtgcgcggctcgaaggccacagccacttcgccgccgccgtccgcctccccgtcgccgccctcctcgtcggaggcgacaaccacctcctcgtcctcctccaccaccacctcctcctcgtcgtcatcctcctcctccgcgggctccccgttcaggtcatccgcgacctccctcttgacacgcctagccgcagccacagccgcttcctcctcatcctcctcctcctcctccaccaccacctccacctcaaagctagggtttcgcgcacgcgcggcgcgggaggagcgaggcctctccgaaccctcccccatggctctcttccccccctccctcctatttacgcgcccacgcgctcaccaccaccaccaccacaacgccacacgcctccc

SEQ ID NO: 67936 - DNA, 372 bp, Oryza sativa
  Clone ID: PAT_MRT4530_68748C.1
atggctctgcaattgcaggaggagggttgtcacttgtcagttgatgacaggaggtcaggattagttggtttggagaacggctaccggggcgtatcggccaccacggaggtggaccggtcggcagctaccgacggtggccgccgcttcggaggggtgggggtgtcgtcaagcacgatggttgacgccgcgagctgccaccgcttcgggtctggagggggaggcgtgggagggaggtgcggtttccgcgtcctcggtggcggcggggctaggcggtgcggatgcggcggtgcagaccaatgtgatgggaggaggggcggcgaaaggcgaggcggatggccaggagcgatagaaagaggagggagggcgcggtga

SEQ ID NO: 67937 - DNA, 3314 bp, Oryza sativa
  Clone ID: PAT_MRT4530_68749C.1
atgggggagggttcggagaggcctcgctcctcccgcgccgcgcgtgcgcgaaaccctagctttgaggtggaggtggtggtggaggaggaggaggaggatgaggaggaagcggctgtggctgcggctaggcgtgtcaagagggaggtcgcggatgacctgaacggggagcccgcggaggaggaggatgacgacgaggaggaggtggtggtggaggaggacgaggaggtggttgtcgcctccgacgaggagggcggcgacggggaggcggacggcggcggcgaagtggctgtggccttcgagccgcgcacgctggaggaggccctcgttccgcgcgtgggtgcggtgttcgactctgtggacgaggccttctcgctctacaagacctacgcctaccgcacaggcttccacgcggtgcgccggacctgccacaactacgaggggctccgctaccgctctacctttacctgcactcatggtggcaaggcccgggctgacgccagcccgtctgatggctcaggcgcccgctacccactccgcagcagcaagcgtgcggccaacgcccaggagaagagggctcgtcgcggtgcggctgagaagacaggatgcaaggcgatgttgatcatccgtgacaggcgggcggatgataagtggaaggtggagttcgttgagttggagcataaccatccgtgtacacctgacatggtgaggttcttgaaggcttacagggaaatgcctgactcagctaagaagaaggccaagatttctgatgagatggatgatagggtggagaaatcgctgagcgagattgctgagaccaggaagttcccaactcggcccaagcggagtgttggtggtggagcctctgttggtgggttcaggtttagtagaagcgacagttttgtgcagcggtttggggatgatgaccttattgcactgaagaagtttattgaggcgatgcagcgcaagaagccaaactttatccactactgggatcttgatcaggaaactcatgtgaagaattttttctggactgactcgaggtcccaggcacaataccgttattttggtgacgtcattacacttgacgtgatgtatttacagcattcgcgtgctagccttccattggccacaatccttggggtgaacaaccatggtcaccttgttctgcttggttgtggtctgctttgcagtgacaagaaggaaaactatgtttggctgttgaagaggtggttgggctgtatgaatggcaagccaccagaggcgatcacaaccacctattcagatgccgttgcagaagctgtggctgaggtgttgccaaatgcgaggcaccgtttctgtttttggcatatcttgaaaaaactccaagagaatgtcggacgcacaaatgagaaagaggcaatttccttgagattcaaggaggttgtttatgacacagtcacacttacagactttgagagagagtgggggcccatggttgagcagtacaagctcaaagacaatgactggttctctgctttgtacagctgccggaaacaatgggcacctggttatgtcaaccattcattttgggctggcacttctgctattaggaaggtcgagaaaccagatccatactttgatggcgtggtgacaactaaaactaccctaccagttttccttgagcaatacgagactactctgagagggaagctggaaagggaggcatatgatgatttgcgctcctattactctaggctcacttcgctgtcgggattaccctttgaggaacaactcatggagctctacacagtacctatgttccaagcattccaagacgagatcaaacaattaatacacgtgatttgtaaagaggtagacaggagtggaaattcaattacctacatggctagtgagttgatacagggaaagaaggtcaactatacagttgtctacaacagtgctgacaaggatgtctggtgcatttgtcgctcctttccgtcacgaggcatcctttgcagccatgctctctccgttcttaagcaagagaatgtgttaatgctgccatcaaagtatatcctcaatcgttggagaaaggattttagagtacttcatgcaactgcaagttccagttctatatcatctgatagagatttgagcattttcaatgatctctatgtccgtggccacgagtatttagaagatgtcattgacattggagccagagaacctgagctcaaagagtttgtgttgacagttatgaaggaagcgaaggacaaactagttaggcctgaccatattcatcaagctgatcagcgggttgatgtaaatatgtcagtgactggccaagtgtccgcagatagaggagtagatgtgaacatttcatcaaatagcacatccctgattcagggagacagaagggttgatacaaatgtgacctcaaacaccacagccatggttcatggtcatggggattccatgacatcaaacaccacagctatgattcgtggggatagaagagttgagatgaagatcccaacgccccaccttattcatggagacggaagaattgacatgaacatggcatcccctctcttgatgcagagggacagaagagttgacatgaacatggcctccccacacatgatacagggggacagaagagttgatatgaacttggcatcaccacactttatacaaagcgacagaagggttgatatgaacctggcatcttcgcatctgatacaaggggacagaagagttgatatgaatatgacatcccctcacttgatacaaggtgacaccagagtggatatgaatatggtatctactgctcagaatggaatgcactcttttgatttggtgaatgtgaacctagaaagtggtcctttgccaatggctgcaactgatttcatgcaaatgcatcagcacccacccgtttaccatccaaaacaactcctcaatatgagagatcaggtgatggacacaaataagaggcccaatatggaaacaaacacatactttatgggaggtggaatgcatgtgggatagtttcttgtctagagacccactatgtaatcttttctgtttggaaaggagatgcctttccttattttatattgatatgtatgttcctacagcaggcagcaactaatcaattaggttgtagtaattgcagattaatcttgcagtgctggtagctttgttgttgtatccttctctgttcggcagctgtagcaattacttgctattgtcttgtacataagatagtagaatgcaacaaccttttcttgtcacccggtaaaaaaaaaaaaaaaaaaaaaaaaaaaaaaaaaaaa

SEQ ID NO: 67938 - DNA, 279 bp, Oryza sativa
  Clone ID: PAT_MRT4530_6874C.1
atggacagagagctggccgccgcccaggccacttatggggcgatgacggtgagcgtcgacagtcctcacagctttatttatgccttcgtcaactgttacctcgactcagatatatggcgcggcacagccacacacagtgcggcggcggcggcggcgtcgtcttcggcgccgtcggctagctcggccaaccgcaccaccctgccgtatggggcggtccgcctcaggaaggcttcagccaacgcgccgccgttcctcatgaagatctgggagcttaattag

SEQ ID NO: 67939 - DNA, 394 bp, Oryza sativa
  unsure (1)..(394): unsure at all n locations
  Clone ID: PAT_MRT4530_68750C.1
gacttcaataacaaggcgngggccgcgngccacagggggggggtgcgcatagacggaggcggcggggttcccgcgaagctccgggcccgggcctcgccggagcggctattccccgacgaccggagttgcgcgtcggcggtcaatggtcgccgactcggaccgaacacaccatgtctctccgaccgccgcctgcggtggagaagaagaccgccaagaagaagaagaagaagcgttacgctcccaaccgcctatataagcagcgccccagccgccgagtacccccctaactcctacaccccgaccaccacctaaaagctctccactcgaaccccacctcaccctgcccctcccaccaccatcactcaacaccggctccgttccgatccccatggcg

SEQ ID NO: 67940 - DNA, 113 bp, Oryza sativa
  Clone ID: PAT_MRT4530_68751C.1
acggagagacacggcgaggaaactacaggaaccagagaacattacaggcaattccatttttaccaccagcaacgtttacgtccatctacatattgaccgcctgctacactcat

SEQ ID NO: 67941 - DNA, 501 bp, Oryza sativa
  Clone ID: PAT_MRT4530_68752C.1
atggccgccaagaccaccacgctcgccgccgtctcctcctgcctcctcctagcccagcagcttctcctcctcgcgcccgccacgacggccacgtcgatccccgtcggcggcggcggcggtggctccacggcctcatcgaccgtcccggtgtcctcgcacagggacagcgacgacgccgacgccgacgtgccgcccttcttccccttccccggcggctcgggcgcggcggcggggtgctggaacgcggtgctccgcgctgaggtctgcgccggggacgtcctccgctcggtggcgtcgctcctgctgcacgacggcgagcgccacccgtggggcgtccacgtcggcgcgccctgctgcggcgtgctccaaaccgtcggcgaccggtgcttccgcgacctgctcaccgactcgccgttccgcccgctctacgctcccctcgtcaaccacgtgtgcagcgccctccccgtcggcggcggcgtcacccccatccaccgccactga

SEQ ID NO: 67942 - DNA, 2268 bp, Oryza sativa
  Clone ID: PAT_MRT4530_68753C.1
tcatccacggcctctgcccctccctctgcctctgcctctgcctcctctcccaccaccaccacctcctcctccacctcttccaccaccaccacctcctcctctcccacgacctcctcctcctcctcttcctcttcctctgccacggcttccaccgaacaaatagtactcggctttgccttgtttcaagcccagggattgcacacctctcctcttgaaatccttgggctcttcgtcatcagattcttcgttgcgccttcttgagcctctagcgatgaatgagatctcgcgtgaaccaccaggtccatactttacctcatcaagtgcattggagttccgctgcctctccagagcagctaccctatcgccaataggtagagcatcctcattggcaagggaggtgctattcaaaaatgcctcagcgtgacggtcatccttgacttcatacaaccttatacgctttgaactttgcatgccattgtcactgtcagactctgctgatgcatcagatgaactagcatcttcttgttcctcatcatcactaacagtctcaaaatgttcctcaattagacgaggctccttcaaagatgtttgaggatgaagtgcaagatattctcttgattgttcatcaatttcaaagtccttattttcaaacatttctttgaaacgaggatcagtcaacaatgccttgttcatttccagtttctttttcttcttcttgatgcctgatttttcatcattctccaaatcagcatccatttcctcttcctctttaagtatattatccataatttgcctgttaacctttggtattttcacaacttgcgttatgcgagattttctctgttcttctattttcttttgcttaaccttctcttgaatattctcaggatcaacagcactagtagctagtagcttcttatatagctgaagtttcatcacatatccatgcatatgcgctctcacaagaccctgatcaatgtacttagagagatcatatcgatccatctcatcttttgttaaaaacttgaaatcttcatatacaatattctctgtcttctcttccatttcttccgttagattatcaagatgcgagcaccactttggagcagggcccaatgcaggaataaagtgggcagggatctggctattgtccaaagctaataacatcaaaccactgttccggaaaacacaaacatcattgatagtaccaccatctggttcaatgctagtcatgttatttcctgtattaggatcccaaactctcactatatgcttgtcagcagtaatcagcttaggttcagtagaattaagtgtctggtgccacttaatacttaatattgggctaccatacatatgatccttaactcgcaaaggggaagacatacgtagatcatatattgctacctttcctgtgctgctccctactgccataaggtatccttggttttcatcgaattgcagagatgtgacctcctgattaaaatcttcaggagagacagctgtgttaattctgccaacagaagattttctcctcatatcaaagcactcaaccacaccatcctcaccaccacaagcaatgagcccatgtatgttactccgagaaaccacatttattgctggagattgagatgaaagagatgcaaggaatcgtccctgctctaaattgattctatacacatctggtgatgaagcagcgcaaagcaaatcacaagaccagcaatcatatgccatatctcttcccattcttggaattctcaagctatagtgtctaccgtactttgcatgcaggcatacagaacggtcagcacacaaaaatgcaagttttgagtaatcatcaccaaggacctggaaatctacaatttctgaaatcatgtgcctctcaaacttcattgataactccttcaattcatagactttaacttgtggggggtaaatacatgtcatttgcacaagaaaaaagaacccaaaatagagagagcagatgagcgtgaggcgagttaggatgcctgcgtccttgcggagggcgcgcttcttcttcgagaggacccatggggcgacgtagcggttgccggtgatggagtagagcttgacgccgttgatggaggttgacctgagggtccccgcgccgttgttcgacgccatgctcccctcctcctctgaaaccctgtaccgccgcacttgccctagctctcgtcggcgaccgacgcccccgactcgtcgtcgagcggcgccgtcgggggcggcgggtgctaggttttagcctcgtgc

SEQ ID NO: 67943 - DNA, 368 bp, Oryza sativa
  Clone ID: PAT_MRT4530_68754C.1
acgcgttcttttttttaattataaaaaaaaaaaattatttttattatatttaaaggggaaaaattaaaaaaatattaataaaaaaaaaaaaaaaaaaaaaaaaaaaaacggggggcccttttaaaaaatccaagtttacttccccgtgcatgcaaagttttactttttttataatgtaaccaaaattaaattaattgcccgtctttttaaaacctcgtaaaaaaaaaaaccctggtttaaccaaactaaataatcttgcaccaaatcctctttttaaaaactggcgtaatataaaaaaggcccaaaccaatctcctttccaaaaaattccccacccttattggaaaatgaaaacccccctttaccact

SEQ ID NO: 67944 - DNA, 496 bp, Oryza sativa
  Clone ID: PAT_MRT4530_68755C.1
aaaaaaataaaaaaaaaaaaaaaaaaaaaaaaaaaaaaaaaaaaaaaaaaaaaaaaaaaaaaaaaaaaaaaaaaaaaaaaaaaaaaaaaaaaaaaaaaaaaaaaaaaaaaaaaaaaaaaaaaaaaaaaaaagggggggccttttaaaagaaacaaaggtaacggaccaggggaaggggacgttaaagttttggggggggggaccctatttttaatcaccgggccgtggtttaaaaagggggggcggggaaaacccggggggttccccaactaaatggcgtgggggcagatccccttttcgccggggggggtattagggagggggcccgaccggatggcctttccaaaagggggggcgccctggggggggaggggaacgccccctgggccggggcattaacgccggggggggggggggttccgcggagggggaacgttaccctggcgggggccttggcccccggtccttgggttttttgggcgtccttttggggggg

SEQ ID NO: 67945 - DNA, 323 bp, Oryza sativa
  unsure (1)..(323): unsure at all n locations
  Clone ID: PAT_MRT4530_68756C.1
cgtccgnattcccggtcgcccagcgtncgcccgcgtccgaacagtagaatctcttatgttgtagctgcacaccaccacacaccagaacaactggcgccgccacgcccctatcaatatggaggacccggttaactggggcgcgccggccgacgatatggccggcgggcaccttgaccaggcgcagcgcatggtggcacaccaccgcgagcgcgtggtcaagatccagggcgccaccctacgggttgctctagcgggcgccgttgtccaggcagaggacgcgctacgtgaccgcggagagctcgaccagctaccgctggcacacc

SEQ ID NO: 67946 - DNA, 465 bp, Oryza sativa
  Clone ID: PAT_MRT4530_68757C.1
atggtgaagctgacaatgatagcacgtgttactgatggccttccgttagtggagggattagatgatggtcgggatctgaaggatgctgacttctacaagcagcaagctaaactgttgttcaagaacttatcgaaagggcaacatgaagcatcaaggatgtcaattgagactgggccttacatcattgagggccgtgtgtgctatttgacaatgtgtgaccactcttatccgaagaaacttgctttccagtacttagaagatctcaaaaatgaatttgagagggtcaatggcaaccaaattgaaactgctgcaagaccatatgcttttattaagttcggcccttatttgcaagtatgcccctgttgccattgtgattgggatagtactgatgctcttttgggtcaagaacaagatatggtgactgagagtaacagtcaggcctcctgttacggtgctggaacttga

SEQ ID NO: 67947 - DNA, 1761 bp, Oryza sativa
  Clone ID: PAT_MRT4530_68758C.1
atgcagccgccgccaagaacccgcgatccggccatcgccatcgccggcgacggcgcggcgcggcgaggtcccccgccgatgcagccgcccgggccgccgccggtaaggcatggtccgccgccggtgcggcagcagcacggctactactacgaggaggagcagaggccgctgcacctgcacgtgaggacggcgaggtcgtcgtcgtcggcgctggcgtcgtgcctcgtggcggcggcgttcctggcgctggcggtgggcggggcgggggcggcgctgttcgtgctgttccggccgcgcccgcccgacatcgcggtggcggcggtgcggctgccggcgttcgcgtccggcccgaacggcacggtggcgttcacgttcgagcagacggccgccgtgcgcaaccccaaccgcgcgccgctcgcgcacttcgacagctcgctccgcgtcgcctacgccggcggcgagctcggctccgtctacatccccgccggcctcatcgacggtggccgcaccaaggacatgtccgccagcttcgccgtcccggcgttcgccgcggccaccccgccgtcgctgcctcaggagcagatggccgccgccgccgccgcctcggcgcagcagcagcagccggcggcggcggcggcggtgatggaggtcgactcgctgctggtggtcaaggggagggtgaccgtgctgcgtgtgctgacgcaccacgtcgaggcggccaaggtgtgccgcgtcggcgtctcgccggtggacggcaagatgcgggataagccatcaaagcatctgttgagccagaatcgattcggggtgcacggagaactcaagttccagcaccgtaacaggaggcctgactgttactctcagtcaccatatcttgttcttgacccaaaagagcatcagtactattccaatcacaatggcaacaagggcatacttgcgaataagggcctgaaaaccattgaaggaaagccttgtcacagacgtgaaaacaggtgaagtgggtaaactggttcttcgtcttctgtatgaaagtgtcaaacttaataaaagcatatggtcttgcagcagtttcaatttggttgccattgaccctctcaaattcatttttgagatcttctaagtactggaaagcaagtttcttcggataagagcagtcacacattgtcaaatagcacacacggccctcgatgatgtaatggaaaaggtatggcccagtctcaattgacatccttgatgcttcatgttgccctttcgataagttcttgaacaacagtttagcttgctgcttgtagaagtcagcatccttcagatcccgaccatcatctaatccctccactaacggaaggtcatcagtaacacgtgctatcattgtcagcttcaccattttggatatgcagcgtgaaatgaactagcataggcaatctgaaagtgccaccttcaaaatttcgaatcgggccgcgaggtgggggcgccggtgggatgagacggccgcgtcgccgcccccggcgaacccgctcgccggcgatcgggggaggagaggagcacgtccgccgccgcttcctcccttgcacctgtccgtcagagcgtgagtgcgggagagggtgagtactctgcttcgcccctcgccccctcatgtgcgacggtgtgtttttcacgtcatccttctctcccgcttcaaccatgaggacatgggtaccttagtactttccatgccattcatgcatccggggtgcaattcctcctgcagcccgggggatccac

SEQ ID NO: 67948 - DNA, 6420 bp, Oryza sativa
  Clone ID: PAT_MRT4530_68759C.1
atggaggagcctgacggggaagcgcgtgggcgggaggatcatgctgcggttgggcggttgggaggagaggagggtgctgttggcggcggtggcctggctttgctcgctgttcctgagattggcggtgagctcggtgatggtgggaaggtctgcggtggtcaggagaggcgcctgcccacagaggaagatggagtccgagataatggaggtggctccgctgcagaattggtggaatctgctgtgaatgtttctaccccttttgaaggaaggggtcagattggtggtgagaaggagtctagtatgcaggaggggtctatgaacatggcgggagagaagcatggcagttatcatgtggaatctgctgaacccagcaatttgcagacgtgtcatgcgcccaatggcggggtatcgaataagacattatttgctcccttcagcgaagttttctccagtgataacagccatatgcgttacttgctggacaaagcgacagaggggagcatttgtgagcatggtgatttggcggacagtaaagatgatttgggtggcgcaacggacgtaaagacaaacacagaagatttacagatggtttgcacgaaaccacattgtgatagcgagggtttgtcggatttgcataatgacagtgagcgatggccacaagtggttgatggggtgggatttacgataaagggtaataatgagctgaaacaagttgatttgataccaaaaattgaagctgaagtctctaggtcggtggaggatgattcaatcccttctttttctggtggtattgatgattctttacgcaaggcaggttgtgcgtgtgaaactctcaatgatatggggatgtctcatatggccaatggtgatttgtggtgcaatgttttatatgcccctcttagtgaaggatgccagtccaaggatgctcgacacatagcagtcatggggaacaaggtgacacaggggagtcaatgcgggcagggtgatttggcgtgtgatggaattgttttgcgaggtggggtagatgtagagaaaagtctagatgatttacagatgtgttccaaggaaccacaatgtgataacaagggctttccatatttgacagaatttggtgtccagcagccatcatatggcatgaatgtcatatgttcgaagacagatcctaaccatcagctggaaaaggatgaattgttgacaaatactagaggagagttctctagttctatccatgaggattcagttccttcaatttctgtgagctctgttgattttacttttgatggcaatgctggtcagattggtaaaacatctgagcatagagcaatcatggagaaagtgtcgcatggttcacagcgaggaggtgtactttcctgtgagagtaggtctttaaaggagtctcatgcagatgagaatcagagttccacattggaggttaagacatgtgaagagggcttacagacaggtcaagtggaaccatgccacagcatcgtagctttgtcggattcagggaagtatggcaccgacatattaccacgtggtggtgacggtctgagatcgatgactggtgctaaccatgagctggtaaaggatgattttcatccaaaaagtgatgtagtggtctcctgtccagtggatgaggcatcgattccctctaactataatagccccattgatgttcttttatacaaagaggatggtttagttggtgagatatctgaaaatagaattggtgtggagaaattggctcatgatttgctcggagaagttatgctttcatttgacagcaggcctcagactgaggcttctggagatgagaatcaacacttctggatggatgttccaaagggttcaactgcatctgtttgtgaagtagaaaatacaggcactagaagatcttgtgatccctgtgctgaaatagagtttccactccaacaaagtcgtgaaaagcatgtgatctctgaatcccccccagagagagatctgactagttcgtcccataacctaccttgtgaaaatgaaccttgttatagtggcagggaaacacccgccttctgcctaggccatcaagattctgctggtcttggactggaatcttcagactgtttggtacaagagctcaatacgtgtacttccactgatgacaaagcttgctctgttgattttgttgagaatggtaatggttctcataaccaaaaggaagtgccggtgattttcttcaggcggaggaatccagtaagagctgcctcttcaagaaattctaattttgagaagtgtgaccagataaacaaatcaggtaatagtacacgcaaatctaagaaggttgacagtgtaagctcattacttaaaagcaccatgattaagttcccaaacaaaaccacaaagggaagaagtggcatcaataggccattgaactcttctgcttggggcagcctacaaaagctaatggatggtttcaatcagaactgtggtccttcaacttctcgttctcatcaaacttgtttgggaaaagaaatatcaaatagaggatctagcgagaaaaaacagctatctattcggaaaattcgaacttcaagatgttcaaaatataaaaacacatcactttctgatattggatatttagcaggtgaattgaatggccaaccgacctgttcagtgaggattgatactaatgtttcttctgatgcattgttcaattctccgaatggtgctcacaaagctgcacagtgtgttgaaggtaatcatactctaaaattaacatctagcctgactgacacacaacagtttggcttggagaatgttactcaagaaacatgccctgggtacatccatggagagtgtggtacttcaacttctgaacgttctctaaataatatagttgggttttcaccagactctgttttggatatagcttctgttacatgtgaaagcaacacttctgcaacccttgatgttatagtgcatgaaaacccatcttgtcctggtggattgattggaggtggtcttcgtgcatctgctttatctacttctcactgtgaaaatcatcatgcttcatcattgatggatttggagcagcaggtcaaaactgtgagggagaacgacatgggagaggaagatgtcattccatcacatgccatgatgtacaatgatattggtgaaggaaagcaaactttagcgaagtccaatacgatgaggaaaggtagaaatgtgggaaagcaggaatgccgaaagaaagatggaaagaagggaaaaaacataaacaaaaatagaagttccaccaaaatttcatctagtgaagcttcaaaactcgtgtccttttctaatgattcaccttcacttgatccatctgagttgctgcttcatacgagacctccaaagtttggttcttgttctaaggtcgtaacttctgccatacatgatgttggtatgcatggatatgacaatatgcgtccttttggaattgacaatgatgacgaagggagtgcatttgacaatgtgaaatcactaaggcgcaagaaaaaggatagtcatggaggaaagaagggtaaggtgcgggatccacatgggaagggcagaagcaagaagaaaaatatagctgataacacctacggtgatcttattcctgctgctgaacttgtattcaagaactcttctgccgtatctgttgaattacctgcagttgttgcttgcaaaactgatggtgcatctgtaccaccagcacctgcttgggtttgttgtgatgattgcgaaaaatggcgctgcataccaactgaactggcagataaaatctcaaaagaaaatctcagatggacttgtaaggaaaacgaagataagacatttgccaattgctctataccacaagagaagacagatgatgagatcaatgcagagcttgggctttcagatgcttctgctgatgaagctaatggcgatggatcaaactcgaaagcttctggagaaccaaactttgcacttctcaggtcaaacttgtttctacatcgtaaccgcaggacacaatccattgatgagttccaaaggcgcacctatgcaaaacttggtaagttccatactggtaaaaagggctatggattgcaattgaaggaagatgtatctgaaggacgattcctcattgaatatgttggagagggaaacatgctctgtttaaatgttgattatgttggtttcacattcgttgtccttgatataacggcttatgaatcccgccaaaggtattatgcctctaaaggccagaagcatttctatttcatggcacttaatggtggtgaggtgatagatgcttgtactaaaggaaacttgggccggttcatcaatcatagctgcagtcctaattgccgtacagagaagttatattcttattttgagtccattaaattactttttccttgtgagcagtggatggtcaatggtgaagtctgcattggaatatttgctatgaggaacatcaagaagggtgaagaattgacgtttgattacaactatgttcgtgtatctggtgctgctcctcagaaatgcttttgcggtactgccaaatgccggggttacatcggtggtgacatatcaggtgctgatatgattactcaagatgatgctgaagcagggactttcgaacctatggctgttcaggaggatgctgaggaagtacttggtgcaaatggtttgtcctctcatggcacacatctagatattgtcgaccatgaagcttccactaaaacagaagattcaaatgattgcccatctgtgaacccaccagagttagaatctgagcaacaaacttcaggaaccttatttgacacaagtgagccagaaaattccttagaagcattgagcccacaggatgatgaagatgtcgtccgcacacctgtccatgtgtcccggacagttgagagtacgtcgcggcagtttccagaatatggtactcggtcatcagaaattttgcaaagggctccatgcacactggatggaccaaaggttccaagcacaacaaatggaattccgcctagttccgatttggggagccactgggtaccaggtttccacgctaataagaaaaccaatgtaaaacatcatttgattctgaatccatcatcagctcctattgacagtgagcacattttgggagggttacatatgactgttaatgatcgctacctgacatgcacagttgaaggaagattgaacagcttgcttgatgtaaatggaggtattagcaaacgaaaagacgcaacaaatggatacttgaagcttctccttgtgactgcagcggaaggtgacaatgctgggggcacgtctaaaagtgtaagggatctttcgttaattcttgatgcacttctgaaaacaagatccaattctgtcctgttggatatcatcaataagaatggactgcaaatgcttcacaatatattaaagcagaataaaagcgatttccataggatacctataataagaaagcttgtgaaggtacttgagtttctagcttccaagggcattctgacatctgaacatataaatggtggtcctcgatgtgctgggacagaaagcttcagggagtcgatgttgggcttgttaaggcataatgatatgcaggttcaacagattgctcggaactttcgtgatagatggatccaatgggcccctcgaaatatttcaagaaatgagccaacagaatattcacgtgcatccatatctgcacacgatattcatgtcatttcaacagctggtggatcttttccaacttcagccaacactatggattggaaatccatcagaagaaaacgcaagagccgttgggattaccaaccagatgaccactataaaatgggtggcctgaaaattcagaaagtttgtcctgtacaaagtgagtttcggactggctcggtgggaaataagttgcatggtaattggggaacgaacagctcccacaatgatgttcctgtggtgggaagttcagccgatggtgcagatgatgaagcacctcctggatttgagtctcagcaggaaagtcggcctggacaagcttgtttagaatcgggggtttctccaggattatacttggagagcattttggaaccccagaagttgaaggagggccatgtcgcaaaaactggaaagtcgcacctggtgtgcctttccagccctttccaccattgccgccctatccaagagggagtccttgtccttccactcagatgtctcagcatgaacacaacagtttgggacattgtggcagggctgcaaatagagacgggagaatacataggaattggagaaatggggcgagaacaaaatttccatacaatcatcaaggacggagatttcctaacaataatcaaagattttgaaagttgcctgctgcctccaacgtctcaggagcagggtgatccaggacctagaggcagggagtga

SEQ ID NO: 67949 - DNA, 2913 bp, Oryza sativa
  Clone ID: PAT_MRT4530_6875C.1
atggtgcctcagatggttcctgagcacttggtacgcaatacccagccgaatcttcataactaccaagggggaaacttgagctatcaatatcagcctccttccccgcaagcccaatatcggccagggggattggctcagccccagtttgcatctcagtttggtcaattcgagcccatgcagcaacaaccacaaggagcagctcagcaacgaccgtgggccgatgtgattgccgatgtaatgagggagcaatttgggcttaaaccaaaagaaactagaagtttgtatcggcagccttaccctgagtggtttgaaagagttcctcttcccaatcggtttaaagttccagatttctccaagttttcgggacaagagggcgtgtcgacttatgagcacatcagccgatttcttgctcagtgcggtgaagcatcggctgtagacgccttgagagttaggttgttccggttatttctgtccggatcagcttttacttggttttcctctttgccatatgggtcgatcaatagttgggccaatttggagaagcaattccacagctatttctacagtggggtccatgagatgaagttgtccgacttgacagtgatcaagcagcggcatgatgaaaccgtgcacgagtatattcagaggttcagagagatgaggaacaagtactttagcttgagtttaactgatgctcagttagccgatttggccttccagggtatgattcctccaatcagggagaaattctcatccgaagacttcgatagcttatcgcatctaatacagaaggtaaccttgcacgagcataggtcggcggaagtcaggaaaagctctaagaaagttaatcacgtttgtccatatatgtattggtcggatgacgaagaagatgattctgagatagctgcagccgaatgggtgaggagtaagaaagttataccatgccaatgggggaaaagtcatgggaaagaggagaagtatgactttgatatcaccaaagctgacaagatttttgatttgctactccgagaaaagcagattcagcttcctgctggtcatacgatcccatcggctgaggaattaggcaagagaagatattgcaaatggcacaattctggttcccattctactaatgattgtaaggtctttagacagcaaatccaggttgccattgaagggggaaagattaggtttgatgattccaagaagccgatgaaggtcgatgggaatccttttcccgtgaatatggtgcatacagctggtcaagcagccaatagagcccatgcaaagggttttcgagtaaattcggctaagattatcaacaagtatcagaggaaatatgataagcagcaggaaaggcattacgaagaatacgacgatggttttgatcctcatcggggttgtgaattcttcagattctgctggaacgaaaggatgaggttgccatctattgaaaattgccctggatgcagtgatatcatcgagggctcgagccgatcatataatagggataatcggctgaaacaggcaagactccctgttcatcagagattggctgatgaggtgaagaggttgggaaaaggaaagagtgttatagcggcaccgattaacatggtctttacattgccagctgaattcgggattgaccaggccgatgttgacgaagtggaagaggagtcggctaagttggtcctgttgccagaacaagcagtattcgagaaacctgaggggacagaaaatcggcatcttaaaccattatatataaacggctacgtcaatgggaagccgatgtctaagatgatggtcgatggtggggccgcggtgaatttgatgccttatgctacgttcaggaagctgggtaggaacgccgaggatctcatcaagacaaatatggtgctcaaagactttggtggtaatccatcggagaccaaaggtgttctaaatgtggagttgacagtcggcagcaagactattcctaccacctttttttgtcatcggtggaaagggttcgtacagcttattgcttggaagggattagattcatgccaattgttgcatcccttcgacagagctacaagagatgatcgtttgggatttcttgttcatgagagggggattgaggtgactcaaaggagcgttaatgcgatcaagaaaattcagcccccagaaaataagacagagctacaagagatgatcggcaagataaattttgttagaaggtttatttcaaatttgtccaggaggttggaaccttttacacccttattgaaattaaaagccaatcagcaattcacttggggggcagagcagcaaaaggctttggataatatcaaggagtatctcagctctcctcctgttttgattcctccacagaaagggataccgtttaggttatatttatcggctggtgagaagtcaatcggctcggttctgattcaagaattggaagggaaggagcgagttgtgttttatctcagtcgacggctcttggatgctgagactcggtattctcctgtggagaagttatgcttgtgcctgtatttttcgtgtacgaggttgaggcattatctgttatctaacaagtgcactgttatatgcaaagccgatgtagtcaagtatatgctgtcggctccaatattaaagggacgagttgggaagtggatattttccttgactgagtttgatcttcggtatgaatcaccgaaagcgattaagggacaggctatagccgattttattgtagaacatcgtgatgagtattacaatcttatggctgatgagagggaagatttggttcagtcacgattgcgagcccttgcgaaggttactaaagataaggaacgtgttgctcggcattgtaataagaaagttgtgtctaaagatttttggagggagaacttgtatggaagctga

SEQ ID NO: 67950 - DNA, 773 bp, Oryza sativa
  unsure (1)..(773): unsure at all n locations
  Clone ID: PAT_MRT4530_68760C.1
gtcgtcgagatggtcgccggtgccgactactctcgtcttgctgctgcggagttctccgtcggatttcttctgaacggcgggctgcgacaacggcaggttccctcccctagccactggctggggtgctattggttttgctcaagcaaaggttgcggcggcctacttcgttttctccggcgagcccctttcaagaaaagcggtcgtcttcctaatctccggcgaaacttcctcgagcggtggctgatgtggttgattttagctaggatgacctcaacctccaaggaggcccctttcgggtatggttgctggctttctttgcagttcaccgtgtttgttggttcttcttcgttggaggtttcgatctagctattttccttgctatggctgcggttgtgttgatcttgtgaaagaattttggcggaaatcttcggtggtgcggctgatgatccaatttacttgccggtgcttcaacctccacatacgggaggccccttcagggttcatgcacaggcactatcttctgcagctggccttgtttcaagctctgccagattcgagctccaagaaactaccatcaacactacaggcagctcaaagagaaggacttgattgctttttaatattttctctaggtccttttctacaaaatgatctcaagtgtaatttnacctttctacaggggttcatgtgcaaaactggatgtactccagtgatgtgtgcttgttgcactggtaaactcatgtttttctatgatatactaataataaaacctg

SEQ ID NO: 67951 - DNA, 552 bp, Oryza sativa
  Clone ID: PAT_MRT4530_68761C.1
atgaggatgcaggacgagcttgcccgcaccaagaccaggtggcccacccccgcccagcttgagatgatagagagaatgaaggaggaggaggaggacgacgaaattgtagcgtcggacaatcggacgccatccgtggtggagacgaaggtgcaggtgccggagatcgtcgaacagaacgtcgttgaaagagatgagcggctgcgcaccagcgatgacaacgacgactacgaagacgaacccatagtgaggagagacgggcacggcggcggcggcggcggcaggagggcgtacggcgacatcggcgggtaccacggcagcaagggcaggtggccgcgcgagcccgaagtggagaagctcgagagggagaaggagatgctaaagtatggcattatgtccaaaccgaccaccaccagaaaggtgaagatcgtccacaggatgatccggccgccgaaccagtatggcgccgccggcagtgcaccaccaccaacagcaggaggaggccaccagccagctaccagtagctacctacggcccatatactaccactactag

SEQ ID NO: 67952 - DNA, 515 bp, Oryza sativa
  Clone ID: PAT_MRT4530_68762C.1
gtagcatgctcaccccccataagatttattgcaataccatgttctgagtacaatacacataaactacaaaactctatatgaatcttaactgctccttgcacataaaaagcaatatggtcggaaaaaaataatgctaggtaaatttaacaaacagaaaacaaaagaatgtcaattaagaaataaaaagtgagtagatcaacccatacctcatcaatggattgtgtcctgcggttacgatgtagaaacaagtttgacctgagaagtgcaaagtttggttctccagaagctttcgagtttgatccatcgccattagcttcatcagcagaagcatctgaaagcccaagctctgcattgatctcatcatctgtcttctcttgtggtatagagcaattggcaaatgtcttatcttcgttttccttacaagtccatctgagattttcttttgagattttatctgccagttcagttggtatgcagcgccatttttcgcaatcatcacaacaaacccaagcagg

SEQ ID NO: 67953 - DNA, 432 bp, Oryza sativa
  Clone ID: PAT_MRT4530_68763C.1
gttcattgtgagtttcggactggctcggtgggaaataagttgcatggtaattggggaacgaacagctcccacaatgatgttcctgtggtgggaagttcagccgatggtgcagatgatgaagcacctcctggatttgagtctcagcaggaaagtcggcctggacaagcttgtttagaatcgggggtttctccaggattatacttggagaggtatcaacataacttgactatttcatacgggattccaatcgcttttgttgagcattttggaaccccagaagttgaaggagggccatgtcgcaaaaactggaaagtcgcacctggtgtgcctttccagccctttccaccattgccgccctatccaagagggagtccttgtccttccactcagatgtttcagcatgaacacaacagtttgggacattgtggcagg

SEQ ID NO: 67954 - DNA, 401 bp, Oryza sativa
  Clone ID: PAT_MRT4530_68764C.1
aaaaggatgagagccctagaatttacaagttacaactggtgacatgtgatatctctgcagtttattaaaaccatttttgttgtatgtgttcaccttttcagataaagtttttggccctgctactactactcgtcatgtatatgatattgctgctcagcatgttgtaagtggtgctatggaaggaatcaatggcactgtttttgcgtatggtgtaactagtagcggtaaaactcacaccatgcatggggaacaaaaatcacctggaattatcccattggcagtgaaggatgttttcagcattattcaagatgtaatctgttcatttctctgttcacctcagacacctggacgagaatttcttctacgagtttcatatcttgaaatatacaatgaggtacttc

SEQ ID NO: 67955 - DNA, 559 bp, Oryza sativa
  unsure (1)..(559): unsure at all n locations
  Clone ID: PAT_MRT4530_68765C.1
aaacacaccagaggatataagctaagttactaagagagttaggctgagaaagagatattacagacaaaaacgacgacgtaggaagacaatagacccagagagagagaacaccagagtagtagcagttgtcacagtatcagtgatttgttggttattaccaatcttcttccttgttttgttgtcacactgtcttctaattcagtagtaatgttgctgatggtggaattggtggtgttgatgatggtgtgggtggtaaactggaggagctggagcaggaactggaccattacaataaccgttgtacgctgggtaaccgataggagagccttggtatgagcctgggatgatctccggagagtatggataaggtgggcttctgttgctgtagactgttgtaggtggggatgggtaagctgctggtgaagcgtattgaggagagtgagagggtgatctgatgaacgggaaggaagagacgtatgcgtttgtgatacgcccggctttggctgntggcattggaccgttgtagctggcttgggttcttttgttggcaggaacagct

SEQ ID NO: 67956 - DNA, 740 bp, Oryza sativa
  Clone ID: PAT_MRT4530_68766C.1
ggctgcaggaattcgggcaaacgacgccctcctttccctcccttaattgtcggggcgctctcgccgcccgcgcgccactgcgctgctacacgctacgggataagccaagcttgcttgctttcgtagtcgctttgctcgatcgctcctctcgatcccatcctagattccactcggttctgcttctgctccttcgatgggttcccgcgacggatggcggctactcatcctcctgctcggcttcctgctcgtggcgccgacttgccgcgctcgggaggcgcagccgctgccggtactggaggaagaggaggtggtggcggacgcggcaggagggcgtggtggcgcgggcgctgctgccggcggaggaaacaggcgcgcgccggtgcggcacgagctgtcgctggacttctacgccaagacgtgcccggccgtcgaccagatcgtcggcaacgtcaccgcgccgcggttccgcgacaaccccgccgccggccccgccgtgctccgcctcttctaccacgactgcttcgtcgaagggtgcgacgcgtccatactgatcgcgccgacggccaacaacggcggcggggcgccgagggtggagagggacatggaggagaaccggaacctgccgcaggaggcgttcgacacggtggagatggccaacgccgccgtggagaaggcgtgccccggcgtcgtcacctgcgccgacgtcctcgcgctcgccgcccgggacttcgtccacctgg

SEQ ID NO: 67957 - DNA, 237 bp, Oryza sativa
  Clone ID: PAT_MRT4530_68767C.1
atggccaatgtggccaggcaagatcgttggaagaacgaaccgaccgatgtccagcctccgtttttgctgctgctgctgctgctgctgctgctgacgatgatgatgaaaacgaagggaatcgccagtggaggcctcgatctgatccaaggtgtggagattggtgagctggagttgctgataggaaagataatggagttcagtgctgggcttcgccagagtagaacaggtgtagggtag

SEQ ID NO: 67958 - DNA, 189 bp, Oryza sativa
  Clone ID: PAT_MRT4530_68768C.1
atgatgcccgcagacatcccgaatcacatagattcgtttctgaccactcaggtcatccatctgccacataggctgattctggttacgattcccacaccacaacaacttttcaccaagcacaagcaaacaaatctacgcaacgggaaccaccttacatccgcccattaccgtgggcacgctgttcgaaca

SEQ ID NO: 67959 - DNA, 108 bp, Oryza sativa
  Clone ID: PAT_MRT4530_68769C.1
atggcgcactcaccttctgaagttcttaaggttgcatatgagacctgcaagtactgggtagctgccctttctccttccaagtctaggagcaagagtgccaacgggtag

SEQ ID NO: 67960 - DNA, 762 bp, Oryza sativa
  Clone ID: PAT_MRT4530_6876C.1
atggctgttctcaccagaacaacgttgatcgccttcttctggctcggagattccaaatggacattgatagattcaaagctagaatacccagtgacctgtgtcgtgcactgtcgagacagttttgtcgctattggctccctcggagagatctccatgtttagtggtaataacactgatggtgtggctcttctcacggcgagcccgtcactgttgatgcctccaccggcacatatctgccaacgcagctacctggacatgaacaacaagatgcacctagttagcaccatcttgcgggtcagctcactcaaagagatctccatcttcagtggcagtaacagtgatggtgttgctcctctcacggcgagcccattgctgttggtgcttccatttgcacacatctaccaacatagctacctggatatgaatggcgagcgatatctcttcaatgggtgccattttgcatgtgaccagctggacaagaattcatggtgctccaaggtggaagatgtcgaagacacgtcattctttgtgtccaacatttcaatatccaattggaaccgcgtctacttatatgagcccatgttgtgtcaccaagatcaagaagacactaacgaccgtcatctacagatggttgacattaccgatatcagatttgccagtttgcagccccaccattcatgtccatgcatttcaccggacaccaacgtcacgttctaccccgccatgaccagaggtggaccaaggattgggccacaattctaa

SEQ ID NO: 67961 - DNA, 612 bp, Oryza sativa
  Clone ID: PAT_MRT4530_68770C.1
atgggggaatttttcacccgtgagcgggtgtgggtattggagtggggacatttgatttccatgggtgtgggtatgggggtgacgactgatggggaaaagggcagcgtgtggctggcaagaaggagttgggtagcggcgtcgaaccagggaagttgttgggaggtggggagcatcagacaagaacctcgtcacgtcgctgtcactagtggcgcgcacacaagccaaatcctatccggtgatgttgcactctcagtgctcgcgaggcttgagttcttgatggcctccgcgtgggggaggtcctctccagcgccattctcaaccttctcgccactcgccaacctcaagctgttgtttctcattgacaactcgatgtacggcgcagtaccaccgtcaatgggggaattagtgcggcctagaacggctgggctcatcctcggcggccgctgcggcgcgctcggcggagtaccgtgcccccgaggctccctcgccgtcgcggctgtgggcggctcctctcccttcgcgttccacccttctcccttcaaccgtgtcctgaagaagataaggaaaagagggggagaaaggagaaagaaagaattggccgatgacatgtag

SEQ ID NO: 67962 - DNA, 1800 bp, Oryza sativa
  Clone ID: PAT_MRT4530_68771C.1
atggcgtccccgtccccggcggcgcggccgcagcggacgcccgacgaggtggaggacatcatcacgcgcaagatcctcctcgtctccctcaccccgccctccacgcccaacccggccgtcgcctacctcgagctcaccgccgccgagctcctctccgagtcgcgcccgctcctcgccctccgcgacgcctccgagcgcctcctcatcgaccgcctctccctcccggaccagcccgccgggtccccctcccccttcgcctacctcgtctcctccttccgccgcgccgccgacgaggcccgcaagatctccaccatccgcgacgccgccctccgcgcgcgcctcgccgcctccatcgcgcacctccgcggcctcatcctctcctacgcccgcatcgtcgccgggaaccccgacaccttcccttcgccgcacaacgcgccccaccccgccgccgagctgctcgtcttccacctggccgaggccgccgacccgctcgaccctaccccggcccctggtgccccgccgccgccggggttcctcgacgaattcttcgccaacgccgattacgagaccgtcgagccggccatgggcgagctctacggccgcctcaggcaaagcgtcgagaaggtgtcggcgcttggcgacttccagaagccgctgcgggtgctcaggcggctggtgggaatccctaactgcgcaaaggctctggtgaatcaccccaggtggataccgaagaatcaaattatgctcattggggaagggagaatcatggagatctccagtgtgctcggggcgttcttccatgtcagtgcgatccctgaccgcgagtttgcaagcaagcctgatattgggcaacattgcttctcagaggcatcttcacgcagaccagctgatttgatgtcatcttttacaacaatcaaaagcgttatgaataacttgtatgatggccttaaggatgttcttcttgcgctgctaaaaaatatggatactcgagaaaaggttctcgagtttattgctgaagtgataaataaaaatgcaggcagatctcgtatgcaggtagaccctttaaagagtgccagctcaggtatgtttgtgaatctcagtgccgtgatgctacgtctatgtgagccttttctggataggatggagtctaagaaggacaagattgatgtcaattacctcttctgcaacgatagaattgatttcaagaatttgactgcaataaatgcttcttccgaggaagtatcatcttggatagagaacaggggctatgagcatgctgaagatagtgccagtggagaggctcgctttgttgaatcacaagaagcgacaagctctggcaacaatagcacagtttctctttcttctaaaggcgggtcacttgtgaattgctcaaagaaagagaatttctcatttatttgtgaatgcttcttcatgactgcaagggtgctcaatctggggctgatgaaagctctatcggatttcaaacatattgctcaggatgggaaagaaggccagaatawtgcaagcgacgtactgtttcaaaaaatgaagatgaacagatgggactcagggatcaaccggtttccgtttcttgctgtgtgtgtccaccgacggttccgtttctccattcacgccgaggaggcgaagaggcgaagaggttgggaggcacttgcggcgctagggtgcgacgtcacggggaggacagggaggggcgactcggccgtggggcagagggtccacctgcggcactgggggcgtagaaggcgggaggcgatgcggtgggtggtgaaggcgggctag

SEQ ID NO: 67963 - DNA, 891 bp, Oryza sativa
  Clone ID: PAT_MRT4530_68772C.1
atgtcgtatacaacacggacttgtggaccgctacaggctttgcgtcgacacacccaacgtcatggttgttcctccctcggcttcagtgacaaagaaacctacaagctgaacaaaataattacaaatccgagctaccttcggaatatctacgtctccgaaagataccgaaccatcatctgtctcattccgaaagcaaccagcatgaactgggtgagaactctaatgatactagagggcgcgatcaactcgacgaatggcttggcgccgcaagaaatagtacatgcagccaagaagcatctccgcgtgctaggccagtataaacctgacaagaggcttggtatattacggaattactcgtcggcgatcttcgtgcgcaatccgtattcccgtcttctgtccgctttccgtgacagactggagaagtaccccaatcggaatctgtcacatcgtaaatggtttaacaaaaatatctatttgaagttcgggaaccattctcccgcagagatgccggatcggtcgatgccaagcgagaaatacaacgtcactttcaaagaattcgtggacttttacctgagtgtaaaaaaaactcaggacgtgcactggcgagaacaatacaaagtctgcccaccatgtttcgattacgattatatcggcaacgtcgaaacgtacgcagacgattttaagcaaaccgttcagatatttgatgccacttcgaaagtgccacttgtgaaagcgccacatgcgaccaatagttctgaggatggcgtcttgcggaggtattatgaaacactgtcggatcttcaaatgaagaagcttgaaaagctgttgagttcggatatgaaattgttcggttattcgattcctcgagcaattcaaagaaattcattttaa

SEQ ID NO: 67964 - DNA, 276 bp, Oryza sativa
  Clone ID: PAT_MRT4530_68773C.1
gctgccaatgctgcttggcatatgggtgagtgggcccacagggctgaaatgtttctcgtctggatgatggggatgaaaacaagctccggatattggtatgaagaagctcgtgtatatgttgagagagctcggcggtgtttggctacagaacttgcagcattggtacttgagagttatgagcgtgcttataataatatggtgcgggttcaacagctttctgagctggaagaggtgattgattactgcactcttccaatggaaagtaccaatagctga

SEQ ID NO: 67965 - DNA, 346 bp, Oryza sativa
  Clone ID: PAT_MRT4530_68774C.1
atattatgtggggggtcaccgttttgtcgaggtctttgtttgtgttttcggtgctgtatgcggtggtgggagccgtggagatcccccgtaccgaggtgctcaagcgcctttgggcctacaacaagcagaacaaccggaaggaaccggcgggcaagagggccaccgaaagggaagacaaggggaaggctcgggggctggccaagagcgcaaaggggggctggagggcgccaagggaaaggacccccaccccgagaggggactgcccgggtaaaaggcgccgagagagcaggggtggcaaagggtgaacaagaagggggcccaaaaaagagggaatgtaggaaagagg

SEQ ID NO: 67966 - DNA, 912 bp, Oryza sativa
  Clone ID: PAT_MRT4530_68775C.1
atggaccatgagtttcatgattatttcaaagatgcaagcttgatggaacaaagaccgattgatacttcatcggtcacttgtgaaactattagttgtactgatttagacaacgaaaaagtagtgattcggcctagtcaagccgaatccacaaaaggaaaaagtgttattattggggatcctcggcttgacacaattaggatcaataatgcaaaggccgaagatcgtaaggttacaaaggatgaattatctagttccataaagaccaaaaagccgaagctcacttttgagatgcctatggctaagtataagaaaggattagccagtcaacgatttcataatcgaactaatgattcaaaaagaccaagatcatcttgtaggaagagatttggtcaaacaccaaaccaatcggagccatcaactataccaactccatacaaacctccggttgcgatgccatggtatccatatccaatgtcaccgtttggttatccttttatgtattacatgccatggatgcctcaattctctacgccatttcatcaaggatggaaggaatcaactaggtcagtaccaaatcattcatctaattcaagacaacactgtttcctactaaagaatcggtccggtggatcaaaggtgaaaaaggtgaagaaggtgtgggtgaggaaagaagccaaagcaccagaggtcgttgctatcaaggaggactctcaagatgttcatgtacctatcatgcaagcaaaggagatcgaagccgacaccgtaattgtcaaaagcggaggtctgaccgaggcattcggcagtttggatgaaattggcagaataacagaccaggggtggtctgaccggcattgcatggccggtataaccggtggcgaccggtggtctgaccggctctacatggccgtctga

SEQ ID NO: 67967 - DNA, 249 bp, Oryza sativa
  Clone ID: PAT_MRT4530_68776C.1
gaattattggggttttttttttttttatttttttttttaatggtttttttttttgaaaaaaaaaaaacgggcaattcacagggtaagagacattgcaaccccatcggaataacaggggtcccaagattggtttagaggtttcacaactacaaaaacaaaaaatgggtgggggccgaggaagactaaaaccggccccaaactggttaacaaggggggatcgacatggtagggcccgttgcgaggggtcgc

SEQ ID NO: 67968 - DNA, 2128 bp, Oryza sativa
  Clone ID: PAT_MRT4530_68777C.1
atgaaaggcggcggaggcggattgtggcggccgcgggtggagtcacgggggacgttcaggcggcggctgctgaccgtcaccgccggctgcttcctcttcttcatcgtcttcctcctctcctcccgccacgacgccattgttctcctcgacacccgtctgggagtgggacgtcccacggcggcgtcgttgcgctcgccggcggcggccgacaccctgccggacgccggctcagctggtcgccggaatcatgaggctccctcctcgccggccttttcttcaggggttagagaaacggtgaccggggtggagacgaacgacgacggcgccgagagaggggcggagccgggcggagcgcgacaacgccgcgccggccgccgcggcagccatctccggcggcgatcaagaagcacaaccaggttcgtcttccacaaccgcgcaccgacactatctacagtagttgacaagtgcacggactccaaatttgacctgcaattctgcaaaccgtggatgcggcgcacttacaggtacagcagccgtggatgcggcgccgggccacgacaaatccttgcggaccgccgccgccaccggaacgtctcctccacggcacgaacaaccagcattgatcatgcgacggcttgtaactctggatcttctccaggggagaccacgacgcgtgcggattcggtagaccagccgcgacatccgctgtgcgacttgtccgaccaccgcaccgacgtctgcgacctcgccggcgacatccgcatggacgccaacgcctcggcgttcgtcgtcgtcgtcgacccggcggtcggcgcggacgggccgacgtacaaggtccggccgtacccgcggaagggcgacgccacgagcatgggccgcgtcaccgagatcacggtgcgcacgaccgcggcgggggcgccgccgccgcggtgcacgacgacgcacgcggcgccggcggtcgtgttctcgatcagcgggtacacgggcaacctgttccacgacttcaccgacgtgatcgtcccgctgtacaacaccgcggcgcgctactgcggcgacgtgcagctcgtcgtgacggacggcaacgcggccacgcggcggtggctcgccaggtacggcgctgtcctgcgcggtctgtcgcgccacgtgccgcttgacctcgccgccgaggccgccgccggcggcggggaggtgcactgcttcgggcacaccgtggtcggcctgcgcgcgcacggggagctcatcatcgaccgcgaacgcagcccggacggtctcgggatgccggacttcacgcggttcctccgccgcgcgctctcgctgccccgcgacgcgcccacgcgccccggcggcggccacggcgacgccacgaagccccaaccccgcccgcgccttctcatcatctcccgccgcggaacacggcttctactcaacaccgacgccgtggcgcgcgccgcggagcaggtcggcttcgaggccgtggcaagcgagctggacatggccggcgcggaccacgacgacgtcgcgcgcgtggcacggctcgtcaactcgttcgacgcggtggtgggcgtgcacggcgccgggctgacgaacatggtgttcctgccacccggcgccgcggcggtgcagatcgtgccgtggggcggtctccggtggctggcgcgggcggacttcggcgagccggcggtggcgatggggctcaggtacatccagtacgaggtcgccgccggcgagagcacgctcaaggacaagtacccgcgagaccacgagatattcaccaacccgacggcgctgcacaagaaggggttcacgttcatgaggcacacgtttctgaacggccaggacatcatcgtcgacatcgaccgcttcaagccggtgttgctccgcgcactcaacagcctcgcgcgctaacctagggtctgtttggcagagctctagcgcaagtctaatggatgagtctagggtccgttctgcattcggcctaagcacgcaaacgtgttcggtctggcccacatgcgtcttgcccatcttgagacactgtgctagaaaaaattgacacagaatttacataaaaaacttttaatataggaacattttatataaaaacatttcaatccaaatttgaattgaagtt

SEQ ID NO: 67969 - DNA, 261 bp, Oryza sativa
  Clone ID: PAT_MRT4530_68778C.1
agtgaacacacttctttaggctcttatcccaccaaaaagaaactttattttgctgttggtgttgttatatatgtgctcttgttcaagtgtatgtcacatgtgtgtcttatggagaataattttttgtgtgaaaaaaaaaaaaaaaaaaaaaatagtaaaaaataaaataaaaaaataataaaaattaaattatttcggtctttgttgtattgacgatatttggtgttcagtcattttcatatttgtttttatttttttttt

SEQ ID NO: 67970 - DNA, 138 bp, Oryza sativa
  Clone ID: PAT_MRT4530_68779C.1
agataaagcacatacaagaagagtttatgactatatggtatagaggtacagaacaacagcttacattcaaaagtagatttaaccaaagagttcacttataataaagcatttgggcgaacacattatacattaatacca

SEQ ID NO: 67971 - DNA, 712 bp, Oryza sativa
  Clone ID: PAT_MRT4530_6877C.1
atggcaccatgtgttggggctgattgggctgtagaacttgaggctgagcatatggagcagattgcgcaggagcttgagccacattctggggtgcaatttgcgtctgaggttgtgtgtactgttggtactgaccatactgttgatactgctgcatgtaggggttatatccagggtaatgttgctgtaggtgccaccggaagtgaaggagccacagccacggtgcttacagtggttgaaccagctgaagcaactgcgatagcagaatctgttccagctctggctgtagttgtggatggtactgttgtaggagctgctgtaacaggcgtcatagggactgctgaggccactgcagaaggaccttgcacggctgcctgggttcctgttgctgatgactgcatcatactactgcggcgtgcgagggggaacgcgatcgtcgtcgttcccactccaaaaccctacctcgtgagcggggcgtcgtggagatcggcgccgggtggtagcggacgtaagcacggctccgcggccgggccgcgtatctggaggtgggcgggggcgatcccaaggcggcgtcggctagtcgagacgggagcaccgccgaggggcggcgcggcggcgaactccgccggcaagcggttgggggcggcgagggtggcggaggttaccgcggtatttatattaccgtacccccgcggtaaccgcgcggttaccggcg

SEQ ID NO: 67972 - DNA, 300 bp, Oryza sativa
  Clone ID: PAT_MRT4530_68780C.1
atgaggagagagaaggggattcaggtttacaggaatggcaggggcacttgtgatgccacccgctatgatctaggagagggtggtgagcagggggcaggacggaaaaggaggggcgcagaggttacctttgctgagcttgaagaacggactggtggtggcggcgaagagacagatcttgccggagggtataatttgtcggtggtgccggagttgaagatgggatggatggatggtgggggggaggggggcggcagcgacagatctcagttggtggtgactggggagctcaagtcggcatga

SEQ ID NO: 67973 - DNA, 240 bp, Oryza sativa
  Clone ID: PAT_MRT4530_68781C.1
atggcgatggaattccaggacatgggatttaatgcagatgctgtgggagggaatgaaggtatgggcgtcagggatggcaagggatatgcatttgtgcatattgctactggattttctcattgtcctcatcccctgtacctcaaacaaatgcaacaatgccgaagaggtcaccaccagaaacagaagcagaaggctctcgaatgcaagaaacttcaaaaaccgaaagatgagaccctctga

SEQ ID NO: 67974 - DNA, 573 bp, Oryza sativa
  Clone ID: PAT_MRT4530_68782C.1
atggccatggcaaagaggagcggcggcggcagttcggcgaggaggacgcgcggcggggcggcgaggacgcgcagcgagcaggacgtgcggcggggaggcagacgcggcggcgaggaggacgcgcggcggggcggcaaggaggacgtgcggcggggaggcagacgcgcggcggctcggcgaggaggagcggcggcggcggctcgtcagctcggcgaggaggacacgcgcgccgctttgccgggatgttgctaccttgccaggaggagaaggggcgtcgtcagacggggaggagaaggggcggcgccaccgtcgagcggggagggggcggagtgggccggcggggacgagaggaggagcggcggcgtcttggcgaggaggaggagcgacggtggtggcagctcatcgagggcgacgcagcgtcgggcggggagggcggcgaccagtgtcaggcggggagggcagggagggcggcggccggcgtcgggcggggagagcggcggcggagccgggcttctcgtcacgtctctctccctgacagccctgccgctcaagtccctgagcggcgcagcataa

SEQ ID NO: 67975 - DNA, 1254 bp, Oryza sativa
  Clone ID: PAT_MRT4530_68783C.1
atgggatcgcgcggtgaccatggcggcggcggcggcggccgcggcgcggcgagggcgacgcagctcaaggttctcgtgccttcttccttccgcaagatgcgcatctgcgacgagctcgcggcgcagctgggcgtcggcgtcggcggcggcggcgcgccacgggcggcgacggcgcgcgtggcgagcccgctcggcaaggcctgggacgtcggggtcgtccgggacggcgacggccgagcgttcctggggcgcgggtgggcggagttcgccgccgcgcacggcctcggcgtggggtggttcgtggtgctccgccacggcggcggcgtgctcgccgtcgaggcgttcgacaccacctgctgcctcagggtgttcggcgctccccctgcagaagcgggcagggcaacagacacttcacgtaagccgcagttcttgacggtacttctgccgggtataatggacaagatgaggatccctgataagtttgtacgagactacatcactggagagaacctgaacagcaacatggctatcatcttaagtcccctcggcaaatcttggcgcgtcgagctcgacaaggatcaatcgggcgtgtttttagggggtggatggctacaattcttgtcattccatggtatctctcggggcgacgtcgtgatcttcagtgtttttgggcccaatggacgccagaaagatttcaaggcaaagggcatcagcatttatcaaggtactggagagcaacaggaagcaccttctttttctagaaggaaatgtaataacaagaagaagagtagatttggtgaagatgatggaaaccaacaggaaatgccttgcagtagaaagggcagcggcaacaaagggagaacaagtgacagagaaacaaaaaggatgagaaaaaccagatctgtctacgagattggaccgcgctcttggataaagaaggagatcaatgaatatgttcttgaaagatgcattctctctctcgcaaggaccttctgcgagtcgatcggtctcgtagaggagagcagcatcacgctgatgatgatcgacacgacatcaacgcaaggagatcaaggaggaagcagcagcagcagcagatcatgggaggtgaccgggcgtcggtacaaggacgcctgctacctgctgggagccggctggaggaggttctgcgaggacaacggcgtcaggtccggcgacgtctgcgtcttcaccgtcctcgacaccaccctgtggcgcgtcgacatcgagcgttgctga

SEQ ID NO: 67976 - DNA, 1215 bp, Oryza sativa
  Clone ID: PAT_MRT4530_68784C.1
atggccagtgccattggacaatcgagacaaacgtttcgaacctttgaatttttcaggaaacttgtgcctggagaaataattggccaaaaacatgtgaggacgcgcctccttcgaactcgaacctcaccggcgaccagctcctcggcgacctcctctccgccgcgttcagctggcaatcatgccggagccggtacgagttcgccggcgcacaagccttccccctacctcgtcgccaagctccgcagccacgaggcgctccaggtgcggtgcggccccggcacggcgccgtacgagaaggcgctccggcagcccaagtccggcgatggcgccatcgctgctgatggcgacgacgacgactgccgctatgtcgtatccatcgtctacgaccgcgggctaggtaaccgcgtcatccccatcatctccgccttcctgtacgccgtcctcaccgagcgcgcgctcctcgtcgcgccgtacaacggcgacgtcgacgccctcttctgcgagcccttcccggggacgacgtggattcaccccggcggccggcggttcccgctccggcgcctccgggacctcgacggtaaatccagggagagcctcgggaccttgctgaagagcaacgccgtctccgtcgacgccggcgggaatgtttcttcgtcgtggtcgggccttgtctccgcccagcgcctcctccgtggcacgccgtggctgctgatgaagacggacagctacctcgtcccggggctcttcctcgtgccgtcgctccgtggcgagctcgagcggatgttcccggagaaggacgccgtgttccaccacctcagccgctacctcctccacccggccaacgccgtctggcacgccatcacggcctaccaccgcgaccacctcgccggcgccggccacctcgtcggcatacagattcgcgtgtaccacgaggagacgccgccggtgtcgcaggtggtgctcgaccaggtcctctcctgcgcacgcagggagaagctcatcccgttcccaaccgcagggacgacgacgaacacgtcgtcgtcggaccaggccgtgctcgtgacgtcgctgaactcgtggtactcggacaggatccgcgacgagctcggcggcggcggcggcgtgcaccagccgagccacgaggggtggcagcggatgggcgacacggcgcacgacatgagggcgctgagcgagatgtacctgctcagcacctga

SEQ ID NO: 67977 - DNA, 2141 bp, Oryza sativa
  Clone ID: PAT_MRT4530_68785C.1
ttttttttttaacttctaagattatttcttgccattatatcattacatctgcctagattattgattatttgtggtgtacaatgcatgcgcctttttgtatttttgtggaacatctgaacacatgttctactctatacaattcagtgatctacagttttacactaccactggctctggctgcttccattgacgagctggatgccccagctgacgtcctcgcagcgccgcacgtacggcaccaccttgccaatgtcgtcgtagttccgcctcgccgcgcactcgtagtacgacggcgagtggaagcacggctccggcgtcgccacccgcgcgcacggcgggtccggcaccgccgtggccgcctccttctcccaccacggccgccgcggcatgatccacggccgcaaccccgcgagcccctgcgcgacgtagccgaaggtggagaagccggtggtgagcagcgcgtcgcaggtgctgagcaggtacatctcgctcagcgccctcatgtcgtgcgccgtgtcgcccatccgctgcaacccctcgtggctcggctggtgcacgccaccgccgccgccaccgagctcgtcgcggatcttctcgtagtaccacgagctcagcgacgtcacgagcacggcctggtccgacgacgacgtgttccctgcggccgggaggaggttctccctgcgtgcgcaggagaggacctggtcgagcaccacctgcgacaccggcggcgtctcctcgtggtacacgcggatctgtatgccgacgaggtggccggcgccggcgaggtggtcgcggtggtaggccgtgatggcgtgccagacggcgttggccgggtggaggaggtagcggctgaggtggtggaacacggcgtccttctccgggaacatccgctcgagctcgccacggagcgacggcacgaggaagagccccgggacgaggtagctgtccgtcttcatcagcagccacggcacgccgcggaggaggcgctgctgctcgtcgcagtagaacagcttgtcgtggtagtcggcgccgccgtcgaggtggaggtacacgtacggcggcggcggccggcccgaccacgacgacgacgtgctgccgttcacgccggcggcgacggagacgatgccgttgctcttcagcaaggctcccaggctctccttggacttaccgtcgaggtcccggaggtgcaggagcgggaaccgccgaccgccgtcggggagcagccacgtcgtccccgggaagggctcgcagaagagggcggcgacgtcgccgttgtacggcgcgacgaggagcgcgcgctcggtgaggacggcgtagaggaaggcggagacgatggcgatgatgcggttgcctagcccgcggttgtagctgatggagacgaggtagcggcagtcgtcgtcgccatcagcggcggcggcgccatcgccggacttgagctgccggagcgccttgtcgtacggcgccgtgccggggccgcagcgcttctggagcgcttcgtggctgcggagcttggcgacgaggtagggggaaggcttgtgcggcggcttcctcttgtggtagccggcgaactcgtaccggctccggcatgactgcgggctgaatgcggcggtgaggaggccgccgaggagctgatcgtcggtgaggttcgccgaagttgcgccctctgaaccggcgagccccctctcccccacagctggtcttctctccctcccctcgatccctgctttcctcctcctcaagtcaatggcggcaaggtgccccgccaagccatatccactgtccactgtcgggtcgtcatctcccacggtcttccctctaagtccgacgctctccccaccctggactcgtgtggtgaacaaggaagtcggcatctcgtcctggtcgccgccccatctggcgtagtaggagagcacgacgacggcgagcaccacggccgccgccacgcacgccgcccgcacagccctcccgctctcggcgcagccgccccgccaccgccgccaccgccgccatggcggcgtcaccagcttcatgcctgcctccgtcatcatcatcggcgagaacgaccgcggcggcggcggcgtggcgcactgctcgtcgccgtcgtcgtcgtcgtcccagccgccgcctcccgcgctgcccat

SEQ ID NO: 67978 - DNA, 1179 bp, Oryza sativa
  Clone ID: PAT_MRT4530_68786C.1
atggaggcaagcttggatcagctacccgatcagctgtcgcgtggtttagaggacgcgcctccttcgaactcgaacctcaccggcgaccagctcctcggcgacctcctctccgccgcgttcagctggcaatcatgccggagccgccacgaggcgctccaggtgcggtgcggccccggcacggcgccgtacgagaaggcgctccggcagcccaagtccggcgatggcgccatcgctgctgatggcgacgacgacgactgccgctatgtcgtatccatcgtctacgaccgcgggctaggtaaccgcgtcatccccatcatctccgccttcctgtacgccgtcctcaccgagcgcgcgctcctcgtcgcgccgtacaacggcgacgtcgacgccctcttctgcgagcccttcccggggacgacgtggattcaccccggcggccggcggttcccgctccggcgcctccgggacctcgacggtaaatccagggagagcctcgggaccttgctgaagagcaacgccgtctccgtcgacgccggcgggaatggcacgtcgtcgtggtcgggccggccgccgccgtacgtgtacctccacctcgacggcggcgccgactaccacgacaagctgttctactgcgacgagcagcagcgcctcctccgtggcacgccgtggctgctgatgaagacggacagctacctcgtcccggggctcttcctcgtgccgtcgctccgtggcgagctcgagcggatgttcccggagaaggacgccgtgttccaccacctcagccgctacctcctccacccggccaacgccgtctggcacgccatcacggcctaccaccgcgaccacctcgccggcgccggccacctcgtcggcatacagattcgcgtgtaccacgaggagacgccgccggtgtcgcaggtggtgctcgaccaggtcctctcctgcgcacgcagggagaagctcatcccgttcccaaccgcagggacgacgacgaacacgtcgtcgtcggaccaggccgtgctcgtgacgtcgctgaactcgtggtactcggacaggatccgcgacgagctcggcggcggcggcggcgtgcaccagccgagccacgaggggtggcagcggatgggcgacacggcgcacgacatgagggcgctgagcgagatgtacctgctcagcacctga

SEQ ID NO: 67979 - DNA, 984 bp, Oryza sativa
  Clone ID: PAT_MRT4530_68787C.1
atggcaacccacaagcttgacagcgctgagttcagaattctgacagattataagctacattattacactttttatggtctccgcaacaatgggaaacggctcatgaccttttttggtgcttgtactgatgcctttgctgggcttacaagactctacttacagaacttgaggcttgctgaaactgacattcccaatattattgccacatgcaaacgattagagtctctgcgtatgttcatgtgtcaaacagagggtactgtgttgcagctgcaggtggaacaccagcggcttgttgagcttgatatctgccacggatgtttaaaactagtcaagctcaattctctaccgaaactcgaacggctggtctttaatagttggagacatccccaagaacccttgtattttggcaatgttccgcagctgtcaagcctaagcctcactaatgtaggtctgagattgcacaaccttatcagattaagtcagtttctttctaatgtaacctccataagagacctgcatctcaacctcaaaagtgaaagggatgtgataacacgcttctttcttgaagctgcacccttcctgaaggagctatgcatcacaatttgggaccattggtgtaatattgtgacggacaaggtggaacgggaagaagagggttactgtgacaaaacaaacgtgcagtgggagtcatcttcacctgatggtttcaggcattgcaatctggttaagctcaccatctacggtttccaacctgatgacaactttttgggatacatcaggcacatcatggaaaccgcggttaacatagaggagatatccctgtacgaccggaaggtggaagattgctgtgaagagttggatcccaaaatcaaggttgctccgtcaaagtatccgcagaccgtcgaggagcaggagttgctgaggaagcaaattacagagggattggtgatggcatcgcctcatgtaattaacttccggtcttaa

SEQ ID NO: 67980 - DNA, 2718 bp, Oryza sativa
  Clone ID: PAT_MRT4530_68788C.1
caatattttcgcttatcctttgccctacaagagagcttgccatccagctcacagctgaggcaaatgttctgttgaagtaccatcaaggaattggtgttcaatctcttattggtggcactagattcaagctagatcaaagacgtttagaatctgatccatgccagattttagttgctacacctggtagactgctcgatcacattgagaacaaatcttcattctctgttcgcttgctggagctccattcgcttgttcttatactatacaagtacctatgccggtgatgtatagctgctgctgctggtgcttggattcggttgaattaggtatggtcggtcagctggaatagcagtcggtgtgggtatatatgtagcctagttcgcatcgggcggaagctgggaagggaagatctagttcgcatcggagccggaatcgaatcctcccttcttttcctcttctcctctccatcatcagtatataaacaatacgcgcagcgcttgtccggtcaggcccgccgccgttcagaagcttaacattggaattggattttattaatccgcgccccgcccccgcgcccacgctgccggcccccctccccccgccgccatgcgccccgcccccccgactagccgccagaccctccccggcctcagccgccgcccccaccccttaagagcccgagcagaatctctgtaagcttaggctaaccctaagaatctctctccctctctctctcgctctggctctatatctcggacccccctgcggtccttgttcctcccgatccagagttgcagactccaatacggagaggccttttccttctttccctcctccgtttaggagaaggagaaggagaaggagacggaggagtagttgcctcctccttatgtattcaggaggagccggcgttggccttcatatcatcatcgcaaataataagcgctgcaataaacaaccaaggaactccaatccctccataattaccatacaagcatgaagaacaagaagggtagtcgccgcaacccgcataaatctgcagctcacaataacccccaactagtagtggataggttcaccaagctacctgatgatctcctgctcaacatcctataaatcagctcccgtaaccgtaatggtggtggataggttcaccacgctacctgacgatgttctgctcaacatcctggaccgcctcaacacgcccgacgccgtcaggacctgcctcctctctaagaggacgctccacctcccacgcatgctttcgcactttcgaattgccctactttcattcgcgccagatcctgattatatcacttttaaggacactattgggatgaacgccgccgtggccgctgcaacagataatgttctcaatttcagagccaaagacatccctcttcgccaactcagcatatgtttctacttgaaatactacgactgtcttaccatcggcaaagctgttgcccgagccatgacaacccacaagcttgacagcgctgagttcagaattctgaccgattataagctacattattacactcttgatggtctccgcaacaatgggaaacagctcatgaccttttttggtgcttgtactgatgcatttgctggacttacaagactctacctacagaacttaaggcttcctgaaactgacattctcaatatcattgccacatgcaaacggttagagtctctgcgtatgttcatgtgtcaaacagagggtactgtgttgcagctgcagctagaacaccagcggcttgttgagcttgatatctgccacggatgtttaaaactagttaagctcaattctctaccaaaacttgaacggctggtcttttatagttggaaacatccccaagaacccttgtattttggcaatgttccgcagctgtcaagcctaagcctcactaatgtaggtctgagacggcacaaccttatcagattaagtcagtttctttctaatgtaacctccataagagacctgcacctcaactttgaaagcgaaaggatttgggttcagccagagcgcccgaaactgctggtgcctgttctccagaatcttcaagttttgaatctggaggatctccctgaaggatgtgatatcacatggacacgcttctttcttgaagctgcacccttcctgaaggagctatgcatcacagtttgggaccattggtgtaatattgtgacagaccaggtggaacgggaagaagagggttactgtgacaaaacaaacgtgcagtgggagtcatcttcatctaatggtttcaggcattacaatctggttaagctcaccatctatggtttccaaccagatgacaactttttgggatacatcaggcacatcatggaaaccgcggttaacctagaggagatatccctgtacaacaggaaggtggaagattgctgtgaagagttggatcccaagatcaaaattgctccgtcaaggtatccacagaccattgaggagcaggagttgctgaggaagcaaattacagagggattggtgatggcgttgcctcatgtaattcacttccggtcttaattttgctcggggcaaaactgtgattcactgtatgggactggtaaaaaaaaaagctgaatgttccaatcgtttcaaggcaagcattaaatttctcttgtttcccgcaacttggttccaggccgtaagtaaagcctgctatacaatattaataaatttgaatgttctgg

SEQ ID NO: 67981 - DNA, 516 bp, Oryza sativa
  Clone ID: PAT_MRT4530_68789C.1
atgggagggaagtcgtcgttcctgtgcccgatcttcagcttcctgtcgtgcaagtcgaggaggtacgaggacgacgacgacgacggcgagctgagcggcgagtggccggcgaggtacgggagcaaggtgaggtcgagcgacgaggactacggcgcgtggtgggtcggcgagcgcgacgtcgaccgcaaggcctccgactacatcaacagcttccaccagaggaagcaggttaaaccgggattaagcagaagaacagcaacacaaccatggatgtccttccaagctcaacagcgggcgattgcaccatggctcttagcctttccatgcgatggaggcaggcaggcaggaagccagcggcggcggcgagctagcgattgtttcctccttggatgggagccgccgtttggctgcctcggcatcctcgccggcatcggcgccgccggcaccaacgtctacggggttgttcacttaccgcaggtcctgaaggacgagacatggccgggttcaatgggttaa

SEQ ID NO: 67982 - DNA, 3867 bp, Oryza sativa
  Clone ID: PAT_MRT4530_6878C.1
atggtcgagaaaccaccactatcaccatcctcggctagcccaggcactatcaaagaaaagatccagaagttaggattgaccgacgtcaatgaagcaaacgtcgtgcctatcgatccggaaaaattcacacctgatcaaaagaaagattttgatgcgatgatgcagcaagcacgggatcacttcttgaactcattcatgcagacttgcaagggaacacttgttcaaaagtataaagtaaaggtagttgctgatgatcctgagaccagttcttctagaggtgcagatgggaaacaagctccagacggctcggctcaaccgagtgataaaagtgccacagacggttctctaggaagtcaaggtgacaattctcaaggagttcaaggagttcaaggtggaggccaattggtcaatccccgattgctgataagagaacagtctcaacacgctggacagaatgtggatcggctaacacaagaccaggttgcatctacgtttttgcctcctcaaaacactattgatccaacccagcagcagccgattcaacaaacaccaccaaggcagcagcaaacgccattgaggcaacaggttatccagccgattcagcagcagagttcgttaaatgcatcggctgggtttgcaacacctggtggtcaacctgtgcagcatgctgtgaatcaagtttttccggagcacttggttcatcacgtacaaccagatggcgcagtaatccctcagattgtccctgaacacttgtctcaagggacgcctcagcagcagccatgggccgatttgattgcagatgtcatgaaggagcagttcgggctcaggccaaaagattctggaaatttgtaccgacaaccttatcctgaatggtttgaaagggttcctctgcccaatcggtttaaggttccagacttttcaaaattttcagggcaagatagtacattaacttatgagcatattagccgatttttagctcagtgtggtgaagcgtcggctgtggatgctttgaagaaggtaaccctgcatgaacagaagtttgcagaggctaggaagaactctagaaaggttaatcatgtttgtccttatatgtatggatcgaataatgatgatgatgactctgagatagcaacggccgagtgggtgagaagcaaaaaggttataccatatcaaaggggaaagaaacctaggaaagaagaaaggtatgaatttgatattactaaggctgataagatttttgatttactgcttcgggagaaacagattcaacttcctgctggtcatacaattccatcggccgaagaattgggcaagaaaagacagcaaattcaagcagccattgaggatggcaaaatcaggtttgatgattctaagaggccgatgaaggttgatggcaatcattttcctgtcaacatggtgtatacagctagtcaagtagccaatgtgggacgtacgaaaggtttccagaaaacaaagccaaggcaggagtggcgtgttaagaatcaggttcctgtagccgatgaggccccagatgatgaggcaaaaaggttagctaaaggaaaaagtgttgtaaccgctccggtcaatatggttttcacgctgcctgctgagtttggggaagttggtagaaatgctgaagaccttatcaagacgaacatggtgctcaaggactttggcggcaacaaaaccatcactacaacgttctttgtcatcgatgggaagggttcctatagctttttgcttggaagggattggattcatgctaattgttgtataccttcaactatgcatcaatgcttgattcagtggcaaggcgacaagattgaaattgtaccagccgacaggttagttaatgttgccagtgccgatttggctctttgggaaatggatggtcttgattgtttatctgaaaaagtttgggatggagattttctaaaagtgtccgattctgatatacagccaattgaagatggagaacccaagttattatttttagggcgtcgtggagggttcagggttaggccacatcaacaacctccgagaaaatgcaaaaccgatatgcttgagcctgtcaaggctgaaattaaacgattatatgatgttggttttattcatccctgccggtatgctgagtgggtttctagtatagttcctgttgtcaagaaaaacggcaaggtcaggttggtcgaggtatatattgatgatgtggttgttaagtctaaagaaatagaggaccacatagccgatttgaggaaggtttttgagagaaccagaaaatatgaattgaagatgaatccgacaaaatgtgtttttggtgtatcggctggccagtttttaggatttcttgttcacgagagggggatcgaggtaactcaaaggagtgttaatgcgatcaagaagattcagcctccggagatcaagacagaactacaagagatgatcggtaagataaatattgttagaagatttatttctaatctgtctggaaggttgaggcattatctattagccaacgagtgtactgtcatatgcaaggccgatgttgtcaaatacatgttatcggccccaattttcaaaggaagggttggaaagtggatattctctttaaccgagtttaatcttaggtatgagtcgccgaaggcgattaagggacaagctatagccaattttattgtggaacatcgtaatgattcaatcggctcggttgaaattgtgccatggattttattctttgatggatcggcgactaataatcaagctgagtatgaggcagtgctcaaagggttgcaattactcaaggaagttgaagccgatgctattgaaatcatgggggattctttgctggtagtcattcaattggcaggagaatatgaatgcaagaatgatacgttaatagtttataatgagaagtgccaagaattaatgaaggagtttcggctggttactttgaagcatgtatcccgggaacagaatattgaagctaatgatttggcccagggggcatcgggatataagccgatgatcaaagatgttaaggttgaaattgcagctatgacggccgatgattggcagtatgatgtgcaacggtatttacagaatacatctcaatcggcttctaggaaattgagatataaagcgttgaaatacactttattggatgatgagctttactatcgaacgattgatggggtgttgctcaagtgtttgagtgccgatcaggctaaagttgcaatcggcgaaaagtttggggcaattcagcgagcgccagcatcggctatgaatcctattattaagccatggccattccgaggttggggaattgatatgatcggtatgataaatccaccatcgattaaaggatataagtttatgttggtagcgaccgattattttaccaagtgggtggaagcgattcctttgaacaaagttgattctggggatgcaatacagtttgttcaagagcatataatttaccgatttggtattcatcaaactattacaactgatcaaggttcaatcttcgtgtccaatgagtttgttcaatttgccaagagcatggacaacaaatcgttgaattcttcaccttattatgcacaagctaatgggcaggccgaggcgtctaacaagagcttgatcaaattaattaagcggaagatttctgattatcctcggcaatggcatactcggctggccaaagcattgtggtcctatcggatggcttgtcatggatcgatccaagtcccgccttataagcttgtttatggacatgaagctgttttgccatgggaggttagaatcggctcaaggagaactgagctgcaaaatgatttaaccgccgatgagtattataaaccttatggccgatga

SEQ ID NO: 67983 - DNA, 529 bp, Oryza sativa
  Clone ID: PAT_MRT4530_68790C.1
gcattcagcaaatactgtggtaatgatcgcagttgttcagtgcattcttgaacttctgcgggattcctggtgccattttggagcattttttttggtcaaccacttgagctgggtggttgatgaagcggtcgaacctttttggtttctcagattggtttacacatttgagatgttctgcgacaacctttatatctcagatcggtttacacatttgaggtgttcttccgcacggggcagtccagttttcagtcctgcgaattgcttgtttcctcggctgctatgagaatgcagctactactctagttctgtagtcacttggtctcctactacatctatcaaggcagttttagcgctaggttgacatcttcttcgccatgtggcgttttggtcacctgtttataacttcatattgttattttttacaagttgctcatctctgaatcggtaaatgtttataacttcaccttgttatttttgacaagctgctcatctctgaatcggtaaaggagaaaaaaaaaaaaaaaaaaaa

SEQ ID NO: 67984 - DNA, 204 bp, Oryza sativa
  Clone ID: PAT_MRT4530_68791C.1
atgctggctaacaacaatctctgggctaaaattttgggaatcgaagttgctaaagcggggcaagctttgggccagaaccggcaaggtcagtgctgggctaggctaaacagaactggaaccgagacggaggaccgcgtcctcgccatcgccttcctcccgacgaccccgtcggcgccccgccgcctcgccgtcttgcccgcgtag

SEQ ID NO: 67985 - DNA, 1125 bp, Oryza sativa
  Clone ID: PAT_MRT4530_68792C.1
atggcggcggctggcgcggatgggctccctccggggctcagattcgaccccagcgacgacgagctcgtcggccggtacctgctccggcgcctccagggccagcccctcccgctcgacggcgtcgtcctcgatgccgatcccctgagcgcgcagccatggaggcttctcgcggatcacggccggggcggcgacgaagccttcttcctcgcggaggcgcacgccaagaacgccaagggcaagcgccagaagcgcaccgtcgagggtggagggttctggcaggggcagaggatgtgcgtcgacggcaagaagctgctcgtccccggcggcgacgacggcggcggcggcggcgaagtactggagatcgcgtggcgcaagtatgtcctgagcttctttgccgagggggagagggggagctcggggtgggtgatgcacgagtactccgtgacggcgccggctgacctcgcctcgtcgccgctccggctctaccgcatccgattcagcggctacggcaagaagcggaagagagagccggaagacgacggtcgagcacatggcgcgccccggcgggctgaggcggagactgctctgttcgatctggaggtcgggccaccgccaccgccactgctcgttcctcctcccgcggcggcggcggcggatcatggcaccgatcagagctcctccggtgtgaccgacatggtgttccgtgatcttcccgacctgatcgctgatgctggagctgctctgcccgatcagaaccaacaggattggtctgaagtcgccgatcagagctccttctgtgtgatgggcgatgactcttctctgctgctccctgatcttcctgggatgattgatgacaatgagcaccagcagtttgtgcgcgagtgcgacatgccacacctgttcgtcccgcaagcagaggaagccattgctggtggtggtgcagcatcggcgccatcggcggacaaccagaactgcgagttcaatgacggcgaggacatggcattgtcagattttgagtttccggagagtattgatgaggtgcttagctacatcgacttcagcacgagcgacacgagctgccgcgacttcaccatggacgagctgttcgatctgccggtggactag

SEQ ID NO: 67986 - DNA, 1758 bp, Oryza sativa
  Clone ID: PAT_MRT4530_68793C.1
atggagttcttgtcgcagatgtggtcgctgctgggcctcctcaccatcctgcagaacgtgctcccgacgcagctactctccctcctccactcgctgtggcagtcgctgcaggactcgctcacgccgtactcctacttcgacgtgccggagttcctcggctccgccgccgtcgagcccaacgcgttgtaccgccatgtccagctctacctccaccgctcactcctcctctcctcgccgccgcctccccgcctcacgctgtcgctgccgcgctccgtcgccgtctccggcggcggaggtgggcatgacgcgggagcggcagcggcggcggcgacgccgtccgtgtcgctctccccgaaccactcggtggctgacagcttcgacgggcaccgcgccgtgtggacgcaccacgccgacacgctccaggactcgctcgaggagcggcggtcgttctcgctgcggctgcccaagcggcacgccgcggcggtgctcccggcgtacctggcgcacctcgccgccgcggcggaccacctggagcggtcgtcgcgcgcgcggaggctgcacacgaacgcggcatccccgcgcggcgccgcggcgtggtcgtcggtgccgttctgccacccgtccacgttcgacacgctcgcgctcgacccggagctcaaggcgcgcctcctcgccgacctcacggcattcgccgacggcagcgagttctaccgccggacggggcggccgtggaagcgcggacggaacaaaagacgccggctcctccacgccaccgccgcctccgacgacgactcgtcggactccgactccgacggcggcgacaaccaccgctccaaggtgacgctgtccgggctgctcaacttcaccgacggcctgtggtcgtgctgcggcgaggagcgcatcatcgtgttcacgacgaaccacgtcgacggcatcgacccggcgctgctccgcccggggaggatggacgtgcacgtgcgcctgggcgcctgcggcgcgcacgccatgcgcgagctggtcggccgctacgtcggcgtcgaggaccacgagatgctggacgcggcggagtgctgcgtccgcggcggcgccgagatgacgccggccgaggtgggagaagtgctgctgcggagcagggacgacccggacgccgcggtgacggagctcgccgtggagctcaaggcgaggcagagcgcggcggccgacgagctccagtgggaggactcggcggcggagctctccgacgagtcgccgaggaagaaagggttagggtgggagggcaaggtcaggtctccgtcaaagtttgacctaatgttcaaatctcaagattgtgttctgttaggaatcgagtgggctgccaatgggcctgtacaaccattcattcaagctggcccaagcaaacccaagccgctgatccatgggatttcaagcatggaggcaatggggaagtaccgctgcggcgtcccgtgcagttggtcattggatttgggcaaggctactgctcatggcaccaacgcccacaacctgttcggtgaaatgtcaagccaaggagaggtgtcccaagaagatctcaagatatctaaggccgtccccatcaattcccccatgaacaaagaggagaaaatgatggatgaagctctggatcagatattggagaagcttgaacaaatgaagaccaagcgtaggtgcaatgagaagattgatcagattttggagaagttggacgagatagaagctaataggcgctatagttggccataa

SEQ ID NO: 67987 - DNA, 225 bp, Oryza sativa
  Clone ID: PAT_MRT4530_68794C.1
atgcaggccggcagtgaagtcgtggacgcccatgaacggtggcggaaacacaagtcggcggcggcgaaggccagccggttggcggagacaccagtcggcggcgatgaaggcaggccagcggccaatgagaagaagtcgacgtcggccagcttgccagggcacgacgccgtcatcggaggtagccggcggatctcattaatagaagatcacgcggacacgacatga

SEQ ID NO: 67988 - DNA, 186 bp, Oryza sativa
  Clone ID: PAT_MRT4530_68795C.1
atggaggaggcgttatacccggttttccggttgagagatgttattcacacaagcgcaagagatgagggagaaatattatatcatccaaaatatttacagaaatggcccctgccacccaagtggagggtgacaagtttttattttcatcttgtccgttcctcgcgtcaccctaccgccctcaggtag

SEQ ID NO: 67989 - DNA, 114 bp, Oryza sativa
  Clone ID: PAT_MRT4530_68796C.1
gtctatatcagcgcacgcgctctgcaccttggcggggaatgtaaaaggccatggatgcttccatgtcggatgcttcccaacctacaaaggaaaatgcgcattcacaccaagtaa

SEQ ID NO: 67990 - DNA, 4843 bp, Oryza sativa
  Clone ID: PAT_MRT4530_68797C.1
cgtgcaatcaataagatagaatatataccctgggtgaaaactagcgttacatcttacatgtgaactgcaacacacagcaatatgtgggaagtttttcccatctttgtggtattgagttcattcctgtgaagaacatgcaaagtttctatgaaattcttgcattcgaaaggagaacaggaacttgcagcattttcacatggaaaattcctgcatttgaaacaggaccttataatcatttataagaccctgtggtcactacacttgatttctattgagaatttgttgtgacaaaagtaatccaatggaagaataggccacgaacaaaatttctgacaacaatgctcttataaagtttacatttccaaagctaaaaggtcatatgaaacctcgccacatttggcgatgtatggaatacagaaaacctaccagcatatttacatggcatatatagaccacaaaaatgtgaggataaaagaagatattatctgtggggaaaggacaaaagaagatttggttcaaaaccaaaaaaaagtttccaaccagattttgcctgttgtttcaatgcccctatcgatgttggaagttcaacttcttgatgcaaatggcatacatgaacgcgaaaaacacagcgaagagcacgagcaccggcgcaacaactggcataaatttcctgtgatatccaaaatgatgagtaacatagtagctgattgtctggttggattggccagggactgagatgatttgttctaggtctccatactgtgtcactatgagcccatacactgtccatgccaatgggcaaagccagtagtaccagatccaccatttgggaatccttggtctcggaatgaagaatcctgagaataggttgaacaaggaatagaacgccgcggcaaagatggctgcaacctcatggtttggtgagattgccaccgtcatcataccatagtaggtgaagtagagaaatgagaagtaggagacgaagaagaaccagaagaacttggctgctgtccactggaagctcatcatggcataaacaatgagggtataatatgcagtttggacgaacacatagggtatctccatgacaacctgagcaatggcatagggcatagcagagtacatcccagcagccctctctcggtagaaaactgttctctcaatcgacacgattggctgcacagtcgcacaattgttgataccgataaacatcactgctgtatacattgctccaatgaccattctaagagaattggcatttcccttgtacaggtctgatgtcttatagtactcagcaaagtccatatttaagcgtacttccgcagcaactgaactgacctcaagcatccatgtagctggattgtacttatctttgattttaggcacaccaggaattgcctcgaaatattcaatcattttctgggaattacgacccaattgcccagagtatatcacctgccctcctcttttcagtagtagcagctcatcaaaagcctcaaatatgtcaatgcttggctggtgaattgtgcaaaccactgtccgtccagtgtcaactgtgttcctcactgttctcataacaatggctgctgctcttgcatcaagacctgaagtcggttcatccatgaagatgatcgagggatttgcaacaagctccactgctattgtcaatctcttcctttgctctgttgaaagccctgtgattccaggcaggccaactaacgcatccttcagattgtcgagctccactagttccataacttcatcaacaaattgaatcttgatatcatcagtgatttcttgatctcctattttttctggaaggcgcaggaaagcagagtatatcaaagactccctaactgtgacctgaggtgaatggatatcgttttgctcacagtagccagaaattcttgcaaatgtttcttggttcttaggataaccagaaattctcatatctccttcaatgtaaccaccagtctttcttcctgccaaaacatccataagagttgtctttccggctccactgactcccatgagtgctgtcagcactgcaggcctaaatgatccagtaacgtcacgtaacaattggagcctatcatccaccactccttgctgcttcatttctgcaggcatgtcgacatagtagttcacatcatcaaaagacatggatagaggagtaaatggaagaaccattcctcttcttggaccagcttcattgctaccaatggacatcagtcgtgaaactccattcgatgaactattgctcagacgagcactcaatctcatctccctcatttctttgtgatttccaccatttgattttgtgctgccatttcttactgtatgtcttgcatccccattgccttccgcttccttcgcagtttcttcagatatgacagcttgtggtttgcccagaggattcagataaacgagtgacagagtgaaaagcacattgaaaaacatggtgaaacccaggagccctgctgctccaatccagaaccaatttttgtcagtgaagatgttggcaccttccatcagagctattcctagtcttttaggaacgccattgttatccagtacaaacttgttcatccaccgaggagagtagaattcattgactgctagagcattatacccgtacatcagtggtgaaacccagtaaccccagatccaccattttgggatgaatgcttttggcagaagaaatcctccaagaacgaaaaatatgagaagggccagggctcctccagtttgagcaatgatcatggatctgcacagaccagcagttgctctgaaaaggccacctgccatctgctggatcaagaacactagcagcaactgcttgaaaaatctgtcagcctctggggcaaatcctatagtgtagtatgtaacaatcacccagactatagattcgatgatggaaaatgggattctcagaataacattcggtagagtgaagatccaagcagggtagaagaggaggtcccggtgcttgaagaacactggcaaccttgtgatggtcaaagagagctcagcgaaaccattgaacatgttcacaatcagactgaaaagtagtgctccaatgtacacaaagccatcatctaaattccttgtgtgcatctgggtcctaagaaacactgtcgacgcgacaagggctacaatgatgagctgtatggtcttgaagatgtacacaaatgagttgcgcttaatgaggagccactccttggcaaaggatgccttgaggagctctgttgttgacaccgattgcttcgagaagacaagagcagcctgatggctacgagttttatcaaatgggactgagagatgattctcaagttggagcccaacatggaaccttttaaatctctgtgcaaattctgagactgaaatgtatctgtatggcctatgcttgtcggcccaatactgctcctgatccttctttgatgtcacctcctgaagaaagtctgcagtacccttacgctctgggcagcggaatccgcatgactcaaagaactcaaggacgtattcgcggggtccctgataaacaatctggccttctgacagtaggataatgtcatcgaatagctcaaaagtctcaggggctggttgtaggagtgacatgaggatggttgcctcgcccaagtgcacgatttgctgaaggcatttgacaatctggaatgtggtggagctgtccaatccagttgatatctcatccatgaatagaacctttgttggaccgacaatcatctcaccggtggtgacgcgtttcttctgaccaccggagatccccctctgcatctggtcgccgacgatcgtgtccgcgcatatatccaatcccagtattctgagggtgtaatctgtctgaaggctgctctcgactccttccatcgaagtagccttcatgaagaggtcgacctcgggctccggccggatgccggcctccttctccctccttgccagctctgtcagaagatcgtacttggtgccgacgccctggcacctggccgagaagtcgagcgtctccttgacggtcatctcgccgacgtgcacgtccgtctggctgatgtacgccgccgtcttctgcgccacgaactcctccagctcgaacccgttgtacgtcacctcgccgccgcgccggagcgacgggtccagcttcccggcgagggccaggaggagggtcgtcttccccgacgacggcgggcccagcagcagcgtcatccgggagggccggacggcgccggagacccccctgaggatggtcagcgtcgcctgccgccccggccggacgccgacgagccccagcgccgcctccgcgatgttgcgcgccgtgttcagcagcgtcggcagcgcgcggctgcccacgtggcacctcgcctgcaccatcagctcctcgaaccgcacctccaccgtcggcagctcgatgcccaccctgtcgatccggttgcgtagcttctggaggaatcgctggttgtcctcctcggcgacgcggaagacgcgctcgatgaactcctgcctctcgccgacgccgagccgccggacgtccacctccttgtactgctgcttgcctgctccggcggcggcggcgggcggcctcttcttcggcggaggagaggatggcggtgcgcatgcggctgtaggtggggaggcgctcgatggcggcccaccggagcgcctcctcgtcgtcgtcggcggtgccgccgcggccgctcctcctcctccccctgctgcccccgccgccgccggagttctgcggcatgaaggcctcgtcgacgccccacgcctccatccccatccccctcccgatgctccggctcatccgcctccccgactcccacaccttctccat

SEQ ID NO: 67991 - DNA, 1283 bp, Oryza sativa
  unsure (1)..(1283): unsure at all n locations
  Clone ID: PAT_MRT4530_68798C.1
catagggcatagcagagtacatcccagcagccctctctcggtagaaaactgttctctcaatcgacacgattggctgcacagtcgcacaattgttgataccgataaacatcactgctgtatacattgctccaatgaccattctaagagaattggcatttcccatcttggtgccgatcttccaaaagatggtgccgagtagcaaggctgtgaacagagtgaaggaaaatctaacaagattgtaatctgggctgcgccaataggtcagccattgcttccagaggcaggccctaaattgccctatggtggattgagagtattttgtaggaaaatgcagatctgatgttcctggctctggttgacttagctgattcaccaataccttgtttttgcttgtacaggtctgatgtcttatagtactcagcaaagtccatatttaagcgtacttccgcagcaactgaactgacctcaagcatccatgtagctggattgtacttatctttgatnttaggcacaccaggaattgcctggtaatattaaatagcagattggttagaaaagtaaatttattctagttattcataacacaccctcccacttagcaaaagttaaccaccattctgaaactatctgtacctcgaaatattcaatcattttctgggaattacgacccaattgcccagagtatatcacctgccctcctcttttcagtagtagcagctcatcaaaagcctcaaatatgtcaatgcttggctggtgaattgtgcaaaccactgtccgtccagtgtcaactgtgttcctcactgttctcataacaatggctgctgctcttgcatcaagacctgaagtcggttcatccatgaagatgatcgagggatttgcaacaagctccactgctattgtcaatctcttcctttgctctgttgaaagccctgtgattccaggcaggccaactaacgcatccttcagattgtcgagctccactagttccataacttcatcaacaaattgaatcttgatatcatcagtgatttcttgatctcctattttttctggaaggcgcaggaaagcagagtatatcaaagactccctaactgtgacctgaggtgaatggatatcgttttgctcacagtagccagaaattcttgcaaatgtttcttggttcttaggataaccagaaattctcatatctccttcaatgtaaccaccagtctttcttcctgccaaaacatccataagagttgtctttccggctccactgactcccatgagtgccggacgcgtgg

SEQ ID NO: 67992 - DNA, 192 bp, Oryza sativa
  Clone ID: PAT_MRT4530_68799C.1
atgcggagggatcgatgtggaggaaagtggctgcacagcaccgtgcgggagtctgacaaagcacttgagaggggaggagatttcgaccttgaactagttgaaggcgatagaaagggatcggcgtacacggagacggaggtcagccacttaatgttgggcttgaagatgacggcgacaacctcatcctcctaa

SEQ ID NO: 67993 - DNA, 1513 bp, Oryza sativa
  Clone ID: PAT_MRT4530_6879C.1
cgcctttttcgctcgcagacggccgccggcgacgcgcgtggcggcgagccctagatatggtgccgggaggtggagtcccacagggggcggagggagggagggctatggcggcggcggagacggccgccactgccgccgccgccggggagagggccccggggacggaggtggacgcgttccggcgccaggtcgaggacctcgtctccaagaccgaccagctggagaggagggtgaatgaagtggtgggattctacgacgggaagaaacatggcagtggtggccggaaggctggtcgcaaggatagcagcctttccaaagggatgcctgatcttatgcgccagtttggcacgattgtgcgccagatcacatctcatgaatgggccgagccatttctcaagccggttgatgtggtaggccttcagcttgatgactattacaagattatcaccaaacctatggatttttcgaccatacaaaagaaaatggaagggaaagatgacaacaagtataacaatgtccgagaaatatattcggatgttagattaatttttgccaatgcaatgaagtacaatgatgaacgacatgatgttcatataatggcgaaatcattgcttgagaaatttgaagagaaatggctccagcttcttcctaaagttgaaaatgaggaaaggaaacaaaaggatgaggaatccaacggtgttccaaaagtgaacatttctccagaagaagctattgcaaaactagcaaaagatactgacaatgagctgattgaaatcaacaagcagttggaggagcttcggcaaatggtggtccagaaatgccggaaaatgactacatatgagaaaagaaaactgggtgcaggtctctgccacctgtctccagaagagcttactaaggcattggagatggttgcacaagacaaccctagcttcgaagctaaaggagacgaactggaacttgatatggatgctcagagtgagacaaccctctggaggttgaaattctttgtgagggaagcattggaacgacaggccaacgtcgcttctggcaggactgatgaaaatgcgaaaagaaagagggagatatgcaatgctctggccagaactgcttcaaaaagagtcaagcagcaacctaattagtggcctctgaccattgtgcatttgtgtcttcacttgttgtttagaatgtttctgagaaatagccttgcaaaataatctcttccttctatggagcatgtaaataactagtctctgcttagctgtgtgaggttgcaacaatagcgaaatgtttcccaaaaaaagggtcttatgttccacctgtagattgtgtgttccatgcaattgtaccatcaagaaaaatctagtatagcgttgctggcgccatttaaaaaaaaacaaaaacccataaaaaaaaaagaagagcaaactgtgaaaaaaaatccataagaacaaaatgtgatttttgttttcaaaagaatgaacaattcttagcattccaaaaaaaaaaaaaaaaa

SEQ ID NO: 67994 - DNA, 2463 bp, Oryza sativa
  Clone ID: PAT_MRT4530_687C.1
atggccggcggctcgtcgccggcgatacggccgatcggcaagtcggcggtgcaccggatctgctccggccaggtcatcttcgacctctcctccgccgtcaaggagctcgtcgagaacagcctcgacgccggcgccaccaccgtcgagttgctgaccgccatgtgcgcttctcaggcgctcgctctgaagcaccacacctccaagatctcggacttcggcgacctcgcctccgtcgccaccttcgggttccgcggggaggcgctcagctcgctctgcgcgctggggaagctgacggtcgagacgaggaccaaggacgagcccgtcgggacgcgcctggagttcgcgcactcgggcgtggtgaccggcgagaggaagatggcgcggccggtcgggaccgccgtgaccgtcgagaagctgttctccacgctgccggtccggagcaaggagttcagcaggaacattcggaaggagtacgggaaagtgatctccttgctgaatgcctatgcgttgattgccaaaggggtcagattagtttgcacaaatactgttggcaagaattctaaatcggcggtgcttaggactcaagggagcagttcactgaaagataatatcattaccgtatttggtctgaacactttcaagtgcctgcagcccttcaatgtgacaatctcagaaggctgccaagttgatggctttctttccaaacctggacctggtagtggtcgcaattcaggggatagacagttcttctatgttaatggcagacctgtggatatgccaaaggtttccaaacttgtcaatgagctgtacagaagctcaaatgccaagcaataccctgtggctgtattgaatttctgtattccaaccacatcttatgatgtgaatgttgcgcctgataagagaaaaattttcttctcatctgagcatgccattttgctatctttacgggaaggtattgagaatctgtactgccctcaacaatgcagtttctccatcaacagcgttgaagatcctgggaaggaaatggacccagccatcgatgggtctgatgaagacatgtgtttaacagaaaaggagaatgtttcagctcctgaaaatgacgatgacatggatgaaacagatagtgatgatgaggttacaccagagaatcagaaagtgccttcttcagtgacaacaagggtagccactggatctacacccaaagatgtgagccccttgtcaagaggcccacctgctcagcttgatagatctactttgctttcagcctaccggtatgaacaacgagaaaagacgcctacacgagtaaaaagttatccagcacaagcaaatcatgttagaacagggcttgctgcaaagtcttctccttcaagtgctgttcaaccttctattatgaaatttctatcacaaaataaaaggaaacacgaagacagttgcaatcttatttctgaagctccagtgctgagaaggggaacatgcttggagcaagtgaggagaacagatttaggagtgaattcaccaactgcactaacctcaagagtatctaatattccagaggttaatgcacctcaaggaacaaatcctttgcggcaccattccctgcaatcttttgtacctgagatgccagaagattcaccacagcattctgaaccacctaatattgtttctcatcgtgatgaagtgcctcagttgcgtccatgtgatgttcacgctacagaatctgaagtggtaaggtgttataaagctgcgacactggataactatgtaccagataacgaggagggaaaatcgaattctttagctgcagccaccagcgagttagataagcttttcagtaaagatgactttggagaaatggaggttgttgggcagtttaatcttggttttatcattggaaagctggaccaggacctatttattgttgatcagcatgctgctgatgagaagtacaactttgagaacctttcacagtcaacaactttaaacatacagcctctccttcaaccactgagacttgacctatcaccagaggaagaagttatcgtttctatgaacatgagcactatcagaaagaacggttttgttttagcagaagatctgcatgcttcaccttgcaaccgctattttataaaagccgttcccttcagcaagaatattacatttggtgctcaagatgtgaaggagttaatctccatgcttgctgacagtcaaggtgactgttcaataatcagcagttacaagctcgacagaactgattctatttgtccttcaagggttcgtgctatgttggcttcgagggcttgccgaatgtctaccatgataggtgatccattgacaaaaactgagatgaagaagatacttaagaatttgacaggattgaggtccccttggaattgccctcatgggaggccaacaatgcgccatctagcagatctccatgctataaaaactgaagaaaaagagtga

SEQ ID NO: 67995 - DNA, 231 bp, Oryza sativa
  Clone ID: PAT_MRT4530_68800C.1
cccgggctgcggaattcggcacgaggactccctctagtctcgtctctccccctctcttctgactcgccgcactgaggggcggcggtctgcgagccggatctgcgaaggcgtcggcggcccggtggaagcttcctcccctccaccagatccatctagaggggaggcggtggcagcccggcgtgagggtaggaggcagcggtgacccgacgagagggtaggaggcggcggtgg

SEQ ID NO: 67996 - DNA, 454 bp, Oryza sativa
  Clone ID: PAT_MRT4530_68801C.1
aaagccttttacctccttagtgctacgaggcgggaggtccggatgtcgacccagcatcatgagcgcagagagctaattgcagctgcccgctgtccattaagcccagctacaagtaggcctgactgctactagatggcgccgtctctgacttggacagccatgatatagcggaaacgactaccagggcgggcctaggccaggaaatattgacaggcctacagctgacgcaactcgaaactacgactgctgtaacgagcaaagaaactgaaggcgaagatactgatgtcccctacacaagtgcaccgagaagatcctgtactaccactattacaccaaaccgtgcctctctaggagaaatattcccagggaccaggcccatcactgcgctcccaagccagcacagctccgaacccgccctacaccattggcaccttttatggcagagcatttgtcc

SEQ ID NO: 67997 - DNA, 542 bp, Oryza sativa
  Clone ID: PAT_MRT4530_68802C.1
ccccggggcccccaaggggtccctgggggggggggggttttcttaaacccggcgccccgggggggggttaaaacccccccccaaaagggggggcgaaccccccccccccgattggcccaaaaaaccccccctatcccacccaacccgggggggatctttttccccccccccgaccggaccttttaaaaggactacccccccccccccctctttttttttgggggccccgccacccccgaacgccggttccggggaaggggggggggggacccccccaaatcagggaaagcgggcccctgcggggaaaaaaaacgggtggggggggccccccgccgggggacccccccttttggggggcctgggggccccccttcccctcaaagacggggccgaaaacaagggtcttcccgggccccccgcgggggggcccgggggcgtttaaaaaccgcgccccccgtcggggcggagccccagaagtcccccctggcacaaggcgcgcggagccttacggcccttaccccggcccccccgggggggggggc

SEQ ID NO: 67998 - DNA, 210 bp, Oryza sativa
  Clone ID: PAT_MRT4530_68803C.1
atggcgcaaggccggctcgccggcgacggcgaagaggaggacgacgaagacgacgtcgtggacagcaccggctcacggcggacggcgcggacgccgggagccctcgcgccgctcgaagtttcggtcgcatccgtttcttcctctccgattaattgtcaagcctccacgcgcctcgaggagccgagccagtggcctctgggcccaccatag

SEQ ID NO: 67999 - DNA, 354 bp, Oryza sativa
  Clone ID: PAT_MRT4530_68804C.1
aacgatccgcgcggcgacattgctaggcggtgagcctgcctggggcgagccatctggaaaaagacaacgcacgcgtcctaagatgagctcgacgagaacacaaatctcgcgtggaacaaaacggcaacaagctcgctagatgctgatgctcaggacgaacacgaaccgtgaaagcgtgggctatcgagccgtcagacctgttttaatattagcgcgaggagtcacacaagttaccacagggataactggcttgaggaagaccagcgtcataccgacgttgctttttgatccttagatgtcggctctctcgatcatggggaaccatacactaccaagagtgggactgttcaccca

SEQ ID NO: 68000 - DNA, 657 bp, Oryza sativa
  Clone ID: PAT_MRT4530_68805C.1
atggccgccgcctcagccacacaagccaccgccgcagaggcggccgcgccgtgctccaccaccaaaaccgagtccacctcgtcgtcgtcgttcctccgcgcccgctgcgcgaccacgcggtacccggacgtctgctacgactccctcctcccctacgcctccacgttccagaccagccacgtcaagctcgccgtcgccgcggccgacgtcgccgccgcccacctccgcgccttctccgcacgcgtcaaggacatgctcctccaccgcggcggcggctcggaggaagccgcggccagcagcggtggtggcgcggctcgcgtggacgccgtgctgcacgactgcgcgagcaccatctcggcggcggctaacctggcgaagcggtcgtcggcggagctcacacggctggacgcggacacggccgcctcaacggagacgtcgacgtccggcgggagcaggcaggcgaggtggcagctctccaacgcgaagacgtggctcagcgccgcgatgacgaacgaagggacgtgctcagacgggttcgaggacgccggcgctgccgccacggcgtcgccggccgggaaggaggtcgccgccggcgtggcgagcgtgacgcagcacaccagcaacgcccttgcgcttgtcaatggcattcccttatga

SEQ ID NO: 68001 - DNA, 319 bp, Oryza sativa
  unsure (1)..(319): unsure at all n locations
  Clone ID: PAT_MRT4530_68806C.1
cccaaagaanacgaaaatactgctccgcgggacgaacccgngnncanactcgatctttcctncccaaggaagtctgaaatggggggtgccaccccgcccangctgcancccccanncntggggggatcataaaatctgtcatcctgttaaagccttccaaattactgaaatnattgaatggataaataataatgccgttgtttcttgggttgggttttccttggggtttgttcgccaaacannaannaaaaaggaggggaggaaaanaannannaanacnaaaaaaanaaaaaanannaaaacaaaaaananaaaanaa

SEQ ID NO: 68002 - DNA, 2119 bp, Oryza sativa
  Clone ID: PAT_MRT4530_68807C.1
ccggccagacggactcgtatcacttctcaaaaaaagaaaaacaaagcacaaggaagaggccatgaggagcggcggcggcggcggccgagcaactcgcggttagcagggaacggcgcctcagtgcaccgcgccgccgcggaactcttgcgatgctccacctccacggcaggacggcttctccgactcggctcctcctcttgccccttctctcgccgcttccctcacgcccaaccctaacccggccctggcacccttgccgccagcacctctcttgctgccactggtgccgcatccggggaagcaagtgcagcaggagaatgctgaggaaggagaagaacagaggccgaggccaacgccgacagccatggaaaagaaggttgtagagccttcagagaagaagaaatttgtggatttgaaatcaatgtggggtagagctgaaaagaaactgaagtctatagttgatagcaataatatttctgagcattcagctaggaggaaagaccctgaacctgctactatacatgcacctgcaactaaagagattgggtgtagtagagcatgtgaagttggatttgcacaaacagaaactcaagtgccctatgaaagtatagaagtatcaagacctcaagatgtagatggcagcatagaagtatctaaacctcatgttgcaaattcagaatctgaagaggaagatgattggctagaagatgttgatgaggatgttggttttcttccacatgatcctggaaagaggattgccatctcagattatagtgtgtatcagcaagatgaagtgaggatgaagtatattgcacttgggccttgtcgaccaccactagagcaatttcctcaaagaaattgtggaggatacaaaaacagcttattagatgttgtgctacagagactactaaacttctcatggaagatcttggggatgagttttttttcaattcttgctgatgagtctagcgatgtgtatcaaaatgagcagttggcactttgcttgcgttatgttgacaagaaagggagggtggttgagcgctttcttggtattgtgcatgttgagaatactacagctttgatacttagagatgctatcaagaatttactaatgcaacaatcattgagcttgtctaaagttcgtggtcaaggatatgatggggctagtaacatgaagggtgaggttaatggtctaaagaagctgattatgaatgaatctccttctgcttattatgttcattgttttgcacatcaactacaattaactcttgtggccgttgctagggagaatgttgctcaagctcaagagattgtagaagctttggaattgggtgaaattgaaagtgggcagggtctgaatcaagagatgggtttgggtaggccaggagatacacgttggggatctcactacaaaacagtgcaacatattcttattatgtatcgctcaatccggaaggttctactacaagttggaaaagatcgttcacaaagcacggaagctataaaagctcaaactgcattacaatcatttgtgtcatttgagattgttttcatggcacacttgttgaacactattcttggatacacagatgacttaaacacagctttgcaaaggagggcgcaagatattgtgaatgcggttgagctcattgttttgacaaagatgcaattggagatgttgcggcaagatgatggacaacttagagaactaaatgacagatttgatgaggtgaacacagatttacttgtttgcgtggcttcattcaatcccactaattcatttggttcttttgacaaggaaatgttggttaaacttgcacaattctatcccaatgacttctcagccaatgacatcatgcacctacctattcagcttgatcgttttattattgatatgcgtagagatgaaaggtttagagaagtgaacaccattgctgaactttcggtcaagcttgttgatacaaataagcatatcaattacacacttgtctacaagctactgaaattggtgctagtccttcctgtagcaactgcaagtgttgaaaatgtattctccacaatgaattatgtcaagaacaagcaaagaaatagaataggagatgaatacttgaatgattga

SEQ ID NO: 68003 - DNA, 1668 bp, Oryza sativa
  Clone ID: PAT_MRT4530_68808C.1
atggccgccgccacggcggacggacatggcgggaggcggcggctgagggtgttcttcctcccattcttcgcgcgtggccacctcatccccatgaccgacctcgcgtgcctcatggcggcggcgagcactgatgccgtggaggtggaggcgacgatggcggtgacgccggccaacgccgccgccatcgccgccacggtcgccgggaacgccgccgtgcgcgtcgtctgctacccgttccccgacgtcggcctggcccgcggggtcgagtgcctcggcgccgccgccgcgcacgacacctggagggtgtaccgcgccgtcgacctgtcgcggcccgcccatgagtcgctgctccggcaccaccgccccgacgccatcgtcgccgacgtgccgttctggtgggccaccggcgtcgccgccgagctcggcgtcccgcgcctcacgttcaaccccgtcggcgtgttcccgcagctcgccatgaacaacctcgtcgccgtccgccccgacatcgtccggggaggcgccgacggcccgccggtgaccgtgccggggatgcccggtggcagggagatcaccatcccggtgtccgagctcccggacttcctggtccaggacgaccacctctccatgtcgtgggaccgcatcaaggcgtcccagctcgccggcttcggcgtcgtggtcaacaccttcgccgcgctcgaggcgccctactgcgacgagttcagccgcgtcgacgcgcgccgcgcctacttcgtcggccccgtcagccagccatcgcgcgccgccgccgccgccgtgcgccgcggcggcgacggcgacgtggactgccttaggtggctgtccaccaagccgagccagtccgtggtgtacgtctgcttcgggagctgggcccatttctcagtgacacaaactcgcgaactcgcgctggggctcgaggcctcgaaccagccattcctgtgggtgatccgctccgactccggcgacggcggcggcgagcggtgggagccggagggatgggagcggcgcatggaggggcgcggcatggtggtccgcgggtgggccccgcagctggcggtgctggcccacccgtcggtgggcgcgttcgtgacccactgcgggtggaactcggtgctggaggcggcggcggccggcgtgccggcgctgacatggccgctggtgttcgagcaattcatcaacgagcggctggtcaccgaggtggccgcgttcggcgcgcgcgtctgggaggacggcggcgggaagcgcggcgtgagggcgcgcgaggcggagaccgtgcccgccggcgtgatcgcgcgggcggtggccggattcatggcgggcggcggcgggcggagggagagggcggcggccatggcgacggcgctggcggagagcgcgcgcgtggcggtcggcgagaacgggtcgtcgtggagagatatccgccgcctgatccaggatctgacggacgcgactgcatctcagccttgaccatgacttccattccggctcatttcattatcgtcgcaatcactttttgaaaaattttgtagaaaaaaatcgagtgaaaagctatgatgacctttgtatgcttcttccgttctgtatcatcaacatttgtttgtcccatcactcaactatcttaaacttatcgttacatcaaaaaaaaaaaaaaaa

SEQ ID NO: 68004 - DNA, 2276 bp, Oryza sativa
  Clone ID: PAT_MRT4530_68809C.1
atggcggaggaggcgccgccgccgccgccgccgcccaagctcctctacattgccgtctccgacgccgccgctcgccgcgccttccgctacacgcgccccgtgcttcagggcaccctccaactcatgggatgcaaggctcgccatgccttcaagattagcaagagggtgttcaatgtgatgaggagtgaattcttggatgcatccaaatcagatactgcagataatgaagaaaatgccccttcccttgtaaaagatgttgagatgctgaagcccaaaattttggaagcaactcttagtagcatacccttcgagttatacaagacccaaacaaccatcgttgtttctagggagaagttcctaagtgttgtatgtgatgccctctcttcatacaagtatgtggggccaaaccagaaggctgactttcttcttgcttgcagaattaaggagagaaaggaatcagtgacagtactcttatgtgggactagcggatgcggcaaatctacgctatcatctttgttgggtagtagattgggtatcacgacagtagtttctactgattccatacgccatatgatgagaggctttacggatgagaagcaaaatcctcttctctatgcatcaacctatcatgcaggcgaatgcttagaccctgttgcagttgctcaggcaaaggcaaaacggaaggcacagaagcttgacattgtttctcatcctaataccaatgaaggcagagacgacacttcagatgataaagctcatcatggatcctccgaattgcctcctagaacggagttgatcggcagcaagcaaatggcaatagaagggttcaaggcgcaaagcgagatggtaatagacagcctggacagattaattacgtcctgggaggagcagaaacaatctgtaattgttgagggagttcatctaagcctcaattttgtgatggggctaatgaagaaacacccttccataataccatttatggtatacattgcgaatgaggagaaacacatggagcgattcgctgtacgtgcaaagtacatgacactagacccagcgaagaacagatatatcaaatacatccggaacatcagagcaatccaggactacctttgtaaccgtgcagacaagcatctggtgcccaagattaacaatactaatgttgaccagagtgtggcggccatacacgccacggttttcagctgtcttcgcaggcgagaagctggggagcagttgtatgacctcaacacaaacactgtagctgtagtgaatgaggaatacaggaaccagcgtgctgctaactcactgggttccaagggaatgtttcagttgatacaaagacagggatcttcaagaaatttgatggctatccttaatactgacggtagtgtcaccaaagcttggcatgtggataaaaacaatggcaatggaagtctcgatggtacaagcagtgacaaatcaacaaaaaatcccatgtatgatacatttgggaaggcggagccagtcaatctccagttcggatctttcgggatcagtgcatggatgagtgacacaggtggcaccagccatacaggaagtgtagatgacttgagagctgatggcattgaaacgggcggcagatattattcctcatgctgcagttcaccaaaggtgtcagattgcccttcaaaagagcttatggaggatgattattcagtttttggtagcgaagaagatgctgatgatcctcctgatgctggaactgacgaagacctaactgatgaagaaagagatatgcacgagatagaagcaggctctgttgatgaacactccaccaagtccgacgaggaatacgacgatctggcaatgcaggatgtgatggagaacggttactggtccgacgacgaacaggctgcaagcagcaccaagaactcatcgaaccaggagaagaacatccatggagcagctgatggtgatgttgttgatgatgaaggcagtggcaatgacaggtttcaccacaatctggccttcttcctgaagatgtccaagaaagtagccgccacagaactgccgtgtgcatagtgcctccggtgtcaaagcaactgttgttggtccagatgtgctctgaactcggttgttatgtatcctgatgagcttacctccatgactgtaactgtaagagaggatctgctgcttgtctaagcaatacagatcacttagaatccgtgtaatccaataactcttgaaaagatgaaataataaagggtgaataaatagtttgatacaaaaaaaaaaaaaaa

SEQ ID NO: 68005 - DNA, 1494 bp, Oryza sativa
  Clone ID: PAT_MRT4530_6880C.1
atgcctggactcagccgatcaattgtagaacatcggctacctatcaaaccaggagttaggccgcaccagcagcctccgaggagatgcaaagccgatatgcttgaacctgtcaaggctgagattatgcgtttatatgatgctggttttatttgtccttgccgatatgctgagtgggtttctagcatagttcctgtcatcaagaagaacggtaaggtgagtgtatcggctggccaattcttgggatttcttgtccatgagaggggtattgagataactcagagaagtatcaaggcgatcaagaagattaagcccccagaaaacaagaccgaattgttgaggcattatctactatccaacgagtgtactgttatatgcaaagccgacgctgtcaaatacatgttatcggctccaatattgaaaggaagggttgggaagtggatattttccttacctgagtttgatcttcggtatgaaccgccgaaggcgattaagggacaagctatagccgattttattgtggaacatcgtgatgattccatcggctcggttgagatggtgccatggactttgttctttgatggatcgtgccaagaattgatgaaggaatttcggctggttactttgaagcatgtgtctcgagaacaaaatattgaagctaatgatttagcccaaggggcatcgggatataagccgatggtcaaggatgttaaggttgaagttgctgccataacaggcgatgattggagatatggtgtttatcggtatttacaggatccatctcaatcggcttcccgaaagttaagatataaggcattgaagtatacactgttggatgatgatctttattatcggacgattgatggagtgttagttaagtgtttgagtgccgatcaggctaaagttgcaatcggcgaagttcatgaaggaatttgtggcactcaccaatcggctcataaggtgaagtggttacttcggcgtgcagggtatttttggccgacaatgctggaggattgtttcagatattataaggggtgtcaagattgtcagaagtttggggcaattcagcgagcgccggcgtcggctatgaatcctattattaagccatggccattcagatgttggggaattgatatgatcgccgacgagtattacaaccttatggccgatgagagggaggatctggttcagtcgcgattgctagcccttgcaaaagttaccaaggacaaggagcgtattgctcggcattacaataagaaagtggtacccaaggatttttcggagggggaacttgtatggaagttgattctgccgattggaactcgggatagcaaatttggcaaatggtcgcggaattgggaaggatcgtttcaaatttataaggttgtgtctaaaggagcttatatgttgcaaggactcgatggggaagtttatggcagagcattaaatggcaaatatttgaagaaatattacccaagtgtttgggttaatgcatga

SEQ ID NO: 68006 - DNA, 267 bp, Oryza sativa
  Clone ID: PAT_MRT4530_68810C.1
atggcccgcccccacgtcgcggcggctttgcgcgcgcgatgcctcccgccgaaaggaaagccgagagggcagaagcgccgtgccaattccccctcgcggcctcgccggtgcgtcccccgtttgccggagcacgctgatgctgccggtgggagggagtacgccgttgctgttgacgacttgaccggtccaactgtccaagtccagacttttgctggtggcatctgggctgcgaaagatagtttcatcagatggactatcgatcggtag

SEQ ID NO: 68007 - DNA, 1559 bp, Oryza sativa
  unsure (1)..(1559): unsure at all n locations
  Clone ID: PAT_MRT4530_68811C.1
atgtcgggagtaggttttagtaaaattgacgggaattcgcagcaggaggaggaggagaaagaggctgacgatttggaccgggatttggggatgatgagggaggaattggagcgtgaggtgctcaacacttggctctggggcaaggacatggactctattctgaatgaagaatctgaatggcaagggacacttccaggctgggcctgccctcgagaagataattaccagtccgaaagtgaattctcggttgatccagatgaatgcgattctttcgacggatactggtatgaattccgctacgaggatggaaatccttactacgctgctgagagggaggagagatgggagaatcaggttatggagcaaatgaagttcacagtatcaattgcaaagcaacgacaaaatgatttcttttgtcctatttttgaggggtctctacatgttgaagggccatgtcatttggatccagatatcctgtcgacggagcatctattgccccagctgccaaagtggaaaaatcgttgggtaaatggatacaaccacaggaatgaaccttgtcggcgtgcaatccaggtgtatgatttgaatgtatcgtccccccatgatgaaccaatggagatctacggtatatttgcatttagagatgtacgaaacaaccaacaacgtaatcatgtctttcaatactcgagggacaaaccatataagcttcggccgggctctaataagatacggcctctaatttggccacctagaggcatatatgcagttgggcctatgttgatcgaatactaccttgtcattaagggtcaagaaaggaaagacgataaagtgttgatagacgggcattctatgtatgccccatcgttctattcagaacttcatagataccgttggcacatcgacactggtcattgtggcactgttgctctggagatggttgcccttgataaggcagtactgggcacattggagcttgaggtactcgatctcggagagaactgttttgattcacttacagttgttgcaggttactgcgtacagtggggacaattcatgatatttgacggcaagttgagcgttggcaagttgcccccggtcacattatgcgtggacggtgatggaattctgttgcttcgcttcttcacgtataacagcccttcaaatgataagagctttagtcatggtggtggtgttaatgatctccttgagcatgtcactgaggatgtgttgtttgggagtatgtcgtttgtaccacagaacgaggggagttctactgcaagtggaggctgttctagttgtatggacggtcttgagatttcggccactgccaagtggtcgccattatttgaacaatcagattagctatgcattcccctttcaaaaaggaagaagattagctatgcttcgtattatacacaaatggtcttgatcatctctgtatttagtaatgaaggcctaaaaggacaagaatgaccaacgtttgtaacagacgataatagtgtatctctccgcatatgtatattaatgtggtgttttcttncaaaaaaaaaaaaaaaaaa

SEQ ID NO: 68008 - DNA, 2327 bp, Oryza sativa
  unsure (1)..(2327): unsure at all n locations
  Clone ID: PAT_MRT4530_68812C.1
ggttgcgcaacaccacccactgctcgtctccgatcctcacccaagcctctctctctccctctcaccggaggcaaggtggggatggcctcgccggcggtggcgacgcggcacccttccccctccttcttcggcccggaccctcgccgccgccgcgggcattcgccttcgaatctaggcttccgaagatcgggattgcagttaaaggttactgcaatttttgggtggattaagggagacacaagaacacgtgaattgaacccatctgctgaatcatatacgcttacagggtcagcctcagaggcagacaccaagccacgtgaggtttctgttgctgttgtttcttctattatggacattccttcagcagattgggatgcctgtgcagttgattcagttgatcctgacaattttaatccttttctgacccacgcattcctctcaagcttagaggaatcgggttctgcagtgaaggaaacagggtggttacctctgcatgttgttgcacgggatgagaatgaaactgtcgttggtgttgtcccactttacctgaaaagccattcaaggggagagtttgtatttgatcaatcatgggcagaagcttactatagctatggactcgaatactaccccaagttgcagtcttgtgtgccttttactccagtaactggtcaaagaatattagttcgagatacaccatacagggatcaagtttttgaagctttagtgaaagaattgaagagtttgactaccaagctgaaggtgtcatcgttacatataacatttccatctgaaggtgaattcagcaagttgaaggatagtgagttcttgcagagaatcgggatgcagtatcactggagaaatcgagattacagaagttttggacgagtttttaatggatttgaagcaacccaaacggaagaatatccagacaagaacgtaaaaagattcctgctccaaaatttggaaaatggaagcgacttcgtgggagatgagataaagagcgagcattggggacacctttttataagtcctaccgcaacaccactggataatcccgggggcagaccatacttgacaagggaattctttcaccgcttgggagaaaagatgggtgacaaggtgatgcttattgttgctgaacatgacgataaacatgttgccggggctcttaaccttattggaggtgacacattgtttggccgcttatggggctgtctgccagatgcttatttccccaatttgcattttgaagcttgctattatcaggcaattgaagcagctatagaactgaacctgagtaaggtggaggcaggtgctcaaggagagcacaagatccagcgtggttacctcccagtgacaacatacagctgccactacttcttagatcctggttttggggcagctataggaaattatcttgtacatgagacggctcaggttaaacatgttattaaggtcctgcatgattccggcccatacaaggaagatatactgaacgaatttttgcttacacaaggggatggagtgtagaacatcaaaggaacttacagctatgaatatgttcatgactcaagatgtggaagtagcaaaaatatgggtgatcccatgcctccacaaggagatgatactgtgaatatgtaaacccacagttgtacattactaggcttgtaaatagctgtcatttaaaaatctcaagtcattagcttgaaatgtgacaactgaaagaaaaaacaacattctattgcccagtttcgcctatctgaatgggattacaagtttacaaccaatgaggagaaagtgtactatgatatctgcaatttttgtttcttttcccatcagaagaacctgatgctgcattagtcaacttgtgtagttcttttctcatgggatctgaactacaatacaggtgaggagttgccatcggcgaaaggaaagggcaaggaaaaagctttctgaatgtcacattgacatatcagccaagatcccaaccaaaaaggacatcagatactgcctcattatgctttttgtacaaggatacaaggattggttcttcctccctcctctcatcaatcaaaggccaagaagaaccaagctccaggttagaatctcaaagcaaacaatctacctaaaacttccatcatcatcatcatcatctgttgtaacattaacctcctctccatgctgctctttcagtgcagaaagctatcgcaaacaagaaagagctttgccagttgcagcctgccttttgcatttggactgcaccggttgctttcattcgtcaagnacaccacaaggntgagggaagcagccgtttggaccatctgtgg

SEQ ID NO: 68009 - DNA, 181 bp, Oryza sativa
  Clone ID: PAT_MRT4530_68813C.1
gtgggtacaagcacttgatctttaaagttcaaagaccaccattgatcaggtttctaaaaggagtttcacaaagtttgcccttcgtcaacacatgagttcacgataggcgataggccaccaaggaccaagggcaggactcagttggggtgggtatacttactaatattttatatatctgcgc

SEQ ID NO: 68010 - DNA, 307 bp, Oryza sativa
  Clone ID: PAT_MRT4530_68814C.1
aaaaggcccgcccggcatggcccggcctaggcacggtgaggcacggcccaccagctatcgggccggcacggcccgatcggcacttcgtgctgggccgtgtcggcccataatttattttttgtgtatcgggcctgactgccggcccatcgtgccgtgccggcccggtcgtgctgggccggcccaacgtgccggtggaggggcccaggaacggcccggtggtcgggccgttccgtgcttgggccgggctaaaatgtcgtgccatgggccgggccgtcaggcctcgggccttttggccatctataggaaa

SEQ ID NO: 68011 - DNA, 179 bp, Oryza sativa
  unsure (1)..(179): unsure at all n locations
  Clone ID: PAT_MRT4530_68815C.1
tccgnatcccggtcgccccgcgtccgcccgcgtcgtttcgagcgaattctccaacactttcacccaccggcgcgagaggagaggaagaagatagatgatcgctccgccatactatgggctcaccccatcgcgctccaccgcgtgctccccagagctccgncgctcgngccagtttgaat

SEQ ID NO: 68012 - DNA, 1317 bp, Oryza sativa
  Clone ID: PAT_MRT4530_68816C.1
ccggccgggggcgcggccagcataagctaccccgtttcgttgtctccttgggaggaaaaagggaagggacaggagagaaaccagaaaagcatccgccctatctgctcttcatatatacttctcagttccagtcttccagctgtacgtatgggtaccagcagccggccgacgacggtgaaggaggggaagaaactagagccgccccgccgtgccggcagccgcgcagccatgcagcgctcaccggtggacaaaccgccgttcacgctgggggacataaagaaggccatcccgccgcactgcttccaccgctccgtgatcaagtcattctcctacctgctccacgaccttgccattgccgctggcctcctctactttgctctggtcggcatccctgccctcccaagcatcctccgcctcgtcgcctggccgctctactgggccgcgcagggcagtgtactcaccggcgtgtgggtcatcgggcacgagtgtggccaccacgccttctcggactacttgctcctcgacaacctcgtgggcctagtgctccactccgcgcttctcacgcccttcttctcgtggaagtacagccaccggcggcaccacgccaacaccggctccatggagaaagacgaggtgtacgtcgcgaagaagaagtccgcgctgccgtggtacaccccgtacgtgttcggcaaccccgtcgggcggctggtgtacatcgccctgcagctcaccctcgcgtggccactctacctcgcgttcaacctgtccgggcagccgtacccacgcctcgtcacctgccactacgacccctacagcccgctgttcagcgaccaggagcgcgtccaagtcctcgtctccgacgccgccatcctggccgtgctgctcgcgctgcacaggctgacggcggcgtacgggctctggtgggtggtgcgcgtgtacggcgtgccggtgatgatcgtgggcgcgctgttcgtgctcatcacgtacctgcaccacacccaccgggcgctcccgcactacgactccagcgagtgggagtggctgcgtggctcgctcgccaccgtcgaccgcgactacggcgtcctcaaccgcgtgctgcacaacgtcacggacacgcacgtcctccaccacctcttccccagcatgccacactaccacgccatggaggccaccagggcagcgaggcccgtcctcggtgagtactacaagtttgaccgcacgcccatcatcgaggcaacatggcgtgaggccaaggagtgcatgtacgttgagcccagggagcgcgatggtatctactggtacaacaacaagttttag

SEQ ID NO: 68013 - DNA, 273 bp, Oryza sativa
  Clone ID: PAT_MRT4530_68817C.1
tttgctttaaacctcactctcggcaagaacaggggggggtttataagataatgcgggggaccacccaccccacgggacctaaaacgccatattgaaccacacaaaaaactcacccgaacaaccttagacacgacgccgagcactgcaggacaatcacacctgacagcgaaagcctccatgtggactactggaccaagctagcatctggctagaccacagagaacacgattcaattgcacgagccagcctccctcattgagaagacctagaaaa

SEQ ID NO: 68014 - DNA, 1447 bp, Oryza sativa
  Clone ID: PAT_MRT4530_68818C.1
ccggggctccccggcctgcgcacgcgcctccagccactctcctcccctcccctctctcaactcgcatcgatcgttaatttctgttctcaccggtacatacatacatacgcacgcacgtacatacactcaatcagagagagatggttggtagctaggtagctgtggccaagaaagtgagagaattgggaggaggattggaggaagacgaaggggttgatggggatgaggcctggatgggtaggggggctcgtggaggagagcttcttcgttgggtgtcccgcccacgagagccgcaagaagaacgagaagaacatcttctgcctcggctgctgcgccagcatctgcccccactgcgccccctcccaccgccaccaccctctcctccagagagagtctggtgcaactacaaaagctctaattcttaaatacatccaaactgcagcagttaggaggtatgtgtacaacgacgttgttcgcctggatgatctcgacaagctcatcgactgctcctttgttcagccatacacgatcaacagcgcaaaggtgatatttctgaagccaaggcctcagtcgaggccgttcaagggctctggcaacatctgcttgacatgtgacaggatcctgcaggagcccttccatttctgctgcctctcttgcaaggtggatcacgtgatgatgcagggcggcgacctctccaacatcctctacatgtccggcggctcctccggcgagcccgacctcgccgccggcttcccgcgcttcgagaacctccgcgtcgacggcggcggcggcggcggcggcggcctctccgacgacgacgacgaccaccaggtgaccacacccaactccatcctcgaagaccccctccaccaccaccaccaccagtactacggcggcggcggctccagcaacaacggccggagcacgtcgccggcgccaacgacggccgatgtcccgaggaagaagaagagcggcggcggcggcgggttcttcccccagatcgtgctgtcactgaacaacaggaggaagggcgccccacacaggtcgcctctcgcgtgatcatcatcagatcgtcacgtacgcgtaaaccgtgtttcgatcgctagtacagataatcatgaacacctccccctactattatataattagttgctctcattacctatcttaattgtaatccccttatgattattagtagcattgtagagagagaaagagagtgtgtgtgtggttgtggtgatggatgatggtgtggcctttggctggctagggtcaccatctttagggcaagcagtgttttgacgagatttgagagaggagagaaccagctaagcttgcaaactcctccctgttacaagactaggtaggcacggactttgtgggggcccctgtgcagggaccccaaaagattggctaccaattttgtaaaaaaaaaaaaaaaaaaaaa

SEQ ID NO: 68015 - DNA, 624 bp, Oryza sativa
  Clone ID: PAT_MRT4530_68819C.1
ctcccctccaccggcggcgaccgccgcgtccgcctcttcctgcacgagcacgacccctcgccctcgccggacgagaaccaccaggcgatcctcgtcctcgacctgccacccggcctctccggcgccgacatcgccgccgcgggggccccctccccctctcctccctcctcgaaccatcggcagcgagaatttgttaacagtgaaatttggtaagcccaaagttaccatcggcttagagtcagtatcggcttcaaagttctagaatcggccgatgggagtcaagtcgccacgatgtcgtaaccataatctctagcctgcttcttgattgccaataagggtttcatcggggtttcagccgatttcatgacatcggacctccagccgatgtgtgctttaaccttcggatcgatgcttatttatcatatcattatttgccgattggtttatactggattatattattatttcattacatcgtcatcagccgattgcctttatatcattatctacattggacatatagccgattgcttaaaccctatcgctatcagctggtatcggcattggctattatcggctatcggctggaactactccatcggcttgtcagccgattggctgttt

SEQ ID NO: 68016 - DNA, 5990 bp, Oryza sativa
  Clone ID: PAT_MRT4530_6881C.1
ttacaggatcaaatcaactgttacgctaatatatccgaaggtgagctttggacctacactggagttaagcagatctcccaggccacatgttttctgtcaacacgcttttggcacgcccggtgggacctgattaaaagtcagacgtcagtccctcctcatggccgagaaacagccaccgccaccatcaagcccaggttccgttaaaggcaaggcgccgaagccgggattgaccgacatcattgatgacaacgtcatgccaatcgatccagagaagttcacgcctgagcagaagcaggagtttgaagcaacgatgcagcaagcacgggatcagttcctgagctcgttcatgcaaacccgcaaggaaacgcttgttcagaagtataagataaaagtggttgctgataatcctgggaccggttcctctaaagatggagaagtgaaacaagctccaggcggctcggcccaaccgagtgctaaaggtgctaccgacggctccccgagcgatcaaggcgacaatctgcaaggagtccacggagcacaaggtgatgaggctcaaggtgttcaagatcgggtcgattacgctgtgcatcatgctttgatcaatcaatcaggagtgctagtcaatacattgtcaaacatgatgaagacaatagccgatggctcaatagctgagcattaggctgcaggcccggtttatttgcaaggaggtgtcttcccgaattatcgatcgttgatcactgatgtttagccatcttctcaggcggttccctccgttgcacccacaactcagccgacggcgccaacatcatctcctctacctgctgtagcagctatgacgccaggccagccgataaaccctcggttgttaataagggagcatccacagcctactgggcatatcgcgaatcagccgacccaagatcaagttgctgccatgtttttgccacctccatctattggtgatccagtgcagcagcatttattggtgatcctcattggggttacgagtttttcagattctgctggaatgaagggatgaggttgccatctatcgaaaattgccctggatgcagtgatgtcatcgagagctcaagctgaccacacaatagggataatcggctgagacaggcgagactccctgttcatcagagactgggtccgatgaatcaggattgtggccaaggggatgaggcgatcaggaagaatcaatggtgtccttctggtattttcacgaagaatcagaaaaggagggtccagagattgaggagcagggagcgttttcaggaggttgaaaaggaaatcaatcatcggctgaggaaaccaaaaccaagacagacaggagtggcgtgtctggaatcaggttcccgtagccaatgatgctgaagatgacgaggtgaagaggttggcaaaagggaagacgccactacaatgattttatatatataggagtgttccactagaataattaaattaatatttataactttcattgagtctctcatgggatggattcactcatgtaaaataatttgtcatgcaaataaattgaactttatatataaaatatgtttatgtgagtgtttaattaaacatttagcctttctttccctttttcttccttttctctcttttctcagccgccactattcactgtccgccaaccgttcgatcccgtctaccgcgtgcaccacatcgcttccggccgcgccagtcacgcccgtgccgcgccgcaaccgcgcctccttcccctcagccgcgtccgaccccaaccctagccaaaccgcactagccgctccgcaaccgcatcgcgttgtatcgcgccgtgcgtcgcatcgcgccggacccacgcccgcgcccgcgtcgtcccttccgtacctcgtctggaggaagagccgtgctgccgccgtcgccataggggaagccgggtagccgctggacatcaagaaaagccgtcaagcaccttacgtcgccgctgtctgcccctgtcctgcaccgtgtcgagctccactttgccgcgttttgccatctcgccgtctcgcggtacaccctcgtgcccgtagcgtcctccatacatctaattgctagcgccggctccaaaatcggcgattagcgcccatggccttatcaaatgcttcatgcttgggaaactaccttggggaggtagttgagatacggcatgtggagacatgagtgccacattgccatgacattgatgagatgatttgtgaaagaaaatgaaaactaaacaaatattttcgactagggcggctggaggacttgggtggtgtccggaaaaggctagtgccgtccctggtcagttaaggaccgagccatgaagctaagcatgaaacgacccccgtacaaccgtacttctcgtatgggtatagacctagcagagtaaatagccgagcggaggcaacttaatgcatgtgtgaatcttcccttcccgggagcgccagaactcctctcactgctagaaaccttggacgcctagagtgcatgaggactaaaattcatggagcgggtactgccaaagtgaggttgttgaaaggctttgccatggcaagtctcattcgttgggacttaggctcatgtgctgggcaagtcgcggagtacgggtaaagtgtacattcactgcagtgtgagtaaactaaatctattcgaatagccgtgctcgtggttattgagcaccgagacgtgtattatactaggctagactctaaattcttaaactggttgggtgggataaggggtaaaccccagaaaaccatgacgaccagtggcgggagctctatatatatcttttagcagagtattgaagagaagctaggtaggaacgccgtggatctcatcaagacaaatatggtgcttaaagtctttggtggtaatccgtctgaaaccaaaggtgttctaaatgtggaactaacggttggcagcaagactattcctaccacgatttttgtcatcgatgggaagggttcgtacaacttgttgcttggaagggattggattcatgccaattgttgcatcccttcgactatgcatcaatgcttgattcaatggcaaggcgacaagatagaggtcgtgccggccgacagccaatcgaagatggagaacccaagctattactttgagggcgttgtgaagggttcgaatgtctacgctaaggatacagtagatgatctcgatgacaagcaaggtccaggttttatgtcggccgatgatttggaggaaatagacataggtccagagtttagaaccaagctgatagagctcctaaaagagtttagagattgcttcgcttgggagtactacgagattcccggactcagccgatcgattgtcgaacatcggctacctatcaagccaggggttagaccacgccagcaacctccgaggagatgcaaagctgatatgctcgagccggttaaagctgagatcaaacgattgtatgatgctggttttattcgtccctgtcgatatgccgaatgggtttctagcatagttccagttattaaaaagaatgatttgaataaagctacaccaaaggacgaatatccaatgccagtggccgatcaattagttgatgctgcatcagggaacaaaattttgagttttatggatgggaatgcaggatataatcagatctttatggctgaggaagatatccataagacggcttttagatgtcctggtgcaatcggcttatttgaatgggtcgtcatgacttttggcttgaagagtgctggagcaacatatcaaagggccatgaattatatatatcatgatttaatcggctggtcggttgaagtctatattgacgatgtggttgttaaatctaaagaggtggaggaccacatagccgatttaaggaaagtttttgagagaaccagaaagtatggcttgaagatgaatccaacaaaatgtgcttttggtgtgtcggccggccagtttttggggattcttgttcatgaaagggggattgaggtgacccaaaggagcgttaatgcgatcaagaaaattcagcccccagaaaataagacggagctacaagagatgatcggcaagataaattttgtcagaagatttatttctaatttgtctagaaggttggaatcttttacacccttattgaggttaaaagccgatcagcaatttacttggggagcagagcagcaaagggctttggataatattaaggagtatctcagctctcctcctgttttgattcctccacagaaaggaataccgtttaggttatatttatcggctggtgagaagtcaatcggctcggtgttgattcaagagttggaggggaaggagcgagttgtattttatctcagtcgacggctcttggatgctgagactcggtattctcctgtggagaagttatgcttgtgtctatatttttcgtgtacgaggttgaggcattatctattatctaacgagtgcaccgttatatggaaagccgatgtagtcaggtacatgctgtcggctccaatattaaagggacgagttggaaagtggatattttccttgactgagtttgatcttcggtatgaatcaccaaaggcgattaagggacaagctatagccgattttattgtagaacatcgtgatgattcaatcggctcggttgagatagtgccatggactttattctttgatggatcggtatgtactcatggttgtggcatcggcttagtcataatttcccctaggggggcatgtttcgagttcgcttatactattaaaccgtatgcaactaataatcaagctgaatatgaggcagtgcttaaggggttgcaattactcaaggaagttgaagccgatactattgaaatcatgggggattctttgctagtaatcagccaattggcaggagaatatgaatgcaagaatgatacattgatggtttataatgagaagtgcttggaactaatgaaagagtttcagctggttactttgaagcatgtatctcgagaacaaaatcttgaagctaatgatttggcccaaggggcatcggggtataagccgatgatcaaagatgttaaagttgagattgcagcaatgttagccgatgattggaggtatgatgtgcatcagtatttgagtaatccatctcaatcggcttccaggaaattaaggtatagggcattaaagtatacactgttggatgatgagctttattatcagacgattgatggggtattacttaagtgcttgagtgccgatcaggctaaggttgcaatcagtgaagttcacgatgggatttgtggtattcatcaatcagctcacaagatgaagtggttgcttcggtgtgtagggtacttttggccgacaatgctggaggattgtttcaaatattataagggatgtcaagattgtcagaagtttggagcaattcagcgagcaccggcgtcggctatgaatcctattattaaaccatggccgttcagaggttggggaattgatatgatcggtatgataaatccaccatcgagtaaagggcataaatttatattggtggcaactgattatttcaccaagtgggtagaggcgattcctttgaagaaggttgattctggggatgctattcaattcgttcaggaactattactacggatcaaggttcaatcttcgtgtccgatgagtttgttcagtttaccgatagcgtgggtatcaagttgttgaattcttcaccttattatgcacaagctaatgggcaagccgaggcatctaataaaagtttgatcaaattgattaagcgaaaaatttctgattatcctcggcaatgacatactcggttggccgaagcattgtggtcttataggatggcctgtcatggatcgattcaagttcctccttataaacttgtttatggacatgaggctgttttgctatgggaagttagaatcggctctcgacgaacggagctgctcaatggtaaatatttgaagaaatattacccaagtgtttgggttaacgca

SEQ ID NO: 68017 - DNA, 510 bp, Oryza sativa
  Clone ID: PAT_MRT4530_68820C.1
atggatcccaagaaggagaatcccggcggcggcggaggcggtggtccggcgccgccgcggccggactgcgtgaagtgcttcgacgcgctgtggttctgctactcgccgtactaccagctgcagaactactaccggcacggcgagttcgacaactgcttcggcaagtggggggacctcgtcgactgtctctggctcaagacgaggcgcgcggcggaggcggaggagatcctcgccgccagggagaaggcccggccgcacatctggacctaccgcaccgtcgacgaggcctccgacaactggctgcggatgtacggccaccttgtcggcctcggcggcgaggacggcggcggcggcctcgtcagggtgatcacgccgccctccgccgccgccgtcccgcggcctgcgacgtttcccggccttgccgccgccgctaccgccgccgtgccgcggcctccgccgtttaccggcgctggcgctgcgccgtcgccgccgaagtccggtggttcgtga

SEQ ID NO: 68018 - DNA, 369 bp, Oryza sativa
  Clone ID: PAT_MRT4530_68821C.1
tttggttaataaaaatggcaggagacacttaaactctacatggagttccctgggatgcaaaggctctactgagaaatccaccagtaagcaaagggaacgtaagcgcgccggaggcccgctgataacctggatactaatacggaacaacgcactgacaacctgggtgctgagaatggcaaaaatatgtctagagagcctggaatatggcggaccaagcagatgggatttggctgagctacggctgtgacagaataatcaccgatctaacggcgaactgagcacaccatgaacggccacatgcgacgacacaccgttagactgagaaactgcagggtcgcaggctctgaacatgaacgactctggggtgtt

SEQ ID NO: 68019 - DNA, 453 bp, Oryza sativa
  unsure (1)..(453): unsure at all n locations
  Clone ID: PAT_MRT4530_68822C.1
tcgcttcttcttcagctgcctccttctccacagcccacaggcgggacggcggtgagctcggaaacggcgggcggacgtggggaggcggcggctggcgcaggcgggataggcggcccgcggctcctctcctcccctccccggcagggactccggcgcgcgggcgggcgacgacgggcgaggagccacggctcctcccctccctctcccctcccctcccctccccggcggcgacgggagcgcgcaggcggcggatccggcaggcgggcgggcaggcaacgatgggcggctcgcggccgtccccgcacggatccggcagcagcggccgtccccgcccggatccggcagcagcgtccctctcccacccttccccgctcgagggcgacgacgacgatgacgacnaggcgggagtgggcggtggcgaccacaacaacgacgacgagggggagggctttc

SEQ ID NO: 68020 - DNA, 573 bp, Oryza sativa
  Clone ID: PAT_MRT4530_68823C.1
ccggccggattcttccttcattcacaccttatacgtggacgattgtatcatattcctaagaaatgacagatcattacccccatcttgctactacttgatattgttgcatgcaacgctgctgaactccttgatgttcttcaacatacgtatatacctcatcaactacaatcgcatctcctgctacggcaacaagtgctcagacccttgcacagatctcctaaagcaacatcataccatatcggcaacccccttctggcacaccagctacgatgcaattgcatactacaaccaactcatgcatctgcaccgttgcctacagctctagctgtaacgaggaccatctctgtaccacatcattaaaagagctcaccggactgtgctacaactaccactgctgcagagctgtggtgcttactttgctcagaatcgacttcaagatcattgtttgctgcactttcacttgccatacatatgtgatatctatcctatctactacattgctccgatgacaattcccacacgttggtagaagctctgacactgaattgtaatagatataatgttgtcagatgt

SEQ ID NO: 68021 - DNA, 963 bp, Oryza sativa
  Clone ID: PAT_MRT4530_68824C.1
atggcggcaaccatgctccagcgacggaatcctgaactgagcggggagatcgacggcaggcagcggcggctcttcatgccgaggaggaggacgacagccatggtggatggtgcaacttcaactggcttgcatgtcatcacaaacatcgaaaacagagctatttcgatgtggtacacgcgttcccgtgtgtcctgtgagctttggttcgtcggagtggccggggacttcatcgaacagctgagggctcccaccggcggcagggaagacggcggcatttcgggcggatggaggcagtctttgatgggcgaagtgagggtggtgaaggaggagagtggtgaatcttgtgggcaaggtcttgggcgctttggctgggtttacgacataagttggatggggatgtcacgagctcgtattcacgttcacggcctcactgcacagcgccctgtcctggcgacatccagcagaacggatgggacaacacggatgggggagtcttcaaggctcgaatggctgccactctgccagaggtggagtaaaggagaaggatttggtcggggcgtggaggatttggccgggacggcgagactggggcgctcgttgtcttcttcggaagacatagcacgccacgtgttcgacggattgcccaagagggcagagtgtggagaagaggaagggaatgggttgggcgtctcctggggctttactatggatgacaagtggggtcagtgcttccagggcccacgaacagaggaagggtttgttaatggaattttggagaatggagttgtaggatcggaggttcagcagtggcccaataatttggcacagcccagccgccccaagaggcagccgcctccttcctccttcccgtgggtgctgccaccgtgcgccatgggcgccaccgtgcgccgctctaccattgccacccgccgcttgtatggctttgagtaccgcctccactga

SEQ ID NO: 68022 - DNA, 445 bp, Oryza sativa
  Clone ID: PAT_MRT4530_68825C.1
aagcttcattccgcattaatgtaaatattacaatgtaattgtgccaatacgagtattgttatgtattggttaatcttaccagccacctttatggtaaattaatcgagataatagaacttggtttcctcgtgtcacaaatattgtattagcaaaggtagtttatcttgcacataaaataataagaatatatatactacctaataagtgcactccattttgttcacttaaacatatattcattaaatatcataaagtaatgtaactattgggttggtccattggtttgtagacacacatacactccgaggccgattgaattcatgtgtaccgtaagcaatgcatgtttatgaacaacatgtctataaatcttagagcaatatgatcaaattgtggcttgccagaatcttgcttttaagactctcttcgttcgaaaaaaaaaaagctt

SEQ ID NO: 68023 - DNA, 1038 bp, Oryza sativa
  Clone ID: PAT_MRT4530_68826C.1
atggagaccaagccagtgctatgcaaggcaatagaggggggttttgcgtccctatcctctccagctccagcgaagatcgttatagctgaccttggttgctcgtcgggtcccaacacgctgctagtcgtgtcgggagtgattggcatgatctccaccagtggctactcggaaaagacggaactgcagttcttccttaatgacctacctggcaatgactttaactacgtcttccggtcgctgcagcagctcaagcagcaacttgccgaccggaaggagggattgttggagccaccatactacatcgctggtctaccgggatcgttctacaccaggctcttcccttgccagagtgtccacctcttccactcttcctacgccctcatgtggcgctccaaggtccctgaagagctctcaagtggcgtccatctgaataaaggcaacatctacatcggaaaagctacgccatcacatgtcgtcaaattgttccagaagaagttcaaagaggacttttcattgttcctcacactgcgccaagaggaactcgtaagtggcggccgcatggtgctaacattcctaggccgaaagagctcacaaatgctggcgcatggcgacgtcggcaccatgtgggaattgctcgcccaagctctccaaattttggtccaaaaggggcgcgtgaaggaagaggatctgaccaccttcaacctgccgttctacgcgccatcggtggacgaggtaacagagctgatcgaggagagtgggctcttcgacgtcgagcacacgggcgtcttcgagtcgagttgggacccccacgatgactccaagtccaacggcgatgtggtggccgactgcgcccgcagcgccgacagcatcgcgaactgcagcatcagggccgtcatcaagccgctaatcacggaccacttcggcgagtccatcgttgacgagctcttccaggtgtatgtccccattgttgccaagcatcttgagaaaggaagggctatgtaccctgtcattgttgtctccttgaagggaaggctctaa

SEQ ID NO: 68024 - DNA, 189 bp, Oryza sativa
  Clone ID: PAT_MRT4530_68827C.1
ttatgcagcaatggcggtcgtcggcgtcctcgcgctgcagggctccttcaacgagcacttggccgcgctgaggaggatcggggtgaggggggtggaggtctataattctactattttaatggtgatcaactcttttatcatttatctatgctttacctctttattcaacaatcttattatataccttaa

SEQ ID NO: 68025 - DNA, 1098 bp, Oryza sativa
  Clone ID: PAT_MRT4530_68828C.1
atggagaccaagccagtgctctgcaaggcaatagagggggtttttgcgtccctatcctctccagctccggcgaagatcgtcatcgctgacctcggctgctcgtcgggtcccaacacgctgctagtcgtgtcgggagtgatcagcatgatctccactagtggctacccggaaaagacggaactacagttcttccttaatgacctacctggcaatgactttaactacgtcttccggtcgctgcagcagctcaagcagcttgctgaccggaaggagagattgttggagccaccatactacatcgctggtctaccaggatcgttctacactaggctcttcccttgccagagtgtccacctcttccactgttcctacgccctcatgtggcgctccaaggtttttcccatgaaaatgaaaaatcagaaattttcacaagcagttgtggatccacttgtacaggtccctaaagagctctcaagtggcgtccatctgaataaaggcaacatctgcatcgggaaggctacgccatcacatgtcgtcaaattgttccagaagaagttcaaagaggacttctcactgttcctcgcacttcgctcagaggaactcgtaagtggcggctgcatggtgctaacattcctaggccgaaagagctcagaaatgctggcgcatggcgacgtcgacaccatgtgggaattacttgccgaagctctccaaattttggtccaaaaggggcgcgtgaaggaagaggatctgaccaccttcaacctgccgttctacgcgccatcggtggacgaggtgactgagctgatagaggagagtggcctcttcgacgtcgagcacacgggcgtcttcgagtcgagttgggacccccacgacgactccaagtccaacggcgatgcggtggccgactgcgcccgcagcgccgacagcatcgcgaactgcagcatcagggccgtcatcaagccgctcatcacggaccacttcggggagtccatcgttgacgagctcttccaggtgtatgtcccccttgttgccaagcatcttgagaaaggaagggctatgtaccctgtcattgttgtctccctgaagggaaggctctaa

SEQ ID NO: 68026 - DNA, 314 bp, Oryza sativa
  unsure (1)..(314): unsure at all n locations
  Clone ID: PAT_MRT4530_68829C.1
acgacgaggaggcgggggcaggtggcggcgagagcggccggcnagctcgggcnacggctagggtttctttttttaaattctttttggaatttttttttcgcgatttagtgggtggccggcatcgatggtgtggccagtggccggcntcgtccgcttcgtctntggtggtggcggcggcgaaaatggtgggggcgaggacggagcgagagaggaagggcggcgagatggcgggggcnaggtcgcnaggagccgactagccnaggacagcggccagtagtggtgcgctcnaccccttggatgcgnccgctccgccg

SEQ ID NO: 68027 - DNA, 931 bp, Oryza sativa
  Clone ID: PAT_MRT4530_6882C.1
ctaattcttaggcccgttggcccatttagatagagggatacataaacctaaccctacccggccactcccacagtcccactctcctagccgccacccttcctcccacgacagcgtgcgccggatggcgatgccggcctcggggtggccgacgtcgtgggctccgcggcgcgaggcgacggcgtgcaacggacggcggcgagcggattcgacggtgctggccccggagcggcccaatctgacgttgtgaggcaatggcgatgactggggcgtggcggcgcgaggcgacggcgtgcggcgaacggcgacgcgagcctcgtggtggctggatccagggttggcggtcccggagccgcgggatccgacgtcgtgaggcgacggcgagggctcggcggcgcgaggcgacgacgtgcaactgacggtgatgagcgaatccggtggcgccggccttggggcggccgggtcacggcgatgggcggcggcagcgggctcgactacggcgacggcttcgatgcgcggcgacagcgtcggtgggcgacagcggcaggcggcggatccagcggcgccgccctcgggaggggccggatctgccgtcctacggaggtgttcggcgctcagccccgcgacggccagcggcaggcggccgcagcggcgcggatctatcgccggccatgcggcggctggcaatatcggatatccgatgaaaaatcccagatagtttccgacagtttacgtttccatcggatatcacccttactgtattcgttttcgtatccgagaaaaaaaatccgaattcgtttccgaatccgaaaagttccggatagttccgaccgaatttttccgaatccgaaaattggttcagacggacggaaactatccgaaccagtttcatccctacctacaggacctgttcttcttattcaaaaaatttacg

SEQ ID NO: 68028 - DNA, 481 bp, Oryza sativa
  Clone ID: PAT_MRT4530_68830C.1
taagccaccagaaaggcagcaaaacacaccgcctcctccgcccccgcctccgcctccgcctccgcccgcagcgatcgactccccgccctcctcgccccgctccgtagcgagacccctcctccctctcctcctccgctctcgcgcgctaagttgaggacctcccaaccagtaagcatttcgaggctcctgcctatgcttgatgtcaactatcaaagatgttgtttagcgctgtggaggtcaagtagcattggatcataaattcaaccaaaacaagacaggcatggaccgtgcagacacctcaggctttgtcagtggtggttgcttcagtactacactcctgctgatattcttccattttgtctattctgcgatctgcgtttgaaagatcatcagttccctgttcttcagctattcagtgattcagttgtcatttgctctcaccccgctgtcatattgtcaagctgtgatggataacagcttt

SEQ ID NO: 68029 - DNA, 2941 bp, Oryza sativa
  Clone ID: PAT_MRT4530_68831C.1
agcgccgggggaagccaccagaaaggcagcaaaacacaccgcctcctccgcccccgcctccgcctccgcctccgcccgcagcgatcgactccccgccctcctcgccccgctccgtagcgagacccctcctccctctcctcctccgctctcgcgcgctaagttgaggacctcccaaccagtaagcatttcgaggctcctgcctatgcttgatgtcaactatcaaagatgttgtttagtgctgtggaggtcaagtagcattggatcataaattcaaccaaaacaagacaggcatggaccgtgcacacacctcaggctttgtcaggggaggttgcttcagtactacactcctgctgatattcttccattttgcctattctgtgacctgagttagaatggcggaaggggacaaccagggggaaagggaggttgtcaagaaggccagcacaagcacctcctcccaagctttgtcgatggtgatagagggggagggcaacgaagcggctggatctggagctttgattagcgggctacgtggcagtgaagccgtcatgctcatcgtcggtgttgtgttgaggacctcccaaccaatcatcagttccctgttcttcagctattcagtgattcagttgtcatttgctctcaccccgttgtcatattgtcaagctgtgatggataacagctttgtggatatcccaaatcaacctccaatgaataacccgtttgtgttaatggaaccctcagctcagagctacatggtgaaccttggcaaaagcacaccccacatggactgcctgggatctgcaatggctaattatggccatggtaatcaaaatatacagtgcattgatagcatcacaactagagatgatggttgcaggttagtccttgggttgggtccaacgccgaatttttactctgcagagtgtcagcccactggagtagacaagcttaaagaagctccttcgttatctggacagggtttgactatcaccgatcctgggacattgaggcttggccttcaaatggatgtttctcaaacaattcaacctttgcaagcaccagatggaacagttcattcttttactgttgttgatgaagcctcagcatctccttctgtaaggagcatcggtggctacatgccatccctactctttgctccacgctccggttcttctgctgtcaatgagacccacgaagcagaaacccaggattcactagacctgacgcacagcgacaatgataacactcagcacgttcaacatcaccttcagctgagccctgagccttctgccatgacagatacttcatttggtgtgagctccgacgttgtcacggcaacaaccacatcagaacaaaggaatcatccccggcatcccaagaagtgcaggttcaagggatgctcgaaaggtgcgagaggcgcatcagggctgtgtattgcccatggaggtgggcagagatgccataagcctgggtgccataaaggtgcagagagcagcactgcctattgcaaggcccatggcggtggtcggcggtgcgaggagcttggttgcaccaagagtgctgaagggaagacagattattgtatcgctcacggtggaggtcgtcgttgtgaacatgatggctgtcctaaagctgcacggggtaagtctgggcggtgcatcaagcacggtggtggtaagagatgcacggtgcaaggttgcatccggagcgctgagggtaaggccgggctctgcatttctcatggtggtggccgccggtgccagttcccggactgcagtaagggggctcaaggcagcacattgtactgcaaagggcatggcggtggcaagcggtgtatctttgacggctgcagcaaaggtgctgaggggagcacgcctctgtgcaaagcacacggtggcgggaagcgatgcatgttcgaaggtggcggcgtctgcccaaagagcgtccatggtggcactgagtactgcgtggcgcacggaggagggaagcgctgttcggtggctggctgcaccaagagtgcccgtggccgcacggactgttgcgtgaagcacggtggtggcaagaggtgcaaggtcgacaactgcagcaagagcgcccaggggagcacggacttctgcaaagcccacggcggcggcaagcggtgcacttggggaacgggctgcgagaagttcgcccgcggcaggagcggcctgtgcgccgcgcatgggaccttggcggccaagcagcaagagcgcgacgcggcgaacaacggcgcgggcatgatcccgccaggccttttcagcggcatagtgaccgtcgctgccacgagcagcatgacgaacgagtactcgtcgtcgggcatcagcaccgcgtcggactgcgacggcacggtgaggagccaggcgatgatgatacctccccaggtgctggtgcctcgctctatgatgccctcatcgtcgtccgaacctaccgtgcatgggggcagagagggaggctgtgccgttccggagggaagggtgcacggtggcggcctcttgtcactcctcggtggcagcttcaggaacgccgacatggataagctctgaatttgcttctccggctgccgaattctgttagtttggttgtgtacataaacaaggcaatttattttgccgatttgaacttctttggctttttttcctttgtctagataaatggtccgtggttgctttagtccagtcatttgtacattcatgtccgtggcaattgtcctgaacaccttctcatgtcagtttagtcagtcggaggaactggcaataaaatttgtgtattggtttaaaaaaaaaaaaaaaaaaaaactcgagggggggcccggtacccaattcgccctatagtgagtcgtattacaattcgctcccagagctcaaagtttaccatgaagactctattacttgtcaaatgcctatccataccaacctctgga

SEQ ID NO: 68030 - DNA, 3072 bp, Oryza sativa
  Clone ID: PAT_MRT4530_68832C.1
atgccggcgccggcggcgacagcggccgcggggatggggagtggcggcggcggcggcggcagcggcgagcaccacatgcggggacacgcgcacctgaccaactgcatccacctgcggcaccaccacgcgcacgggctcggcgccgggagcgcgtcgtcggggcggaggcggagcccgacggggtcgtccgcgtcggcgtcggccgcgctgatgcgggacctgctcgcgctgcagcgctcgcgctcgctgcgggacccgtccacccgccgctcggtggactcgtcgtcgagggtcgccgccgagccccagggggtcgggctcgggctcggggacgacctccacgacgacagctcccgccccggcggcgcgctcaagacgctgctcgaccagctcgcggagaacccgcagcccaagccgtctcgcggcccgcggcgccggttcaagggcggcgcgggccggcgcgccgctcccgcgtccgccaccggcggcgctctagatcgcggcgtggacggcgccgccgccgtctcggtgaactccagctcgcaggaggccgtctgcggcaacaagtacctcttcggcgtcgtcggaggcgacgacgacgacgacgacgagtgcggggtggagctgcagaggccgcaggcgtcgcaggactcgcgcaatgtgtgcggcatcccctggaattggtcacgcatccaccaccgcggcaaatccttcctcgacatggccggccggagcttctcgtgcggcctctccgaccccaagtcggcgtcggcggcgcggaggtccattgccgccacctccgcaggctcgtgcggtcacatggacggctcgcgttcgcatccgcatttcccggtcacggcgaggctgacctcgaccagttcggactcagactcgttgcctctgctcgtcgacggcgtgcgcaatggcatcggtggcattgccaggagcttctcgggggagctcgggatattctcgaatcagaccagtgagcttgattctgacctcgcatcagaggcacggtcggggcagaggtcacggggctcgcatcgaggccggcaccagagcctcacgcagaagtattcgcccaagactttcaaggacatgattgggcagagcttggtggtgcaggctctctccaatgccatcctgaagaggaaaattgggttggtgtatgtgttctacgggccgcacggcacaggcaagacatcatgcgctcgggtgttcgcaaaggcgttgaattgccattctcctgagcacccgaggccctgtgattcatgtgcgtcttgtatcgcacacaatctgggcaagagtaggagcttagtggagattgggcctgttggtaacattgaccttgacagcattgtggatatccttgataatgtgatgctttcacctgtaccaactcagcacagggtgtttatagtagatgattgcaacacattgccacctgatacgtggagtgtcatatcgaaggtcatcgaacgtgcacctcggcgtgtggtttttatcctcatcagccccaatcttgatctcccacatataatcgtgtcgaggtgccaaaagttcttctttcccaaactgaaggagtgtgacattgtcaacactttacagtggatttctactagcgaaggactagatgttgatagagatgccctgaaacttattgcttcccggtcagatgggtcactgagggatgcagagatgactttggatcagctgagcttgcttgggcagagaatctcaatgtcgcttgtccaagaacttgtcggcttggtttctgatgataaattggttgatttgcttgatttggcactgtctgctgacactgtgaacaccgtgaaaactttaagagatattactgaaacaggtgttgagcctttggccctgatgtctcagcttgccacaataattactgacatccttgctggcacctatgcattcacgcaggaaagggttcgaagaaaattcttcaaatgtccaaccttatcaaaagatgacatggaaaaactacgccaggccttgaaaacactctctgaagctgaaaaacagttgagggtctctaatgataagatgacgtggcttacagctgctctgcttcaacttgctcctgataaacaatatgttctgccgagttcatccacaagtgcaagctttaaccagggcctgcttacctgccctgagggggacataggaaggagcactgctatagatcacactaacatatatgctggtcctcatggtttaccaagaaatgctaatctgggggttgattctgacaacaacatggcaggcacccggagaggaaagggacctgcaccaactgtgcaactaatgttcagctctcgtgtgaataaatccaaagctgagaggtcaagggaacaagttctacatgcatttgagtctgtccttgcttctgctataacacttgaaatccggtacgaaccaaaggatgatgcaagggcaggtcatgttccagctatttcaccgtatcctgaggatagcacttccaatgtggcattaaggaggtctttcactagacatagttccgcttcttccagaggtgaaaacttaattaggagacttcaaaaagacaacgtggtccatggtgctaattcaaatcagacacgatgggtgcaatcagatccacatatattgactgaaggtgaaattatagaagtaggaccttctcaagtggactggcatagtgaaccaaataacagcgccggtgtcagaaaagaaaacatagttcttcaaggacgagaagttgtgaataatgagcatggccgacaaaacagcatagtaaggggcaaggtatctcttgctcatgtcattaacaaggcagaaacttgttcacaacaaggaggagattggagcctaagtcgagtttactttgttggaaggcttcaagcactactagacgaaagggtacattccattggatatttggatcttcctctattcgagagcatgcagttgctggccttttctctgaaggaaacaccgtacataaaggctgcagcattgcagccagcatatgctcttagccaggtatatccaagagagaagaggtga

SEQ ID NO: 68031 - DNA, 426 bp, Oryza sativa
  unsure (1)..(426): unsure at all n locations
  Clone ID: PAT_MRT4530_68833C.1
actagtggatcccccgggctgcaggaggagagatgtcatatgagcaggcagtcagttgcagccttgtggttgcacctccctttcctgctgtcctcttttttttgttttccctggtttctcttcatcagaattaaagcagatattttttgtggcggccgtggatttccattcatcntgatgatcagctagtaatattctgcaagtgccttccgatagaattgagcgatgattctgaggtcagatactcatcagatgctcgaaggataagtgggtttcagacgatgctgcaaaagatattagccggcgagtgaggtgaggctactagcctactaggcttatcgccttgtataaaactaaaggagtcagtacagagacatcaggtaaagtcagcatatgcagctatccatctatgcatgcatgcaccaa

SEQ ID NO: 68032 - DNA, 222 bp, Oryza sativa
  unsure (1)..(222): unsure at all n locations
  Clone ID: PAT_MRT4530_68834C.1
tactatccactgggcagttccttcgcaggacagtcggcgttaacatcaacccaacacacccactttccaagcctatccagggtccaaggcacacacgaggcgcacatctataggttgttagcagccctgggtaagtgggcacctaggttgagcctgacaaaattctttccccctaagtttcttttggtgaacccaactcanacagccttcagcaccttctgt

SEQ ID NO: 68033 - DNA, 339 bp, Oryza sativa
  Clone ID: PAT_MRT4530_68835C.1
atggaatcataactcacatcattagacactgccagtgttgaggccaagtggcttcgtgatttcctgatggatttgccggtggttgaaaaactagtaccagctatcctactgaacagtaataatcaaacgatgattattaaggtgaacagttcgaaggataatatgaagtcatttagacatgtaaagagaagactgaagtctatcaaaaagctaaaaaactccgaagtgataacattggaatatgtccaaactgctaaaaatatgacatatcaggttactaagggaatatcatgtaatgtgatagacagtgcatcaagtgagatgggcttgagacccact

SEQ ID NO: 68034 - DNA, 624 bp, Oryza sativa
  Clone ID: PAT_MRT4530_68836C.1
atggcgcaggcggccacgacctcgacgctgccaccgacgcaggcgccgtgcatcttgaacccacgccgaagcgccaccatcatcgtcgaggtcgccagctgctgtcgccgtcgtctgcaccgtcgccatccactgccgtcgtccccgaggttgccgttgctgtcatcggccttcttcggcaaccctgcggccgccgcctgccttcgccgcctcaggacccccgcgaccgccgcctgtcttcgtcgtgccggaaacccacggccgccacctgtctcgccgcacaagggagcgggaaggcccgcggccgccgccccgccggccatcgactcgcgctattgcgccgttatcgcgcacgccagagacctgctaccgcctcatcgatccgccgggtgggttggagatgggagggagtggcggtggcggcgttgctcgacggagaggttgagggagacgaggcggccggtaagagctcagcagaagggcaccggcagacggagcccgagcatcggcggtggggcggccggtgggtacggaatgccgaggaggttgccggggcagtcgccgacgggcggcgctgtggcgactgatttggccgggggcgcaaaggagggaggcggtgcctag

SEQ ID NO: 68035 - DNA, 207 bp, Oryza sativa
  Clone ID: PAT_MRT4530_68837C.1
atggtggaggctcttagcggcggtgtcctagggacggcgacactaggcgagctccagcacccgaatctgactatggccaagccaggattgcagaaagtagctgccaagcgagcgttggcgccaatatatgagtgcgggaacggccgggagtttgaaagtttgcgggaaatgatggtggtgcgacatagcggattcgcggcgcactag

SEQ ID NO: 68036 - DNA, 108 bp, Oryza sativa
  Clone ID: PAT_MRT4530_68838C.1
atgaacgataacaaggtgaatgaacgtgaacgagaacgagcgaacgaacgtgaacgagccaacgaacaaaagacgttgtcggagtcgtccctcaagccggactggtag

SEQ ID NO: 68037 - DNA, 279 bp, Oryza sativa
  unsure (1)..(279): unsure at all n locations
  Clone ID: PAT_MRT4530_68839C.1
ggtgacgatgcccgacccgacgacgacgacgacgccgacgccattcatgaacccggtcaccgcgccgcccaccgncactntncccgtcacccccgggatgtatccngcgncgtagnctgctgatgatgtctgnaacaagnaagttcctgaacttgggttgatnttgacgagcatgccggtgtcgccgaagtcgcagctcgtcggcgaggggttnctctaggaagtaggagttgaaggcgtaggaggtgtnggcctgcagggtgtttgggttgtagcagt

SEQ ID NO: 68038 - DNA, 4152 bp, Oryza sativa
  Clone ID: PAT_MRT4530_6883C.1
atggctgagaaaccgccagcatcgccatcctcggctggtgaacctggctctgttaaagctaagatccataagctgggtctatctgaggttgatgaaggcaacattgtgcccgtcactatggataagttgacacctgatcagcaaaaggatcttgaggcaatgatgcagcaagcacggaatcagttcttgagctcatttacggagacccacaagggaacacttgttcagaagtataaagtaaaagtaattgctaatgttcctgggacaggttcttctaaggatggagaagtgaaacaagctccagatggcgcggctcaatcgagtaataaaggtgctgcagatggttctcgaggagatcaagatgatggctctcaaggagttcagggtgttggttctcaaggaactcaaggtgatggtgttcagggatttcaaggtgaaggtcttaatcaaaatggcaatacaacacagttacagtttaacaactttcaggatcaggttgattatgccgtgcaccatgctttgatcaatcaatctggaatattagtcaacactttgtcaaacatggtgaagacaatggttgatggttcaatggctgaatatcaagctacaggaccagtttatctaccaggaggggtattcccgaattatcggccattgatcactgataatcagccagttgttcaatccattcctccaaatgcagcactagctcagccgacggcaccagtatcggctcctgcacctgctgcaccatcattagcgccatgtcaattggtgaatcctcgattgttggtgagagagcaaccacaacatagtgggcagaatgtgaatcggctaactcaaaaccaggttgcggctatgtttttaccacctccacctactgttgatccaacccagcagcagccgattcagcaaacaccaccaaggcagcaggttgtacagccgattcaacaaacgccaccaatccaacaggttgtgcagccaattcagcagatgccacctaggcagcagggtatgattgctcctatcagggagaagttctcgtctcaagattttgatagcttgtcacatcttgcacagaaggtaaccttgcatgaacagaggtttgcagaagctaggaagaactttaataaggttaatcatgtctgtccctacatatatggattggatgatgatgatgactatgagatagcagcagccgaatgggtgagaagtaaaaaggttataccatgccaatgggtaaagaattctggaaaagaggagaggtatgactttgatatttccaagactgataagatttttgatttattactccgagagaaaaagattcaacttcctgctggtcatacaatcccatcggctaaagaattgggcaagagaagattttgctggaataagggtatgaggctgccatctatcaaggactgtcctgggtgcggtaatgttgcagaaagttcaagccgatcgtataatagaagcaatcggctaaagcagacaagggttcctgttcatcaaaggttgggcccggtgaaccaagattgtaaccaagaggacaatgaagacaggaagactcaatggtgtccttctggtatctttacaaagaatcagaaaagaagggttcaaagattaaggaacagggagcgctttcaggaggtcgaacaagaaatcaatcatcggctaaagaaaacgaagccgaggcaggagtggcgcgttaagaatcaagctcctgtagccgatgagcccacagccgatgaagcaaagagattgcctaaagggaaaagtgttgtaactgtatcggttaacatggttttcatgttgcctgctgaatttggggtcaagcaagccaatgtcgataaagttgaagaggaatcggctaagttgattttattaccagaacaagcagtcttcgagaacctggaaggaacagagaatcggcatcttaaaccattatatataaatggctatgtcaatgggaagccgatgtccaagatgatagtcgatggtggagctgcagtaaatctgatgccttatgctacattcaggaagttgggcagaaacgctgaagatctcatcaagacaaacatggtgctcaaggattttggtggcaatccatcagaaactaaaggagttttgaatgtggaactaaccgtcggcagcaaaactatccctacaacgttctttgtcatcgatgggaagggttcctacagcttgttgcttggaagggattggattcatgccaattgttgtattccttcaaccatgcatcaatgcttgattcagtggcaaggcgacaagattgaaattgtgccagccgacagtatagttcctgttatcaagaagaacggcaaagtgagggtatgcattggcttcagagatttaaataaagctaccccaaaggacgagtatccaatgccagtagccgatcagctggttgatgctgctttaggacacaagattttgagttttatggatggtaatgcagggtacaatcagatctttatggccgaagaagatattcataagacaacttttaggtgtcctggtgcaatcggcttatttgagtgggttgtaatgacttttggtttgaaaagtactagggttacatatcaaagagccatgaattatatatatcatgatctgatcggctggttggttgaagtctacattgatgatgtggttgttaaatctaaagagatagaagaccatatagctgatttgaggaaggtttttgagagaactaggaaatatggcttgaaaatgaacccaacaaaatgtgcttttggtgtatcggctggccagtttttaggatttcttgttcatgagaggggaattgagattactcaaaggagtgttaatgcaatcaagaagattcagcctccagagaacaagacagagttgcaggagatgatcggcaagataaattttgttagaagtttacttgggggggcagagcaacagaaagctttagacaatattaaggaatatcttagctctcctccagttttgattcctccacagaaggggataccttttaggttatatctgtcggccgttgagattgtgccatggactttattctttgatggatcagtatgtactcatggttgtggcatcggcttggttataatttcccctcggggggcatgttttgagtttgcttacacaattaaaccttatgcgaccaataatcatgctgagtatgaggcagttctcaaagggttgcaattactcaaggaagtcgaagccgatgctatcgaaattatgggggattcattgttagtaattagtcaattggcaggagaatatgagtgcaataatgatacgttgatagtttataatgagaagtgccaagaactaatgaaggaatttcagctgacgattgatggggtattgcttaagtgtttgagtgccgatcaggctaaggttgcaatcggagaagttcatgaagggatttgtggtactcatcaatcggctcataagatgaagtggttgcttcgacgtgcagggtatttttggccgacaatgctgaaagattgtttcaaatattacaagggatgtcaagattgtcagaaatttggggcgatccagagagcaccggtgtcggctatgaatcctatcattaagccatggctatttagatgttggggaattgatatgatcgacatgattaatccaccatcgagtaaagggcataagtttatattggtggcaactgattattttacgaagtgggtagaggcgattcctttgaagaaggctaattctggggatgctatacaatttgttcaagaacatataatctatcgatttggtatttctcaaaacattatgaccgaccagggttcaattttcgtgtccgatgagtttgttcagtttgccgatagcatgggtatcaaattgttgaatttttcaccgtattatgcacaagctaatgggcaggccgaggcatctaacaagagcttgatcaaattaattaagagaaaaatttctgattatcctcggcaatggcatactcgattggccgaagcattgtggtcttatcgaatggcttgtcatagatcgatccaagtccctccttataaggttgtttatagacatgagactgttttaccatgggaggttagaatcggctcaaggagaacggagttgtaa

SEQ ID NO: 68039 - DNA, 290 bp, Oryza sativa
  Clone ID: PAT_MRT4530_68840C.1
ccatatttataactagtcttgtccaccggagcatagcagcggcagcttcaatggacgctctcctcatggcgaaggactttcaggccctgcaagtgcgtgccgtgctctccctagagctggccaagctcaccgggaagagggtacacctgccggccggaccctgaggtgaacccatcgcttgccactgggtcccgcgcggtgacgacctcaaccacacgaaactgatggccctgcctcggcctgtcggcgacaagctagttcttcgaataggactgcggaagctgctggta

SEQ ID NO: 68040 - DNA, 1476 bp, Oryza sativa
  Clone ID: PAT_MRT4530_68841C.1
ttttttttttttttttttttagcaacgaatgcctgtgtttattacgatagctccttttgttgcgagtatcttacactcaacatgcacaaaaacgcctagataagagcaattcaagaacttctaatcattccgcacccaacaaattggtgcgctctatttaaccttttcttctgcaagggacacaatagaacactatatatactccttgtgtatagatattaacaccacaccagccgtgcaaaaggatgctaaatcctgacatattggatgctttacggttaggatttgttggttttcaaagtgtacaagcaaagaaagctcaaactgccacgaatgcgacgtctctactcaaagtccgggaattgcttccaggttgtacttctctgatgatgtcaggccattctctgggccctgctgtgttcttggttgctccagcacgttcagcttctgaaggtaggagtaggaggcattgggatttggcggtgggctcgggttgcttattttgcttgccaggaaccgtctgatgagtcctctgaggaatggagccatggtatctggctcatactccaggaaatacatgattccccccatgcacatgcagaaaagagccacctggaagaatgtaacaaaagcagacaaaaaggtcgtagagcgaactgcacccacaagagctcgccaacaagttgcagctggtgattccaagaacttttgaaggcgtagaacaacaaatgggacaaatgtcaatgagaaatacagagggaatgttttcttgaacgttgatgaagagacactgggcagacgcaagtgaaaaaagtaatgcatctccatgcctccaatggcttccccaaaagtgaaatctgttcttagactttgcagaattatatgcacagcattaaatggtgtttcctttttccgaaatctccgaaggaaacatcgaagtgcatgatatgatccagtgaatcctccaaaaagtaatcctacccggcaagcttcctccctcactattagatctttctccgaaaccagttgcttgaggtcgaggagggaggagtaggatctgcggcgggcgagcttgaaggcgcggaggaggatgccgatgccgacccggacgccgtaggagagcaggaagctctggcacaggttccccgccgcgtgcgccgcgcacgactccccctcgtgcccgcaaccccacccaccaccaccaccaccgccgccctcctcatctccatccacccccttcccgtccccatccccatcccctcctcccccgtgctggtggcggtggagctcctggatggcctcccgcagccgctcctccgcctcccgcagcctccgcgccgccgcctccgacgccggcgcggcctgctgcggggtcggcgggtgaacggcgtcagggggaggagggggagagcgcgggccgagggtgggctcggcgccggcggagaggtcgaacgacggcgtcgagaggaacggcat

SEQ ID NO: 68041 - DNA, 869 bp, Oryza sativa
  Clone ID: PAT_MRT4530_68842C.1
acaagttgcagctggtgattccaagaacttttaaaggcgtagaacaacaaatgggacaaatgtcaatgagaaatacagagggaatgttttcttgaacgttgatgaagagacactgacattatgagccaagcacgatgctctgtcaggatgtatcacagaacatggaataatgggtggactttttgttaaatttatcaaatttgaattcttcttgttagctaaataggctgagagaccaatgagatccacatgaccacctctgcagcaatctcttacagccttgtaaacaggttccgcaactggtccagtcttttggatgaagtcttggtacgatttaggtaagctttcaggcctcataacgaaagaatacataacctgggcagacgcaagtgaaaaaagtaatgcatctccatgcctccaatggcttccccaaaagtgaaatctgttcttagactttgcagaattatatgcacactgggcaagccttgccagaagatatagagaaagggtgcgcctcctacttgaatcatctagcgctactatcgccaagcctgccaccgaacctgctaatattgcattaaatggtgtttcctttttccgaaatctccgaaggaaacatcgaagtgcatgatatgatccagtgaatcctccaaaaagtaatcctacccggcaagcttcctccctcactattagatctttctccgaaaccagttgcttgaggtcgaggagggaggagtaggatctgcggcgggcgagcttgaaggcgcggaggaggatgccgatgccgacccggacgccgtaggagagcaggaagctctggcacaggttccccgccgcgtgcgccgcgcacgactccccctcgtgcccga

SEQ ID NO: 68042 - DNA, 431 bp, Oryza sativa
  Clone ID: PAT_MRT4530_68843C.1
cccacgcgtccgcccacgcgtccgcttggaatcaccagctgcaacttgttggcgagctcttgtgggtgcagttcgctctacgacctttttgtctgcttttgttacattcttccaggctgccatctgtttgcatcgtaaagttgcaaccaaagaccacaagtttgtgtactggtttgctggtctgatgtctggtctttctattcttttggaaaagaaagccagaagagctgagctagctctctatgtacttccccgcgcaggggattctttgtggtatatattaatcaaccgccatctgctcccaaatattaaaaacgctgaggtggctcttttctgcatgtgcatggggggaatcatgtatttcctggagtatgagccagataccatggctccattcctcagaggactcatcagacggttcctggcaagca

SEQ ID NO: 68043 - DNA, 609 bp, Oryza sativa
  Clone ID: PAT_MRT4530_68844C.1
atggcatttgttaccctccaagccataggcaggggagagcttaggaggccccgtgcactgacctctaacctatacgacatgctaaggagagtagagttgcaactatgtgtccctattgcttgtctctctagaagtccattaagctttggagagtatataagcaggagggggttccccagtgtgggggtggaaaaattttcaaaggatccaagacacatcggagttggagtaaatgaaatgacgcacatgcgttttgtgggttatcaaaaatatatgtccaacaatataaggttagtttctttcttgtccgacaaggacttgtatcaacccatgggtataaatatgtacagccggggtctatgtaatctatcgctacgatcaatacaattcggcgcatcaccagtcctccacaacaaccggtgggtcgatatcacgccattacctggagcattcatcatcaatataggcgatctcatgcaggtacctgttgacgaaaaaatcaaacacaccggcctaggagatcttcttagctccagtgcaggtccaaatatgatgagatgcgggcatgctagtcagtttgatcctgcaactgacaagatatgcaaatag

SEQ ID NO: 68044 - DNA, 328 bp, Oryza sativa
  unsure (1)..(328): unsure at all n locations
  Clone ID: PAT_MRT4530_68845C.1
gcggaatagacgtatagatgtagccttatatcgtcagagacttctctgtgaccgtgggtgctacctggtcaggttcggaaaaatgcgtgcatgtgtacattctagctttgctcctgtgactgttaatggtgttcctaagaactgataggcttgcgcctagcggtgggctgtgctgcaggctgcacctgaggctgtaccatgctctatgaaatgcacttacatgtgtactcagatgagaaatatgtggttcaaactgtagagcttagtctagagtntagactaaaaaaaataacataaacaaaaaacaagactatgcatgtgtattgat

SEQ ID NO: 68045 - DNA, 997 bp, Oryza sativa
  Clone ID: PAT_MRT4530_68846C.1
atggcttaccttgttattcaattgcggcggcagcctctgcgggctcggttcactgctccatccaatgtttccaaatatgcggatgcttctactcaagtgttgtcagcaaattttcctggaaaaggcagtaatagcctgagtctctcaagtgcttttcctcacaaaacagttgctccaagttataagaagacaacgagggtgaatcaagggcttttcaaacctggcaccaatcgaaaccttacttggcaaaagcctgtgtcaagtgataaccttgtgataagtttctctgatgatgatagtgggtccgactctggaatgtcaaagcaagataagagaggcaggaaagacagttcacaaggtacatataaaacagggattaatgtgcacactggaattatgagggaagaagcacctcaacagaagatccatgctgcaaaggttggatctgcaaattggtcagctgttccactaacatataggaattcaggggtaggcaggggattgagtgccacctttgctaggagagatccacctgttcggcaagtcactccccaaaaggccatccataaggatggaaatgttgtgggagtaagttcagcggttcataatttggaaagcttacgccacaaaattgctgctagggaaaatgaattgaaagtgaaaagaccaatgtcacctagtcttttgaaggactcaagttttcccactggtcagacaaggttacccttggaaaagataggatttgaagcttcaagcattggtgcatgctcacaccttaatggtcctgttggacatgatattagaccaattaaaaggttgaagcccaatcaggagtgctccaacaaccaagttcttgttaatcagataccacctgtacctactggcaagtcactggggaaaagcaatgtgcaaccttgtgaaagaagagagcatatcgaaaatggaattagggactgcaatgttaatgaagcagtgcatactgtaacaacagaaaccg

SEQ ID NO: 68046 - DNA, 273 bp, Oryza sativa
  Clone ID: PAT_MRT4530_68847C.1
atggagcggagaggggcggagcagggtgggcagaacggcggcggccggagcagggcggtggagtggaacagaccgtccttgtcaaccactgttgcacccgccacaactgtcgcgcatgctccggctgctgccggctccgctctactgaccttctccctctgtcagcacatatccttcgcccccgcctccatgcccagctctgcccgcttgggttcagggctcttcttgctgtggctgccactggagccgttcggccttaccgatgcttgttag

SEQ ID NO: 68047 - DNA, 700 bp, Oryza sativa
  Clone ID: PAT_MRT4530_68848C.1
agtggatttccccgtgcccgcgcctcgcgacgggcccaaatccaacacgacgacgaggaggaggagatcgagtgcgccaccgaatcgaataaccacaagccgcggaagatttcccctccccccggtggatccctcctcctcctcctcctcctcctcctcctccggggtcgcctcctcccctccgatggagtccgggagcgagagcggcagcgggagcgggagccgaggggagatcacgctggccatcggcggtggcggcgcgtcggcggcggcgtggactcggctggtcagctccggcgtggaggacgtgctggtggtggggggcgcgggtggctggcgtggaggaggaggaggagatgcatccgttggactcttgcgaagtggagtctactccgaggcctccgaaagctcgcgccggctcgatcctcgccgggtgacaactgacaaggaggagggactgaaagtgaggaaactcctccgggattgtgctgctcgttttccggcaagccaagaccagatgatcctcacaccttaccaccagaaaactatcacttacaaagttacatatgggtttgtgtttttgtttaaaccccctttgctcttttggtggtgtttgatagcgccttccttaatatcggtgatcgatgatgtttagagaccgtaggaaaggatgaccattcgcttgttatcattaggagct

SEQ ID NO: 68048 - DNA, 242 bp, Oryza sativa
  Clone ID: PAT_MRT4530_68849C.1
ttttgttataaatgataccaaggcaagagggaggcagggcacggtgagagtgccatcgctgagatggacatcagcaaggcgctgggcgcaacggcggcgagggcggccaccttggtggccatggctgagggtcttctggtggtggtctacttgtacgagccgtaccggaaggtgtggcacgtgccgggtcccgtgcctctgccgatcatcgggcaactccacctgctggccatgcacgggcc

SEQ ID NO: 68049 - DNA, 132 bp, Oryza sativa
  Clone ID: PAT_MRT4530_6884C.1
atgcgttttttttacacctgtaaggacgcccccataatcgtgaggtatatcgctgtcgtgggcaggagcctatagtccgagaagctattccgcgtcaccctcgacctcatcacctgggcctgcggctccatg

SEQ ID NO: 68050 - DNA, 122 bp, Oryza sativa
  unsure (1)..(122): unsure at all n locations
  Clone ID: PAT_MRT4530_68850C.1
gttaactttcacaatggtggtggtggtaatatttgccctacaaaagcaagtnggtgtntggcaaattcagcanttggaagcacccggctgcaacggcgttggattggccttgcagtaatggt

SEQ ID NO: 68051 - DNA, 229 bp, Oryza sativa
  Clone ID: PAT_MRT4530_68851C.1
ttgccgatgctgggccggatccggccacttatctatgggcgtagagcgtgatatacctcaggctggtgacgttgcccatgtccttccggatggctccacacagggagttggagttaatcgctaccgactcaagcttggacagccggcacacctcttaggggacctccccctgtagctgtttcttgttaaagtcgagggtggtcacatacccttactcccccatctcctt

SEQ ID NO: 68052 - DNA, 183 bp, Oryza sativa
  Clone ID: PAT_MRT4530_68852C.1
atgggcgacgacgacaagggcgcaccaatttccgaggcttggggggtgggggcgagtggcaaaaggctgtggcgcgacgatgagatcccaaggacagggacaggtaggcgcggggaatcgataacggtggccatggccggccatggcaacgggggtggatgctttcgcagcagcggaggctga

SEQ ID NO: 68053 - DNA, 159 bp, Oryza sativa
  Clone ID: PAT_MRT4530_68853C.1
atgtcgagttgtggtagcgcctgcgtatcggtggcgccgagtatttatggcacgttgaaggctttctctccacgtccacggaccgcctgcctccctgcagccactgagacacgtagttgcagcaacagcagcgaggtcggactcggacgctacggctga

SEQ ID NO: 68054 - DNA, 2847 bp, Oryza sativa
  Clone ID: PAT_MRT4530_68854C.1
atggcgccatggcggtacgggcgacggcgaggcttggtcacgcactctcgcatatgccgggaggaaacggcagcttacccatctgtctacggaggcgagaagcggcggcggaggcggctcgcggaacggcataccgccgcattaaccggagctctcgccgggaatagtggctggcggcggacgcagctgcgatggccgtgctcggccgccaccaccgccgtacccccgcgggtggccgacgatgctaggagaggcaccaccggcgggagaaggggaagaggcagaggaagagattgtttcttggtcgccggccgcctccccctccctcccaaactcgctggccgccgcgctcgctcgccgctgctctgccgcgcgctcgcgctccgctactctgtccgcggcctgctcgcgctccactgctcgacccgccgctgcgctcgcaccttccgctgctccgttgccacgctcgccctcgttgcgccgcccgcatccgtgctcgccgctccgccgccgcgctccgctgcctccgctcagccgccggacgaccgcaccgcgtagcctcgcccatggcgacgacgacggtagagagccgatgacgacggcggccacggcgcgcggctcctccgtccgcagcccctgtcgaactggggcagttcgacagggtactgtcgaactggggcagttcgacagggtactgtcgaactggggcagttcgacagggtactgtcgaactggggcatgctgtcgaactggggcagttcgacaggtaccctttcgaactggggcagttcgacaggtaccctttcgaactggggcagttcgacaggtaccctttcgaactgcctccgttcgacagggtgctaaacttgcgatttcgtctaactgactggctaattcagctattccatcgtcctcttctgaaattgcagaaagatcggaggagtgaaagtaagaatccatgacttgtggaggtggcatgccatccccatcgcagaaaaatggtctcagaggcacttgcagcgcatccacacccccttcgagcatctctattgcctcactcatcgtcggccgatcgtgtgatttcatctgaatgcaccacagcccaacaaggcacaacttcctctctagctcatgcatgttggcaaagttggatatctcatcaacttgttgatctgctattagcttatcataaacccatgatgggtagtatgccttacttgcactggaatctgcatttggatctgcattccttcgtcctccgaccatctcaagcagcaacattccaaaactgtaaacatcagacttgccagatatgatgccaaagctccgggaaaccatctcaggagccatataacccactgttcctcgtaaagccctatctgacacaaagctcttgtcccttgggtacagtttagcgaggccgaaatcagcaacttttggaacaaagttatcatcaagaaggatgttgtgtggcttgatgtcaaagtgtagaatctgcatatcacacccttggtgcaggtagttgatccccctagcaatgcctagagcaatctcattgagcttgtcccatgagaatcttctctcagatgagaagatgtgtttgtctagagatcccctaggcatgtactcgtaaaccaaggcccttctcatttcctcggagcagaaccccaccaaacgcacaacattaacatggtgaatcctaccaatggtggcaacttcactgatgaattcttcgccgttgcaattagagtagccattcagtatcttgatagccacatggagatcacccgggagcagcacacccttgtatacagaaccgtagcctccttggcccaacttttctctgaaatgccctgtgattgcgataatgtcggtgtaggcataccttgtcggaccgagcatttgttgcattcggagaaatttctcgagtgcaagcatcgtccagaacatcaaggcatacaatattatgcccaagagtatattgtatggcgatggaattttagcagttgcgcaatccatgaaattttcagtcaccgaaagactaaaccaatctgaaagtttgcctataccagtcgatttgggaatcgactccattaggcaatccttgaagcttcgatttctatggtgtctgaaaggaaattggacgcggaatcctttcctcatgaattttactacgtcttcataacttaagctatcaactgctggtgctacacgacccataccatccaaaggagtcatggctaggtaaccacaggaaggctcgaggttttcaatgtaacaggacaatctgccagtcaagacataaacgaaggagctgctggtgcccatgcaagcaacaggactgtacataacattgttgtttatttccttggaacagttgacaaagaaagaccaccaacgtgaagcagggtccaattcgacttggatgttgtatggcgatgattcttcgtcgtcactactaacatcatcatagtaataaggaatgcgtttccagcgaggaagagggcaattgttacgtgaatccgagatgttggcgtcgacaacccagaaggtggaatcactgtagtcgatgcctgtcacaaagtatgttccgttgtcgatctgaattgtagccttgtcatcggtgcaagtcagctcatacgatgcaacaccgcactcgtagcctcgccggtggaaaggagacgcgactttgctaagatggccgcaggtgaacggagggcatgcaggtattccatgaattaaaggccattctatatccggatctgggacgacaaatcgaagcacacacaggacagagaaaacttgcagggcagtcgagcgacggaagaacggaccaggaatcaccat

SEQ ID NO: 68055 - DNA, 779 bp, Oryza sativa
  Clone ID: PAT_MRT4530_68855C.1
atgcatgtcgcggtctacaagtccggcgaggcgtaccgcggcaagaaggtgctcgtcgtcgggtgcggcaactccggcatggtggtgtcgctcgacctgtgcgaccacagcgccctcccggcgatggtggtgcgcgacgccgtccacgtcctccctggcgaggtgctcggcaagtccacgttcgagctcgccgtgttgctcatggcgtggctcccgctctggctcgtcgacaagatcctcgtcctcctcgcctggttcgtcctcggcaacctcgccaagctcggcatccgccgccccaccactgggcggctgggggcgatggggcgacggcttggaggggggcgtgcagcgccggcgatgtcagaggatgccattggggacgtcttgcatatgttagaggacgtcgttggcgatgaagccaccactttggttggttcttctacgccgtgtaacagtcatcacaatagtgatgcggagttgatgcagtcattgtcatcgtagatgacgtgatcgatgccgtcgtcggtgacgcggtcgttgctgtcatagaggacgcagtcgatgtcgtcgatgaagcatcttcgaaaatataaaccggggtgaattttcgtcatccgcttgcgaaaatcaatttttccaggcggaccacttaagaggtccgcatgcggaaggtttgcccgcttatagctgagctcgagcttgaaccgagcttgcctaaattctcgaaggtacaataggctcggctcgatcctcttccacttccgctcatctgctcccat

SEQ ID NO: 68056 - DNA, 279 bp, Oryza sativa
  unsure (1)..(279): unsure at all n locations
  Clone ID: PAT_MRT4530_68856C.1
ggtcccccttttttgggggggggggggctcccccccccccccctttccccttttttccttttttttnnccttttttttttttttcttataattttttccctgggtaaaatttttaccctttaaaattcccccaaaaattccccccctatactataaagtaaaaaaccgggggccccctggggggccctaacctaaaataaacccagtgaatctaatggcccctttcccggtggaaaaacctggggccccccttgcttcaattattttacaatatcccga

SEQ ID NO: 68057 - DNA, 281 bp, Oryza sativa
  Clone ID: PAT_MRT4530_68857C.1
ggggtggggggggtttttatttttttttttttgcccaaacgacgcagggtaattaggagcagaacggaccctgcattaggaaaaaagcaccccggacctggggtcaaacaggtccatcgatacataccccagctaaaacccataccttaatacgggggggcgatatatacaaaaagcggacggccccctggctacacggacacccaggacgggaccggattttggaccggacaccacgcggggcccacggggaccaacttaatcccctcgaacacacagct

SEQ ID NO: 68058 - DNA, 1228 bp, Oryza sativa
  Clone ID: PAT_MRT4530_68858C.1
gcacgaggggccacttgacacagaaccacctcgctgcttcgcgctagctaagtcgctggttagaaagagacgcggcaatggcgctcctacggcctctcgcgctctgcttgctgctcgtctcctgcgccgcgcagtcgccggcctcgtcgccgtcggcgtcgaacggtcctccgctcagcgccgccacgccgcaggcatccgccgcctcgtcgccacaggtctcggccgctgcaccgaccacggcagcctcggcgccacaggtgtcgtccgcggcggccccgaccaatgccgcctcggcgccgcaggtctccgccgcggccccgaccaatgccgcccaggcgccgaaggtctccgccgcagcaccgaccaatgccgcctcggcgccacgggtttccgcggcggctccgcccaatgccgcctcggcgccacaggtttccgccgcggccccaccgaccacggccgccgcggcgccacagctggccgccgcgtcaccgccgaccgccacctcctcgccaccggtctccgcgcctactttggcagtggcagctccccctctggcaacaccgcccaccgtcgccgccccagtggcctccccgcccctcgccactccaccggcggcgcttcctccggccaccgcgccaccgacgtctgcacccgctccgctgctcgccgccccggtcctggcgcccgtcgccacgccgaccttggcccccgcgccagctcccgtatcgccggcgccagcgcccgtatcgccggcgccggctccgatcgtggccccgaccccggcgcccatcttggcgcccgagctgtcgcccctgatggcaccggagctgtctcccctcggctcgctgtcgccggggccctcgctcgcgccggcgatggcgtcggaggatgagtcagcggcgacgcgcgcgcccgccggcattgccgcgttggtggcattggcggcggcggggctcgtggccttgttttaagtatagctgagtcacatcaccgcctactttcgcgttttctgtttaactttgttattactcgatcgttttcccgtcgtcttttttgtgttttgcgtgtctgcatgtatgattcttggtgtacgataaattggttatttatttctttttttatcatttatttatggatgataaatatggatcgggatatcctacagttgccccgaaaaaaaaaaaaaaaactcgagggggggcccgtaccaaaaaaaaaaaaaaaa

SEQ ID NO: 68059 - DNA, 357 bp, Oryza sativa
  Clone ID: PAT_MRT4530_68859C.1
atgggcaccaataccgcaccttcattgtggggcaccgtcctcttcaagcaagcactcaatatcataatactcctaagtcctaatagtcagcaggttcttgacatcccactcatgcagaatgcaacaatgcaaacagatctcctggagctcacgaaaagtgtgggtacaagggacgatgccggtgttaggcaactggacgccaccaagttagacctgcttcagggaattgcaatggaagagatcagcaaggttaaacagatgatgctaaagggtccagggtggaagaacaggatgctggcgaccatggctttcattcaagagctcgtcgaggacatgctccccggcacgtcggatctc

SEQ ID NO: 68060 - DNA, 2883 bp, Oryza sativa
  Clone ID: PAT_MRT4530_6885C.1
atggccgagaaacaagcaccaccaccatcaagcccaggttccgttaaaggcaaagtatcgaagccaggattgactgacatcattgatgacaatgtcatgccaatcgatccagagaaattcacgcctgagcagaggcaggagtttgaagcaacgatgcagcaagtgcgggatcagtatttgagctcattcatgcaaacccgcaagggaacgctggttcagaagtataagataaaagtggttgctgatagtcctggaaccggttcttctaaagatggagaggtgaagcaagctccagacggctcggctcagccgaccaacaaaggtgctactgatggttctataggaaatcaaggcgacaaccctcaaggagtgcacggagctccaggtgatgttgctcaagggctgcaaggaggaaatcttaatcaaaataatgagctagcacaagactttttcaacaactttcaagatcgggttgattacgcggtgcatcatgctctgatcaatcagtccggggtcttagtcaatacattgtcaaacatgatgaagacaatagccgatggttcgatagctgagcatcaggctataggcccggtttacttgcaaggaggcgtcttcccgaattatcgatctttggtcaccgatgttcagccagctatgcagcggctccctctattgcacccacaactcaaccaacggcgccagcatcaactcccttacctgctacgtcagccatggtgccaggttgctgccatgtttttgccacctccacctattgttgatccagtgcagcaacagccgattcagcagaccccaccaatccagccggttgtacagccgatccaacagactccggtgcgacagcagatcgttcagccgattccgcacccggggtcggccaatgcatcggccgggttcgcagcacctggggggcaacctgcgcagcaatttgtaaaccaaatcgtcccagagcatttggttcaccatgcacaaccggatggcactgtggtacctcagatggttcctgagcacttggtacgcaacattcagtcgaatcttcataactaccaagggggacaagagggcgtgtcaacttatgagcacatcagccgattccttgctcagtgtggtgaagcatcggctgtagacgccttgagagtcaggttgttccggttatctctgtccagatcagcttttacttggttttcctctttgccatatgggtcggtcaatagttgggccgatttggagaagcaattccacagctatttctacagcggggtccatgagatgaagttgtccgacttgacagcgatcaagcagcggcatgatgaacccgtgcacgagtatatccagaggttcaaaaagatgaggaacaagtgctttagcttgagtttgactgatgctcagttagcagatttggccttccaggggggaaagattaagtttgatgattccaagaagccgatgaaggtcgatgggaaccctttacctgttaacatggtgcatacagcttgtcaagcagccgatagggcccgtgcaaagggtttccaagtaaattcggctaagattatcaataagtatacgaggaagtatgataagcagcaggagaggcgttttgaagagtacgacgatggttttgatcctcattggggttgcgagttcttcagattctgctggaatgaagggatgaggttgccatccattgaaaactgtcctgggtgtggtgatgtcatcaagagctcaagccgaccacataatagggatgatcggctgagacggacaagactccctgttcatcaaagattgggtctgatgaatcaagatcgtggccaagaggacaaggaggttgaagaggaaatcaatcatcggctgaggaaaccaaaaccaagacaggagtggcgtgtcaagagtcaggttcccacagccgatgatgctgtagccgatgaggtgaagaggttggcaaaaggaaagagtgttattacggcaccaatcaacatggtctttacattgccagctgagttcgggatcgaccagaccgatgtctatgaagtggaggagtcggctaagttggtcctgtcaccagaacaagcagtattcgagaaacccgaggggacagagaatcggcatcttaaaccattatatataaacggttacgtcaatgggaagccgatgtctaaaatgatggttgatggtggggccgcggtgaatttgatgccctatgctacgttcaggaagctgggtaggaacgtcgaggatctcatcaagacaaatatggtgctcaaagactttggtggtaatccatcggagaccaaaggtgttctaaatgtggagctgacagtcggcagcaagactattcctaccacgaagtatggcttgaagatgaatccgacaaaatgtgcttttggtgtgtcggctggcaagtttttgggatttcttgttcatgaaagggggattgaggctgaatatgaagcagtgctaaaggggttgcaattactcaaggaagttgaagccgataccattgaaatcatgggagattccttgttagtaatcagccaattggcaggggaatatgaatgcaagaacgatacgttgatggcttataatgagaagtgcctggaactaaggaaagggtttcggctggtcaccttgaagcatgtatctcgagaacaaaatcttgaagctaatgatttggcccaaggggcatcggggtataagccgatggtcaaggatgttaaagttgagattgcaacaatatcagccgatgattggaggtatgatggtacttttggccgacgatactggaagattgtttcagatattataaggggtgtcaagattgtcagaagtttggatcaattcagcgagcaccggcgtcggctatga

SEQ ID NO: 68061 - DNA, 640 bp, Oryza sativa
  unsure (1)..(640): unsure at all n locations
  Clone ID: PAT_MRT4530_68860C.1
gcgtgtccncgacgctgatgtttgcttggggattggtgcggttgcttgccatgggccaggtggaaaatgatccatggaatgctgcttgcgtgtntttgctgccttgcctttggtgcctgggatgggatnggctggctgatggcttggtgattggttgattgctgggtggtgattgtgcacacaagtgtgcggaaaccctgttggaaaggtgaagaaaacccaaggagctatgattggagcctggcaacaaagtgcattgcacttggccctggtggaatgctgtttggatggggctggagcctttgatggatgttggacatgatggtnttgctagctgtgttgcattgctgaaggacataggacattggggagatggctgtgcagatgtgtgattgatggtgggttggttggctggagagctgatgctgcccccaatgtgttggtgaatacatgaggaacaattgaggattgagggttgatgcagttgctgcctttgctttncttcatgcatgtcgccatgaacgaagttataccctgtacatagtttctataggctagngaaatgaccaggcatactttaccnannatatggcgtagtgcattcgagaaaaaaaactnaataataaaaaaaaaaaaaaaa

SEQ ID NO: 68062 - DNA, 537 bp, Oryza sativa
  Clone ID: PAT_MRT4530_68861C.1
atggaggtggagctcgcccgggcggccgatggcggtagtggaggcagaggcggaccgggcggccggtggcggaggaggagcttgcccgtgcagtgggcgaaagaagcggagctcgcttgggcggccggtggcggagatggagttggaccggcgaccggcggcggagatggagttcgaccggtgactggcggcggaggcggagctcacccgggcagcaggcgactaaggcggaggcggacagggcagccggtgacggaggcagagctcgcctgggcggcgggcgtagagctcgccctcgcgcgaatgtggcggctacggtggcggccctccccgctgctgcactgcaggaaagggggaatcgacaaagaaggagaggggaaaggggaggaacggcggtggtggccctccacgctgccatccgccttcggcgcagctctatctctcccggcaacaccgccgcaatgccttccggccgccgcccgccctccccaccgcgctcctagcgttagagattggagatataattggagtatatga

SEQ ID NO: 68063 - DNA, 2322 bp, Oryza sativa
  Clone ID: PAT_MRT4530_68862C.1
atgggcggccgcaaatctccatcaaagtcgacacaggtcgggtatcctgctctcagcaaccgaggaggtatgcatgttgggggaagtcctgtttttactggtaacatgagtgcaattgatggttcaatacaagcttcctcctcgtacttgactaaagatggtaaccacaattctgctcttggattggcagctgctccagtttgtgggaattttggcccgcgaataacttatgtggctagcgttgcgggtgggggcaacattgggagaaccataagctctgccggaatgtctatgcctactgttgcatcccctgtgaatttgtctggaagtggggctcttaatatccgaggatcaaaccaaatgggtggtactcatcaacaaggattgccggctatgaatatgcttggaagctctagttcagcacctggaggaacactatctaagaaccaattgcaggcaggaagcagttcgtctggttctccaggaatgcgacatgatggacctctaagacaacaagcatttggtattaatgctgttcagcaaaaccaggaatttagaatccataatgaggacttcccagctttaccaagattggaaggtatggagttgcatcgcaaggatcatcttcctaagaatgcaaatattatgcaagcacaacattatcctatgggcaaatcatctggctttaacacgggcagcagttgtccaccccgtaaacaacataagcagacagctaattcggttcaaaatactgggcctgaaaatgttggaccaaagccagtaaattctccaaggttgcctttaaatccgaggcctcgtgaacaagttatccagcaaaatcatgaaccacaggctcagaagtcagttaggctgcagtcatcttccggcccagagtctcacaaggttcagagtcccaagtcttctcagagaactgataccacaccagagtcttacaaggttcagagtcccaagccttctcagagaaccgataccgcaccagagtctcacaaggttcagagtcccaagtcttctcagagaactgataccgcaccggatccatatgatccatatggcttacatggactactgagggtaatgaagttgaaagaggagggaccggcatctcttgctttagggattgatttgacaacactagggttggatatgaactcttcagataatctttacaagacatttggctctccttggtcaagtgagccagttaaagaagagtattcttatgaaattccggattgctactcttctatgcagcctccacccctgcaagcgttgcattttctgaggtttcacctcatgacactattctacatcttctacagtatgccacaggatgcagctcagttatatgccgcgaatgaaatatgcaaatacgggtgggtttaccacaaagagctgcgtcagtgggttaaaagagctcctaatacgacccctctcgtcaaaactacaacttatgaacaaggactctgctatctttttgatgccaacatttgggatgcaattcctaaggacaactttattctccgttatgacgatatcgagaagatacctgcccttcctccccttcttcctgccacccaaaatcctgccacccaaaatggtagtgtaagaataaacaagtggtatgaatcgagtgctcgcgcatggacgccttcggctgcggcgagctcgatcggccaggcgctggtggttgtggatggcctgacgctctacgcgcgcctcggcgccggcgccggcgacgacctcctctccggcctcgccttcggcgcggccgacgaggctctgctgaggatcaagatgaacaccatcatgtcatgccggccgccgctggaccaaggtgatcaccttctcctgcaagctgcacgccgcggatgcctgtggcggagcgaacagtggacacacaagaggattcttctgcacggacaccatcttctcgttcgacggcaacacattctgggcggatctctcgcagggcttcatgtgctgcgacaccgccatcgtcttcaccggcgacggaggcggctcaccaccacccgtcgatctcagatccgcgtctgccccgtagtacctacttctccacaccttcaaatccgagaagcttggatgtatggagatgcaccacacctaggcatcttggacaacttcatcaaactcgtttccgttaacaccgcccgcatcgctgttgccgctgccacaacgaaagaagaagaagacatgccatcgtcaccgtgccacgccgccaccgaagcagccaacgcgacggtggccatatggactctggacaaatcagctgatgagacttga

SEQ ID NO: 68064 - DNA, 259 bp, Oryza sativa
  Clone ID: PAT_MRT4530_68863C.1
atctttgttacacaacatattaattgctatctttgtaccacaaccatttaaaaacactttgatcattacacagtcatagtgtgcacacctactcctttgtactccctctgggcagaggaagcataaataagcccctatgacagatctgcctccggtgccgcctgtcattctctgattggtaggagccgtgatactctttcgcaataactattactccatctttgcatagataaacacattatctcacacactaatagcc

SEQ ID NO: 68065 - DNA, 236 bp, Oryza sativa
  Clone ID: PAT_MRT4530_68864C.1
ctagctgagagcgcgattagcgcccttttttttttttttctaggatgctcaagtctaggccgatctattccaactcaagcacgccaattgtattgcaaagaagcatttaataatgccgaaatactaaggttaattgaataggcaataacaacctgggattttttttctggcccgagtattatcgtgacccctgtcacgcgcgagacccacagctctcttttatggggggctcgcgg

SEQ ID NO: 68066 - DNA, 388 bp, Oryza sativa
  Clone ID: PAT_MRT4530_68865C.1
aatcccccatttccccttttccctggggaaaaaaatcccttcccaaaaggggccccccaaatgggcaccggaaaaaaaactccctttttaaaagttaaaattggacccggggaatttttggttgggttggcccccctataaaatttgggggggggattgggggttcccaaaattggaaaaaaaaattttttggggaatgttgggcctgtttttttcccaaaattggttaccaaaaaggggggaaaacctaaagggctaaaaaggccccctaaaaaaaaattttccccaaggcctttttccaaaaaggaaacccaaattggttttccggggggttaaaaggcaccaatgggggcccatggaatcatgcttttcccaagggggggccccg

SEQ ID NO: 68067 - DNA, 212 bp, Oryza sativa
  Clone ID: PAT_MRT4530_68866C.1
gctagcccggaggaagttgttactggggggggggttttatatatactagccatggattagcaaccggatgagaacacctggatagtggagccgtggatggacaaatcgggctatccatacgaagcggggaactagccgaccgctatgtagactgcctggttccgatattagactgcgctcgtatgggcttatgcatgggacatggccatgtg

SEQ ID NO: 68068 - DNA, 1021 bp, Oryza sativa
  Clone ID: PAT_MRT4530_68867C.1
cccagcgtccgctttggaaagtgagttcaagtagactttcggaatacaaagtagaggatcttgcggcagctctattgaattctttcacctacaacattgggcaggtatttccagatatctgagttactaggtgtcattcaccaataatgtgctgacctcattttgtttctcttttagatagcctactttgtagctaatctttctggtctgaagagaattttcttccgaggtgcttatatctgtggccatgagaagactatggacaagatttcccattccctcagtcttatgaacgactcgggtaggccccaaatttgttgagagatgaggtgcgtgagcaacatggaaacggatgcggcaaacagtttgttactgaggtgtgtaaggttgttctacaccgtaacagtttggcagtagttttaagtcaatcatgatttttacggaggaagtgtgcacacaaggtgttacccagttagcagtgctcatgcctgttgagctcaggttgtatagttacttatttttctgtacttattggtgttggtgttcccttatctctcttgttctgtatcttgtatatatggcagcagccgggataatgaacatatccggtgtcgttgtattatttgcaaaaatcaaaacatcccttatcaggttgagtattggtccaaaagccaagttcaaacaacatttctgtgccatgaggggttcttgggaacactaggtgcattttggagctatgagaacatgggtattgacggcttggcagcacatgaagtcataagggaggtcttgcttggcgctccttacactgggcagcttccatctctgcctctgactcaccaacaggacaatggagaagatacgaccattgaaggagaagtagaacggcttcgacatgacaatgctgtgctgaaggctgagcttgaacggttacaaagggagaacacagagctcaaagcgaagctggtaaaatctggcaaaccaaataccttttatcattaaacataggatgcagtagtga

SEQ ID NO: 68069 - DNA, 269 bp, Oryza sativa
  unsure (1)..(269): unsure at all n locations
  Clone ID: PAT_MRT4530_68868C.1
ccgaaaccgctgcggcggcgccgcccgatctgcgagccaagtatcaaaaaaaacagcagcgcgcgcccgcccaattcgtgtgcggcgaccgttgatatttctcgtctctcatctcaccaccggtaggcgcgctccaagaatctcccagtagctcantgcctctntcggtttctcggttctctctcccccccagctncaganaacacggtggcgttccggggcgagangtgtttttcgtaatggcgacggttggcgccgtngacgggttt

SEQ ID NO: 68070 - DNA, 450 bp, Oryza sativa
  Clone ID: PAT_MRT4530_68869C.1
atggcttcggagccaatcaaaggctccggagtgcccggggaactagagtgctcatcaagcatggaggaatggtccacggactgcggcgggggcgtggcagccgcggtgctcgccggggccggccacaaggtggtggtcatcgagaagggcaactacttcacgtcgcgggactacacatccttcgagggtctgtcgatgaaccagctctacgagtctggtgggttcgtcaccacgatgaacggcggcgggctgctcctggccggatccacggtcggcctgcctcaagacgcccgagttcgtgctcagggagtgggcggccgcgcacgggctcccgctgcacaggcggggacgggcgaggcgagcgtggcggggacggccagctgtggcggtggaggcggaggtgcccgggcggttggtggcggcagcggaggcggaccgggcggcgggtga

SEQ ID NO: 68071 - DNA, 4803 bp, Oryza sativa
  Clone ID: PAT_MRT4530_6886C.1
atggccgagaaaccaccgccatcaccgtcctcggctagcccaggttctgttaaagaaaagattcagaagttaggtttgttagacgttaatgaagggaacatcatgaccatcgatccagaaaagttcacacctgatcaaaagaaagattttgaagagatgatgcagcaagcacgggatcagttcttgaactcattcatgcagacccgcaagggaacacttgttcagaagtataaaataaaggtagttgctgatgatcccgggactagttcttctaaggatgaagaagggaaacaagctccagatggcttggctcaaccaagtgacaaaggtgccacatatggttttccagcaaatcaaggtgacaactctcaaggagtcacggggttcaagggagttcaaggtggaggtgttaatcaagacgacaatgcagcacagttgcagttcaacaactttcaagatcaggttgactatgctgtacaccatgctttgatcaaccaatctggaatattaaccaacactttggcaaacatggtgaagtcaatggttgatggttcaatggccgagtatcaagctacaggaccggtgtacctaccaggaggagtattccctaattatcgaccaataatcactgataatcaaccagtcgtccagttaatccctcttaatgcaccatcggctcagccgacggcaccagtatcggctcatgcacctgctccaacactttcggctccaggccaagtaattaatccccgattgttgcaatctcaaggaacacctcaacaacgaccatgggccgatttgattgcagatgtcatgaaggagcagtttgggcttaggctgaaagatgctggaaatttgtaccgacaaccctatcctgagtggtttgagagggttcctctacccaatcggtttaaggtaccagacttttcaaaatttttagggcaagatagtatatcgacttataagcacattagccgatttttagcccaatgtggtgaagcatcggctgtggatgccttgaaggttaggttgttccggttatctttgtatggatcagcctttacttggttttcttctttaccatatggatcaattaacagttgggccgatttagaaaagcagtttcacagctatttttatagtggggttcatgagatgaaattgtccgatctgacatccatcaagcaaagacatgatgagcctgtgcatgagtatattcagagatttagagagatgaggaataagtgctacagcttaagcttgactgatgcccagttagccgatttggcttttcagggtatgattgctccaattagggagaaattctcatctgaggattttgaaagcttgtcccatcttacacaaaaggtaaccttgcatgaacaaaggtttgcagaggcgaggaagaattctaggaaagttaaccatgtctgtccttatatgtatgggtcggatgatgattctgagatagctgcagccgaatgggtaaggagtaaaaaggttataccatgccaatgggtgaagaactcagggaaagaggaaaggtatgactttgatataaccaaggctgacaagatttttgacttgctactccgggagaagcagattcaacttcctgctggtcacgcatttccaacggctgaagaattgggtaagaaaaggtattgcaagtggcataattctgggtctcaaacgactaatgattgcaaggtattcaggcagcagatccaagcggctattgaaggatgcaaaatcaaatttgatgactctaagaggccgagaaggttgatggcaatccttttcctgttaatatggtgcatacagctggccgaacagccgatgggggccgtgcaagaggttttcaggaagtatgacaagcagcaggagaagtattatgaagaagatgatgatggctttgatcctcattggggttgtgagttctttagattttgttggaatgaaggtatgaggctgccatctattgaggactgtcctgggtacaatgatgttgcggagagctcaagccgatcatatagtaggggcaatcggctaaggcagacaagacttcctgttcatcaaagattgggtccaaaaacaaagccgaggcaggagtggcgtgttaagaatcaagttcttatagccgatgaagctacagctgatgaagcaaaaaggctggctaaaggaaaacgtgttgtaactgcttcggtcaacatggttttcacgttgcctgccgagtttgggatcaagcaagccgatattgacgaagttgaagaagaatcggctaagctaattttgtcaccagagcaggcagttttcgagatgccagagggaacggagaatcgacatcttaagccattgtacataaatggttatgtcaatgagaagccgatgtccaagatgatggtcgatggtagagctgcagtaaacttgatgccttacactacattcaggaagttgggcagaaacgctgaagatctcatcaagacaaacatggtgctcaaagattttggcagcaatccatcagaaaccaaaggagttttgaatgtggagctgacagtcggcaacaaaaccatccctacaatgttctttgtcatcgatgggaagggttcttatagcttgttgcgtggaagggattggattcatgctaattgttgcattccttcaactatgcatcaatgcttgattcagtggcaaggcgacaagattgaaattgtgccagccgacagaaccaagttgatagagctgttgaaagaattcagagattgctttgcttgggagtattatgaaatgcctggactcagccgatcgattgttgaacatcggctacctatcaaactaggggttaggccacaccaacaacctccaaggagatgcaaagccgatatacttgaacctgtcaaggctgagattaaacgattatataatgttggttttattcgtccttgccgatatgctgagtgggtttctagtatagttcctgttatcaagaaaaacggtaaggtcagggtgtgcattgatttccgaaacttgaataaagctaccccgaaggacgaatatccaatgccgtttttgggatttcttgttcatgagagggggatcgaggtgactcaaaggagtgttaatgcgatcaagaaaattcagcctccagagaacaagacagaactacaagagatgatcggcaagataaattttgttagaaggtttatttctaatttatctggaaggttgatgcattatctactatccaatgagtgcactgttatatgcaaggtcgatgttgtcaaatacatgttatcggctccgattttgaaacgaagggttggaaagtggatattttccttaactgagtttgatcttcggtatgattcgccgaaggcaattaaaggacaagctatagccgattttattgtgaaacatcgtgatgattcaatcgactcggtcgaggttgtgccatggactttattctttgatggatcggtgtgtactcatggttgtggtatcggcttagttataatttcccctaggggggcatgttttgagtttgcttatactattaaacctaatgcaactaataatcaagatgagtatgaggcagtactcaaagggttgcaattactcaaggaagttgaagccgatgctattgaaatcatggaggattctttgctggtaatcagtcaattggtaggagaatatgagtgtaagaatgatgcattaatggtttataatgagaagtgccaagaattgatgaaggaatttcggttggttactttgaagcatgtatctcgagaacaaaatatcgaagctaatgatttggcccaaggggcgtcggggtataagccgatgatcaaagatgtgaaggttgaaattgcagcaatgacagccgatgattggaggtatgatgtgcatcagtatttacagaatccatctcaatcggcttctaggaaattaagatataaggcgttgaagtacactttattggatgatgagctttattatcggacgattgatggggtgttgcttaagtctttgagtgccgatcaggctaaagttgcaatcggcgaagtccatgaaggaatttgtggtactcatcaatcggcttatgagatgaagtggttacttcggcgtgcagtcttcgtgtccgatgagtttgttcagtttgccgatagcatgggtatcaaattattgaattcttcaccgtattatgcacaagctaatgggcaggccgaagcatcaaacaaaagtttgatcaagttgattaagcggaaaatttctgattatcctcggcaatggcatactcggttggccgaagcattgtggtcttatcgaatggcttgtcatggatcgatccaagtccctccttataaacttgtttatggacatgaggctgttttgccatgggaaattagaatcggctccagaagaacggagttacaaaatgatttaatggccgatgagtattacaaccttatggccgatgagagggaagatctggttcagtcacgattgcgagcccttgcaaaagttaccaaggataaggagcgtgttgctcggcattacaataagaaagtagtacccaaagatttatcagagggggaacttgtatggaagttgattttgccgattggaactcgtgatagcaaattcggcaagtggtcgccgaattgggaaggaccgtttcaaatttataaggttgtctctaaaggagcttacatgttgcaaggactcgatggagatgtttttggcagagcactaaatgacaaatatttgaagatatattacccaagtgtctgggttaatgcatga

SEQ ID NO: 68072 - DNA, 557 bp, Oryza sativa
  Clone ID: PAT_MRT4530_68870C.1
tgccgtctaggggcggaggcactcggcggcgcccggatctgagaggaccggcggcggcgcttgcgaaggtggcggcgacggtcgtagacgaggcagaggtggcggagtttgtggagatggcggtcgcggtgctcgtggagcggaggtggcggtcgcggatgagcggcggcactcgtggaggcggcggcggcggccgtggaggcgaggcggcgctcgtggacgcgcggaggtggtggtcgcgggcaagcggcggcgctcatggaggcggcggcggtcgcggacgaggcagaggcggcggcgctcaaggaggcggcggcggcggagaaggacgtgcggaggtggcggcgggtgtggaccaagcggcgacgctcgtgggcgcccggcggagctcgcgaaggtgggacgagtttgtccgccagtttttggcggatcggttggtcccggatctgagaggattattcctttccagggaccaacccatcccatccacccttaaaccgaacacctttaaaagtgggttcgtcccatcccatccttgcaaccaaacactaccttag

SEQ ID NO: 68073 - DNA, 413 bp, Oryza sativa
  Clone ID: PAT_MRT4530_68871C.1
tgccgtctaggggcggaggcactcggcggcgcccggatctgagaggaccggcggcggcgcttgcgaaggtggcggcggcggtcgtagacgaggcagaggtggcggagtttgtggagatggcggtcgcggtgctcgtggagcggaggtggcggtcgcggatgagcggcggcactcgtggaggcggcggcggcggctgtggaggcgaggcggcgctcgtggacgcgcggaggtggtggtcgcgggcaagcggcgacgctcatggaggcggcggcggtcgcggacgaggcagaggcggcggcgctcaaggaggcggcggcggtgctagcggaggtggcggtcgcggatgagcggcggcactcgtggaggcggcggcggcggccgtggaggcgaggcggcgttcgtggacgcgcgga

SEQ ID NO: 68074 - DNA, 731 bp, Oryza sativa
  Clone ID: PAT_MRT4530_68872C.1
agaagctggtacgcgtaagctgggcccctcgagggatactctagagcggcgctcgcgatctagaaccttctgactaaatcgggcacgatgactggtggaataagcggtggaatggcagctagatctaataaatgggatgacagcataatagaatcttggaagaagaagaaaaatcagtatgaatctgaaatgtcagaacttggatcccccagggagttacagagaagggagcttgctgtgtctgagaaaataactggacttgagaaaaagttacattacttgaatgttgaagagaataatctcagggagaagctacgcagattggaatctgagaagagtaatatagaggaagagatcgatcgtcttgagccagtaaaggaggagttggagacccgtattggtaaaaaggaacgggaagtgagagttcttgagaaaaaaataaatgagattgtggaccgtatttacaaagattttagcaagtcagttggggtgaagaacatccgtgaatatgaagagaggcaacttaaagatgctcaagcactacaggagaggaagctaagcctgagtaatcaaatgtcaaaattgaaataccagctggaatatgaacaaaaacgagatatgcaggcaccaattattaaattaaaggagacacgtgaatctctagagaagaaacttaagagtttacaggagagagagtctgaagctagggcggaagctgaacaaatttcaaa

SEQ ID NO: 68075 - DNA, 2932 bp, Oryza sativa
  Clone ID: PAT_MRT4530_68873C.1
atgaggccgacctcccgcatactggccgcgggccacctcctccgcggctcacgctcacgctacgacccctcgccggtcgccgctgccgcccccatattccggcggccgccgaccgtgccgaggcctctcccgagccctctgctcggaggcttcgggccgaattgttgggtttatcccggcgacgggaagtatgccccctttggtcgcctcagctgcttcatgtcggactccacctacccgccgcctccccgcgatgtgagaggacatgcattttccacatctgccaatgctgtggcagttgggaaatcatctgatgacaaagtgaagaaagatatctccaaaaaggatgttgatgatcagatagcagatacacagatactgaaaaaccttgggaaatacttattgttgaatgatagcccggatttccgcttcaggcttatattgtcattgggcctcttagttggggcaaaggttataaatgttcaagtgcctttcttgtttaagcttgctgtcgattggcttgcagcccttgctggtgctgaaacttcacttgcatcattcacagaggctaatgctaccctattggctctctttgcaagcccagcagctgttctgattggatatggaattgcacgatcgggagtatcagcctgtacgttagtgccgtctaggggcggaggcactcggcggcgcccggatctgagaggaccggcggcggcgcttgcgaaggtggcggcggcggtcgtagacgaggcagaggtggcggagtttgtggagatggcggtcgcggtgctcgtggaggtggcggcagtcatggaccaagcggaggaggcgccgggcgcggaggcgaggcggcggctggatctgagtggagtggcggcggtgctagcggaggtggcggtcacggatgagcggcggcactcgtggaggcggcggcggcggccgtggaggcgaggcggcgctcgtggacgcgcggaggtggtggtcgcgggcaagcggcggcgctcatggaggcggcggcggtcgcggacgaggcagaggcggcggcgctcaaggaggcggcggcggcggagaaagacgtgtggaggtggcggcgggtgtggacgaggcggcgacgctcgtgggcgcccggcggagctcgcgaaggtattttcgcacttgcatgagcttgatcttcgttatcatctaagccggcaaactggtgccctaaatcgcataattgatcgaggtagtcgtgcgataaattacatccttacagtgatggtgttcaatgttgttcccacaatattggagattggtatggtgtcaagtatacttgcatacaaatttggttccacctttgcttggattacttcagtttctgttgctacttatattgctttcaccttggctgtgacgcagtggcggaccaaattcaggacagccatgaataaagctgataacgcttctagcacagtggcagttgactcccttctgaactatgagactgtcaagtacttcaacaatgaacaatttgaagttgagaagtatgacaaatatttaaagaagtatgaggatgctgcactgaaaacccaaagtagccttgcctacctgaactttggacaaaatatcatatttagctcggctttatccacggctatggttttgagttcatacggtgtaatgagtggtgctctgactgtcggtgatttggttatggttaatggtcttctattccaactttctttgcctctgaacttccttggaagtgtctatcgagaatctaggcaaagcctgattgacatgaagtctatgtttcaattgcttgaggaaaaacctggaataaaggatgaaccacatgcacagcctttgcagttcaagggaggacgcattgaatttgagaacgtgcattttgggtacgtaccagaaaggaagattcttaagggtgccacgttcactgtacctgcaggaaagagtgttgcaatcgttggaactagtggcagcggaaagtcaaccatacttaggcttctcttcagattttttgactcctcttcaggatctattcgaatagatgggcaagatatccgagaggtgacactggatagtctccggaagtgtattggtgttgtaccgcaagatacggtactttttaatgacacaattaagcataatatacaatatgggcggttatcagcaacagatgaggaggtttatgacgttgcccgccgggctgctattcatgatacaattatgaactttcctgacaagtacaacacagttgtgggagagcgaggattaaagttaagcggtggggagaaacaacgagtatcaattgctcgtgtattcttgaaggaaccttccattctattgtgtgatgaagctacaagcgctcttgatagcaccaccgaagcgtcaattttaaattctctgaagactttgtccgttgaccgtacctctatctttattgcacatcgactgacaactgcaatgcaatgtgatgagattattgttttggagaatggggaggtagtggaacaaggaccacatgattttctgctgtcaaagggtggccgatatgctgaattgtggtcacagcagaataacagtgatgccatcgatgctgccgcggttagcttagaggtttcatagactatatacataattcccttttgcaagggaaaatgcaaaccatatttgaatgaaagaaggcttccccatatctgcattgtaaattgaatggttaggtttttagatatcggggaacagaaatttatagcttaggagcaaataactccgtttgaaagaaagccaggaggcaaaattttcctctttgaggaaacacccaacagttcgacatgtttccatgatgtaagcattttttttactaatccaagtaaatattttttcccactaaatcctatgaccgtgatctgatcgaaaaaaaaaaaaaaaa

SEQ ID NO: 68076 - DNA, 441 bp, Oryza sativa
  Clone ID: PAT_MRT4530_68874C.1
gtcgctcatacattaaatcttcctgacagcgacaatggcgtaccaccaacagcaagctctcggtgtcatctgtggccgaggggtgggttgttctgatggtggtggtggtcctcaccgtcgtctcggcggctgcggacggcgaggagtactacggttatgcaacccaccatgaacccgtgcactgagttgtgcaaggcctggtgcccaacgaccacctgccggggtgccgggcgtacctgctgcggcggtgcggctgcagctaccccccgttggtgctggcgcggtgctgccaccaactgatggaggtgtcggcgcgctgccgctgcgacgcgctgcacgccatggtggaggtgctcgtctaggaggaggaggcgccgctggcgtgcaagaagggggccatggccgccatcgccgaggggctccccgggcgcgacgagtgcg

SEQ ID NO: 68077 - DNA, 234 bp, Oryza sativa
  Clone ID: PAT_MRT4530_68875C.1
atgaccattgtcaggtgcaggagaagcacagccaaccacagcactgggaagccgacgctgaggcagacgtcaggtgggacgccgagacggggaggtcctcaccgttgccgtggtgacgatgtcgccgcagggcctccgccgcagtcatcttatcgcgatgtccttcgccgcgtccgcgtcctcgccactggcctcctccgcgatcggctgactaccactgtcgtaccaagctag

SEQ ID NO: 68078 - DNA, 194 bp, Oryza sativa
  Clone ID: PAT_MRT4530_68876C.1
cgacaagccgtgaaatatacggcttgcaccagagacaacagtacagataccatgcactcattttagctggcacactggcttttaggacgtactatacacatagatttggggctccaaagcagaccggaccaaaaccttgttttccattggagggaatggaatgaagccttgtacttgtcttgcagtctctagct

SEQ ID NO: 68079 - DNA, 464 bp, Oryza sativa
  Clone ID: PAT_MRT4530_68877C.1
tttttttttttttagatttttttaggtttcccaaacggtttatcattttccttggactaaatgccatattacacaagggtggggtttgtaggatctaactctaaggtgcttagccagcttctatcactatgaactggccttgatacatgttgcggcctacaatacatgttgcggcttaaaaaccagggctaattataaatattagtgccaatacgttcttagttataactggcactaatggacaagactacatcatgccagataaaaaactacaaaatggtcttagctacctattttattgtatctacctcatatagaaggagtaataatcgtggttttgctttcatacaaaacggccttagctacctaatttaaatacatccgcctcatatagatggaagtagtaatcgtggttttgcttgccataagtaatggtttagacaattgcaggcttgtagctgact

SEQ ID NO: 68080 - DNA, 390 bp, Oryza sativa
  Clone ID: PAT_MRT4530_68878C.1
gaaaagatgagccaattggcggcaatttcactcaatgggggtatcttttacatggtcaacgttcaattacccaggagctgagtagctgacatttttatttacagacaagaataggagaaaaatatgacactgtgagcttgggcactcacttctttcttcacagagctcaacttgttacagccgcttagaatttctcacaatttgagagctcagaactcatgttcgttggcttaattaccaacaagaataatagctggtgtcatcacaacaatggtggtaacatctaacaacaatgaggtgccgagatcactacatacaattaacactcggcaatgcaacatactagagaaattgcagcaagaatgcaaagaagatggccatcattggttt

SEQ ID NO: 68081 - DNA, 466 bp, Oryza sativa
  Clone ID: PAT_MRT4530_68879C.1
tcaggcgccattcgccattcaggctgcgcaactgttgggaagggcgatcggtgcgggcctcttcgctattacgccagctggcgaaagggggatgtgctgcaaggcgattaagttgggtaacgccaggggcgaattcgagctcggtacccggggatcctctagagtcgacctgcaggcatgcaagcttgcatggccttgcaagatgccagggccaggcccacccagcaagtgcatccaggcgaatgtttttcggctatctcgcgaagtgaataccagggtgcagatcccctggagttggcttccaactccaaccgcgactccacagtggggtgaaatggaaggccggcacttaaggctgggtcagcgaggcaggagagcaatgagcctctcaaggccagcctcgccgagggcatctcctctcactcctgctcaccggccggagatggacgcggagaaggcaaaatag

SEQ ID NO: 68082 - DNA, 707 bp, Oryza sativa
  Clone ID: PAT_MRT4530_6887C.1
aacgatctctcccggggccccaccaaacaaacaaaggggaatgagagaaatgatcggaacgattgaggaaagaaagagaatggcggcccctttcctttcgcccagggggcatcgtcgtcggggacaggcttcgagggttcttccatatttagatatagagatagatgatgatagagatctagatctttgtatagatagatcctttgataaatttctattgatccgctttcaagatctatgaacaagaagagagatcaaaaaatagaaaagtaaaaaaatagagatgaatagatagggctgagccgatagcaggactgggtacgatgatggggcgagagagggaaaaaaaccttcgggatggatcgggaaaagtgacccccggctcagcccacgacttccttcccttcgcatagctctggtgactcccttcccccttttttcccagaatgaattcgcccgacgcgacgaatcctgccctcctgtctttctttctcattgaatgaaccactgcctgggacgcccttatgcctatgaattcaatgatttaagggccccgggaggaaacttcggaaagaaagcctacttggttgtccccccggcggtgcccgggcggccctcggttcattcttgccgtttacctggctcaaacgaaggggtagggccaggtgttctttaaacaaacctctcagggcacttcggggcccggt

SEQ ID NO: 68083 - DNA, 1032 bp, Oryza sativa
  Clone ID: PAT_MRT4530_68880C.1
cggcacgaggcgcctctctctcgatccatctcccccctctctcctctcctctctctctccgttcccaatctgcggaggcggaggcggagctagggcgcggcgtcgccggcgaggagttccgcaggcgcggtgtggacggggctcctctgcttccgcacacggcgggcggcgacggcgagcagggttggaggggcggcgcggcgacctcctcgttcctgccttgcctgcctccatctggtgttggaaatatcataagttttgggacaagcaagagaggacatggagccatcatcacaacctcagccggcaattggtgttgttgctggtggatcacaagtgtaccctgcataccggcctgcagcaacagtgcctacagctcctgctgtcattcctgccggttcacagccagcaccgtcgttccctgccaaccctgatcaactgagtgctcagcaccagctcgtctatcagcaagcccagcaatttcaccagcagcttcagcagcagcaacagcgtcaactccagcagttttgggctgaacgtctggtcgatattgaacaaactactgacttcaagaaccacagcttgccacttgctaggataaagaagatcatgaaggcagatgaggacgttcgcatgatctccgcagaggctcctgtgatctttgcgaaagcatgtgagatattcatactggagctgaccctgagatcatggatgcacacggaggagaacaagcgccgtaccttgcagaagaatgacatagcagctgccatcaccaggacggatatgtacgatttcttggtagatatagttcccagggatgacttgaaggaggagggagttgggctccctagggctggattgccgcccttgggtgtccctgctgactcatatccgtatggctactatgtgccacagcagcaggtcccaggtgcaggaatagcgtatggtggtcagcaaggtcatccggggtatctgtggcaggatcctcaggaacagcaggaagagcctcctgcagagcagcaaagtgattaa

SEQ ID NO: 68084 - DNA, 223 bp, Oryza sativa
  unsure (1)..(223): unsure at all n locations
  Clone ID: PAT_MRT4530_68881C.1
gggtcatctctgtgctgagccatctgtcgatcggctgaggncnttgatgagacatgtattcannatcgagaagaagcgaggagaaaagtaaganngcaagggaggatatggttgagaggttttcccagcaatcgttagcaacgattgttctgataagatacacctcagtacttagtagatcatactgaatcntacaactctacagtaaacgtgatgatatact

SEQ ID NO: 68085 - DNA, 107 bp, Oryza sativa
  Clone ID: PAT_MRT4530_68882C.1
ataaacaacctcacgcagccgccgccgtagacgtaacaaaaccacaaagcgccgacgaaaacacgaaaatagacgcctccaccaacactaaagacgaacgatacacc

SEQ ID NO: 68086 - DNA, 168 bp, Oryza sativa
  Clone ID: PAT_MRT4530_68883C.1
atggctgctagcccggtggatgggatgatgcagatttgcacatcatgcagaggcagatcgaacaggtgtgctctccctttcatggcacggctggactggtcactgccatcggcccatcgctacatgctgcaccatgccattccaatgttcattacttcagatatatag

SEQ ID NO: 68087 - DNA, 593 bp, Oryza sativa
  Clone ID: PAT_MRT4530_68884C.1
ctgacgtcagcaatggcggccggttagggtttgcgagctcgccggagctagggcggtcgaccgggggattggaggacacctacgcgtagaggacatcgagacgaacccggacggcgggctacggcggtcggcggcaaagaaggatgggcggccgagcttctcctcaccacggcgctcctatcagcggcggcggcaagcggcggcgacggcggaggcggcgcagcgacgacgccgaagacggccggcggcggcggcgagcttggcgcgcgtggcggcggcgctatggggcacgggagaggacgggaaagggggcaaacgggagaggacgacgaggggaagaaagaggagaacgagaggaacaaaacccctcaaaaacccggaggaatcggggtcggattgaggcggatttggaggtagaaggcggcggcaaagcggcggctcgggcggctcggccggaggttgaagacgagcccgacatgtgggccccacatgtcggtgactcgagagagaggagggcgggcggcggctgggccggcgtgggccgcgcggaagagagaggatgttgggccgaattcggcccaacggcttaggga

SEQ ID NO: 68088 - DNA, 556 bp, Oryza sativa
  Clone ID: PAT_MRT4530_68885C.1
ttttgtttttttttttttttttttttttttttttttttttttttttttttttttttttttttttttttttttttttttttttttttttttccctttttttttgccccggattttgtggccctcccatttttcctttttttctttccgtttgggggtttttcttttaattgggctggttttttcctttggctatttcttttccgaaattttttccccataaaattttcccccaattctaaatccgaaaaccttaggggcccaaattggggagcttaatgacttgggttccttaaatttaatttccctctttcaattcgcgattccttttttgccacctttttttttgaattaccttactcacccggacaattaattagtagatccgcccccccggatggggcccctttgcccttttgctcccgcccagtttttttttccccaaccgatccgcctttaacatttttccctttaacggtccacccttgtgtgcccccctgggtgacccccccgtttgttggtcctttacggcgagatttaacttggggttttttcaagg

SEQ ID NO: 68089 - DNA, 2365 bp, Oryza sativa
  Clone ID: PAT_MRT4530_68886C.1
aaagaaaagaaaaaggagatgatgacgtcatgctgacgtcagcaatggcggccggttagggtttgcggagctcgccggaactagggcggtcgaccgggggattggaggacacctacgcgtagaggacatcgagacgaacccgatggtactcaccacgacgacaaacgatgcacgacgacggccggcgacgagagggcaacggcggcggctcggcttgcgcggcgacggcgggctacggcggtcggcggcaaagaaggatgggcggccgagcttctcctcaccacggcgctcctatcagcggcggcggcaagcggcggcgacggcggaggcggcgcagcgacgacgccgaagacggccggcggcggcggcgagcttggcgcgcgtggcggcggcgctatggggcacgggagaggacgggaaagggggcaaacgggagaggacgacgaggggatgctttataaagcattagattgaagagattggactccaaacgagaggaatcgactcgggaaaaaattcaaactcggttttagggataaaatcaaaacgaactcgattcggatcaaatcctcaacgattcgctccgattcttgggggaaaagaaagaggagaacgagaggaacaaaacccctcaaaaacccggaggaatcggggtcggattgaggcggatttggaggtagaaggcggcggcaaagcggcggctcgggcggctcggccggaggttgaagacgagcccgacatgtgggccccacatgtcggtgactcgagagagaggagggcgggcggcggctgggccggcgtgggccgcgcggaagagagaggatgttgggccgaattcggcccaacggcttagggaggggtttctttgaacgaaggtgtacagccggtctgaccaagggtcggtctgaccactgctgtaccgttggtctgactggtgctcagtctgaccgaagcacagccgccggattgactggtcgccggtatcattgtcttcacactctgaatctgattcaccatgtgccatgaagcaaacaccggagatgttctttcccttatcttcatcttcactttctccatctacatcgcttagtggctcaaaagcggcatagactttctcaaacatcttcttgagattctccttggtcttcttccccttgaatgtgctcttagactttgttctccttagtcttctctccaccattgtcttcctttttgcctctcctaagcgaagttgtcccgtcggtctgaccacacttgtgccgtcggtttgaccgatgtagatcgcccggtctgacagccccgaagtcgccactgcctcctgatgccaccgccggtctgaccgctgcgatgccgttggtctgaccgccggtgtttcgccgggtagactgcgctcgcatagcgccagtatgaccggcagcacctgcccggtctgaccgtacccgacaaaacagcagcactcttctgccatgtccaagtcatcacccttaacttcatcagggatcgtccactcaaaccgatgcagtagtgatgcaagcatcagatgcaggcatgcagcatcccttctgctgtatggcatgaacttgtccagatcatcccaaatcttagctctcctacaaattgcccatatattcacatatacagttgttccctgaggtatcttgtagccctggatttctactgtggcctcagccttgttgaatgctattggaacagttgggtgaagccggagggtctctttgatgacagcttggagataaggaagctggctgatgtctgattctgcaacgtgagtttttgtgcccataaggcctttgagctcctctggaagttgtatcatggactttggattttgcagtaactctgccattgcccactctattgtacttgaggttgagccgcttccagcgacgagcaaatccatgaacattcccctcatggtgtcttggttcatcacccatccttcgctttccacttctccttccatgtcaaacgccacatccagcaagtcattcttgcgaggctcgcagacgatgcggcggcgccgccgccggtcgatctgcacatcgatgatgccgtacacccatccgacgagattatccatccttcgccgcacgcccatgacgtcggcggcagcgatcaccgggaaatagtcagacaggttcggcgctccggcgaccaccaccgccttctcgatgacatccctcagctgccgcgtcgtcgcggcgtccatgtcctcagagaacatgctccaccacagcacgccagccaccgctgcgaacgcctcgcgtgccaccgacaccggcatgcccccggcgctcccgtcggacacgcggtgcgcgagctcacgcgccacctcctcccgcat

SEQ ID NO: 68090 - DNA, 668 bp, Oryza sativa
  Clone ID: PAT_MRT4530_68887C.1
ccggccgggatcctagctctgcccgattgatgcccaaatcgtgttctacttatagatctacacctgccctcttcttctctcttccggtcttctcaccactcattgatgtctccattgatggtgtctctccctattgtctagaaaagatctacttgatctttgccagcttatttttccctcctccatcatcgtgtgccagaatagctccctctaccttgttccaccaagacatcggaacccaagttgcgttgtgatagcaacatgttgcaagactggaaactgacgatactagtggttttcaaggcctcgaaattctcagaaagttgaaaagtgtgtgttggataaggtgaaagcctctaagaatatgctgatgaagctactatgataccaaagaacacatcggtgttgattcgtcggataccaggaagaccaaggaagcctattgtaacagaaccagaagagacaaaagccatggaaggtagggtagaagaaaccatgccttctggtagtgcttttcttgctgatgcatctatgaaatatcctgaagaatctgagtgggatgacgagtttggcaatgatttatatgtttctgattcagtcccttcacagctcggtagccaggcggttgatgcatctgaaaataaaggtgatgaagatagtcaaataaa

SEQ ID NO: 68091 - DNA, 189 bp, Oryza sativa
  Clone ID: PAT_MRT4530_68888C.1
atggagatgttgatgaatgtggatgacggcgggcggatgagtctcgatggcagcggagatggtttgagtacgatctcctgcagcgttgatctgcccaaggaagatgtcgttgttcctcctcatgtgcgcctcttgccggacacaggggtgctgtggacgaggtcgccggccgccgagatcacatcttga

SEQ ID NO: 68092 - DNA, 317 bp, Oryza sativa
  Clone ID: PAT_MRT4530_68889C.1
ggaaacaatatattttcaaatttaattcgggtgggggcagctgcccttgaacagggagaaagttatgatggttaaaaccccctcccccaaagattttgtcattgggggggaccaataggggctttttcagggctggaagggcccaatcctttttgcccactcaacagggggggcccatgactgggccagttctccctggaagcattccctttacaaggggggatataccccctgggcggcattctcaaagaaattttgggggcatcttcatttccatgcccggttgggactagggtatgggaatcatcacacccttg

SEQ ID NO: 68093 - DNA, 294 bp, Oryza sativa
  Clone ID: PAT_MRT4530_6888C.1
ctagccaggtgacagaattgtaccctcaaccccaggaccaaaggctacatctgcctgctcagcaggttgagtcacaagcatggcgaacacagccccttgtggtgcaaccgcagcaatacaatattcagcaagttccaccacagctagttcaacagcaaacatcatctcctcaggctcaaagtgctcctcaagtcgctgtcttgtatcctccatactcttctcagaagcctcagcagaagcatcatgaagccatgccttctttttatggccaaggcaatacagttttgcttccat

SEQ ID NO: 68094 - DNA, 381 bp, Oryza sativa
  Clone ID: PAT_MRT4530_68890C.1
attgcttataccccaatcaacaaaagtccaattggggggagtgaactcaatggacatgattcgatcagtgccatgagtttccttgacccggctggtggtctggcacatcagtcctttatcactgatgatgctctggatcaagtattctctcctgtattgatggaatcttcgttgttccatgatgcagatgaggatctacttgcacccttgtcagagactgacgcagcattaatggaatattaagcttcacatgtgcactatgtaatattttgaccactgcagacgcagcctggaggttattgtggcttatgttcgtcttattgactattcggctagctgcttgcgagttgcaaccatgttgagatacagatggcttatcag

SEQ ID NO: 68095 - DNA, 195 bp, Oryza sativa
  Clone ID: PAT_MRT4530_68891C.1
atgggacggccggcccaagaaggcggtccaaagcgcgcgcgcgggcggggaggagagagagagagaaccgatgggccgggtccatcccgcgtggtcccgggtgggacccgcttgtcagcgactcggttcaccgtgagcgaggtgcacgcggggcgtgctagggtttggggaggggaggcgtggcgcatgcgcgtg

SEQ ID NO: 68096 - DNA, 1489 bp, Oryza sativa
  Clone ID: PAT_MRT4530_68892C.1
atgctggatccgcccctgggcgccacgctcagcgtcgtggccgtgaagctggccgtggccggcctcacgtcggcgacggcgaccctgaccactgaccagcgcggtagattctggggcaaactccatggaaactatatagtgggccaacctatatgggctgcagcccatgtacaatgcgccagccttcccgtgttatcctcttcaacctctggccctctcactcctcgcgccgcgcggctgctccggccaccaaagtggcgctccgatggcggtgagagtcccttccatggagctgcaccgccccccgccgtccgtatccggtgtccgaggaaaaagctgccttcaaaagcctttccttgtccaagcaaagagattagagggattggagaaggcaaacccaaggtcacgaggaaagcaaagtttggaacaagtgaagaaaagagcaccactgatccgtgggacagtgagtccacctctaccagtaccaggtcacataactcaacctccttacgttggtaaaaaggatgcttcagagatagcaagtgagatacaaatgcatgacaaagtgagcattattcacatgaaagctgcatgtgagcttgctgctcgtgttcttgaatacgctggaactttagtgaaaccctctgtaacaacagacgaaattgataaagcagtgcacaagatgatcattgatgctggagcctatccatcccctctcggatacggagggtttccaaaaagcgtgtgcacatctgtgaatgaatgcatctgccatggaattcctgattctcgtgaacttcaggatggagacataattaatatcgacgtcactgtctacctgaatggctatcatggggacacctcaaagactttcctatgtggagaagtggatgaagccagtaaacgacttgtgaaggttactgaagagtgcatgctcagggctatatcagcttgcaaacatggtaccagcttgaagaaaattggcagaagaataagcgagcatgctgagaggcacggatttggtgttgtggatcgttttgttgggcatggagttgggagaatatttcattcagaaccaatgatatatcaccagcgtaataatatgccaggtcaaatggttgaaggccagacattcacaatagaaccggccctatccatgggaagcattgattgcgacatgtgggacgacggctggacggccgtcacgacggacggcagcctagccgcgcagttcgagcacacgatactgattaccaagacaggagcagaaatcctcacgaaatgctagtaagatcggtgcccagcattagccactggagtagcagtgatctctgtgtttgtaggacgagtatggtggaaaggatggtcgattgttttgctgtataaagtactccctctgtattttaattttgattttaatgtattatgccgttgactttttaaccaaaaaaaaaaaaaaaaaaaaaaaaaaaaaaaaagatctatagag

SEQ ID NO: 68097 - DNA, 646 bp, Oryza sativa
  Clone ID: PAT_MRT4530_68893C.1
ccgggctgcaggaattcggcacgaggtacacacggaaggacggagaggattacaaataatctataagcctcatcggttgctcatatattttctaataagctaaaatgtttttctagcgaataaaaataatttataactaaaacttatattccctaataagataaaatgttttactaaggaataaaaaataatttgtagttaaaatttttatatatgtatttctagctgacttaaaagctaatactgtaaaaaaaactaagttcaaaatatcttaaaatcaactttaaaattaaatttaaaaatttaaatttttggcttttgcttcggcttaatagggcaaccgatgggaccctataacttatttactgtagctcatttgtcacgtctgccgctattactgttccatcccatcacggtagcatggctgtgcgggcgcgcgcgtactacatgtggccctagcaaagccaaaaaggctgagctggtccggtgtactgtatggtccagaccgggggtgagctggtccgtgcaggcagcggctaggttttcatgtgatctccatgatgaattttggctggaccgccggtacaaattcttcaacaaccccctctgttttttcccaaaactatttcgtgtcctttcacgccat

SEQ ID NO: 68098 - DNA, 216 bp, Oryza sativa
  Clone ID: PAT_MRT4530_68894C.1
aagcttctcaacgctagatactactaagtaatttatacgagataaaaaataagtaataacaattctcgttattatacttaacattaagatttgtctataatacaatatatcgtgtttattgattatttagtaaaagtaagcctttatcctattccgggattttatttaaaatcccattttttaccttccatttttacctgaaaaaaaaaaaacctt

SEQ ID NO: 68099 - DNA, 143 bp, Oryza sativa
  Clone ID: PAT_MRT4530_68895C.1
atggcaactgagttagacccacatgtcggggcatttcagtccaatacatttctgttggcatcagtggtggtcactggcgagaacttgctgagaaaaggcgaaagcatggtggagtggggagaggaggcggcgaaggagcaaag

SEQ ID NO: 68100 - DNA, 567 bp, Oryza sativa
  Clone ID: PAT_MRT4530_68896C.1
atggccaatttatggactagagcctctccccaaaccctagctgccaaatcgccggcgagccatcgttgtcgtcattcatcctcgtccaccatcgctcggcgtcttcatccagcagcagcagtcagtcgtcatcttcgtctcctagcagcaagcccgcgcgcggctcatcgccgtcaccgcgttcccgttcgccggtcgcagccgccgtccgtcgcggcgccgtgcccgcttctccaccatccactctcgctgccacgcccgtcgcgtcgcttatccacgccgctcgtccccaccgttcttcaggtcacgggacttgtcctagccatcggcggcaagccgccgccgtcgtccgcaacggctgcagttttggccgggcgtccttgcaccgaggtcgtcgctgctcatctccattgctggggtaagcttgtcgttggttgtccacatggacgttctccgtcacgcggttcgtcgtccccaactacgctggtcgtcatcctcagcagcgtggccgttggggttgtctgcttgtcgcccagccgcatgaggcttcgggagagtccttcgtga

SEQ ID NO: 68101 - DNA, 1116 bp, Oryza sativa
  Clone ID: PAT_MRT4530_68897C.1
atggcgattccccgagtcgccaccgcgctgctcgccgggaggaggagggcggctgcggacatcgtgttcgccggcgtccgcgtgcaccaccaccaaggggcggcgaggctgctgcagcccggcaacctcgccgccgcccgcctctggccgccgccaaccgccttctcctacggcggcagagtcggctcgctcgggctcggcgccaggcgcgggatgtccggctctagcggcggaggtggtggccggagctcaggaggcggcatccccggaggcgacggcaagcgaagattggaggaatggaccaggtcggtggattcccagcttgaagagatccttaccgaactccaacaactaagtgctgctcaaatgaatgctgtcaaggtctccacttcctctttccaaagccttaagagatctatggagcgcactggaaaagtcacaacagctgtaatttcactcagtgttactgcatctgtgtatcttgtgctgttcgcgctctattgtgttggggttaaaatggcctatatcgttgacgccgacgaatttgccaaaaaattcgcacacagtgtcttagatgatgaggaattcaaggcaaagctagatcagacagcagatagacttggtgccatagcagtgtccgctccctttaggaaggctcaggagtggttttttggtaaagacagctcacctcaagatgatttggatttggaggcttcagacacttgggaagactgggcagtttccttttccttctttgctctgtcattgatcagaggaatgccagtttatgagaatgaactgtggatgcgtttataccagcttggagttagacgcaacaaggaaaatgaagaacttctgaacattttggttgcagtagggttgatatcaaagaagaaaaagggtaagcttactacctatgcccttgtcgaagagcaatacagggaatgcattgacgcaggattcaggccgaaaattgttccgatcctcaagaagggtatgttccgggtgctgaactttggtttctttagcttgaatttagcagtcagcgagtccggaggttgtcaaaggcacaagcttttagttgggggcctgttaattaggaggcaaatgctttag

SEQ ID NO: 68102 - DNA, 405 bp, Oryza sativa
  Clone ID: PAT_MRT4530_68898C.1
atgtgcgtcgcggtgtgcactgtgcactacttggaatatttggcgcgcggcagacagctccagcgctccaggcagggccgcctggcatgcgtgcacctgctgttcgacaaggacgacgtctccgtgcccaccgcttcccggcctgggagcacgccgctgcacctggccgcccacgccggtagcctgactgcatccagagatggcgcgctggagggaagcggagatcgagcgggcgtcgaggaggcagagatcgcgcgccgcatatgcgtcgagggggaagcggagggagcgttgcgggatcggctgtgcacgacccccgtgaactatgctgggggcacatcggccctcgagcgggactgctcaaggtacccctatcctcgggcacagctcctcgtgatatatgct

SEQ ID NO: 68103 - DNA, 837 bp, Oryza sativa
  Clone ID: PAT_MRT4530_68899C.1
atggagcctgcaggtgggcgagtcgtcgtcgccggcggcggcggcggcggcggccggcgaccttccggcgtgctgctgatgctgtacgccgccggcgggatcctcatcctgaactccacggcgccggtgatgaactctcacgtgctggccatcatgggtttctaccacgccatgtggctgctgggatgcgccatcttcttcgcattcctgggtggcagcctcctcagccacgagatggagaggaggaatcaaaccaaggtgcacgcgcttttctcctcgcaaatccccaattcctcaatcgctcaagccgccgccgcggcgaaccctagcctcgccaccgccgcgaaccctagcgtcgcgttgcctcgccgccgctgcgagccgtcgaaccctaagcctcgcctccgtgtccacccgccggcctcgacgccaccaagaaggtgccgagctcggggggttgtacgttcgccgcgctccggcggaggccgtctgcgtcgtgggggagccggccctggcgataaaaacgcggtttgtggggcccgcacaccacagccgatcccgcaacgctccctccgcttccccctcgacgcatatgcggcgcgcgatctctgcctcctcggcgcccgctcgatctccgcttccctccagcgcgccatctctggatgcagtcaggctaccggcgtgggcggccaggtgcagcggcgtgctcccaggccgggaagcggtgggcacggagacgtcgtccttgtcgaacagcaggtgcacgcatgccaggcggccctgcctggagcgctggagctaggtgcagcagcatggcaccccgcgtccctgacgtag

SEQ ID NO: 68104 - DNA, 4887 bp, Oryza sativa
  Clone ID: PAT_MRT4530_6889C.1
atggccgataaacagccaccaccaccatcaagcccaggttccattaaaggcaaggcattgaagctgggattgactgacatcattgatgacaacgtcatgccaatcgatccagagaaattcacgcctgagcagaagcaggagtttgaagcaacgctgcagcaagcacgagatcagttcctgaactcgttcatgcaaactcgcaaggggacacttgttcagaagtataaaataaaagtggttgctaataatcctgggaccggttcttctaaagatggagaggttaaacaagctccaggcggctcggctcagctgagtgctaaaggtgctactgacggctccccaggcgatcaaggcaacaatctgcaaggagtccatggagtacaaggtgatggagcgcatggggctcaaggtgatggtgctcaaggaccacaaggaggaaatcttaatcagaacaatgaactatcacatgattttttcaataatttccaagatcgggtcgattacgctgtgcatcatgctttgatctatcagtcaggagtgctagtcaacacattgtcaaacatgatgaagacgatagccgatggctcaatagctgagcatcaggctacaggcccggtttatttgcaaggaggtgtcttcccgaattatcgatctttgaccactgatgttcagccatcttctcaggcggtgccctctattgcacccacaactcagccgacggcaccagcatcaactcccctgcctggtacatcagctatggcgccaggccagccgatgaaccctcggttgttaataagggagcatccacagcctactgggcagatcgtgaatcagccaacccaagatcaagttgctgccatgtttctgccacctccacctattgttgatccagtgcagcagcaaccgattcagcagacaccaccaatccagccaattgtacagccaatccaacaacaggtcgtacaatcagctcagcaaacaccaccaaggcagcagcctctgcaaccgattcagcagacgccaccaaggcagcggcttcagccgatccaacagactccggtgagacagcagatcattcagccgattcagcacccggggtcggtaaatgcatcggccgggttcgcagcacctggtgggcaacctgcgcagcaatttgtaaatcaagtcgtcccagagcatttggttcaccatgcacaaccggacggcactgtggtgcctcagatggttcctgagcacttggtgcgcaacatccagccgaatcttcataattaccaagggggtaacttgagctatcaatatcagcctccttccccgcaagcccaatatcagccaagaggattggctcagccccagttcggatctcagtttggtcaattcgagcccatgcaacaacagccacaaggagtagctcagcaacgaccatgggcggatgtgattgccgatgtaatgagggaacaatttggacttaaaccaaaagaaactggaagtttgtatcggcagccttaccctgagtggtttgaaagagttcctcttcctaatcggtttaaagttctagatttctccaagttttcaggacaagagggcgtgtcgacttatgagcacatcagccgattccttgctcaatgtggtgaagcgtcggttgtagatgctctgagagttagggagatgaggaacaagtgctttagcttgaggttgaccgatgctcagttagccgatttgcccttccagggtatgattcctccaatcaaggagaaattctcgtccgaagacttcgatagcttatcgcatctgatacagaagttgaccttgcatgagcataggtcggtggaagtcaggaaaagctctaagaaagttaatcatgtttgtccatatatgtatgggtcggatgatgaagaagatgattctgagatagctgcagccgaatgggtgaggagcaaaaaggtcataccatgccaatgggtaaaaagtcctggaaaagaggaaaagtatgactttgatatcaccaaagctgacaagatttttgatttgctactccgagaaaagcagattcagcttcctgctggtcatacgatcccatcggctgaggaattaggcaagaagagatattgcaaatggcataattctggctcttattcgactaacgattgtaagatctttagacagcaaatccaggttgccattgaagggggaaagattaggtttgatgattccaagaagccgatgaaagtcgatgggaatcattttcctgttaatatggtgcatacagctggtcaagcagccgatagggcccgtgcaaagggtcttcaagtaaattcggctaagattatcaacaagtatcaaaggaagtatgataagcagcaggagaggcattatgaagaatacgacgatgtttttgatcctcattggggttgcgagtttttcagattctgctggaatgaagggatgaggttgccatctattaaaaactgccctagatgcagtgatatcatcgagagctcaagccgatcacataatagggataatcggctaagacaggcaagactccctgttcatcaaagattgggcccgatgagtcaagatcgtggccaagaggatgaggtgatcagggagaatcaatggtatccttctggtattttcatgaagaatcagaaaaggagggtccatagattgaggagcagggagcgttttcaggaggttgaagaggaaatcaaccatcggctgaggaaaccaaagccaagacaggagtggcgtgtcaagaatcaggttcccgtagccgatgatgttgcaaccgacgaggtgaagaagttggcaaaaggaaagagtgttatagcggcaccaattaacatggtctttacattgccagctgagttcggggtcgatcaggccgatgttgatgaagtagaagaggaattggctaggttggttctgtcaccagaacaggcagtgttcgagaaacctgaggggacagagaatcggcatcttaagccattgtatattaatggctacgtcaataggaagccgatgtctaagatgatggtcgatggtggggctgcggtgaatttgatgccttatgctacattcagaaagctgggtaggaacgccgaggatctcatcaaaacaaatatggtgctcaaagactttggtggtaatccatcagagaccaagggtgttctaaatgtggagctgacagtcggcagcaagactattcctaccacccaatcaaagatggagaacccaagttattactttgagggcgtcgtggagggttcaaatgtctatgctaaggatacggtagatgatctcgatgacaagcaaggtcaaggtttcatgtcggccgatgagttggaagaaatagacataggtccagctggccagtttttgggatttcttattcatgaaagggggatcgaggtgagccaaaggagcgttaatgcaatcaagaaaattcagcccccagaaaataagacggaattacaagagatgatcagcaagataagttttgttagaaggttaaggcattatctattatctaacgagtgcactgttatatgcaaagccgatgtagtcaggtatatgctatcggctccaatattaaagggaagagttggaaagtggatattttccttgactgagtttgatcttcggtatgagtcaccgaaagcgattaagggacaagctatagccgattttattgtggagcatcgtgatgattcaatcggctcggttgaaatagtgccatggactttattctttgatgggtcggtatgtactcatggttgtggcatcagcttagttataatttctcctaggagggcatgtttcgagtttgcttatactattaaaccatatgcgaccaataatcaagctgagtatgaagcagtgctcaaggggttgcaattactcaaggaagttgaagccgatactattgaaatcatgggggattccttgctagtaatcagccagttggcaggagaatatgaatgcaaaaacgatacattgatggtttataatgagaagtgcctggaactaatgaaagagtttcggctggttactttgaagcatgtatctcgagagcaaaatcttgaagctaatgatttagcccaaggggcatcggggtataaaccgatgatcaaagatgttaaagttgaaattgcagcaatatcagccgatgattggaggtatgatgtgcatcagtatttgagtaatccatctcaatcggcttctaggaagttaagatataaggcattaaagtatatactgttggatgatgagctttattatcggacgattaatggggtattacttaagtgcttgagtaccgatcaggttaaggttgcaatcggcgaagttcatgaagggatgtggtactcatcaatcggctcacaagatgaagtggttgctttgacgtgcagggtacttttggccgacaatgcaattcagcgagcaccggcgtcggctatgaatcctattattaaaccatggccgttcagaggttggggaattgatatgatcggtatgataaacccaccatcgagtaaagggcataaatttatattggtggcaactgattatttcactaagtgcgtagaagcgattcctttgaagaaagtcgattctggggatgctattcaatttgttcaggagcatataatttaccgatttggtcttcctcaaactattaccacggatcaaagttccatctttgtgtctgatgagtttgttcagtttgccgataacgtaggcatcaagttgttgaattcttcaccatattatgcacaagctaatgggcaagctgaggcgtctaataaaagtttgatcaagttgattaagtggaaaatttctgattatcctcggcaatggcatactcggttggccgaagcattgtag

SEQ ID NO: 68105 - DNA, 1215 bp, Oryza sativa
  Clone ID: PAT_MRT4530_688C.1
atggctgccactcactcaggcagcagcctcctcaaagcagtgccaatgctgctcctcttctcttcaggatttatcctgggcatgatctccatcgccaacttccctaaattctacgaatcgcctttgctatcgccgatgttacactcccttgtaccatcatcatcacggccaataatgcagccatcgccatcgccggagacaccgtgcgtgtggccaccaccattgccgtcgtctactccaactccggcgccgtcaccgccatcgacaccgacagggttgatggggttccttgcgccgagcggcgtgacgcacaacatgaccgacgaggagctcctgtggagggcgtccatggcgccgagggtgtctcgcgcgccgtacagccgcgtgcccaaggtggcgttcctgttcctggtgagagcgaagctgccgttgcggctactgtgggagaagttcttcgcggggcacgggaaggagctctactccatctacgtccactccgatcctcattttgctgcctcgctgccgaccgactctgtcttctatggccgcatgattccaagccagaggacgacctggggcgacgcgaacctggtggaagcggagcgtcggctgctagcgaacgcgctgctggacctatcaaacgagcgcttcgcgctgctgtccgagtcgtgcatccccatcttcgacttccccaccttgtacgctcacctcaccggatccaacgacagcttcgtcgactgcttcgacaacgccggcgcccgcgcgcgctacaggccggcgctgttcgcgccgcacaacatcacggcggcgcagtggcgcaaggggtcccagttcttcgagatggaccgcgccctcgccgtcgaggtcgtctccgacgagcgctacttcccggcgttccgcgactcctgcgccgggcgcaggggctgcctcatcgacgagcactacatcccgacgctggtcagcctgctccggtggcgccgcaacgccaaccggacgctcacgtacacggagtggcggccgaggaggcctcacccgaggagccacggcgcacgggacgtcaccgaggagctcttcgggaagatgaggggcggcgccggcaactgcacgtacaacggcaaggctagcgacgtttgcttcgtgttcgcgcgcaagttctcgcccgacgcgctggcgccgctgctcgagctggctcccaaggttattggcttcggctga

SEQ ID NO: 68106 - DNA, 633 bp, Oryza sativa
  Clone ID: PAT_MRT4530_68900C.1
atggagatcccgccgccgtcagctggtggcggaggcggcggcggcaagcccgaccggaagacgacggagcgcatccgccgcgagcagatgaacaagctctactcccacctcgactccctcgtccgctccgctccccccacagttaattccattccttcacattcaaattcaaattcaaaataccatcaaagaaaattacggattctcggtggggcggcggcggcgacgacgaggccggacaggttgggggtggcggcggagtacataaggcagacgcaggagagggtggacatgctgagggagaagaagagggagctcaccggcggcggcggcggcggctcctcgtcgtcgtccggcgccggggcggccacggccgccgcgccggaggtggaggtgcagcacctggggtccggcctgcacgccatcctcttcaccggcgcgccgcccaccgacggcgcctccttccaccgcgccgtccgcgccgtcgaggacgccggcggccaggtgcagaacgcgcacttctccgtcgccggcgccaaggccgtctacaccatccacgccatgattggagatggatatggaggcattgagagggtggtgcagagattaaaggaagcaatacggagcaactaa

SEQ ID NO: 68107 - DNA, 310 bp, Oryza sativa
  Clone ID: PAT_MRT4530_68901C.1
ttctttttttttatttattgttttttttttttttatccttttcactctttcattttattgttttttttttttcatgttttctctattcatattactctcctacaccaaaagacccaggacgcacgagcgctgcgggaaacgacaagccgacgaagaaggcggaggacccggaccactgggagggagacgtgcaagtggggacgaccatggagaaagctgtctaaaccggcgagaaggggcaaaactcacaggagaagattgccaataggccctggcgcagacaagataaatagcacagaaaacagacccg

SEQ ID NO: 68108 - DNA, 3039 bp, Oryza sativa
  Clone ID: PAT_MRT4530_68902C.1
atgcgactgggcggatggatgctccggccactgaaccgcggcctcctcctccccaccttgtcctgcccagttgccccacaccgccgtgggttcgcagcctatgcagcagcgctacagtggctggaggacgagctcacctcgctcgcgatcctcccctccgtccccggggtggactccttcgcgtgcgccaggcagttgcagggctgcatcgctcgtggcgacgcccgcggcggccgcgccgtgcacggccatgtagtgcgccgcggaggggtggggcgcctggacctcttctgcgccaacgtcctgctcaatatgtacgggaagctcgggccccttgccagcgcgcgcaggctgttcgaccgaatgcctgagcggaacatggtgtccttcgtcacgctcgtccaggcccacgctcagcgcggtgattttgaggctgccgcggctctgttcaggaggctgcggtgggaggggcacgaggtgaaccagttcgtgctcaccaccatgttgaagctagctattgccatggatgcggcagggcttgccgggggtgtgcactcatgtgcgtggaagctgggccatgatcacaacgcctttgttggttcagggctgattgatgcctactccttatgcagtcttgtcagtgatgcggaacatgtgtttaatgggattgtgcgtaaggatgctgttgtctggactgcgatggtttcttgctattctgaaaatgattgcccagagaatgcctttcgggtcttttccaagatgagggtgtcgggttgtaagcctaacccttttgcactaaccagtgtgctcaaagctgcagtttgcttgccatcagttgtgctaggcaagggcatccatggttgcgccataaaaacccttaatgacacggagcctcatgtcggtggtgctttgcttgatatgtatgccaaatgtggggatattaaggatgcacgtttggcttttgagatgattccctatgatgatgtgatacttctgagttttatgatatcccggtatgcacagagcaatcagaatgaacaagcctttgaactgttcctccgattgatgcgttcttctgtgctgcccaatgaatatagcctttctagtgttctgcaagcatgtactaacatggttcagttggatttcggaaagcaaattcataaccatgctataaaaataggccatgagtctgatctttttgttggaaatgcactaatggatttctatgccaagtgcaacgacatggatagctcacttaagatcttctcatcattgcgagatgccaatgaggtgagctggaacacaattgttgttggcttcagtcagtctggtttgggagaagaagcattgagtgtattctgtgagatgcaagctgctcagatgccttgcactcaagttacatactcgagtgtgctccgggcttgtgcaagcacagcatcaataagacatgctggtcagattcattgttcaattgagaagtccacatttaataatgacaccgtaattggcaattcacttattgatacatatgctaagtgcggatacattagggatgctctcaaggtatttcaacatttaatggaacgcgatataatttcatggaatgcaataatctcaggatatgcgcttcatggacaagcggcagatgctctagaactttttgacaggatgaataaaagcaacgtggaatccaatgatatcacttttgttgctctgctatccgtctgcagtagcacaggattagtaaatcatggattatctctgttcgattctatgaggattgatcatggcatcaaaccaagtatggagcattatacatgcattgttaggcttctaggacgagctggccgtctgaatgatgctctacaattcattggagatattccttcggcaccatctgctatggtttggcgtgcattgcttagctcttgtataatccataagaatgtggctctgggaagattttctgcagaaaaaatacttgagattgaaccacaagatgagacaacctatgtcttactatcaaatatgtatgctgcagctggaagtttggatcaagttgcccttttgaggaaatcaatgaggaatattggtgtaaggaaggtacctggtcttagttgggttgagatcaagggtgaaattcatgccttttcagtgggatcagtggaccatccagatatgcgggtgataaatgcaatgctggaatggctcaatcttaaaactagtagggaaggttatattcctgacattaatgtagtgttgcacgacgtagacaaggaacaaaagactcgaatgctgtgggtgcatagtgagaggctggctttagcatatggccttgtgatgacacctcctgggcatccaataaggatattgaagaatttgcgttcctgtttggattgtcatactgcatttacggtgatatctaaaatagttaaacgagaaatcatcgtgatagttgggcaaggcaaccataagggctatataaccttctactacctccttatggaagctgagggattgtttgtgccggatcatcctgtaattgctcatcttgtagagatgaagagtattgtagaaaagcttttaaatgcctttttgttaataattatgagatacctgcaaatgttggatgattttgatgatgatgttctcagaaatagacaagtaaccaaacctagcaaggtcctggtagcagtggtaaaatccaataaaaataagtttctacaatttcttaaatcttgtgataacatagtagaagctagtacacttgaagaagatgacttgcccaatgaagatgcccatactgaagggaagcttaacattttcaatccaaaacaacaggaacagaaacatttccatactgaagtgaagaagatgacaatgatgatgacattggaccatcagagtacaaggacattaaaaagcatgactgaaaaactcgagcaaagaacagaaatactcaccgttatctttttgattacacattggctccgcttatgggctatccttcagaagaagccggaggtgctcgcagaataa

SEQ ID NO: 68109 - DNA, 2513 bp, Oryza sativa
  Clone ID: PAT_MRT4530_68903C.1
cccacctttctccgccgccgccgccgccaccccatgtcgccgacgacgccgccaccgccgccgccggaaacctagccagccagccatccagcaaactgcgaaccccaacaatgccgcgctcgtcgaccacccgccccgccgcccccgtccgcctccgccgcaggccgttgaaaacccccctcgtcgttgctgccgctgccgcctcatcgtccgccgccgtggggctgccccgcgggggcgggccgggcacgccgcacctgcggtggggcgccggggagcgggaggaggaggagaacggcggggagaaggggaatgcggtgggggcgcccggccgccgctccgtgaggcggctcgccgcggcggtgtggcggctgcggccggcggaggaggcgcctcctccggcttcccgccacgccgcggatcgtgcctgcctcgagcatataccaaggcatctacaagtccaactacttaggaaggatcatgttagcactcgatatggcctgaagaatgagacttcaagccccatatctgtcttggaacgacatagtggagagctccacaagggccaacttcatcttgcttcagacgtgttgcctataaccagcttggagaatgtaacaaagtgggagcctgacggcatagaggggatagaatcagatggtgcctatgtgatcgccagccaactaaatctcattgaagaacagaaaggggaaaattatgtatcgaacctccaggtggagcttcaacagacacgggatagggtcggcaagctagaagctgagcggatttcagccaagaagcaacttgaccacttgttcaagaaactgacagaggagaaagcagcttggcggaagagagagcacaagaaggttcaagccattcttgaagatatgaaggcagaccttgaacatgagaagaagaaccgtaggcaactagagaagattaacataaagcttgttgatgagttgaaggaggtcaaaatggcagcaaacaatctgttgcaggagtatgacaacgagaggaagacacgtgaactcactgaggaggtgtgcaccaagctggtgagggagttagaggaacacaaggccgagattgaaggcctgaagcaagactctctgaaactgcgtgcagaggtggatgaggacagaaaattgctgcagatggctgaggtgtggcgtgaagagcgtgtgcagatgaaacttgttgatgctaaactcacccttgaagccaaatacgaagagttgagcaaactgcaactagatgttgaggcaatcatcgcctctttcagtgacaccaagggagacgataccatagtacaaacagcaaaaaacatcttacagtcaattgaatcaaccagggaacaggagatcaaattcacgtatgaaccaccaccagcatcggatgatatactagcaatcattgaagagttacgccctagtgaagagctcgagacaagggaaactgaaccatgccataagcacaactctccagtacacgaatcagaaaaccagcaagattccccaatgactgacatattcctggagaacccaaccaaactgtactcaaatagaagccattacaatgagagtgacatgggtgattccagcagctgggaaaccataagcaatgaagagatgcaggggtcgagctcttcaaggaatggaagcgaaccttcagtcaacaagatatgtgacaagatttcctggaccagtggggatgattctgaggctgggcagaatgacaacctgagtggtgagttgagcaaggcctacttcgcagacagaaaaccatccaagaagaaagagtcagccatatcaaagttctggaagtcatcccctctgaaaaactgcgaaatcttcaagatagatgtcgtggagatgatgaacaggagatcatcgaacgaaaggctgtcaaatggcatgcattcttcgaacgaaggcgccaatcaagatgcaggactcagctcgccaagtatagggcaatggagctcacctgactcgatgaacagccaactcaaccgcgggttcagaggctgcatggagctggttcagaagcagagcttaaaggcgaagcttctagaagctcggatggagagccagaagatccagctccgccatgtgctcaaccagaaaacctagaactgcaagaattgaagagcgacaggcacttttaaccctgcaatttacagcaagaaataaggccaggcacacgatttactccattttctcttgtgcattgtagcatgtagcctagtctcctgtacttttagtctttttactccatagaaatgaatagctagctggttgtagccttgtagtggtaggcagcctggcagtagttgatgttgtcgtattgttgtagtactgaattctgcttggatgcgtaacgtagcaacataatacaagcagcatttttcagacaaagttcagcattgtcaatgaaaaaaaaaaaaaaaaaaaaaaaaaaaaaaaaaaaaaaaaaaaaaaactcgagactagttctctccctcgtgc

SEQ ID NO: 68110 - DNA, 257 bp, Oryza sativa
  Clone ID: PAT_MRT4530_68904C.1
gtcatgcatatgtaatctatacatgtgtgccaccaagagctgatgagtagtagaaaattcatagagacaaataatgaacttctgaagaaactgccacccaaacaaaacaaagcagaagtctcaactctgaggggcggcaacgagccaacgcacatctcattgcggttgcaccttcctcctcctccaatgatccccctctccctcctcgccgtcgtcctcgtcttcggcatcgccggcgccgccgatggcctttcagg

SEQ ID NO: 68111 - DNA, 385 bp, Oryza sativa
  Clone ID: PAT_MRT4530_68905C.1
aaaagcccccccacatatagtaataattataaaccccaaaaagcaaaaaaaaaagccaaagacaccgaaaaaaaaaggggggcccatacctaaaaaagaaatgaatggccctaactaccaggggcacatttgaaaaaacacccggaaacaaaagggaaaaaaaggaagcaaaaagctagctcatcactttattccaaaaacgggacaggggagggactcgctcgctcctccctttggggaaaaaatggcggcaatgcccaaatcgggcaaaaaaaagggctcggaccccggggaaaccccccactggtcggtcgctggcggtaagcacggcggtatgggctttttggggggggcttgaaggttggggtgaggcttaggctcaggg

SEQ ID NO: 68112 - DNA, 804 bp, Oryza sativa
  Clone ID: PAT_MRT4530_68906C.1
atggttggcctgggttggcttgggacgagctgggacccagggtcgggttgccagttcgatctgaatcatcgtaggccttgggttaaggcagatgttaatgaatttagacagtctagattcattaacatttatatgaatgtgggtaatgctcgaaagtcttataatatgaaagaagatgttgattcacaaatcaacaagtgtcgatttctaagatcggaaatgaaatttttagggtgcgcaaggtcaaagaaagaagtggtgacacatatgtttatactggttcaggtcctcaaggcaagggtgatcagtggcaagtatgatgcggtatcccttataatcgggccattctccgtcttcctcctctgccatgtcccagtcaacagcggaattcgtgccaatcctcaaccaaactgttgcctgggctccgtttacagtaatggcggggaatctggagaaggtggtggcggagggatacctcccctgcaagcgctcatcaactggtgggaggacgtcgaggaagatttccccactccaaacaccaatgagattgtagtcttcctccccttcttccagttcagacttgggctaccgaccggcaatttcttccaaggtctgctacacttccatggcatcaatgtccatcatctcaatcccaactccattcttcagattgccatattcaattacatgtgcgaggggtattatggtatctacccgcattttgccttcttctgctacctgtaccaactgaagccccagcctggcaagaagaatcccactgtggttgggggaagcggaatctag

SEQ ID NO: 68113 - DNA, 567 bp, Oryza sativa
  Clone ID: PAT_MRT4530_68907C.1
atgtcgccagcagacagccatgattctacgtcgcgcctgctcccggcgaaagaggagactgcttgcccgcctactcgcacctgcacctccgcctactggcgagctccgcccacctgctcgcttgcctactgggccattgtcgagtcgagctcctccgtccaactggcgaccatcacgcacctctgcccgccgtcgtccatcttgcgagcctgccctcgccactcttcctcttgcttgcctccggtttgcttgcctgcccgccggcccatctcactcaccgctcctttgcttgcttgcgaactctgccggcgtgcggacggcttgctcactcgcacgccggcctactactgtttctttcaccggcgcaaaagccaatcgaggaatgaccacgcgctcgagcgctacttcggagacctcccctgcgtcgaggtgatcggcgagcccggccggtacttcgccgagacggcgttcaccctcgccacgcccacgcgcgtcatcgggaagggcacccgcggcgagctccgggagtactggatcgacgacggcctctacggccccctcaactga

SEQ ID NO: 68114 - DNA, 619 bp, Oryza sativa
  Clone ID: PAT_MRT4530_68908C.1
cgggctgcaggaatcggcacgaggctcctcctcatttgttcgaaaccaaaccagtggaaagctagggtttcgccgactcgcgagtggagggcgctgctcgtcgccaggctcgtcgccggcgggatggccggtcgtccgtcagcatcctctctccgtcaaactgtttggtttcgccggctctgtctgccacgcccctctctttcgtcgactctctccgttgagctctctggttccatgtagataagatgtcctctgcacacgtatatttgagattcaataaaggtcagacaatcacataagtgaaggtgtgcttgaagattgtggccagcttgtgaaagctaattccattcaaggtaataagactaataacattgatgtggtttatacaccggggtataatctaaagaagactcctccatggatgtgggtcaagttggttttcacaactctaaattggtttgttgtttccctcctcccaaagcctcaacaatgccgcctcccctcctcctcctcttcttcctcctcgccggcgtgggcgccaccaccacggtggaggagcccccggcggcgctgtccccgccgcacaagaacgcgacgctctctgagatcctcctgcgct

SEQ ID NO: 68115 - DNA, 345 bp, Oryza sativa
  Clone ID: PAT_MRT4530_68909C.1
ggggcccaataaccccttcccaagtccggtttaggggaggaaaactggaccagttaaaaacccatgggaaaaaactttcccccaaccagtttattttttttgcaattcccccaaaaaatccctttccaaaaaagatccccccgtccatttttttaccaagtttttttccggtaaccccaaaagacgatttgtccaccacccacctttttggccctccaattgggtttttttaccaatttggcttcctcaacaatcactggtgggggggaaacgtttacaagttcttctttggcggggtaaaaagagactcccctgggcgggctgccaacccacccccctgccaaa

SEQ ID NO: 68116 - DNA, 2001 bp, Oryza sativa
  Clone ID: PAT_MRT4530_6890C.1
atggcgtcccccgcgcgccccgccgccgcctccgtctccggcgcgttcggcctccccgccgaccccgccgccgcccgctgctccttcgaccagtcgcgccgccgcccggaggatttgcagcaggagaagaggatggtgaggacgttcgtgaacgtgtacggtgggcaggagaactacaccaaggaggcggtcatggcggccgtggaggagtgcatgaagaagcaggccgagggcttgctgcattcgctcgagggaatcggcggccgcctgtcgcagctggagctctactgctacaagctcgagaggtccatcggggagctgcgcagcgacgtcatggattaccacagcgaggggacggtcaacttccggtgcctggagaagaatctgaggcaggttcaaaaatctgtgcagattctgcaggataagcatgagatttcagagacaccgaacgagttctccaaacttcaaatagcgcatgagttccctgctagagcaaatgaagcctctgctttctcaacattcggaagggaaaatgatcacagcacacaagttgcaaaacatgaggttgctttcatgccacttcagcaagttaatgcaatgcaatctcctgctgtgccagtccaaagcagcaatggttatattttgcagcaactagtgcctgtctctttgagcacacaaccagatcagcagcagccgagtcaagctgccgtgtattatatgcaaagccaaaatcctattaagtgcacagagagtgaaccatcagaatccgcggtacatgttattcagtcacaaatccagaatcctgaagccagggttgcagttgacctatctcagaaatctagccaggtgacagaattgtaccctcaaccccaggaccaaaggctacatctgcctgctcagcaggttgagtcacaagcatggcgaacacagccccttgtggtgcaaccgcagcaatacaatattcagcaagttccaccacagctagttcaacagcaaacatcatctcctcaggctcaaagtgctcctcaagtcgctgtcttgtatcctccatactcttctcagaagcctgccagtgctacaacggagccacttctgagaaacatggttgtgcactcgccatactcttcacctcagcagaagcatcatgaagccatgccttctttttatggccaaggcaatacagttttgcttccatcgacagaccttaacatccagcatcagcagccacaaccattgcagcaacacggcctgagctcatgcccacctcaaccaagcaagcccaaccactgtagtgtggcatcctatgccgttcaaggtagtggccaatcctacagcgccacattcaagaatccttctaactgtgctgctactgttgttgctgttctgcctcagcatccagcgagtggtccgatggcatttcatcatttgggaccacaagtcgtgcataatcagccatttggaaatatgtttgaaacagctagtgtggtagggtatccacgggatcgagttgagagcgtagctctcccagtggtaactgcagcccaacctgcagactctgttgccatggctgataagctcaatgcaggtagcaatgttacatccccacgagaatggtcaggttagtgcagaatgaaccagtcatattgagatgtttcactggtctcacaaaggatctccacttctaatatggactggaagcttatcagctctccataaggccacttcaatctggcttcctttttttttaattagccagcagattggtgcaaatccttctactttttttcagctgaagggtcaatctgaataagaatggtagattagttaagtgatgatgctagcatatgtcctcacttttaatggacatacctgcttgtaacctggtaaacttatgtctttgcggtatgaatatatttgacgagtttacaccaaaaaaaaaaaaaaaaaacacgaggaggggcccggtacccaattcgccctatagtgagtcgtattacaatt

SEQ ID NO: 68117 - DNA, 465 bp, Oryza sativa
  Clone ID: PAT_MRT4530_68910C.1
atggaggcccaaggggccatcccagccgctcaggcctgttcgccaattggcccattagaggcccatcgtcgtcgcttcgttatcccgtgcatcgccccgtgcaatgttgtcgcttcgttagcccacgcatggcctcgtgtcaccgtcgcttcgagtcgcgccatcgctcgtggcctcacgaatcacgtcctacagtccatggcaacactggatttcgaccaaaacaatcccattgattgcgacctaaacaatcccgttgattgcgagatgatgaagatggagaaggacaagaagaatgtccttgagaagatgagtttaacaatgcacattcacctctcgctcctcaccatagtgaccgcgatccccacgacatcgcctcccactccgcctatgccgactgagaagccatctcttgctctggccatgtcgtcatccatgatccatcgcctccatgtctttcagtag

SEQ ID NO: 68118 - DNA, 418 bp, Oryza sativa
  Clone ID: PAT_MRT4530_68911C.1
ggttcccttattaggcatttgagcaaattggaataaaccgaacatatgtgtacaaactcacatgcgagaaccacaggtagcaacaggccttacagtttttgaacagaagaaattgatcgcagaacggccggatgaacactttgcccacactagggaagaaccaggctcgaaaggagagacacatgccggaggacggccataacagctcctattggtttagcattattggacccggagaatgagaagcatttcctggggacaagtggaaggcccagaataatcggactcggtctttggcatccacatctgttggaacgggctgagagaagacacgatggatcctccagtgcagagactggccttacttgtaggaggagcgcccaccttgacctttatgccgctaggagccaaggcagtg

SEQ ID NO: 68119 - DNA, 330 bp, Oryza sativa
  Clone ID: PAT_MRT4530_68912C.1
atgggcggctgccgcaacggtggcctccgtccatgccaatgccggcggaggcgcagctcacaggggatggtcccgagaaagcggagatccaaggcgaccgtcgccgccgccgttcgggagatgagccggagccaacggatcaccggtggacggcagctggtggtgctcctcctcctgctgataatcacgctgttcgtcttgacgcagcccatgatcgccatggcctccgccgcgagggctttgggagaaaacgacggcaaccctgactgtgtcatccgtgaccaccctgctggcgaaaatggaataccaccatgcccgccgcgtccctaa

SEQ ID NO: 68120 - DNA, 438 bp, Oryza sativa
  Clone ID: PAT_MRT4530_68913C.1
atgagaaccgctgccatcctgggccgccggccgacggaagccgccaatgcccttagggccacggccgccgacgtgaacaaccgtcgtcctccgccgcagcccctagggccaccggcaccgatgggagccgttgtcgtcctgggccgacgccgtcctccgctactgcccccaccgccgttcgaaggtcctccgtcgccgacgcatagccgctacccgccgtcctcccgaccacctctagccgtcaccaacccagacggtcagcgcacgagcccggctgcctctggccaccatcgccgtgcctccgcctcccacctccccgtcgccgatgtcctagccgccgcgcagacgccggtcagctttggcggtgctccagcctccaagcgaccaatttggattcagccagaaatgagcctggaaggttgcagcttcaaccattga

SEQ ID NO: 68121 - DNA, 750 bp, Oryza sativa
  Clone ID: PAT_MRT4530_68914C.1
attcggctcgagctcgagccgaatcggctcgagccctatcactttttttgagaaaagatatatatcaatggcaactccgagtgtgttagaagtccgccctcctgctttaacttccatctctgaaccacttccattttttgatggaaccacaaggttatacatttgctatctgtgcccttttgcacaacgcgcatggataactaggaactgtaagggactgcaagacaagatcgaattggttcctattgatcttaaaaacaggcctgcttggtataaggaaaaagtttatcccacgaataaggtaccttcgttggagcacaatagcaaggttttaggagaaagtcttgatttgataagatatatagatgccaactttgaaggggcacctctattccccactgatcctgccaagagagaatttggtgagcagttgatatcccatgttgatacattcaccagtggcatataccctacatttaaaggagatcctatacaacaaaccagtgctgcttttgattacctggagaatgctcttggtaaatttgatgatggaccatttttccttggtcaatttagtttggcggatattgcctatgtttcatttcttgaaaggttccaaattgtcttctctgaaatttttaagcacgacatcacagcaggaagacccaaactagccacatggattcaggaggggaataagatcgatggttataaacagacaaaagttgacagggaggaatatctggaagc

SEQ ID NO: 68122 - DNA, 474 bp, Oryza sativa
  Clone ID: PAT_MRT4530_68915C.1
tcaaccgctcatccgtccattcggcccaatagctgtgtgggccgtgtactgggccgatgaccttacgccgagcccggcccattggagccctaaactagacggctcgccggctcgccgcagccaaaccatccgattccccaaacctctcctcctcgtcgtggacctgccggtggcgacgccgacgagctcccctccccaccgccgccgatccgagagcctccacgtcccccttgccggcgcggctcgagcccgggagcggaggagggcaagcgtccccggcggcgtcctctggtatggtggcgtggtgatccggccggaggagcctggatgaaggagaggaacccggcggttgcatcctccgcgctggcccggatcctcgccgcctcctgaattgttgcagctgttgtggtcctggcaatgcagttgctgcattgtggacatggcgattacgtcctatctctatatctctctctc

SEQ ID NO: 68123 - DNA, 210 bp, Oryza sativa
  Clone ID: PAT_MRT4530_68916C.1
atggtgacatcaacaagctccagaactggagtcggtcttcgaaacccggtgaccgctgctgatgctgctgctgctcttctacgcatgccgatgccgtcgccatcgcaaggatccgcactagggaaagtggccaccgcacacgcacccgcacccaccaccacctttgtcccgtttcttcgccgtgcagcccgtgctcaccggaacgagtga

SEQ ID NO: 68124 - DNA, 103 bp, Oryza sativa
  Clone ID: PAT_MRT4530_68917C.1
ggtggttctttaagtgtttcggggctttccccaagcccacaagagcgcgcaaatcccatggcacaagaagattgatgatacccttgcacttaaaacacaatgt

SEQ ID NO: 68125 - DNA, 7695 bp, Oryza sativa
  Clone ID: PAT_MRT4530_68918C.1
ctgcacgaactccccccgccggtttctctctcgcctctccgccgccgccaccccgccgcctccctcctccggcgaccgccgcgggcagagcgcgacaagagggagggaggagagctcgcccgagtgtgggggcagggagcgcgaggagagggtgaggggaagatggtgagctcttcgtcgccggtggtgaacgtgtacccgctcgccaactacacgttcggcaccaaggagcccaagatggagaaggacacctccgtcgccgaccgcctcgcccgcatgaaggtcaactacatgaaagaaggaatgcggaccagtgttgaagcaatcctattggtgcaagaacacaaccatccccacatactgctgttgcaaattggtaatacattttgcaagcttcctggtggacgtttgaagcctggagaaaatgaaattgagggtctgaaaagaaagttatgcagtaagcttgcagtgaactcgccttcctttccacctaactggcaggttggagagtgtgttgctgtatggtggaggccaaactttgagactgtgatgtatccttactgccctccacatataaccaagcccaaggagtgcaagaagcttttcattgttcacctatctgaaagagagtattttgctgttccgaggaacctgaagctgcttgctgttccactgtttgaactctatgacaacgttcagcgatatgggccagtcatttccaccattccgcagcagctgtctaggttccagttcaacatgcaggtggtcgacctcaaggcgcgccaccccgacgtcctcctcatggtcgaggtcggttaccgcttccgcttcttcggcgaggacgccgccgtcgccgcctccgtgctcggcatcatcgcccaccccgaccacagcttcctcaccgccagcatccctaccttccgcttgggcttccacgtccgccgcctcgtcgccgcggggcacaaggttggcgtcgtccgccagaccgagacggcggcgatcaaggcggcgcacggcgggggcgcggccggcacgcccttcgcgcgcgggctctcggcggtgtacacgcgcgccactatcgaggccgcggccggggagctggagggcggcggcgcgcccgacgaggggagcaggtacctcgtgtgcgtggtggacaaggaggtggacgccatggggacggaggggttcgaggtgaagatcggggtggtggccatcgaggtttcgaccggtgaggttgtgcacggcgagttcatggacggagtctcgaggaatggccttgaggccgtgctgcttggcttggcgcccgttgaggtcatcctcgggactccaatatcctctgccacggaaaagctgatggtggcatatgccgggcctacctctaatgtccgggttgagcgcacctcgcgtctttgttttagtgagggtggtgctttagctgaactgctctctttgtttgagaagtctggggttgatgctccaactgttgagaatggcagacatttgatggagatgaacgaggagaacaataatcctcgtgggattgaggtaccgttaagttcttctgaactcactgtcatcgcaccttatgattgggtctccatatgtagtttaggtatcatggctatgccagaactagttatccatgcactggccttgagtgttcgctatctcaagggttttggtatggacaggataatctgctttggttcttcatttcagccatttacagctaacactgaaatgtctctgtcagcaaatactcttcaacaacttgagctgactcaccctttatgtgatagaaatcaaatatgtactcgtcatgacgcggtctctgagatctctgaatcaattggatcacaacaatattcaactaacaatctccaggatgaagtggacatgtcttgctcatcttctgtgagaagtgatctgagcaccattctttcatccgttttgagaatgctggcaggaactcttgatatacaaagaggaataacaaggattttccactgcaaagccacagcgaaagagggtacttcaaatgatactcccttcgggctgataatacttgtcgttttagacaaggatgagtttgttggggtcgtccaagctatcctgacggctggaaagcaactgcagaagcttgttcttgaggatacagacaccatgtcttctcagcatagaactgtgcactctcctttgttgagaaggctaataaatacggcttcatcatgtactgtcctggctaatgctgcgacacttgtgtcttgtcttaacaaagatgctgctgatcaaggagatatgctaaacttattcattgcatctgttgatcagttcccagaggttgcagagggtcatgcaactgttgaaatggccaagcagaaattggagctgttaattactgagtatcgaaagcagcttggtctaccggtggatagaaaggtaccttcaagttggatgaaagtaaacagcaccaagaaaacaattagataccacactccggaagtctcgaaaaacttggagaatttattgctggctaaggaaaagctagcagttatctgcaggacaacatggaataacttcctcatggatttcggcagatactatgcgcagtttcaagcaactgttaaatctcttgccactctggactgcttatactcgcttgccactctcgcaaaacaaaataaatatgtacgaccaaattttgttcgtgagaatgaagcaagtcagattcacataaaagatggccgccatccggttctggagtccctacttggagtcaattttgttccaaatgataccgagcttcatgcaaatagtgagtactgccagattgttacaggaccaaacatgggaggaaagagttgctatattcgtcaagttgctctaattacattgatggcccaggttggttccttcgtaccagcttcatcagcaacattgcatgctgttgatggaatttatactcgaatgggcgcgtccgatagtattcagcatggaacaagtaccttttatgaggagttgagtgaagcttccaacatattgcataactgctcatctcggtcactagttatcatcgatgagcttggtcgtggtacaagcacacatgatggtgttgctatagcttatgctacattacactatcttctgaaagagaagaaatgcatggtaatttttgtcactcattatccaaagattcttaatattctgagagaatttgaaggttctgtcggtgcataccatgtctcatatctagcaacacggaaactgttggaagtagctgatagacagatggtgattaacaacacagagacaaaggatcttggtgaaatcactttcttatataaacttgttgctggagcttcagacagaagcttcggtcttaatgttgcgctgcttgcacagcttccatctagctgtattgagcgcgcttcagtcatggcagccaaacttcaacaggagttaagtgagcgtgagaaaaataagttttgtaggctaatggacgttccacgggaaagctctccgaaagagctttgtgcacagccttatcaagggctggctgaagcatgccacaggatactatttaacgttacatctgctcaaagtaatgacgagttaacggatacactatcttctttaagggaagccagggaaattgccttgaaggcaataaaaggctgggggcgcgtggggatggatttgtctaggtttactgccccgcggccgggcttgcagatcggcgccgccgggaatggcttccgggcatgctccctgcggcgtctcaggtatcgtgtctgcggcgggaaccccatgggcgcctccgccctcggaggctgcggttcccgtagcctcttctacttggctccaaaccatgggagccctcttgccctccggaccagagggagggcgctgaggtgccagggaaatgactcactggcctatgttgatggccctttggaaggtaccaatggctcagtagtcgataataccgaggacgaagcaaacagctctgggttggatgaggagaagggtgatgatgatgcagaaaatctcagggacttgcttcagaaggcgaggaaagagctggaggtggccaggttgaacagcaccatgttcgaggagaaggcgcagcggatatccgagtcggccatcgcactgaaggatagggcagataaagctcagagcgacgtctcttctgccgtgacgaccatacaggagatcatcagcaaggaggctgatgccaaggaggctgtccggacagctacaatggcgctctccatggctgaggcccgcttgcagttggcgtcagaagctctggatgccaaaaggggatcagtcgggccgatggaagttagcattgatgatgtggaggaggaggcccttgcgtccgcgcaagaggagattaaggagtgccaagaaagtctgtcaaaatgtgaggaggagctgagacgtatccaagagaagaaaatggagttgcagaaggaggttgatagattgacggagcttgctgagagggctcttttggatgcttcaaaagctgaggaggatgttgcaaatataatggttttggctgaacaggcagtagctcttgagatggaagctgcacagcgagcaaatgatgcggaactagcattgcagaaagcggagaaggccatctcctcggttgatgccgtcgtagagttaccagcacctgctgaggagcaagtaagtgatgaagaagacaatgtttctgaagtgtatgattacagcagtgatgctatagatgatattcctgaaagagacgaggtgtcaaatgttgagcgcctaactgttggggacttagctgtagaaggcattgagcaacttgaatcatcccgtgaaatgtctgatgacgaaagcactgacaagttgcttgttgagcctcagaaagaagccgaacctgatatagataagtcaaagcaagggaaaaaacaggaaatagaacgaaaggagtctcagccatcgaatgctcctaaagcatcactgaagagatcatctcggttcttccccgcatctttcttctcctccaaagcggatggagaatttacacctacatctgttttcaaggggttgatgaaatcgactagaaagcatgcgccaaagcttgttgttgggatagtgcttcttggagcaggagcattcttcttaaatcgggctgagaagagtagtcaattatttcagcagcaagaaataaccacaagtattgaggaagttacctccactgcaaagcccatagttcgtgagatgcgaaagatcccacaacgagtaaaaaagcttattgagctcttacctcatcaagaggtaaatgaggaagaagcttcactcttcgacatattatatttgcttctggctagtgttgtgtttgtaccattatttcagaaaatacctggaggtagtcctgttcttggatatctggctgctggtgtcctaatcggtccctatgggctttccatcatccgtcatgtccatggaacaaaagcaattgctgaatttggagttgttttcttgttgttcaacattggccttgaggatatatcagcttaccattttttacctgcagctttctgtggaaaggctaagctcaatgaagaagtgctggctactacagcagctgttggtatgatagctcaccgttttgcagtgctaccgggaccagcagcaattgttattgggagtgggttggctctgtcctcaacagctgttgttttgcaggtactacaagaacgtggggagagcacatcacgacatggacgtgctacattttctgtgttattattccaggatttggctgtggtggtcctgttgatattaatacctcttatatcacctaattcttcaaaaggaggggttggtttccaagcaatagcagaagctatgggaatggctgctgtaaaagcaatagctgctataacagccataatcgctggaggtcgtctgttgcttcgtccaatttacaagcaaattgctgaaaataggaacgctgagatattttcagcaaatactctccttgttatttttggaacaagtcttctcacagctcgggctggattgtcgatggcactgggagcatttttggctggtctattgctagcagaaacagaattctccttacaggttgagtcggatattgctccttaccgtggtcttctgttaggtcttttctttatgacggtccaacatcgtggtttctattatttactctggaatgacgataaatcgctaattcttcctgttggaatgtctattgaccccaagttgcttctgtcaaacttcccagcaatctctgtgatattaggtcttttgattattggaaagacaatgttggttacatttattggtagagtatttggaatttccaccatagctgctgttcgggttggtctgttgcttgcacctggtggcgtccgtgcttttgttgccttcggagaagctgtcaatcagggtcttctatctcctcaattatcgtcattattatttctagtggttggcatttcaatggctcttacaccatggttagctgctggtggccagtttttggcatcaaaatttgagcagcatgatgtgagaagtttattacctgtggaaagtgagacggatgacttgcaagaccatattataatattgggatttgggcgtgttgggcagataatcgcacaactcctgtcagaaagattaattccatttgttgcacttgatgttcgaagtgatcgggtggcagttggacgcgcgcttgacctaccagtatatttcggggatgcaggaagtagagaggtactgcacaaagttggggctgagagggcctgcgcagctgctattactttagatacccctggtgcaaattatagagctgtctgggctttgagcaaatattttccaaatgtgaagacattcgtccgagcgcatgatgtggatcatggtgttaacttggagaaagctggtgcaacagcggttgtccctgagaccttggaaccaagtctccagttggctgctgctgttcttgcacaggcaaaactcccaatgtcagagattgcagcaactgtcaatgagttcaggaaccgtcatctgtcagagctcacagagttatgtgctacaagtggaagttctctgggctacggatactcgagagtcatgtccatttccaaatcaaagaccgtcacctctgatgatgagagtgaaactgttgatggagcattggcgatttgagctgatgcgttagtcacctcccttagactgtacagtagataatctgtcatcaaagataatttgcgtatagaaaagtagtagcaaaataattcacgcaatgacgattcccatttttgaaaacttagcattacccctttttttaatgtatggtaggacataggatattacttatcttctaccatcagttcatttatttgtagcccttttactccgttagcaagtaatttcttgatggagaactaggacgatgcttgcaccttacatggagaacactgagaatttcacaagtggcctccaaatggcgcatgatggataagtcgtagtcgtctcttatgaggaatccatacaaccaagattttgggttcagaactaaatattatgattttgttagtactcagagctgatgttggaaacaagtggtgtcgggtttcttttgaaaaaacattatatttttaacaaaaaaaaaaaaaaaaaaaa

SEQ ID NO: 68126 - DNA, 634 bp, Oryza sativa
  Clone ID: PAT_MRT4530_68919C.1
ccacgcgtccgggttgatgaaatcgactagaaagcatgcgccaaagcttgttgttgggatagtgcttcttggagcaggagcattcttcttaaatcgggctgagaagagtagtcaattatttcagcagcaagaaataaccacaagtattgaggaagttacctccactgcaaagcccatagttcgtgagatgcgaaagatcccacaacgagtaaaaaagcttattgagctcttacctcatcaagaggtaaatgaggaagaagcttcactcttcgacatattatatttgcttctggctagtgttgtgtttgtaccattatttcagaaaatacctggaggtagtcctgttcttggatatctggctgctggtgtcctaatcggtccctatgggctttccatcatccgtcatgtccatggaacaaaagcaattgctgaatttggagttgttttcttgttgttcaacattggccttgagctttctgtggaaaggctaagctcaatgaagaagtatgtctttgggttaggctctgctcaggtgctggctactacagcagctgttggtatgatagctcaccgttttgcagtgctaccgggaccagcagcaattgttattgggagtgggttggctctgtcctca

SEQ ID NO: 68127 - DNA, 1110 bp, Oryza sativa
  Clone ID: PAT_MRT4530_6891C.1
atggacaacgttctccttgggaaagtggcagcgagggggaacttaccatgcttggagaaaatagctgatggcgaggtcgacaaagaggtcacaatagttggtccaggacccggttcggtggctggcgctgagatgaaaggcggctgtgcggcggacggtgacggcggccgcgccggcgcacggtcggcgaaagctgttttcctcatgaccgagaagccgccaccatcgccgtcctcggctagcccaggttctgttaaaaagaagatccagcaattagaccaatctgaagttaatgagggcaacgtcatgaccattactccggacaaattaacacctgatcagaagaaggagtttgaagcaatgatgcagcaagcatggaaccagttcttgaacttattcatgctgacccgcaaggggacagtggtgcaaaagtatcaggtgcgagtagtggctgatgtccccgggaccggttcttccaaggataggggactgaaacaagccctagatagctcggctcaaccgagcgacaaaggcactgcagatggatcggctcaggagaatcagggtgaccactctcaaggaatacatggagttcaagacgccatcaagacagcggactatctagccgattcaccagcaaggcttgatgaatccatcgactgggaaacatactctgaatcagccgaatgggtaaggagcaaaaaggttataccatgccaatgggtgaagaattatggaaaagaggagaggtatgactttgatattgccaaggctgacaagatttttgatctgttactccgagaaaagcaaattcaactccctgctggtatgaggctgccatctattgaagactgtcctgaatgcgccaacgttgcaaagtgttcaagccggttgtatattaaaggcaatcggctgaggcatgcaagggttcctgttcatcaaatattgggcccggaagtcgagcaggaaatcaatcatcggctaaagaaaacaaagccgaagcaggaatggcgcgttaagaaacaagctcctgtaaccgatgaagctgtggccgatgaagcaaagagattggctaaagggaaaagcgttgtgattgcgtcggttaacatg

SEQ ID NO: 68128 - DNA, 259 bp, Oryza sativa
  unsure (1)..(259): unsure at all n locations
  Clone ID: PAT_MRT4530_68920C.1
cgcgacggccaggcctccanaaggttccggtgggtcctacaaccccctcccctctcccagatntaataggaggcggtggngcttgttnttcgtctctcaatgatgaggncgatccaatctaatccggttactctgattagtttgaatgganatggagattgatccatttnaaaacctgtgaaaggaaatatatgnccttaaattatgatgatttgtggatttgttaaaaaaaaaaaaaaaaaaaaaaaaaaaaaaaaaa

SEQ ID NO: 68129 - DNA, 7518 bp, Oryza sativa
  Clone ID: PAT_MRT4530_68921C.1
atggtgagctcttcgtcgccggtggtgaacgtgtacccgctcgccaactacacgttcggcaccaaggagcccaagatggagaaggacacctccgtcgccgaccgcctcgcccgcatgaaggtcaactacatgaaagaaggaatgcggaccagtgttgaagcaatcctattggtgcaagaacacaaccatccccacatactgctgttgcaaattggtaatacattttgcaagcttcctggtggacgtttgaagcctggagaaaatgaaattgagggtctgaaaagaaagttatgcagtaagcttgcagtgaactcgccttcctttccacctaactggcaggttggagagtgtgttgctgtatggtggaggccaaactttgagactgtgatgtatccttactgccctccacatataaccaagcccaaggagtgcaagaagcttttcattgttcacctatctgaaagagagtattttgctgttccgaggaacctgaagctgcttgctgttccactgtttgaactctatgacaacgttcagcgatatgggccagtcatttccaccattccgcagcagctgtctaggttccagttcaacatgtgggccagtggctcaccgcccacttcaccggtttccggcgtccggcgcggcgcctgcagaagagcccctcgaaaacccctaccccccatagctgcccacgtccccccgtttcccgcgcccacctccaccgccatcgccatgggcaagccgaagcagcaagtgctctcccgcttcttctcccccaagccgcggccctccgcccccgccaccgccgacgatccgccgcctccgcctagacctcccgccgagccgcccgtcgccgccgtcgtctccttctcgcccgccaagcgcgcgcgcgccctctccgtctcccccaaaaccaccgccaaaagggccaagccctcccctcccccttccgactacgttcgccgcaggctgctcgaaccgccccggccgcccccgcccgccgctgtgaaccctagcggcaaagcctacaccccgctggagcagcaggtggtcgacctcaaggcgcgccaccccgacgtcctcctcatggtcgaggtcggttaccgcttccgcttcttcggcgaggacgccgccgtcgccgcctccgtgctcggcatcatcgcccaccccgaccacagcttcctcaccgccagcatccctaccttccgcttgggcttccacgtccgccgcctcgtcgccgcggggcacaaggttggcgtcgtccgccagaccgagacggcggcgatcaaggcggcgcacggcgggggcgcggccggcacgcccttcgcgcgcgggctctcggcggtgtacacgcgcgccacgatcgaggccgcggccggggagctggagggcggcggcgcgcccgacgaggggagcaggtacctcgtgtgcgtggtggacaaggaggtggacgccatggggacggaggggttcgaggtgaagatcggggtggtggccatcgaggtttcgaccggtgaggttgtgcacggcgagttcatggacggagtctcgaggaatggccttgaggccgtgctgcttggcttggcgcccgttgaggtcatcctcgggactccaatatcctctgccacggaaaagctgatggtggcatatgccgggcctacctctaatgtccgggttgagcgcacctcgcgtctttgttttagtgagggtggtgctttagctgaactgctctctttgtttgagaagtctggggttgatgctccaactgttgagaatggcagacatttgatggagatgaacgaggagaacaataatcctcgtgggattgaggtaccgttaagttcttctgaactcactgtcatcgcaccttatgattgggtctccatatgtagtttaggtatcatggctatgccagaactagttatccatgcactggccttgagtgttcgctatctcaagggttttggtatggacaggataatctgctttggttcttcatttcagccatttacagctaacactgaaatgtctctgtcagcaaatactcttcaacaacttgagctgactcaccctttatgtgatagaaatcaaatatgtactcgtcatgacgcggtctctgagatctctgaatcaattggatcacaacaatattcaactaacaatctccaggatgaagtggacatgtcttgctcatcttctgtgagaagtgatctgagcaccattctttcatccgttttgagaatgctggcaggaactcttgatatacaaagaggaataacaaggattttccactgcaaagccacagcgaaagagggtacttcaaatgatactcccttcgggctgataatacttgtcgttttagacaaggatgagtttgttggggtcgtccaagctatcctgacggctggaaagcaactgcagaagcttgttcttgaggatacagacaccatgtcttctcagcatagaactgtgcactctcctttgttgagaaggctaataaatacggcttcatcatgtactgtcctggctaatgctgcgacacttgtgtcttgtcttaacaaagatgctgctgatcaaggagatatgctaaacttattcattgcatctgttgatcagttcccagaggttgcagagggtcatgcaactgttgaaatggccaagcagaaattggagctgttaattactgagtatcgaaagcagcttggtctaccggtggatagaaaggtaccttcaagttggatgaaagtaaacagcaccaagaaaacaattagataccacactccggaagtctcgaaaaacttggagaatttattgctggctaaggaaaagctagcagttatctgcaggacaacatggaataacttcctcatggatttcggcagatactatgcgcagtttcaagcaactgttaaatctcttgccactctggactgcttatactcgcttgccactctcgcaaaacaaaataaatatgtacgaccaaattttgttcgtgagaatgaagcaagtcagattcacatcaaagatggccgccatccggttctggagtccctacttggagtcaattttgttccaaatgataccgagcttcatgcaaatagtgagtactgccagattgttacaggaccaaacatgggaggaaagagttgctatattcgtcaagttgctctaattacattgatggcccaggttggttccttcgtaccagcttcatcagcaacattgcatgctgttgatggaatttatactcgaatgggcgcgtccgatagtattcagcatggaacaagtaccttttatgaggagttgagtgaagcttccaacatattgcataactgctcatctcggtcactagttatcatcgatgagcttggtcgtggtacaagcacacatgatggtgttgctatagcttatgctacattacactatcttctgaaagagaagaaatgcatggtaatttttgtcactcattatccaaagattcttaatattctgagagaatttgaaggttctgtcggtgcataccatgtctcatatctagcaacacggaaactgttggaagtagctgatagacagatggtgattaacaacacagagacaaaggatcttggtgaaatcactttcttatataaacttgttgctggagcttcagacagaagcttcggtcttaatgttgcgctgcttgcacagcttccatctagctgtattgagcgcgcttcagtcatggcagccaaacttcaacaggagttaagtgagcgtgagaaaaataagttttgtaggctaatggacgttccacgggaaagctctccgaaagagctttgtgcacagccttatcaagggctggctgaagcatgccacaggatactatttaacgttacatctgctcaaagtaatgacgagttaacggatacactatcttctttaagggaagccagggaaattgccttgaaggcaataaaaggctgggggcgcgtggggatgggtttgtctaggtttactgccccgcggccgggcttgcagatcggcgccgccgggaatggcttccgggcatgctccctgcggcgtctcaggcatcgtgtctgcggcgggaaccccatgggcgcctccgccctcggaggctgcggttcccgtagcctcttctacttggctccaaaccatgggagccctcttgccctccggaccagagggagggcgctgaggtgccagggaaatgactcactggcctatgttgatggccctttggaaggtaccaatggctcagtagtcgataataccgaggacgaagcaaacagctctgggttggatgaggagaagggtgatgatgatgcagaaaatctcagggacttgcttcagaaggcgaggaaagagctggaggtggccaggttgaacagcaccatgttcgaggagaaggcgcagcggatatccgagtcggccatcgcactgaaggatagggcagataaagctcagagcgacgtctcttctgccgtgacgaccatacaggagatcatcagcaaggaggctgatgccaaggaggctgtccggacagctacaatggcgctctccatggctgaggcccgcttgcagttggcgtcagaagctctggatgccaaaaggggatcagtcgggccgatggaagttagcattgatgatgtggaggaggaggcccttgcgtccgcgcaagaggagattaaggagtgccaagaaagtctgtcaaaatgtgaggaggagctgagacgtatccaagagaagaaaatggagttgcagaaggaggttgatagattgacggagcttgctgagagggctcttttggatgcttcaaaagctgaggaggatgttgcaaatataatggttttggctgaacaggcagtagctcttgagatggaagctgcacagcgagcaaatgatgcggaactagcattgcagaaagcggagaaggccatctcctcggttgatgccgtcgtagagttaccagcacctgctgaggagcaagtaagtgatgaagaagacaatgtttctgaagtgtatgattacagcagtgatgctatagatgatattcctgaaagagacgaggtgtcaaatgttgagcgcctaactgttggggacttagctgtagaaggcattgagcaacttgaatcatcccgtgaaatgtctgatgacgaaagcactgacaagttgcttgttgagcctcagaaagaagccgaacctgatatagataagtcaaagcaagggaaaaaacaggaaatagaacgaaaggagtctcagccatcgaatgctcctaaagcatcactgaagagatcatctcggttcttccccgcatctttcttctcctccaaagcggatggagaatttacacctacatctgttttcaaggggttgatgaaatcgactagaaagcatgcgccaaagcttgttgttgggatagtgcttcttggagcaggagcattcttcttaaatcgggctgagaagagtagtcaattatttcagcagcaagaagtaaccacaagtattgaggaagttacctccactgcaaagcccatagttcgtgagatgcgaaagatcccacaacgagtaaaaaagcttattgagctcttacctcatcaagaggtaaatgaggaagaagcttcactcttcgacatattatatttgcttctggctagtgttgtgtttgtaccattatttcagaaaatacctggaggtagtcctgttcttggatatctggctgctggtgtcctaatcggtccctatgggctttccatcatccgtcatgtccatggaacaaaagcaattgctgaatttggagttgtgttcttgttgttcaacattggccttgaggatatatcagcttaccattttttacctgcagctttctgtggaaaggctaagctcaatgaagaagtgctggctactacagcagctgttggtatgatagctcaccgttttgcagtgctaccgggaccagcagcaattgttattgggagtgggttggctctgtcctcaacagctgttgttttgcaggtactacaagaacgtggggagagcacatcacgacatggacgtgctacattttctgtgttattattccaggatttggctgtggtggtcctgttgatattaatacctcttatatcacctaattcttcaaaaggaggggttggtttccaagcaatagcagaagctatgggaatggctgctgtaaaagcaatagctgctataacagccataatcgctggaggtcgtctgttgcttcgtccaatttacaagcaaattgctgaaaataggaacgctgagatattttcagcaaatactctccttgttatttttggaacaagtcttctcacagctcgggctggattgtcgatggcactgggagcatttttggctggtctattgctagcagaaacagaattctccttacaggttgagtcggatattgctccttaccgtggtcttctgttaggtcttttctttatgacgattttttttttggtccaacatcgtggtttctattatttactctggaatgacgataaatcgctaattcttcctgttggaatgtctattgaccccaagttgcttctgtcaaacttcccagcaatctctgtgatattaggtcttttgattattggaaagacaatgttggttacatttattggtagagtatttggaatttccaccatagctgctgttcgggttggtctgttgcttgcacctggtggggagtttgcttttgttgccttcggagaagctgtcaatcagggtcttctatctcctcaattatcgtcattattatttctagtggttggcatttcaatggctcttacaccatggttagctgctggtggccagtttttggcatcaaaatttgagcagcatgatgtgagaagtttattacctgtggaaagtgagacggatgacttgcaagaccatattataatattgggatttgggcgtgttgggcagataatcgcacaactcctgtcagaaagattaattccatttgttgcacttgatgttcgaagtgatcgggtggcagttggacgcgcgcttgacctaccagtatatttcggggatgcaggaagtagagaggtactgcacaaagttggggctgagagggcctgcgcagctgctattactttagatacccctggtgcaaattatagagctgtctgggctttgagcaaatattttccaaatgtgaagacattcgtccgagcgcatgatgtggatcatggtgttaacttggagaaagctggtgcaacagcggttgtccctgagaccttggaaccaagtctccagttggctgctgctgttcttgcacaggcaaaactcccaatgtcagagattgcagcaactgtcaatgagttcaggaaccgtcatctgtcagagctcacagagttatgtgctacaagtggaagttctctgggctacggatactcgagagtcatgtccatttccaaatcaaagaccgtcacctctgatgatgagagtgaaactgttgatggagcattggcgatttga

SEQ ID NO: 68130 - DNA, 535 bp, Oryza sativa
  Clone ID: PAT_MRT4530_68922C.1
tctaacctgaaatagtttctcaagtttacatccttacctccttatctgtcagacagaaatatcatatttgtcacacctatatcaaagttctaattgaatactatggtactattatctatattttatttgagaagaaaaaactatatttggttaattaccagacagaccttataaatatggtcatctttagcactattatttgtctaagcgagtattttactttttaaggtggtggtatcatggatacagaaatgtctgaagatatagaccacaacttaactcctacccttgacagcatgtcttatggaatgccgaatcaaacaggatctgaaaattcattgctcggatgaagatgattattttttgaactctggggatcttgcaggaattccagtcgttggtagtgacaatgaggatgaacaggattttagttcaaaggacaatcttgtttcttcaattcatactgatgatagcttggaagtagagagaagagtcacacagcatgaatcagactatgaacatgaaatacagattc

SEQ ID NO: 68131 - DNA, 267 bp, Oryza sativa
  Clone ID: PAT_MRT4530_68923C.1
atggagcggcgcatgctcaagcataggcaggcggttagcaagcggaggagcgtgcacgagaaaaccgacgtcgagcaagcgaaggatcgagcaacacgagctcaggagaaaacgaggagcaacgtagaagaggagcggcggcgaccgatggctgacgggcaggatcacgagcaggcggggtgggcggaggagcttgacgatgaccggaaggagcaggtgagcggcgggccagtaaaagtactcggtgatggccggaagagcgggtga

SEQ ID NO: 68132 - DNA, 1866 bp, Oryza sativa
  Clone ID: PAT_MRT4530_68924C.1
ttacttagatggtgtggcgtcccgcgccttcccgccgcctacgacgtggagctccgtcgggctgctgccggcgccgccctcctcctctcccgccgaccatcccacacagccgcccgccagcatctgcatctgcatctccctctgcgccagcgacggccggcgcgccccatcgccgcctccgccgtcgacttgccccatcaccgccaacgaggcgttctgccgcctggcgccgctcgtcacgtacgaggacatcctccgcatcgccaacggcgacacctcaccatcctatccggcaagcccggtcagcgagttcctcaccagccaagattttctcatggacaaggcgctgaagtgagacgacgacagacgaagaggtgaaaaaaatggagtcatgttttgtaacgccccacgaggacacgccagagacgatagaagaagaggtgaaagagatggagtcttgttttgtaacgccccacgaggacacgccaaggcaagggctctggctctctcccctcgacatagtcatggtcagcagaggccatacccctactgtgtacttctaccaacgtgacactgccactgttgctgccgattttttcgaggtaggcaggcttaaggaggctatggcaaaggccctagtggccttctaccccttggcaggccgtctcagtgtagatggtgatggtaggcctgaaattgactgcaatgccgagggtgcgctctttgttgtggctcagtcaaaactcaccgttgatgccttcagcgaccttaagccatcaccagagttgaggaggttgtttgccccccgtattgagccagcatccatcatgcttggagtacaggtgactttcttgagttgtggtggtgtggcattagggacggtgttgcaccatgtcgccatcgatgcccttagcgcgttccatttcttccagacatggtcttctttctgccgagatggtgaagccgccatgttggagctgccctgccatgaacgcaccctcctccgcacacgctccccacctatcgtccacccggatgtgcactcaatgttcagtctaaagctcaacttctgtgagccatcagaccctatatccaccaagatattcgtcatctccaagaaccagctcgatgcccttaaacaaatatgtggtggattgagcacattttgtgccatgagcgcccttgtatggcagtgcatgtgcattgctcggcaactccctctagacgccgagacacgcgtcatcttcccagtcaacattcggcgccgtgtgaagccacctctcccagatcgctacttcggcaatgcacttgtcgacttgaaagtagcctccacagttagggacattgtcttggggacactggatgtaactgctgcccagataaagaacgcattgggacgccttgacgatgagatgctgcagtcggcgatagactacaatgagatggcagggatgcccaacaagcataccaagggaaacctgccagatacagaattacgaatggtctcttggctaggcatgccagtttatgatgcggattttgggtgggggaagccggagatgatgtctcgtgcggagtctgtgcgtggcggatttgtttatatgatggatggcattgacaacgatgggggtggcgtgcgtgtgctcatgtgtatggaggcacgaaagatggaggagttcgagcgactgttttatgccaagtttgcacaatgaagaaactacctagctagaacatgatgcatgttttctgttctattatcaataatggatgtttcatgtaataatataaccaatacctccatatattttggtggcatggttgtttcagacatgacagggtgtggttgactttaaaaaaaaaaaaaaa

SEQ ID NO: 68133 - DNA, 462 bp, Oryza sativa
  unsure (1)..(462): unsure at all n locations
  Clone ID: PAT_MRT4530_68925C.1
gcgaaaaaaccgtacgaatctttcccattttcacacgaatttcaaaccaaagtctcctccgacgacgccgcgacatttcaaatctcaaccaaatcntnncccaattcgttcgaatctctncnccccttccccccacccgcttgcttccgtgttctacccccctttcttcccaattcgatctgcgaatatcgctgcctcgattcccaggctagggctcgcgcggcggccccggatcgagctgccccggtgagttctccccccccctcgccggcgangctanggtttgggcggcggcggcggcggtggancgcgtgctgttccgtttctctggatcctagggtttgctgcgctggatcgagctttgttcgttgtgatggtngtgaagggangaggaagaagtgantgaacggtttgattggcgtgtttaangggtcgccgggcaatggtgcggcttttcggggt

SEQ ID NO: 68134 - DNA, 464 bp, Oryza sativa
  Clone ID: PAT_MRT4530_68926C.1
aaagtaaaagggtggtggtgcgccgagattgtattgaacgtgtgtgttagattgattacatggggctcggggtctatttatacccgagattacaaaatatgtccatgtcagacacgactcttatctctaacaaactctaagataccataagtctttgcggcagacttttgcccaaacttatctctaaggaaattacataaaatatcctaattgatagatacacttgccttctcaggacttaatccgtgcatggcaatccacatgaagcacattaactcaacccgacaacgtgtatcgagttacattgtcggaatcggtttaatcggctaaccttgtccgactcgaactctgccgattctggtcgcagccgattcggacttcagctgatcttcactctgtttccgggacaatctctatctcgattcctccttcacatctgatccttggattaccaaattgggtcg

SEQ ID NO: 68135 - DNA, 1903 bp, Oryza sativa
  Clone ID: PAT_MRT4530_68927C.1
atggcgacgctgctctccaagctcctagctctgcctcaacaatggcagctcctcctactcctcctcctcctcccaatcgcctccctcctgttggtaattggcaggaacaccggcggccgtcgtcgccggcggcatcttagactgcctccgggcccagcgcggctgccggtcctgggcaacctgctccagctgggcgcgctgccgcaccggagcctgcgggatctggcgcggcggcacgggccggtgatgatgctgcggctgggcgcggtgccggcggtggtggtgtcctcgccggaggcggcgcaggaggtgctgaggacgcacgacgccgactgctgcagccggccgtcctcgccggggccgatgcggctgtcgtacgggtacaaggacgtggcgttcgcgccgtacgacgcctacggccgcgcggcgcgccggctgttcgtcgccgagctcttcagcgcgccgcgcgtccaggccgcatggcgcgcgcgccaggaccaggtggagaagctgatcgggaagctgacacggccggagccggagccggtggagctgaacgatcacatcttcgccctgaccgacggcatcatcggcgcggtggcgttcggcagcatctacggcacggagcggttcgccggcggcggcaggaagcgcttccaccacctgctcgacgacgtcatggacatgctcgccagcttctccgccgaggacttcttccccaacgccgccgccgcccgcctcttcgaccacctcaccggcctcgtcgcccaccgcgagcgcgtcttccaacagctcgacgccttcttcgagatggtcatcgagcagcatcttgactctgacagcagcaacgccggcggcggcggcggcaacctcgtcggcgccctgatcggcctgtggaagcaggggaagcagtacggcgatcgccggttcaccagggagaacgtcaaggccatcatcttcgacgcgttcatcggtgggatcgggacgagctcggtgacgatcctgtgggcgatggcggagctgatgcggtcgccgcgggtgatgcggaaggtgcaagccgagatcagggccaccgtcggcgaccgagatggcggcggcatggtgcagccggacgacctgccgaggctcgcctacctcaagatggtggtgaaggagacgctgcggctgcacccgccggcgacgctgctgatgccgcgggagacgatgcgcgacgtgaggatcggcgggtacgaggtggcggcgaggacgcgggtgatggtgaacgcctgggcgatcgggagggacgcggcgaggtgggaggaggcggaggtgttcgacccggacaggttcgaggcgaagcgggtggagttcaacggcgggcacttcgagctcctgccgttcgggtcggggcggcggatctgccccggcatcgccatgggcgccgccaacgtggagttcacgctggccaacctgctgcactgcttcgactgggcgctgccggtggggatggcgccggaggagctgagcatggaggagtccggcggcctcgtgctccacaggaaggcgcccctcgtgctcgtgcccactagatacatacaactataggagtacaaatgaaatggaatttagctagtagcaaagccgcgacttcggccttgattagttcctaaattattttttttccaaaaacgtcacctccaatctttggatatatatatataaaatattaaatataaataaaataaaaaattaattgcacagtttgtatgaaaatcacgagacgaatcttttgaacctaactagtccatgattagccataagtgttacagtaacccatatgtactaatgatggattaattatgcttaataatttcatctcgcggttttcaggcgagttatgaaattagttttcaaaaaaaaaaaa

SEQ ID NO: 68136 - DNA, 549 bp, Oryza sativa
  Clone ID: PAT_MRT4530_68928C.1
atgcacctcaataccaccacggtacctcggaaaggaactgtgacaatacccctcgcacaacacaactcaccacagtgcaccatatacctggatcataatcaccccctctacaaccagaggcatggactccctaacgacccccacggacttctcgccgcttctcagtctggcaccccaaaaactaaaacaaaagaaaatatgatgtcatcacgacatcatcgccggcctaggctcggctccacgcgaccaccggcgatagagggctcggccgggctatccgagaacacctatgcgaagaggacggagaagcgaactcaccgacacaacgaacaacgacgcgacgacgaacgacggccggctacaaggtctgacggcggctcggctcggatcaacttcggcgatggcgctccggcggtcttcagtggctgcgaaggggcggacggggtgctactcctcctggcgaacccaacggtggcgacggaaggtggcggcgacgaccacagcagcggcgcagcgcggctgaaacagcgtcggcggcggcagcgctag

SEQ ID NO: 68137 - DNA, 414 bp, Oryza sativa
  Clone ID: PAT_MRT4530_68929C.1
gaagacaaagcgaccagttgagctgtggttgtcagctactattgttccttcagagaattcagagttcaggcatgctgttcttgatgattaatttcaggcatggaatgatggaaatctaatttactcatgtgaagtaacagtgcagttatgaccgaacttcagaaactaaattgtctggtctagatatataagtatacatggtggattttgtgatgataatgtgatgcaattgttgtttcatttaatttggtattcccaggttgtaatttactagttgattttatatttgtagcagtgacactacgaatctacagaatttacatgtcactttcaaattcttaaaaaaaaaaaaaaaaaaaaaaaaaaaaaaaaaaaaaaaaaaaaaaaaaaaaaaaaaaaaaaaaaaaaaaaaaa

SEQ ID NO: 68138 - DNA, 4101 bp, Oryza sativa
  Clone ID: PAT_MRT4530_6892C.1
atggctccacgagcgatcaaggcgacaattctcaaggagtccatggcgtacaagccatctgttcaagcagttccctccgttgcacccacaactcagccgacggcgccagcatcgactcctttgcttgctacactagctatgacgccaggacagccggtgaaccctcggttgttaacaagggatctgccacagcatggcgggaaggctatgaatcggctaacccaagatcaagttgctgccatgtttctgccacctccacctattgttgatccagtgcagcagcagccgattcagcagacaccaccaatccagcctgttgtacaaccaatccaacaacagcagacaccaccaaggcagcagcctcagcagccgatccaacagactccattgagacaacagatcgttcagctgattcagcacccggggtcagtaaatgcatcggccgggttcgcagtacctggtggtcaacctgtacagcagtttgtaaatcaggttatcccagagcatttggttcaccgtgcacagccggacggcacagtgatacctcagatggttcctgaacacttggtgcgcaacatccagccgaatcttcataattaccaagggagtaatttgagctatcaatatcagcctccttccccacaagcccaatatcagccagggggattggctcagccccagttcgcatgtcagtatggtcagttcgagtctatgcaacaacagccacaaggagcaactcagcaacgaccgtgggccgatgtgattgccgatgtaatgagagaacaatttgggcttaaaccaaaagagactggaagccttatcctgagtgcttttacttggttttcctctttgccatgtgggtcgatcagtagttgggccgatttggtgaagcaatttcacatctatttctacagtggggttcatgagatgaagttgtccgacttgacagcgatcaagcagcggcatgatgaacccgtgcacgagtatattcagaggtttagggagatgagaaacaattgctttagcttgagtttaactgatgctcagttagccgatttggcattccatggtatgattcctccaatcagggagaaattctcgtccgaagactttgatagcttattgcatctgatacagaaggtgagaagcaaaaaggtcttaccatgccaatgggtaaaaagttctggaaaagtggaaaagtatgattttgatatcaccaaggctgacaagatctttgatttactactccgagaaaagcaaattcagcttcctgttggtcatacaataccatcggctgaggaattaggcaagaagcgatattgcaaatggcataattctgggtctcattctactaacgattgcaaggtttttagacagcaaatccaagttgccattgaagggggaaagattagattctgctggaacgaagggatgaggttgccattcattgaaaactgccctgggtgcaatgatatcgtcgagagctcgagccggtcatatagtagagccgatgaggcgaagaggttggcaaaagggaagagcattgtagcggcaccaattaacatggtctttacattgccagccgaattcgggatcgatcaggccgatgtcgatgaagtggaagagggatcggctaagttggtcctttcaccagaacaggcaatattcgagaaacccgaggggacagagaatcggcatcttaaaccattgtatataaacggctacgtcaatgggaagccgatgtctaagatgaaggtcgatggtggggccgcggtaaatttgatgccttatgctacgttcagcaagttgggtaggaacgccgaggatctcatcaagacaaatatggtgctcaaagactttggtggtaatccatcggaaaccagaggtgttctaaatgtggagctgacagtcggcagcaagactattcctactacgttttttatcatcgatgggaagggtgacaagatagagatcgtgccagccgacagccaatcgaagatggagaacccaagctattactttgagggcgtcgtggagggttcaaatgtctacgctaaggatacagtagatgatctcgatgacaagcaaggtcaaggttttatgtcggccgatgagttggaagaaatagacataggtccagacgatcggccaaggccgacatttattagcaaaaatttgtctctagagtttagaaccaagctgatagagctcctaaaagagtttagagattgcttcgcttgggagtattatgagatgcctggactcagccgatcaattgttgaacatcggctacctatcaagccaggggttagaccacgccagcaacctccgaggagatgtaaagccgatatgctcgaacctgttaaagctgagatcaaacgattcatagttccagttattaaaaagaatggcaaggtcagggtgtgcattgattttcgagatctgaataaagctacaccaaaggacgaatatccaatgccagtggccgatcagctggttgatgcctcagcagggaacaaaattttgagttttatggatgggaatgcaggatataatcagatttttatggctgaggaagatatccataagacggcttttaggggccctggtgcaatcggcttatttgaatgggtcgtcataactttcggcttgaagagtgctggagcaacatatcaaagagccatgaattatatatatcatgatttaatcgactggttggttgaagtttatattgacgatgtggttgtcaaatctaaagaagtggaggaccacatagccgattcaaggaaagttttcgagagaaccaggaaatatggcttgaagatgaatccaacaaaatatgtttttggtgtgtcgaccggccagtttttgggatttcttgttcatgaaagggggatcgaggtaacccaaaggagcgttaatgcgatcaagaagattcagcccccagaaaataagacagagctacaagaaatgatcggcaagataaattttgttagaaggtttatttctaatttgtccggaaggttggaaccttttacacccttattgaggttaaaagccgatcagcagtttacttggggggcagagaagcaaaaggctttggataatattaaggagtatctcagctctcctcctgttttgattccttcacagaaaggaataccgtttaggttatatttatcggctgccgacgtagtcaggtacatgctatcagctccaatattaaagggaagagttggaaagtggatattttccttgactgagtttgatcttcggtatgaatcaccaaaagtgattaaaggacaagctatagccgattttattgtagagcatcgtgaagattcaatcggctcggttgagatagtgccatggactttattctttgacggatcggtacgtactcatggttgtggcatcggcatagttataatttcccctaggggggcatgtttcgagtttgcttatactattaaaccatatgcgactaataatcaagcagagtatgaggcagtgctcaaggggttgcaattactcaaggaagttaaaaccgataccattgaagtcatgggggattcattgcaagtaatcagtcaattggcaggagaatatgaatgcaagaacgatacgttgatggtttataatgagaagtgcttggaactaatgaaagagtttcggctggttactttaaagcatgtatctcgagaacaaaatcttgaagctaatgatttagctcaaggggagtcggggtataagctaatgatcaaagatgttaaagttgaaattgcagcaatgtcagccgatgattggaggtacgatgtgcatcagtatttgagtaatctatctcagtcggcttctaggaaattaagatataaggcattaaagtatacactgttggatgacgagctttattatcggacaattgatggagtattacttaagtgcttgagtgccgatcaggctaaggttgcaatcggcgaagttcatgagaggatctgtggtactcatcaatcgactcacaagatgaagtggttgcttcggcgtacaggatacttttggccgacaatgctggaggattgtttcagatattataaggggtgttag

SEQ ID NO: 68139 - DNA, 360 bp, Oryza sativa
  Clone ID: PAT_MRT4530_68930C.1
atgcggcagaggaagctgtggtggatcggtacagatcgccgtctaatcaaaatcaacgcactccaacgcccttcaagggaaggaagccttaaaggagggagtgccgctgaaccttgcggtcgaggacatctcaaggaaaggggtggaaacgagcaggaggtagacaaaagggtaatggccaagggggaacttgcagatgaaagagaatcaaccgcgacctcgccggagggcatgggacatagaccagccaagctgctggaggagcacagttcctggaacaaacacctggaccaattgttgagcatgccggaaatgagaaggaaagatgatgagttgtactgcaaatactttgaggtttga

SEQ ID NO: 68140 - DNA, 1786 bp, Oryza sativa
  Clone ID: PAT_MRT4530_68931C.1
atggcgctgtggctgaagctgttcttgtccgtgttcctgccggtcgcggcgctggtcgcggtggctgttcttgtttaccggcggcggagctcgtcgtcgcggaacgcgcagcctgagctgccggagagtgtggctggtggtggtggaggaggggatccggcggtgagccccgggttggggaagctgaatatcaggtacaacgccacgagtggccgcgcggggctccggttccagcagttgcaccatcaccaccatgggcatgtcgatgtgaggcatcatcaccggggcggcgccggcgccggcggcgcgcagcaggggccgttccagtgggcggaccacccgcggctggtgacggaggcggcggagaacgggtgggcgcagttcgtgttcgccgtggcgccgccgcggacgaggtcggcgtcgtcgtcgccgctgtgggggctctgccccgcctgcgactccgggaccagccgcgacatggcggacgccgcgtgggaggtgcccgcggggtcgtcggagcggatgcaggcggtgcggctcaacccggtggtggccgcggcggcggcggccgtctcggcgtccgccaagaagtggctccccgggagcatcccgagcccgctccgcggcggcgaccacgacgcggcggggaacagcagcgccctgtgcctcgccaggatgagcctgccgctgcccggcccgcccctcgccggcgcgccgttcccgcaggacgcctacttcgagatcaccatcatctacctcaacacgcggcggccggagtggtcggcgtcgagggcgagccgccgcggcagggacggctccagcgagagcgaccgcgccaagctcatcagctttgcaccggacgccaagaacgcggcccaagaaaccagagccgccacgaaagccgacgatcaccacgacaagcagcggcacacggtcatgtcgttcggcctcgccgccgccgcgtccgccgcgccgccacggccgtcgctggccggaacgtacgcgtcgtccatcggcttccactccaacggcgcggtctacctcgacgggatgaagctggtgtacgagtcggagaagtcgtcgtgggcgggggtggacaaggtggtgggctgcggcttcgagccggcgaagcggaaggtgttcttcacggtggacgggcagctggtccacgccgtgagctgcaacgccgacgcgttctccaccccgatgtacccggtcctcgcctccagcttcgacgtgatggcgctggtcaacctcgggcagggcaagttccggtacgcgccggcgaacgcgcggcgcacggcgaacccgtgcttcctccgcgccgcgtcggcgggggacgacggccggagcggcggttcgctgggcctcgacttcgacgacagcggcgacctcttctccatgggccgcgtcgactccggctggctggagacggcgtcgcggatgagcaagagcaggaaggagaacggcggcggcggcggcgcgtcggccggcgacccggacgccgactccgacctgttcgagatctcattacgagactgacataagcaatgatgagagggacaggtggctcacttgtcaaacaggaattagcagcagttaatggctgattctgacaatatgcttaggagttaggacatcgcggctgcagttttccatggatgtttgtatcttctagatgttgttacctagatgtaaacatgtaaaaaggtcaaaagattaaaaggatggaaaaggttgtcttatatagtgagcttctgatttatttaaaaaaaaaaaaaaaaaa

SEQ ID NO: 68141 - DNA, 702 bp, Oryza sativa
  Clone ID: PAT_MRT4530_68932C.1
ccggcgtcgaatttaatcgccccccacttaatctaatcaaaccctccaaaccaaaccgattcctcctcttctcctctcctctcctctcctctcctctgctcccaaccccacccttccttcctcgaccacagcagcggcggcggcggcaggagacggagagaggaatcgcgatggcggcggaaaaaggaagtccgttgccgaagtttggggaatgggatgtcaatgatcctgcttcagctgagggattcactgtaatctttaacaaagctagagacgagaagaagactggtggcaattcacagggacaagatttggccgcaaaaagtgaacagccatctggacaagggttgtatccagcaaaaccgaacagttccaagaaatggttctgctgcatgcaacctactgctgctgaatcttgaagatcatgggctgattggattgtggaagcgtctaccttgttaaaatcagaaaaaactccacgatatccatgggaacttgtttgtgggtttactgtgtggtgaagatgttatggcggaacatgtaatattacttctatggtgtgtacattatttacaacctatatatgtgggaaaacatcagtggtgtatattgatgcataaagttggtatttcgtcaaattgactcaattcttgaaaaaaaattctgtataaagggcgagaagaaaagcaaaagtaacacccg

SEQ ID NO: 68142 - DNA, 327 bp, Oryza sativa
  Clone ID: PAT_MRT4530_68933C.1
atggagagggtggcgaagctggcgtcggagagggcggtggtggtgttcacggcgagcaactgcggcatgtgccacgccgtgacgagcctcctcgtcggcgagctgggcgtcaacgccgccgtgcacgagctcgacaaggacccccgcggcagggacatggagagggagctcgccaggaggctcaacggcggcggcggcggcggccgcgccctgccggcggtgttcgtcggaggcaacctcgtcggcggcgccaaccgggtcatgtcgctccacctcgccggcgagctcgtccccatgctcaagaacgccggcgcgctctggctctag

SEQ ID NO: 68143 - DNA, 113 bp, Oryza sativa
  Clone ID: PAT_MRT4530_68934C.1
gaatgggatcatgcaaaccattatgggtagatcattgtatctgtggcatcgagttaagtaaagtcatgagagacagggacgaattcaggtaggcgccatgtgttttggacatg

SEQ ID NO: 68144 - DNA, 166 bp, Oryza sativa
  Clone ID: PAT_MRT4530_68935C.1
atgtccaccaaccctattcccattaggctgaaaagctggaatgtgcccccgggtatttcaaatgcgagctgtggtcgagtagcagttactatagaggagacctttgagatcggccacctgctttttcagtgccgccatatcaacccggaattcgttgagctcctac

SEQ ID NO: 68145 - DNA, 421 bp, Oryza sativa
  Clone ID: PAT_MRT4530_68936C.1
attgatggtcgttatcgatcagttgcgtccgtcaatattcccaaaataaaggagaactagttatgcttgcaatgcaaatttatgttagaataagttctattccactagcactagaattctaacctcttgcagagaataaatataaaatggaggagaatcggtagcaaaacagacaatcaaataatcggacgctatcaagaatcagacttgcggacaagtgggctgagaacatcaaattgacacaaccaaaacagtccaaaattcacaagtctttggaaaggagcaaaagaggaggccacctgccgaaattgggctaggtcggcccagcacatgttttggctgaacccgtcgtggctccattggatgcagggttttgatggacggctgagattggctccctatgacggttggagggtattac

SEQ ID NO: 68146 - DNA, 495 bp, Oryza sativa
  Clone ID: PAT_MRT4530_68937C.1
atgagtgatcatgttagcgttatggatcgcaaaacagtttcagcttttcaggcaaagaaaagtcgagaggtcagcttcgtggtgatagaacccgtgcagggtcgatccgacacatcggttccgccaaaccttgaagtacagcaggatacgatagtgaggctgatgcacattcagatccattacaagactgctccattcacaggttggtttcagttcggaattattgggtttggtggcgccacagcacagcatcgatggcacagaaggcgctacctaaggtttattaatagatcctgccggcagtataacccgatgacaaaggaagcaccaaataggcaaatgatcatcctcggcaccgaaagcctatcatcaaccgagatcttcgcgatcggtaatggtgattgctgcataaaccgacgatcaaaaaggggagagagctggagtagtggcaaacagtttgtcagcagtgaaactgccagaacacacaactactga

SEQ ID NO: 68147 - DNA, 410 bp, Oryza sativa
  Clone ID: PAT_MRT4530_68938C.1
gcgaccttattcttcgactgaagagcataccattggaagcagaatgcactgactagtaccaaccactctcatgctcacggatcctgcagggcaaacctatgcatatgatagcccaccatgcctggaggacatcaacattggtcagatgattggtctcaaaggggaacaacatctatgagatatagggcttgaagaacacgcgttctcaatgggatttcaagcttgtggagcactcgaactatggaactatccaagggtcttaagggacctgactgcacaaaacttggatggtacaaatcgatctgacacaatcaaccttgctgtcctaggagcataccgtgacagggggagaaatgtaccatggcacatatgaggttaggaggagactatttgtgatatcgatacaaagc

SEQ ID NO: 68148 - DNA, 235 bp, Oryza sativa
  Clone ID: PAT_MRT4530_68939C.1
gggccatcgaggtggaggtcgacccagaacctggacccgtgaaccagggccccacccgggcacgtgtccttttgctacccgagggcgctgcaggacacgtgcctcaatgatctggggcgggcagcccgagaacttgaagcggcccaggacgcgctgctctctccgcccaaggccacatcttgtggcggcaggctcggcacagtacaccagcgtatcggcgagggccccccgaggg

SEQ ID NO: 68149 - DNA, 366 bp, Oryza sativa
  unsure (1)..(366): unsure at all n locations
  Clone ID: PAT_MRT4530_6893C.1
ngagcgagtancngngtgcaganctcnancngtcccccttcaaccatcngcctcnagacngcgaaaatccatagcccacgactctatagctagctcgctccngcacngcgaccaccaccacagctggcagcgggagggatatngcggagaagaggctgctgctgctgccgnttaggcttggcgatngcgcagaagcatnggggaggaggggagagggtgtnggcacngcgtngaggtaggccaagacggcgttcttcgtcgtcgccatgatcgcnccgctgctgctcgtctncgcgccgcgnttctcgtcgtgatactcgacctcgccctccctgcccgtgctcctattcgcgnggcttcggcgcg

SEQ ID NO: 68150 - DNA, 603 bp, Oryza sativa
  Clone ID: PAT_MRT4530_68940C.1
atggggtcaccgtacatgctgaagaaactggattgcttaccctattgcaggtcggacaatccatgcggcgtggtcggcgcatgcccgtacatttcagcagcagccgccggcgccggcgccctcgccgcccaccctctcccgttcggccacatggcctgtcccgccgcctgccactcggagagaacatgcgcgggcactaattggtggccacggcgacgccggatcctccacgggaagtggctgaagcacatcttgtgctccgccggcggtcgcagcaaggccgagcgccgacgacatgtctgcagcacttcgccggacgcacacagaggatgctacttcagcccctccccgtcgacggggtgggcatcggcgcatggcggcggcggcggcggcagctggtacgcctccggctccggcgtgggcagaatggtgcaggtgccggccatcgatgctgcccccgtttgtatcgccgcaggcggcatatcttttgatgggatgatctgcgtcagcaaaaccaacttcaccagcatggttgtgatgtccggtttcggtgtcctcttcctggcttatctggtgttcaatttgttcctcagtttgaattaa

SEQ ID NO: 68151 - DNA, 434 bp, Oryza sativa
  unsure (1)..(434): unsure at all n locations
  Clone ID: PAT_MRT4530_68941C.1
gtgnttgtttggggttttttttttttttttttttttttttttttttttttttttttttttttctatttatatcacccaaagtttcacatgtcacatatgaggatatctgggcttatttttaacttcccgaaccactatactgttaaaactcattagggggggggggcaaggggggtaatggtactgggggcaccatagtacctaggggggataccatatttagagggggcgttaaaagccaacaaagcttgggcttgagccaaattcccatcaaagtggagatcaccaaactgctggaggtgtagctgctgcgctatggcctgaacaatgttaatgtcctgatagggggatgggggcgccaccaccgcgaggtggtgccagacttgggggtttttcactagaaacacacctgattgcaagaaggggggggccgc

SEQ ID NO: 68152 - DNA, 813 bp, Oryza sativa
  Clone ID: PAT_MRT4530_68942C.1
tagttaattcaaactgaggaacaaattgaacaccagataagccaggaagaggacaccgaaaccggacatcacaaccatgctggtgaagttggttttgctgacgcagatcatcccatcaaaagatatgccgcctgcggcgatacaaacgggggcagcatcgatggccggcacctgcaccattctgcccacgccggagccggaggcgtaccagctgccgccgccgccgccgccatgcgccgatgcccaccccgtcgacggggaggggctgaagtagcatcctctgtgtgcgtccggcgaagtgctgcagacatgtcgtcggcgctcggccttgctgcgaccgccggcggagcacaagatgtgcttcagccacttcccgtggaggatccggcgtcgccgtggccaccaattagtgcccgcgcatgttctctccgagtggcaggcggcgggacaggcctgtgcacagtattaccggcgtacatgctagcggatggaggggaatggatcagggatgtgttactgcgcagtacgtcagccggcgacgttgatcgacgaggcagtggccatggatctaagagggttttaatgggagagttttggcttaccagtttcttcagcatgtacggtgaccccatcagatcagaatcagatcgcgccaagagtccaccgtgcctgatccttactgttttaccgaaatccgaccgaaaaccaataaaaaccagtgactttcggtcaacgccgtatgaaaaccagctaatatcgaccagtttttataacccgagatctagcggtttcacaaaatccgattggttttcg

SEQ ID NO: 68153 - DNA, 516 bp, Oryza sativa
  unsure (1)..(516): unsure at all n locations
  Clone ID: PAT_MRT4530_68943C.1
ttgaaatttttaaataaatttttttttttttttttttatttatttacccccagctaggatattcacctacctgtcaacaaaatacctgtccttgctctgagcttctcgttcccaaacagggaaacccattcttttttttatgatttaactggggtggtaaaaaaaaaacacagagactctttctctatgaggctcgttgccatcccctcgccccacattgaaaacctgattctctggtgcttgccttgtggagctcgtaactctgacactggctgcacagcttcaaaccagcaaaaacaccgcatagcgtgtcttacattgtaaagggcctaaggacaccgtcctaaaatctaagttctccatantaccaatggttctaggagttactttaattttatatttcggctcctgataccttttattttagntcatattatttatcatttngnatagagggctaaaaattacacataacactctagaatccaaaaaaaactaaatttccgacccgtgggt

SEQ ID NO: 68154 - DNA, 309 bp, Oryza sativa
  Clone ID: PAT_MRT4530_68944C.1
aaaaagagcaaataaatacccattaagcatccaggttaactaaggagggccagggacttacttaaaagcttactgatgatgtgcttaataacggaatggttagcacctgggtttaacagggaccaagtgcttaatttatccagccgatttgccctgctaccgttttatttttgaaattataatatttctcctatccgatgacgcttgtccaaatggagaccagaccagccagtgttgcggccagggaagaccgcggtacattgtaacataaaacggccaaaaaaaacaccgtttgaccacaaattcttt

SEQ ID NO: 68155 - DNA, 482 bp, Oryza sativa
  Clone ID: PAT_MRT4530_68945C.1
tttttttttttttttttttttttttttttttttttttttttttttttttttttttttttaaaaagaaaaaacctggggttattttccgggggggaagaccaaaccatcaccatttgggggcaaagggttcctccttagaaaccgggcaaaaaaacctttcccggaaaaaccaaaacaaccctggttggcaaggacttccaaacagctcttcgccaaaaaaaaacataacccgaaaacttgggccccggaaggggggcaccaaccccccctggtaaggtaaacctcctgggaaataaggggccccaaaacgaccccttggaaaaaccttgggggggtcccctcccttaaaaggacggatcccagaacccttaaaaccccggaaggccccggaggcggaaaacccaataaatgggggaaaaaaggtggagggaccagcgggggggacaacaaatcccagggacccacgggggtccaacggaccg

SEQ ID NO: 68156 - DNA, 141 bp, Oryza sativa
  Clone ID: PAT_MRT4530_68946C.1
atgaacgccttcaggctcgccggggacatgacgcacatcatgagcgtcctcgtcctcctgctcaagatccacaccatcaagtcttgcgctgatcaggtatatgcggatttatcacatggaacggtaaaggtgtttccttga

SEQ ID NO: 68157 - DNA, 237 bp, Oryza sativa
  Clone ID: PAT_MRT4530_68947C.1
atggcggaggatcttgaacaaccatcaagcgaccgtcgcggcggcggccgcatgccggcggcggcggcggcggcggcgggtgatcgtcaaaaagaaccatgggagcgccgccgcagcaagaggccgatttgcgccgacgtgtgcgcctgcttcttcacgttgatcggcatcgccgccgtcgtcttggtcttcgtcttggcctacaaatgcttccgcacgacgtgctacaagttataa

SEQ ID NO: 68158 - DNA, 826 bp, Oryza sativa
  Clone ID: PAT_MRT4530_68948C.1
acagtagtccatcaatatagttttccttgcgacggccctggtcgcggcgggacttgtgatatttctgcttgggacgggttttatttggcagttttctggatgttaaataccattggatgggttactttttattggcattggaaacacatcacattatggcagggcaacgtttcacaatttaatgaatcctccacttatttgatgggatggttaagagattacctatggttaaactcttcacaacttatcaatggatataatccttttgggatgaatagtttatcggtatgggcgtggatgttcttatttggacatcttgtttgggcgactggatttatgttcttaatttcctggcgtggatattggcaggaattaattgagactttagcatgggctcatgaacggacacctttggctaatttaattcgctggagagataagcccgtggctctttccattgtgcaagcaagattggtgggattagctcacttttccgtgggttatatattcacttatgccgctttcttgattgcctcaacatcaggcaagtttggttaatttagttaattttgttgtactgtatcagcacctagttcattactcttgatggagggggaggatccgccttcttagatttctttttctatttatttttccatctaggattagaaccgtatacttggtagatagtaggaacggcacattatggcaaaaaaaagtttgattcagagagagaggaaccgccagaaattcgcaccagaaatatcatttgattcgtcgatcttcaaaaaaaaaaaaaaaaaactagagactagttctctctctc

SEQ ID NO: 68159 - DNA, 374 bp, Oryza sativa
  Clone ID: PAT_MRT4530_68949C.1
gggggaaccttgtggtgttttggttttcccttcgggaaaacggccaattgttggtgtgttcgccaatcgccccccagattgcctttggattttgaatcgccaccttgtcgccaaccaacggaaaaaggtgggcctttaaggtttttttgggaaacgttctttaatttctttttggaagttggaattggccacttggcccaacttttaaggtggccccttcctttaattccttgaagttagtttggaaacctgcccacgaccagggccttggtaaatgcccgaaacactatgcctatgtcaaagtacatccgtccatttttacctgtgccaagttttgatgagtatgcgtttcgttgagtaaaaaaaaaaaaaaa

SEQ ID NO: 68160 - DNA, 195 bp, Oryza sativa
  Clone ID: PAT_MRT4530_6894C.1
atgacggctcttggcttcatgacggctcttggcttgacgccgtccacgcgccgctatgcgccgtggctgccgtcgggaagtcgtcggagcctcgccgcaccctccccggcagccgccgtgccgacctcgcgccgtaccggctgcgctcggtcgagcccagccgtgccctggatgctgcctcccgttcggctggag

SEQ ID NO: 68161 - DNA, 258 bp, Oryza sativa
  Clone ID: PAT_MRT4530_68950C.1
ctcgagatcatgatgtcaacatttgtaatttgtttactatggaagctatttttaatagtttaatattgtattatattttcagaccagtggcagatctggtacaaaaaaggatgcatgctatgaaagatggcgagagaaccaaagatggtttgctcgggatattactagagtcaagcacgaggcatgctgacgagaatggacattcatgcccggggatgaccatcgataaagtgatggaagagtgctaagtgttctatt

SEQ ID NO: 68162 - DNA, 627 bp, Oryza sativa
  Clone ID: PAT_MRT4530_68951C.1
aaaaattcgtagtggtggtcttgattcctgacatagcagacgcatctgacagacacgcgtaatctcaaccatccgattgccatatccaatggtgtcaatctcctccccatcacgcgctcgctcctctcttgaatcgatctcctccccacgcccactcctcctcctcccacgccgcgtccttcgccctcctccctgggcgacgctcgccccgccgccgcatcgcctcctcgccagccacgcccgccggcctcctccgcgatcgccgccgccctctccaacgcgcctccacctcgcatcggatcgatcatccaccttcgccctcctccctgcgtcatctcctcgcctcctcaccttctcacctcgccgccgcatcgcctcctcagcagccccgtgccacgcgcgcgcgtcccgcgcgcgcgtcccgcgccgccctcgaccgccgacgctgcgacccgcgccgtctcctcgctgccgtcgccgtgccccgagtcccacgtcccgcgccgccctcgaccgccgacgcgggagcaggaggtcacgccgcgtcaacaccgccgaggagccgcttcctcgccgccgtcgcgacgacccgcgccgccctcgactgccgccacctctgccggtcat

SEQ ID NO: 68163 - DNA, 1434 bp, Oryza sativa
  Clone ID: PAT_MRT4530_68952C.1
atggcttctgctgagcgcagcaagaagcttcgaatccttttcatcccgttcttcgccacaagccacatcggccccttcaccgacctcgccgtccgcctcgccgcggccaggccggacatcgtcgagccgaccattgccgtgaccccggccaatgtctcggtcgtccgatcagccgtcaagcggcacggctccgtggcgagcagcatggtcagcatcgccaagtatccgttcccggatgtggctggcctctctccgggcgtcgagaacctctccaccgccggcgacgaagggtggcgcatcgacaacgccgccttcaacgaggcactgacacggccgccgcaggaggcggtcatcagggagcagtcccccgacgtcctcatcacggactcccacttctcctggatcgtctacatcgccgagggcctcggcatggcgtgcttccgattctgcgtcatcggtttcttctccatcctcgccatgcgcctcctcgccggcgccgctgccgacgcgaacggctccgattcggagtcgctcaccgccgcggggtttccggggccgaagctgcagatcccgaggtccgaggtgccggacttcttgacccgccaacagaatttcgacaagtttgacatgcgcaagttgcaacagtcgcaagacaggtgccatggcatcgtcgtcaactcgttcttgttcctggacaagccatactgtgagaagttcgtgtgcaacggcttcgcgaagcgcggctaccatgtcggcccactctgccttccgaagccaccggccgtaggcaacgtcggcgagccgtcgtgcatcagctggttggactcgaagccgagccggtcggtggtgtacatatgcttcggcacatttgctcccgtctcggaggagcagctccatgagctggctctcgggctggaagcctccggcaagccgttcctttgggcggtcagggcggctgacgggtgggcgccaccggcggggtgggaggagcgtgtcggtgacaggggattgctcgtcagagattgggtcccgcagacggcgatacttgcccactcggcgacggcggcgttcttgacgcactgcggctggaactcgatgttagagggtgcgacggctggtgtcccgttgctgacatggccgctggtgttcgagcagttcatcacggaaagggtgtgggacgggccccgtagcgtgcggtacgaagagaagacggtggtcccggcgttgacgttggcgcaaaccgtggcgaggttcttggagcctggagggacaggggacgcggcgaggatcagagcgcaggagctcgccgcggaggctcacgcggccgtggccgaaggcggctcgtcgtacgacgatctgcgcaggctcatcgacgatatggtagaagcaagggcggccgccggcggggttgcaccggcacggcaacctcagtag

SEQ ID NO: 68164 - DNA, 612 bp, Oryza sativa
  Clone ID: PAT_MRT4530_68953C.1
atggctggttggggattgggcagcggcgacggagatggtaacctagacctagcaaccagggattcgcagcagcgtggtgtggcgtgcgggcggcaatggccggtttgcaggtcggggatggtgtggcgtgcggctattgcggcagcggcggctgacagaagtggtgggacaggaggggatacataccttcagatgacggcgatcgtgaccggcggagggcggcgcgggacgcgggactcggggcgcggcgacggcagcgaggagacggcgcgggtcgcagcgtcggcggtcgagggcggcgcgggacgcgggacgcggggcgcggggcacggggctgctgaggaggcgatgcggcggcgaggcgaggaggcgacgcagggaggagggcgaaggtggatgatcgatccgatgcgaggtggaggcgcgttggagagggcggcggcgatcgcggaggaggccggcgggcgtggctggtattcattgaatacccatgaattgaagtgggcccgccccttcggcagcatgctgcaggccggcaggaagatggcgtacgacctcgacgagaacacgcttacgttcgacttcgagacaccgtcgtcctccttgcggtag

SEQ ID NO: 68165 - DNA, 1137 bp, Oryza sativa
  Clone ID: PAT_MRT4530_68954C.1
atgaccacacatcgagtcttagaatattttctcgatcatgttggcgtgcgtgcccaagggatccagatcggcggcgacctgcgagagcaggtgtggctcgacggcgccgccgccggctacgtcgtccgcctcgacatcgccgggttcagcaaggatgaggtcgacgtgcgggtgaacggcgccaccggccgcgtgacggtgctcgggcagcggcccgcggcggcggggccgcacgtccgcctccgccgcgtgatccagcttcccccgacggccgactcggaccgcgtcgccgcccgcttcgtcggcaccacgctgttcctcaccgtgcccaagaagcgccccgcggcggccgcggcggcgacgggggtggtgatggcgacgacgatggaggtggcggagacggagacggagacggagaagaagaaggagcgggcggccaggtgggacagcgggagcgtggtcgccgccgccgccgccgccgcggcggcgttcgcgctcggcgtcgtcgtgtcgcacgggatcttactctacaccaggaatgtgttttctgtcaggggttttggtccgtcgtccactgatcagtgtgtcgcacgactccgccgctcggccgacgcggtgtccccgaaccgagaccaccggcgcgaacgccgttccctggaacccagtcgtgcgccgccgcctccttcccatcagcggaccgccgccgccaaggtcgattcgtggccgccgctcgccgtcacactcccggagttcctcgcgcccccttcccattggccgctccccacttttccttctcgccgcacccacgctcgcggtagcccgccgcggccgtgtttccgccgccgccgtgcgcaaccgcagttccgccgtcggcccttctctcctcaacccctcgcgctgccaccctccttgagccccggcgaaactccccggtgcgcctccgcggccgcccgcctcgccggccgcgcccgcgccgtgccacccatcccgccgccgcacggccgccgtcgccggccgccgtcgcgccgcctctccctcatccgagccggtggatggaatcgcctcgactccctcttgcttccagtgtccgcgcctcactccggttcgccgccgttcgccggcgcccctcggccgccg

SEQ ID NO: 68166 - DNA, 3338 bp, Oryza sativa
  unsure (1)..(3338): unsure at all n locations
  Clone ID: PAT_MRT4530_68955C.1
atggctgaggaaccctccccctccccctcctcctcctgcgccaagcaccaccgctctcccgaccccgccgaccccgccgcctctcctaagcgtcgccgcaggcaccaccgccgccgccgcgacgtggatgacgacgacgagtctccgctcgccgacgcggacaggccgccggccgccgaagacgtcgaggagggcgagattctggacgacgccatggatgtcgacgccgttccagatgctgctccgcaactttcttctggtaatcatgcccatatgaactcagatgctgatgcaaccgtgctgcatgcttctcgcttgcctactcattcatcctcaagggacgaaaccaagtcaaatcacaccgcccatgagcctgagagtggaggcgatgcagatgataccaaaggggatagacaaagtcaaagggtgccaaaatcaccactattgacaagggagaaagaaaggaagcacaaagatgagcaccgcaaatcgtatcctaaagattcacattccaaagagcagtctagaagatccccttcaaggcaccatagcagtcaagatcatgccaggcatcactcaaggtctagagatactggtgctgaagctaatggttcgcgggcaagtacaagggaagattctgaccgtgacagcaacggcagaaatagtaagcatggtaggcatgcaaccaggagtcgagataatgagacagaaaggagcagcagctatgctgttcgtgatgaggcgtatgatgagcgggaaagatataagcatgaaagaaggcatagaagcaacccagttgatagagacaaagtggatttgcatgaactaactcacagggatagagaaaggagcagcagtcgcagtagatctgatcgtagggagagtgcacatcacattcgtgatgaaagcagggagagtgaaaggcggagtagtagttcaaggcataaagataatgagagaagggatagaagtaaggatcgctataaagaatctgacaaggttgacagtggacatgaaagggacaaaacaagagatgatagagacaggggacgacataaggatttggaaagtagaaagcggagaaatggagaagcaaaggacagggatgacaggcacaaggattctacacgctcaaaatacagtacttctgatagtcataaacaccgctcaagatccagggagagaggtagagatgctgaacgtagaggccagagatctgaagagctgaaggagaatactttcagggaggaggatgaagaggagtaccaagagaaaattgaacagcagttagcaatgcaggaagaagaggaccctgaaaaaattaaggaggaagcaaggaggaggaaagaagctattatggcaaaatacaggcagcaacaattgcagaagcagcagctggaatctttacctagaagtaatgatgaagaggtgataatgcagatcttgaaaagtgataacgatagcagatttgtggctagcgaggaagctgaaaataagcatgattcttcagatgcaattgttggtgaaacagacttcactgtgggaaagtctcctgctcacaatgatggtgcaggaactttgggtaatcagagaacaactggtgtttcaggtcttggagagggcactccaaagagtgagagatcggcggatatgttttgtgatgacatttttggagaatcacctgctggcatccggaaattgggcaaggatgatggtttgcgcatcgagaaaaatgctcttcatgacaactgggatgatgccgaggggtactatacttaccgttttggggaattgctggatgggcgctatgagattacagcagcacatggaaagggagtgttttcaacagttgtccgagcaaaagatcttaaagctgggaaggatgatcccgaagaggttgctattaagattattcgcaacaatgagacaatgtacaaggctggtaagcaagaggtttcaatattagaaaaactggcaagtgcggatcgtgaagacaggcgccactgcgtgcggtttatttctagtttcatgtataggaaccatctttgcttagtttttgaatctctaaatatgaatcttcgtgaggtactaaagaaatttggtcgcaatatcggacttaaactaactgctgtgagggcatattcaaagcagcttttcatcgccctgaagcatctgaaaaactgcaaagtgctgcactgtgatataaagccagataatatgctggtgaatgaggctaagaatgtgctgaagctctgtgattttggcaatgcaatgcttgctggaatgaacgaggttacaccttatcttgtgagccgtttctatcgtgcacctgagataattcttgggttaccctacgaccacccattagacatgtggtcagttggctgctgtctatatgaactttacaccggaaaagtcctatttccaggtccatcaaataatgacatgcttcggcttcatatggaactgaagggccccttccccaagaaaatgcttcgaaagggtgcctttacgatgcaacattttgaccaagatctcaactttcatgccactgaggaggatcctgtgactaaaaaggctgtgacaaggatgattttgaacattaagccaaaggatattggttccttgatttcaaacttccctggcgaggatccaaaaatgctatccaactttaaagatcttcttgaaaaaatatttgtcttagatccagaaaagaggataaccatatcacaagcacttagccatccatttatcactggcaagtgaaaagatgttgattactcttggcattgctaacttagcataccttgtaaactacattttgggtcgctcttgtctaatcattggcatttcctggtcttgtatcctcggagctatgagatcagagtatgtgggcgaagctcggaaatatggaagagatggctgtcttacagaccttggtgcatgcagttatcatttggatatgttctgttgcttgaattctgccagggcctctgctgtgaaagtgcacattttgtatgctaaagggccaacataagaaggtaccctgattgatatctgggtaactaagtagtttgcacccatgagtgatacattctcttttgacgacatgattttttgatttaagttgtcaagatgagtcagcatgtgacactgaattgattttttaatatgaatgtgcatatgacctcttccatagtactacatatatgaaaaaatattcttttattggatggatgtttttttcttttgaaattttcataggtcacntcgcctgtttgtcttttgaatattttggtatgaaaatcgataccattatgcntnntaccttctcttac

SEQ ID NO: 68167 - DNA, 5841 bp, Oryza sativa
  Clone ID: PAT_MRT4530_68956C.1
atggccgagccagcaaaggcgcacgacctctccccgagtatgagcggtgacgacggggagccaaacccacgccgtcgagctcgtactccaccgccccctccacgccaaagtcctaggcgggagaaggcgctcgagagggccgaaggatccgcgacttcgacacccacaggaggtggagaagggcggcgagatggggagcgtcgcctcctcgtctacggcgacggcagcacgccccagggcgcgctccaagctgcgggcgcgctcctacgtcacccgcccgtcgcccatgacccggagtctccagcccaacgttggctggacgatgtggccaaattggtcatgactgcacggcagcgcctagatgctggtgggcggtcctccgccaccaaggcctctggtgctgctaccaccggctccgcatcgtcaagacggagggcgcggcgagcggcagccgctgttcgccattcggccgccactcctccgtcaacgcctccgacccgggaagatctgcgtggggaaccggatgctcgcatcagtatcgagcgccggcgtaatggccgacgtgctccccacgcaacggagggcgcctcctcgtccggagtgtcacctcaccacggacgcggggatcagccctccgtgcccccggttggtggtgtcggctgtagagcctttgtggcgagccttcggaatgtccgttggcccccaaggttccggcccaccatcgccgaaaaatatgacgggagcgtcaaccccgccgagtttctccaggtctacacgaccgggatcgaggccgccgggggtgacgacagggtcatggcgaatttctttcccatggccctgaaaggacaagcgcggggttggctaatgaacttgccacctgcgtctgtccactcttgggaggatttgtgccaacagttcaccatgaacttccaaggaacatatccgcgcctaggtgaggaagcggacttgcacgcagtacagcgaagggatgatgagtcacttcgctcgtacattcagcggttctgtcaagtccgcaacaccataccatgcatccctgcgcacgcggtgatttacgcgttcagggggggtgtgcggcacaaccgcatgcttgaaaagatcgcctccaaggagccccagactaccgcggagctttttcagctcgcggaccgagtggctcgtaaggaggaggcatggacctggaacccctccggttccggtgtggcagcttcggccgcccccggatccgccgctcagatagggcggcgtgacaggaggaggaagaagaggtcagcccataccgacgacgagggtcatgtcctcgccgtcgagggcgcttcgcgggccacccgaaaggggaggcctgcgggaggcaaaaagaacgaggccggcgctcccaacagggagcgcccaaccggcaagtggtgcaccgtccacaacacttcccttcacgacctcgcggactgccgtgcagtcaaaagtttggctgagcggacgaggaagtgggaggaggagaggaggcaggagcgccgagagggcaaatccccggcggttccttccggtaatcggcgaagtgaggccaagcagaaggcccccgccgaggacatcgatgacggcgatgatgacctaggtttccaagagcctggggccaccattgccaccgtcgatgggggagcgtgtgctcacgtttctcgccggagcttcaaggccatgaagcgagagcttctggccgcggcccctactcatgaggcgacgtgtcgggcgtggtggtcggagttggggcgtgtcctcattgatgggggagcggccctcaacatcctttcccctgcggcctttgacgccatcaaggccccggggatggtgctccggccgtcccagccaattatcggtgtgacgccggggcacacatggccgttaggtcacatcgacctaccggtcaccttcggtggatccgccaacttccgcacggagcgggtgaacttcgatgtggcggacctcagtctgccctacaacgcggtcctggggaggcccgcgttggtgaagttcatggcggcggtccactacgcctacctacagatgaagatgccggtccccggtggccccatctctgtccatggcgacctcaaagtcgcgctcacttgtctggagcagcgcgcggaccacctcgccgctgcatccaagcccgagggtggcgacgagaggcttggcgcttccgcccccgccaccccgaggcaacggatgatcacaggcgacgaggtcccggaagacgcgctcgtctccttcctgcgggcaaacgctgacgtcttcgcatggagaccggcggatatgcccggggtccccagggaggtgattgaacaccgtctcgccgtgcggccgggcgcaaggccggtccggcagaaagtgcggcggcaggccccagaacgtcaagccttcatccgcgaggaggtggcgcgacttctggaagccggattcatccgtgaggtcatccatccggagtggctggcgaacccggtggtcgttcccaaggcgaacggcaagcttcggatgttcatcgactacaccgaccttaacaaggcatgtcctaaggatccttaccccctgcctcgcatagatcagattgtcgactccactgcggggtgcgaccttttgtgttttctagatgcatactctggttaccatcagattcgcatggctagggaggatgaggaaaaaactgcgttcattacccccataggaacctattgttatacgacaatgcccttcgggttaaagaatgcaggtcctacttttcaacgtactactcgaatttctttgggtaaccaattaggacgtaatgttgaggcttatgtcgatgacttggttgtaaagacgcgcaaccaggaaatgttactctcagatctagcggaaacttttgagagtctccgctccgcccgcataaaactaaaccccgataagtgtgtgttcggtgtacctgcgggcaagcttctagggttcttggtctctgcccgaggcattgaggccaaccctgagaagatacaggctatagagcggatgcgcccccccagcaaacttagggatgtgcaatgcgtcaccggttgcatggccgccctaagtcggttcatatcgaggctgggagagaaggcgttacccttatttaagcttctcaaacgctccggaccgtttacctggacggaggaagccgaaaatgccctcacccagttgaaggcgtatctaagctctcccccagttctggtcgccccggagccagacgagcccttgttactctacttagcggcgaccccgcaagtagttagtgcggcattggttgtggagcgcgatgagaacaattctcatttcacgcttccccaccctgtgccgacttggcccgggagagagaagggaggagaggctcccgagccgaatggtggcccaaggcccccgacgaccggagttggccctctgcccgcttgtcagacggtgctaggagcccccgacccccaggaaggccctgaggccactgtgggaaggccgcacctatcgcccttcgaccccgaggctaaccctgtgctgacccgacccgggaaagagcagggagaagaggcccccaagccgaacggaggcctaaggcccctgacgaccgaagttggccctttgcccgcttttccgacgacgccaggagcccccgacccccaggacggccccgaagccactgtgggaaggccgcccctgttatcctccgaccccgaggtcatcagcacagaagataagtgcgccccgcgaggctgcttggacgaagagtgccccagggatgcggcccctagcgaagaggatcggccccaccgaaaggtgcagcggcccgtctactttgttagtgaggccctccgggacgccaaaacccgataccctcaggcccagaagatgctttacgctattctgatggcctcgaggaaactgcgccattatttccaggcgcatcgggtcacagtagttacgtcttaccccctcggtcaaatcttgcataatcgagagggtacaggacgggtggtgaaatgggcaatcgaactttctgagttcgatttgcactttgaaccacgccacgctatcaagagccaggccctcgccgattttgtggcagagtggaccccggctcccgagcccgtctcgatccccgaggccagcacggacccctcgcagctgcctcacaccgcccactgggtgatgcagttcgacggctccctgtctcttcagggcgccggtgcgggggtcacgttgacctctctgagcggagacgtcctcagatacttggtccgcctcgactttcgagcgaccaataatatggcagaatacgagggactccttgccggactaagagtggcagctggactggggatccgccgcctcctggtgttaggcgactcccagctggtcgttaaccaagtctgtaaggagtaccggtgctctgacccacagatggacgcctacgtgcgccaagtacggcgtatggagcgccattttgacgggattgagcttcggcatgtgcccagacgggataacatgattgccgacgaactctcacggctcgcgtcctcgcgagcccagaccccaccgggcgcctttgaagaaaggcttgcccagccgtcggcgcgacccgaccccttaggggagacggatgcgcctgaccggcccccgaggcctgtcggagtccaggcctcgggacccgaggggagtgctcccaactcccttagattgattgcttggatcgccgagatccaagcatacctcacagataagactctacccgaggaccgcgaagggagtgaacgcgtccatcgcatctccaaacgctacgtgctggtagaagggaccctctatcggcgcgcggctaatggaatcctcctgaagtgcattcctcgggaacaaggcgttgtgcttcttgccgatatccatgaaggcgaatgcggagcccactccgcctcgcgcaccttggttggtaaagcttttcgccagggtttctattggccgacagctcttaatgatgcggtcgacctggtccggcgatgtagagcgtgtcaattccacgccaagcaaatccatcagccggcccaggccctgcagaccataccactttcgtggccatttgctgtctggggactcgatatcctgggaccgtttaggcgggccccgggcgggtttgagtatctgtatgtcgcgatcgacaggttcactaagtggcccgaggcttatccggtcatcaagatcgataagcactccgcacttaaattcattaagggcatcacggcccggtttggagtgcctaaccgtattattacggataatggcacccaattcactagtgaactcttcggcgactactgcgaagacatgggcatcaagctctgcttcgcctcacctgcccaccccagaagcaatggccaagtggagcgcgccaatgcggaaatcctcaaaggccttaaaaccaagaccttcaacatactcaagaagcacgtcgattcatggatcgaggagttgccagcgcttcgcagagatgacctcgactacttggaagagcgaaggcggcgcgcggccctccgagccgcgcgctaccagcagagcctgcggcgctaccatcagcgccacgtccgggcccgatcactctgcgtcgacgacctcgtcctacgccgcgtccaaacgcgtgctggattgagcaagctttcaccaatgtgggagggtccgtatcgagtggtcggcgttccccggccgggctccatatggctggccacgggcgacggcactgagctgcctaacccgtggaacatcgaacaccttcgtcgcttctacccctga

SEQ ID NO: 68168 - DNA, 1638 bp, Oryza sativa
  Clone ID: PAT_MRT4530_68957C.1
atgacggcacagcggcgcctaggtgctggtggttggtcctccgccaccaagacctctggcgctgctaccaccggctccgtgtcgtcaaggcggagggcgcgacgagcggcggctgttgctcgccattcggctgccactccctcgtcagcgcctccgacccgggaagatcagcgtggggggccagatgcccgcatcgatatcgagcgccggcgtaatggtcggcgtgctccccacgcaacggagggcgcctcctcgtccggagagtcacctcaacacagacgcggggatcagccctccgtgcccccggttggtggtgtcggctgtagagcctttgtggcgagccttcggaacgtccgttggcccccaaggttccggcccaccatcgccgaaaaatatgacgggagcgtcaaccccgccgagtttctccaggtctacacgaccgggatcgaggccgccgggggtgacgacagggtcatggcgaatttctttcccatggccctgaagggacaggcacggggttggctaatgaacttgccacccgcgtccgtccactcttgggaggatttgtgccaacagttcaccataaactttcaaggaggggtgtgcggcacaaccgcatgcttgaaaagatcgcctccaaagagccccagactaccgcggagctttttcagctcgcggaccgagtggctcgcaaggaggaggcctggacttggaacccctccggttccggtgtggcagcttcggccgcccccgggtccgctgctcggacagggcggcgtgacaggaggaggaagaaaaggtcggcccattccgacgacgagggtcatgtcctcgccgtcgaaggcgtttcgctggccacccgaaaggggaggcctacgagcgacaaaaagaaggaagccgacgctccctgacctcggctacttggaagagcgaaggtggcgcgcggcccttacagccgcgcgctaccagcagagcctgcggcgctaccatcagcgccacgtccgggcccgatcactctgcgtcgatgacctcgtcctacgccgggtccaagcgcgtgctggattgagcaagctctcaccaatgtgggagggcgcccccgacccccaggatggccccgaggccactgcgggaaggccgcgcctgtcgccctctgaccccgaggtcgtcggcacagaagccgagtgcgccccgcgtggcctctcggatggagagcgccctgaagatgtggcccctgacgaagaagatcggccccgccgaaaggtgcagcggcccgtctacttcgttagcgaggccctccgggacgctgagacccgataccttcaggcccagaagatgctttacgctatcctgatagcttcgaggaagttgcgccattatttccaggcgcatcgggtcacggtggttacgtcttatcccctcggccaaatcttgtataaccgagagggtactggacgggtggtgaaatgggcaatcgaactcgctgaattcgatttgcgctttgaaccacgccacgcgatcaagagccaggccctcgccgactttgtggcggagtggaccccagctcccgagctcgtctccgcccccgaggccagctcgggcccatcgcagctgcctcacaccgccctctgggtgatgtag

SEQ ID NO: 68169 - DNA, 204 bp, Oryza sativa
  Clone ID: PAT_MRT4530_68958C.1
gtatatctatccacagggaaggcatgggagagatctgatgttattgggtgcgggatcatgcctcttgagcttgcgactggacagacagccataaagttgtcacgcttggaggaagaggacaatgttctattgctcgatcatgtacagaagctacacacagaggggaatcttggaccgattgtgtacactaacctgaaccatgca

SEQ ID NO: 68170 - DNA, 2834 bp, Oryza sativa
  Clone ID: PAT_MRT4530_68959C.1
atagatcatatcgtgcgcgcgctaattacgctcgccgaccgaagcgacgttaccatatctccagatgaaacgaatcgccatgtccagattcgtgtgctactcaagacgagggcttctaggcgctcgtccccagctggagctagcgtgttacctcccagagatggcacgttagtcctggttagatatatgccaggcttcatcctaaccattacaggcaagatgttgtgtgaagaagggcgaacatgtagattgctaagctgacacgtggtggacaagaatgaccgacgtgactggtctgacaccggtcatgtcgtcagcagacagccacgattccacgtcgcatctgctcccggcgaaagtggaggtagttgtgggccgtctcatcagaaggggactctgcgagggattttctgagctctcgcactctttcgtgtgcgccaagcttttccagttcagcccaatggccgagccagcaaaggcgcacgacctctccccgagtatgagcggtgacgacggggagccaaacccacgccgtcgagctcgtactccaccgccccctccacgccaaagtcctaggcgggagaaggcgctcgagagggccgaaggatccgcgacttcgacacccacaggaggtggagaagggcggcgagatggggagcgtcgcctcctcgtctacggcgacggcagcacgccccagggcgcgctccaagctgcgggcgcgctcctacgtcacccgcccatcgcccatgacccggagtctccagcccaacgttggctggacgatgtggccaaattggtcatgactgcacggcagcgcctagatgctggtgggcggtcctccgccaccaaggcctctggtgctgctaccaccggctccgcgtcgtcaagacggagggcgcggcgagcggcagccgctgttcgccattcggccgccactccttcgtcaacgcctccgacccgggaagatctgcgtggggaaccggatgcccgcatcagtatcgagcgccggcgtaatggccgacgtgctccccacgcaacggagggcgcctcctcgtccggagtgtcacctcaccacggacgcggggatcagccctccgtgcccccggttggtggtgtcggctgtagagcctttgtggcgagccttcggaatgtccgttggcccccaaggttccggcccaccatcgccgaaaaatatgacgggagcgtcaaccccgccgagtttctccaggtctacacgaccgggatcgaggccgccgggggtgacgacagggtcatggcgaatttctttcccatggccctgaagggacaggcacggggttggctaatgaacttgccacccgcgtccgtccactcttgggaggatttgtgccaacagttcaccatgaactttcaaggcacattggcgcgcccaggtgaagaagcggacctgcacgcagtacagcgaagggatgatgagtcacttcgctcgtacattcagcggttctgtcaagtccgcaacaacataccatgcatccctgcacacgcggtgatctacgcgttcagggggggtgtgcggcacaaccgcatgctcgaaaagatcgcctccaaagagccccagactaccgcggagctttttcagctcgcggaccgagtggctcgcaaggaggaggcctggacttggaacccctccggttccggtgtggcagcttcggccgcccccgggtccgccgctcagtcagggcggcgggacaggaggaggaagaagaggtcggcccattccgacgacgaggagcgaaggtggcgcgcggcccttcgagccgcgcgctaccagcagagcctgcggcgctaccatcagcgccacgtccgggcccgatcactctgcgtcgacgacctcgtcctacgccgtgtccaaacgcgtgctggactgagcaaactctcaccaatgtgggagggtccgtatcgagtgatcggcgtcccctggccgggctccgttcggctggccacgggcgacggcacagagctgcctaacccgtggaacatcgaacaccttcgtcgcttctacccctacattttcgatttcctaaaggctattaaatcagcctataacaagaagggggcccgaaggcctcggaagaagaaggaaaagctattaagattggcggaggcctgggggctcactctgacgcgcccgggcgcccccgacccccaggatggccccgaggccactgcgggaaggccgcgcctgtcgccctctgaccccgaggtcgtcggcacaaaagccgagtgcgccccgcgtggcctctcggatggagagcgccctggagatgtggcccctaacgaagaagatcggccccgccgaaaggtgcagcggcccgtctacttcgttagcgaggccctccgggacgctgagacccgataccttcaggcccagaagatgctttacgctatcctgataacttcgaggaagttgcgccattatttccaggcgcatcgggtcacggtggttacgtcttatcccctcggccaaatcttgtataaccgagagggtactggacgggtggtgaaatgggcaatcgaactctctgaattcgatttgcgctttgaaccaagccacgcgatcaagagccaggccctcgccgactttgtggtggagtggaccccagctcccgagctcgtctccgcccccgagaccagctcgagcccatcgcagctgcctcacaccgccctctgggtgatacacaatcgtccacgtggcctggcaccctcggggggcgtcgggcccgagggtgatgtgttcgccctcctcgccccgagggccgaggcgccccgaccccttgtgggtttttgctccgcgt

SEQ ID NO: 68171 - DNA, 361 bp, Oryza sativa
  unsure (1)..(361): unsure at all n locations
  Clone ID: PAT_MRT4530_6895C.1
agctcaaaagccggtgcncgccgggcgacttcaaacnaccccgtcgcgctggaccgcggcagcgagcgcgacttcgacggcgaggtcagggacgtgtgctcccagttcaacaccgactgattgatcgatcgatcgatccatcggtcgaacactgtacatttcttctgaaagatcaaatcgattcaagaattcaacaacaaatgaaatgatatactccatgaaagaaaagattaggatctctctctttctgtgtgtgtgttcgtgtgtgtactccaaatgtgatacaaatttcacattgaaattcggcagaatttgaggaattaagcttgaaagtttgctggagaaaaaaaaaaaaaaaaaa

SEQ ID NO: 68172 - DNA, 793 bp, Oryza sativa
  Clone ID: PAT_MRT4530_68960C.1
ttatcccttcttccacactgccatggccggcgccacctccggcgggcgcacagcacgcgccccagttcctgaacatagccatgccttgcagctgtttgccatcgcggagccgacctccgtcgcgtcgtccgtccggtccagcaccagtgggctccttctcctcaccagctcgagcctgtcgtccacaaacgcaccgtccgaggaagcgggtgaggtcgtcgatctgaaactagcgcttgtacatggcggcggtggccttcttggcagggtggacgaacaccttgtagatctgtgtgcccacagtgaggaaggcggcgtcggagtgcgggtccaccgcaatgccgctgggcggtgttgtggggtaggggagcggggcggagaagaccgccggccatggcagtgtgggaggatggacggccatgggagctctgcctcaaccaccaccgccgctcaacctctaatccaccgcctccagtgcgtaatcgaccaagccgccaccaccaccaagtcccacgcccctccgcgaccccatttcacccctcaccggcgcccaacaaccaccaccgctattttccccaaattggaccgcccgctatccaatcctcttcgcttctaccttcctcgaactcgccaaattaaaacacccagatcggctgctcgccatccaatcctcttcgcttgcaccatcgccatttcgctcgacgggaccggcctctgcacgtgtcccctgtcgcttctcacagcgctgtgctgccacaccgaggggatagaggaagaagagagaggagagagc

SEQ ID NO: 68173 - DNA, 4254 bp, Oryza sativa
  Clone ID: PAT_MRT4530_68961C.1
atggccgagcaagcaaaggcgcacgacctctctccgagtgtgagtggcgacgacggggagccgaacccacgccgtcgagctcgtactccaccgctccctccacgccaaagtcctaagcggggggaggcgctcgagagggtcgaaagatccgcgacttcaccgatcgcgggcgatggagaagaacggcgagatggggagcgtcgcctcctcgtctacggcgacggcagcacgccccagggcgcgctccaagctgcgggcgcgctcttacgtcacccgcctgtcgtccctgacccggagtctccagcccaacgatggctggacgacgtggccaaattagtcatgacggtacggcagcgcctagatgctggtgggcggtcctccgccaccaaggcctctggtgctgctaccaccggctccgcgtcgtcaagacggagggcacgacgagcggcagccgctgttcgccattcggccgccactccttcgtcgactccttcgacccagaaagatctgcgtggggggccggacgcccgcaccagcatcgagcgccggcgtaatgaccgaagtgctgcccacgcaacggagggcgcttcctcgtccagagtgtcacctcaacacggacgcgggaatcagccctccgtgcccccggttggtggtgtcggctgtagagcctttgtggcgagtcttcggaatgtccgttggcccccaaggttccggcccaccatcgccgaaaaatatgatggcagcgtcaaccccgccgagtggctagcgaacccggtggtcgttcccaaggcgaacggcaagcttcggatgtgcatcgactacaccgaccttaacaaggcatgtcctaaggatccttaccccctgcctcgcatagatcagattgtcgactccactgcggggtgcgaccttttgtgttttctagatgcatactctggttaccatcagattcgcatggctagggaggatgaggaaaaaactgcgttcattacccccataggaacctattgttatacgacaatgcccttcgggttaaagaatgcaggtcctacttttcaacgtactactcgaatttctttgggtagccaattaggacgtaatattgaagcttatgtcgatgacttggttgtaaagacgcgcaaccaggaaacgttactcatagatctagcggaaacttttgagagtctccgctccgcccgcataaaattaaaccccgataagtgtgtgttcggtgtacctgcgggcaagcttctcgggttcttggtctctgcccggggcattgaggccaaccccgagaagatacgggctatagagcggatgcgcccccccagcaaacttagggatgtgcaatacgtcaccggttgcatggccgccctaagtcggttcatatcgaggctgggagagaaggcgttacccttatttaagcttctcaaacgctccggaccgtttacctggacgaaggaagctgaaaatgccctcacccagttgaaggcgtatctaagctctcccccagttctggtcgccccggagccagacgagcccttgctactctacttagcggcgaccccgcaagtagttagtgcggcattggttgtggagcgcgatgaggacaattctcatttcgcgcttccccaccctgtgccgacttggcccgggagagagcagggaggagaggcccccgagccgaacggtggcccgaggcccccgacgaccggagttggccctctgcccgcttgtcagacggtgctaggagcccccgacccccaggaaggccctgaggccactgtgggaaggccgcacctatcgccctttgaccccgaggctaaccctgtgctgactcgacccgggaaagagcagggagaagaggcccccgagccgaacggaggcctaaggcccctgacgaccggagttggccctttgcccgcttgtccgacgacgccaggagcccctgacccccaggacggccccaaagccactgtgggaaggccgcccctgttatcctccgaccccgaggtcatcagcacagaagacaagtgcgccccgcgaggctgcttggacgaagagtgccccagggatgcggcccctagcgaagaggatcggccccaccgaaaggtgcagcggcccgtctactttgttagtgaggccctccgggacgccaaaacccgataccctcaggcccagaagatgctttacgctattctgatggcctcgaggaaactgcgccattatttccaggcgcatcgggtcactgtggttacgtcttaccccctcggtcaaatcttgcataatcgagacggtacaggacgggtggtgaaatgggcaatcgaactttctgagttcgatttgcactttgaaccacgccacgctatcaagagccaggctctcgccgattttgtggcagagtggaccccggctcccgagcccgtctcaatccccgaggccagcacggacccctcgcagctgcctcacaccgcccactgggtaatgcagttcgacggctccctgtctcttcagggcgccggtgcgggggtcacgttgacctctccgagcggagacgtcctcagatacttggtccgcctcgactttcgagcgaccaacaatatggcagagtacgagggactccttgccggactcagagtggcagctggactggggatccgccgcctcctggtgttaggcgactcccagctggtcgttaaccaagtctgtaaggagtaccggtgctctgacccgcagatggacgcctacgtgcgccaagtacggcgtatggagcgccattttgacgggattgagcttcggcatgtgcccagacgggataacatgattgccgacgaactctcacggctcgcgtccacgcgagcccagaccccaccgggcgcctttgaagaaaggcttgcccagccgtcggcgcgacccgaccccttaggggagacggacgcgcctgaccggcccccgaggcccgttgaagtccaggcctcgggacccgaggggagcgctcccagctcccttagattgattgcttggattgccgagatccaagcatacctcacagataagactttacccgaggaccgcgaagggagtgaacgcgtccatcgcatctccaaacgctacgtgctggtagaagggaccctctatcggcgcgcggctaatggaatcctcctgaagtgcattcctcgggaacaaggcgttgtgcttcttgccgatatccatgaaggcgaatgcggagcccactccgcctcgcgcaccttggttggtaaagcttttcgccagggtttctattggccgacagctctcaatgatgcggtcgacctggtccggcgatgtagagcgtgtcaattccacgccaagcaaatccatcagccggcccaggccctgcagaccataccactttcgtggccatttgctgtctgggggctcgatatcctgggaccgtttaggcgggccccgggcgggtttgagtatctgtatgtcgcgatcgacaagttcactaagtggcccgaggcttatccggtcgtcaagatcgataagcactccgcacttaaattcattaagggcatcacggcccggtttggagtgcctaaccgtattattacggataatggcacccaattcactagtgaactcttcggcgactactgcgaagacatgggcatcaagctctgcttcgcctcacctgcccaccccagaagcaatggccaagtggagcgcgccaattcagaaatcctcaaaggccttaaaaccaagaccttcaacatactcaagaagcacggcgattcatggatcgaggagttgccagcggtgctctgggcaaaccgaactacaccaagccgagcaaccggggaaacgcctttcttcctcgtctacggcgcggaagcggttctcccatccgagctcaccctgaggtctcctcgggccaccatgtactgcgaggctgatcaagatcagcttcgcagagatgacctcgactacttggaagagcgaaggcgacgcgcggccctcagagccgcgcgctaccagcagagcctgcggcgctaccatcagcgtcacgtccgggcccgatcactctgcgtcgacgacctcgtcctacgccgcgtccaaacgcgtgctggattgagcaagctctcaccaatgtgggagggtccgtatcgagtggtcggcgtcccccggccgggctccatacggctggccacgggcgacggcattgagctgcctaacccgtggaacatcgaacaccttcgtcgcttctacccctga

SEQ ID NO: 68174 - DNA, 1353 bp, Oryza sativa
  Clone ID: PAT_MRT4530_68962C.1
tcacgttgatggggaggggagggtttcggtggtgattgggtctgggggagcaatggctaaggtgcggtgcgagacgacgaagctattggtggcgtggcgcagcgaggggtggtcaggagtggcgcccaacagcggccggaggcggtagagttggtggcggcttgggttcatagtggagagggcggctagggggatggaatggaggagcagtgtggtggccgagcttgcctgcggggcggcgaagctggggatggcggtggattggcgcgacggcggcccattcttggcagaatcatccgtgacatacctcgctttgaggttgtaccggacatcccatataattttcttcttcgagctggttgggactggtgtcgccaggagaccattcccacggagcttcttgaggcgttcctctaccatcgagttgaggctagtaatctgcttgaccgtgaggcccacaaggctagggaggcagcagtcaaggctgttgaggaggaggagctttgtctcgagctcatcgttctcatgctttgccttatccaccttctcttggagattggcgatgcgctgcttgaggaagccctccaggttagtcgtgttctcgtattggtccttctgcggcaaggccctgaagcgctcgatcacacgccttgcctctggtaccgatggccacaccatcataggttgcgcctcgccttcagcatacatcacaacgcatgcatccacgccatatagcgtcgagagctcgcttgccttcttcattaggctcttttgccgcttcttgaacatcgcccgacgaattgtgtagttggcgagccgctgtaggttcaccttctgacgagctatggccagcacgattctccgttcatatccactgcctccaccgtcctcctcttcgccgcttgctgcctccatagtcctcctcagcacggcccactggccgccgtgccctccctgcgccgtcgcctccctcggcttcgcaagggtgagagccgacgctttcggtctttgccacgcctccagcaaccatccatcgtcgactccgtggtcgccggacctcgccgtatccactgttggcatcgcagcagtgaggagaagcccggcagccacctccgcgaagacgcaagccatcggagcaccgtcgtcaccgtgaagccgatttgttccatcttcagccgcgccgttcgtcgccgtccatcgccgccttcgttcaccgtcgccaccctcgggatcgcaggagcgaggtgaagaccgtccgcccctcggttgcgtggttcgctggtaactgccgttcccgtgcttgcgggcgtcgatcttgcgtggcagccatgtcatcgctgacatgagcgtcat

SEQ ID NO: 68175 - DNA, 5526 bp, Oryza sativa
  Clone ID: PAT_MRT4530_68963C.1
atggccgagccagcaaaggcgcacgacctctccccgagtatgagcggtgacgacggggagccaaacccacgccgtcgagctcgtactccactgccccctccacgccaaagtcctaggtgggagaaggcgctcgagagggccgaaggatccgcgacttcgacacccacaggaggtggagaagggcggcgagatggggagcatcgcctcctcgtctacggcgacggcagcacgccccagggcgcgctcctacgtcacccgcccgtcgcccatgacccggagtctccagcccaacgttggctggacgatgtggccaaattggtcatgactgcacggcagcgcctagatgctggtgggcggtcctccgccaccaaggcctctggtgctgctaccatcggctccgcatcagcctttgtggcgagccttcggaatgtccgttggcccccaaggttccggcccaccatcgccgaaaaatatgacgggagcgtcaaccccgccgagtttctccaggtctacacgaccgggatcgaggccgccgggggtgacgacagggtcatggcgaatttctttcccatggccctgaaaggacaagcgcggggttggctaatgaacttgccacccgcgtctgtccactcttgggaggatttgtgccaacagttcaccatgaacttccaaggcacatatccgcgcccaggtgaggaagcggacttgcacgcagtacagcgaagggatgatgagtcacttcgctcggggggtgtgcggcacaaccgcatgcttgaaaagatcgcctccaaggagccccagactaccgcagagctttttcagctcgcggaccgagtggctcgtaaggaggaggcatggacctggaacccctccggttccggtgtggcagcttcggccgcccccggatccgccgctcagatagggcggcgtgacaggaggaggaagaagaggtcagcccataccgacgacgagggtcatgtcctcgccgtcgagggcgcttcgcgggccacccgaaaggggaggcctgcgggaggcaaaaagaacgaggccggcgctcccaacagggagcgcccaaccggcaagtggtgcaccgtccacaacacttcccttcacgacctcgcggactgccgtgcagtcaaaagtttggctgagcggacgaggaagtgggaggagaagaggaggcaggagcgccgagagggcaaatccccggcggttccttccggtaatcggcgaagtgaggccaagcagaaggcccccgccgaggacatcgatgacggcgatgatgacctaggtttccaagagcctggggccaccattgccaccgtcgatgggggagcgtgtgctcacgtttctcgccggagcttcaaggccatgaagcgagagcttctggccgcggcccctactcatgaggcgacgtgtcgggcgcggtggtcggaggttgccctcaccttcgaccagaccgaccacccaccgtgcgttgcccggggagggcagattgcgatggtggtttctcccaccgtttgcaacgtgaagttggggcgtgtcctcattgatgggggagcggccctcaacatcctttcccctgcggcctttgacgccatcaaggccccggggatggtgctccggccgtcccagccaattatcggtgtgacgccggggcacacgtggccgttaggtcacatcgacctaccggtcaccttcggtggatccgccaacttccgcacggagcgggtgaacttcgatgtggcggacctcagtctgccctacaacgcggtcctggggaggcccgcgttggtgaagttcatggcggcggtccactacgcctacctacagatgaagatgccgggccccggtggccccatctctgtccatggcgacctcaaagtcgcgctcgcttgtctggagcagcgcgcggaccacctcgtcgctgcatccaagcccgagggtggcgacgagaggcttggcgcttccgcccccgccaccccgaggcaacggatgatcacaggcgacgaggtcccggaagacgcgctcgtctccttcctgcgggcaaacgctgacgtcttcgcatggagaccggcggatatgcccggggtccccagggaggtgattgagcaccgtctcgccgtgcggccgggcgcaaggccggtccggcagaaagtgcggcggcaggccccgaaacgtcaagccttcatccgcgaggaggtggcgcgacttctggaagccggattcatccgtgaggtcatccatccggagtggctggcgaacccggtggtcgttcccaaggcgaacggcaagcttcggatgtgcatcgactacaccgaccttaacaaggcatgtcctaaggatccttaccccctgcctcgcatagatcagattgtcgattccactgcggggtgcgaccttttgtgttttctagatgcatactctggttaccatcagattcgcatggctagggaggatgaggaaaagactacgttcattacccccataggaacctattgttatacgacaatgcccttcgggttaaagaatgcagatctagcggaaacttttgagagtctccgctccgcccgcataaaactaaaccccgataagtgtgtgttcggtgtacctgcgggcaagcttctagggttcttggtctctgcccgaggcattgaggccaaccctgagaagatacgggctatagagcggatgcgcccccccagcaaacttagggatgtgcaatgcgtcaccggttgcatggccgccctaagtcggttcatatcgaggctgggagagaaggcgttacccttatttaagcttctcaaacgctccggactgtttacctggacggaggaagccgaaaatgccctcacccagttgaaggcgtatctaagctctcccccagttctggtcgccccggagccagacgagcccttgttactctacttagcggcgaccccgcaagtagttagtgcggcattggttgtggagcgcgatgagaacaattctcatttcacgcttccccaccctgtgccgacttggcccgggagagagcagggaggagaggctcccgagccgaacggtggcccaaggcccccgacgaccggagttggccctctgcccgcttgtcagacggtgctaggagcccccgacccccaggaaggccctgaggccactgtgggaaggccgcacctatcgcccttcgaccccgaggctaaccctgtgctgacccgacccgggaaagagcagggagaagaggcccccgagccgaacggaggcctaaggcccctgacgaccggagttggccctttgcccgctttttcgacgacgccaggagcccccgacccccaggacggccccgaagccactgtgggaaggccgcccctgttatcctccgaccccgaggtcatcagcacagaagataagtgcgccccgcgaggctgcttggacgaagagtgccccagggatgcggcccctagcgaagaggatcggccccaccgaaaggtgcagcggcccgtctactttgttagtgaggccctccgggacgccaaaacccgataccctcaggcccagaagatgctttacgctattctgatggcctcgaggaaactgcgccattatttccaggcgcatcgggtcacagtagttacgtcttaccccctcggtcaaatcttgcataatcgagaggagtggaccccggctcccgagcccgtctcgatccccgaggccagcacggacccctcgcagctgcctcacaccgcccactgggtgatgcagttcgacggctccctgtctcttcagggcgccggtgcgggggtcacgttgacctctccgagcggagacgtcctcagatacttggtccgcctcgactttcgagcgaccaataatatggcagaatacgagggactccttgccggactaagagtggcagctggactggggatccgccgcctcctggtgttaggcgactcccagctggtcgttaaccaagtctgtaaggagtaccggtgctctgacccgcagatggacgcctacgtgcgccaagtacggcgtatggagcgccattttgacgggattgagcttcggcatgtgcccagacgggataacatgattgccgacgaactctcacggctcgcgtcctcgcgagcccagaccccaccgggcgcctttgaagaaaggcttgcccagccgtcggcgcgacccgaccccttaggagagacggatgcgcctgaccggcccccgaggcctgtcggagtccaggcctcgggacccgaggggagtgctcccaactcccttagattgattgcttggatcgccgagatccaagcatacctcacagataagactctacccgaggaccgcgaagggagtgaacgcgtccatcgcatctccaaacgctacgtgctggtagaagggaccctctatcagcgcgcggctaatggaatcctcctgaagtgcattcctcgggaacaaggcgttgtgcttcttgccgatatccatgaaggcgaatgcggagcccactccgcctcgcgcatcttggttggtaaagcttttcgccagggtttctattggccgacagctcttaatgatgcggtcgacctggtccggcgatgtagagcgtgtcaattccacgccaagcaaatccatcagccggcccaggccctgcagaccataccactttcgtggccatttgctgtctggggactcgatatcctgggaccgtttaggcgggccccgggcgggtttgagtatctgtatgtcgcgatcgacaggttcactaagtggcccgaggcttatccggtcgtcaagatcgataagcactccgcacttaaattcattaagggcatcacggcccggtttggagtgcctaaccgtattattacggataatggcacccaattcactagtgaactcttcgacgactactgcgaagacatgggcatcaagctctgcttcgcctcacctgcccaccccagaagcaatggccaagtggagcgcgccaatgcggaaatcctcaaaggccttaaaaccaagaccttcaacatactcaagaagcacggcgattcatggatcgaggagttgccagcggtgctctgggcaaaccgaactacaccaagccgagcaaccggggaaacgcctttcttcctcgtctacggcgcggaagcggttctcccatccgagctcaccctgaggtctcctcgggctaccatgtattgcgaggctgatcaaaatcagcttcgcagagatgacctcgactacttggaagagcgaaggcggcgcgcggccctccgagccgcgcgctaccagcagagcctgcggcgctaccatcagcgccacgtccgggcccgatcactctgcgtcgacgacctcgtcctacgccgcgtccaaacgcgtgctggattgagcaagctttcaccaatgtgggagggtccgtatcgagtggtcggcgtcccccggccgggctccatacggctggccacgggcgacggcactgagctgcctaacccgtggaacatcgaacaccttcgtcgcttctacccctga

SEQ ID NO: 68176 - DNA, 6252 bp, Oryza sativa
  Clone ID: PAT_MRT4530_68964C.1
atggaggagggttgctctgcttgtgagaagttggatctcggcgagcattcctctgctgacattttcgacggaaccacgcaccaatcatgcgacgcatgcagtggtggtggtcacgctcgcacggcggcgtctctctctggaccatatcaatcggactcggccggaatcgggtttttaaaatcagttatgtctcgtggttatcatgcagttttcgggttaccacggtgtcgcaccgaaaatgtagtcattacacggcggtggtcggtcaggcgatgtatacatgctactgatactttggagtacctgccggggctgcgttcggtacttttccttttcagccaatgccgagccggaaaggcgcaggcctctccccgagaagagcggggagagggggagccaaacccacccgttgagttggtaatcccccgcccccttcacgccaaagtcttaggcgggagaaggcgctcgagagggccgaagaatccgcgacttcgacgcccccaggaggtggagaaaggccggcgagatggggagcgtcgcctcttcgtctacggcgacggcagcacgccccagggcgcgctccaagctgcgggcgcgctcctacgtcacccgcccgtcgcccatgacccggagtctccagcccaacgttggctggacgatgtggccaaattggtcatgactgcacggcagcgcctagatgctggtgggcggtcctccgccaccaaggcctctggtgctgctaccaccggctccgcgtcgtcaagacggagggcgcggcgagcggcagccgctgttcgccattcggccgccactccttcgtcaacgcctccgacccgggaagatctgcgtggggaaccggatgctcgcatcagtatcgagcgccggcgtaatggccgacgtgctccccacgcaacggagggcgcctcctcgtccggagtgtcacctcaccacggacgcggggatcagccctccgtgcccccggttggtggtgtcggctgtagagcctttgtgacgagccttcggaatgtccgttggcccccaaggttccggcccaccatcgccgaaaaatatgacgggagcgtcaaccccgccgagtttctccaggtctacacgaccgggatcgaggccgccgggggtgacgacagggtcatggcgaatttctttcccatggccctgaaaggacaagcgcggggttggctaatgaacttgccacccgcgtctgttcactcttgggaggatttgtgccaacagttcaccatgaacttccaaggcacatatccgcgtccaggtgaggaagcggacttgcacgcagtacagcgaagggatgatgagtcacttcgctcgtacattcagcggttctgtcaagtccgcaacaccataccatgcatccctgcgcacgtggtgatttacgcgttcagggggggtgtgcggcacaaccgcatgcttgaaaagatcgcctccaaggagccccagactaccgcggagctttttcagctcgcggaccgagtggctcgtaaggaggaggcatggacctggaacccctccggttccggtgtggcagcttcggccgcccccggatccgccgctcagatagggcggcgtgacaggaggaggaagaagaggtcagcccataccgacgacgagggtcatgtcctcgccgtcgagggcgcttcgcgggccacccgaaaggggaggcctgcgggaggcaaaaagaacgaggccggcgctcccaacagggagcgcccaaccggcaagtggtgcaccgtccacaacacttcccttcacgacctcgcggactgccgtgcagtcaaaagtttggctgagcggacgaggaagtgggaggaggagaggaggcaggagcgccgagagggcaaatccccggcggttccttccggtaatcggcgaagtgaggccaagcagaaggcccccgccgaggacatcgatgacggcgatgatgacctaggtttccaagagcctggggccaccattgccactgtcgatgggggagcgtgtgctcacgtttctcgccggagcttcaaggccatgaagcgagagcttctggccgcggcccctactcatgaggcgacgtgtcgggcgcggtggtcggaggttgccctcaccctagaagcttgcccgcagttggggcgtgtcctcattgatgggggagcagccctcaacatcctttcccctgcggcctttgacgccatcaaggccccggggatggtgctccggccgtcccagccaattatcggtgtgacgccggggcacacgtggccgttaggtcacatcgacctaccggtcaccttcggtggatccgccaacttccgcacggagcgggtgaacttcgatgtggcggacctcagtctgccctacaacgcggtcctggggaggcccgcgttggtgaagttcatggcggcggtccactacgcctacctacagatgaagatgccgggccacggtggccccatctctgtccatggcgacctcaaagtcgcgctcgcttgtctggagcagcgcgcggaccacctcgccgctgcatccaagcccgagggtggcgacgagaggcttggcgcttccgccctcgccaccccgaggcaacggatgatcacaggcgacgaggtcccggaagacgcgctcgtctccttcctgcgggcaaacgctgacgtcttcgcatggagaccggcggatatgcccggggtccccagggaggtgattgagcaccgtctcgccgtgcggccgggcgcaaggccggtctggcagaaagtgcggcggcaggccccggaacgtcaagccttcatccgcgaggaggtggcacgacttctggaagccggattcatccgtgaggtcatccatccggagtggctggcgaacccggtggtcgttcccaaggcgaacggcaagcttcggatgtgcatcgactacaccgaccttaacaaggcatgtcctaaggatccttacccccttcctcgcatagatcagattgtcgactccactgcggggtgcgaccttttgtgttttctagatgcatactctggttaccatcagattcgcatggctagggaggatgaggaaaaaactgcgttcattacccccataggaacctattgttatacgacaatgccctttgggttaaagaatgcaggtcctacttttcaacgtactactcgaatttctttgggtaaccaattaggacgtaatgttgaggcttatgtcgatgacttggttgtaaagacgcgcaaccaggaaatgttactctcagatctagcggaaacttttgagagtctccgctccgcccgcataaaactaaaccccgataagtgtgtgttcggtgtacctgcgggcaagcttctagggttcttggtctctgcccgaggcattgaggccaaccctgagaagatacgggctatagagcggatgcgccccccagcaaacttagggatgtgcaatgcgtcaccggaagccgaaaatgccctcacccagttgaaggcgtatctaagctctcccccagttctggtcgccccggagccagacgagcccttgttactctacttagcggcgaccccgcaagtagttagtgcggcattggttgtggagcgcgatgagaacaattctcatttcacgcttccccaccctgtgccgacttggcccgggagagagcagggaggagaggctcccgagccgaacggtggcccaaggcccccgacgaccggagttggccctctgcccgcttgtcagacggtgctaggagcccccgacccccaggaaggccctgaggccactgtgggaaggccgcacctatcgcccttcgaccccgaggctaaccctgtgctgacccgacccgggaaagagcagggagaagaggtccccgagccgaacggaggcctaaggcccctgacgaccggagttggccctttgcccgcttttccgacgacgccaggagcccccgacccccaggacggccccgaagccactgtgggaaggccgcccctgttatcctccgaccccgaggtcatcagcacagaagataagtgcgcctcgcgaggctgcttggacgaagagtgccccagggatgcggcccctagcgaagaggatcggccccaccgaaaggtgcagcggcccgtctactttgttagtgaggccctccgggacgccaaaacccgataccctcaggcccagaagatgctttacgctattctgatggcctcgaggaaactgcgctattatttccaggcgcatcgggtcacagtagttacgtcttaccccctcggtcaaatcttgcataatcgagagggtacaggacgggtggtgaaatgggcaatcgaactttctgagttcgatttgcactttgaaccacgccacgctatcaagagccaggccctcgccgattttgtggcagagtggaccccggctcccgagcccgtctcgatccccgaggccagcacggacccctcgcagctgcctcacaccgcccactgggtgatgcagttcgacggctccctgtctcttcagggcgccgatgcgggggtcacgttgacctctccgagcggagacgtcctccgatacttggtccgcctcgactttcgagcgaccaataatatggcagaatacgagggactccttgccggactaagagtggcggctggactggggatccgccgcctcctggtgttaggcgactcccagctggtcgttaaccaagtctgtaaggagtaccggtgctctgacccgcagatggacgcctacgtgcgccaagtacggcgtatggagcgccattttgacgggattgagcttcggcatgtgcccagacgggataacatgattgccgacgaactctcacggctcgcgtcctcgcgagcccagaccccaccgggcgcctttgaagaaaggcttgcccagccgtcggcgcgacccgaccccttaggggagacggatgcgcctgaccggcccccgaggcctgtcggagtccaggcctcgggacccgaggggagtgctcccaactcccttagattgattgcttggatcgccgagatccaagcatacctcacagataagactctacccgaggaccgcgaagggagtgaacgcgtccatcgcatctccaaacgctacgtgctggtagaagggaccctctatcggcgcgcggctaatggaatcctcctgaagtgcattcctcgggaacaaggcgttgtgcttcttgccgatatccatgaaggcgaatgcggagcccactccgcctcgcgcaccttggttggtaaagcttttcgccagggtttctattggccgacagctcttaatgatgcggtcgacctggtccggcgatgtagagcgtgtcaattccacgccaagcaaatccatcagccggcccaggccctgcagaccatactactttcgtggccatttgctgtctggggactcgatatcctgggaccgtttaggcgggccccgggcgggtttgagtatctgtatgtcgcgatcgacaggttcactaagtggcccgaggcttatccggtcgtcaagatcgataagcactccgcacttaaattcattaagggcatcacggcccggtttggagtgcctaaccgtattattacggataatggcacccaattcactagtgaactcttcggcgactactgcgaagacatgggcatcaagctctgcttcgcctcacctgcccaccccagaagcaatggccaagtggagcgcgccaatgcggaaatcctcaaaggccttaaaaccaagaccttcaacatactcaagaagcacggcgattcatggatcgaggagttgccagcggtgctctgggcaaaccgaactacaccaagccgagcaaccagggaaacgcctttcttcctcgtctacggcgcggaagcggttctcccatccgagctcaccctgaggtctcctcgggctaccatgtattgcgaggctgatcaaaatcagcttcgcagagatgacctcgactacttggaagagcgaaggcggcgcgcggccctccgagccgcgcgctaccagcagagcctgcggcgctaccatcagcgccacgtccgggcccgatcactctgcgtcgacgacctcgtcctacgccgcgtccaaatgcgtgctggattgagcaagctttcaccaatgtgggagggtccgtatcgagtggtcggcgtcccccggccgggctccatacggctggccacgggcgacggcactgagctgcctaacccgtggaacatcgaacaccttcgtcgcttctacccctga

SEQ ID NO: 68177 - DNA, 693 bp, Oryza sativa
  Clone ID: PAT_MRT4530_68965C.1
atggcagggcgaaacaaccacgagctcaagctgctgggcacatggccgagcccgttcgtcgtcagggtgaggctcgcgctcggcctcaagggcctgagctacgagtacgtcgagcaggacatcagggacaagagcgagctcctcgtcgtctccaacccggtgcacaagaaggtgcccgtgctcatccacggcggcaagcccgtctgcgagtcgcagatcatcgtgcagtacatcgacgaggcgttccccggcgccggcgcctccctcctcccctccgatccccacgaacgcgctgtcgcccgcttctgggccacctacatcgatgacgagtttgctacgaagttccgagcaatgggagaagcgaaggaggaggaggagaaggacgaggcggcggcgcaggtgttcgccgcgctggagaccttggaggaagccatgaaggggaaggtcttcttcggcggcgacagcgcggggtacgtggacgtggcgctcggtgggttcctggggtggatcaaggcggcggaggcgttggccggcgtcgcgttcctcgacggggcccggacgccgctcctggccgcttgggcggcgcggttctccgcgctggaggccgccaaggaggcgatacccagcgtcgagcggctgcgcgagtttcacggggcgatgcacgccgccgccgccacggtcgccggaaattga

SEQ ID NO: 68178 - DNA, 5772 bp, Oryza sativa
  Clone ID: PAT_MRT4530_68966C.1
atggccgagccggcaaaggcgcacgacctctccccgagtatgagcggtgacgacggggagccaaacccacgccgtcgagctcgtactccaccgccccctccacgccaaagtcctaggcgggagaaggcgctcgagagggccgaaggatccgcgacttcgacgcccacaggaggtggagaagggcggcgagatggggagcgtcgcctcctcgtctacggcgacggcagcacgccccagggcgcgctccaagctgcgggcgcgctcctacgtcacccgcccgtcgcccatgacccggagtctccagcccaacgttggctggacgatgtggccaaattggtcatgactgcacggcagcgcctagatgctggtgggcggtcctccgccaccaaggcctctggtgctgctaccaccggctccgcgtcgtcaagacggagggcgcggcgagcggcagccgctgttcgccattcggccgccactccttcgtcaacgcctccgacccgggaagatctgcgtggggaaccggatgcccgcatcagtatcgagcgccggcgtaatggccgacgtgctccccacgcaacggagggcgcctcctcgtccggagtgtcacctcaccacggacgcggggatcagccctccgtgcccccggttggtggtgtcggctgtagagcctttgtggcgagccttcggaatgtccgttggcccccaaggttccggcccaccatcgccgaaaaatatgacgggagcgtcaaccccgccgagtttctccaggtctacacgaccgggatcgaggccgccgggggtgacgacagggtcatggcgaatttctttcccatggccctgaaaggacaggcgcggggttggctaatgaacttgccacccgcgtctgtccactcttgggaggatttgtgccaacagttcaccatgaacttccaaggcacatatccgcgcccaggtgaggaagcggacttgcacgcagtacagcgaagggatgatgagtcacttcgctcgtacattcagcggttctgtcaagtccgcaacaccataccatgcatccctgcacacgcggtgatttacgcgttcagggggggtgtgcggcacaaccgcatgctcgaaaagatcgcctccaaagagccccagactaccgcggagctttttcagctcgcggaccgagtggctcgtaaggaggaggcatggacctggaacccctccggttccggtgtggcagcttcggccgcccccggatccgccgctcagatagggcggcgtgacaggaggaggaagaagaggtcagcccataccgacgacgagggtcatgtcctcgccgtcgagggcgcttcgcgggccacccgaaaggggaggcctgcgggaggcaaaaagaacgaggccggcgctcccaacagggagcgcccaaccggcaagtggtgcaccgtccacaacacttcccttcacgacctcgcggactgccgtgcagtcaaaagtttggctgagcagacgaggaagtgggaggaggagaggaggcaggagcgccgagagggcaaatccccggcgtttccttccggtaatcggcgaagtgaggccaagcagaaggccctcgccgaggacatcgatgacggcgatgatgacctaggtttccaagagcctggggccaccattgccaccgtcgatgggggagcgtgtgctcacgtttctcgccggagcttcaaggccatgaagcgagagcttctggccgcggcccctactcatgaggcgacgtgtcgggcgcggtggtcggaggttgccctcaccttcgaccagaccgaccacccaccgtgcgttgcccggggagggcagattgcgatggggcgtgtcctcattgatgggggagcggccctcaacatcctttcccctgcggcctttgacgccatcaaggccccggggatggtgctccggccgtcccagccaattatcggtgtgacgccggggcacacgtggccgttaggtcacatcgacctaccggtcaccttcggtggatccgccaacttccgcacggagcgggtgaacttcgatgtggcggacctcagtctgccctacaacgcggtcctagggaggcccgcgttggtgaagttcatggcggcggtccactacgcctacctacagatgaagatgccgggccgcggtggccccatctctgtccatggcgacctcaaagtcgcgctcgcttgtctggagcagcgcgcggaccacctcgccgctgcgtacaagcccgagggtggcgacgagaggcttggcgcctccgcccccgccaccccgaggcagcggatgatcacaggcgacgaggtcccggaagacgcgctcgtctccttcctgcgggcaaacgctgacgtcttcgcatggagaccggtggatatgcccggggtccccagggaggtgattgagcaccgtctcgccgtgcggccgggcgcaaggccggtccggcagaaagtgcggcggcaggccccggaacgtcaagccttcatccgcgaggaggtggcgcgacttctggaggccggattcatccgtgaggtcttccatccagagtggctggcgaacccggtggtcgttcccaaggcgaacggcaagcttcggatgtgcatcgactacaccgaccttaacaaggcatgtcctaaggatccttaccccctgcctcgcatagatcagattgtcgactccactgcggggtgcgaccttttgtgttttctagatgcatactctggttaccatcagattcgcatggctagggaggatgaggaaaaaactacgttcattacccccataggaacctattgttatacgacaatgcccttcgggttaaagaatgcaggtcctacttttcaacgtactactcgaatttctttgggtagccaattaggacgtaatgttgaggcttatgtcgatgacttggttgtaaagacgcgcaaccaggaaacgttactctcagatctagcggaaacttttgagagtctccgctccgcccgcataaaactaaaccccgataagtgtgtgttcggtgtacctgcgggcaagcttctcgggttcttggtctctgcccgaggcattgaggccaaccccgagaagatacgggctatagagcggatgcgccccccagcaaacttagggatgtgcaatgcgtcaccgccagacgagcccttgttactctacttagcggcgaccccgcaagtagttagtgcggcattggttgtggagcgcgatgaggacaattctcatttcacgcctccccaccctgtgccgacttggcccgggagagagcagggaggagaggctcccgagccgaacggtggcccagggcccccgacgaccggagttggccctctgcccgcttgtcagacggtgctaggagcccccgacccccaggaaggccctgaggccactgtgggaaggccgcacctatcgccctttgaccccgaggctaaccctgtgctgactcgacccgggaaagagcagggagaagaggcccccgagccgaacggaggcctaaggcccctgacgaccggagttggccctttgcccgcttgtccgacgacgccaggagcccccgacccccaggacggccccgaagccactgtgggaaggcggcccttgttatcctccgactccgaggtcatcagcacagaagacaagtgcgccccgcgaggctgcttggacgaagagtgccccagggatgcggcccctagcgaagaggatcggccccaccgaaaggtgcagcggcccgtctactttgttagtgaggccctccgggacgccaaaacccgataccctcaggcccagaagatgctttacgctattctgatggcctcgaggaaactgcgccattatttccaggcgcatcgggtcacagtagttacgtcttaccccctcggtcaaatcttgcataatcgagagggtacaggacgggtggtgaaatgggcaatcgaactttctgagttcgatttgcactttgaaccacgccacgctatcaagagccaggccctcgccgattttgtggcagagtggaccccggctcccgagcccgtctcgatccccgaggccagcacggacccctcgcagctgcctcacaccacccactgggtgatgcagttcgacggctccctgtctcttcagggcgccggtgcgggggtcacgttgacctctccgagcggagacgtcctcagatacttggtccgcctcgactttcgagcgaccaataatatggcagaatacgagggactccttgccggactaagagtggcagctggactggggatccgccgcctcctggtgttaggcgactcccagctggtcgttaaccaagtctgtaaggagtaccggtgctctgacccgcagatggacgcctacgtgcgccaagtacggcgtatggagcgccattttgacgggattgagcttcggcatgtgcccagacgggataacatgattgccgacgaactctcacggctcgcgtcctcgcgagcccagaccccaccgggcgcctttgaagaaaggcttgcccagccgtcggcgcgacccgaccccttaggggagacggatgcgcctgaccggcccccgaggcccgtcggagtccaggcctcgggacccgaggggagtgctcccaactcccttagattgattgcttggatcgccgagatccaagcatacctcacagataagactctacccgaggaccgcgaagggagtgaacgcgtccatcgcatctccaaacgctacgtgctggtagaagggaccctctatcggcgcgcggctaatggaatcctcctgaagtgcattcctcgggaacaaggcgttgtgcttcttgccgatatccatgaaggcgaatgcggagcccactccgcctcgcgcaccttggttggtaaagcttttcgccagggtttctattggccgacagctcttaatgatgcggtcgacctggtccggcgatgtagagcgcgggccccgggcgggtttgagtatctgtatgtcgcgatcgacaggttcactaagtggctcgaggcttatccggtcgtcaagatcgataagcactccgcacttaaattcattaagggcatcacggcccggtttggagtgcctaaccgtattattacggataatggcacccaattcactagtgaactcttcggcgactactgcgaagacatgggcatcaaactctgcttcgcctcacctgcccaccccagaagcaatggccaagtggagcgcgccaatgcggaaatcctcaaaggccttaaaaccaagaccttcaacatactcaagaagcacggcgattcatggatcgaggagttgccagcagtgctctgggcaaaccgaactacaccaagccgagcaaccggggaaacgcctttcttcctcgtctacggcgcggaagcggttctcccatccgagctcactctgaggtctcctcgggctaccatgtattgcgaggctgatcaagatcagcttcgcagagatgacctcgactacttggaagagcgaaggcggcgcgcggccctccgagccgcgcgctaccagcagagcctgcggcgctaccatcagcgtcacgtccgggcccgatcactctgcgtcgacgacctcgtcctaggccgcgtccaaacgcgtgctggattgagcaagctttcaccaatgtgggagggtccgtatcgagtggtcggcgtcccccggccgggctccatacggctggccacgggcgacggcactgagctgcctaacccgtggaacatcgaacaccctcgtcgcttctacccctga

SEQ ID NO: 68179 - DNA, 5967 bp, Oryza sativa
  Clone ID: PAT_MRT4530_68967C.1
atggccgagccagcaaaggcgcacgacctctccccgagtatgagcggtgacgacggggagccaaacccacgccgtcgagctcgtactccaccgccccctccacgccaaagtcctaggcgggagaaggcgctcgagagggccgaaggatccgcgacttcgacacccacaggaggtggagaagggcggcgagatggggagcgtcgcctcctcgtctacggcgacggcagcacgccccagggcgcgctccaagctgcaggcgcgctcctacgtcacccgcccgtcgcccatgacccggagtctccagcccaacgttggctggacgatgtggccaaattggtcatgactgcacggcagcgcctagatgctggtgggcggtcctccgccaccaaggcctctggtgctgctaccaccggctccgcatcatcaagacggagggcgcggcgagcggcagccgctgttcgccattcggccgccactccttcgtcaacgcctccgacccgggaagatctgcgtggggaaccggatgctcgcatcagtatcgagcgccggcgtaatggccgacgtgctccccacgcaacggagggcgcctcctcgtccggagtgtcacctcaccacggacgcggggatcagccctccgtgcccccggttggtggtgtcggctgtagagcctttgtggcgagccttcggaatgtccgttggcccccaagtttccggcccaccatcgccgaaaaatatgacgggagcgtcaaccccgccgagtttctccaggtctacacgaccgggatcgaggccgtcgggggtgacgacagggtcatggcgaatttctttcccatggccctgaaaggacaagcgcggggttggctaatgaacttgccacccgcgtctgtccactcttgggaggatttgtgccaacagttcaccatgaacttccaaggcacatatccgcgcccaggtgaggaagcggacttgcacgcagtacagcgaagggatgatgagtcacttcgctcgtacattcagcggttctgtcaagtccgcaacaccataccatgcatccctgcgcacgcggtgatttacgcgttcagggggggtgtgcggcacaaccgcatgcttgaaaagatcgcctccaaggagccccagactaccgcggagctttttcagctcgcggaccgagtggctcgtaaggaggaggcatggacctggaacccctccggttccggtgtggcagcttcggccgcccccggatccgccgctcagatagggcggcgtgacaggaggaggaagaagaggtcagcccataccgacgacgagggtcatgtcctcgccgtcgagggcgcttcgcgggccacccgaaaggggaggcctgcgggaggcaaaaagaacgaggccggcgctcccaacagggagcgcccaaccggcaagtggtgcaccgtccacaacacttcccttcacgacctcgcggactgccgtgcagtcaaaagtttggctgagcggacgaggaagtgggaggaggagaggaggcaggagcgccgagagggcaaatccccggcggttccttccggtttccaagagcttggggccaccattgccaccgtcgatgggggagcgtgtgctcacgtttctcgccggagcttcaaggccatgaagcgagagcttctggccgcggcccctactcatgaggcgacgtgtcgggcgcggtggtcggaggttgccctcaccttcgaccagaccgaccacccaccgtgcgttgcccggggagggcagattgcgatggtggtttctcccaccgtttgcaacgtgaagttggggcgtgtcctcattgatgggggagcggccctcaatatcctttcccctgcggcctttgacgccatcaaggccccggggatggtgctccggccgtcccagccaattatcggtgtgacgccggggcacacgtggccgttaggtcacatcgacctaccggtcaccttcggtggatccgccaacttccgcacggagcgggtgaacttcgatgtggcggacctcagtctgccctacaacgcggtcctggggaggcccgcgttggtgaagttcatggcggcggtccactacgcctacctacagatgaagatgccgggccccggtggccccatctctgtccatggcgacctcaaagtcgcgctcgcttgtctggagcagcgcgcggaccacctcgccgctgcatccaagcccgagggtggcgacgagaggcttggcgcttccgcccccgccaccccgaggcaacggatgatcacaggcgacgaggtcccggaagacgcgctcgtctccttcctgcgggcaaacgctgacgtcttcgcatggagaccggcggatatgcccggggtccccagggaggtgattgagcaccgtctcgccgtgcggccgggcgcaaggccggtccggcagaaagtgcggcggcaggccccggaacgtcaagccttcatccgcgaggaggtggcgcgacttctggaagccggattcatccgtgaggtcatccatccggagtggctggcgaacccggtggtcgttcccaaggcgaacggcaagcttcggatgtgcatcgactacaccgaccttaacaaggcatgtcctaaggatccttaccccctgcctcgcatagatcagattgtcgactccactgcggggtgcgaccttttgtgttttctagatgcatactctggttaccatcagattcgcatggctagggaggatgaggaaaaaactgcgttcattacccccataggaacctattgttatacgacaatgcccttcgggttaaagaatgcaggacgtaatgttgaggcttatgtcgatgacttggttgtaaagacgcgcaaccaggaaatgttactctcagatctagcggaaacttttgagagtctccgctccgcccgcataaaactaaaccccgataagtgtgtgttcggtatacctgcgggcaagcttctagggttcttggtctctgcccgaggcattgaggccaaccctgagaagatatgggctatagagcggatgcgcccccccagcaaacttagggatgtgcaatgcgtcaccggttgcatggccgccctaagtcggttcatatcgaggctgggagagaaggcgttacccttatttaagcttctcaaacgctccggaccgtttacctggacggaggaagccgaaaatgccctcacccagttgaaggcgtatctaagctctcccccagttctggtcgccccggagccagacgagcccttgttactctacttagcggcgaccccgcaagtagttagtgcggcattggttgtggagcgcgatgagaacaattctcatttcacgcttccccaccctgtgccgacttggcccgggagagagcagggaggagaggctcccgagccgaacggtggcccaaggcccccgacgaccggagttggccctctgcccgcttgtcagacggtgctaggagcccccgacccccaggaaggccctgaggccactgtgggaaggccgcacctatcgcccttcgaccccgaggctaaccctgtgctgacccgacccgggaaagagcagggagaagaggcccccgagccgaacggaggcctaaggcccctgacgaccggagttggccctttgcccgctttttcgacgacgccaggagcccccgacccccaggacggccccgaagccactgtgggaaggccgcccctgttatcctccgaccccgaggtcatcagcacagaagataagtgtgccccgcgaggctgcttggacgaagagtgccccagggatgcggcccctagcgaagaggatcggccccaccgaaaggcgcatcgggtcacagtagttacgtcttaccccctcggtcaaatcttgcataatcgagagggtacaggacgggtggtgaaatgggcaatcgaactttctgagttcgatttgcactttgaaccacgccacgctatcaagagccaggccctcgccgattttgtggcagagtggaccccggctcccgagcccgtctcgatccccgaggccagctcgggcccctcgcagccgcctcacaccgcccactgggtgatgcagttcgacggctccctgtctcttcagggcgccggtgcgggggtcacgttgacctctccgagcggagacgtcctcagatacttggtccgcctcgactttcgagcgaccaataatatggcagaatacgagggactccttgccggactaagagtggcagctggactggggatccgccgcctcctggtgttaggcgactcccagctggtcgttaaccaagtctgtaaggagtaccggtgctctgacccgcagatggacgcctacgtgcgccaagtacggtgtatggagcgccattttgacgggattgagcttcggcatgtgcccagacgggataacatgattgccgacgaactctcacggctcgcgtcctcgcgagcccagaccccaccgggcgcctttgaagaaaggcttgcccagccgtcggcgcgacccgaccccttaggggagacggatgcgcctgaccggcccccgagacctgtcggagtccaggcctcgggacccgaggggagtgctcccaactcccttagattgattgcttggatcgccgagatccaagcatacctcacagataagactctacccgaggaccgcgaagggagtgaacgcgtccatcgcatctccaaacgctacgtgctggtagaagggaccctctatcggcgcgcggctaatggaatcctcctgaagtgcattcctcgggaacaaggcgttgtgcttcttgccgatatccatgaaggcgaatgcggagcccactccgcctcgcgcaccttggttggtaaagcttttcgccagggtttctattggccgacagctcttaatgatgcggtcgacctagtccggcgatgtagagcgtgtcaattccacgccaagcaaatccatcagccggcccaggccctgcagaccataccactttcgtggccatttgctgtctggggactcgatatcctgggaccgtttaggcgggccccgggcgggtttgagtatctgtatgtcgcgatcgacaggttcactaagtggcccgaggcttatccggtcgtcaagatcgataagcactccgcacttaaattcattaagggcatcacggcccggtttggagtgcctaaccgtattattacggataatggcacccaattcactagtgaactcttcggcgactactgcgaagacatgggcatcaagctctgcttcgcctcacctgcccaccccagaagcaatggccaagtggagcgcgccaatgcggaaatcctcaaaggccttaaaaccaaaaccttcaacatactcaagaagcacggcgattcatggatcgaggagttgccagcggtgctctgggcaaaccgaactacaccaagccgagcaaccggggaaacgcctttcttcctcgtctacggcgcggaagcggttctcccatccgagctcaccctgaggtctcctcgggctaccatgtattgcgaggttgatcaaaatcagcttcgcagatatgacctcgactacttggaagagcgaaggcggcgcgcggccctccgagccgcgcgctaccagcagagcctgcggcgctaccatcagcgccacgtccgggcccgatcactctgcgtcgacgacctcgtcctacgccgcgtccaaacgcgtgctggattgagcaagctttcaccaatgtgggagggtccgtatcgagtggtcggcgtcccccgaccgggctccatacggctggccacgggcgacggcactgagctgcttaacccgtggaacatcgaacaccttcgtcgcttctacccctggggggggggtcgggtgtcaggtttcgggctcgggccaaccccgcacccccctcgggcgtgcagggttggccgggggctacaacatatgcatattcttatttctcttatatctgaatttctataa

SEQ ID NO: 68180 - DNA, 320 bp, Oryza sativa
  Clone ID: PAT_MRT4530_68968C.1
gtggggggccaacaaagcgtaccatatggtaataacagccgcatatggccctggtttattccgcgctatcgctcacataaaaatcataagctgcgtacagcatccgtcatcaaagtcgtgtggcatgaaagcctagtggcacttctcggtcgatgagaaaaccgccctcgtcattgctgctggtgacaccgcgtcgcatgtcgatgttgggtctgttagatgccaaaatgcggagctggtctcttaacggagacctgggtcgccgaatccaaatgggtcattgcttgacgagctattggaccccgacacataacctgatg

SEQ ID NO: 68181 - DNA, 1119 bp, Oryza sativa
  Clone ID: PAT_MRT4530_68969C.1
atgaacttccagggcacatatccgcgccaagctccggccgccaacgggtccgccgctcggtcagggcggcgggactggagtaggaagaagaggtcggcctatttcgacggcgaggggcacgtcctggccgtcgagggcgcttcctgggcctcccaaaaggggaggcctgcgagcgacagaaataaggaggccggtgctcccagcagggagcgcccgactggcaagtggtgctccgtgcacaactcctccttccacgacctcgcggactgccgcgcggagcctcaggctactgtcgccaccgtcgatgggggagcgtgcgctcatgcttctcgccggagcctcaaggccgtgaagcgagagcttctggccgcggcccctacccatgaggcgacgcggcgggcgcgatggtcggaggtggccctcaccttcgaccagaccgaccacccgccgtgcgttgcccggggaggacagatcgcgatggtggtttcccccaccatttgcaatgtgaaattgaggcgtgtcctcatagacgggagtgcagccctcaacatcctttcccccgcagcctttgacgcaatcaaggccccggggatggtgctccggccgtcccagccgatcatcggtgtgacgccggggcacacgtggccgttaggtcacatcgacctaccggtcaccttcggtggatccgccaacttccgcacggagcgggtgaacttcgatgtggcggacctcagtctgccctacaacgcggtcctgggaaggcccgcgttggtgaagttcatgccggcggtccactacgcctacctacagatgaagatgtcgggccccggtggccccatctctgtccatggcgacctcaaagtcgcgctcgcttgtctggagcagcgcacggaccacctcgccgctgcatccgagcccgagggtggcgacgagaggcttggcgcctccgcccccgccaccccgaggcagcggatgatcacaggcaacgaggtcccggtcaaggaggttgccttgggcgacggcccgtccaagaccacgcgctcgtctccttcctgcgggcaaacgctgacgtcttcgcatggagaccggcggatatgcccggggtccccaggaaggtga

SEQ ID NO: 68182 - DNA, 300 bp, Oryza sativa
  Clone ID: PAT_MRT4530_6896C.1
ctaactgaccgattccttcttgctgttctgcttttcctccaagtccttgagcgctcgatccatccgcttcagctcagcggagatgtactcgatgcgcttcttgacgttggccttcgcctccgcgagatcctgcttgaccagcaccggcccgatcagcttgtacacgttcgcctcgtcattcaccagctccagctcctggatggtgtactgcttgcggacctggtggttcttggagatgtctgcgaggccgccgttgatgcttgccccgtctgcgccaccaccaagattgcctccgtccat

SEQ ID NO: 68183 - DNA, 2916 bp, Oryza sativa
  Clone ID: PAT_MRT4530_68970C.1
atgttgtgtgaagaagggcgagcatgtagattgctaagctgacacgtggtggacaagaatgaccgacgtgactggactgataccgatcatgtcgtcagcagacagccacgattccacgtcgcgcctgcttccggcggaagtggaggtagatacagagagcttagaatctctccctgagtccccggccgaaccggcaaaggggggcctgcgcggtctcccggtgaggagccccacactccgtcatctggcgcgccagcttttcctgttcagcccaatggccgagccagcaaaggcgcacgacctctccccgagtatgagcggtgacgacggggagccaaacccacgccgtcgagctcgtactccaccgccacctccacgccaaagtcctaggcgggagaaggcgctcgagagggccgaaggatccgcgacttcgacatccacaggaggtggagaagggcggcgagatggggagcgtcgcctcctcgtctacggcgacggcagcacgccccagggcgcgctccaagctgcgggcgcgctcctacgtcacccgcccgtcgcccatgacccggagtctccagcccaacgttggctggacgatgtggccaaattggtcatgactgcacggcagcgcctagatgctggtgggcggtcctccgccaccaaggcctctggtgctgctaccaccggctccgcatcgtcaagacggagggcgcggcgagcggcagccgctgttcgccattcggccgccactccttcgtcaacgcctccgacccgggaagatctgcgtggggaaccggatgctcgcatcagtatcgagcgccggcgtaatggccgacgtgctccccacgcaacggagggcgcctcctcgtccggagtgtcacctcaccacggacgcggggatcagccctccgtgcccccggttggtggtgtcggctgtagagcctttgtggcgagccttcggaatgtccgttagcccccaaggttccggcccaccatcgccgaaaaatatgacgggagcgtcaaccccgccgagtttctccaggtctacacgaccgggatcgaggccgccgggggtgacgacagggtcatggcgaatttctttcccatggccctgaaaggacaagcgcggggttggctaatgaacttgccacccgcgtctgtccactcttgggaggatttgtgccaatagttcaccatgaactttcaaggcacatatccgcgcccaggtgaagaagcggacttgcacgcagtacagcgaagggatgatgagtcacttcgctcatacattcagcggttctgtcaagtccacaacaccataccatgcatccctgcacacgcggtgatctacgcgttcagggggggtgtgcggcacaaccgcatgctcgaaaagatcgcctccaaggagccccagactaccgcagagctttttcagctcgcggaccgagtggctcgtaaggaggaggcatggacctggaacccctccggttccggtgtggcagcttcggccgcccccggatccgctgctcagacagggcggcgtgacaggaggaggaagaagaggtcagcccataccgacgacgagggtcatctcctcgccgtcgagggcgcttcgcgggccacccgaaaggggaggcctgcgagcgacaaaaagaaggaagccgacgctccctgacctcggctacttgaaagagcgaaggtggcgcgcggcccttcgagccgcgcgcaaccagcagagcctgcggcgctaccatcagcgccacgtccgggcccgatcactctgcgtcgacgacctcgtcctacgccgcgttcaaacgcgtgctggattgagcaagctctcaccaatgtgggagggtccgtatcgagtgatcggcgtcccccggccgggctccgttcggctggccacgggtgacggcacagagttgcctaacccgtggaacatcgaacaccttcgtcgcttctacccctacctcgccgtcgctgtcgtccgcaccatcgtcaccacattcctcatcagagttgaaggcaaacgcgagcccagcggccgctcattattgtcggttggttttcccttgccgatgcgcgtgatttgcgaccgctgggattccgcccgaagagagagcagggaggagaggcccccgagccgaacggtggcccaaagcccccgacggccggagctggccctccgcctgcttgtccgatggtgacaggcgcccccgacccccaggatggccccgaggccactgcgggaaggccgcgcctgtcgccctccgaccccgaggttgtcggcacagaagccgagtgtgtcccgcgcggcctctcggacgaagagcgccctggagacgtggcccctagcgaagaggatcggccccgccgaaaggtgtagcggcccgtctccttcgttagcgaggccctccgggacgccaagacccgataccctcaggcccagaagatgctttacgctattctaatggcttcgaggaaggcgccgcgtgtatgggttaggtgagcacagtggggctcacctaaccacatttattgcgcaggcttcatcctaaccattacaggcaagatgttgtgtgaagaagggcgagcatgtagattgctaagctgacacgtggtggataagaatgaccgacgtgactggactgataccggtcatgtcgtcagcagacagccacgattccacgttgtaacgccccgattttcgttcggagatctcccaaaacacaggagtagggtattacgcttctcagcggcccgaacctgtatacatcgcccgtgtcttgtgtgtttcctgtctcgcgaaccttctacatacagagagcttagaatctcaccctgagtccccggccgaaccggcaaaggggggcctgcgcggtcccccggtgaggagccccacgctccgtcaacattgta

SEQ ID NO: 68184 - DNA, 180 bp, Oryza sativa
  Clone ID: PAT_MRT4530_68971C.1
atgtcccgccccaacgtcgactacctctacaccaagctcaccgccgccatcgccaaggaggacgccgccctccgagctgccatccccgtccgccagcacgtcgccgtctgtgtccgatgcctcgccatgggggagccactcagtaacaggacgcggcccagttacgcgtggggagcatga

SEQ ID NO: 68185 - DNA, 338 bp, Oryza sativa
  Clone ID: PAT_MRT4530_68972C.1
ttttttttttttttttttttgccaagaaaattaattaattccatcgagcgacgagatgtctaatcgctactacaaaaataaatccaaagcagcgtatacgtacttgtacaggagagggacacaacgcgcacccccctctctcgccgcgccaatgccggtgtcgcccgcgcgcccgcgcgcgagagcgagagctttgccggtggcgcgtccccgtcaatcacatcaacctagctagagctagctagctaactcccccccaattaatccccaccccccaagcatgcgcgaaattggacattgatcggcctgtgcacgcacgcacgcgcgtacaggagggg

SEQ ID NO: 68186 - DNA, 1311 bp, Oryza sativa
  Clone ID: PAT_MRT4530_68973C.1
atgtcatccagcactgctgccatactagccctcgtcatcatcctcctcccgccgataactctcgccggcgatcttcatggcttccgcgccactcttactcgcatccacgagctctcccccggcaaatactcggaagcggtacgccgcgacagccaccgcatcgcttttctctccgacgccaccgcagccggcaaggccaccaccaccaactcgtcggtcagtttccaggcactgcttgagaacggcgtgggagggtacaacatgaacatctccgtcggcacgccgctactcaccttctcggtcgtggccgacaccggcagtgacctcatctggacgcagtgcgcgccgtgcaccaaatgcttccagcagcctgcgccgccattccagccggcgagctcctccaccttctccaagctcccgtgcaccagctccttctgccagttcctacccaactccatccgcacgtgcaacgccaccggctgcgtctacaactacaagtacggcagcggctacaccgcgggctacctcgccaccgagacgctcaaagtcggggacgcctctttccccagcgtcgcgttcgggtgcagcacggagaacggcgtgggcaactcgacgtcgggcatcgcgggtcttggccgcggcgcgctgtccctcataccgcagctcggcgtcggccggttctcgtactgcctccgctccggctctgccgccggcgccagcccgatactgttcggctccctggccaatcttacggacggaaatgtccagtcgacgccgttcgtcaacaaccccgcggtacacccctcgtactactacgtcaacctcaccggcatcaccgtcggtgagacggacctcccggtgacgaccagcacgttcggcttcacgcagaacggcctcggcggcggcacgatcgtggactccggcaccacgctcacgtacctcgccaaagacggctacgagatggtgaagcaggccttcctgtcccagacggctgacgtgaccacggtgaacggcacgcgcggcttggacctgtgcttcaagagtaccggcggcggcggcggcggcataaccgtgccgagtctggtgctgcgcttcgatggcggagctgagtacgccgtgccaacttacttcgccggagttgagacggactcgcagggcagtgtgaccgtagcgtgcttgatgatgctgccggcgaagggtgaccagccgatgtctgtcataggcaacgtgatgcagatggacatgcacctgctctacgatctcgacggcgggattttctccttcgctccggcggattgcgccaaagtgtga

SEQ ID NO: 68187 - DNA, 408 bp, Oryza sativa
  Clone ID: PAT_MRT4530_68974C.1
atggcggaaatttggggggaagaacccgtcgatgcgcctgaggggtggggtgggggtggtaggggaggggagggggtagtggcggcgattaggacgacatcaagtcggagtcggccggaatcgatggcggctttgatggaaggattttggatcgggatcggaagagagttggatggagaggcgctccgggatagggagctgctcctccgccggcctaggctgctgggcattgaggcctcggaggccggcctgatgcggcggccgactgctccggatcaagcgatgcaagcagcggcgacgatggagtctctttctcttttttttttggataaggcagcgatggagtcgagactggggatcgcatcggccgcgggaggaactgagaaagtcacgggaggttgggggtag

SEQ ID NO: 68188 - DNA, 852 bp, Oryza sativa
  Clone ID: PAT_MRT4530_68975C.1
atggcggcagacggggcacacggacggtggcggcgaggacggcggcgtggccgcctggccggcgctagagcggctcgacctccacaccccagcgaacgtggcaatggcaggagtggcgtcggactcgttcccgtcggcatcgcggccatcgccagcggctgcagcggcggaccggcggaccaggacgacgccgtcggtgatgaagagtacctgaggcggaggcggcagctggcgcgggacaggacgcgggggatcacccttatcccccgctgcctcgtctcgcgcgaccgcctcctcatctcgcgccgccgcctaccgcccgccgcctccgcccaccgcctccgcctcgctcacgccgctacctcgcttgcactgccgcccaccgcccacccccgcgcgctgtctcctcatctcgcgccgtcgcctaccgcccgtccccgcccgctgcctccgcctcgctcgctcgtgctgccgcccaccacccacccccgcctgccgcctccgcctcactcacgccgccgcccaccgcccacccctgcccgccgcctccgcctcgctcgcgccgccgcccaccgcacgcccccgcacgccgcctccgcctcatctcgcgccgccgctcaccgcccgcccccgcgcgctgcctcggcctcgctcgcgccattgcctcgcttgcgctgccgctgccgccgccgcctcgctcgcgccgccgcctcgtctcgcgtcgccgcctcctcatcttgcgccgccgcccactgcccgcctccgcgcgccgcctcctcatctcgcgccgccgcccaccgcccgcccccgcgctgcctccgcctcgctcacgccctgccttgctcgtcgtga

SEQ ID NO: 68189 - DNA, 416 bp, Oryza sativa
  unsure (1)..(416): unsure at all n locations
  Clone ID: PAT_MRT4530_68976C.1
atgccctacattcaatggtgtgcagtttaaaggcgatttctacagcaatttgaaaccttctggagcaagaaagtnctttataaatcatggccgcggctnncatnaaactttcaacggcaaaacatttccttttgtatgaattattattcttttcccttttcaattaatcctataatttttttttcccttatatataatttttattaattttttttttttttacattattttattttttattataaatttattttttaataaattttttattttcatttttttatttttctctttctatttgtggtgtgttttctttttccttattttttccttctttttttattatctttttccttatttaattttttctttattttatcttatctttttttttatttaatattttttatttttat

SEQ ID NO: 68190 - DNA, 223 bp, Oryza sativa
  Clone ID: PAT_MRT4530_68977C.1
ggatccccgggctgcaggaattcggcacgaggtgcccgcaactgtgcagactttcattttgaattatgctgatttctgaggtgtggtgagaccataggagttggaagaaaatttttgcacaaccatgagggtcaatcttaggctgctcatgcccctgttggcgcaatcacaccacgccaacttgggccactctggttgcgggattcttcatgctgctctctct

SEQ ID NO: 68191 - DNA, 352 bp, Oryza sativa
  Clone ID: PAT_MRT4530_68978C.1
ctttcttttttttttttttttagataaaaaacaaaacttggggggtaacaatatggaaggcacatatctatatccataatcaccattaaacaaacaaaaatattttttcccaaacttttgaataaatctttctctaccacaacaaatccaaagattttcaaacaaactagtacattaacaaaacaaacattaaaataaccatcaccttcaaaattcacccaccttaccttttttcaaaacttttgctacacttacaaaactttaatcaattaacaggcttattctcaactttttaagaataatactcttttccattatccacatctttaatattgcccccaacctccatctc

SEQ ID NO: 68192 - DNA, 304 bp, Oryza sativa
  Clone ID: PAT_MRT4530_68979C.1
agcggatttgtttcggatgtgggaaatgatgcggaatcagttcggaaatggattaaatttatcggatgttataagtatcggataatccgcatccaccggattttagagatattatatcatcatctgtatttgcatcatactatccacatccacatccatatctgccgtatttctaaaaacccataccatatactcgtttcgaacggattcggagcggatcggatcggatattatccgatccgttttcaccccacatcgattctttgtgcatgaattttcttctcaatggcatagactttgcaag

SEQ ID NO: 68193 - DNA, 6261 bp, Oryza sativa
  Clone ID: PAT_MRT4530_6897C.1
tacatagaatttacataattgatcaatgttccaagaatatgccaactcacgaccatcgccgtctgcaatcttgaatgcgcctggccgcaaaacttgtgtgatcgtgtacggtccttcccatttgggtgagagcttgtttcgccctgcttggatttgaaccagtcggaggacgtaatcgccgatcgaaagcgtgcgtgctcggatgcgcttctcgtgataacggcgaagggcctgttggtagctggctgctccaacagcaactcgttcgcgatgttcctcgagtagattcacatcatcatttcgctgctcctcctgatcctcatcggagtacttctgtactcgtttactttgatgtcgtagcttggtggggagcatggcctctgaaccgtacacgaggaagaagggtgtctccttgttagacgttgtcggtgtggtacgcacggcccatagtagggtcttgattccttgtagtactatgccgtttgctctctcgacctatccattgctctgagggtgagaaactgaggcgaagcagatcttgactcccagcctgatgtagtaatcctggaaatcggcactgatgaactgggagccgttgtccgttatgatacggtgaggcaatccgaatatgcaaaatatccctttgatgaatttgatggcgttgtcggccttgatttcccccgtgggtgtcgcttcaatccacttagtgaatttgtcgatcgccacgaataggaacctgtagccctatcctcgtgggaatggcctgagtatgtctagcccccagcacgagaacggccaagtaagagggatagtctggagtgcttgcactggtagctttgtgtgtttccatgtcgcaggcgtctttgagggcggttggccagaaaaatccttgtcgaaaagcttttccgaccaatgtccgaccggcggcgtgtgacccacagatcccttcatgtatgtcgaggaggagatgtctactgtcgtcggacgagacgcattttaggagtaccccgtttggtgccttcttgtatagatcgttgccgatcatacagttgatttttgctttatgggttatttttttggcttctgcgtcgtcctcgggcaactcttcgctgcctatgaatttaatgagtggggtgcgccggtcgtctgtggtctcgatatcggcaatggcgcgctctacctctgtagcccccgagctgatgttgagggcgaccgggctatcttcgccgcttgcctctttcactgatgggcttgtcaggacgtccagaaaggtaccaggttcgagtggctctcgtctggacgcacgccgtgctagatcatccggctcgatgttatccttgcggtatagatgtcggacctcgatcccatcgaaccttttttccagcttcctgacttctgcgagatacttggataactcggggctagagcatttgtaatctttatgcaccttgttcgcgactagttcggaatcccctttcacaaccagtcgcttgactccaagtgcagctgcagctcttatcccggcgagtagtccttcgtactcggctgtgttattagtcgccctgaagttgaggtgaattgcatgcttgaattgatcttccgaaggtgatgtcaagatgaatcatgcccctgctccttggctgttgagcgcgccgtcgaacgccattatccacgtttcgttgtcgatttggttgtctgacctgttatcaggcatagtccaatcagctacgaagtcagcgagtacctgggacttgatggctgttcgtggcacaaagtggacatcaaactggcttagctcgactacccatttcgcaatgcggccaacaacgtctttgtttctcacgacttcaccgagagggaaggaggatacaactgtgaccctgtgggcttggaagtagtggcgtaactttcttgatgtcatgattaccgcgtagagcagtttttggatctatggatatcttgtgtttgcgtcgtggagggcttcgctgacgtagtagactgatcgttgcaccttctctctctcgacaacaatgacagtgctaacggaatatggcgtggcggcaatatagaggaataattcttcattaggttggggggcaacaagtacagggggatttgataggtagcgcttgagtgcaatgaatgcctcttcggcttcctgtgtccatacaaatttgtcttgcttcttcagcagagcgaagaaaggttgtcctcgctctcccatcctagcgacgaacctgcttggtgccgccatgcatccggttagtttctgtacttccttgagtcttgtaggcgacttcatgttctcgattgccttgatcttctcgggatttgcttctattcctctgccagagacgaggaaaccgagcagcttgcccgatggtactccgaacgtgcacttctctggattgagcatgaggcgatatcgtccgaggttgtcgaacgtttcctgcagatcgtcaatcaatgagtcacttgtcctggtcttgacaacaatgtcatcgacgttggcctcgacattgtttccgagttggtcgctaagtgcgccctggaccgtgcactggaaagtgtttcctgcggttattagtccgaacggcatcttaacgtagcagaataccccgaacggcgtaatgagtgccgtcttctcctcgtcctctttcgccatgctgatttggtggtagccggagtaagcgtcgagaaagctcagcaactcacaaccggctgttcagtccaccagttggtctattcgaggaagagggaagtgattcttgggacacgccttgttgaggtcggtaaaatagacacacattctccatttcccgttgaccttccgcaccatgactgggttggctagccactctggatggagtacctctctgataaaaccagctttgagaagcttgtcgagttcttctcgtatggcttgttttcgatctggtgcaaatctcacgcagtttttgctttactggcttggcgtccggtcgcaccatgagtttgtgctcaatcacctccctggatacccccagcatgtcggacggctgccaagcgaacacatcagcattgtcgcggaggaaggtgatgatcgcgagttcggtcttgtcagggttggcactggagagtggaacgattttgattgcaccgtccggtttcgccgtcttgtttgttttgctcactttcttgggtggctcagctgtggtgggtgggctgggcgtgtgctcgaccatgtcgaggctccgcttgtcgcattgcactgccagcttagcattcccttgaatagtgattgttcccttcggtcccggcatcttgagcacttgatacgcgtagtgagatgcggccatgaacttcgcaagtgcaattctcccaatgatagcattgtatgctgtatcgaattcagcgacatcaaaggtgatctgctccgttcggaagttatttgcttggccaaaagtcataggcaacgtaattttgcccaatggtttggacgatgactgaggagtgattccatggaaaggttgatcggtgggtgtcaactcgcttcgtgggatccccatcgcgtccaaagtgctagcgaagagaaggttgattgagctgccgccgtcgatcagaactcgcgcgaccttgatattccgaatagtgggttcgaccacgatcggatatcgccgctgtggaacctccgaagatgtgcgagacatggagatcagagtctgggtatgctgagtccgattcctgagtagccgccttagcgtccttctcggccacacgtactcgcttgcctttttccaatgccatgtgttttgcgagcgactttttgaagatgaggcaatcttctagagagtgtctgtccgacttgtgtatagggcaccatgttttcttcgtgtcgctgctttgtgggtctgggcgcttgggagggtccgcgtattctgttgcgagaacttccgcttgagctttccttttcccactcttgcgatttttcttcttgcttgactcaggtgcgtccttggctggtttcttctctcctccggtctttggtttgtcgttcttgcgtctcagtgcgtcgtccgcgtgagcacatcgatcgacaatttcgaataatctccgagtagtcgtgacacacctcgttgccaactcctgggtagtatagcgatctctgacaccggacttgaaggcgcagattacagaagcgtcggtgatttcggggattgtatttctgcactcattaaagcgttgaacataatccttcaaggattcacccgggttttgtgtcaacgcatataggtcgtcttcgatcgtatggcgcttgtaagttccttggaagttggcaacgaactgctgccataggtctgcccacgaagaaatcgagtagggcgggagatgcatcagccatgaacgcgcagagcctttcaatgcagttggcaaataattcaccaacacgttgtcgtccgctccggcagcgtagagtaccgtggagtaaacctggaggaattcttctgggtcggtactcccatcgtacttctctattgctcctggtcggaatctcttaggccatcggacatcacgtagcgaacaaccgaaagctctacacccagcgctgggggtggtgggttgtcggcgatcgtacgtccttcgtggatgtctatctgatgatgaggatgaggaagatgacgacgatggtgatgggtcgcttggttgcggtgtatgattacgaggacgtcggccgggttctcaagaatcctgtcgtcgtctcccattgttgtctcgacgccgatctccatcgtcgtcgtcattatggcggcgtcctcgaccagtatcgcctagcgcccgccgttcgcgatcgtcgtgatcgtggtggtggtggcggttatcaccgttatcatgacgccgtgaagagacgcgatgtcgggaatggttctcgttgtctcgtgcgcgtcgcgcctctcggcggccattcaggtgatcgcggagatcgctggtgccgcgaggtggagggatggctcgatgaggcgattcccgctgttcagggttttcgccattagcaccgccagttggtggctgttccgggtgcgctgcagcagcggcctcttcgaacgcgttgctgaggttggtcactgattcccgtaaccgttctgtccaccgtgcgagatcgtcgttcagaacgggatcgtagggggtttccgtcagtattgtgttgacggccctgatgtgctgggccagtgtagtcacttgattctccacttccgcattagcgtgcgctgacgtgccgatctcatcgatagccaatacctcgcgcggcgtactcgttgacgatgagccatagtcttcgagcaggtgcaggactgacggttcgtggggatcgatgtcgattaccccaacgaatcggtctgaggttagcgtcgctccttgttccttgtcctcatcactgatggggatacgtgactgctagaccttaggaggtgacgtcttcacggcgctgagaaagaccttgcagcttgagaggtcgtgattctttgtctagtgaataggacagtagacatcacgagttggagaagtatgctgaattccacgctctttgcaggcacgaatttcagcgtggacattgagaaagacccagcaggcttgcaaggtgtgttttctggttttgtggataggacaccaggaccttgtcacctcggaagtgatcctcgtcggctcgtgattcttgtcagaaagacaaggtttggccgcactaggatccttctcgggctcggatgttgtcgacgttcagttctccgctttggcgggaggatccttcgacatggagtcgtcctgggttgtagccactgcgttctcgctttcgatcattgatggaccagccgagatcggcatcgtggcgtaaaccgggaagacgatttcgccgacttgattccacaccagcattgttgaagcaggaactccttggttgaggttggtgttgacgctgttgtcgacgaagctggatgacatagttgtagaaccctgagcaccaagtccccctacctggcgcgccactatcgatggggaatacccgtagaccggatatagagggtactagggtatgctggtacgaggattccgtaggctgtggtggatgtgttggctatgagattcgatgccttaggtcctcccgggggtcccttttatatcgcaggtcaaccggtctccaagtaggactcggagacatcgaacccgacacgatacaatgacgacccagttctgtccgagtatgactccttccatctgtgaactccg

SEQ ID NO: 68194 - DNA, 522 bp, Oryza sativa
  Clone ID: PAT_MRT4530_68980C.1
atgacccccctaagcatggctgatcgccgcccggcctacaacaacaccacaaaggcaagactccaaaaacgatgcccccatggaggtcacgacatcaaggacgccgctatcgcccatctaagaaagatgtggtttccacccaaagagaactcgccaagaaagggggagaggtacccacgacagcgcccccaagagggttacgacactcgaaggtgtagccgttgccggcccggtgatcaccgaaaccctgccgccagctcgctgcatcccaccgctcctcccctgagagctggcccaggccacctccgtcccgccacccgccggcctcctcgccaagttcgaccaaaggagaatccggactggacagtgtcacttcggccgcctgagcttcccctgctgaccagcagccgcctcaacccaaccgaaactccccacaaagaaggggaggagttcaagaagggagagggtgctgactggcaacaaggaagacgacgcaccgccgccagctcccatgagcactga

SEQ ID NO: 68195 - DNA, 272 bp, Oryza sativa
  Clone ID: PAT_MRT4530_68981C.1
attccatcctttcttctcttcaccatcttattggtgttattcacatttggctcagcgagggatccattacatatatgatgacaaatcatcgagctctatatatactccattaatctaagctggacgatccatggacagtaccaaattaaaacgcgactgtaaataactctatctatagagcggtacatatagactagttccacattaccgccacactcatgcttgtcatagctttacctactcgtatatcacgataccatagatgccacaat

SEQ ID NO: 68196 - DNA, 447 bp, Oryza sativa
  Clone ID: PAT_MRT4530_68982C.1
atggcccctgccgcccaagtggagggcggcaaggtggtggcgctggagacctcgggcggcggccggattcggcgttgcaggtctagtgtcagtgctcatgggagctggcggcggtgcgtcgtcttccttgttgccagggaagctcaggcggccgaagtgacactgtccagtccggattctcctttggtcgaacttggcgaggaggccggcgggtggcgggacggaggtggcctgggccagctctcaggggaggagcggtgggatgcagcgagctggcggcagggttctgcggcaagttcagaagtcaaccagcagagaggcgctggtgcggggttccaggcgaaagcctcactcggtgatcaccgggccggcaacggctacaccttcgagtgtcgtaaccctcttgggggcgctgtcgtgggccgggcggcgatcagccatgcttag

SEQ ID NO: 68197 - DNA, 1107 bp, Oryza sativa
  Clone ID: PAT_MRT4530_68983C.1
atggcggaggcggcgggtgatgggggttggccggagccggtggtgagggtgcaggcgctgtcggagagcggggcggcgacgatccccgaccggtacgtgaggccggagacggagcggccgtcgtcgtcgtcggaggcgaacgccgtcgccaacatcaacatcccggtggtggacatgtcgtcgtctccggggacggcggcggcggcggtggcggaggcgtgcagggagtgggggttcttccaggcggtgaaccacggggtgccggcggcgctgctccggcgtgcccgcggcgtgtggcgcgggttcttccagcagccgatggaggtgaagcagcggtacggcaactcgccggcgacgtacgaagggtacggcagccggctcggcgtcgacaagggcgccatcctcgactggggtgactactacttcctccacgtcagaccaccccacctcctctcccctcacaagtggccccacctcccccctgacctcagggagacgacgacagagtacagcgaggaggtgaggaggttatgcgagaggttgatggcggtgatggcggtggggctaggggtagaagaagggaggctacaggaggcgtttggtggtagagagggtgctggagtgtgcgtgcgggtgaactactacccgcggtgcccacagccggatctaacactagggttgtcctcgcactccgaccccggcgggatgacggtcctccttgtcgacgaccgtgtcaagggactccaggttcgccacgccggtgcatgggtcaccgttgaccccgtgcctgacgccttcatcatcaacgtcggcgaccaaattcaggtggtgacgaacgcattgtaccggagcgtggagcaccgggtggtggtgaacgcggcggaggagcggctgtcgatcgcgaccttctacaaccctcggagcgacctgccggtggcgccgctgccggagctcgtgtcgccggagcggccgccgctgtacagccccatgaccttcgacgactaccgcctctacatccgccgcaacggcccccgcggcaagtcccaggtcgatcgcctcgccgccgccgccgccacaatacctaattctactaccaccactcaataa

SEQ ID NO: 68198 - DNA, 1503 bp, Oryza sativa
  Clone ID: PAT_MRT4530_68984C.1
atgcggaacctccgcgccgccgcgcctgcctccttcctcgcgccgcccgcgccccctctcctcctccccccgtcgactccaaccccgcgaggcgccttctcggcgaaggcttctcctgccgcggcggccgcccaggcgcatggctggtgcccctcgccgcggcgcgtgggccggctccggcggcgcgcgggagccgcttcgtcgagcgtggcgtcggtggaggacgccaagaaggacgtgctcgtggcgctctcccaaatcatcgatcccgacttcgggacggacatcgtctcgtgcgggttcgtcaaggacctggagattagcgaggccttggaagaggtctcgtttcgtctggagctgacgactcctgcctgcccgatcaaggacatgtttgaagagaaggcaaatgaggttgttgcagcacttccttgggtcaagaagggaggagttggaaagtctacagttgctgtaaatcttgcatatacattagctggtatgggggccagggttggaatatttgatgctgatgtcttcggtccgagcttaccaactatggtttctcctgaaaaccggctgctagtgatgaacccagaaagcagaagtattcttccaaccgagtatttgggcgtcaagatggtgtcttttggctttgctggacaaggaagagctataatgcgtggtccaatggtttcgggagtgattaatcagttgctgaccactactgattggggcgaactcgactaccttgtcattgacatgcctccaggaacaggagatatacacttaacactctgtcaggtggtagccccattgactgcagctgtcattgttaccacccctcagaagcttgctttcatcgatgttgcaaagggagttagaatgttttccaagctgaaggttccgtgcgttgcagttgttgagaacatgtgctacttcgatgctgatggaaaacgattttacccatttgggcaaggttctggagctcaggcaagaaaagttgtgcagcagtttggaatacctcacctcttcgatttgccgatacggccaactctttcagcgtctggagatactggaattcctgaagtagtggctgatccacaaggggatgttgctaagacgtttcagaatcttggagtttgtgttgttcagcagtgtgctaaaatcagacaacaggtttcaacagcagtttcctatgatagatcaattagagcaatccgagtgaaagtaccagattcagatgaagagttcttgttgcatccagcaacagtcagaaggaatgaccgatctgctcaaagtgtggacgaatggacaggtgagcagaaagtacaatatggtgatataccagaagacattgaacctgaagagatccgtcctatgggaaactacgcagtttctataacttggcctgatggtttttctcagatagcaccttatgatcaattggaaatgcttgagaggcttgtggatgttcctcgtgcaacaacagcagcagtctcttcatga

SEQ ID NO: 68199 - DNA, 2336 bp, Oryza sativa
  Clone ID: PAT_MRT4530_68985C.1
gaatggttcaatggataacggttatgatgcatcagtcatatcatgactgacattcttgtattggaaggtacaagtagtacgttcattcagtaaaagaaaaggcaccaaaaaattcgccaacttacagttacaccagcgcagatagtttcgggctgttctaggcttctagcaagcaatgaagtgagacactgccattacccttaatccagtgacattacagcatcactatcttaaagggatgttagctataaagatcaaaacgtgacattatgactacaaagatgtcatcagaacctaagccctttggtacattgtcaccagtaatcccgacaagagcataatccatctttgaagtgatggaagcgctgtaaatctctgatgatgatttctctttcagtgatcttggtaatgaacttcattgctgtatggcaatcactacagacccggagattctttattatatggatcactgatcttgggactgaattcattagagcaaaagcaacagcaagcttttcactatggattcgcaatgcagactctttctcttcttcatccaaatcatgaagaacagaacccgtgtttggtacatagcctgcttcttgcattctttcaagcagtttctccaaataagaatagatttcaatgtgctgtgggtgactcttgtcgccaacataaaacaaatagattttacctttcaactcaaaagagctatacccaggaggcttttctattcttcttgttttgaccagaagccttatccgttccacatctttccacattctagcctctgcatatatattagacaacagaacatagtatccactattgcttgcatccaattcaaacaatctttttacagacatttctgcaagctcaacatttttgtgtatgcggcatgcactaagaagagctccccatatagcagcatcgggtttgaccttcatttctttaatgagactataagcttcatcaagacaaccagcacgaccaaggagatccaccatgcaaccgtagtgctccacaccagcttcaataccaaattcttgcttcatggcattgtaccaatatcggccctcatccaaaagaccagcatgactgcaagcggctaaaactgagataaacgttatgtagttaggccttagacctgatcttttcatctcggtgaaaatctcaagggcttcttgtccgcgaccatgcatgccataaccagtaatcatggcagaccatgaaaggatgttcttttccttgatttttcggaaggccctacttgccatttcaactcttccacacttactgtacatatcaactatggaagtaccaacatagacattttcctccaaacccatccttaccacctgattatgaatgcgctttcctgtctgtattgcccctgcatgcgcacaagccagtagcacagccgacaatgccacagcgttgcatttgattcctccgccaacattcagcatcttgctatacaacccaattgcttcggctgacatcccattctgtgcgtacagagcaatcatcgaattccaggacaccacatccctttccattgtatcaaacactttcctggctacctccaagtcacgactgccacccttagcgtacgagtctagcatcgtgtttaccaccccagcattcctttcgaagccaatctttgcaataagcgcgtggaggctggcagtaacaccacggtcagggacacgggcggaagcagagaacgccaccagagcggcagcctcgtcgaccacagaagcagaatcggaggctatcatggcacggaagagttcgagcgagtggtagactagattgttgcgtacgtagccagatgccatagcggtgacgatgacggggttggggtcagggatttcgtcgaacgccctgcgggcgtccatgggacgggaacagtggtggtacatgtggaggagggcggaggcggaatacgggtcggaggggaacaggcccgagcggagggcgaggagatgcagctggcgaccggcggcgagggacctggcggcggcggccgcgcggagggccgggggcagagccgggcggagcgcggcggggttggcgcggacggcggcggcgaacgtggcgagggcggcgaccgcgtcgccggaggagaggaggtctgcgacggccgcggaccaggacgcggggcgcgacgggtcgacggcgcggaggaagagcgcgcggagggaggaggcggtggtggtcggactcgggacgctgcgctctcgttggcgttggggattgaacgcgggagatgggtgggcaggcggcgtggggagtggatttgggagcgatgtcatgacgcttgctcccgccat

SEQ ID NO: 68200 - DNA, 374 bp, Oryza sativa
  Clone ID: PAT_MRT4530_68986C.1
aatgaatctcgatagttctccattcaatcatgccagattttcaaccaatacactaagttttgcttcatgcaggaggacaaaaaattacttgagagtttcgagatagcatctaacataattctaagaaccaaaaactcctaacaggagccatctaaggatcggacctgcagaacagcaccatatgtcctgagaatgtcagcgcgggcaccggcatcgccatcattgagatcaagcagtgttctggtcaaatgcaaagcactaaagctattttttacaaggccacttccagatattataatctggccacccaattttctcgtagatcttggtccaaaactcaggagaccacccatctatcagtttaatgaagccat

SEQ ID NO: 68201 - DNA, 450 bp, Oryza sativa
  Clone ID: PAT_MRT4530_68987C.1
atggcggatcaccggaagatcaccagtgatgaggaggaggcggcggtgaagccgacgaggagcttccggtacgaggactacagcaccaggagggtgttcctgcggagctaccctctccagtgggactgggcgtcgccggcgccgggggagaaggagaagcagcagcagcagcagcaggtgcagggcgtcgtcgccggcggcgacggggaggaggatgacgatgagtacggcggaggaggaggagacgagcgcggcgggaggaggtggcggcggcaggtggcggtggcggtggtggagtggggggaggagaagctgctcctgctccggcgggtcaagaagaggctggcgctctacctcatcggctgccactacgccggccaccgcgccgcgctgccgttcaagtcctcctccgcctcctgcaccgccgccatgctcgcctcctcccgctga

SEQ ID NO: 68202 - DNA, 2319 bp, Oryza sativa
  Clone ID: PAT_MRT4530_68988C.1
gcacgagggcgattcatggtgctctgcattgctctactgtcatgcgagtaatttctgtcttgtgtgtgcttggggttctcgttccagatgctgcaggtggccaaggaacttttattccagtttggatggcgtagtacctacagaatttcgtgatagaatctacgtgattttgaaaaaaatattattttagtagatcatatcatcggcagaagtgggaggtggccggcggcatcatcggcgccatgactgccctccgttcacatgcggccatctcagtgacgtgtcgttcccgttccgccggcgaggtgacccgccggagtgcggtgttcaatcctacgagctaacttgtgcagacgacaaggctacaattcagatcgacaaggagacatactctgtaagtgacatcaactatggtgattctaccttgtgggtcgtcgatgccagcttcttggattcacgtagcagttgccttcttcctcgctggaacccccttcttcgtgatcccaggctccaggccaagtcacaccacatcattgaattggcacctccagtaggggttacctgggctagctttgtcaattgttcgcaggaaataaggaacagcagttggatgtacatgcccgtcgcttgcctgagcaccagcagatccttcgtttacgtgtttactggccaacaatctgcttatattcagaaccttgagccttcctgtgggtacctggccacgactcctttgggtggcagcaagttgaacagcacgtcggcgctgcagaatgtaagctatcaggatgttgtaaagctaatgatgactggatttgccgttcgatttcctttcacagttagtgggtggaacttcaaagaatgcctggcactgtcaatccgccagacaggtacagggagcaaggaaaggattgcgaatattgctatcattgacttctatttctggtcgtgcttcctgcttggagatagatcacataataacctcatctacacgtacatggtggtcgacacagccctactgattttgaagtggactgctgtactgtgcagattcgtattggccccattagcagtattcatcttccttgcccacaagtattggagaaataagataacaattgatgcagtagagaagttcctccagatgcaactaactctcggcccaacaaggtatgcctacactgacctcactgcaattacaggtcacttcggtgagaagcttggccaaggaggctacggctcggtatacaaaggtgttctcccaggttatgttaatgtggctgtcaaggtgctggaaaatgccaactgcaacggtgaagagttcatcagtgaggtctccaccattggtaggatccaccacgtcaatgtagttcgtcttgttggtttttgttcagaggaactgaggagggcacttgtgtacgagtacatgccacgaggatctctagacaagtacattttctcatccaagagaagtttctcatgggacaaactcaatgagatagctttgggtattgctagggggatcaactatcttcatcaaggttgcgatatgcagatactgcactttgacatcaagccacacaacatccttcttgatgacaactttgttccaaaggttgctgatttcggcctcgccaaactgtacccaagggacaacagttttgtgccgctcaacgccttaaggggaacaataggttatattgctcctgaaatgatatctcggagctttggcgttatatcaagcaaatccgatgtctatagctttggaatgctgctgctggagatggctggaggaagaaggaactcagacatgcatgcagggaactcaagtcaggcctactacccgtcgtgggtgtatgaccggctaatagagcaacaggtgggtgttggtgagatatctgctgctactgttgctaacatgcatgagcttgagaggaagctgtgcataatcgggctacattgcatccagatgaagtctcacgatcggccgacgatgagcgaggtcatagagatgcttgaaggtggcgttgttggcctgcagatgcctccaagaccattcttctgtgatgatgagtccatgtcacctatgatggattcttaccaattctcctctgggctaactgaaatcttagaggaggatgagtgaacttatgcatgttttgatgccaatcagctagctagtagctagctcttgtaggtaggtggtaaaatgctgaagctggaaatattaactgtaaacagtgatatattttattttaccctatttatttatgatttaccaccgatcaaggttgtattttagaaaaaaaaaaaaaaaaaaaa

SEQ ID NO: 68203 - DNA, 229 bp, Oryza sativa
  Clone ID: PAT_MRT4530_68989C.1
gagcggccgacctcggtcgttctcgatctataactaggcgcgtctaggagagagagagagagaggaggaggaggaggagagcggcggcagccatggccaagaagggaaaaatcgcaactggggagttcttccgtcgttgggacgactggaggaggcttttaaagggccgaaccagttggtttacgttacgccggtgctagctattggcatcgactccttctggatctac

SEQ ID NO: 68204 - DNA, 354 bp, Oryza sativa
  Clone ID: PAT_MRT4530_6898C.1
aagacgtcatcaccggcggtggctcgacacctcgtgctcgccggcgaatgacggcgcggcggcgcaaacggaccacacctacgggtagagggcgacacggcgaactcaccgagggctcgaacgacgacagacggcaaccgacggcgacggcagcgaggtcgaagcggcgaagacattcgggtcgacggcgacggcgatgctccggcgatcttcggcggaaacggagaacgggacgaggacagcgacgacttggtgaacacgacagcgaccttcccgagcgacgatgacgaccagagcagcagcagcgcacggctggacttgcggcggcgcacgggctaacgcggctagagctct

SEQ ID NO: 68205 - DNA, 141 bp, Oryza sativa
  Clone ID: PAT_MRT4530_68990C.1
ggtatacaagctttagttctgttgcgatgggtcagcctcgtcgatggcatatcgatcccacatgggcagggggctgcgggcagcacgatgggtccgctagttgagagcaagatggacagccagcagggtcagcccatgcag

SEQ ID NO: 68206 - DNA, 350 bp, Oryza sativa
  Clone ID: PAT_MRT4530_68991C.1
acacggtaaaatccagatcttaaatttcacatttacagacattaccggcatcatcaactcgatcagtacaccatcttaagattaagatcgacctagttgattaattaactagtttataatcaccacaaaataaccttttaacttaaattactttctcctccccctcttttacacactactacacccctttcaaaactatgctactgatcgatcgatccacgcagccatggctggcgccgccgccgccgccgcgctacgtggttcgccggcggcgagacggcggcggtcacggcatgaagagcttatcgccgaacttgcagcgccacaccttcgggtagtactcccactgg

SEQ ID NO: 68207 - DNA, 1449 bp, Oryza sativa
  Clone ID: PAT_MRT4530_68992C.1
gcccctccttccttgatggtcttggagctccaccgcggtggcggccgctctagaacgggccgctctactgggcgcccggcctgcgggggtggagctagctcgatctcgccgcgcgcgctcagctcgtcgacaaggcagcgtgcacccaccaagatagcgggatgatccagtgagcgcgtggaggcggtgtttgattctagattgttctagaaccgaacgagcgagcttagctagctagctagctgctgctgcttcgatcgatcggtcgttgcctcatgcaggagttccagtccatcccggggctcgccgggcggctgttcggcggcgcggcggcggctgacatccggcgcgcgcaggcgcagcagggcccggcgtcgcggtgcggcgggataccgtcgccggaggcggtgaagtgcccgcggtgcgagtcgaccaacaccaagttctgctactacaacaactacaacctctcgcagccgcgccacttctgcaagagctgccgccggtactggaccaagggcggcgtcctccgcaacgtccccgtcggcggcggctgccgcaagaccaagcgtagcggcagctcgtccgctgcgtcctcggccccgtcgacgccgacggcggcaactgacaacgccaagaaccagcggcgcgcctcggcgtcgtccccacgatccagtagcggcggtagcggcaacacgagccccacggccgccgcggcgacgaccccgacgacaccggccacgccgtcgtcgaacaccatcgccgtcataaaccacgcgacgacgacgacgacgacgacgaaccccttcccgacagacgtgccacctccggcgccgattttcgccgaccaagcggcagcgctcgcgtcactgttcgcccctcctccgccgccgcctctcccggtgttcagcttcgcagcgcaggcgaagaccgaggacgggattgcctccgttctactcgccggacagacgacggcgcccactgccgccaccgttgccgacatgacgccgttcacgtcgctggacgcggggatcttcgagctcggcgacgtgccgccggcggcgtactggaacgccgggagctgctggacggacgtcccggacccgaatgtctacctaccctagctcggtgtagttactcatcacgatcaccttgattaagtctttgattaagctgtggttaaaacgcttcttaaggacgaccactagctaccactagtatgtcttttactactacattcatctactctactgttctccctgtaagtttttttcttcttttccttgtcttctctagctgcacttctgctgctgcaaaggtacgtgtaactgtccaagaaagctaacatttgtgtatctactgcacgcgtgaaaaaaaaaatctgaattggatcgatcattgttgcaaaaaaaaaaaaaaaacagaacgcccagcttattcccttagtga

SEQ ID NO: 68208 - DNA, 258 bp, Oryza sativa
  Clone ID: PAT_MRT4530_68993C.1
atgggggccacacagcaaaatgggggccagacatatgaagctctcctctttacaggaacaacaaaaaaagccagcagagctgggtcctccaccagggactgcccaagaacattgtccttgagaatttcacctatatccaacactgtgcccaatgatatattgaacggcacccgaatccgaacaacctcaccaacaagggttgaagctgggcatatcgaacggcacccaaatccgaacaacctcaccaacaagggttga

SEQ ID NO: 68209 - DNA, 947 bp, Oryza sativa
  Clone ID: PAT_MRT4530_68994C.1
cagtcgatctgtctcgcacgcaaagtcatcagtgtcaagcaaaaaaagcatctctcattcaaagtactccgtttactcaacgccgacaatggggctgtctaagaagacagtgagtgccagcatcactttgctttttagccctaagaagcccgaggaatcaaagattccaattccaaaggaagtgatcgatcatttcataaagtgtgcacaaccttagccacccaagaaacctatatcggacttccgaagaactattacaaaaacaaggatctgcagactcagtctaaggagttgtaacttgcagagaaagcggacgagacagctgcattctgtaagtcaaccagtctaaacagccttgacgatctggataatcttgaggaggccgaattggtactgcagttccaacatggaaaactcatggcattgctcttttgaatgtcaaagcaaaaaccttaagattgcttttctttacccagtggttgtgaacttcgataggcaattgtccaaagaagctgaaatcgagaactatcacttggacgccctcatcaagctcaattcctgtgaccacatcatccttccttaccttgctcaccattattgaaccctgatcgtaatcaatatcgacgatagtaagattttcatatatgacagtataaggaaggagagagcgcaccaccagtgtcttatcaatttattaaataggacatatatgagataccgttggtccggaagatcatatcgtagatcctaggtggatgcaataacattttggccgggtattcaaacatcaatggatccatagacagccacctgccaccaacctttgcggcttctacgtcatgggcatcaggctagctattggagccgcatcttacatagccaccgcatcaggccatcacctcatgatggaatccactcaacctcatctgtgggcaggtgcgacaaga

SEQ ID NO: 68210 - DNA, 629 bp, Oryza sativa
  Clone ID: PAT_MRT4530_68995C.1
agcggcgtgaaggcgtgctccaggcagagggggcggtgagaccggcgggacgagtaccccgtgcaccggcgtggacggggtcggcgcagggcaacgggccggcggcgtcgacggagtggagatgacagagggcggcgtcgatggggagcgccaggccggcgggaggccgggcggttgagtcggtggccagcggcgggcgcaggtcgacaagtggcgaggtggtgccgatgaccgagtggatctggaggcggacgaagcggcggtgatgtgctctaggcggcaatccgggcggagaggccggttgcgtcggtagagatggctcgacgacgaggaccatgtccgcgacgaccggtggagatgctgctgatgcttgacttgaacaaggaccgagaggccgagatcgatccctctcgacgacgacgacgcagacgaagaaccagccgcttaggagatcgaaacctccatggcgagggtgaagacaacgaaaaaaaggacgaactttggatcaacaaattgtcactttcaagaaattgggctttgctgtcagttaagtaagagactgaatccttaactcagttaaggaaattcagtctgtactctatccttcctctaaaccaggatgttttttt

SEQ ID NO: 68211 - DNA, 451 bp, Oryza sativa
  Clone ID: PAT_MRT4530_68996C.1
atggcatcaaaaggtcctcgatcaaagttagatcatgagacaagagccagacgccagaaggctcttgaagccccaaggggggagcctcgaaggacgaaaactcactgggaccatcttcttggagaaatggcttggctggcaaaggagtttgatgctgagagaaaatggaagctgtccatggctaaaaggattgctcaaagagctaataagggtgtagttgaccaagcaacaaaggacgagagaaaacagaagtatgcttttacagacaatgtggaaatcgatgatgattacaacagttccttgggtgaagagccaaaagatgatgaacacacaatcgatgaggatgaagctcaaattacggaggctgagcgcaacgaggaattggctgctttgcaggcagaagctgatctaccactggatgatattctcaagttgtacactaaaaataaag

SEQ ID NO: 68212 - DNA, 2373 bp, Oryza sativa
  Clone ID: PAT_MRT4530_68997C.1
atgggtggcaacagtgtgacgatggcagaggagctcaagggagctgcggtccccatgtctctcgacgggaggcaaggcggtgggagcatttctgcaggggtttgcgtcgatggcatgggcgcctgcctttcagcttgcggtattcaggttttgaagttttggtgcataagattggtgatattttattcttttattgggagtaagtgttgctctgaggtgcaatttgccttctgctacatattgtttttgcaggctcttgaagccccaaggggggagcctcgaaggacgaaaactcactgggaccatcttcttggagaaatggcttggctggcaaaggagtttgatgctgagagaaaatggaagctgtccatggctaaaaggattgctcaaagagctaataagggtgtagttgaccaagcaacaaaggacgagagaaaacagaaggttttttataagaaccaactggagcttgaggaaaggaaaaaaaaggccctagacaagcaacttgatttcctcttaggacagactgaaagatattcaacaatgctggcagaaaatcttgttgatgtgcgccttcaaaatcaagaaaatgactctttacagactaatcaaagatcccagcaggaactagcacaagagaacataaatgcatcaagtccgactgatgttgacaatgtggaaatcgatgatgattacaacagttccttgggtgaagagccaaaagatgatgaacacacaatcgatgaggatgaagctcaaattacggaggctgagcgcaacgaggaattggctgctttgcaggcagaagctgatctaccactggatgatattctcaagttgtacactaaaaataaagttcaagctttctcagttagcagggaaagcagtccagatggcagagacgtttttagtgactcagattcaaaggatttgattaaagatcctttgaaccaggctaatggatgcaacgatgaatctgatcatacttcaagtgatgaaggcatttcttctgaggaagcagatgattaccagtcttactctgagtttgtgaaaaagaacactgtgaaatgcaatggcaatatctcatctgttgatgcaaagttaactgaactatcggtccgatccttggtctccaccgaaatgaccgaaggtacatggactctgggagagctaggcccaagcggtggcgcggaggtagggtggatgcaggctgtaggtggtggtgcgacaatcagtcgggacctgggtggtgcggagtttgggtgctggccatggtgcaatgagcagcaggggccacggagaggctgcgcgcgggcggcggtgcaacgagcagctgagcgtcgagcggacgacgaagattatgttgctaatgatgaaggaaaggatgatgaagctactttgtctgaagaggaagagttggcgaagaaagaagactgtgatcctctagatgaggttaagttactgcagaaagagagtgagatcccacttgaagaacttcttgcaagataccaaaaggatggctatgcagatgatgacacaacagaattggaaaattcacctgcactatcagttgaggatgtcaatgccaacatgcctgtggatgatgagtctgcagacaccgtggaggtaaacagggatctttctgcagataccatgaaactgaccagagatcagtctgcagagaccgtaaaagtgaataatgaccagtctgcagagattgtggagggcaacaatgacacatttgaagatcatgaatctgcaggcatgctgggacctgagcatgtcagtggtagtgttctacaactagaaacatcagagcctattgtacaggaaaatactgctaaagagggtgatgtaactgatactaaagcgatggccaatggagataatagtgatgtgattgctgatgctgcagctgctgcaagatcagcacaaccgactggtaacacgttctcaacaacaaatgtgcggacaaaattccctttccttcttaagcattctctacgagaatatcagcacattggactggactggcttgttgctatgtatgaaaagaggctgaatggaattctagcagatgaaatgggtttggggaagacaattatgaccatctccttgctagcacaccttgcatgtgagaagggaatatggggtccacatcttattgtagtgccaactagtgttatgctaaattgggagactgaatttctcaaatggtgtcctgcgtttaaaatactgacatattttggaagtgcaaaagagagaaaacagaaacgtcaaggttggatgaaaccaaattacttccattcacatcaagagttcaaggactggttctgcaatccaatttcaggcatggtagagggccaagacaag

SEQ ID NO: 68213 - DNA, 4824 bp, Oryza sativa
  Clone ID: PAT_MRT4530_68998C.1
atggcgaatttctttcccatggccctgaaaggacatgcacggggttggctaatgaacttgccacccgcgtctgtccactcttgggaggatttgtgccaacagttcaccatgaacttccaaggcacatatccgcgccccggtgaggaagcggacttgcacgcagtacagcgaagggacgatgagtcacttcgatcgtacattcagcggttctgtcaagtccgcaacaccataccatgcatccctgcacacgcggtgatttacgcgttcagggggggtgtgcggcacaaccgtatgctcgaaaagatcgcctccaaagagccccagactaccgcggagctttttcagctcgcggaccgagtggctcgtaaggaggaggcatggacctggaacccctccggttccggtgtggcagcttcggccgcccccggatccgctgctcagacagggcggcgtgacaggaggaggaagaagaggtcagcccataccgacgatgagggtcatgtcctcgccgtcgagggcgctccgcgggccacccgaaaggggaggcctggggagacaaaaagaaggaggccggcgctcccagcagggagcgcccgaccggcaagtgtcaaaagtttggctgagcggacgaggaagtgggaggaggagaggaggcaggagcgccgagagggcaagtccccggcggttccttccggcaatcggcgaagtgaggccaagcagaaggcccccgccgaggacatcgatgacagcgatgatgacctaggtttccaagagcctggggccatcgttgccactgtcgatgggggagcgtgtgctcacgtttctcgccggaacctcaaggccatgaagcgagagcttctggccgcggcccctactcatgaggcgacgcgccgggcgcggtggtcggaggttgccctcaccttcgaccagaccgaccacccaccgtgcgttgcccggggaggacagatcgcaatggtggtttcccccactgtttgcaacgtgaagctggggcgtgtcctcattgatggaggagcagccctcaacatcctttcccccgcagcctttgacgccatcaaggccccggggatgatgctccggccgtcccagccgatcatcggtgtgacgccggggcacacttggccgctaggtcatatcgacctcccggtcaccttcggtggacccgccaacttccgcacggagcgggtgaactttgatgtgacggacctcagtctgccctacaacgcggtcttggggaggcccgcgttggtaaagttcatggcggcggtccactacgcctacctccagatgaagatgccgggccccgatggccccatctctgtccatggcgacctcaaagtcgcgctcgcttgtatggagcagcgcgcggaccgcctcgccgtcgtgtccaagcccgagggtggcgacgagaggcttggcacatccgcccccgccgccccgaggcagcggatagtcacgtgcgatgaggtcccggaagacgcgctcgtctctttcctgcgggcaaacgctgacgtcttcgcatggagaccggcggatatgcccggggtccccagggaggtgattgagcaccgtctcgccgtacggccgggcgcaaggccggtccggcagaaagtgcggcgccaggccccggaacgtcaagccttcatccgcgaggaggtggcgcgacttctggaggccggattcatccgcgaggtcatccatccggagtggctggcgaacccggtggtcgttcccaaggcgaacggcaagcttcggatgtgcatcgactacaccgaccttaacaaggcatgtcctaaggatccttaccccctgcctcgcatagatcagattgtcgactccacagcggggtgcgaccttttgtgttttctagatgcatactctggttaccatcagattcgcatggctagggaggatgaggaaaaaactgcgttcattacccccataggaacttattgttatacaacaatgcccttcgggttaaaaaatgcaggtcctacttttcaacgtactactcgaatttctttgggtagccaaataggacgtaatgttgaggcttatgtcgatgacttggttgtaaagacgcgcaaccaagagaccttactctcggatctagcggaaacttttgagagtctccgctccgcccgcataaaactgaaccccgataagtgcgtgttcgttatacctgcgggcaagcttctcgggtacttggtctctgcccgaggcatcgaggccaaccccgagaatatacgagctatagagcggatgcgccccccagcaagcttagggatgtgcaatgcgtcaccggaagctgaacgtgccctcactcagttgaaggcgtatctcagctctcccccagttctggtcgccccggagccaaatgaacccttgctactctacttagcggcgaccccgcaagtggttagtgcggcgttggttgtggagcgcgatgaggacaatcctcattccgcgcacccccaccctgtgctggcttggcccgggagagagcagggaggagaggcccccgagccggacggtggcccaaggcccccgacgaccggagcaggccctctccccgcttgtcagacggtgccaggtgcccccgacccccaggacggccccgaggccactgcgggaaggccgcacctatcgccctctgaccccgaggctaaccctgtaccgattcgacccgggagagagcagggagaagaggcccccgagccgaacggtggcctaaggcccctgacgaccggagttggccctttgcccgcttgtccgacgacgccaggagcccccgacccccaggacggccccgaggccactgtgggaaggccgcccctgtcgtcctccgaccccgaggtcgtcggcacagaagacgagtgcgccccgcgaggccgcttgggtgaagagcgccccagggatgcagcccctagcgaagaggatcggccccaccgaaaggtgcagcggcccgtctactttgttagtgaggccctccgggatgccaagacccgataccctcaggcccagaaaatgctttacgctattctgatggcctcgaggaaactgcgccattatttccaggcgcatcgggttacggtggttacgtcttaccccctcggccaaatcttgcataatcgagagggtactggacgggtggtgaaatgggcaatcgaactttctgagtttgatttgcactttgaaccacgcaacgctatcaagagccaagccctcgccgactttgtggcagaatggaccccggctcccgagctcgtctcggtccccgaagcaaactcgggcccctcgcagctgcctcacaccgcccactgggtgatgcagttcgacggctccctgtctcttcagggcgtcggtgcgggggtcacgttgacctctccgagtggagacgtcctcagatacttggtccgcctcgactttcgagtgaccaataatatggcagagtacgagggactccttgccggactcagagtggcagctggactggggatccgccgcctcctggtgttaggcgactcccagctggtcgttaaccaagtctgtaaggagtaccggtgctctgacccgcagatggacgcctacgtgcgccaagtacggcgtatggagcaccattttgacgggattgagcttcggcacgtgcccagacgggataacatgatggccgacgaactctcacggctcgcgtcctcacgagcccagaccccaccgggcgcctttgaagaaaggcttgcccagccgtcggcgcgacccgaccccttaggggagacggatgcgcctgaccggcccccgaggcccgtcggagtccaggcctcgggacccgaggggagtgctcccagctcccttagattgattgcttggatcgccgagatccaagcatacctcacagataagactctacccgaggaccgcgaagggagtgaacgcgtccatcgcatctccaaacgctacgtgctggtagaagggaccctctatcggcgcgcggctaatggaatcctcctgaagtgcattcctcgggaaggcattgtgcttcttgccaatatccatgaaggcgaatgcggagcccactccgcctcgcgcaccttggttggtaaagcttttcgccaaggtttctattggtcgacagctctcaatgatgcggtcgacctgttcactaagtggcccgaggcttatctggtcgtcaagatcgataagcactccgcacttaaattcattaagggcatcacggcccggtttggagtgcctaaccgtattattacggataatggcacccaattcactagtgaactcttcggcgactactgcgaagacatgggcatcaagctctgcttcgcctcacctgcccaccccagaagcaatggccaagtggagcgcgctaatgcggaaatcctcaaaggccttaaaaccaagaccttcaacatactcaagaagcatggcgattcatggatcgaggagttgccagcagtgctctgggcaaaccgaactacaccaagccaagcaaccggggaaacgcctttcttcctcgtctacggcgcggaagcagttctcccatccgagctcaccctgaggtctcctcgggccaccatgtactgcgaggctgatcaagatcagcttcgcagagatgacctcgactacttggaagagcgaaggcggcgcgcggccctccgagccgcgcgctaccagcagagcctgcggcgctaccatcagcgtcacgtccgggcccgatcactctgcgtcgacgacctcgtcctacgccgcgtccaaacgcgtgctggattgagcaagctttcaccaatgtag

SEQ ID NO: 68214 - DNA, 6042 bp, Oryza sativa
  Clone ID: PAT_MRT4530_68999C.1
atggccgagcaagcaaaggcgcacgacctctctccgcgtgtgagtggcgacgacggggagccgaacccacgccgtcgagctcgtactccaccgccccctccacgccaaagtcctaagcggggggaggcgctcaagagagtcgaaagatccgcgacttcaccgatcgcgggcgatggagaagaacggcgagatggggagcgtcgcctcctcgtctacggcgacggcagcacgccccagggcgcgctccaagctgcgggcgcgctcttacatcacccgcctgtagtccctgacccggaatctccagcccaacgatggctggacgacgtggccaaattagtcatgacggcacggcagcgcctagatgctggtgggcggtcctccgccaccaaggcctctggtgctgccaccaccggctccgcgtcgtcaagacggagggcacgacgagcggcagccgctgttcgccattcggccgccactccttcgtcgactccttcgacccgggaagatctgcgtggggggccggacgcccgccccagcatcgagcgccggcgtaatgaccgacgtgctgcccacgcaacggagggcgcttcctcgtccagagtgtcacctcaacacggacgcgggaatcagccctccgtgcccccggttggtggtgtcggctgtagagcctttgtggcgagtcttcggaatgtccgttggcccccaaggttccggcccaccatcgccgaaaaatatgatggcagcgtcaaccccgccgagtttctccaggtctacacgaccgggattgaggccgccgggggtgatgacagggtcatggcgaacttctttcccatggccctgaaggggcaggcgcggggttggctaatgaacttgccacccgcgtcagtccactcctgggaggatttgtgccaacagttcaccatgaactttcagggcacatatccgcgcccaggtgaagaagcggacttacacgcggtacagcgaagggatgatgagtcacttcgctcgtacattcagcggttctgtcaagtccgcaacaccataccatgcatccctgcacacgcggtaatctacgcgttcagggggggcgtgcggcacaaccgcatgctcgaaaagatcgcctccaaggagccccagactaccgcggagctttttcagctcgcggaccgagtggctcgcaaggaggaggcctggacttggaacccctccggttccggtgtggcagcttcggccgcccccggatccgccgctcagacagggcggcgtgacaggaggaggaagaagaggtcagtccattccgacgacgagggtcatgtcctcgccgtcgagggcgcttcgcgggccacccaaaaggggaggtctgcgagcgacaaaaagaaaaaggccggcgctcccagcagggagcgcccagccggcaagtggtgcaccgtccacaacacctccctccacgacctcgtggactgtcgcgcagttaaaagtttggcagaacgaacgaggaagtgggaggaggagaggaggcaggagcgccgtgagggcaggtccccggcggttccctccggtaatcggcgaagtgaggccaagcagaaggcccccgccgaggacatcgatgatggcaatgatgacctaggtttccaagagcctggggccaccattgccaccgtcgatgggggagcgtgtgctcacgtttctcgccggagcttcaaggccatgaagcgagagcttctggccgcggcccctactcatgaggcgacacgtcgggcgcggtggtcggaggttgccctcacctttgaccagaccgaccacccaccgtgtgttgcccggggagggcagattgcgatggtggtttctcccaccgtttgcaacgtgaagttggggcgtgtcctcattgatgggggagcggccctcaacatcctttcccctgcggcctttgacgccatcaaggccccggggatggtgctccggccgtcccagccgattgtcggtgtgacgccggggcacacgtggccgttaggtcacatcgacctaccggtcaccttcggtggatccgccaacttctgcacggagcgggtgaacttcgatgtggcggacctcagtctgccctacaacgcggtcctggggaggcccgcgttggtgaaattcatggcggcggtccactacgcctacctacagatgaagatgccgggccccggtggccccatctctgtccatggcgacctcaaagtcgcgctcgcttgtctggagcagcgcgcggaccacctcgccgctgcgtccaagcccgagggtaacgacgagaggcttggcgcctccgcccccgtcaccccgaggcagcggatgatcacatgcgacgaggtcccggaagacgcgctcgtctccttcttgcgggcaaacgctgacgtcttcgcatggagaccggcggatatgcccggggtccccagggaggtgattgagcaccgtctcgccgtgcggccgggcgcaaggccggtccggcagaaagtgcggcggcaggccccggaacgtcaagccttcatccgcgaggaggtggcgcgacttctggaggccggattcatccgtgaggtcatccatccggagtggctggcgaacccggtggtcgttcccaaggcaaacggcaagcttcggatgtgcatcgactacaccgatcttaacaaggcatgtcctaaggatccttaccccctgcctcgcatagatcagattgtcgactccactgcggggtgcgaccttttgtgttttctagatgcatactctggttaccatcagattcgcatggctagggaggatgaggaaaaaactgcgttcattacccccataggaacctattgttatacgacaatgcccttcgggttaaagaatgcaggtcctacttttcaacgcactactcgaatttctttgggtagccaattaggacgtaatgttgaggcttatgtcgatgacttggttgtaaagacgcgcaaccaggaaacgttactctcagatctagcggaaacttttgagagtctccgctccgcccgcataaaactaaaccccgataagtgtgtgttcggtgtacctgcgggcaagcttctcgggttcttggtctctgcccgaggcattgaggccaaccccgagaagatacgggctatagagcggatgcgccccccagcaaacttagggatgtgcaatgcgtcaccggttgcatggccgccctaagtcggttcatatcgaggctgggagagaaggcgttacccttatttaagcttctcaaacgcttcggaccgtttacctggacggaggaagctgaaagtgccctcactcagttgaaggcgtatctaagctctcccccagttctggtcgccccggagccagacgagcccttgctactctacttagcggtgaccccgcaagtagttagtgcggcattggttgtggagcgcgatgagggcaattctcatttcgcgcttccccaccctgtgccgacttggcccgggagagagcagggaggagaggcccccgagccgaacggtggcctaaggcccccgacgaccggagttggccctctgcccgcttgtcagacggtgctaggagcccccgacccccaggaaggccctgaggccactgtgggaaggccgcacctatcgccctttgaccccgaggctaaccctgtgctgactcaacccgggaaagagcagggagaagaggcccctgagccgaacggaggcctaaggcccctgacgaccggagttggccctttgcccgcttgtccgacgacgccaggagcccccgaccccaggacggccccgaggccactgtgggaaggccgcccctgtcatcctccgaccccgaggtcatcagcacagaagacaagtgcgccccgcgaggctgcttggacgaagagtgccccagggatgcggcccctagcgaagaggatcggccccaccgaaaggtgcagcggcccgtctactttgttagtgaggccctccgggacgccataacccgataccctcaggcccagaagatgctttacgctattctgatggcctcgaggaaactacgccattatttccaggcgtatcgggtcactgtggttacgtcttaccccctcggtcaaatcttgcataatcgagagggtacaggacgggtggtgaaatgggcaatcgaactttctgagttcgatttgcactttgaaccacgccacgctatcaagagccaggccctcgccgattttgtggcagagtggaccccggctcccgagcccgtctcaatacccgaggccagcacggacccctcgcagctgcctcacaccgcccactgggtaatgcagttcgacggctccctgtctcttcagggcgccggtgcgggggtcacgttgacctctccgagcggagacgtcctcagatacttggtccgcctcgactttcgagcgaccaataatatggcagagtactggggatccgccgcctcctggtgttaggcgactcccagctggtcgttaaccaagtctgtaaggagtaccggtgctctgacccgcagatggacgcctacgtgcgccaagtacggcgtatggagcgccattttgacgggattgagcttcggcatgtgcccagacgggataacatgtttgccgacgaactctcacggctcgcgtcctcgcgagcccagaccccactgggcgcctttgaagaaaggcttgcccagccgtcggcgcgacccgaccccttaggggagacggacgcgcctgaccggcccccgaggcccgtcggagtccaggcctcgggacctgaggggagcgctcccagttcccttagattgattgcttggatcgccgagatccaagcatacctcacagataagactctacccgaggaccgcgaagggagtgaacgcgtccatcgcatctccaaacgctacgtgctggtagaatggaccctctatcggcgcgcggctaatggaatcctcctgaagtgcattcctcgggaacaaggcgttgtgcttcttgccgatatccatgaaggcgaatgcggagcccactccgcctcgcgcaccttggttggtaaagcttttcgccagggtttctattggccgacagctctcaatgatgcggtcgacctggtccggcgatgtagagcgtgtcaattccacgccaagcaaatccatcagccggcccaggccctgcagaccataccactttcgtggccatttgttgtctgggggctcgatatcctgggaccgtttaggcgggccccgggcgggtttgagtatctgtatgtcgcgatcgacaagttcactaagtggcccgaggcttatccggtcgtcaagatcgataagcactccgcacttaaattcattaagggcatcacggcccggtttggagtgcctaaccgtattattacggataatggcacccaattcactagtgaactcttcggcgactactgcgaagacatgggcattaagctctgcttcgcctcacctgcccaccccagaagcaatggccaagtggagcgcgccaatgcggaaatcctcaaaggccttaaaaccaagaccttcaacatactcaagaagcacggcgattcatggatcgaggagttgccagtggtgctctgggcaaaccgaactataccaagccgagcaaccggggaaacgcctttcttcctcgtctacggcgcggaagcggttctcccatccgagctcaccctgaggtctcctcgggccaccatgtactgcgaggctgatcaagatcagcttcgcagagatgacctcgactacttggaagagcgaaggcggcgcgcggccctccgagccgcgcgctaccagcagagcctgcggcgctaccatcagcgtcacgtccgggcccgatcactctgcgtcgacgacctcgtcctacgccgcgtccaaacgcgtactggattgagcaagctctcaccaatgtgggagggtccgtatcgagtggtcggcgtcccccggccgggctccatacggctggccacgggcgacggcactgagctgcctaacccgtggaacatcgaacaccttcgtcgcttctacccc

SEQ ID NO: 68215 - DNA, 165 bp, Oryza sativa
  unsure (1)..(165): unsure at all n locations
  Clone ID: PAT_MRT4530_6899C.1
ggcgacncaagaggaacccccgcgcacggagaacaaaaccgcannannagccgnggannanaacgacccaaggcgagcnnngnccgcaacncggcgggcancgcnaanncgccgcaacccgcaaggaacaaggcgcccgngaaccngctcccttnggaagcatag

SEQ ID NO: 68216 - DNA, 786 bp, Oryza sativa
  Clone ID: PAT_MRT4530_689C.1
atggcggcgatgctgcccggggtggagtgcgcgcggcggcggcggctccggcagggagggggagctggggcggatgcggcggcggctggcggaggtacgaggcggtcgtcgttctgcgtgcacgcggccgggcatggtggtggtcagacatgtggcggcgccgccgcgaatcattccggcaagcagaggagtagtgtgatggagctcatccatgggtggtcgctggacagcaatgcccgggaggcgaaggagcggctggaccagaagctgaggagccagagggaatccgtcatcaagaggcatcacagcacgggaagcatcaagctgaacagaggcgccaccggcggcggcggagggggcgggagatcgacggcgacggcggcgatgggggtgcagagggaggtgtactcgaggaaaggggtgatgcggcggctgatgcggtggagccggctgcggtgggacgcggcggagcaggcggagtgcgccatgttagatattatttctgttgatagatgtcagatatgtgtgaccagttctactgagagtactgacatgaagaagtcatcaactgatactgtacatgaagaagtggacggtgtcacacggtggctccccaatggcccaatgtttacttgcaactttatctcgctccttcttctcatggcacattctgatatagcgacacctccagattttatggcgcatcaattcagcgagcacgtcgctgccaagcgagcattcctttctcaccttcacaatgaaggcctagcctcgtttgaaaattga

SEQ ID NO: 68217 - DNA, 2358 bp, Oryza sativa
  Clone ID: PAT_MRT4530_68C.1
atggcaatagcggagggggaggcagcgcatggcgtcttcgcctacgccgccgcggccgactcagcatccgcagacgacccgatgacggtgaagatgctgcgcgacgccgccgcggatgtcgttagctcctccacggcaacgcgcatccacctcttccgcgaaatcctcccgccgcttctcagccgcggatctgattcagcattatttgttgcacaattgatacgtttcattttccgaacgttgccagtgtatgatgatcaagcatctaataatgcagtagatgatcttgttcaattggctttgagaaaaccaaccttcttggggcattttgcatttatgcttgttgagacaatggagcaaaacatgaagtttagcaggcctccacttctaagtgatgtccataaaatgtatgtagagaaggtcagaaattctatgtttcatgtcagggaatctccacaattcttcaagttgatactagattttgcgatgacctcttcatccttgtcttcagaatacaagcattctgatgaacagatgagggcggatgctttggtgattgttgggacattaattataaaatccactgatcctgaaacgctaactactatgctggatgctattacaacaagtctaggaggttctaaggaagaactatcaaacacatacaagagaattggaatgataaaggcattagcagaactgtcaacatctccagctgttcaccaaataaacactgttgctgcctcaatatctggtttcctcatgacatgctataaggatgatggtaaagttaaagtgttcctatctatgcttgatgctctcatccaaatggatctctccatagttttgccagctattgacaggtataaagcaggcctgaaagatgaagtctgtttaaggaagggttatctagagttattacgagctgtatgcaaaaattctgctgcattaagaaagatcaccagtttgttggatcagctggttcagttgctgataattagtttcacaagcacaacacaacgattggatggaatttacacactctttgcagtatcaagaattgttgctgttgatacagatgcaagtttacctacaatttgctctgctatctatgatgcttgtgggcaagtggacctcttcacattgatttgccaaaatgaactatcatcgaattctgccctatcgctttcagaactgtcagatgaagattgcttggtcactgtggatcttgttcaatcattaattgtggaaaatctttcttgggttaaggaaaaaatctctatccaatcattactacagctgctaattcatccggcgtgccacccacatcgtgaagttaggaagttagcttatgttgctaccgagaaaatacttgcaagcactgctgttttaggccaagatcttctcctcttattcaataactggttgtcattgattggaaatagaacattaactttggaacaaagcccaagatcatattctcaacttatattgtgctcccaccacccttgtatttccaactcccgccctgctgctgtttggaagaggttgcagagagttttgaagcaccaccagatcgtttttattgatttaattgctaccaacatgtcggcaatattcatggaattacttagacaggatgactccttaacctgtgatgaatatgcacttgaagcaagattacattcattacggacagtagcagcaatattacccaacaacggacttccagaattcgaggctttcattagcctgctaaaagcaatctccactagtgctgcttctgccaccgcaacaatcgccatctttgtagtaagctaccccattaaatggccagataaagtgtcagttaattaccagatgatactggaggctctcctctttgttttctttcctctggcccttcttgccacgggcttatcccatgctgctgagaaagatgagagatggcttggtcttgcttctgccttggttttatttgaattcttttatgctttggctttggggggagggatatccatcgctatacaagtgagaccaagaattgcagtgtgtgccacagtattctcttctatggtggtgattacttttgcgtggagtttaatgttctcgcacccggagaatcaggttgtaactattgctggttactattccaaacaacagttcttaaagaagatgcacttttgggcgcgccacccagacatgccaacaggagacatgccccagtctccccgaagttctctctcgaagcttttcaagtggttcaagaaggagtcgtctgcgcctagtcaggagtcagtcacagaacaagttatgccccagccaagttttcggtccaagttcatcgagtggctttaa

SEQ ID NO: 68218 - DNA, 5913 bp, Oryza sativa
  Clone ID: PAT_MRT4530_69000C.1
atggccgagccagcaaaggcgcacgacctctccccgagtatgagcggtgacgacggggagccaaacccacgccgtcgagctcgtactccaccgccccctccacgccaaagtcctaggcgggagaaggcgctcgagagggccgaaggatccgcgacttcgacacccacaggaggtggagaagggcggcgagatggggagcgtcgcctcctcgtctacggcgacggcagcacgccccagggcgcgctccaagctgcgggcgcgctcctacgtcacccgcccgtcgcccatgacccggagtctccagcccaacgttggctggacgatgtggccaaattggtcatgactgcacggcagcgcctagatgctggtgggcggtcctccgccaccaaggcctctggtgctgctaccaccggctccgcatcgtcaagacggagggcgcggcgagcggcagccgctgttcgccattcggccgccactccttcgtcaacgcctccgacccgggaagatctgcgtggggaaccggatgctcgcatcagtatcgagcgccggcgtaatggccgacgtgctccccacgcaacggagggcgcctcctcgtctggagtgtcacctcaccacggacgcggggatcagccctccgtgcccccggttggtggtgtcggctgtagagcctttgtggcgagccttcggaatgtccgttggcccccaaggttccggcccaccatcgccgaaaaatatgacgggagcgtcaaccccgccgagtttctccaggtctacacgaccgggatcgaggccgccgggggtaacgacagggtcatggcgaatttctttcccatggccctgaaaggacaagcgcggggttggctaatgaacttgccacccgcgtctgtccactcttgggaggatttgtgccaacagttcaccatgaacttccaaggcacatatccgcgcccaggtgaggaagcggacttgcacgcagtacagcgaagggatgatgagtcacttcgctcgtacattcagcggttctgtcaagtccgcaacaccataccatgcatccctgcgcacgcggtgatttacgcgttcagggggggtgtgcggcacaaccgcatgcttgaaaagatcgcctccaaggagccccagactaccgcggagctttttcagctcgcggaccgagtggctcgtaaggaggaggcatggacctggaacccctccggttccggtgtggcagcttcggccgcccccggatccgccgctcagatagggcggcgtgacaggaggaggaagaagaggtcagcccataccgatgacgagggtcatgtcctcgccgtcgagggcgcttcgcgggccacccgaaaggggaggcctgcaggaggcaaaaagaacgaggccggcgctcccaacagggagcacccaaccggcaagtggtgcaccgtccacaacacttcccttcacgacctcgcggactgccgtgcagtcaaaagtttggctgagcggacgaggaagtgggaggaggagaggaggcaggagcgccgagagggcaaatccccggcggttccttccggtaatcggcgaagtgaggccaagcagaaggcccccgccgaggacatcgatgacggcgatgatgacctaggtttccaagagcctggggccaccattgccaccgtcgatgggggagcgtgtgctcacgtttctcgccggagcttcaaggccatgaagcgagagcttctggccgcggcccctactcatgaggcgacgtgtcgggcgcggtggtcggaggttgccctcaccttcgaccagaccgaccacccaccgtgcgttgcccggggagggcagattgcgatggtggtttctcccaccgtttgcaacgtgaagttggggcgtgtcctcattgatgggggagcggccctcaacatcctttcccctgcggcctttgacgccatcaaggccccggggatggtgctccggccgtcccagccaattatcggtgtgacgccggggcacacgtggccgttagatcacatcgacctaccggtcaccttcggtggatccgccaacttccgcacggagcgggtgaacttcgatgtggcggacctcagtctgccctacaacgcggtcctggggaggcccgcgttggtgaagttcatggcggtggtccactacgcctacctacagatgaagatgccgggccccggtggccccatctctgtccatggcgacctcaaagtcgcgctcgcttgtctggagcagcgcgcggaccacctcgccgctgcatccaagcccgagggtggcgacgagaggcttggcgcttccgcccccgccaccccgaggcaacggatgatcacaggcgacgaggtcccggaagacgcgctcgtctccttcctgcgggcaaacgctgacgtcttcgcatggagaccggcggatatgcccggggtccccagggaggtgattgagcaccgtctcgccgtgcggccgggcgcaaggccggtccggcagaaagtgcggcggcaggccccggaacgtcaagccttcatccgcgaggaggtggcgcgacttctggaagccggattcatccgtgaggtcatccatccggagtggctggcgaacccggtggtcgttcccaaggcgaacggcaagcttcggatgtgcatcgactacaccgaccttaacaaggcatgtcctaaggatccttaccccctgcctcgcatagatcagattgtcgactccactgcgattcgcatggctagggaggatgaggaaaaaactgcgttcattacccccataggaacctattgttatacgacaatgcccttcgggttaaagaatgcaggtcctacttttcaacgtactactcgaatttctttgggtaaccaattaggacgtaatgttgaggcttatgtcgatgacttggttgtaaagacgcgcaaccaggaaatgttactctcagatctagcggaaacttttgagagtctccgctccgcccgcataaaactaaaccccgataagtgtgtgttcggtgtacctgcgggcaagcttctagggttcttggtctctgcccgaggcattaaggccaaccctgagaagatacgggctatagagcggatgcgcccccccagcaaacttagggatgtgcaatgcgtcaccggttgcatggccgccctaagtcggttcatatcgaggctgggagagaaggcgttacccttatttaagcttctcaaacgctccggaccgtttacctggacggaggaagccgaaaatgccctcacccagttgaaggcgtatctaagctctcccccagttctggtcgccccggagccagacgagcccttgttactctacttagcggcgaccccgcaagtagttagtgcggcattggttgtggagcgcgatgagaacagttctcatttcacgcttccccaccctgtgccgacttggcccgggagagagcagggaggagaggctcccgagccgaacggtgacccaaggcccccgacgaccggagttggccctctgcccacttgtcagacggtgctaggagcccccgacccccaggaaggccctgaggccactgtgggaaggccgcacctatcgcccttcgaccccgaggctaaccctgtgctgacccgacccgggaaagagcagggagaagaggcccccgagccgaacggaggcctaaggcccctgacgaccggagttggccctttgcccgcttttccgacgacgccaggagcccccgacccccaggacggccccgaagccactgtgggaaggccgcccctgttatcctccgaccccgaggtcatcagcacagaagataagtgcgccccgcgaggctgcttggacgaagagtgccccagggatgcggcccctagcgaagaggatcggccccaccgaaaggcgcatcgggtcacagtagttacgtcttaccccctcggtcaaatcttgcataatcgagagggtacaggacgggtggtgaaatgggcaatcgaactttctgagttcgatttgcactttgaaccacgccacgctatcaagagccaggccctcgccgattttgtggcagagtggaccccggctcccgagcccgtctcgatccccgaggccagcacggacccctcgcagctgcctcacaccgcccactgggtgatgcagttcgacggctccctgtctcttcagggcgccggtgcgggggtcacgttgacctctccgagcggagacgtcctcagatacttggtccgcctcgactttcgagcgaccaataatatggcagaatacgagggactccttgccggactaagagtggcagctggactggggatccgtcgcctcctggtgttaggtgactcccagctggtcgttaaccaagtctgtaaggagtaccggtgctctgacccgcagatggacgcctacgtgcgccaagtacggcgtatggagcaccattttgacgggattgagcttcggcatgtgcccagacgggataacatgattgccgacgaactctcacggctcgcgtcctcgcgagcccagaccccaccgggcgcctttgaagaaaggcttgcccagccgtcggcgcgacccgaccccttaggggagacggatgcgcctgaccggcccccgaggcctgtcggagtccaggcctcgggacccgaggggagtgctcccaactcccttagattgattgcttggatcgccgagatccaagcatacctcacagataagactctacccgaggaccgcgaagggagtgaacgcgtccatcgcatctccaaacgctacgtgctggtagaagggaccctctatcggcgcgcggctaatggaatcctcctgaagtgcattcctcgggaacaaggcgttgtgcttcttgccgatatccatgaaggcgaatgcggagcccactccgcctcgcgcaccttggttggtaaagcttttcgccagggtttctattggccgacagctcttaatgatgcggtcgacctggtccggcgatgtagagcgtgtcaattccacgccaagcaaatccatcagccggcccaggccctgcagaccataccactttcgtggccatttgctgtctggggactcgatatcctgggaccgtttaggcgggccccgggcgggtttgagtatctgtatgtcgcgatcgacaggttcactaagtggcccgaggcttatccggtcgtcaagatcgataagcactccgcacttaaattcattaagggcatcacggcccggtttggagtgcctgaccgtattattacggataatggcacccaattcactagtgaactcttcggcgactactgcgaagacatgggcatcaagctctgcttcgcctcacctgcccaccccagaagcaatggccaagtggagcgcgccaatgcggaaatcctcaaaggccttaaaaccaagaccttcaacatactcaagaagcacggcgattcatggatcgaggagttgccagcggtgctctgggcaaaccgaactacaccaagccgagcaaccggggaaacgcctttcttcctcgtctacggcgcggaagcggttctcccatccgagctcaccctgaggtctcctcgggctaccatgtattgcgaggctgatcaaaatcagcttcgcagagatgacctcgactacttggaagagcgaaggcggcgcgcggccctccgagccgcgcgctaccagcagagcctgtggcgctaccatcagcgccatgtccgggcccgatcactctgcgtcgacgacctcgtcctacgccgcgtccaaacgcgtgctggattgagcaagctttcaccaatgtgggagggtccgtatcgagtggtcggcgtcccccggccgggctccatacggctggccacgggcgacggcactgagctgcctaacccgtggaacatcgaacaccttcgtcgcttctacccctga

SEQ ID NO: 68219 - DNA, 6683 bp, Oryza sativa
  Clone ID: PAT_MRT4530_69001C.1
atgacctcccgcctcccggtgactcctaggcctaacatagcggcccacttgactagttcatatgttgttcatccctccctatctgcttgtagcacttgggtgagaccaatgtacacctacaaacacaatcgcacacgtggcctggtacccccgagggacgtcgggcccgagggtgatgtgttcgccctcctcttagtccccccgagggggtcgggccgcacccccctcggccccgagggccgaggcgccccgacccctcgtgggtttttgctccgcgtgtatgggttagaccggtcagatcgcgggttaggtggcgacaggcggtctgacacacgcctcaccccatcccgtcaggacgagggcttctaggcgctcgtctccagctggagctagcgtgttacctcccagagatggcacgttagtcctggtcagatatatgccaggcttcatcctaaccattacaggcaagatgttgtgtgaagaagggcgagcatgtagattgctaagctgacacgtggtggacaagaatgaccgacgtgactggtctgataccggtcatgtcgtcagcagacagccacgattccacgtcacgcctgcttccggcggaagtggaggtaggtatgggccgtcccatcagaaggtcattcggacggcaaccatacaagtctccgtctgtttatgaaaaggtgggcccaatagccgagccagcaaaggcgcacgacctctccccgagtatgagcggtgacgacggggagccaaacccacgccgtcgagctcgtactccaccgccacctccacgccaaagtcctaggcgggagaaggcgctcgagagggccgaaggatccgcgacttcgacatccacaggaggtggagaagggcggcgagatggggagcgtcgcctcctcgtctacggcgacggcagcacgccccagggcgcgctccaagctgcgggcgcgctcctacgtcacccgcccgtcgcccatgacccggagtctccagcccaacgttggctggacgatgtggccaaattggtcatgactgcacggcagcgcctagatgctggtgggcggtcctccgccaccaaggcctctggtgctgctaccaccggctccgcgtcgtcaagacggagggcgcggcgagcggcagccgctgttcgccattcggccgccactccttcgtcaacgcctccgacccgggaagatctgcgtggggaaccggatgctcgcatcagtatcgagcgccggcgtaatggccgacgtgctccccacgcaacggagggcgcctcctcgtccggagtgtcgcatcaccacggacgcggggatcagccctccgtgcccccggttggtggtgtcggctgtagagcctttgtggcgagccttcggaatgtccgttggcccccaaggttccggcccaccatcgccgaaaaatatgacgggagcgtcaaccccgccgagtttctccaggtctacacgaccgggatcgaggccgccgggggtgacgacagggtcatggcgaatttctttcccatggccctgaaaggacaggcgcggggtgaggaagcggacttgcacgcagtacagcgaagggatgatgagtcacttcgctcgtacattcagcggttctgtcaagtccgcaacaccataccatgcatccctgcacacgcggtgatttacgcgctcagggggggtgtgcggcacaaccgcatgctcgaaaagatcgcctccaaagagccccagactaccgcggagctttttcagctcgcggaccgagtggctcgtaaggaggaggcatggacctggaacccctccggttccggtgtggcagcttcggccgcccccggatccgccgctcagatagggcggcgtgacaggaggaggaagaagaggtcagcccataccgacgacgagggtcatgtcctcgccgtcgagggcgcttcgcgggccacccgaaaggggaggcctgcgggaggcaaaaagaacgaggccggcgctcccaacagggaacgcccaaccggcaagtggtgcaccgtccacaatacttcccttcacgacctcgcggactgccgtgcagtcaaaagtttggctgagcggacgaggaagtgggaggaggagaggaggcaggagcgccgagagggcaaatccccggtggttccttccggtaatcggcgaagtgaggccaagcagaaggcccccgccaaggacatcgatgacggcaatgatgacctaggtttccaagagcctggggccaccattgctaccgtcgatgggggagcgtgtgctcacgtttctcgccggagcttcaaggccatgaagcgagagcttctggccgcggcccctactcatgaggcgacgcgccgggcgcggtggtcggaggttgccctcaccttcgaccagaccgaccaaccaccgtgcgttgcccggggagggcagattgcgatggtggtttctcccaccgtttgcaacgtgaagttggggcgtgtcctcattgatgggggagcggccctcaacatcctttcccctgcggcctttgacgcaatcaaggccccggggatggtgctccggccgtcccagccaattatcggtgtgacgccggggcacacgtggccgttaggtcacatcgacctaccggtcactttcggtggatccgccaacttccgcacggagcgggtgaacttcgatgtggcggacctcagtctgccctacaacgcggtcctggggaggcccgcgttggtgaagttcatggcggcggttcactacgcctacctacagatgaagatgccgggccccggtggccccatctctgtccatggcgacctcaaagtcgcgctcgcttgtctggagcagcgcgcggaccacctcgccgctgcatccgagcctgagggtggcgacgagaggcttggcgcctccgcccccgccaccccgaggcagcggatgatcacaggcgacgaggtcccggaagacgcgctcgtctccttcctgcgggcaaacgctgacgtcttcgcatggagaccggcggatatgcccggggtccccagggaggtgattgagcaccgtctcgccgtgcggccgggcgcaaggccggtccggcagaaagtgcggcggcaggccccggaacgtcaagccttcatccgcgaggaggtggcgcgacttctggaggccggattcatccgtgaggtcatccatccggagtggctggcgaacccggtggtcgttcccaaggcgaacggcaagcttcggatgtgcatcgactacaccgaccttaacaaggcatgtcctaaggatccttaccccctgcctcgcatagatcagattgtcgactccactgcggggtgcgaccttttgtgttttctagatgcatactctggttaccatcagattcgcatggctagggaggatgaggaaaaaactgcgttcattacccccataggaacctattgttatacgacaatgcccttcgggttaaagaatgcaggtcctacttttcaacgtactactcgaatttctttgggtaaccaattaggacgtaatgttgaggcttatgtcgatgacttggttgtaaagacgcgcaaccaggaaatgttactctcagatctagcggaaacttttgagagtctccgctccgcccgcataaaactaaaccccgataagtgtgtgttcggtgtacctgcgggcaaacttctagggttcttggtctctgcccgaggcattgaggccaaccctgagaagatacgggctatagagcggatgcgcccccccagcaaacttagggatgtgcaatgcgtcaccggttgcatggccgccctaagtcggttcatatcgcggctgggagagaaggcgttacccttatttaagcttctcaaacgctccggaccgtttacctggacggaggaagccgaaaatgccctcacccagttgaaagcgtatctaagctctcccccagttctggtcgccccggagccagacgagcccttgttactctacttagcggcgaccccgcaagtagttagtgcggcattggttgtggagcgcgatgagaacaattctcatttcacgcttccccaccctgtgccgacttggcccgggagagagcagggaggagaggctcccgagccgaacggtggcccaaggcccccgacgaccggagttggccctctgcccgcttgtcagacggtgctaggagcccccgacccccaagaaggccctgaggccactgtgggaaggccgcacctatcgcccttcgaccccgaggctaaccctgtgctgacccgacccgggaaagagcagggagaagaggcccccgagccgaacggaggcctaaggcccctgacgaccggagttggccctttgcccgcttgtccaacgacgccaggagcccccgacccccaggacggccccgaagccactgtgggaaggccacccctgttatcctccgaccccgaggtcatcagcacagaagataagtgcgccccgcgaggctgcttggacgaagagtgccccagggatgcggcccctagcgaagaggatcggccccaccgaaaggtgcagcggcccgtctactttgttagtgaggccctccgggacgccaaaacccgataccctcaggcccagaagatgctttacgctattctgatggcctcgaggaaactgcgccattatttccaggcgcatcgggtcactgtagttacgtcttaccccctcggtcaaatcttgcgtaatcgagagggtacaggacgggtggtgaagtgggcaatcgaactttctgagttcgatttgcactttgaaccacgccacgctatcaagagccaggccctcgccgattttgtggcagagtggaccccggctcccgagcccgtctcgatccccgaggccagcacggacccctcgcagctgcctcacaccgcccactgggtgatgcagttcgacggctccctgtctcttcagggcgccggtgcgggggtcacgttgacctctccgagcggagacgtcctcagatacttggtccgcctcgactttcgagcgaccaataatatggcagaatacgagggactccttgccggactcagagtggcagctggactggggatccgccgcctcctggtgttaggcgactcccagctggtcgttaaccaagtctgtaaggagtaccggtgctctgacccgcagatggacgcctacgtgcgccaagtacggcgtatggagcgccattttgacgggattgagcttcggcatgtgcccagacgggataacatgattgccgacgaactctcacggctcgcgtcctcgcgagcccagaccccaccgggcgcctttgaagaaaggcttgcccagccgtcggcgcgacccgaccccttaggggagacggatgcgcctgaccggcccccgaggcccgtcggagtccaggcctcgggacccgaggggagtgctcccaactcccttagattgattgcttggatcgccgagatccaagcatacctcacagataagactctacccgaggaccgcgaagggagtgaacgcgtccatcgcatctccaaacgctacgtgctggtagaagggaccttctatcggcgcgcggctaatggaatcctcctgaagtgcattcctcgggaacaaggtgttgtgcttcttgccgatatccatgaaggcgaatgcggagcccactccgcctcgcgcaccttggttggtaaagcttttcgccagggtttctattggccgacagctcttaatgacgcggtcgacctggtccggcgatgtagagcgtgtcaattccacgccaagcaaatccatcagccggcccaggccctgcagaccataccagtttcgtggccatttgctgtctggggactcgatatcctgggaccgtttaggcgggccccgggcgggtttgagtatctgtatgtcgcgatcgacaagttcactaagtggcccgaggcttatccggtcgtcaagatcgataagcactccgcacttaaattcattaagggcatcacggcccggtttggagtgcctaaccgtattattacggataatggcacccaattcactagtgaactcttcggcgactactgcgaagacatgggcatcaagctctgcttcgcctcacctgcccaccccagaagcaatggccaagtggagcgcgccaatgcggaaatcctcaaaggccttaaaaccaagaccttcaacatactcaagaagcacggcgattcatggatcgaggagttgccagcggtgctctgggcaaaccgaactacaccaagccgagcaaccggggaaacgcctttcttcctcgtctacggcgcggaagcggttctcccatccgagctcaccctgaggtctcctcgggctaccatgtattgcgaggctgatcaaaatcagctttgcagagatgacctcgactacttggaagagcgaaggcggcgcgcggccctccgagccgcgcgctaccagcagagcctgcggcgctaccatcagcgccacgtccgggcccgatcactctgcgtcgacgacctcgtcctacgccgcgtccaaacgcgtgctggattgagcaagctttcaccaatgtgggagggtccgtatcgagtggtcggcgtcccccggccgggctccatacggctggccacgggcgacggcactgagctgcctaacccgtggaacatcgaacaccttcgtcgcttctacccctga

SEQ ID NO: 68220 - DNA, 1365 bp, Oryza sativa
  Clone ID: PAT_MRT4530_69002C.1
gtgaagcttgtgtttggtgaggacatcaggtgggcgcaggtgccggcgagctgcagcatggcacagcttcgcgaggctgtccggagcaagtttccggggctcaaggctgttcttgtcaagtacaaggacaaagagggtgacctggtgacaatcaccaatcaggatgagctcaaatgggctgaggatttggccgagccagggagctcgcttaggctctatgtcaccgaggccaatccggagcatgaaccttatcttgatgacaccaacagcgggccgttggagagaaacgtgaattccgacaatggaagtaccagaagcaataggcaggatgaggataggagcacggtgacttgcattgacgactggattgtgcagtttgctcggcttttcaagaaccatgtcggggtcagctctgatgagtatttggacctccatgaggtcagcatgaagctgtacaccgaggctatcgaggacacaattactactgaggaagcccaggaggtgtttcaacttgctgaaagcaacttccaggagatggcagcgcttgcgtttttccattggggtaatgttcatatgtctcgggccaggaagaggttgttactgccaggagactctccacaggaatcggtacttgaacaagtgaaggaagcgtatgaatgggcaaaagaagagtacaataaggctgggaggagatatgaagaagccgtgaaggcaaagccaaactttttcgaaggttttcttgcacttgcacatcaacattttgagcaagcaaaactgtcatggtattatgcaattggtagtagcgtagacctggacacatggccatcatctgaagtcctggaactcttcaataaagctgaagataacatggagaggggtacagagatgtgggaggaaatggaagagcaacgcctgaagaatcggtcaaaacctagccaggagaatgtggtgctggagaagatgggcttggatgaatatatcaaagaggggtcccccgaggacgcagctgaacaagcttctaatatgaggtctcagataaacattttatggggtatgctactttatgaacgttcagttgtggagtttaaattaggccttccaatgtgggaggattgcttgatggcagctattgaaaagttcaaacttggaggggcttcagctacagacattgctgtgttggttaaaaaccactgtgccaacgaaactgcccaagatggtttgggcttcaagattgatgaaattgtgcaagcctggaatgaaatgtatgacattaaacggtggctgcgtggtgttccatccttccgtcttgagccactatttaggcggagagttccacaattgcatactgcactggagcatatatag

SEQ ID NO: 68221 - DNA, 5988 bp, Oryza sativa
  Clone ID: PAT_MRT4530_69003C.1
atggccgagccagcaaaggcgcacgacctctccccgagtatgagcggtgacgatggggagccaaacccacgccgtcgagctcgtactccaccgccccctccacgccaaagtcctaggcgggagaaggcgctcgagagggctgaaggatccgcgacttcgacatccacaggaggtggagaagggcggcgagatggggagcgtcgcctcctcgtctacggcgacggcagcacgccccagggcgcgctccaagctgcaggcgcgctcctacgtcacccgcccgtcgcccatgacccggagtctccagcccaacgttggctggacgatgtggccaaattggtcatgactgcacggcagcgcctagatgctggtgggcggtcctccgccaccaaggcctctggtgctgctaccaccggctccgcgtcgtcgagacagagggcgcggcgagcggcagccgctgttcgccattcggctgccactccttcgtcaacgcctccgacccgggatgatctgcgtggggaaccggatgcccgcgtcagtatcgagcgccggcgtaatggccgacgtgctccccacgcaacggagggtacctcctcgtccggagtgtcacctcaccacggacgcggggatcagccctccgtgcccccggttggtggtgtcggctgtagagcctttgtggcgagccttcggaatgtccgttggcccccaaggttccggcccaccatcgccgaaaaatatgacgggagcgtcaaccccgccgagtttctccaggtctacacgaccgggatcgaggccgccgggggtgacgacagggtcatggcgaatttctttcccatggccctaaaaggacaggcgcggggttggctaatgaacttgccacccgcgtctgtccactcttgggaggatttgtgccaacagttcaccatgaacttccaaggcacatatccgcgcccaggtgaggaagcggacttgcacgcagtacagcgaagggatgatgagtcacttcgctcgtacattcagcggttctgtcaagtccgcaacaccataccatgcatccctgcacacgcggtgatttacgcgttcagggggggtgtgcggcacaaccgcatgctcgaaaaaatcgcctccaaagagccccagactaccgcggagctttttcagctcgcggaccgagtggctcgtaaggaggaggcatggacctggaacccctccggttccggtgtggcagcttcggccgcccccggatccgccgctcagatagggcggcgtgacaggaggaggaagaagaggtcagcccataccgacgacgagggtcatgtcctcgccgtcgagggcgcttcgcgggccacccgaaaggggaggcctgcgggagacaaaaagaaggaggccggcgctcccggcagggagcgcccaaccggcaagtggtgcaccgtccacaacacttcccttcacgacctcgcggactgccgtgcagtcaaaagtttggctgagcggacgaggaagtgggaggaggagaggaggcaggagcgccgagagggcaaatccccggcggttccttccggtaatcggcgcagtgaggccaagcagaaggcccccgccgaggacatcgatgacggcgatgatgacctaggtttccaagagcctggggccaccattgccaccgtcgataggggagcgtgtgctcacgtttctcgccggagcttcaaggccatgaagcgagaacttctggccgcggcccctactcatgaggcgacgtgtcgggcgcggtggtcggagctggggcgtgtcctcattgatggaggagcagccctcaacatcctttcccccgcagcctttgacgccatcaaggccccggggatgatgctccggccgtcccagccgatcatcggtgtgacgccggggcacacttggccgctaggtcatatcgacctcccggtcaccttcggtggacccgccaacttccgcacggagcgggtcaactttgatgtggcggacctcagtctgccctacaacgcggtcttggggaggcccgcgttggtaaagttcatggcggcggtccactacgcctacctccagatgaagatgccgggccccgatggccccatctctgtccatggcgacctcaaagtcgcgctcgcttgtatggagcagcgcgcggaccgcctcgccgtcgtgtccaagcccgagggtggcgacgagaggcttggcacatccgcccccgccgccccgaggcagcggatagtcacgtgcgatgaggtcccggaagacgcgctcgtctctttcctgcgggcaaacgctgacgtcttcgcatggagaccggcggatatgcccggggtccccagggaggtgattgagcaccgtctcgccgtacggccgggcgcaaggccggtccggcagaaagtgcggcgccaggccccggaacgtcaagccttcatccgcgaggaggtggcgcgacttctggaggccggattcatccgtgaggtcatccatccggagtggctggcgaacccggtggtcgttcccaaggcgaacggcaagcttcggatgtgcatcgactacaccgacgttaacaaggcatgtcctaaggatccttaccccctgcctcgcatagatcagattgtcgactccactgcggggtgcgaccttttgtgttttctagatgcatactctggttaccatcagattcgcatggctagggaggatgaggaaaaaactgcgttcattacccccataggaacctattgttatacgacaatgcccttcgggttaaagaatgcaggtcctacttttcaaggtactactcgaatttctttgggtagccaattaggacgtaatgttgaggcttatgtcgatgacttggttgtaaagacgcgcaaccaggaaacgttactctcagatctagcggaaacttttgagagtctccgctccgcccgcataaaactaaaccccgataagtgtgtgttcggtgtacctgcgggcaagcttctcgggttcttggtctctgcccgaggcattgaggccaaccccgagaagatacgggctatagagcggattcgcccccccagcaaacttagggatgtgcaatgcgtcaccggttgcatggccgccctaagtcggttcatatcgaggctgggagagaaggcgttacccttatttaagcttctcaaacactccggaccgtttacctggacggaggaagctgaaaatgccctcacccagttgaaggcgtatctaagctctcccccagttctggtcgccccggagccagacgagcccttgttactctacttagcggcgaccccgcaagtagttagtgcggcattggttgtggagcgcgatgaggacaattctcatttcacgcttccccaccctgtgccgacttggcccgggagagagcagggaggagaggcccccgtgccgaacggtggcccaacgcccccgacgaccggagttggccctctgcccgcttgtcagacggtgctaggagcccccgacccccaggaaggccctgaggccactgtgggaaggccgcacctatcgccctttgaccccgaggctaaccctgtgctgactcgacctgggaaagagcagggagaagaggcccccgagccgaacggaggcctaaggcccctgacgaccggagttggccctttgcccgcttgtccgacgacgccaggagcccccgacccccaggacggccccgaagccactgtgggaaggccgcccctgttatcctccgaccccgaggtcatcagcacagaagacaagtgcgccccgcgaggctgcttggacgaagagtgccccagggatgcggcccctagcgaagaggatcggccccaccgaaaggtgcagcggcccgtctactttgttagtgaggccctccgggacgccaaaacccgataccctcaggcccagaagatgctttacgctattctgatggcctcgaggaaactgcgccattatttccaggcgcatcgggtcactgtggttacgtcttaccccctcggtcaaatcttgcataatcgagagggtacaggacgggtggtgaaatgggcaatcgaactttctgagttcgatttgcactttgaaccacgccacgctatcaagagccaggccctcgccgattttgtggcagagtggaccccggctcccgagcccgtctcgatccccgaggccagcacggacccctcgcagctgcctcacaccgcccactgggtaatgcagttcgacggctctctgtctcttcagggcgccggtgcgggggtcaccttgacctctccgagcggagacatcctcagatacttggtccgcctcgactttcgagcgaccaataatatggcagagtacgagggactccttgccggactcagagtggcagctggactggggatccgccgcctcctggtgttgggcgactcccagctggtcgttaaccaagtctgtaaggagtaccggtgctctgacccgcagatggacgcctacgtgcgccaagtacggcgtatggagcgccattttgacgggattgagcttcggcatgtgcccagacgggataacatgattgccgacgaactctcacggcttgcgtcctcgcgagcccagaccccaccgggcgcctttgaagaaaggcttgcccagccgtcggcgcgacccgaccccttaggggagacggatgcgcctgaccggcccccgaggcccgtcggagtccaggcctcgggacccgaggggagtgctcccagctcccttagattgattgcttggatcgccgagatccaagcatacctcacagataagactctacccgaggaccgcgaaaggagtgaacgcgtccatcgcatctccaaacgctatgtgctggtagaagggaccctctatcggcgcgcggctaatggaatcctcctgaagtgcattcctcgggaacaaggcgttgtgcttcttgccgatatccatgaaggcgaatgcggagcccactccgcctcgcgcaccttggttggtaaagcttttcgccagggtttctattggccgacagctctcaatgatgcggtcgacctggtccggcgatgtagagcgtgtcaattccacgccaagcaaatccatcagccggcccaggccctgcagaccataccactttcgtggccatttgctgtctggggactcgatatcctgggaccgtttaggcgggccccgggcgggtttgagtatctgtatgtcgcgatcgacaagttcactaagtggcccgaggcttatccggtcgtcaagatcgataagcactccgcacttaaattcattaagggcatcacggcccggtttggagtgcctaaccgtattattacggataatggcacccaattcactagtgaactcttcggcgactactgcgaagacatgggcatcaagctctgcttcgcctcacctgcccaccccagaagcaatggccaattggagcacgccaatgcggaaatcctcaaaggccttaaaaccaagaccttcaacatactcaagaagcacggcgattcatggatcgaggagttgccagcggtactctgggcaaaccgaactacaccaagccgagcaaccggggaaacgcctttcttcctcgtctacggcgcggaagcggttctcccatccgagctcaccctgaggtctcctcgggccaccatgtactgcgaggctgatcaagatcagcttcgcagagatgacctcgactacttggaagagcgaaggcgatgcgcggccctccgagccgcgcgctaccagcagagcctgcggcgctaccatcagcgtcacgtccgggcccgatcactctgcgtcgacgacctcgtcctacgccgcgtccaaacacgtgctggattgagcaagctttcaccaatgtgggagggtccgtatcgagtggtcggcgtcccccggccgggctccatacggctggccacgggcgacggcactgagctgcctaacccgtggaacatcgaacaccttcgtcgcttctacccctga

SEQ ID NO: 68222 - DNA, 5928 bp, Oryza sativa
  Clone ID: PAT_MRT4530_69004C.1
atgaccgaacaagcaaaggcgcacaacctctctccgagcgttagcggcgacgacggggagccaaacccacgccgtcgagctcgtactccaccgccccctccacgccaaagtcctaggcgggaggaggcgctcgagagggtcgaaggatccgcgacttcgacatccacgggtgatggagaagggcgccgagatggggagcatcgcctcctcgtctacggcgacggcagcacgccccagggcgcgctccaagctgcgggcgcgctcctgcgtcacccgcccgtcgtccctgacccggagtctccagcccaacgatggctggacgacgtggccaatttggtcatgacggcgcggcagcgcctagatgctggtgggcggtcctccgccaccaaggcctctggtgctgctaccaccggctccgcgtcatcgagacggagggcgcggcgagcggcggccgctgttcgccattcggctgccactccttcgtcagcgcctccgacccgggaagatctgcgtggggggccggatgcccgcatcagtatcgagcgccggcgtaatggccgacgtgttgcccacgcaacggagggcgcctcctcgtccggagtgtcacctcaacacggacgtggggatcagccctccgtgcccccggttggtggtgtcggctataaagcctttgtggcgagccttcggaacgtccgttggcccccaaggttccggcccaccattgccgaaaaatatgacgggagcgtcaaccccgccgagtttctccaggtctacacgaccgggatcgaggccgccgggggtgacgacagggtcatggagaatttttttcccatggccctgaagggacaggcgcggggatggctaatgaacttgccacccgcgtccgtccactcttgggaggatttgtgccaacagttcaccatgaactttcaaggcacatatccgcgcccaggtgaggaagcggacttgcacgcagtacagcgaagggatgatgagtcacttcgctcgtacattcagcggttctgtcaagtccgcaacaccataccatgcatccctgcacacgcggtgatctatgcgttcagggggggtgtgcggcacaaccgcatgctcgaaaagatcgcctccaaagagccccagactaccgcggagctttttcagctcgcggaccgagtggctcgtaaggaggaggcatggacctggaacccctccggttccggtgtggcagtttcggccgcccccggatccgctgctcagacagggcggcgtgacaggaggaggaagaagaggtcaacccattccgacgacgagggtcatgtcctcgccgtcgagggcgcttcgtgggccacccgaaaggggaggcctgcgagcgacagaaagaaggaggctagcgctcccagcagggagcgcccaaccggcaagtggtgcaccgtccacaacacctcccttcacgacctcgcggactgccgcgcagtcaaaagtttggctgagcggacgaggaagtgggaggaggagaggaggcaggagcgccgagagggcaagtccccggcggttccttccggcaatcggcggagtgaggccaagcagaaggcccccgccgaagacatcgatgacggcgataatgacctaggtttccaagagcctggggccactattgccactgtcgatgggggagcgtgtgctcacgtttctcgccggagcctcaagaccatgaagcgagagcttctggccgcggcccctactcatgaggcgacgcgacgggcgcggtggtcggagctggggcgtgtcctcattgatgggggagcggccctcaacatcctttcccccgtagcctttgacgccatcaaggccccggggatgatgctccggccgtcccagccgattatcggtgtgacgccggggcacacatgtccgctaggtcatatcgaccttccggtcaccttcggtggatccgccaacttccgcatggagcgggtgaactttgatgtggcggacctcagtctgccctacaacgcggtcctagggaggcccgcgttggtgaagttcatggcggcggtccactacgcctacctccagatgaagatgccgggccccggtggccccatctctgtccatggcgacctcaaagtcgcgcttgcttgtatggagcagcgcgcggaccacctcgccgccgcgtccaagcccgagggtggcgacgagaggcttggcgcctccgtccctgccgccccgaggcagcggatgatcacatgcgacgaggtcccggaagacgcgctcgtctccttcctgcgggcaaacgctgacgtcttcgcatggagaccggcggatatgcccggggtccccagggaggtgattgagcaccgtctcgccgtgcggccgggcgcaatgccggtccgacagaaagtgcggcggcaggccccggaacgtcaagccttcatccgcgaggaggtggcgcgacttctggaggccggattcatccgcgaggtcatccatccggagtggctggcgaacccggtggtcgttcccaaggcgaacggcaagcttcggatgtgcatcgactacaccgaccttaacaaggcatgtcctaaggacccttaccccctgcctcgcatagatcagattgtcgactccactgcggggtgcgaccttttgtgttttctagatgcatactctggttaccatcagattcgcatggctagggaggatgaggaaaaaactgcattcattacccccataggaacctattgttatacgacaatgcccttcgggttaaaaaatgcaggtcctacttttcaacgtactactcgaatttctttgggtagccaaataggacgtaatgttgaggcttatgtcgatgacttggttgtgaagacgcacaaccaagagaccttactctcggatctagcggaaacttttgaaagtctccgctccgcccgcataaagctgaaccccgataagtgcgtgttcggtgtacctgcgggcaagcttctcgggttcttggtctctgcccgaggcatcgaggccaaccccgagaagatacgagctatagagcggatgcgcccccccagcaaacttagggatgtgcaatgcgtcaccggttgcatggccgccctaagtcgattcatatcgaggctgggagagaaggcgctacccttatttaagctcctcaaacgctccgggccgtttacttggacggaggaagctgaacgtgccctcactcagttgaaggcgtatctcagctctcccccggttctggtcgccccggagccagatgagcccttgctactctacttagcggcgaccccgcaagtagttagtgcagcgttggttgtggagcgcgatgaggacaatcctcattccgcgcatccccaccctgtgctggcttggcccgggagagagccgggaggagaggcccccgagccgaacggtggcccaaggcccccgacgaccggagctggccctctgcccgcttgtcagacggtgccaggtgcccccgacccccaggatggcccggcggccactgcgggaaggccgcacctatcgccctctgaccccgaggctaaccctgtgccgactcgacccgggagagagcagggagaagaggcccccgagccgaacgaagcccccgacccccaggacggccccgaggccactgtgggaaggccgcccctgtcgtcctccgaccccgaggtcgtcggcacagaagacgagtgcgccccgcgaggccgcttggacgaagagcgccccaaggatgcgacccctagcgaagaggatcggccccaccgaaaggtgcagcggcccgtctactttgttagtgaggccctccgggacgccaagacccgataccctcaggcccagaagatgctttatgctattctgatggcttcgaggaaactgcgccattatttccaggcgcatcgggtcacggtggttacgtcttaccccctcggccaaatcttgcataatcgagagggtactggacgggtggtgaaatgggcaatcgaactttctgagttcgatttgcactttgaaccacgccacgctatcaagagccaggccctcgccgactttgtggcagagtggaccccagctcccgagcccgtctccattcccgaggccaactcgggcccctcgcagctgcctcacgccgcctactgggtgatgcagtttgacggctccctgtctcttcagggcgcctgtgcgggggtcacgttgacctcgcctagtggagacgtcctcagatacctggttcgccttgactttcgggcgaccaataatatggcagagtacgagggactccttgcgggactcagggtggcagctggactggggatccgccgcctcctggtattaggcgactcccagctggtcgttaaccaggtctgtaaggagtaccggtgctctgacccgcagatggatgcttatgtacgccaagtgcggcgtatggagcgccatttcgacgggatagagcttcggcacgtgcccagatgggataacacgattgccgacgaactctcacggctcgcttcctcgcgagcccagaccccaccgggcgcctttgaagaaaggcttgcccagccgtcggcgcgacccgaccccttaggggagacggacgcgcctgaccggcccccgaggcccgtcggagtccaggcctcgggacccgaggggagcgctcccagctcccttagattgattgcttggatcgctgagatccaagcatacctcacagataagactctacccgaggatcgcgaagggagtgaacgcgtccagcgcatttccaaacgctacgtgctggtagaagggaccctctatcggcgcgcggctaacggaatcctcctgaagtgcattcctcgggaacaaggcatcgagcttcttgccgatatccatgaaggcgaatgcggagcccactccgcctcgcgcaccttggttggcaaagcctttcgtcaaggtttctattggccgacagctctcaatgatgcggtcgacctggtccggcggtgcagagcgtgtcaattccacgccaagcaaatccatcagccggcccaggccctgcagatcataccactctcatggccatttgctgtctgggggctcgatattctgggaccgtttaggcgggccccgggcgggtttgagtatctgtatgtcgcgatcgacaagttcactaagtggcccgaggcttatccggtcgtcaagatcgataagcactccgcacttaaattcattaagggcatcacagcccggtttggagtgcctaaccgtattattacggataacggcacccaattcactagtgagcttttcggtgactactgcgaagacatgggcatcaagctctgcttcgcctcacctgcccaccccagaagcaacggccaagtggagcgcgccaatgcggaaatcctcagaggccttaaaaccaagaccttcaacatcctcaagaagcacggcgattcgtggatcgaggagttgccagcggtgctctgggcgaatcgaaccacaccaagccgagcaaccaaggaaacgcctttcttcctcgtctacggcgcggaagcggttctcccatccgagctcaccctgaggtcccctcgggccaccatgtactgcgaggctgatcaagatcagcttcgcagagatgacctcgactacttggaggagcgaaggcggcgcgcggccctccgagccgcgcgctatcagcagagcctgcggcgctaccatcagcgccacgtccgggcccgatcactctgcgtcgacgacctcgtcctacgccgcgtccaaacgcgtgctggattgagcaagctctcaccaatgtgggagggtccgtatcgagtgatcggtgtcccccggccgggctccgttcggttggccacgggcgacggcacagagctgcctaacccgtggaacatcgaacaccttcgtcgcttctacccctaa

SEQ ID NO: 68223 - DNA, 315 bp, Oryza sativa
  Clone ID: PAT_MRT4530_69005C.1
atttttatgcagcatggattgagtgatgccattggggggggttgtttgacaaagttgggcggtgacctacacctgggtggactgttctaccatctgtataaccagattgctacaaacaccttggagcgagtggcttctctgacacaagctgtccgcaaagagttgaaacgtgttttcgtcatcggattctcaatcattgtttttggtaacaaaattagcacacaaactggaattggcacgtcacattgacctagctggatctgctatggaccttcacattaaggctaacattgcagaggtcaaaaggaaaaagat

SEQ ID NO: 68224 - DNA, 5928 bp, Oryza sativa
  Clone ID: PAT_MRT4530_69006C.1
atggccgaacaagcaaaggcgcacaacctctctccgagcgttagcggtgacgatggggagccaaacccacgccatcgagctcgcgctccaccgccccctccacgccaaagttctaggcgggaggaagtgctcgagagggtcgaaggatccgcgacttcgacatccacgggtgatggagaaggacggcgagacggggagcgtcgcctcctcgtctacggcgatggcagcacgccccagggcgcactccaggctgcgggcgcgctcctgcgtcatccgcccgtcgtccccgatccagagtctccagctcagcgttggctggacgacgtggccaacttggtcatgacggcacggcagcgcctaggtgctggtgggcggtcctccgccaccaagacctctggcgctgctaccaccggctccgtgtcgtcaaggcggagggcgcggcgagcggcggctgttgctcgccattcggccgccactctttcgtcagcgcctccgacccaggaagatctgcgtggggggccggatgcccgcatcagtatcgagcgccgacgtaatggccgacgtgctgcccacgcaaaggagggcgcctcctcgtccggagtgtcacatcaacacggacgcggggatcagccctccgtgcccccggttggtggtgtcggctgtagagcctttgtggcgagccttcggaacgtccgttggcccccaaggttccggcccaccatcgccgaaaaatatgacgggagcgtcaaccccgccgagtttctccaggtctacacgaccgggatcgaggccgccgggggtgacgacagggtcatggcgaatttctttcccatggccctgaaaggacaggcgcggggttggctaatgaacttgccacccgcgtctgtccactcttgggaggatttgtgccaacagttcaccatgaacttccaaggcacatatccgcgcccaggtgaggaagcggacttgcacgcagtacagcgaagggatgatgagtcacttcgctcgtacattcagcggttctgtcaagtccgcaacaccataccatgcatccctgcacatgcggtgatttacgcgttcagggggggtgtgcggcacaaccgcatgctcgaaaagatcgcctccaaagagccccagactaccgcggagctttttcagctcgcggaccgagtggctcgtaaggaggaggcatggacctggaacccctccggttccggtgtggcagtttcggccgcccccggatccgccgttcagatagggcggcgtgacaggaggaggaagaagaggtcagcccataccgacgacgagggtcatgtcctcgccgtcgagggcgcttcgcgggccacccgaaaggggaggcctgcgggaggcaaaaagaacgaggccggcgctcccaacagggaacgcccaaccggcaagtggtgcaccatccacaacacttcccttcacgacctcgcggactgccgtgcagtcaaaagtttggctgagcggacgaggaagtgggaggaggagaggaggcaggagcgccgagagggcaaatccccggcggttccttctggtaatcggcgaagtgaggccaagcagaaggcccccgccgaggacatcgatgacggcgatgatgacctaggtttccaagagcctggggccaccattgctaccgtcgatgggggagcgtgtgctcacgtttctcgccggagcttcaaggccatgaagcgagagcttctggccgcagcccctactcatgaggcgacgcgccgggcgcggtggtcggaggttgccctcaccttcgaccagaccgaccacccaccgtgcgttgcccggggagggcagattgcgatggtggtttctcccaccgtttgcaacgtgaagttggggcgtgtcctcattgatgggggagcggccctcaacatcctttcccctgcggcctttgacgccatcaaggccccggagatggtgctccggccgtcccagccaattatcggtgtgacgccggggcacacgtggccgttaggacacattgacctaccggtcaccttcggtggatccgctaacttccgcacggagcgggtgaacttcgatatggcggacctcagtctgccctacaacgcggtcctggggaggcccgcattggtgaagttcatggcggcggtccactacgcctacctacagatgaagatgccgggccccggtggccccatctctgtccatggcgacctcaaagtcgcgctcgcttgtctggagcagcgcgcggaccacctcgccgctgcgtccaagcccgagggtggcgacgagaggcttggcgcctacgcccccgccaccccgaggcaacggatgatcacaggcgacgaggtcccggaagacgcgctcgtctccttcctgcgggcaaacgctgacgtcttcgcatggagaccggcggatatgcccggggtccccagggggttgattgagcaccgtcttgccgtgcggccgggcgcaaggccggtccggcagaaagtgcggcggcaggccccggaacgtcaagccttcatccgtgaggaggtggcgcgacttctggaggccggattcatccgtgaggtcatccatccggagtggctggcgaacccggtggtcgttcccaaggcgaacggcaagcttcggatgtgcatcgactacaccgaccttaacaaggcatgtcctaaggatccttaccccctgcctcgcatagatcagattgtcgactccactgcggggtgcgaccttttgtgttttctagatgcatactctggttaccatcagattcgcatggctagggaggatgaggaaaaaactgcgttcattacccccataggaacctattgttatacgacaatgcccttcgggttaaagaatacatgtcctacttttcaacgtactactcgaatttctttgggtagccaattaggacgtaatgttgaggcttatgtcgatgacttggttgtaaagacgcgcaaccaggaaatgttactctcagatctagcggaaacttttgagagtctccgctccgcccgcataaaactaaaccccgataagtgtgtgttcggtgtacctgcgggcaagcttctagggttcttggtctctgcccgaggcattgaggccaaccccgagaagatacgggctatagagcggatgcgcccccccagcaaacttagggatgtgcaatgcgtcaccggttgcatggccgccctaagtcgattcatatcgaggctgggagagaaggcgttacccttatttaagcttctcaaacgctccggaccgtttacctggacggaggaagccgaaaatgccctcacccagttgaaggcgtatctaagctctcccccagttctggtcgccccggagccagacgagcccttgttactctacttagcggcgaccccgcaagtagttagtacagcattggttgtggagcgcgatgagaacaattctcatttcacgcttccccaccctgtgccgacttggcccgggagagagcagggaggagaggctcccgagccgaacagtggcccaaggcccccgacgaccggagttggccctctgtccgcttgtcagacggtgctaggagcccccgacccccaggaaggccctgaggccactgtgggaaggccgcacctatcgccctttgaccccgaggctaaccctgtgctgactcgacccgggaaagagcagggagaagaggcccccgagccgaacggaggcctaaggcccctgacgaccggagttggccctttacccgtttgtccgacgacgccaggagcccccgacccccaggacggccccgaagccactgtgggaaggccgcccctgttatcctccgaccccgaggtcatcagcatagaagacaagtgcgccccgcgaggctgcttggacgaagagtgccccagggatgcggcccctagcaaagaggatcggccccaccgaaaggtgcagcggcccgtctactttgttagtgaggccctccgggacgccaaaacccgataccctcaggcccagaaaatgctttacgctattctgatggcctcgaggaaactgcgccattatttccaggcgcatcgggtcactgtagttacgtcttaccccctcggtcaaatcttgcataatcgagagggtacaggacgggtggtgaaatgggcaatcgaactttctgagttcgatttgcactttgaaccacgccacgctatcaagagccaggtcctcgccgattttgtggcagagtggaccccggctcccgagcccgtctcgatccccgaggccagcacggacccctcgcagctgcctcacaccgcccactgggtgatgcagttcgacggctccctgtctcttcagggcgccggcgactcccagctggtcgttaaccaagtctgtaaggagtaccggtgctctgacccgcagatggacgcctacgtgcgccaagtacggcgtatggagcgccattttgacgggattgagcttcggcatgtgcccaaacgggataacatgattgccgacgaactctcacagctcgcgtcctcgcgagcccagaccccaccgggcgcctttgaagaaaggcttgcccaaccgtcggcgcgacccgaccccttagggcagacggatgcgcctgaccggcccccgaggcccgtcggagtccaggcctcgggacccgaggggagtgctcccaactcccttagattgattgcttggatcgccgagatccaagcatacctcacagataagactctacccgaggaccgcgaagggagtgaacgcgtccatcgcatttccaaacgctacgtgctggtagaagggaccctctatcggcgcgcggctaatggaatcctcctgaagtgcattcctcgggaacaaggtgttgtgcttcttgccgatatccatgaaggcgaatgcggagcccactccgcctcgcgcaccttggttggtaaagcttttcgccagggtttctattggccgacagctcttaatgacgcggtcgacctggtccggcgatgtagagcgtgtcaattccacgccaagcaaatccatcagccggcccaggccctgcagaccataccactttcgtggccatttgctgtctggggactcgacatcctgggaccgtttaggcgggccccgggcgggtttgagtatctgtatgtcgcgatcgacaggttcactaagtggcccgaggcttatccggtcgtcaagatcgataagcactccgcacttaaattcattaagggcatcacggcccggtttggagtgcctaaccgtattattacggataatggcacccaattcactagtgaactcttcggcgactactgcgaagacatgggcatcaagctctgcttcgcctcacctgcccaccccagaagcaatggccaagtggagcgcgccaatgcggaaatcctcaaaggccttaaaaccaagaccttcaacatactcaagaagcacggcgattcatggatcgaggagttgccaacggtgctctgggcaaaccgaactacaccaagccgagcaaccggggaaacgcctttcttcctcgtctacggcgcggaagcggttctcccatccgagctcaccctgaggtctcctcgggctaccatgtattgcgaggctgatcaagatcagcttcgcagagatgacctcgactacttggaagagcgaaggcggcgcgcggccctccgagccgcgcgctaccagcagagcctgcggcgctaccatcagcgtcacgtccgggcccgatcactctacgtcgacgacctcgtcctacgccgcgtccaaacgcgtgctggattgagcaagctttcaccaatgtgggagggtccgtatcgagtggtcggtgtcccccggccgggctccatacggctggccacgagcgatggcactgagctgcctaacccgtggaacatcgaacaccttcgtcgcttctacccctga

SEQ ID NO: 68225 - DNA, 260 bp, Oryza sativa
  Clone ID: PAT_MRT4530_69007C.1
aaacccccaccccttgaatgtggctatccacctgctgcagacatgggtatggcctagtacaagatatacacactttccccatatgtgcatgctcaagttaggcagtaaaaaacaaaggcgtgtggacacactgcctacaaagtttaagcacctacaaagattaactgccctctgtcatgggactggactccccacgcctcccctgaacttcccctccttcttcttcattgttatctctacaagttcccacaataaactcc

SEQ ID NO: 68226 - DNA, 5799 bp, Oryza sativa
  Clone ID: PAT_MRT4530_69008C.1
atggccgagccagcaaaggcgcacgacctctccccgagtatgagcggtgacgacggggagccaaacccacgccgtcgagctcgtactttaccgccccctccacgccaaagtcctaggcgggagaaggcgctcgagagggccgaaggatccgcgacttcgacacccacaggaggtggagaagggcggcgagatggggagcgtcgcctcctcgtctacggcgacggcagcacgccccagggcgcgctccaagctgcgggcgcgctcctacgtcacccgcccgtcgcccatgacccggagtctccagcccaacgttggctggacgatgtggccaaattggtcatgactgctcggcagcgcctagatgctggtgggcggtcctccgccaccaaggcctctggtgctgctaccaccggctccgcgtcgtcaagacggagggcgcggcgagcggcagccgctgttcgccattcggccgccactccttcgtcaacgcctccgacccgggaagatctgcgtggggaaccggatgcccgcatcagtatcgagcgccggcgtaatggtcgacgtgctccccacgcaacggagggcgcctcctcgtccggagtgtcacctcaccacggacgtggggatcagccctccgtgcccccggttggtggtgtcggctgtagagcctttgtggcgagccttcggaatgttcattggcccccaaggttccggcccaccctcgccaaaaaatatgacgggagcgtcaaccccgccgagtttctccaggtctacacgaccgggatcgaggccgccgggggtgacgacagggtcatggcgaatttctttcccatggccctgaaaggacaggcgcggggttggctaatgaacttgccacccgcgtctgtccactcttgggaggatttgtgccaacagttcaccatgaacttccaaggcacatatccgcgcccaggtgaggaagcggatttgcacgcagtacagcgaagggatgatgagtcacttcgctcgtacattcagcggttctgtcaagtccgcaacaccataccatgcatccctgcacacgcggtgatttacgcgttcaggggtggtgtgcggcacaaccgcatgctcgaaaagatcgcctccaaagagccccagactaccgcggagctttttcagctcgcggaccgagtggctcgtaaggaggaggcatggacctggaacccctccggttccggtgtggcagcttcggccgcccccggatccgccgctcagatagggcggcgtgacaggaggaggaagaagaggtcagcccataccgacgacgagggtcatgtcctcgccgtcgagggcgcctcgcgggccacccgaaaggggaggcctgcgggaggcaaaaagaacgaggccggcgctcccaacagggagcgcccaaccggcaagtggtgcaccgtccacaacacttcccttcacgacctcgcggactgccgtgcagtcaaaagtttggctgagcggacgaggaagtgggaggaggagaggaggcaggagcgccgagagggcaaatccccggcgattccttccggtttccaagagcctggggccaccattgccaccgtcgatgggggagcgtgtgctcacgtttctcgccggagcttcaaggccatgaagcgagagcttctggccgcggcccctactcatgaggcgacgtgtcgggcgcggtggtcggaggttgccctcaccttcgaccagaccgaccacccaccgtgcgttgcccagggagggcagattgcgatggtggtttctcccaccgtttgcaacgtgaagttggggcgtgtcctcattgatgggggagcggccctcaacatcctttcccctgcggcctttgacgccatcaaggccccggggatggtgctccggccgtcccagccaattatcggtgtgacgccggggcacacgtggccgttaggtcacattgacctaccggtcaccttcggtggatccgccaacttccgcacggagcgggtgaacttcgatgtggcggacctcagtctgccctacaacgcggtcctggggaggcccgcgttggtgaagttcatagcggcggttcactacgcctacctacagatgaagatgccgggccccggtggccccatctctgtccatggcgacctcaaagtcgcactcgcttgtctggagcagcgcgcggaccacctcgccgctgcgtccaagcccgagggtggcggcgagaggcttggcgcctccgcccccgccaccccgaggcagcggatgatcacaggcgacgaggtcccggaagacgcgctcgtctccttcctgcgggcaaacgctgacgtcttcgcatggagaccggcggatatgcccggggtccccagggaggtgattgagcaccgtctcgccgtgcggccgggcgcaaggccggtccggcagaaagtgcagcggcaggccccggaacgtcaagccttcatccgcgaggaggtggcgcgacttctggaggccggattcatccgtgaggtcatccatccggagtggctggcgaacccggtggtcgttcccaaggcgaacggcaagcttcggatgtgcatcgactacaccgaccttaacaaggcatgtcctaaggatccttaccccctgcctcgcatagatcagattgtcgactccactgcggggtgcgaccttttgtgttttctagatgcatactctggttaccatcagattcgcatggctagggaggatgaggaaaaaactgcgttcattacccccataggaacctattgttatacgacaatgcccttcgggttaaagaatgcaggtcctacttttcaacgcattgaggccaaccccgagaagatacgggctatagagcggatgcgcccccccagcaaacttagggatgtgcaatgcgtcaccggttgcatggccgccctaagtcggttcatatcgaggctgggagagaaggcgttacccttatttaagcttctcaaacgctccggaccgtttacctggacggaggaagccgaaaatgccctcacccagttgaaggcgtatctaagctctcccccagttctagtcgccccggagccagacgagcccttgttattctacttagcggcgaccccgcaagtagttagtgcggcattggttgtggagcgcgatgagaacaattctcatttcacgcttccccaccctgtgccgacttggcccgggagagagcagggaggagaggctcccgagccgaacggtggcccaaggcccccgacgaccggagttggccctctgcccgcttgtcagacggtgctaggagcccccgacccccaggaaggccctgaggccactgtgggaaggccgcacctatcgcccttcgaccccgaggctaaccctgtgctgactcgacccgggaaagagcagggagaagaggcccccgagccgaacggaggcctaaggcccctgacgaccggagttggccctttgcccgcttgtccgacgacgccaggagcccccgacccccaggacggccccgaagccactgtgggaaggccgcccctgttatcctccgaccccgaggtcatcagcacagaagacaagtgcgccccgcgaggctgcttggacgaagagtgtcccagggatgcggcccctagcgaagaggatcggccccaccgaaaggtgcagcggcccgtctactttgttagtgaggccctccgggacgccaacacccgataccctcaggcccagaagatgctttacgctattctgatggcctcgaggaaactgcgccattatttccaggcgcatcgggtcacaatagttacgtcttaccccctcggtcaaatcttgcataatcgagagggtacaggacgggtggtgaaatgggcaatcgaactttctgagttcgatttgcactttgaaccacgccacgctatcaagagccaggccctcgccgattttgtggcagagtggaccccggctcccgagcccgtctcgatccccgaggccagcacggacccctcgcagctgcctcacaccgcccactgggtgatgcagttcgacggctccctgtctcttcagggcgccggtgcgggggtcacgttgacctctccgagcggagacgtcctcagatacttggtccgcctcgactttcgagcgaccaataatatggcagaatacgagggactccttgccgaactaagagtggcagctggattggggatccgccgcctcctggtgttaggcgactcccagctggtcgttaaccaggtctgtaaggagtaccggtgctctgacccacagatggacgcctacgtgcgccaagtacggcatatggagcgccattttgatgggattgagcttcggcatgtgcccagacgggataacatgattgccgacgaactctcacggctcgcgtcctcgcgagcccagaccccaccgggcgcctttgaagaaaggcttgcccagccgtcggcgcgacccgaccccttaggggagacggatgcgcctgaccggcccccgaggcccgtcggagtccaggcctcgggacccgaggggagtgctcccaactcccttagattgattccttggatcgccgagatccaagcatacctcacagataagactctacccgaggaccgcgaagggagtgaacgcgtccatcgcatctccaaacgctacgtgctggtagaagggaccctctatcggcgcgcggctaatggaatcctcctgaagtgcattcctcgggaacaaggcgtcaagcttcttgccgatatccatgaaggcgaatgcggttcccactccgcctcgcgcaccttggttggcaaagcctttcgactaggtttctattggccgacagctctcaatgatgcggtcgacctggtccggcgatgcagagcgtgtcaattccacgccaagcaaatccatcagccggcccaagccctgcagatcataccactttcatggccatttgctgtctgggggctcgatatcctgggaccgtttaggcgggccccgggcgggtttgagtatctgtatgtcgcgattgacaagttcactaagtggcccgaggcttatccggtcgtcaagatcgataagcactccgcacttaaattcattaagggcatcacggcccggtttggagtgcctaaccgtattattacggataatggcacccaattcactagtgaactcttcggcgactactgcgaagacatgggcatcaagctctgcttcgcctcacctgcccaccccagaagcaatggccaagtggagcgcgccaatgcggaaatcctcaaaggccttaaaaccaagaccttcaacatactcaagaagcacggcgattcatggatcgaggagttgccagcagtgctctgggcaaaccgaactacaccaagccgagcaaccgggaaaacgcctttcttcctcgtctatggcgcggaagcggttctcccatccgagctcaccctgaggtcccctcgggccaccatgtactgcgaggctgatcaaaatcagattcgcagagatgacctcgactacttggaagagcgaaggcggcgcgcggccctccgagccgcgcgctaccagcaaagcctgcggcactaccatcagcgccacgtccgggcccgatcattctgcgtcgacgacctcgtcctacgccgcgtccaaacgcgtgctggattgagcaagctctcaccaatgtgggagggtccgtatcgagtgatcggcgtcccccggccgggctccgttcggctggccacgggcgacggcacagagctgcctaacccgtggaacatcgaacaccttcgtcgcttctacccctaa

SEQ ID NO: 68227 - DNA, 5703 bp, Oryza sativa
  Clone ID: PAT_MRT4530_69009C.1
atggccgagcaagcaaaggcgcacgacctctctccgagtgtgagtggcgacgacggggagccgaacccacgccgtcgagctcgtactccaccgccccctccacgccaaagtcctaagcggggggaggcgctcgagagggtcgaaagatccgcgacttcaccgatcgcgggcgatggaaaagaacggcgagatggggagcgtcgcctcctcgtctacggcgacggcagcacgccccagggcgcgctccaagctgcgggcacgctcttacgccacccgcctgtcgtccctgacccggagtctccagcccaacgatggctggacgacgtggccaaattggtcatgacggcgcggcagcgcctagatgctggtgggcggtcctccgccaccaaggcctctggtgctgctaccaccggctccgcgtcgtcaagacggagggcactacgagcggcagccgctgttcgccgttcgactgccactccttcgtcgactccttcgacccgggaagatctgcgtggggggccggacgcccgcaccagcatcgagcgccggcgtaatgaccgaagtgctccccacgcaacggagggcgcttcctcgtccagagtgtcatctcagcacggacgcgggaatcagccctccgtgcccccggttggtggtgtcggctgtagagcctttgtggcgagtcttcggaatgtccgttggcccccaaggttccggcccaccatcgccgaaaaatatgatggcagcatcaaccccgccgagtttctccaggtctacacgaccgggattgaggccgccgggggtgatgacagggtcatggcgaatttctttcccatggccctgaaggggcaagcgcggggttggctaatgaacttgccacccgcatctgtccactcctgggaggatttgtgccaacagttcaccatgaactttcagggcacatatccgcgcccagcttcggccgcccccggatccgctgctcagacggggcggcgtgacaggaggaggaagaagaggtcggtccattccgacgacgagggtcatgtcctcaccgtcgagggtgcttcgcgggccacccgaaaggggaggcctgcgagcgacaaaaagaaggaggccagcgctcccagcagggagcgcccaaccggcaagtggtgcaccgtccacaacacctccctccatgaccttgcggactgtcgcgcagtcaaaagcttggctgagcggacaaggaagtgggaggaggagaggaggcaggagcgccgggaaggcaagtccccggcggttccttccggcaatcggcgaagtgaggccaagcagaaggcccccgccgaggacatcgatgatggcgatgatgacctaggtttccaagagcctggggccaccattgccaccgtcgatgggggagcgtgtgctcacgtttctcgccggagcttcaaggctatgaagcgagagcttctggccgcggcccctactcatgaggcgacgcgtcgggcgcggtggtcggaggttgccctcacctttgaccagaccgaccacccaccgtgcgttgcccggggagggcagattgcgatggtggtttcccccaccgtttgcaacgtgaagttggggcgagtcctcattgatggaggagcagccctcaacatcctttcccccgcggcctatgatgccatcaaggccccggggatggagctccggccgtctcaaccgattatcggtgtgacgccggggcacacttggccgctaggtcatatcgacctcccggtcaccttcggtggatccgccaatttccgcacagagcgggtgaacttcgatgtggcggacctcagtctgccctacaacgcggtcctggggaggcccgcgttggtaaagttcatggcggcggtccactacgcctacctacagatgaagatgccgggccccggtggccccatctctgtccatggtgacctcaaagtcgcgcttgcctgcatggagcagcgcgcagaccatctcgccgccgcgtccaagcccgagggtggcgatgagaggcttggcgcctccgcccccgctaccccgaggcagcggatgatcacatgcgacgaggtcccggaagacgcgctcgtctccttcctgcgggcaaatgctgacgtcttcgcatggagaccggcggatatgcccggggtccccagggaggtgattgagcaccgtctcgccgtacggccgggcgcaaggccggtccggcagaaagtgcagcgacaagccccgaaacgtcaagccttcatccgcgaggaggtggcgcgacttctggaggccggattcatccgtgaggtcatccatccggagtggctggcgaacccggtggtcgttcccaaggcgaacggcaagcttcggatgtgcatcgactacaccggccttaacaaggcatgtcctaaggatccttaccccctgcctcgcatagatcagattgtcgactccactgcggggtgcgaccttttgtgttttctagatgcatactctggttaccatcagattcgcatggctagggaggatgaggaaaaaactgcgttcattacccccataggaacctattgttatacgacaatacccttcgggttaaagaatgcaggtcctacttttcaacgtactactcgaatttctttgggtagccaattaggacgtaatgttgaggcttatgtcgatgacttggttgtaaagacgcgcaaccagggaacattactcacagatctagcggaaacttttgagagtctccgctccgcccgcataaaactaaaccccgacaagtgtgtgtttggtgtacctgcgggcaagcttctcgggttcttggtctctgcccgaggcattgaggccaaccccgagaagatacgagctatagagcggatgcgcccccccagcaaacttagggatgtgcaatgcgtcactggttgcatggccgccctaagtcggttcatatcgaggctgggagagaaggcgctacccttatttaagcttctcaaacgctccggaccgtttacctggacggaggaagctgaaaatgccctcacccggttgaaggaatatctaagctctcccccagttctggtcgccccggagccagacgagcccttgctactctacttggcggcgaccccgcaggtagttagtgcggcgttggttgtggagcgcgatgagaacaattctcatttcgcgcatccccgtcccgggagggagcagggaggagaggcccccgagccgaacggtggcccaaggcccccgacgaccggagttggctctctgctcgcttgtcagacggtgctaggagcccccgacccccaggaaggccctgaggccactgtgggaaggccgcacctatcaccctttgaccccgggcctagttctgtgctgactcgacccaggaaagagcggggagaagaggcccccgagccgaacggaggcctaaggcccctgacgaccggagttggccctttgcccgcttgtccgacgacaacaggagcccccgacccccaggatggccccgaagccactgaggtaaggccgcccctgttatcctccgaccccgaggtcatcagcaccgaagacaagtatgccccgcgaggctgcttggacaaagaatgccccagggatgcggcccctagcgaagaggatcggccccaccgaaaggtgcagcggcccgtctactttgttagtgaggccctccgggacgccaaaacccgataccctcaggcccagaagatgctttacgctattctgatggcctcgaggaaactgcgccattatttccaggcgcatcgggtcacggtggttacgtcttaccccctcggtcaaatcttgcataatcgagagggtacaggacgggtggtgaaatgggcaatcgaactttctgagttcgatttgcactttgaaccacgccacgctatcaagagccaggccctcgccgactttgtggcagagtggaccccgcctcccgagctcgtctcagtccccgaggccagcgcggacccctcacagctgcctcacaccgcccactgggtaatgcagttcgacggctccctatctcttcagggcgccggtgcgggagtcacgttgacctctccgagcggagacgtcctcagatacttggtccgcctcgactttcgagcgaccaataatatggcagagtacgagggactccttgccggactcagagtggcagctggactggggatccgccgcctcctggtattaggcgactcccagctggtcgttaaccaagtctgtaaggagtaccggtgctctgatccgcagatggacgcctacgtgcgccaagtacggcgcatggagcgctattttgacgggatagagcttcggcacgtgcccagacgggataatatgattgccgacgaactctcgcggctcgcgtcctcgcgagcccagaccccaccgggtgcctttgaagaaaggcttgcccagccgtcggcgcgacccgaccccttaggggagacggacgcacctgatcggcccccgaggcccgtcggagcccaggcctcgagacccgaggggagcgctcctagctcccttagattgattgcttggatcgctgagattcaagcatatctcacagataagactctacccgaggaccgcgaagggagtgaacgcgtccatcgcatctccaaacgctacgtgctggtagaagggaccctctatcggcgcgcggctaatggagtcctcctgaagtgcattcctcgggaacaaggcgtcgtgcttcttgccgatatccatgaaggcgaatgcggagcacactccgcctcgcgcaccttggttggtaaagcttttcgccagggtttctattggccgacagctctcagtgatgcggtcgacctggtccggcgatgtagagcgtgtcaattccacgccaagcaaatccatcagccggcccaggctctgcagaccataccactttcgtggccatttgctgtctgggggctcgatatcctgggaccgtttaggcgggccccgggcgggtttgagtatctgtatgtcgcgatcgacaagttcactaagtggcccgaggcttatccggtcatcaagatcgataagcactccgctcttaaattcattaagggcatcacggcccggtttggagtgcccaaccgtattattacggataatggcacccaattcactagtgaactcttcggcgactactgcgaagacatgggcatcaagctctgcttcgcctcacctgcccaccccagaagcaatggccaagtggagcgcgccaatttggaaatcctcaaaggccttaaaaccaagacttacaacatactcaagaagcacggcgattcatgggtcgaggagttgccagcgcttaccctgaggtctcctcgggccaccatgtactgcgaggctgatcaagatcagcttcgtagagatgaccttgactacttggaagaacgaaggcggcgcgcggccctccgagccgcgcgttaccagcagagcctgcggcgctaccatcagcgccaagtccgggcccgatcactctgcgtcgacgaccttgtcctacgccgcgtccaaacgcatgctggattgagcaagctctcaccaatgtgggagggtccgtatcgagtgatcggtgtcccccggccgggttccgtgcggctggccacgggcgacggcacagagctgcctaacccgtggaacatcgaacaccttcgtcgcttctacccctga

SEQ ID NO: 68228 - DNA, 1139 bp, Oryza sativa
  Clone ID: PAT_MRT4530_6900C.1
ataaatagagtacccactagctggggttttgtttattctagggtgaacaagccgaggggagagggcgcgcggaccgagtccacgggagtggggcccacgcggcagcctcacggtccacggtggaccgggtgcacccaggctcacaccggccggcgccgtgggccccaagcgtcagccgcacccgagggcgcgggcggctgacggccgggccccacgcggcagccgctcggcgcgcccgaaggcggccacgtcggcgcggccggcgggaggcggcgcgcccgcgcccctatggtcgtcggcggcggccataggcacggcggagcggcggccgagagagggaagggaaagggggaaacgaggtggcggtccacggctcaccctaggtcgacggcgacgacgaaaaaggcggccggagaggaggaaggcggcggcgcggctcgggtcgacggggacggcggcgcttcggcggtcggcgagctcgacgagggggtggacggggacggcgacggtgcggcgaagccggaggaggcgacgccggggcgggaaacggtcccggcgagcggagagagccggccgaaggtcgtcagcgacggaggagagagagggcgacggcgcgagctcgattccggcgaggagacggtgcggcaaggggcggaaacgggcgagggaggcgcggggagggtttaaataggattggaagggggagagggcggccgggagaggaaggaaaccggccgggaggtccggccgccatcaatggcgccggcgagatttgcgggagcaaatccggccgtttgaatgcgagagagagagggaaaaatggggggaaagggagaggggatcacggggagtatttcccctcactttattgcacgcggggacggcggggtgcggcggattcggcggttgcggcggcgctaggcgcgggcgaggcggcgggagcggcaggaggaaggagatgacgggtgggccccacccatcagcgagggtggcgggcgggcccgcccgtcagcggcgcgcgcgcggggaggggccgagtgggccgcgggggaagaggagagagggggaggagagtgggccgagccggcccaagagagggagggagggtttttagggtttttctttttataaaacctttt

SEQ ID NO: 68229 - DNA, 5988 bp, Oryza sativa
  Clone ID: PAT_MRT4530_69010C.1
atggccgagccagcaaaggcgcacgacctctccccgagtatgagcggtgacgacggggagccaaacccacgccgtcgagctcgtactccaccgccccctccacgccaaagtcctaggcgggagaaggcgctcgagagggccgaaggatccgcgacttcgacacccacaggaggtggagaagggcggcgagatggggagcgttgcctcctcgtctacggtgacggcagcacgccccaaggcgcgctccaagctgcgggtgcgctcctacgtcacccgcccgtcgcccatgacccggagtctccagcccaacgttggctggacgatgtggccaaattggtcatgactgcacggcagcgcctagatgctggtgggcggtcctccgccaccaaggcctctggtgctgctaccaccggctccgcatcgtcaagacggagggcgcggcgagcggcagccgctgttcgccattcggccgccactccttcgtcaacgcctccgacccgggaagatctgcgtggggacccggatgctcgcatcagtatcgagcgccggcgtaatggccgacgtgctccccacgcaacggagggcgcctcctcgtccggagtgtcacctcaccacggacgcggggatcagccctccgtgccccccgttggtggtgtcggctgtagagcctttgtggcgagccttcggaacgtccgttggcccccaaggttctggcccaccatcgccgaaaaatatgacgggagcgtcaaccccgccaagtttctccaggtctacacgaccgggatcgaggccgccgggggtgacgacagggtcatggcgaatttctttcccatggccctgaaaggacaagcgcggggttggctaatgaacttgccacccgcgtctgtccactcttgggaggatttgtgccaacaattcaccatgaacttccaaggcacatatccgcgcccaggtgaggaagcggacttgcacgcagtacagcgaagggatgatgagtcacttcgctcgtacattcagcggttctgtcaagtccgcaacaccataccatgcatccctgtgcacgcggtgatttacgcgttcagggggggtgtgcggcacaaccgcatgcttgaaaagatcgcctccaaggagccccagactaccgcggagctttttcagctcgcggaccgagtggctcgtaaggaggaggcatggacctggaacccctccggttccggtgtggcagcttcggccgcccccggatccgctgctcagacagggcggcgtgacaggaggaggaagaagaggtcagtccattccgacgacgagggtcatgtcctcgccgtcgagggcgcttcgcgggccacccaaaaggggaggcctgcgagcgacaaaaagaaaaaggccggcgctcccagcagggagcgcccagccggcaagtggtgcaccgtccacagcacttcccttcacgacctcgcggactgccgtgcagtcaaaagtttggctgagcggacgaggaagtgggaggaagagaggaggcaggagcgccgagagggcaagtccccggcggttccttccggcaatcggcgaagtgaggccaagcagaaggcccccgccgaggacatcgatgacggcgatgatgacctaggtttccaagagcctagggccaccatcgccactgtcgatggaggagcgtgtgctcacgtttctcgccggagcctcaaggctatgaagcgagagcttctggccgcggcccctactcatgaggcgacgcgccgggcgcggtggtcggaggttgccctcaccttcgaccagaccgaccacccaccgtgcgttgcccggggagggcagattgcgatggtggtttctcccaccgtttgcaacgtgaagctggggcgtgtcctcattgatggaggagcagccctcaacatcctttcccccgcagcctttgatgccatcaaggccccggggatgatgctccggccgtcccagccgatcatcggtgtgacgccggggcacacttggccgctaggtcatatcgaccttccggtcaccttcggtggacccgccaacttccgcacggagcgggtgaacttcgatgtggcggacctcagtctgccctacaacgtggtcctggggaggcccgcgttggtgaagttcatggcggcggtccactacgcctacctccagatgaagatgccgggccccgatggccccatctctgtccatggcgacctcaaagtcgcgctcgcttgtatggagcagcgcgcggaccgcctcgccgtcgtgtccaagcccgagggtggcgacgagaggcttggcacatccgcccccgccgccccgaggcagcggatagtcacgtgcgatgaggtcccggaagacgcgctcgtctctttcctgcgggcaaacgctgacgtcttcgcatggagaccggcggatatgcccggggtccccagggaggtgattgagcaccgtctcgccgtacggccgggcgcaaggccggtccggcagaaagtgcggcgccaggccccggaacgtcaagccttcatccgcgaggaggtggcgcgacttctggaggccggattcatccgcgaggtcatccatccggagtggctggcgaacccggtggtcgttcccaaggcgaacggcaagcttcggatgtgcatcgactacaccgaccttaacaaggcatgtcctaaggatccttaccccctgcctcgcatagatcagattgtcgactccacagcggggtgcgaccttttgtgttttctagatgcatactctggttaccatcagattcgcatggctagggaggatgaggaaaaaactgcgttcattacccccataggaacttattgttatacgacaatgcccttcgggttaaagaatgcaggtcctacttttcaacgtactactcgaatttctttgggtagccaattaggacgtaatgttgaggcttatgtcgatgacttggttgtaaagacgcgcaaccaggaaacgttactttcagatctagcggaaacttttgagagcctccgctccgcccgcataaaactgaaccccgataagtgcgtgttcggtgtacctgcgggcaagcttctcgggttcttggtctctgcccgaggcatcgaggccaaccccgagaagatacgagctatagagcggatgcgcccccccagcaagcttagggatgtgcaatgcgtcaccggttgcatggccgccctaagtcggttcatatcgaggctgggagagaaggcgctacccttatttaagctcctcaaacgctccgggccgtttacttggacggaggaagctgaacgtgccctcactcagttgaaggcgtatctcagctctcccccagttctggtcgccccggagccaaatgaacccttgctactctacttagcggcgaccccgcaagtggttagtgcggcgttggtcgtggagcgcgatgaggacaatcctcattccgcgcacccccacattgtgcagacttggcccgggagagagcagggaggagaggcccccgagccgaacggcggcccaaggcccccgacgaccggagttggccctctgcccgcttgtcagatagtgctaggagcccccgacccccaggaaggccccgaggccactgcgggaaggccgcacctatcgccctctgaccccgaggctaaccctgtgccgattcgacccgggagagagcagggagaagaggcccccgagccgaacggtggcctaaggcccctgacgaccggagttggccctttgcccgcttgtccgacgacgccaggagcccccgacccccaggacggccccgaggccactgtgggaaggccgcccctgtcgtcctccgaccccgaggtcgtcggcacagaagacgagtgcgccccgcggggccgcttgggagaagagcgccctagggatgcggcccctagcgaagaggatcggccccaccgaaaggtgcagcggcccgtctactttgttagtgaggccctccgggatgccaagacccgatatcctcaggcccagaaaatgctttacactattctgatggcctcgaggaaactgcgccattatttccaggcgcatcgggttacggtggtcacgtcttaccccctcggccaaatcttgcataatcgagagggtacaggacgggtggtgaaatgggcgatcgaactttctgagttcgatttgcactttgaaccacaccacgctatcaagagccaggccctcgccgattttgtggcagaatggaccccggctcccgagcccgtctcgatccctgaggccaacacggacccctcgcagctgcctcacaccacccactgggtaatgcagttcgatggctctctgtctcttcagggcgccggtgcgggggtcacgttgacctctccgagtggagacgtcctcagatacttgatccgcctcgactttcgagcgaccaataatatggcagagtacgagggactccttgccggactcagagtggcagctggactggggatccgccgcctcctggtgttaggcgactcccagctggtcgttaaccaagtctgtaaggagtaccggtgctctgacccgcagatggacgcttacgtgcgccaagtacggcgtatggagcgccattttgacgggattgagcttcggcacgttcccagacgggataacatgatggccgacgagctctcacggctagcgtcctcgcgagcccagaccccaccgggcgcctttgaagaaaggcttgcccagccgtcggcgcgacccgaccccttaggggagacggatgcgcctgaccggcccccgaggcccgtcggagtccaggcctcgggacccaaggggagtgctcccagctcccttagattgattgcttggatcgctgagatccaagcatacctcacagataagactctacccgaggaccgcgaagggagtgaacgcgtccatcgcatctccaaacgctacgtgctggtagaagggaccctctatcggcgcgcggctaatggaatcctcctgaagtgcattcctcgggaacaaggcgttgtgcttcttgccgatatccatgaaggcgaatgcggagcccactccgcctcgcgcaccttggttggtaaagcttttcgccaaggtttctattggccgacagctctcaatgatgcggtcgacctggtccgccgatgtagagcgtgtcaattccacgccaagcaaatccatcagccggcccaggccctgcagaccataccactttcgtggccatttgctgtctggggactcgatatcctgggaccgtttaggcgggccccgggcgggtttgagtacctgtatgtcgcgatcgacaagttcactaagtggcccgaggcttatccggtcgtcaagatcgataagcactccgcacttaaattcattaagggcatcacggcccggtttggagtgcctaaccgtattattacggataatggcacccaattcactagtgaactcttcggcgactactgcgaagacatgggcatcaagctctgcttcgcctcacctgcccaccccagaagcaatggccaagtggagcgcgccaatgcggaaatcctcaaaggtcttaaaaccaagaccttcaacatactcaagaagcacggcgattcatggatcgaggagttgccagcggtgctctgggcaaaccgaactacaccaagccgagcaaccggggaaacacctttcttcctcgtctacggcgcggaagcggaagagcgaaggcggcgcgcggccctccgagccgcgcgctaccagcagagcctgcggcgctaccatcagcgtcacgtccgggcccgatcactctgcgtcgacgacctcgtcctacgtcgcgtccaaacgcgtgctggattgagcaagctctcaccaatgtgggagggtccgtatcgagtggtcggtgtcccccggccgggctccatacggctggccacgggcgacggcactgagctgcctaacccgtggaacattgaacaccttcgtcgcttctacccctga

SEQ ID NO: 68230 - DNA, 1080 bp, Oryza sativa
  Clone ID: PAT_MRT4530_69011C.1
atggcaccttgcccaacaaacttcaagttatcaaacatcacaaaatatagaggagatatagaccccaatgagtatttaagggtgtatgaaacaatagttgaagaaacaggaggagatgatacagtaaaagctaaaatacttccgaccatgttggaaggagttgcattgtcatggtatacaaccattcctcctatgacaatctactcatgggaacacatgatggacacttttcgagcagggtttgttggagcttatgaagaaccaaaagagacagatgatttatatgcaatgaagcaacttccaggcgagactttgaggagtttcattgtaaagttttccagagttaggtgtcaaattagacaagtggatgacgaaatgctcatagcagctgcaaaaagagctttgttgcctggtccacttcgttttgaccttgcaaggaacataccaaagacagcgaaagacctgtttgagagaatggaaagttttacaaaaggtgaagaagacaaattgagagtgcaagaagaagaagtagctttgttaggaggtcattcaatagaagaatgctggcacatggcccatttggtggaaaaacacatcaatcaatatgagaacaagtataaaggggctcgagagcaacgagcgcaaaatgctatagaagcaccgcaagttttaaagatagaagcaattgatgaggtaccgaaaagggtaatcaatgccataacagaaggatcttcattgggtattgagtcaaagagacaaagaaaggcatatgtcagacagataaaccatgtaggaacaagtaaccagtcaaacccaccaacttactcaaagacagtaatttcctttggtccagaagatgctgagggaatcttgtttccccatcaagatcctttggtagtttcggtagaaatcacccaatgtgaagtacaaagggtgttgattgatgggggaagctcggcggatgtgcttttttttacagtaaatctaattggagaggcctctccaattagtcttaaccagagacacccatgtgctagtactttaggagttttggttgctattaatccattgagcaagtag

SEQ ID NO: 68231 - DNA, 375 bp, Oryza sativa
  unsure (1)..(375): unsure at all n locations
  Clone ID: PAT_MRT4530_69012C.1
ctcagcttatatgggatagatagctttggtatcagccntgtctaaggtatacacgtgtctcacggaattcccgggtgcagacacacacaggcagtgcacagcacacaacagcagtgccgagctcggaggtggcactaatgctgcaaaacccagatgtgtctggtaatgattgtgtgtggcaatgtgtgctgcgtggaaaaacatggcaaaccagtgtgctgtgtgctgctctgctgcttgtggtggcaccctggcaatgcactgacaatgtgctgaccaggaaccacgttgcatgtgcaagtatacnatagtgtataaaagaacatgaaaaggtatacaagaattttttcggctgaaaaaaaaaaaaaaaaaaaa

SEQ ID NO: 68232 - DNA, 479 bp, Oryza sativa
  Clone ID: PAT_MRT4530_69013C.1
ccgaaagcggggggcaaccgaggaaggcggaaccaggcccagagggggacccagcatgaaaaagaggggggggaaaaaaagccgggcgaaaacaaggcaaaagcagaagcggggggaaaaaagtaatccaagaaaaaatccaaaaaaaaaaaaagccggaagcaaaaaggggaaagccgggggggccaaaagagggagccaaacaaaaaaaatgagggggccaaaacggcccgagagccagacggaaaaccgggcgccccagcggaataaaagaaaaggacaaagccggggaagaggggattgaaaaaaagggacccaggggggttgatttttaaacaagggaaaggggaaaaaagtgatagacattaaaaacccggcccgggggaagtaaaaaaaagggacaacaagtggttgtggcccaaaaagaaaaaaacaccatggggggggaaaaaggggagaaaaaaaaaagaaggggtaaa

SEQ ID NO: 68233 - DNA, 1279 bp, Oryza sativa
  unsure (1)..(1279): unsure at all n locations
  Clone ID: PAT_MRT4530_69014C.1
ggcgggtctcccgttcttggntggtcgttgttggtttcggttggtgtcgatggagttctggccggagttcttggcgagcagctgggggaaggagttcgtggcggggggagtcgggggcatggccggggtgctggcgggacacccgctcgacacgctccgcatccgcctgcagcagccgccgccgcccgccagccccgggatcaccgccgcgccggggcgccccgcgtccgccgcctcgctgctccgcggcatcctccgcgccgagggcccctccgcgctctaccgtggcatgggcgcgccgctcgcctccgtcgcgttccagaatgcaatggtcttccaagtcttcgcgatcctgtcgcggtcgatcgatcaaccgagctccatgtcggagccaccgtcgtacaccagcgtggcgctcgccggcgtcggcaccggggcgctgcagacgctgatcctgtcccccgtcgagctcgtcaagatcaggctgcagctggaggcggccgggcagaagcaccgccggcccggcgaccaccacgggcccgtggacatggcgcgcgacatcctgcggaaggagggcgtccgcggcatataccgcggcctcgcggtgaccgcgctccgggacgcgccggcgcacggcgtgtacttctggacgtacgagtacgcgcgggagcggctgcacccggggtgccgcggccacggcggggagcaggagagcctcgccaccatgctcgtctccggcggcctcgccggcgtcgccagctgggtctgctgctacccgctcgacgtggtgaagtcgcggctgcaggcgcagggctacccgccgaggtaccgtggcatcgccgactgcttccggcggagcgtcagggaggaagggctccccgtgctgtggcgcggcctcggcaccgccgtcgcgcgggcgttcgtcgtcaacggcgccatcttctctgcctacgagctggcactccggttcttggctagcagcagcaacgaccagaggctggtcatggaggagaactgaatcaccgagacggcgagactgcaggggttgtacatagactagtattcattggcagcatttccgaggctcgtagcgtcgcaagaagatgagattttcagagaaagcatcgttgctgcagagttcgtgtagattggcattataggtttgccaaatgatgatgatgatcaatccccaattgtctagggaaaactttttttggtgtactgctattacagatataataacattgtttgagacagtaaagactaaaattaatctttt

SEQ ID NO: 68234 - DNA, 1402 bp, Oryza sativa
  Clone ID: PAT_MRT4530_69015C.1
atgacggatgagttagggtttgggcggcgtcccggcgacggggcagccgctcctacatctctacctcagagatggctggggatggagttctactccgatccgatctggaagtctgcaggggtctcgcctgctaagtggagtctggatgaaggaggtgttctgatcatctccgcacagtttggcccagtttggatgagttacgattttggaggggagactttacacgggattgatttaggtaattccttgttgttcgtccgtaaggggattggtgatcgatggttagttaggatatggcagggaagatctgcccctggcatttccatctgttgtttgttcgtgtgggatccggattgggaggtgcgcaggtatatattggacgcctggtcgatcaattggagatacgacgggaacacaccttttgtcctctggctcttaggtttctgctttcaagtttccaaggatcaactcatggcggccatgggaggtgggagtgaaaaagggatcgtcagtgggacgattacccacccgaagcctcctggggacgttggcgttgtttcttcggcagcaatccttaggaagtcaaatgcgttggtggtctcagaaaaggtggcagaggggtcgacgaagcatgattttcttcaggagatgatgaactcgcaagcggcgacgggttttaatacagacatggctggtactaaatcccagggtccggctgtgttcacaaaggacgttgaaggcgataaggaggaggaggcgatagaggttaacctggaggaggatgaggtggaaaaggctggacaatggactatcctgtcatgtttctattcgcttagaattccaaacgcaacagctttatttgaggacatgagtagggcttggaggttgagagctgacatgaactacaaggcgttgagagataatatgttcataatcacctttggttctgagggagattacaattttgttcttcagggaggtccatggctgcgtcccaacacacggcttgtcggggcaatcccactcaaaccacagccattggagtcgcaacgctctaacaaacttgtcaaggtctaaaatatcgaggcctcccagattgattggggaacataccctcttccaatttactttgcatttcccatcgctcatctcttggtcaccatcccaaagaaacttccttataatcttattcatttctgttaagaattgctttggtggcttcaaggcagtgagggagtagattggtatggaacttagcacatatgagactagtgtctttcgccgtgcttactggattagtttccctttccattccgcaagccttgattgcaacttgtccatgactagttgcaggtgaattctcttaatgtggcttgtggtgagcggcaaccctaagtatgtt

SEQ ID NO: 68235 - DNA, 4359 bp, Oryza sativa
  Clone ID: PAT_MRT4530_69016C.1
atggccgatgtttctttgatcagttgcgctgtcggcatcatcttcttctccgccgtttgctacctgcctacggctcctgtcgccgccttgtccttcaactacaccaacttcaattcaaacaacccgagcatcgaatatgaaggcaacgcctctttcagcgtcgggtatatcgacatcagcttgaacgaagccaacggcatgggcaacagcgccggacgggtgtcctacaagcagccggtgcagctctgggagtgggacgccgccaccggcgaggtggccagcttcaccacaaccttctccttcaacatcacgccgagcgataggaacaacaggggcgacgggatggccttattcctcggcagctacccatcgaagttaccagaccgcgccggtggccacaacctcggcctaaccaaccaaacaatcggcaacgtctcgaccggtgacaagaggaagacaagaggaagcccagcccagacgatccatgcgagatcggcggcccacgagcaagttgaggcaatggagaagcagaatctcgatttcggcaagttgctcggcgacatccaggagtcgctggtggcgttgaacaacaagcaggcggagatgcaggtggcggtggcgaagttggacgaaggggttagtggatggcgaccccaagttgaagccgcgatcaaggacttgcgtgctgaggtcgacgaacttcagcagcagcatgatgccgccaacaagggaaagcaagctccatcagcggcactttcccctcgggtcccgttgacgggcgaggaaaggaaggtgccattgttgccgactcctccaccatcatatcagttgggcgcggcggaaggcgggggcaaactggccggtggccacggcgttccacaacatcactggaggagggcatctggagtggttaccactctgatcccaactccgggcaagggtacgttcaatgtttctcctgtgcctttgcattcctgtgaaaattttgattcgggatttggggaatttgatggagaggttgaggaacgtcagtatagccatagagtgcctaagttagattttcccaaattcgatggtaccgactcacaggattggaggatgaagtgtgagcattatttcgatgtgaataacacgtacccggggttgtgggtgcgagtggctatcatctacttttctgggagggctgcatcttggttgagatccactagagctcatgttcggtttcctaactgggaggatttctgtgctgcgctatctgataagtttgatagggatcaacatgaactgttgattcggcagatggatggaattaaacagtcgggaacagtgtgggagtattacgaacagtttgatgaactcatgaataagttgcttgtgtatgatccagaggaagtgctggagacagctgatgaagtgcctggaaaagaagttaggaagagtgaaggaaattctctaggacgttcagttgcaaatcttaaaggggcatatcctttgccaactcctccaatgaggtctgggggcatcaacatgggcattaaatctgaagaaaggaaggagtctgaagtaaaacgttcatcaggaatgaatgagagattatcttctcttaaggctcaacgtcgtgctcaaggtctctgttacatctgtgcagagaaatggtcgcctacacataagtgttctaatactgtgcaactgcatgctgtccaagagttattcacagtgttgcatgaatcagcagaggacgggttgagcacaacagatcatgttgttgagcaaacgttaatggcagtttcactacaggctgtgcagggatctgaaactggtggttgtatgagaatgctggggcaaatccaaagcaaagaaatcttgattttagtcgactcaggcagctctgccagtttcatcagtaaaagggtggcaagcagttttataggggttctagagcagcctgtgcatgtgcaagttaaggtggctgggggagcaatgttacattgttgttctgagattctgaattgtgaatggaccactcaaggacatgtgttctttactaatctgaaggttctggaattgaacaactacgacatgattttgggcatggattggttgatgcagcacagtctaatgacagtggattggaccacaaaatctctgataattgcttgtgcaggaactcagattcagttacatgttttcgcgttggagcaccaagagcagattcctaatgtggtgcagacagtactgacagagttttcttcagtttttgatgaacccaaggggttaccaccaatcagacaatttgaccatactattcctttgctgccaggagctgggccagtcaatgtgagaccctatcgatatactcatgtccaaaagaatgagattgaaagtcaagtgcaagagatgttgagtaaagggataattcaaccatgttcaagtcctttttcatcacccgtattacttgttaaaaagaaggacggttcatggaggttttgtgtggattatagacatcttaatgccataacagtgaagaataagtatcctttgcctgtgatagatgaactattggatgaacttgcgggagctcaatggttttctaagttggacttgcgctccgaatatcaccaaatcagaatgcatccagatgatgtgcataaaactgcttttcaaacccatcacggtgactttgagttcagagtgcttccttttggtttgactagtgcaccggcaacttttcaaggagtcatgaacagtgtgcttgctaccttacttaggaggtgtgtgcttgtattcgtggatgacattttgatatacagcaaatctttagaagagcatgtgcagcatttgaaaacagtgtttcagattttgcttaaacaccaattgaaggttaagaggactaagtgttcttttgcacaacaagaattagcatatcttggacatataattcaacctaatggtgtttccacagaccctgagaagattcaagttattcaacattggccagcacccacttctgtaaaagaattacgtagctttttaggtctctcaggatactacaggaaatttgtgcgcaattatggcattctcagtaaacctcttacaaatttgcttcgcaatggtcagctctatatttggattgctgaaactgaggatgcttttcaagctttgaaacaagcgctcatcacagctccagtccttgctatgccagatttccaaactccttttgtggttgagactgatgcatctgacaagggcattggtgcagtgttaatgcaaaataatcatcccctcgctttcttaagccgagctcttggactgcgacatcagggactctctacttatgaaaaggagagtttggccataatgcttgcggtagatcactggcggccatatttacagcatgatgaatttttcattcgaactgatcaccgcagtttggcatttcttactgaacagcgtctcaccactccctggcagcacaaggctcttaccaaactcttggggcttcgttataagattatttttaagaagggggttgacaacaacgcagcagatgcattatctcattatccaggctctgatcaggtggaactctcagctttatcagttgcagttccagagtggatcaatgaaattgtggccggttattcctctgatcccgatgcctgcagcaagttggaggccattcgggaatacaagtcacttatcagcgcgttaaacagctgtttgcttggcctcgccttcgtgccactgttgttcacttctgctgcttgtcgatcagacgatcttgttgagtggctgcatgaacgtgagaagatgcaagctttgatcagagatcatcttttgcgtgctcagactcgcatgaagcaacaggctgatcagcaccgttcagaacgctcttttgcagtgggcgattgggtttatttgaagcttcagcccttcgttcagcagtcggtggttaccagggctaatcgtaaactttcgtttcgattctatggaccatttcaggtgcttgacaaggttggagcggtggcatatcgcttggatctgccaacttccagtttgatccacccaattgttcatgtttcccaactaaaaaaggccttggctccaacggaacaagttcattctccacttcctgtgctggatccgacaaatgttactcacgtttgtccagcgcagattttggatcatcgcttcatccgcaagggttccaagatggtggagcaagtacagattcgttggaccggcgatgcaccagcagcaaccacctgggagaatccgcgcgagctccgtcgccgttttcctgcggcaccagcttgggggcaagctggaactcaaggaggggggaatgtcatgccataa

SEQ ID NO: 68236 - DNA, 4890 bp, Oryza sativa
  Clone ID: PAT_MRT4530_69017C.1
atggagaagcagaatctcgatttcggcaagttgctcggcgacatccaggagtcgctggtggcgttgaacaacaagcaggcggagatgcaggtggcggtggcgaagttggacgaaggggttagtggatggcgaccccaagttgaagccgcgatcaaggacttgcgcgctgaggtcgacgaacttcgacagcagcatgatgccgccagcaaggagaagcaagctccatcagcggcgctttcccctcgggtcccgttgacgggcgaggaaaggaaggtgccgttgttgccgactccgccaccatcgtctcactttggcgcggcggaaggcgggagcaaattggccgatggccacggcgttccactacatcaccggaggagggcatctagagtggttaccactctgatcccaactccgggcaagggtacgttcaatgtttctcctgtgcctttgcattcctgtgaaaattttggttcggggtttggggaaatggatggagaggttgaggaacgccattatagccatagagtgcctaagttagattttcccaaattcgatggtaccgacccacaggattggaggatgaagtgtgagcattatttcgatgtgaataacacgtatccggggttgtgggtgcgtgtggctatcatctacttttctgggagggctgcgtcttggttgagatccactaaagctcatgttcgatttcctaactgggaggatttctgtgctgcgctatctgataagtttgatagggatcaacatgaactgctgattcggcagatggatggaattagacagtcgggaacagtgtgggagtattacgaacagtttgatgaactcatgaataagttgcttgtgtatgatccagtagtgaatatgcattatctgacacaccgtttcactgagggattatataggaaaattcgtaatgttgttttacttcagagaccccgagacctcgagtctgctttggctgttgctttgttgcaggaggaggtgctggagacagctgatgaagtgactgggaaggaagttaagaagagtgaaggaaattctctgggacgttcagttgcaaatcttagaggggcatatcctttgcctactcctccaatgaggtctgggggcatcaacatgggcattaaatctgaagaaaagaaggagtctgaagtaagacgttcatcagggacgaatgagagattatcttctctgaaggctcaacgtcgtgctcaaggtctctgttacatatgtgcagagaaatggtctcccacacataagtgttcgaatactgtgcaactgcatgctgttcaagagttattcacagtgttgcatgaatcagtagaggacgggttgagcacaacagatcatgttgttgagcaaacattaatggcagtttcactacaggctgtacagggaactgaaactggtggttgtatgagaatgctagggcagatccaaggcaaagaaattttgattttagtcgactcaggcagctctgccagtttcatcagtaaaagggtggccagcagtcttatgggggttctagagcaacctgtgcatgtgcaagttatggtggctgggggagcaaagttacattgctgttctgagattctgaattgcgagtggaccattcaaggacatgtgttctttactaatctgaaagttctggaattgaacaactacgacatgattttgggcatggattggctgatgcagcacagtccaatgacagtggattggaccacaaaatctctgataattgcttatgcaggaactcagattcagttatatggtgtaaggtctgatactgaacaatgtgcccacataagttccaagcaacttagggaacttaatgacagaacagcagtgtccaacttagtccaattttgttcagttttcgccttggagtatcaagagcagattcctgaggtggtgcagacagtactgacagagttttcttcagtttttgatgaacccaaggggttaccaccaatcagacaatttgaccatactattcctttgctaccaggagctgggccagtcaatgtgagaccctatcgatacactcctatccaaaagaatgagattgaaagtcaagtgcaagagatgttgagtaaagggataattcaacccagttcaagtcctttttcatcaccagttttacttgttaaaaagaaggacggttcatggaggttttgtgtggattacagacatcttaatgccataacagtgaagaataagtaccctttgcctgtcatagatgaactattggatgagcttgcgggagctcaatggttttctaagttggacttgcgctccggatatcatcaaatcagaatgcatccagatgatgagcataaaactgcttttcaaactcatcacggtcactttgagttcagagtgcttccttttgggttaactagtgcaccggcaacttttcaaggagtcatgaacagtgtgcttgctaccttactcaggaggtgtgtgcttgtattcgtggatgacattttgatatatagcaaatctttagaagagcatgtgcagcatttgaaaacagtttttcagattttgcttaaacaccagttgaaggttaagaggaccaagtgttcttttgcacaacaagaactagcatatctgggacatataattcaacctaatggtgtttccacagatcctgagaagattcaagtaattcaacattggccagcacccacttctgtaaaggaattacgtagctttttaggcctctcaggatactacaggaaatttgtgcgcaattatggcattcttagtaaacctcttacaaatttgcttcgcaagggccagctctatatttggactgcggaaactgaggatgcttttcaagctctgaaacaagcgctcatcacagctctagtccttgcgatgccagatttccaaactccttttgtggttgagactgatgcatctgacaagggaattggtgcagtgttaatgcaaaataatcatcccctcgctttcttaagtcgagcccttggactgcgacatccgggactctctacttatgaaaaggaaagtttggccataatgcttgctgttgatcactggcggccatatttacagcatgacgaatttttcattcgaactgatcaccgcagtttggcttttcttactgaacagcgtctcaccactccatggcagcacaaggctcttaccaaactcttggggcttcgttataagattatttttaagaaagggattgacaacagcgcagccgatgcattatctcgttatccaggttctgatcgggtggaactttcagctttatcagttgcagttccagagtggatcaatgacattgtggctggttattcctctgatcccgatgcctgcagcaaggtacaaactctctgtatcaattctggagcagtaccaaatttttctttgcgcaatggggtgctttattttcagaacagactttgggtgggtcacaatgtagatgttcaacagagaattcttgctaatcttcacacagcggccgttgggggtcattcaggaatacaggtcacttatcagcgcgttaaacagctgtttgcttggcctcgtcttcgtgccactgttgttcagtatgtgcaagcttgttctgtttgccaacaagccaaatcggagcatgtgaagtaccctggaatgctgcaacctctccctgtacctgaccatgcgtggcaaattgtctctctggatttcgtggaaggtcttcctaagtcggcttctttcaattgcattcttgtggtggtcgacaaattctctaaatacagtcattttgttccattgactcatcctttctctgccttggatgtggccgaagcatatatgcaacatatacatcgacttcatggcttgcctcagtctttgatctctgaccgtgatcgcatcttcactagtacattgtggactactctattcaggttagccggcactcaactccgaatgagttcctcttaccatcctcagactgacggccagactgaacgtgtgaatcaatgccttgagacattcctccgttgttttgtccatgcctgtccttcacagtggagtcgctggcttgcgttggcagaatattggtacaacacgtcctttcactctgctctgggtaccactccctttgaagtactgtatggacataagccgcgctactttggtctttcagcttctgctgcttgtcgatcagacgatcttgttgagtggctgcatgaacgtgagaagatgcaagctttgatcagagatcatcttttgcgtgctcagactcgcatgaagcaacaggctgatcagcaccgttcagaacgctcttttgcagtgggcgattgggtttatttgaagcttcagcctttcgttcagcagtcggtggttaccagggctaatcgtaaactctcatttcgattctatggaccatttcaggtgcttgacaaggttggaacggtagcatatcgcttggatctgccatcttccagtttgatccacccagttgttcatgtttcccaactaaaaaaggctttggctccaactgaacaagtccattctccacttcctgtgctggatccgacaaatgctactcacgtttgtccggcgcagattttggatcgtcgcttcatccgcaagggatccaagctggtggagcaaatacaggttcgttggaccggcgatgcaccagcagcgaccacctgggagaacccgcaagagctccgtcgccgtttccctacggcaccagcgtggggacaagctggaactcaaggaggggggaatgtcatgccagcgcccatagcatcagcgacaatacatgatgaagcccaacccaggcgatccatgcgagatcggcggcccacgagcaagtacgtgtcgaatgagtggacccggtag

SEQ ID NO: 68237 - DNA, 928 bp, Oryza sativa
  unsure (1)..(928): unsure at all n locations
  Clone ID: PAT_MRT4530_69018C.1
gcttttgctcctgatctacactgtgagatagcattaacttgtctaatttctatgcagttcttctacatagtaatataatttgtattgaaatacagttgtaatttctggagaatgattatgcttgtnactaaacatttaattgaatattttgcggaactgtaacattaggaaatatagccctctgtcattaggggaattccagtgaccaacaattgatacaggcagtagtcatttttgttccccttactgctattggtttactgtctctgcttnacatatctccatgtgcaataccagtattttatccccttggatcctattttatttttctgaccttctctctaatgggtgcaggtttgtttatcctgggggctgtactgcacttactcgtcccgccaaaagaaaaaaatataagaaaaagaggaaaagaaaaggaaatattctcttcaacttcaagctacagattggttgagagtagtgtgtaggggtttcctcaactgaaaagacaaaaagaaagtgctaacaatgtggcttgcgtttgctgttatatttggtgcttcacgcaaccttctgcttgatgctatatttcctttcaagagatactgtggatattttgatgttgcacttcctcatatttcagtcatggaagtgcttcaagttgttaggtcatcataggaaatttctgaggatacactaattgtatttcacttgtgtagaagatcaccccagctgtgttttacacttttactccaggtcacacatgaagaaagctgaatacagttcgtgtaacatgtagctgaagtagcaggcacagaatgcttgtagtctaattgtgtgaaacagatgcttttattgaagaagttatcagatactagtgattgttggtcaaaaaaaaaaaaaaaaaaaaaaaaaaaaaaaaaaaaaaaaa

SEQ ID NO: 68238 - DNA, 291 bp, Oryza sativa
  Clone ID: PAT_MRT4530_69019C.1
atggagaagagaggagacgaacgaggaggaggggaagcggccggcgcggcgtttcccttatttatgggtgtgctcgtggaggggtggggcccacacgtgcctgacaggtggggccggatcgggagtgggcccacccccgcagcgacggctgggtgcgcgtggccgtgtcacgcgcgcgcggatgagaaagagagagagagagagagagaaaaagaaggtgcagcaaacgctctgtgcgccgcgcggctcgtgaaaggaaagaggaaagacgaaggcgaaagatgtgtgtga

SEQ ID NO: 68239 - DNA, 331 bp, Oryza sativa
  Clone ID: PAT_MRT4530_6901C.1
ggaagaatacaacaaatcaatagcaattaccaattttgttctgctcttggtaagataacacaaaatccatggcaaagaacagcacagcttgtgcaatttcaactacaaaatgaagctttgttaagagtgaaagcatgattccagtatcttgggccgttcggcggtagagggcttggttggcatgggatgggagtaggcgaggtggcccaggtcgcccagctgcacggacagggccgggtcggtgccacccaggaaatgggtgaccaggttcgactttcgcgtttttggggatgtcgtccgactggcggccaccaacaacttcactggcacc

SEQ ID NO: 68240 - DNA, 219 bp, Oryza sativa
  Clone ID: PAT_MRT4530_69020C.1
gaagtgttaatttaaatacttaatagtaatagactctatgatggtgtatttcaaaatgcaccaaaggcgttaattcggccgaacattaattaagtttcacatattcgggctccattccggttttttacaatctatcgatttacagagtttctgaagccttccggaataacacttggcacatcatgttactaatacttaacaataggttgcatcctaaaa

SEQ ID NO: 68241 - DNA, 270 bp, Oryza sativa
  Clone ID: PAT_MRT4530_69021C.1
tttcgttcaacagcgacgaagcaaaccctaggggagggggacatgcaccaccggcgacgaaatcaccgacaccagcgagacaccaccgacacaaaagccccccagaaggcaacccagaggggaccctacgacaaaaaacacacacaacaagcaccaagcgaagagaggggcgagcattaacgcacaaacgatcaccagatacaaaagacaaaagcgccaggaacaccgggcacaaaaaagaagcaacgactgaaaacagaaaacgactaa

SEQ ID NO: 68242 - DNA, 216 bp, Oryza sativa
  Clone ID: PAT_MRT4530_69022C.1
atggccacgccatcctctccggcgaatgcgctcgtggcggcgacggtcgccgccagcgccatcaacccccggcgtggtgttctcgcaaaacttccccgaggtcgcgttctgctacgacgacaggtttgctttgcggccgcccaggcgcccaccacctgctcgacggaacgtcccttccgggtggctcgttcctcctgttctgagtctgatcagtaa

SEQ ID NO: 68243 - DNA, 155 bp, Oryza sativa
  Clone ID: PAT_MRT4530_69023C.1
atgatgatgaatcaagttgtgtatatgatgatctggaattttgggctcgggggccaaattcctataggagtcgtataatcgaatctgtataggtgttcctgtgtaatgttatcgtcacatccaaaaatagagcggaagcatagtgaagctgggtg

SEQ ID NO: 68244 - DNA, 376 bp, Oryza sativa
  Clone ID: PAT_MRT4530_69024C.1
gttggcgttcaggtgggacgagctcgggagggagatcatggggattgcggtgcccggcgcgctcgcccttatggctgacccggtcgcctcgctcgtcgacaccgccttcattggccacatagtcgttgacctccgcctgcaaaaatcactttttgccgcctggaaagatattttttctagtagtgcgcgccctcccctccgccagatccagctgaaggggaggcggtgggcgacgagtggcaacggtgccctctctttcgccggatccggcagaaggggtgccggaaggtatcatgatcttcatagccataattttgagggagtttataagttgataattgctgatctaaggccatttaaagcccttctactctaa

SEQ ID NO: 68245 - DNA, 2034 bp, Oryza sativa
  Clone ID: PAT_MRT4530_69025C.1
atggcctctctatctaatcttccaaggtcaatcaaggtcaccgattcactgcatgaacaagtgacaaccatgccgacggaaccagctgcctctgctggaacgtttgtactgcatcatccagggacaagctttcatggtaacctggaaggggaattagagacagatcctagtaaaattgaagctactccacaagcagatccctccaaagggaaggcaccaatcattggtatgaaattcaacagtgaacaagaggcatatgatttctataatgcctatgctcgagacatgggttttagcattcgaagaagcagttaccattatgtgaaagattccaccataataaagaatcggacattttgttgttctcgtgcaggtactcgtggtcatgataaaagagaagaccaaatttcaaattacggtcagtgttttagtaggccagaaacacgatgtatgtgccgagcatgcatgaagataagtcttagggatgatggattgtattgcatatatgaattcttgcacgagcataaccacattcttgctactggaagtcaggccctctacttaagatctcaaagaaaaataactgaagcacagatggcaagtgctgaaaatgcaaaatcagtaggcatttctaataaggctactattgatttaatggcaaaagaagcgggtggatatgagaatcttggatttactcgtgaagacatgaagaatatattatattcaaagaggtcattgaagagaaaactaaatgatggtcgtccatttggtttgcttgttggtgtggataatcataagaaaagcgttgtttttggtgctgcacttttgtatgatgaaactgctgatagttttgtttggcttttcaagacatttttaaaagccatgtctggaaagaagccacagactatattgactgatgaagacgcagcaatggccaaagcaatcaagttagtcatgccagaaagtcatcatagaatttgtgtttggcatatgaaccaaaatgcctgcaaacaccttgctggagttgtgaaggagtacaagaaattcaatgcagattttcagaattgtatttatgacaaagaggaggaagatgaatttataaatgcatggaatagaatgcttaaaaagtatgatctgcaggagaacaaatggcttgagaggctatttcagaaaaaagagcaatgggcattagtgtatgggagaaacacattttctgctgatatgagtggaacacagagaagtgagagcatgaacaatgaattgaagggctatatcagtgtgaaatatgacatacttaccttcttggaacactttgacaggttgttgtcagacaaaagatatgaggaagtcaaaaatgactttaagacaacacaaagtacaccatggccaaaagtagatttgacaatattaaggcaagcaacaagaatttatactccagcaatatttaaagtgtttcaggaacaagtgttgcaaacattgaactgtgacctatactactgtggtgatattgatgctgaaatgtacaaattaaaagttcacgaatctgatgaaacatacttaatggctgccaacaatgcacaaaagttagcagaagatgtggagaaatacttgagtataaggcctgatccagatttggataaatcaggcacagaggaaaatgttggcccgagtaaagcaagaggcataaaggttaaggagaaagccattcgtgggtcgaggagaccaattggtggttttgacaaggcaacacaatggagtaaaaagaaaaagagtgattcaagcacatcaaagtgtccagtacaagcagaggtggtaacaccatcactgccatacaccatgatgcagattcagggtcgttcagagattcccactaactacaatcacatgcaaatgccagactactatcatgttgaaggtgcttcattacttcagtcatctggttatttcgaacttctaaacaaagtcaagggatgcagcatgaagagactgcacagacatttgatacatatccctatagcatgtttgcccatttaa

SEQ ID NO: 68246 - DNA, 259 bp, Oryza sativa
  Clone ID: PAT_MRT4530_69026C.1
ctcaattatcgaccataggctcttgctgtctgcttgcagtgatctgtgctggaaatctatatattgcaaaccttcccaaggggcgtgctagatctcgaagacgtggtggacttataccattagttgactactattcagacgattgcagaacacactgcatcattgaaagagtgtctggctaaagcagaaggcagcgcatacttatgatccgcatattgtgcctataaagcacacattctgacgactgaatggatttatc

SEQ ID NO: 68247 - DNA, 892 bp, Oryza sativa
  Clone ID: PAT_MRT4530_69027C.1
tgatcaaataataaatggtgatgcaaatttaaaatcgcatattaccgcttattataaaggtttatttggtcctcctgatgattcagttctacagcttgatgattcagtagaatgaggacataataaggccccgagtcctaacggatttctagctgaattttaccaagttttttggaacgttattaagtttgatttattagagctttttaaataaattcattgtggtactttgcccttattttctcttaactttggtattatcattcttttgcctaagtgtgtggaggccatgaaaattcaacaatataggcttatctgtttacttaatgtcagttttaagatttttaacaaacttgctactaatagaattattggtgcagctcaaaaagttattagtttgtctcaatctgcttttatacctaggagaaaaactatggaaggtatggttactttgcatgaaactattcatgaattgcattgtaaaaataaaaggggtgtgatgtttaagattgattttgagaaaacctatgataaaatcaaatggtcttttgtacaacaaacactgaggatgaaaggcttttcacctaaatggtgtcaatggatagcttcttttattcaaggtggtcatgttggtattaaagtaaattaccaagtaggacctaattttaagacttataaagggttaaggcaaggtgatcgtttatctccaattctcttcaatatagtggctgatatgctagctttactaattaagagtgctaaagatgttagttctattactagggtaattcctcatttggtagataatggtttatctatttcgtaatatgcagatgacactaatattttttttgagcatgatttacaagaagcaaagaatctaaaattgatt

SEQ ID NO: 68248 - DNA, 2427 bp, Oryza sativa
  Clone ID: PAT_MRT4530_69028C.1
atgaggaatccaagccaaatgctgcgactgctgctgctgcgggtggcaatcctcgccgccgttctcgcgacaccgtcgctgggccgagtgatagggggcagcaagtgcaagtgcctcatgtgcgtctgcgacgtggacccgcacccgctcccgccgtcgcgccaccacccgccgccgccggaggagccggagccggagccgacgccggtgaaccaccactaccctccgccgacgacgcccgcgtactccctcccgccgccggcgcagccgtacgggcagtacccgtacccgtacccgtcgcaggggcaggccggggcggcgtactggccgccgtcgacgccggcggagatgtacccgcaggtcagggggtacatccggtcaatcaaggtcaccgattcactgcatgaacaagtgacaaccatgccgacggaaccagctgcctctgctggaatgtttgtactgcatcatccagggacaagctttcatggtaacctagaaggggaattagagacgataaaaaacgggtatattaatcaagatcctagtaaaattgaagctactccacaagcagatccctccaaagggaaggcaccaatcatcggtatgaaattcaacagtgaacaagaggcatatgatttctataatgcctatgctcgagacatgggttttagcattcgaagaagcagttaccattatgtgaaagattccaccataataaagaatcggacattttgttgttctcgtgcaggtactcgtggtcatgataaaagagaagaccaaatttcaaattacggtcagtgttttagtaggccagaaacacgatgtatgtgccgagcatgcatgaaaataagtcttagggatgatggattgtattgcatatatgaattcttgcacgagcataaccacattcttgctactggaagtcaggccctctacttaagatctcaaaggaaaataactgaagcacagatggcaagtgctgaaaatgcaaaatcagtaggcatttctaataaggctactattgatttaatggcaaaagaagcgggtggatatgagaatcttggatttactcgtgaagacatgaagaatagattatattcaaagaggtcattgaaggtaaacgaaggtgacacagggggagtcttggaatatatggagaaaaaatcatcggaagatgttaattttttctattccattctagttgatgaggatgacttgataacaaatattttctggactgattctaaaatgattgctgattatgaagtttttggtgatgttctttgttttgacacaacatatagaaaactaaatgatggtcgtccatttggtttgcttgttggtgtggataatcataagaaaagcgttgtttttggtgctgcacttttgtatgatgaaactgctgatagttttgtttggcttttcaagacatttttaaaagccatgtctggaaagaagccacagactatattgactgatgaagacgcagcaatggccaaagcaatcaagttagtcatgccagaaagtcatcatagaatttgtgtttggcatatgaaccagaatgcctgcaaacaccttgctggagttgtgaaggagtacaagaaattcaatgaagattttcagaattgtatttatgacaaagaggaggaagatgaatttataaatgcatggaatagaatgcttgaaaagtatgatctgcaggagaacaaatggcttgagaggctatttcagaaaaaagagcaatgggcattagtgtatgggagaaacacattttctgctgatatgagtggaacacagagaagtgagagcatgaacaatgaattgaagggctatatcagtgtgaaatatgacatacttaccttcttggaacactttgacaggagagacttgtgcagaatgtttgttaaaatagcatctcgagctgcagaatctgatgaaacatacttaatggctgccaacaatgcacaaaagttagcagaagatgtggagaaatacttgagtataaggcctgatccagatttggataaatctggcacagaggaaaatgttgacccgagtaaagcaagaggcataaaggttaaagagaaagccattcgtgggtcgaggagaccaattggtggttttgacaaggcaacacaacggagtaaaaagaaaaagagtgattcaaacacatcaaagtgtccagtacaagcagaggtggtaacaccatcactgccatacaccatgatgcagattcagggtcgttcagagattcccactaactacaatcacatgcaaatgccagactactatcatgttgaaggtgcttcattacttcagtcatctggttatttcagaacttctgaaaaaagtcaagggatgcagcatgaagagactgcacagacatttgatacatatccctatagcatgtttgcccatttaaattaa

SEQ ID NO: 68249 - DNA, 617 bp, Oryza sativa
  Clone ID: PAT_MRT4530_69029C.1
aaaaggaacacaaatttattattattctcccaaccatccactataacaaagcggcaaaaacaggcccttttttatgggtaaagaataaggggaaaaccctccttaacaacccaagcctaagatggacatttttgggtaagggacccaaaaaaatgtctgggaacctttggggggcaggactaggagggaacaccccaaactcatccccccgggggggctggaccccccaagctttttttttggaaaaacaaaaggcatttgccacaacatcgccaggaagggcccgaaaaaaggaattctttcctgccagggggcaaaccagggaggcagggggggttttaaaggcaaaaaaagaccaccccccccttggggccttttaaaagacaacagggggggggggaaaaaaaaaaagcggcccacaagggagctctccataaaacacgggttttccatggggggggacaacttgaacccgggcacaaccttgagtaaaaacccccaccctttgggcggggatgtcccaaaaaggggaaaggggggcgttctagaaaaaatttactttaacggccctcatttgaacaaaataaaaaagggggaactttgggccatttaaaaag

SEQ ID NO: 68250 - DNA, 1593 bp, Oryza sativa
  Clone ID: PAT_MRT4530_6902C.1
atggctgacaatgagaaaggcaataaggtcagaagtcaggacgttggtacctcaagctcccgagtgaacgaagcaccagacaccagttgtgtgacactggtccaacacctgattaaccagaaccgattgcttatagagatactgcagcagcatcagacgccaattctgaacctgagtcagatacaacctcaagtgcagttggaggcagtccaagcacccacaccacaagtcagcatgccgccagcatcccgaaggacccatggtgacgtgccacatgttgactcaaaagaagcaagtatcatttgttttatgtgtgatgagcaagggcactatgcaagggagtgtcctcagcagaaaagagaaacaccaatgcgaaccgaagatgaagtccgtaagatgatcattaccagcacagaatggcctccaccaggaatgacaaaacgtcagagaagaaataccttccgaggtgcaccacagttgacagagcatcttttagctaatggaggtagagtgtctgatagtgaagattcagatcaagtctcctcagatgatgaagacgagaagtctccccaaggtttcaaccaggataaaatggaacgtaaggcatgctctcgttgtggagaaatcggtcatgttgccagctcgtgtgccactacatgcattcattgtgaggaagaccatccacccgacaggtgtccaacgagcaggatcacttgtttcttttgtgaaggaactgatcatgtaccaaaagattgtcaattcagttttctgttgacgaagaagatggccaaccaacccgccagttccaacggagagaagcatcaaggccacacaaatcctcgccaagattacagtttcagcctaactccagtgccaggacagaggaatcaaaatgagaaaagaaaatgccgagtctgggaagatatctgttgcttcaattgtcaaggaatgggtcatttcgccgacaagtgcccaaaaccgagaaacatagctgccagcacgtcagtccacgcaactccctgcaatcagaagcttgctcctcagcgaattgtcatccatgcatcccgaagcagtcctatagcccgcggtgcaacagctccaactccagctagtgcattaccacaaggtgtcaatgctcaatttcagccgcagccaccagttgacaagacagaggccagtatcggcattgtacctttggatgttccagcacagcagccaagaaatcaagtacaagatgaagaacccgagccaccaaccattctctgcaccgacagcctcagcaaagaattgtcgtcgatggaagaagttgtgtctctccccgacctactccaggccgagcaaagggcaatcaacctccggagggcgataccaagcagaagaccgtcatccgcttcaacccacaatcagaaggaagcttctcctgtgaatgatagcaatatgcagtcctatcacatcatcacagaactaatcaaggatgcagtcactagaacaatgccagctatatctctccagaatcaaaatgagcagccatatttgtggttttcagttcgctacctatcattgtgtaatcgaaagtttgcagcaatcatgtaa

SEQ ID NO: 68251 - DNA, 948 bp, Oryza sativa
  Clone ID: PAT_MRT4530_69030C.1
atgccggagtactgcgtcaccggcgggacggggttcatcgcgtcgcacctcatccgcgcgctgctcgccgccagccacaccgtccgcgccaccgtcagagacccagaggatgaagccaaggtggggttcctatgggagcttgatggcgcgagcgagcggctgcagctggtgaaggccgacctgatggtggagggtagcttcgacgacgccgtccgcggcgtcgacggcgtgttccacgcggcgtcccccgtcgtggtggtcggcaacagcagcagcaacaacggcaagccgaacgacgacgacgacgaggaggagggcgtcgccgcgcccgcgccgcgtggtgtcacctcctcctgctcctgcgtacgctaccgcgccggcgcggcggcggcgctgaacgagtcgcactggagcgacgccgcctactgcgcggcgcacggcctctggtacgcctacgccaagacgctggcggagagggaggcgtggcggctggccaaggagcgcggcctcgacatggtcgccgtgaacccgtccttcgtcgtgggccccatcctgttgcaagcgccgacgagcacggcgctgatcgtgctcgccctcctccgcggcgagctccccaggtacccgaacacgacggtggggttcgtccacgtggacgacgcggtgctggcccacgtggtggccatggaggacgccagggcgtcggggcggctcatctgctcgtgccacgtggcgcactggtcggagatcgtggggtcgctgagggagaggtacccggggtacccgatccccgcggagtgcggcagccacaagggagacgacagggcccacaagatggacaccgccaagatcagggctctcggcttcccgccattcctctccgtgcagcagatgttcgacgactgcatcaagagcttccaggacaagggcctccttcctcctcacgcttga

SEQ ID NO: 68252 - DNA, 6085 bp, Oryza sativa
  Clone ID: PAT_MRT4530_69031C.1
atggctgagcaagcaaaggtgcccgacctctctcccagtgtgagtggcgacgacggggagccgaacccacgccgtcgagctcgtactccaccgcctcctccacgccaaagtcctgggcgggagaaggcacccaagagggctgaagggtccgcgacttcggcatccacaggagctgggaaagggcggcgagatggggagcgtcgcctcctcgtctatggtgacggcagcacgccccagggcgcgctccaagctgcgggcgcgctcctacgtcacccgcctgtcgcccatgacccggagtctccagcccaacgatggctggacgacgtggccaaattggtcatgacggcgcggcagcgcctagacgctggtgggcgatcctccgccaccaagacctctggtgctgctaccaccggctccgcgtcgtcaagacggagggcacgacgagcggcagccgctgttcgccgttcggctgccactccttcatcgactccttcgacccgggaagatctgcgtggggagcaggacgcccgcgccagcatcgagcgccggcgtaatgaccgaagtgctgcccacgcaacggaaggcgcttcctcgtccagagtgtcacctcgacacggacgtgggaatcagccctccgtgcccccggttggtggtgtcggctgtagagcctttgtggcgagtcttcggaatgtccgttggcccccaaggttccggcccaccatcgccgaaaaatatgatggcagcgtcaaccccgccgagtttctccaggtctacacgaccgggattgaggccgccgggggtgacgacagggtcatggcgaatttctttcccatggccctgaagggacaggcgcggggttggctaatgaacctgccccccgcgtcggtccactcctgggaggatttgtgccaacagttcaccatgaacttccagggcacatatccgcgccccggtgaggaagcggacttgcacgctgtacagcgaagggacgacgagtcacttcgatcgtacattcagcggttctgtcaagtccgtaataccataccatgcatccctgcacacgcggtaatctacgcgttcagggggggcgtgcggcacaaccgcatgctcgaaaagatcgcctccaaagagccccagactaccgcagagctttttcagctcgcggaccgagtggctcgcaaggaggaggcctggacttggaacccctccggttccggtgtggctgcttcggccgcccccggatccgccgctcagacagggcggcgtgacaggaggaggaagaagaggacagtccgttccgacgacgagggtcatgtcctcgctgtcgagggcgcttcgcgggccacccgaaaggggaggcctgtgagcgacaaaaagaaggaggccagtgctcccagcagggagcgccccaccggcaagtggtgcaccgtccacaatacctccctccatgaccttgcggactgtcgcgcagtcaaaaatttggctgagcggacaagaaagtgggaggaggagaggaggcaggagcgccgggaaggcaagtccccggcggttccttccggccatcggcgaagtgaggctaagcagaaggcccccgccgaggacatcgatgatggcgatgatgacctaggtttccaagagcctggggccaccattgccactgtcaatggaggagcgtgtgctcatgtttctcgccggagcctcaaggctatgaagcgagagcttctggccgcggcccctactcataaggcgacgcgccgggcgcggtggtcggaggttgctctcactttcgaccagaccgaccacccaccgtgcgttgcccgaggagggcagattgcgatggtggtttctcccaccgtttgcaacgtgaagttggggcgtgtcctcattgatggaggagcagccctcaacatcctttcccccgcagcctttgatgccatcaaggccccggggatgatgctccggccgtcccagccaatcatcggtgtgacgccggggcacacttggccgctaggtcatatcgacctcccggtcaccttcggtggacctgccaatttccgcacggagcgggtaaacttcgatgtggcggacctcagtctgccctacaacgtggtcctggggaggcccgcgttggtgaagtttatggcggcggtccactacgcctacctccagatgaagatgccgggccccgatggccccatctctgtccatggcgacctcaaagtcgcgctcgcttgtatggagcagcgcgcggaccgcctcgccgtcgtgtccaagcccgagggtggcgacgagaggcttggctcatctgcccccgccgccccgaggcagcggatagtcacgtgcgatgaggtcccggaagacgcgctcgtctccttcctgcgggcaaacgctgacgtcttcgcatatagaccggcggatatgctcggggtccccagggaggtgattgagcaccgtctcgccgtgcggccgggcgcaaggccggtccggcagaaagtgcggcggcaggccccggaacgtcaagccttcatccgcgaggaggtggcgcgacttctggaggccggattcatccgtgaggtcatccacccggagtggctggcgaacccggtggtcgttcccaaggcgaacggcaagcttcggatgtgcatcgactacaccgaccttaacaaggcatgtcctaaggatccttaccccctgcctcgcatagatcagattgtcgactccacagcggggtgcgaccttttgtgttttctagatgcatactctggttaccatcagattcgcatggctagggaggatgaggaaaaaactgcgttcattacccccgtaggaacttattgttatacgacaatgcctttcgggttaaagaatgcaggtcctacttttcaacgtactactcgaatttctttgggtagccaattaggacgtaatgttgaggcttatgtcgatgacttggttgtaaagacgcgcaaccaggaaacgttactttcagatttagcggaaacttttgagagcctccgctccgcccgcataaaattgaaccccgataagtgcgtgtttggtgtacctgcgggcaagcttctcgggttcttggtctctgcccgaggcatcgaggccaaccccaagaagatacgagctatagagcggatgcgcccccccagcaagcttagggatgtgcaatgcgttaccggttgcatggccgccctaagtcgtttcatatcgaggctgggagagaaggcgctacccttatttaaactcctcaaacgctccgggccgtttacttggacggaggaggctgaacgtgctctcactcagttgaaagtgtatctcagctctcccccagttctggtcgccccggagccaaacgagcccctgctgctctacttagcggcgaccccccaagtagttagtgcatcgttggttgtggagcgcgatgaggacaatcctcattccgcgcactctcaccctgtgctgactaggcccgggagtgagcagggaggagaggcccccgagccgaatagtggcctaaggcccctaacgaccggagtcggcgctctgcccgctcgtcagacggtgctgggtgcccccgaccctcaggaaggccccgaggccactgcgggaaggccgcacctatcgccctttgaccccgaggctaaccctgtgctgactcgacccgggaaagagcagggagaagaggcccccgagccgaacggtggcctaaggcccctgacgaccggagtcggcccttcgcccgcttgtccgacgacgccaggagcccccgacccacaggacggccccgaggccactgtgggaaggccgcccctgtcatcctccgaccccgaggtcatcggcacagaagacgagtgcgccccgagaggccacttggacgaagagcgccccggggatacggcccctagcaaagaggatcggccccaccgaaaggtgcagcggcctgtctactttgttagtgaggccctccgggacgccaagacccgataccctcaggcccagaaaatgctttacgctgttctgatggcctcgaggaaactgcgccattattttcaagcgcatcgagttacggtggttacgtcataccccctcggccaaatcttgcataatcgagagggtacaggacgggtggtaaaatgggcgatcgaactttctgagttcgatttgcattttgaaccacgccacgctatcaagagccaggccctcgccgattttgtggcagagtggaccccggctccagagcctgtctcaatccccgaggtcaactcggacccctcgcagccgccacacaccggccactgggtgatgcagtttgacggctccctgtctcttcagggcgccggtgcgggggtcacgttgacctccccgactggagacgtcctgaaatacctggtccgcctcgactttcgagcgaccaataatatggcagagtacgagggactccttgccggactcagagtggcagctggactggggatccgccgcctcctggtgttaggcgactcccagctagttgttaaccaagtctgtaaggagtaccggtgctctgacccgcagatggacgcttacgtacgccaagtgcggcgtatggagcgccattttgacgggatagagcttcggcatgtgcccagacgggataacatgattgccgacgaactctcacggctcgcgtcctcgcgagcccagaccccaccgggcgcctttgaagaaaggcttacccagccgtcggcgcgacctgaccccctaggggagacgggtgtgcctgaccggcccccgaggcccgtcggagtccaggcctcgggacccgaagggagcgctccaagctcccttagattgattgcttggatcgctgagatccaagcatacctcacagataagactctacccgaggaccgcgaagggagtgaacgcgtccatcgcatatccaaacgctacgtgctggtagaagggaccctctatcggcgcgcggctaatggaatcctcctgaagtgcattccacgggaacaaggcgttgagcttcttgctgatatccatgaaggcgagtgcggagccccattccgcctcgcgcaccttggttggcaaggcctttcgtcaaggattctattggccgacagctctcaatgacgcggtcgacctggtccggcgatgcagagcgtgtcagttccacgccaagcaaatccatcagccggcccaggccctgcagatcataccactttcatggccatttgctgtctgggggctcgatatcctgggaccgtttaggcgggccccgggcgggtttgagtacctgtatgtcgcgatcgacaagttcactaagtggcccgaggcttatccggtcatcaagatcgataagcactccgcacttaaattcattaagggcatcacggcccggtttggagtgcctaaccgtattattacggataacggcacccaattcactagtgaactcttcggcgactactgcgaagacatgggcatcaagctctgcttcgcctcacctgcccaccccagaagcaatggtcaagtggagcgcgccaatgcagaaatcctcaaaggccttaaaaccaagaccttcaatattctcaagaagcacggcgattcatggatcgaggagttgccagcggtgctctgggcgaaccgaaccacaccaagccgagcaaccggagagacgccttttttcctcgtctacggcgcagaagcggttctcccatccgagctcaccctgaggtctcctcgggccaccatgtactgcgaggctgatcaagatcagcttcgcagagatgacctcggctacttggaagaacgaaggcggcgtgcggccctccgagccgcacgctaccagcagagcctgcggcgctaccatcagcgccacgttcgggcccgatcactctgcgtcgacgacctcgtcttacgccgcgtccaaaggcgtgctggattgagcaagctctcaccaatgtgggagggtccgtatcgagtgatcggcgtcccccggccgggctccatacggctggccacgggcgacggcactgagttgcctaacccatggaacatcgaacaccttcgtcgcttctacccctga

SEQ ID NO: 68253 - DNA, 1050 bp, Oryza sativa
  Clone ID: PAT_MRT4530_69032C.1
ctacccgacggtggcttgagcaacagcgagcggcggcggagatgcggcagcactaggtgagacggtgcgagagcagaggaatgagcagggagcagtggcgatggggaaaagggagagcggagctcgggggagctttttatagcctcgagggagcacagatgtggccggggtgagcccgaaatggccggagacatggggggataggtgggcccctttttttttttttttgtagaacaagtatttttcattatgataaataaccgagtaaagtgacacaatctaccaagtacaggggtacatcttcgaaagcaacagagccctttatttgtagctaccaagtagacataacaagtacgataaaaatacacggattcaacactattagttgggctccaactttgaactgattgaataaaggtaattatggagaggcattaccatacccagacccacctcctgcaccactaccattcccgccattttcaccattgccattgcctccaccattaccactagcacccgctcccgcacttgacccataccaattattattagcattgctataaccagagccagatccactaccagatccactaccagttgaaccatatcctccagcctgtccttgtcctcctccaccgccaccaccaccggcatcggactcaccaccataacctccttccccattgctagtctgactagagcttgagcctgagccatttccagaaccatatgccgatccaccatattggctagaaccaccgccgccgccgctccctccagcagttgcatgggcaccattactaccaccctgactgacgccataaccgctcccagaccctgcggcaccaccattgtcatacgcagtaccccctccccctccgctgccatttccgtcggaactcgagtatctagacacccttgcggcattggccagtcccatgctcaagagaacaacgaagccaagagctactagcttagtgctagccattgtgaaactacttgctatggtactttgggcgtgggcggacgcgtgggcgtacgcgtggg

SEQ ID NO: 68254 - DNA, 1241 bp, Oryza sativa
  Clone ID: PAT_MRT4530_69033C.1
gctagagatagagagagagagagagagagatgccggagtactgcgtcaccggcgggacggggttcatcgcgtcgcacctcatccgcgcgctgctcgccgccagccacaccgtccgcgccaccgtcagagacccagaggatgaagccaaggtggggttcctatgggagcttgatggcgcgagcgagcggctgcagctggtgaaggccgacctgatggtggagggtagcttcgacgacgccgtccgcggcgtcgacggcgtgttccacgcggcgtcccccgtcgtggtggtcggcaacagcagcagcaacaacggcaagccgaacgacgacgacgacgaggaggaggtccagcagcggctagtggagccgatcgtgcgcggcgcgtcgaacgtgctccgctcctgcgccagggcgtcgccgcgcccgcgccgcgtggtgttcacctcctcctgctcctgcgtccgctacggcgccggcgcggcggcggcgctgaacgagtcgcactggagcgacgccgcctactgcgcggcgcacggcctctggtacgcctacgccaagacgctggcggagagggaggcgtggcggctggccaaggagcgcggcctcgacatggtcgccgtgaacccgtccttcgtcgtgggccccatcctgtcgcaagcgccgacgagcacggcgctgatcgtgctcgccctcctccgcggcgagctccccaggtacccgaacacgacggtggggttcgtccacgtggacgacgcggtgctggcccacgtggtggccatggaggacgccagggcgtcggggcggctcatctgctcgtgccacgtggcgcactggtcggagatcgtggggtcgctgagggagaggtacccggggtacccgatccccgcggagtgcggcagccacaagggagacgacagggcccacaagatggacaccgccaagatcagggctctcggcttcccgccattcctctccgtgcagcagatgttcgacgactgcatcaagagcttccaggacaagggcctccttcctcctcacgcttgattcatatgatccacacaattaagctgcttgattaattaactaattaatctaatattattaaggatcggaatcacgtagtaccgatcatatatatgttcatctcgaaattaactgcaagtgtgagatcgagaatacactaatacagtgctaatatatactgatcagtcgcctggtgagttattaaaaaaaaaaaaaaaa

SEQ ID NO: 68255 - DNA, 2483 bp, Oryza sativa
  Clone ID: PAT_MRT4530_69034C.1
ggaggagaggctcccgagccgaacggtggcccaaggcccccgacgaccggagttggccctctgcccgcttgtcagacggtgctaggagcccccgaccccaggaaggccctgaggccactgtgggaaggccgcacctatcgcccttcgaccccgaggctaaccctgtgctgacccgacccgggaaagagcagggagaagaggcccccgagccgaacggaggcctaaggcccctgacgaccggagttggccctttgcccgcttttccgacgacgccaggagcccccgacccccaggacggccccgaagccactgtgggaaggccgtccctgttatcctccgacccagaggtcatcagcacagaagacaagtgcgccccgcgaggctgcttggacgaagagtgccccagggatgcggcccctagcaaagaggatcggccccaccgaaaggtgcagcggcccgtctactttgttaatgaggccctccgggacgccaaaacccgataccctcaggcccagaagatgctttacgctattctgatggcctcgaggaaactgcgccattatttccaggcgcatcgggtcactgtagttacgtcttaccccctcggtcaaatcttgcataatcgagagggtacaggacgggtggtgaaatgggcaatcgaactttctgagttcgatttgcactttgaaccacgccacgctatcaagagccaggccctcgccgattttgtggcagagtggaccccagctcccgagcccgtctcgatccccgaggccagcacggacccctcgcagctgcctcacaccgcccactgggtgatgcagttcgacggctccctgtctcttcagggcgccggtgcgggggtcacgttgacctctccgagcggagacgtcctcagatacttggtccgcctcgactttcgagcgaccaataatatggcagaatacgagggactccttgccggactaagagtggcagctggactggggatccgccgcctcctggtgttaggcgactcccagctggtcgttaaccaagtctgtaaggagtaccggtgctctgacccgcagatggacgcctacgtgcgccaaatcccaccgggcgcctttgaagaaaggcttgcccagccgtcggcgcgacccgaccccttaggggagacggatgcgcctgaccggcccccgaggcctgtcggagtccaggcctcgggacccgaggggagtgctcccaactcccttagattgattgcttggatcgccgagatccaagcatacctcacagataagactctacccgaggaccgcgaagggagtgaacgcgtccatcgcatctccaaacgctacgtgctggtagaagggaccctctatcggcgcgcggctaatggaatcctcctgaagtgcattcctcgggaacaaggcgttgtgcttcttgccgatatccatgaaggcgaatgcggagcccactccgcctcgcgcaccttggttggtaaagcttttcgccagggtttctattggccgacagctcttaatgatgcggtcgacctggtccggcgatgtagagcgtgtcaattccacgccaagcaaatccatcagccggcccaggccctgcagaccataccactttcgtggccatttgctgtctggggactcgatatcctgggaccgtttaggcgggccccgggcgggtttgagtatctgtatgtcgcgatcgacaggttcactaagtggcccgaggcttatccggtcgtcaagatcgataagcactccgcacttaaattcattaagggcatcacggcccggtttggagtgcctaaccgtattattacggataatggcacccaattcactagtgaactcttcggcgactactgcgaagacatgggcatcaagctctgcttcgcctcacctgcccaccgcagaagcaatggccaagtggagcgcgccaatgcggaaatcctcaaaggccttaaaaccaagaccttcaacatactcaagaagcacggcgattcatggatcgaggagttgccagcggtgctctgggcaaaccgaactacaccaagccgagcaaccggggaaacgcctttcttcctcatctacggcgcggaagcggttctcccatccgagctcaccctgaggtctcctcgggctaccatgtattgcgaggctgatcaaaatcagcttcgcagagatgacctcgactacttggaagagcgaaggcggcgcgcggccctccgagccgcgcgctaccagcagagcctgcggcgctaccatcagcgccacgtccgggcccgatcactctgcatcgacgacctcgtcctacgccgcgtccaaacgcgtgctggattgagcaagctttcaccaatgtgggagggtccgtatcgagtggtcggcgtcccccggccgggctccatacggctggccacgggcgacggcactgagctgcctaacccgtggaacatcgaacaccttcgtcgcttctacccctga

SEQ ID NO: 68256 - DNA, 4608 bp, Oryza sativa
  Clone ID: PAT_MRT4530_69035C.1
atggccgagcaagcaaaggcgcacgacctctctccgagtgtgagtggcgacgacggggagccgaacctacgccgtcgagctcgtactccgccgccccctccacgccaaagtcctaagcggggggaggcgctcgagagggtcgaaagatccgcgacttcacctatcgcgggcgatggagaagaacggcgagatggggagcgtcgtctcctcgtctacggcgacggcagcacgccccagggcgcgctccaagctgcgggcgcgctcttacgtcacccgcctgtcgtccctgacccggagtctccagcccaacgatggctggacgacgtggccaaattagtcatgacggcacggcagcgcctagatgctggtgggcgatcctccgccaccaaggcctctggtgctgctaccaccggctccgcgtcgtcaagacgaagggcacgacgagcggcagccgctgttcgccattcggccgccactccttcgtcgactcctacgacccgagaagatctgcgtggggggccggacgcccgcaccagcatcgagcgccggcgtaatgaccgaagtgctgcccacgcaacggagggcgcttcctcgtccagagtgtcacctcaacacggacgtgggaatcagccctccgtgcccccggttggtggtgtcggctgtagagcctttgtggcgagtcttcggaatgtccgttggcccccaaggttccggcccaccatcgccgaaaaatatgatggcagcgtcaaccccaccgagtttctccaggtctacacgaccgggattgaggccgctgggggtgacgacagggtcatggcgaatttctttcccatggccctgaaggggcaggcgcggggttggctaatgaacttgccacccgcgtcagtccactcctgggaggatttgtgtcaacagttcaccatgaactttcagggcacatatccgcgcccaggtgaagaagcggacttacacgcagtacagcgaagggatgatgagtcacttcgctcgtacattcagcggttctgtcaaatccgcaacaccataccatgcatccctgcacacgcggtaatctacgcgttcagggggggcgtgcggcacaaccgcatgctcgaaaagatcgcctccaaggagccccagactaccgcggagctttttcagctcgcggaccgagtggctcacaaggaggaggcctggacttggaactcctccggttccggtgtggcagcttcggccgcccccggatccgccgctcagacagggcgacgtgacaggaggaggaagaagaggtcagtccattccgacgacgagggtcatgtcctcgccgtcgagggcgcttcgcgggccacccaaaaggggaggcctacgagcgacaaaaagaaaaaggccggcgctcccagcagggagcgcccagccggcaagtggtgcaccgtccacaacacctccctccacgacctcgtggactgtcgcgcagtcaaaagtttggcagagcgaacgaggaagtgggagggggagaggaggcaggagcgccgtgagggcaggtccccggcggttccctccggtaatcggcgaagtgaggccaagcagaaggcccccgccgaggacatcgatgatggcgatgatgacctaggcttccaagagcctggggccaccattgccaccatcgatgggggagcgtgtgctcacgtttctcgccggagcttcaaggctatgaagcaagagcttctggccgcggcccctactcatgaggcgacgcgtcaggcgcggtggtcggaggttgccctcaccttcgaccagaccgaccacccaccgtgcgttgcccggggagggcagattgcgatggtggtttcccccaccgtttgcaacgtgaagttggggcgtgtcctcattgatgggggagcggccctcaacatcctttcccctgcggcctttgacgccatcaaggccccggggatggtgctccggccgtcccagccgattatcggtatgacgccggggcacacgtggccgttaggtcacatcgacctaccggtcaccttcggtgcatccgccaacttccgcacggagcgggtgaactttgatgtggcggacctcagtctgccctacaacgcggtcctggggaggcccgcgttggtgaagttcatggcggcggtccactacgcctacctacagatgaagatgccgggccccggtggccccatctctgtccatggcgacctcaaagtcgcgctcgcttgtctggagcagcgcgcggaccacctcgccactgcgtccaagcccgaggatggcaacgagaggcttggcacctccgcccccgccaccccgaggcagcggatgattacatgcgacgaggtcccggaagacgcgctcgtctccttcctgcgggcaaatgctgacgtcttcgcatggagaccggcggatatgcccggggtccccagggaggtgattgagcaccgtctcgccgtgcggccgggcgcaaggccggtccggcagaaagtgcggcggcaggccccggaacgtcaagccttcatccgcgaggaggtggcgcgacttctggaggccggattcatccgtgaggtcatccatccggagtggctggcgaacccggtggtcgttcccaaggcgaacggcaagcttcggatgtgcatcgactacaccgaccttaacaaggcatgtcctaaggatccttaccccctgcctcgcatagatcagattgtcgactccactgcggggtgcgaccttttgtgttttctagatacatactctggttaccatcagattcgcatggctagggaggatgaggaaaaaactgcgttcattacccccataggaacctattgttatacgacaatgcccttcgggttaaagaatgcaggtcctacttttcaacgtactactcgaatttctttgggtagccaattaggacgtaatgttgaggcttatgtcgatgacttggttgtaaagacgcgcaaccaggaaacattactcacagatctagcggaaacttttgcgagtctccgctccgcccgcataaaactaaaccccgataagtgtgtgttcggtgtacctgcgggcaagcttctcgggttcttggtctctgcccgaggcattgaggccaaccccgagaagatacgggctatagagcggatgcgcccccccagcaaacttagggatgtgcaatgcgtcaccggttgcatggccgccctaagtcggttcatatcgaggctgggagagaaggcgttacccttatttaagcttctcaaacgctccggaccgtttacctggacggaggaagctgaaaatgccctcacccagttgaaggcgtatctaagctctcccccagttctggtcgccccggagccagacgagcccttgctactctacttagcggcgaccccgcaagtagttagtgcggcattggttgtggagcgcgatgaggacaattctcatttcgcgcttccccaccctgtgccgacttggcccgggagagagcagggaggagaggccctcgagccgaacggtggcctaaggcccccgacgaccagagttggccctccgcccgctagtcagacggtgctaggagcccccgacccccaggaaggccctgaggccactgtgggaaggccgcacctatcgccctttgaccccgaggctaaccctgtgctgactcgacccgggagagagcagggagaagaggcccccgagccgaacggtggcctaaggcccctgacgaccggagttggccctttgcccgtttgtccgacgacgccaggagcccccgacccccgggacggccccgaggccactgtgggaaggccgcccctgtcatcctccgaccccgaggtcatcagcacagaagacgagtgcgccccacgaggccgcttggacgaagagcgccccggggatgcagcccctagcgaagaggatcggccccaccgaaaggcgcatcgggttacggtggttacgtcttaccccctcggtcaaatcttgcataatcgagagggtacaggacgggtggtgaaatgggcgatcgaactttctgagtttgatttgcactttgaaccgcgccacgctatcaagagccaggccctcgccgactttgtggcagagtggaccccggctcccgagcccgtctcaatccccgaggccaactcgggcccctcgcagttgcctcacaccgcccactgggtgatgcagttcgacggctccctgtctcttcagggcgccggtgcaggagtcacgttgacctcgccgagcggagacgtcctcaaatacctggttcgccttgactttcgggcaaccaataatatggcagagtacgagggactccttgcgggactcagggtggcagctggactggggatccgccgcctcctggtgttaggcgactcccagctggtcgttaaccaagtctgtaaggagtaccggtgctctgacccgcagatggacgcctacgtgcgccaagtacggcgcatggagcgccattttgacgggattgagcttcggcatgtgcccagacgggataacatgattgccgacgaactctcacggctcgcgtcctcgcgagcccagaccccaccgggcgcctttgaagaaaggcttgcccagtcg

SEQ ID NO: 68257 - DNA, 274 bp, Oryza sativa
  Clone ID: PAT_MRT4530_69036C.1
gcaaacaccaacttttttcagtttctgaattctggatggatcgtatcaaattcatcacagcatcgtacaatctgtgcaagcattggtacacccatcgatgtgcagagagagtttgtttcaaatgcgactggaccattcaccagcccggtgggaccttggccgcgtacacccatacggtcgtggcgacagggtccgcccgggggttgggcaggatctccaaggggcccttgccggtgacgatggcctggacgaagaagccggacatggagaacat

SEQ ID NO: 68258 - DNA, 5983 bp, Oryza sativa
  Clone ID: PAT_MRT4530_69037C.1
atggccgaacgagcaaaggcgcacaacctctctccgagtgttagcggtgacgacggggagccaaacccacgccgtcgagctcgtactccaccgccccctccacgccaaagtcctaggcgggaggaggcgctcgagagggtcgaaggatccgcgacttcgacgtccacgggtgatggggaagggcggcgagatggggagcgtcgcctcctcgtctacggcgacggcagcacgccccagggcacgctccaagctgcgggcgcgctcctacgtcacccgcccgttgtccctgacccggagtctccagcccaacgttggctggacgacgtggccaacttggtcatgacagcacggcagcgcctaggtgctggtgggcggtcctccgccaccaagacctctggcgctgctaccaccggctccgtgtcgtcaaggcggagggcgcggcgagcggcggctgttgctcgccattcggccgccactccttcgtcagcgcctccgacccaggaagatcagcgtggggggccagatgcccgcatcgatatcgagcgccggcgtaatggtcgacgtgctccccacgcaacggagggcgcctcctcgtccggagtgtcacctcaacgcggacacggggatcagccctccgtgcccccggttggtggtgtcggctgtagagcctttgtggcgagccttcggaacgtccgttggcccccaaggttccggcccaccatcgccgaaaaatatgatgggagcatcaaccccaccgagtttctccaggtctacacgaccgggatcgaagccgccgggggtgatgacagggtcatggcgaatttctttcccatggccctgaagggacaggcgcggggttggctaatgaacttgccacccgcgtcggtccactcctgggaggatttgtgccaacagttcaccatgaactttcaaggcacatatccgcgcccaggtgaagaagcggacctgcatgcagtccagcgaagggatgatgagtcacttcgctcatacattcagcggttctgtcaagtccgcaacaccatgccatgcatccctgcacacgcagtgatctacgcgttcagggggggtgtgcggcacaacagcatgctcgaaaagatcgcctccaaagagccccagactaccgcggagctttttcagctcgcggaccgagtagctcgtaaggagaaggcatggacctggaacccctccggttccggtgtggcagcttcggccgcccccggatccgctgctcagacagggcggcgtgacaggaggaggaagaagaggtcagcccataccgacgacgagggtcatgtcctcgccgtcgagggcgcttcgcgggccacccgaaaggggaggcctgcgggcaacaaaaagaaggaggccggcgctcccagcagggagcgcccaaccggcaagtggtgcatcgtccacaacacttcccttcacgacctcgcggactgccgcgcagtcaaaagtttggctgagcggacgaggaagtgggaggaggagaggaggcaggagcgccgagagggcaagtccccggcggttccttccggcaatcggcgaagtgaggccaagcagaaggcccccgccgaggacatcgatgacggcgatgatgacctaggtttccaagagcctggggccaccattgccactgtcgatgggggagcgtgtgctcacgtttctcgccggagcctcaaggccatgaagcgagagcttctggccgcggcccctactcatgaggcgacgcgccgggcgcggtggtcggaggttaccctcaccttcgaccagaccgaccacccaccgtgcgttgcccggggaggacagatcgcaatggtggtttcccccactgtttgcaacgtgaagctggggcgtgtcctcattgatggaggagcagccctcaacatcctttcccccgcggcctttgacgccatcaaggccccggggatggtgctccggccgtcccagccgattatcggtgtgacgccggggcacacctggccgctaggtcatatcgacctcccggtcaccttcggtggatccgccaatttccgcacggagcgggtgaactttgatgtggcggacctcagtctgccctacaacgcggtcttagggaggcccgcgttggtgaagttcatggcggcggtccactacgcctacctccagatgaagatgccgggccccggtggccccatctctgtccatggcgacctcaaagtcgcgcttgcttgtatggagcagcgcgccgaccacctcgccgccgcgtccaagcccgagggtggcgacgagaggcttggcacatccgcccccgccgccccgaggcagcggatagtcacatgcgacgaggtcccggaagacgcgctcgtctctttcctgcgggcaaacgctgacgtcttcgcatggagaccggcggatatgcccggggtccccagggaggtgattgagcaccgtctcgccgtgcggccgggcgcaaggccggtccggcagaaagtgcggcgccaggccccggaacgtcaagccttcatccgcgaggaggtggcgcgacttctagaggccggattcatccgcgaggtcatccatccggagtggctggcgaacccggtggtcgttcccaaggcgaacggcaagcttcggatgtgcatcgactacaccgaccttaacaaggcatgtcctaaggacccttaccccctgcctcgcatagatcagattgtcgactccacagcggggtgcgaccttttgtgttttctagatgcatactctggttaccatcagattcgcatggctagggaggatgaggaaaaaactgcattcattacccccataggaatttattgttatacgacaatgcccttcgggttaaagaatgcaggtcctacttttcaacgtactactcgaatttctttgggtagccaaataggacgtaatgttgaggcttatgttgatgacttggttgtaaagacgcgcaaccaagagaccttactctcggatctagcggaaacttttgagagtctccgctccgcccgcataaaactgaaccccgataagtgcgtgttcggtgtacctgcgggcaagcttctcgggtttttggtctccgcccgaggcatcgaggccaaccccgagaagatacgagctatagagcggatgcgccccgcagcaagcttagggatgtgcaatgcgtcaccggaagctgaacgtgccctcactcagttgaaggcgtatctcagctctcccccagttctggtcgccccggagccaaatgaacccttgctactttacttagcggcgaccccgcaagtggttagtgcggcgttggttgtggagcgcgatgaggacaatcctcattccgcgcacccccaccctgtgctggcttggcccgggagagagcagggaggagaggcccccgagccgaacggtggcccaaggcccccgacgaccggagcaggccctctgcccgcttgtcagacggtgccaggtgcccccgatccccaggaaggccccgagggccactgcgggaaggccgcacctatcgccctctgaccccgaggctaaccctgtgccgactcgacccgggagacagcagggagaagaggcccccgagccgaacggtggcctaaggcccctgacggccggagttggccctttgcccgcttgtccgacgacgccaggagcccccgacccccaggacggccccgaggccactgtgggaaggccgcccctgtcgtcctccgaccccgaggtcgtcggcacagaagacgagtgcaccccgcgaggccgcttggacaaagagcgccccagggatgtggcccctagcgaagaggatcggccccaccgaaaggtgcagcagcccgtctactttgttagtgaggccctccgggacgccaagacccgataccctcaggcccagaagatgctttacgctattctgatggcttcgaggaaactgcgccattatttccaggcgcatcgggtcacggtggttacgtcttaccccctcggccaaatcttgcataatcgagagggtactggacgggtggtgaaatgggcaatcgaactttctgagtttgatttgcattttgaaccacgccacgctatcaagagccaggccctcgccgattttgtggcagagtggaccccagctcccgagcccgtcttagtccccgaggccagctcgggcccctcgcagctgcctcacaccgcccactgggtgatgcagttcgacggctccctgtctcttcagggcgccggtgcgggggtcacgttgacctcgccgagcggagacgtccttagatatttggttcgccttgactttcgggcgaccaataatatggcagaatatgagggactccttgcgggactcagggtggcagctggactggggatccgccgcctcctggtgctaggcgactcccagctagtcgttaaccaggtctgtaaggagtaccggtgctctgacccgcagatggacgcttacgtgcgccaggtacggcgtatggagcgccattttgacgggatagagcttcggcacgtgcccagacgggataacacggttgccgacgaactctcacgactcgcttcctcgcgagcccagaccccaccgggcgcctttgaagaaaggcttgcccagccgtcggcgcgacccgaccccttaggggagacggacgcgcctgacaggcccccgaggcccgtcggagtccaggcctcgggacccgaggggagcgcccccagctcccttagattgattgcttggatcgctgagatccaagcatacctcacagataagactctacccgaggaccgcgaagggagtgaacgcgtccagcgcatctccaaacgctacgtgctggtagaagggaccctctatcggcgcgcagctaacggaatcctcctgaagtgcattcctcgggaacaaggcgtcgagcttcttgccgatgtccatgaaggcgaatgcggagcccactccgcctcgcgcaccttggttggcaaagcctttcgtcaaggtttctattggccaacagctctcaatgatgcggtcgacctggttcggcgatgtagagcgtgtcaattccacgccaagcaaatccatcagccggcccagggcctgcagatcataccactttcatggccatttgctgtctgggggctcgatatcctgggaccgtttaggcgggccccgggcgggtttgagtatctgtatgtcgtgatcgacaagttcactaagtggcccgaggcttatccggtcgtcaagatcgataagcactccgcacttaaattcattaagggcatcacagcctggtttggagtgcctaaccgtattattacggataacgacacccaattcactagtgaacttttcggcgattactgcgaagacatgggcatcaagctctgcttcgcctcacctgcctaccccagaagcaacggccaagtggagcgcgccaatgcggaaatcctcagaggccttaaaaccaagaccttcaacatcctcaagaagcacggcgattcgtggatcgaggagttgccagcggtgctctgggcgaaccgaaccacgccaagccgagcaaccggggaaacgcctttcttcctcgtctacggcgcggaagcggttctcccatccgagctcaccctgaagtcccctcgggccaccatgtactgcgaggctgatcaagatcagcttcgcagagatgacctcgattacttggaagagcgaaggcgacgcgcggccctccgagccgcgcgctaccagcagagcctgcggcgctaccatcagcgccacgtccgggcccgatcgctctgcgtcgacgacctcgtcctacgccgcgtccaaacgcgtgctggattgagcaagctctcaccaatgtgggagggtccgtatcgagtgatcggcgtcccccggccgggctccgttcggctggccacgggcgacggcacagagctgcctaacccgtggaacatcgaacaccttcgtcgcttctacccctaa

SEQ ID NO: 68259 - DNA, 290 bp, Oryza sativa
  Clone ID: PAT_MRT4530_69038C.1
tacacccgtaatattgccacaatgacccagccgcgccccctcctcgtcgctcggcgtcgatcgggtccccctcccgctcgcgcttgccgtcagccgcatccacctagtcgcgcccgcagccgccgagcaccccgacgtttcggcgacagccgcggcgacccagcggcgcgagcggacgaacatggcggcaatggtggtggcgcacgtccccgtcttcctggcgccggggtggtgtcgcggcggcggcgtcagcgtcggcggcgggggcgttctcggaggtgccgccggcg

SEQ ID NO: 68260 - DNA, 5973 bp, Oryza sativa
  Clone ID: PAT_MRT4530_69039C.1
atggccgagccagcaaaggcgcacgacctctccccgagtatgagcggtgacgacggggagccaaacccacgtcgtcgagctcgtactccaccgccacctccacgccaaagtcctaggcgggagaaggcacttgagagggccgaaggatccgcgacttcgacatccacaggaggtggagaagggcggcgagatgaggagcgtcgcctcctcgtctacggcaacggcagcacgccccagggcgcgctccaagctgcgggcgcgctcctacgtcacccgcccgtcgcccatgacccggagtctccagcccaacgttggctggacgatgtggccaaattgggcatgactgcacgccagcgcctagatgctggtgggcagtcctccgccaccaaggcctctggtgctgctgccaccggctccgcatcgtcaagacggagggcgcggcgagcggcagccgctgttcgccattcggccgccactccttcgtcaatggctccgacccgggaagatctgcgtggggaaccggatgcccgcatcagtatcgagcgtcggcgtaatggccgacgtgctccccacgcaaaggagggcgcctcctcgtccggagtgtcgcctcaccacggacgcggggatcagccctccgtgcccccggttggtggtgtcggctgtagagcctttgtggcgagccttcggaatgtccgttggcccccaaggttccggcccaccatcgccgaaaaatatgacgggagcgtcaaccccgccgagtttctccaggtctacacgaccgggatcgaggccgccgggggtgacgacagggtcatggcgaatttctttctcatggccctgaaaggacaggcgcggggttggctaatgaacttgccacccgcgtctgtccactcttgggaggatttgtgccaacagttcaccatgaactttcaaggcacatatccgcgcccaggtgaggaagcggacttgcacgcagtacagcgaagggatgatgagtcacttcgctcgtacattcagcggttctgtcaagtccgcaacaccataccatgcatccctgcgcacgcggtgatttacgcgttcagggggggtgtgcggcacaaccgcatgcttgaaaagatcgcctccaaggagccccaaactaccgcggagctttttcagctcgcggaccgagtggctcgtaaggaggaggcatggacctggaacccctccggttccggtgtggcagcttcggccgcccccggatccgccgctcagatagggcggcgtgacaggaggaggaagaagaggtcagcccataccgacgacgagggtcatgtcctcgccgtcgagggcgcttcgcgggccacccgaaaggggaggcctgcgggaggcaaaaaggacgaggccggcgctcccaacagggaacgcccaaccggcaagtggtgcaccgtccacaatacttcccttcacgacctcgcggactgccgtgcagtcaaaagtttggctgagcggacgaggaagtgggaggaggagaggaggcaggagcgccgagagggcaaatccccggcggttccttccggtaatcggcgaagtgaggccaagcagaaggcccccgccgaggacatcgatgacggcaatgatgacctaggtttccaagagcctggggccaccattgctaccgtcgatgggggagcgtgtgctcacgtttctcgccggagcttcaaggccatgaagcgagagcttctggccacggcccctactcatgaggcgacgcgccgggcgcggtggtcggaggttgccctcaccttcgaccagaccgaccacccaccgtgcgttgcccggggagggcagattgcgatggtggtttctcccaccgtttgcaacgtgaagttggggcgtgtcctcattgatgggggagcggccctcaacatcctttcccctgcggcctttgaagccatcaaggccccggggatggtgctccggccgtcccagccaattatcggtgtgacgccggggcacacgtggccgttaggtcacatcgacctaccggtcaccttcggtggatccgccaacttccgcacggagcgggtgaacttcgatgtggcggacctcagtctgccctacaacgcggtcctggggaggcccgcgttggtgaagttcatggcggcggtccactacgcctacctacagatgaagatgtcgggccccggtggccccatctctgtccatggcgacctcaaagtcgcgctcgcttgtctggagcagcgcacggaccacctcgccgctgcatccgagcccgagggtggcgacgagaggcttggcgcctccgcccccgccaccccgaggcagcggatgatcacaggcaacgaggtcccggtcaaggaggttgccctgggcgacggcccgtccaagaccacgcgctcgtctccttcctgcgggcaaacgctgacgtcttcgcatggagaccggcggatatgcccggggtccccagggaggccggtccggcagaaagtgcggcggcaggccccggaacgtcaagccttcatccgcgaggaggtggcgcgacttctggaagccggattcatccgtgaggtcatccatccggagtggctggcgaacccggtggtcgttcccaaggcgaacggcaagcttcggatgtgcatcgactacaccgaccttaacaaggcatgtcctaaggatccttaccccctgcctcgcatagatcagattgtcgactccactgcggggtgcgaccttttgtgttttctatatgcatactctggttaccatcagattcgcatggctagggaggatgaggaaaaaactgcgttcattacccccataggaacctattgttatacgacaatgcccttcgggttaaagaatgcaggtcctacttttcaacgtactactcgaatttctttgggtaaccaattaggacgtaatgttgaggcttatgtcgatgacttggttgtaaagacgcgcaaccaggaaatgttactctcagatctagcggaaacttttgagagtctccgctccgcccgcataaaactaaaccccgataagtgtgtgttcggtgtacctgcgggcaagcttctagggttcttggtctctgcccgaggcattgaggccaaccctgagaagatacgggctatagagcggatgcgcccccccagcaaacttagggatgtgcaatgcgtcaccggttgcatggccgccctaagtcggttcatatcgaggctgggagataaggcgttacccttatttaagcttctcaaacgctccggaccgtttacctggacggaggaagccgaaaatgccctcacccagttgaaggcgtatctaagctctcccccagttctggtcgccccggagccagacgagcccttgttactctacttagcggcgaccccgcaagtagttagtgcggcattggttgtggagcgcgatgagaacaattctcatttcacgcttccccaccctgtgccgacttggcccgggagagagcagggaggagaggctcccgagccgaacggtggcccaaggcccccgacgaccggagttggccctctgcccgcttgtcagacggtgctaggagcccccgacccccaggaaggccctgaggccactgtgggaaggccgcacctatcgcccttcgaccccgaggctaaccctgtgctgacccgacccgggaaagagcagggagaagaggcccccgagccgaacggaggcctaaggcccctgacgaccggagttggccctttgcccgcttgtccgacgacgccaggagcccccgacccccaggacggccccgaagccactgtgggaaggccgcccctgttatcctccgaccccgaggtcatcagcacagaagacaagtgcgccccgcgaggctgcttggacgaagagtgccccagggatgcggcccctagcgaagaggatcggccccaccgaaaggtgcagcggcccgtctactttgttagtgaggccctccgggacgccaaaacccgataccctcaggcccagaagatgctttacgctattctcatggcctcgaggaaactgcgccattatttccaggcgcatcgggtcacagtagttacgtcttaccccctcggtcaaatcttgcataatcgagagggtacaggacgggtggtgaaatgggcaatcgaactttctgagttcgatttgcactttgaaccacgccacgctatcaagagccaggccctcgccgattttgtggcagagtggaccccggctcccgagcccgtctcgatccccgaggccagcacggacccctcgcagctgcctcaccgcccactgggtgatgcagttcgacggctccctgtctcttcagggcgccggtgcgggggtcacgttgacctctccgagcggagacgtcctcagatacttggcgactcccagctggtcgttaaccaagtctgtaaggagtaccggtgctctgacccgcagatggacgcctacgtgcaccaagtacggcgtatggagcgccattttgacgggattgagcttcggcatgtgcccagacgggataacatgattgccgacgaactctcacggctcgcgtcctcgcgagcccagaccccaccgggcgcctttgaagaaaggcttgcccagccgtcggcgcgacccgaccccttaggggagacggatgcgcctgaccggcccccgaggcccgtcggagtccaggcctcgggacccgaggggagtgctcccaactcccttagattgattgcttggatcgccgagatccaagcatacctcacagataagactctacccgaggaccgcgaagggagtgaacgcgtccatcgcatctccaaacgctacgtgctggtagacgggaccctctatcggcgcgcggctaatggaatcctcctgaagtgcattcctcgggaacaaggtgttgtgcttcttgccgatatccatgaaggcgaatgcggagcccactccgcctcgcgcaccttggttggtaaagcttttcgccagggtttctattggccgacagctcttaatgacgcggtcgacctggtccggcgatgtagagcgtgtcaattccacgccaagcaaatctatcagccggcccaggccctgcagaccataccactttcgtggccatttgctgtctggggactcgatatcctgggaccgtttaggcgggccccgggcgggtttgagtatctgtatgtcgcgatcgacaggttcactaagtggcccgaggcttatccggtcgtcaagatcgataagcactccgcacttaaattctttaagggcatcacggcccggtttggagtgcctaaccgtattattacggataatggcacccaattcactagtgaactcttcggcgactactgcgaagacatgggcatcaagctctgcttcgcctcacctgcccaccccagaagcaatggccaagtggagcgcgccaatgcggaaatcctcaaaggccttaaaaccaagaccttcaacatagtcaagaagtatggcgattcatggatcgaggagttgccagcggtgctctgggcaaaccgaactacaccaagccgagcaaccggggaaatgcctttcttcctcgtctacggcgcggaagcggttctcccatccgagctcaccctgaggtctcctcgggctaccatgtattgcgaggctgatcaaaatcagcttcgcagagatgacctcgactacttggaagagcgaaggcggcgcgcggccctccgagccgcgcgctaccagcagagcctgcggcgctaccatcagcgccacgtccgggcccgatcactctgcgtcgacgacctcgtcctacgccgcgtccaaacgcgtgctggattgagcaagctttcaccaatgtgggagggtccgtatcgagtggtcggcgtcccccggccgggctccatacggctggccacgggcgacggcactgagctgcctaacccgtggaacatcgaacaccttcgtcgcttctacccctga

SEQ ID NO: 68261 - DNA, 6382 bp, Oryza sativa
  Clone ID: PAT_MRT4530_6903C.1
agggaggcgaggtcgaaggcgcttctcgtgataacggcggagggcctgttggtagcttgctacttgtacgacaactcgctcacgatgcttctcgagaaggtttacatcgatgtctcgctgttcatcctggttctcgtcggaatgcttctgtactcgtgtactttgatgtcatagctcaccggggagcatggcttcagagccgtacacgagaaagaagggtgtttccttattggacgttgtcggtgtagtgcgcacggcccatagtagggtttttatcccttgtagtactatgccgtttgcccttttgacttgtccattgctttgagggtgagagaccgaggcgaagcatattttgactcttaagccgatgcagtaatcttggaaatcggcgctgatgaattgggagccgttgtcgcttatgatgcggtgtggtagtccgtatctgcaaaatatccctctgatgaacttgatggcgttgtcggccttgatttctctagtgggtgttgcttcgatccatttggtgaatttgtcgatcgctacaaataggaatttgtagccaccttgtcctcgtgggaatgggccaagtatgtctagcccccagcacgagaacggccaagtcagagggattgtttgaagcgcctgtgcaggtagctttgtgtgtttgcatgtcgcatgcatctttgagggctgttggccagaaaaactcttgtcgaaaggctttgccgaccaatgtccgaccggcggcatgggacccacatatgccttcgtgtatgtcgaggaggagttgtctgccgtcgtcggtagagacgcatttgagaagtatcccgtttggctcttttttgtataaatcgttgccgatcatacagtagatttttgctttacgggttattttctcggcctctgtgtcgtcttcgggtaactcctcgctgctgatgaatttgattaatggggtgcgccagtcatccgttgtttcaatgttagccacggcgcgttctgcctcgatgacctccgagctgatgtcgggggtgcttgggccaacttcgccgcttacttcttttaccgaaggtttcgtcaggatgtcgagaaaggtgccgggctcgagcggttcttgtctggatgcgcgtcgggctaggtcgtctggctcgacgttgtccttgcggtagacgtgtcggacctcgatcccatcgaacctcttctcgagcttcctgacttttgcaaggtacttggataactcggggttggagcatttatagtctttgtgcacctggtttgcgactagctcagagtcccctttgacgattagtcgcttggcgccaagtgcggctgcagctcgtatcccggcgagtagtccttcgtattctgcagtgttattcgttgccctgaagttaaggtggattgcatgtttgaattgatctccggatggagatgttaagataaatccagcccctgctccttggctattgagtgcgccatcgaacgccattgtccatgtctcattgtcgccttggttatctgacttgttatctggcatggtccaatcggccacgaagtcggcaagtacctgagatttaatggctgttcgcggcacgaagtggacatcaaattggcttagctcgactacccatttcgcgatgcggccgacaacatctttgtttctaacaacttcgccaagagggaaggaggaaacaattgtgaccctgtgggcttgaaagtagtggcgtagcttccttgatgtcataatgactgcgtagagcagtttttgaatctgtgggtatcttgtctttgcgtcatggagagtttcgttgacgtaatagactggtcgctgtactttttctcgctcgatgacaatgacagtgctaacggagtgtggcgtagcggcaatataaaggaataattcttcattaggttggggagcaacgagtacaggggggtttgataagtagcgcttgagcgcaataaatgcctcttcggcttcctgtgtccatacaaatttgtcttgtttcttcagcaaggcgaaaaaaggctgtcctcgttctcccatcctagcgacgaatctgcttaatgctgccatgcatccggttagcttctgtacctccttgagtcttgtgggcgacttcatgttctcgattgctttgatcttctcgggatttgcctctattcctctgccagaaacaaggaatccgagtaacttgcccgacggtactccgaacatgcacttctctggattgagcatgagatgatatcgtcggaggttgtcgaacgtttcccgaggtcatcaatcaatgagtcgcttgtcctggttttgacaacgatgtcgtcgacgtacgcttcgacattgttgccaagctgattgctaagtgcgccctggaccgtgcattggaaagtattcccagctgttatcaatccgaagggcatcttgacgtagcaaaataccccgaacggagtgatgaacgctgttttctcctcgtcctccttcgccatgctgatttggtggtagccagagtaagcgtcgaggaagctgttgaatccaccagttggtctattcgagggagagggaagtgatccttggggcacgccttgttgaggtctgtgaagtcgacgcacattctccatttaccattggctttccgcaccataactgggttggcaagccactctggatggagtacttctctgatgaagccagctttgagaagtttgtcgagctcttctcgtatggcttgttttcgatctggtgcaaatctccgtagtctttgctttactggcttggcatcgggtcgcaccattagtttgtgctcaatcacctccctggggacccccggcatgttggacggttgccaagcaaacacgtcggcattgtcgcggaggaaggtgatgaacgcgagttcactcttgtcagggttagcactagagagcggaacgatcttgatggcaccatccggcttcggcgtcttgtttggcttgctcactttcttgggtggctcggacgtggcgggtggagtgggcgtttgctcgaccatgtcgaggcttcgcttgtcgcactggaccaccagttttgcgttcccttgaatagttattgtttccttcggtcccggcatcttgagcacttgatatgcgtagtgggatgcggccatgaacttcgcatgtgcagtcctcccgatgatggcgttgtaagctgtatcgaattcagcgacatcgaaggtgatctgctctgttcggaagttgttggcctggccaaaggtcacaggcaacgtaatcttgcccaaaggtctggatgatgattggggagtaattccatggaagggttgatcagttggtgtcaactcactttgtggaattcccattgcatccagagtgctggcaaaaaggaggttgatcgagctgcccccgtcgataagaactcgtgctaccttgatgttccgaatagtggcttcgaccacaatcggataccgtcgtcgtggagccgccgaagatgtgtgaaacatggaggtcggagtctgggtacgcggagtccgattcgtgaggaggtgactcctcgttcttctcgacaacgcgtactcgcttgcctttttcaaacgccatgtgcttctcgagcgactttttgaaaacaaggcaatcctccagagaatgtctatctgttttgtgtatggggcaccatgatttctttgtgtcgatgccttgtgggtccgggcacttgggagggttcgcgtattctgctgcgaggacttccgcttgagctttccttttcccgttttttgatttttcttcttgttcgacttagatgtgtctgcggctgacttcttctctcccccagtcttcggcttgtcgttcttgcgtcttagtgcatcgtcgacgtgggcacatctttcaacgatctcgaataatcttcgagtagttgtgatgcgccttgttgccaactcctgggtagtgtagcgatctctgacaccagacttgaaggcgcgaattacagaagcgtcggtgatctcggggatggtgtttctgcactcgttaaagtgccgaacgtattccctcaaagattcacctgtattctgtgttaacgcgtgaagatcgtcttcgatcgcatggcgcttgtatgttccttggaaattggcgacaaactgctgccacaggtctgaccacgaagaaattgagtagggggtgatgcatcagccacgaacgtgcagaacccttcaacgcggttggcagatagtttgccaacgcattgtcatctgccctaacggcataaagcactgtcgagtagacttgaaggaattcttctgggtcggtgctcccatcatacttttcaatagctccaggtcggaatctctcaggccatcggacatcacgtagggaacgaccgaaagccctacacccagcgcttggagcggtgggttgtcggtggtcgcgtgaccgtcgtggatgtcggtctgacgatgaagaggacgcggatgatgatgatgatgatgggtcgcttggttccgacgtacgattacgagggtgacgacctggatcttgggaatattgtcttcgtctctcgctgttgtctcgacgccgatcttcttcatcttcgtcattacagcgacggccatgaccagtgttgtccggcccccgccggtcgcgattgtcgtagtctcggtcctcgtttggatgacttcttcgatcatggcatcgtgaggagacatgacgccgggagcggttcgcgtcatcccgtgcacgccgtgcttctcgacgaccattgatttgatctcgaagatcgccagtgccacgaggtggaggggtagcttgtcgaggtgattctctccgttctggaatttcaccgttagcatcgccgacgggggatcggttttgttgtgctgcggtggcggcttcttcgaacgcattgctgaggttagtcaccgatgcccgtagtcgttccgtccaacgctcgaggtcgttgtttagaacaggatcataaggtgtttccctcagtatcgcttgaacagccctgatatgttgggctggggtagtcgattgattcgccgtttccgcgttggcttgtgctgacgtgccaacgtcatcgatagccaacacctcccgcgccgcgtctgatgtcgatgacccatagtcttcgagaagatgtaaaacagatggttcgtggggattgagatcgattaccccaacgaaccgatctggggccggagtcgctccttgttccttgccgttatcccggacggggacgtatgacttaggagacggagttttcatggcgccgagtagaactttgcaacttgagaggtcgtgattctttgtcttatggataggacaatagacgttccgagttggagaagtacgctggatcccacgctctttgcaggcgcggatttcagcacgagcgttgatgaatacccagcaatcttgaagagtatgtttcttggttttatggataggacaccaagacctgatagtttcggaagtcatctttgctggcccgcagtttgtgttggagggacaaggcctggccgcatcagaatccttcacgaacttggatgtagtcggtaatccgttctccgtttcaacgggtggatttttcgacgtggatgtgtcttggttcgtagcgaccgcgttctcgttcccagtcattgggggaccggttgagatcggcattgtggtgtaaaccgggtagacgatttcgccgacttgagtccataccagcattgttgaggtaggaagaacttgaccagagctggtgttggcgttgttgtcgacgaagcttgatggcatagtagtagaatcttgaataccaagtgtccctacctagcgcgccactgtcgacgggggatacccgtagatcggatatagaggatattggggtacgctggtataaggatttcgtaggctgtgtgggttatgttggctctgagatttgatgatctataccctccctggggggtcctttttataccgtaggttgggtgctgttcgagtaggacccgaacataccagacctggcacaatacgtaagtaacccaattcttgtccgagaaggtctctcctcgtccattgactcaggtgtcgataacattgtcattctaggtgcgagaaccacggagatgacgttcttcggcggggatttctcttgtttccttggaattcgcaccgtcgggagtgcgtgctcatttgcgctcctcgccttcttcgccaccgcaaagagccctagcctcgccgatctttgtccaactccggcgatcttccagcggcgatggatcttggcaagtcgacttccaccaccgtgaccctgaagaagctccaagaggagggcgccctccctggccgtgacaaggcagagagggaagcaggaggtactaatccatagcccctttttgcatttgaatcccagctccat

SEQ ID NO: 68262 - DNA, 5841 bp, Oryza sativa
  Clone ID: PAT_MRT4530_69040C.1
atggccgagccagcaaaggcgcacgacctctccccgagtatgagcggtgacgacggggagccaaacccacgccgtcgagctcgtactccaccgccccctccacgccaaagtcctaggcgggagaaggcgctcgagagggccgaaggatccgcgacttcgacacccacaggaggtggagaaaggcggcgagatggggagcgtcgcctcctcgtatacggcgacggcagcacgccccagggcgcgctccaagctgcgggcgcgctcctacgtcacccgcccgtcgcccatgacccggagtctctagcccaacgttggctggacgatgtggccaaattggtcatgactgcacggcagcgcctagatgctggtgggcggtcctccgccaccaaggcctctggtgctgctaccaccggctccgcgtcagcctttgtggcgagccttcggaatgtccgttggcccccaaggttccggcccaccatcgccgaaaaatatgacgggagcgtcaaccccgccgagtttctccaggtctacacgaccgggatcgaggccgccgggggtgacgacagggtcatggcgaatttctttcccatggccctgaaaggacaggcgcggggttggctaatgaacttgccacccgcgtctgtccactcttgggaggatttgtgccaacagttcaccatgaacttccaaggcacatatccgcgcccaggtgaggaagcggagttgcacgcagtacagcgaagggatgatgagtcacttcgctcgtacattcagcggttctgtcaagtccgcaacaccataccatgcatccctgcacacgcggtgatttacgcgttcagggggggtgtgcggcacaaccgcatgctcgaaaagatcgcctccaaagagccccagactaccgcggagctttttcagctcgcggaccgagtggctcgtaaggaggaggcatggacttggaacccctccggttccggtgtggtagcttcggccgcccccggatccgccgctcagatagggcggcgtgacaggaggaagaagaagaggtcagcccatgccgacgacgagggtcatgtcctcgccgtcgagggcgcttcgcgggccacccgaaaggggaggcctgcgggagataaaaagaacgaggccggcgctcccaacagggagcgcccaaccggcaagtggtgcactgtccacaacacttcccttcacgacctcgcggactgccgtgcagtcaaaagtttggctgagcggacgaggaagtgggaggaggagaggaggcaggagcgccgagagggcaaatccccggcggttccttccgataatcggcgaagtgaggccaagcagaaggcccccgccgaggacatcgatgacggcgatgatgacctaggtttccaagagcctggggccaccattgccaccgtcgatgggggagcgtgtgctcacgtttctcgccggagcttcaaggccatgaagcgagagcttctggccgcgacccctactcatgaggcgacgtgtcgggcgcggtggtcagaggttgccctcaccttcgaccagaccgaccacccaccgtgcgttgcccggggagggcagattgcgatggtggtttctcccaccgtttgcaacgtgaagttggggcgtgtcctcattgatgggggagcggccctcaacatcctttcccctgcggcctttgacgccatcaaggccccggggatggtgctccggccgtcccagccaattatcggtgtgacgccggggcacacgtggccgttaggtcacattgacctaccggtcaccttcggtggatccgccaacttccgcacggagcgggtgaacttcgatgtggcggacctcagtctgccctacaacgcggtcctggggaggcccgcgttggtgaagttcatggcggcggtccactacgcctacctacagatgaagatgccgggccccggtggccccatctctgtccatggcgacctcaaagtcgcgctcgcttgtctggagcagcgcgcggaccacctcgccgctgcgtccaagaccgagggtggcgacgagaggcttggcgcctccgcccccgccaccccgaggcagcggatgatcacaggcgacgaggtcccggaagacgcgctcgtctccttcctgcgggcaaacgctgacgtcttcgcatggagaccggcggatatgcccggggtccccagggggttgattgagcaccgtctcgccgtgcggccgggtgcaaggccggtccggcagaaagtgcggcggcaggccccggaacgtcaagccttcatccgcgaggaggtggcgcgacttctggaggccggattcatccgtgaggtcatccatctggagtggctggcgaacccggtggtcgttcccaaggcgaacggcaagcttcggatgtgcatcgactacaccgaccttaacaaggcatgtcctaaggatccttaccccctgcctcgcatagatcagattgtcgactccactgcggggtgcgaccttttgtgttttctagatgcatactctggttaccatcagattcgcatggctagggaggatgaggaaaaaactgcgttcattacccccataggaacctattgttatacgacaatgcccttcgggttaaagaatgcaggtcctacttttcaacgtactactcgaatttctttgggtagccaattaggacgtaatgttgaggcttatgtcgatgacttggttgtaaagatgcgcaaccaggaaacgttactctcagatctagcggaaacttttgagagtctccgctccgcccgcataaaactaaaccccgataagtgtgtgttcggtgtacctgcgggcaagcttctcgggttcttggtctctacccgaggcattgaggccaaccccgagaagatacgggctatagagcggatgcgcccccccagcaaacttagggatgtgcaatgcgtcaccggttgcatggccgccctaagtcggttcatatcgaggctgggagagaaggcgttacccttatttaagcttctcaaacgctctggaccgtttacctggacggaggaagccgaaaatgctctcacccagttgaaggcgtatctaagctctcccccagttctggtcgccccggagccagacgagcccttgttactctacttagcggcgaccccgcaagtagttagtgcggcattggttgtggagcgcgatgaggacaattctcatttcacgcttccccaccctgtgccgacttggcccgggagagagcagggaggagaggctcccgagccgaacggtggcccaaggcccccgacgaccggagttggccctctgcccgcttgtcagacggtgctaggagcccccgacccccaggaaggccctgaggccactgtgggaaggccgcacctatcgccctttgaccccgaggctaaccctgtgctgactcgacccgggaaagagcagggagaagaggcccccgagccgaacggaggcctaaggcccctgacgaccggagtcggccctttgcccgcttgtccgacgacgccaggagcccccgacccccaggacggccccgaagccactgtgggaaggccgcccctgttatcctccgaccccgaggtcatcagcacagaagacaagtgcgccccgcgaggctgcttggacgaagagtgccccagggatgcggcccctagcgaagaggatcggccccaccgaaaggtgcagcggcccgtctactttgttagtgaggccctccgggacgccaaaacccgataccctcaggcccagaagatgctttacgctattctgatggcctcgaggaaactgcgccattatttccaggcgcatcgggtcactgtagttacgtcttaccccctcggtcaaatcttgcataatcgagagggtacaggacgggtggtgaaatgggcaatcgaactttctgagttcgatttgcactttgaaccacgccacgctatcaagagccaggccctcgccgattttgtggcagagtggaccccggctcccgagcccgtctcgatccccgaggccagcacggacccctcgcagctgcctcacaccgcccactgggtaatgcagttcgacggctccctgtctcttcagggcgccggtgcgggggtcacgttgacctctccgaacggagacgtcctcagatacttggtccgcctcgactttcgagcgaccaataatatggcagagtacgagggactccttgccggactcagagtggcagctggactggggatccgccgcctcctggtgttaggcgactcccagctggtcgttaaccaagtctgtaaggagtaccggtgctctgacccgcagatggacgcctacgtgcgccaagtacggcgtatggagcgccattttgacgggattgagcttcggcatgtgcccagatgggataacatgattgccgacgaactctcacggctcgcgtcctcgcgagcccagaccccaccgggcgcctttgaagaaaggcttgcccagccgtcggcgcgacccgaccccttaggggagacggatgcgcctgaccggcccccgaggcccgtcggagtccaggcctcgggacccgaggggagtgctcccaactcccttagattgattgcttggatcgccgagatccaagcatacctcatagataagactctacccgaggaccgcgaagggagtgaacgcgtccatcgcatttccaaacgctacgtgctggtagaagggaccctctatcggcgcacggctaatggaatcctcctgaagtgcattcctcgggaacaaggcgttgtgcttcttgccgatatccatgaaggcgaatgcggagcccactccgcttcgcgcaccttggttggtaaagcttttcgccaaggtttctattggccgacagctcttaatgatgcggtcgacctggtccggcgatgtagagcgtgtcaattccacgccaagcaaatccatcagccggcccaggccctgcagaccataccactttcgtggccatttgctgtctggggactcgatatcctgggaccgtttaggcgggccccgggcgggtttgagtatctgtacgtcgcgatcgacaggttcactaagtggcccgaggcttatccggtcgtcaagatcgataagcactccgcacttaaattcattaagggcatcacggcccggtttggagtgcctaaccgtattattacggataatggcacccaattcactagtgaactcttcggcgactactgcgaagacatgggcatcaagctctgcttcgcctcacctgcccaccccagaagcaatggccaagtggagcgcgccaatgcggaaatcctcaaaggccttaaaaccaagaccttcaacatactcaagaagcacggcgattcatggatcgaggagttgccagcggtgctctgggcaaaccgaactacaccaagccgagcaaccggggaaacgcctttcttcctcgtctacggcgcggaagcggttctcccatccgagctcaccctgaggtctcctcgggccaccatgtactgcgaggctgatcaagatcagcttcgcagagatgacctcgactacttggaagagcgaaggcggcgcgcggccctccgagccgcgcgctaccagcagagcctgcggcgctaccatcagcgtcacgtccgagcccgatcactctgcgtcgacgacctcgtcctacgccgcgtccaaacgcgtgctggattgagcaagctttcaccaatgtgggagggtccgtatcgagtggtcggcgtcccccggccgggctccatacggctggccacgggcgacggcactgagctccctaacccgtggaacatcgaacaccttcgtcgcttctacccctga

SEQ ID NO: 68263 - DNA, 641 bp, Oryza sativa
  Clone ID: PAT_MRT4530_69041C.1
caaaatttgggcacgtttcaaccggtcatttttcagatggaaaataaaggtcattgcaccgagttcaatcgttctgatggaattcagacccaaataccgaatttccccaaaatggctagagggagatttttaggtctatttgcaattccacaaccataagcatggccaattggtagttctccaagtaaaaaaagttaggagctggttatgatggtactaattattcagtttcttctattgatcctgaaagttatatgccagagggtgcatagcttgtgcaaaccctggaagccatgattttaattatcatcaaggttattgaagattttattttttttttcgaaggatctgcagggaaaattattcagatagtggaacaggttcaagtagccatttgaaactcaacacaactttatatcaagaacaaatgaacaatgaatggtagatccaatcttcaatggagaatcatggaccaccgaattgggctatcttcccgagctatctacgactacatgcatagtataatagatgcaatcatgcaagtgtgcaactagtagttttttttttctgaaggagatgagattaggtatagcatgtaatggtcctggtgtataatgccatggcacactcaacttgcattt

SEQ ID NO: 68264 - DNA, 5667 bp, Oryza sativa
  Clone ID: PAT_MRT4530_69042C.1
atggccgagccagcaaaggcgcacgacctctccccgagtatgagcggtgacgacggggagccaaacccacgccgtcgagctcgtactccaccgccccctccacgccaaagtcctaggcgggagaaggcgctcgagagggccgaaggatccgcgacttcgacacccactggaggtggagaagggcggcgagatggggagcgtcgcctcctcgtctacggcgacggcagcacgccccagggcgcgctccaagctgcgggcgcgctcctacgtcacccgcccgtcgcccatgacccggagtctccagcccaacgttggctggacgatgtggccaaattggtcatgactgcacggcagcgcctagatgctggtgggcggtcctccgccaccaaggcctctggtgctgctaccaccggctccgcgtcagcctttgtggcgagccttcggaatgtccgttggcccccaaggttccggcccaccatcgccgaaaaatatgacgggagcgtcaaccccgccgagtttctccaggtctacacgaccgggatcgaggccgccgggggtgacgacagggtcatggcgaatttctttcccatggccctgaaaggacaggcgcggggttggctaatgaacttgccacccgcgtctgtccactcttgggaggatttgtgccaacagttcaccatgaacttccaaggcacatatccgcgcccaggtgaggaagcggacttgcacgcagtacagcgaagggatgatgagtcacttcactcgtacattcagcggttctgtcaagtccgcaacaccataccatgcatccctacacacgcggtgatttacgcgttcagggggggtgtgcggcacaaccgcatgctcgaaaagatcgcctccaaagagccccagactaccgcggagctttttcagctcgcggaccgagtggctcgtaaggaggaggcatggacctggaacccctccggttccggtgtggcagcttcggccgcccccggatccaccgctcggatagggcggcgtgataggaggaggaagaagaggtcagcccataccgacgacgagggtcatgtcctcgccgtcgagggcgcttcgcgggccacccgaaaggggaggcctgcgggagacaaaaagaacgaggccggcgctcccaacagggagcgcccaaccggcaagtggtgcaccgtccacaacacttcccttcacgacctcgcggactgccgtgcagtcaaaagtttggctgagcggacgaggaagtgggaggaggagaggaggcaggagcgccgagagggcaaatccccggcggttccttccggtaatcggcgaagtgaggccaagcagaaggcccccgccgaggacatcgatgacggcgatgatgacctaggtttccaagagcctggagccaccattgccaccgtcgatgggggagcgtgtgctcacgtttctcgccggagcttcaaggccatgaagcgagagcttctggccgcggcccctactcatgaggcgacgtgtcgggcgcggtggtcggaggttgccctcaccttcgaccagaccgaccacccaccgtgcgttgcccggggagggcagattgcgatggtggtttctcccaccgtttgcaacgtgaagttggggcgtgtcctcattgatgggggagcggccctcaacatcctttcccctgcggcctttgacgccatcaaggccccggggatggtgctccggccgtcccagccaattatcggtgtgacgccggggcacacgtggccgttaggtcacatcgacctaccggtcaccttcggtggatccgccaacttccgcacggagcgggtgaacttcgatgtggcggacctcagtctgccctacaacgcggtcctggggaggcccgcgttgatgaagatgccaggccccggtggccccatctctgtccatggcgacctcaaaatcgcgctcgcttgtctggagcagcgcgcggaccacctcgccgctgcgtccaagcccgagggtggcgacgagaggcttggcgcctccgcctccgccaccccgaggcagcggatgatcacaggcgacgaggtcccggaagacgcgctcgtctccttcctgcgggcaaacgctgacgtcttcgcatggagaccggcggatatgcccggggtccccagggaggtgattgagcaccgtctcgccgtgcggccgggcgcaaggccggtccggcagaaagtgcggcggcaggccccggaacgtcaggccttcatccgcgaggaggtggcgcgacttctggaggccggattcatccgtgaggtcatccatccggagtggctggcgaacccggtggtcgttcccaaggcgaacggcaagcttcggatgtgcatcgaccacaccgaccttaacaaggcatgtcctaaggatccttaccccctgtctcgcatagatcagattgtcgactccactgcggggtgtgaccttttgtgttttctagatgcatactctggttaccatcagattcgcatggctagggaggatgaggaaaaaactgcgttcattacccccataggaacctattgtaatatgacaaagcccttcgggttaaagaatgcaggtcctacttttcaacgtactactcgaatttctttgggtagccaattaggacgtaatgttgaggcttatgtcgatgacttgattgtaaagacgcgcaaccaggaaactttactctcagatctagcggaaacttttgagagtctccgctccgcccgcataaaactaaaccccgataagtgtgtgttcggtgtacctgcgggcaagcttctcgggttcttggtctctgcccgaggcattgaggccaaccccgagaagatacgggctatagagcggatgcgcccccccagcaaacttagggatgtgcaatgcgtcaccggttgcatggccgccctaagtcggttcatatcgaggctgggagagaaggcgttacccttatttaagcttctcaaacgctccggaccgtttacctggacggaggaagccgaaaatgccctcactcagttgaaggcatgtctaagctctcccccagttctggtcgccccggagccagacgagcccttgttactctacttagcggcgaccccgcaagtagttagtgcggcattggttgtggagcgcgatgaggacaattctcatttcacgcctccccaccctgtgccgacttggcccgggagagagcagggaggagaggctcccgagctgaacggtggcccagggcccccgacgaccggagttgaccctctgcgcgcttgtcagacggtgctaggagcccccgacccccaggaaggccctgaggccactgtgggaaggccgcacctatcgccctttgaccccgaggctaaccctgtgctgactcgacccgggaaagagcagggagaagaggcccccgagccgaacggaggcctaaggcccctgacgaccggagttggccctttgcccgcttgtccgacgacgccaggagcccccgacccccaggacggccccgaagccactatgggaaggccgcccctgttatcctccgaccccgaggtcatcagcacagaagacaagtgcgccccgcgaggctgcttggacgaagagtgccccagggatgcggcccctagcgaagaggatcggccccaccgaaaggtgcagcggcccgtctactttgttagtgaggccctccgggacgccaaaacccgataccctcaggcccagaagatgctttgcgctattctgattgcctcgaggaaactgcgccattatttccaggcgcatcgggccctcgccgattttgtggcagagtggaccccggctcccgagcccatctcgatccccgaggccagcacggacccctcgcagctgcctcacaccgtccactgggtgatgcagttcgacggatccctgtttcttcagggcgccggtgcgggggtcacgttgacctctccgagcggagacgtcctcagatacttggtccgcctcgactttcgagcgaccaataatatggcagaatacgagggactccttgccggactaagagtggcagctggactggggatccgccgcctcctggtgttaggcgactcccagctggtcgttaaccaagtctgtaaggagtaccggtgctctgacccgcagatggacgcctacgtgcgccaagtacggcgtatggagcgccattttgacgggattgagcttcggcatgtgcccagacgggataacatgattgccgacgaactctcacggctcgcgtcctcgcgagcccagaccccaccgggtgcctttgaagaaaggcttacccagccgtcggcgcgacccgaccccttaggggagacggatgcgcctgaccggcccccgaggcccgtcggagtccaggcctcgggacccgaggggagtgctcccaactcccttagattgattgcttggatcgccgagatccaagcatacctcacagataagactctacccgaggaccgcgaagggagtgaacgcgtccatcgcatctccaaacgctacgtgctggtagaagggaccctctatcggcgcgcggctaatggaatcctcctgaagtgcattcctcgggaacaaggcgttgtgcttcttgccgatatccatgaaggagaatgcggagcccactccgcctcgcgcaccttggttggtaaagcttttcgccaggatatctattggccgacagctcttaatgatgcggtcgacctggtccggcgatgtagagcgtgtcaattccacgccaagcaaatccatcagctggcccaggccctgcagaccataccactttcgtggccgtttgctgtctggggactcgatatcctgggaccgtttaggcgggccccaggtgggtttgagtatctgtatgtcgcgatcgacaggttcactaagtggcccgaggcttatccggtcgtcaagatcgataagcactccgcacttaaattcattaagggcatcacggcccggtttggagtgcctaaccgtattattacggataatggcacccaattcactagtgaactcttcggcgactactgcgaagacatgggcatcaagctctgcttcgcctcacctgcccaccccagaagcaatggccaagtggagcgcgccaatgcggaaatcctcaaaggccttaaaaccaagaccttcaacatactcaagaagcacggcgattcatggatcgaggagttgccagcagtgctctgggcaaaccgaactacaccaagccgagcaaccggggaaacgcctttcttcctcgtctacggcgcggaagcggttctcccatccgagctcactctgaggtctcctcgggctaccatgtattgcgaggctgatcaagatcagcttcgcagagatgacctcgactacttggaagagcgaaggcggcgcgcggccctccgagccgcgcgctaccagcagagcctgcggcgctaccatcagcgtcacgtccgggcccgatcactctgcgtcgacgacctcgtcctacgccgcgtccaaacgcgtgctggattgagcaagctttcaccaatgtgggagggtccgtatcgagtggtcggcgtcccccggccgggctccatacggctggccacgggcgacggcactgagctgcctaacccgtggaacatcgaacaccttcgtcgcttctacccctga

SEQ ID NO: 68265 - DNA, 385 bp, Oryza sativa
  unsure (1)..(385): unsure at all n locations
  Clone ID: PAT_MRT4530_69043C.1
ttgtttttttttttttttttttttttttttttttttttttttttttttttttttttttttttttttttttttttccaaacagggggggccctggaaaaaaataagcaagatttagctggcggggggacctgatccggacccccaggcactccaggcaagcaggggccaattaaattagaaagcatggggnggccatccctacacacaactaaatatgcggggggggtgaaaaccaaaaacaacagaggggaaagcaccacacaacactggagttacattcatgccaccctttaaataaaacggcttgggggaggggacaatataaatacgggggggggctgcatgcaaaaataggggccggggggcgacgaccacgccgaggggg

SEQ ID NO: 68266 - DNA, 5899 bp, Oryza sativa
  Clone ID: PAT_MRT4530_69044C.1
atggccgagccagcaaaggcacacgacctctccccgagtatgagcggtgacgacggggagccaaacccacgccgtcgacctcgtactccaccgccccttccacgccaaagtcctaggcgggagaaggcgctcgagagggctcaaggatccgcgacttcgacatccacaggaggtggagaagggcggcgagatggggagcgtcgcctcctcatctacggcgacggcagcacgccccagggcgcgctccaagctgcaggcgcgctcctacatcacccgcccgtcgcccatgacccggagtctccagcccaacgttggctggacgatttggccaaattggtcatgactgcacggcagcgcctagatgctggtgggcggtcctccgccaccaaggcctctggtgctgctaccaccggctccgcgtcgtcaagacggagggcgcggcgagcggcggctgttgctcgccatttggccgccactccttcgtcagcgcctccgacccaggaagatctgcgtggggggccggatgcccgcatcagtatcgagcgccggcgtaatggccgacgtgctgcccacgcaacggagggcgcctcctcgtccggagtgtcacatcaacacggacgcggggatcagccctccgtgcccccggttggtggtgtcggctgtagagcctttgtggcgagccttcggaacgtccgttggcccccaaggttccggcccaccatcgccgaaaaatatgacgggagcgtcaaccccgccgagtttctccaggtctacacgaccgggatcgaggccgccgggggtgacgacagggtcatggcgaatttctttcccatggccctgaaaggacaggcgcggggttggctaatgaacttgccacccgcgtctgtccactcttgggaggatttgtgccaacagttcaccatgaacttccaaggcacatatccgcgcccaggtgagaaagcagacttacatgcagtccagcgaagggatgatgagtcacttcgctcatacattcagcggttctgtcaagtccgcaacaccataccatgcatccctgcacatgcggtgatctacgcgttcagggggggtgtgcggcacaaccgcatgctcgaaaagatcgcctccaaagagccccagactaccgcggagctttttcagctcgcagaccgagtggctcgtaaggaggaggcatggacctggaacccctccggttccggtgtggcagcttcggccgcccccggatccgctgctcagacagggcggcgtgacaggaggaggaagaagagtcaaaagtttggctgagcggacgaggaagtgggaggaagagaggaggcaggagcgccgagagggcaagtccccggcggttccttccggcaatcggcgaagtgaggccaagcagaaggcccccgccgaggacatcgatgacggcgatgatgacctaggtttccaagagcctggggccaccattgccactgtcgatggaggagcgtgtgctcacgtttctcgccggagcctcaaggctatgaagcgagagcttctggccgcggcccctactcatgaggcgacgcgccgggcgcggtggtcggaggttgccctcaccttcgaccagaccgaccacccaccgtgcgttgcccggggagggcagattgcgatggtggtttctcccaccgtttgcaacgtgaagttggggcgtgtcctcattgatggaggagcagccctcaacatcctttcccccgcagcctttgatgccatcaaggccccggggatgatgctccggccgtcccagccgatcatcggtgtgacgccggggcacacttggccgctaggtcatatcgaccttccggtcaccttcggtggacccgccaacttccgcacggagcgggtgaacttcgatgtggcggacctcagtctgccctacaacgcggtcctggggaggcccgcgttggtgaagttcatggcggcggtccactacgcctacctccagatgaagatgccgggccccgatggccccatctctgtccatggcgacctcaaagtcgcgctcgcttgtatggagcagcgcgcggaccgcctcgccgtcgtgtccaagcccgagggtggcgacgagaggcttggcacatccgcccccgccaccccgaggcagcggatagtcacgtgcgatgaggtcccggaagacgcgctcgtctctttcctgcgggcaaacgctgacgtcttcgcatggagaccggcggatatgcccggggtccccagggaggtgattgagcaccgtcttgccgtacggccgggcgcaaggccggtccggcagaaagtgcggcgccaggccccggaacgtcaagccttcatccgcgaggaggtggcgcgacttctggaggccggattcatccgcgaggtcatccatccggagtggctggcgaacccggtggtcgttcccaaggcgaacggcaagcttcggatgtgcatcgactacaccgaccttaacaaggcatgtcctaaggatccttaccccctgcctcgcatagatcagattgtcgactccacagcggggtccgaccttttgtgttttctagatgcatactctggttaccatcagattcgcatggctagggaggatgaggaaaaaactgcgttcattacccccataggaacttattgttatacgacaatgcccttcgggttaaagaatgcaggtcctacttttcaacgtactactcgaatttctttgggtagccaattaggacgtaatgttgaggcttatgtcgatgacttagttgtaaagacgcgcaaccaggaaacgttactttcagatctagcggaaacttttgagagcctccgctccgcccgcataaaactgaaccccgataagtgtgtgtttggtgtacctgcgggcaagcttctcgggttcttggtctctgcccgaggcattgaggccaaccccgagaagatacgagctatagagcggatgcgcccccccagcaagcttagggatgtgcaatgcgtcaccggttgcatggccgccctaagtcggttcatatcgaggctgggggagaaggcgctacccctatttaagctcctcaaacgctccgggccgtttacttggacggaggaagctgaacgtgccctcactcagttgaaggcgtatcttagctctcccccagttctggtcgccccggagccaaatgaacccttgctactctacttagcggcgaccccgcaagtggttagtgcggcgttggtcgtggagcgcgatgaggacaatcctcattccgcgcacccccaccttgtgcagacttggcccgggagagagcagggaggagaggcccccgagccgaacggcggcccaaggcccccgacgaccggagttggccctctgcccgcttgtcaaacggtgctaggagcccccgacccccaggaaggccccgaggccactgcgggaaggttgcacctatcgccctctgaccccgaggctaaccctgtgccgattcgacccgggagagagcagggagaagaggcccccgagccgaacggtggcctaaggcccctgacgaccggagttggccctttgcccgcttgtccgacgacgccaggagcccccgacccccaggacggccccgaggccactgtgggaaggccacccctgtcgtcctccgaccccgaggtcgtcggcacaggagacgagtgcgccccgcgaggccgctcgggtgaagagcgccccagggatgcggcccctagcgaagaggatcggccccaccgaaaggtgcagcggcccgtctactttgttagtgaggccctccgggatgccaagacccgataccctcaggcccagaaaatgctttacgctgttctgatggcctcgaggaaactgcgccattatttccaggcgcatcgggtcactgtggttacgtcttaccccctcggtcaaatcttgcataatcgagagggtactggacgggtggtgaaatgggcaatcgaactttctgagtttgatttgcactttgaaccacgccacgctatcaagagccaggccctcgccgactttgtggcagaatggaccccggctcccgagctcgtctcggtccccgaagccggctcgggtccctcgcagctgcctcacaccgcccattgggtgatgcagttcgacggctccctgtctcttcagggcgccggtgcgggggtcacgttgacctctccgagtggagacgtcctcaaatacttggtccgcctcgactttcgagcgaccaataatatggcagagtacgagggactccttgccggactcagagtggcagctggactggggatccgccgcctcctggtgttaggcgactcccagctggtcgttaaccaagtctgcaaggagtaccggtgctctgacccgcagatggacgcctacgtgcgccaagtacggcgtatggagcgccattttgacgggattgagcttcggcacgttcccagacgggataacatgatggccgacgagctctcacggctcgcgtcctcgcgagcccagaccccaccgggcgcctttgaagaaaggcttgcccagccgtcggcgcgacccgaccccttaggggagacggatgcgcctgaccggcccccgaggcccgtcggagtccaggcctcgggacccgaggggagtgctcccagctcccttagattgattgcttggatcgccgagatccaagcatacctcacagataagactctacccgagtaccgcgaagggagtgaacgcgtccgtcgcatctccaaacgctacgtgctggtagaagggaccctctatcggcgcgcggctaatggaatcctcctgaagtgcattcctcgggaacaaggcgttgtgcttcttgccgatatccatgaaggcgaatgcggagcccactccgcctcgcgcaccttggttggtaaagcttttcgccaaggtttctattggccgacagctctcaatgatgcggtcgacctggtccgccgatgtagagcgtgtcaattccacgccaagcaaatccatcagccggcccaggccctgcagaccataccactttcgtggccatttgctgtctggggactcgatatcctgggaccgtttaggcgggccccgggcgggtttgagtatctgtatgtcgcgatcgacaagttcactaagtggcccgaggcttatccggtcgttaagatcgataagcactccgcacttaaattcattaagggcatcacggcccggtttggagtgcctaaccgtattattacggataatggcacccaattcactagtgaactcttcggcgactactgcgaagacatgggcatcaagctctgcttcgcctcacctgcccaccccgaaagcaatggccaagtggagcgcgccaatgcggaaatcctcaaaggccttaaaaccaagaccttcaacatactcaagaagcacggcgattcatggatcgaggagttgccagcggtgctctgggcaaaccgaactacaccaagccgagcaaccggggaaacacctttcttcctcgtctacggcgcggaagcggttctcccatctgagctcaccctgaagtctcctcgggccaccatgtactgcgaggctgatcaagatcagcttcgcagagatgacctcgactacttggaagagcgaaggcggcgcgcggccctccgagccgcgcgctaccagcagagcctgcggcgctaccatcagcgtcacgtccgggcccgatcactctgcgtcgacgacctcgtcctacgccgcgtccaaacgcgagctggattgagcaagctctcaccaatgtgggagggtccgtatcgagtggtcggcgtcccccggccgggctccatacagctggccacgggcgacggcactgagctgcctaacccgtggaacatcgaacaccttcgtcgcttctacccctga

SEQ ID NO: 68267 - DNA, 6017 bp, Oryza sativa
  Clone ID: PAT_MRT4530_69045C.1
atggccgagccagcaaaggcgcacgacctctccccgagtatgagcggtgacgacggggagccaaacccacgccgtcgagctcgtactccaccgccccctccacgccaaagtcctaggcgggagaaggcgctcgagagggccgaaggatccgcgacttcgacacccacaggaggtggagaagggcggcgagatggggagcgtcgcctcctcgtctacggcgacggcagcacgccccagggcgcgctccaagctgcgggcgcgctcctacgtcacccgcccatcgcccatgacccggagtctccagcccaacgttggctggacgatgtggccaaattggtcatgactgcacggcagcgcctagatgctggtgggcggtcctccgccaccaaggcctctggtgctgctaccaccggctccgcatcgtcaagacggagggcgcggcgagcggcagccgctgttcgccattcgaccgccactccttcgtcaacgcctccgacccgggaagatctgcgtggggaaccggatgctcgcatcagtatcgagcgccggcgtaatggccgacgtgctccccacgcaacggagggcgcctcctcgtccggagtgtcacctcaccacggacgcggggatcagccctccgtgcccccggttggtggtgtcttcggaatgtccgtcaccacggacgcggggatcagccctccgtgcccccggtgccggcccaccatcgccgaaaaatatgacgggagcgtcaaccccaccgagtttctccaggtctacacgaccgggatcgaggccgccgggggtgacgacagggtcatggcgaatttctttcgcatggccctgaaaggacaagcgcggggttggctaatgaacttgccacccgcgtctgtccactcttgggaggatttgtgccaacagttcaccatgaacttccaaggcacatatccgcgcccaggtgaggaagcggacttgcacgcagtacagcgaagggatgatgagtcacttcgctcgtacattcagcggttctgtcaagtccgcaacaccataccatgcatccctgcgcacgcggtgatttacgcgttcagggggggtgtgcggcacaaccgcatgcttgaaaagatcgcctccaaggagccccagactaccgcggagctttttcagctcgcggaccgagtggctcgtaaggaggaggcatggacctggaaccccttcggttccggtgtggcagcttcggccacccccggatccgccgctcagatagggcggcgtgacaggaggaggaagaagaggtcagcccataccgacgacgagggtcatgtcctcgccgtcgagggcgcttcgcgggccacccgaaaggggaggcctgcgggaggcaaaaagaacgaggccggcgctcccaacagggagcgcccaaccggcaagtggtgcaccgtccacaacacttcccttcacgacctcgcggactgccgtgcagtcaaaagtttggctgagcggacgaggaagtgggaggaggagaggaggcaggagcgccgagagggcaaatccccggcggttccttccggtaatcggcgaagtgaggccaagcagaaggcccccgccgaggacatcgatgacggcgatgatgacctaggtttccaagagcctggggccaccattgccaccgtcgatgggggagggtgtgctcacgtttctcgccggagcttcaaggccatgaagcgagagcttctggccgcggcccctactcatgaggcgacgtgtcgggcgcggtggtcggaggttgccctcaccttcgaccagaccgaccacccaccgtgcgttgcccggggagggcagattgcgatggtggtttctcccaccgtttgcaacgtgaagttggggcgtgtcctcattgatgggggagcggccctcaacatcctttcccctgcggcctttgacgccatcaaggccccggggatggtgctccggccgtcccagccaattatcggtgtgacgccggggcacacgtggccgttaggtcacatcgacctaccggtcaccttcggtggatccgccaacttccgcacggagcgggtgaacttcgatgtggcggacctcagtctgccctacaacgcggtcctggggaggcccgcgttggtgaagttcatggcggcggtccactacgcctacctacagatgaagatgccgggccccggtggccccatctctgtccatggcgacctcaaagtcgcgctcgcttgtctggagcagcgcgcggaccacctcgccgctacatccaagcccgagggtggcgaagagaggcttggcgcttccgcccccgccaccccgaggcaacggatgatcacaggcgacgaggtcccggaagacgcgctcgtctccttcctgcgggcaaacgctgacgtcttcgcatggagaccgacggatatgcccggggtccccagggaggtgattgagcaccgtctcgccgtgcggccgggcgcaaggccggtccggcagaaagtgcggcggcaggccccggaacgtcaagccttcatccgcgaggaggtggcgcgacttctggaagccggattcatccgtgaggtcatccatccggagtggctggcgaacccggtggttgttcccaaggcgaacggcaagcttcggatgtgcatcgactacaccgaccttaacaaggcatgtcctaaggatccttaccccctgcctcgcatagatcagattgtcgactccactgcggggtgcgaccttttgtgttttctagatgcatactctggttaccatcagattcgcatggctagggaggatgaggaaaaaactgcgttcattacccccataggaacctattgttatacgacaatgcccttcgggttaaagaatgcaggtcctacttttcaacgtactactcgaatttctttgggtaaccaattaggacgtaatgttgaggcttatgtcgatgacttggttgtaaagacgcgcaaccaggaaatgttactctcagatctagcggaaacttttgagagtctccgctccgcccgcataaaactaaaccccgataagtgtgtgttcggtgtacctacgggcaagcttctagggttcttggtctctgcccgaggcattgaggccaaccctgagaagatacgggctatagagcggatgcgccccccagcaaacttagggatgtgcaatgcgtcaccggaagccgaaaatgccctcacccagttgaaggcgtatctaagctctcccccagttctggtcgccccggagccagacgagcccttgttactctacttagcggcgaccccgcaagtagttagtgcgacattggttgtggagcgcgatgagaacaattctcatttcacgcttccccaccctgtgccgacttggcccgggagagagcagggaggagaggctcccgagccgaacggtggcccaaggcccccgacgaccggagttggccctctgcccgcttgtcagacggtgctaggagcccccgacccccaggaaggccctgaggccactgtgggaaggccgcacctatcgcccttcgaccccgaggctaaccctgtgctgacccgacccgggaaagagcagggagaagaggcccccgagccgaacggaggcctaaggcccctgacgaccggagttggccctttgcccgcttttccgacgacgccaggaacccccgacccccaggacggccccgaagccactgtgggaaggccgcccctgttatcctccgaccccgaggtcatcagcacagaagataagtgcgccccgcgaggctgcttggacgaagagtgccccagggatgcggcccctagcgaagaagatcggccccaccgaaaggtgcagcggcccgtctactttgttagtgaggccctccgggacgccaaaacccgataccctcaggcccagaagatgctttacgctattctgatggcctcgaggaaactgcaccattatttccaggcgcatcgggtcacagtagttacgtcttaccccctcggtcaaatcttgcataatcgagagggtacaggacgggtggtgaaatgggcaatcgaactttctgagttcgatttgcactttgaaccacgccacgctatcaagagccaggccctcgccgattttgtggcagagtggaccccggctcccgagcccgtctcgatccccgaggccagcacggacccctcgcagctgcctcacaccgcccactgggtgatgcagttcgacggctccctgtctcttcagggcgccggtgcgggggtcacgttgacctctccgagcggagacgtcctcagatacttggtccgcctcgactttcgagcgaccaataatatggcagaatacgagggactccttgccggactaagagtggcagctggactggggatccgccgcctcctggtgttaggcgactcccagctggtcgttaaccaagtctgtaaggagtaccggtgctctgacccgcagatggacgcctacgtgcgccaagtacggcgtatggagcgccattttgacgggattgagcttcggcatgtgcccagacgggataacatgattgccgacgaactctcacggctcgcgtcctcgcgagcccagaccccaccgggcgcctttgaagaaaggcttgcccagccgtcggcgcgacccgaccccttaggggagacggatgcgcctgaccggcccccgaggcctgtcggagtccaggcctcgggacccgaggggagtgctcccaactcccttagattgattgcttggatcgccgagatccaagcatacctcacagataagactctacccgaggaccgcgaagggagtgaacgcgtccatcgcatctccaaacgctacgtgctggtagaagggaccctctattggcgcgcggctaatggaatcctcctgaagtgcattcctcgggaacaaggcgttgtgcttcttgccgatatccatgaaggcgaatgcggagcccactccgcctcgcgcaccttggttggtaaagcttttcgccagggtttctattggccgacagctcttaatgatgcggtcgacctggtccggcgatgtagagcgtgtcaattccacgccaagcaaatccatcagccagcccaggccctgcagaccataccactttcgtggccatttgctgtctggggactcgatatcctaggaccgtttaggcgggccccgggcgggtttgagtatctgtatgtcgcgatcgacaggttcactaagtggcccgaggcttatccggtcgtcaagatcgataagcactccgcacttaaattcattaagggcatcacggcccggtttggagtgcctaaccgtattattacggataatggcacccaattcactagtgaactcttcggcgactactgcgaagacatgggcatcaagctctgcttcgcctcacctgcccaccccagaagcaatggccaagtggagcgcgccaatgcggaaatcctcaaaggccttaaaaccaagaccttcaacatactcaagaagcacggcgattcatggatcgaggagttgcccagcggtgctctgggcaaaccgaactacaccaagccgagcaaccggggaaacgcctttcttcctcgtctacggcgcggaagcggttctcccatccgagctcaccctgaggtctcctcgggctaccatgtattgcgaggctgatcaaaatcagcttcgcagagatgacctcgactacttggaagagcgaaggcggcgcgcggccctccgagccgcgtgctaccagcagagcctgcggcgctaaaatcagcgccacgtccgggcccgatcactctgcgtcgacgacctcgtcctacgccgcgtccaaacgcgtgctggattgagcaagctttcaccaatgtgggagggtccgtatcgagtggtcggcgtcccccggccgggctccatacggctggccacgggcgacggcactgagctgcctaacccgtggaacatcgaacaccttcgtcgcttctacccctgaggggggggggtcggctaaaatcgccaaacggggc

SEQ ID NO: 68268 - DNA, 402 bp, Oryza sativa
  Clone ID: PAT_MRT4530_69046C.1
cacgggagtgcgttgtggaccaatgtgcgcgaggacgcgctggagatgaagatagtgacacaattgcggcagtcgttgaggaagatggtgccgaagagctgatgtagtcgaaccgtgaaggacgagatgtcacgctaggtttgccagacttggggacaactcgggacgaacgagcgcgccggtgttgccaataccatacgggcgaggcaggggaccaccatgaatcatacgccaatgtcggaagagactagcagagtaggcctccgagacggtcgcggcacgagaacgaccggcgagaagtccaccggtgatgaagccatgctaaggaggacgcctcttgagggaggttcagccgaacctggggccggttcaatccagcccaatttcggctggcggccttct

SEQ ID NO: 68269 - DNA, 5994 bp, Oryza sativa
  Clone ID: PAT_MRT4530_69047C.1
atggccgagccagcaaaggcgcacgacctctccccgagtatgagcggtgacgacggggagccaaacccacgccgtcgagctcgtactccaccgccccctccacgccaaagtcctaggcgggagaaggcgctcgagagggccgaaggatccgcgacttcgacatccacaggaggtggagaagggcggcgagatggggagcgtcgcctcctcgtctacggcgacggcagcacgccccagggcgtgctccaagctgcgggcgcgctcctacgtcacccgcccgtcgcccatgacccggagtctccagcccaacgttggctggacgatgtggccaaattggtcatgactgcacggcagcgcctagatgctggtgggcggtcctccgccaccaaggcctctggtgctgctaccaccggctccgcgtcatcaagacggagggcgcggcgagcggcagccgctgttcgccattcggccgccactccttcgtcaacgcctccgacccgggaagatctgcgtggggaaccggatgctcgcaccagtatcgagcgccggcgtaatggccgacgtgctccccacgcaacggagggcgcctcctcgtccggagtgtcacctcaccacggacgcggggatcagccctccgtgcccctggttggtggtgtcggttgtagggcctttgtggcgagccttcggaatgtccgttggcccccaaggttccggcccaccatctccgaaaaatatgacgggagcgtcaaccccgccgagtttctccaggtctacacgaccgggatcgaggccgccgggggtgacgacagggttatggcgaatttctttcccatggccctgaaaggacaagcgcggggttggctaatgaacttgccacccgcgtctgtttactcttgggaggatttgtgccaacagttcaccatgaacttccaaggcacatatccgcgcccaggtgaggaagcggacttgcacgcagtacagcgaagggatgatgagtcacttcgcttgtacattcagcggttctgtcaagtccgcaacaccataccatgcatccctgcgcacgcggtgatttacgcgttcagggggggtgtgcggcacaaccgcatgcttgaaaagatcgcctccaaggagccccagactaccgcggagctttttcagctcgcggaccgagtggctcgtaaggaggcatggacctggaacccctccggttccggtgtggcagcttcggccgcccccggatccgccgctcagatagggcggcgtgacaggaggaggaagaagaggtcagcccataccgacgacgagggtcatgtcctcgccgtcgagggcgcttcgcgggccacccgaaaggggaggcctgcgggaggcaaaaagaacgaggccggcgctcccaacagggagcgcctaaccggcaagtggtgcaccgtccacaatacttcccttcacgacctcgcggactgccgtgcagtcaaaagtttggctgagcggacgaggaagtgggaggaggagaggaggcaggagcgccgagagggcaaatccccggcggttccttccggtaatcggcgaagtgaggccaagcagaaggcccccgccgaggacatcgatgacggcaatgatgacctaggtttccaagagcctggggccaccattgccaccgtcgatgggggagcgtgtgctcacgtttctcgccggagcttcaaggccatgaagcgagagcttctggccgcggcccctactcatgaggcgacgtgtcgggcgcggtggtcggaggttgccctcaccttcgaccagaccgaccacccaccgtgcgttgcccggggagggcagattgcgatggtggtttctcccaccgtttgcaacgtgaagttggggcgtgtcctcattgatgggggagcggccctcaacatcctttcccctgcggcctttgacgccatcaaggccccggggatggtgctccggccgtcccagccaattatcggtgtgacgccggggcacacgtggccgttaggtcacatcgacctaccggtcaccttcggtggatccgccaacttccgcacggagcgggtgaacttcgatgtggcggacctcagtctgccctacaacgcggtcctggggaggcccgcgttggtgaagttcatggcggcggtccactacgcctacctacagatgaagatgccgggccccggtggccccatctctgtccatggcgacctcaaagtcgcgctcgcttgtctggagcagcgcgcggaccacctcgccgctgtatccaagcccgagggtggcgacgagaggcttggcgcttccgcccccgccaccccgaggcaacggatgatcacaggcgacgaggtcccggtcaaggaggaagacgcgctcgtctccttcctgtgggcaaacgctgacgtcttcgcatggagaccggcggatatgcccggggtccccagggaggtgattgagcaccgtctcgccgtgcggccgggcgcaaggccggtccggcagaaagtgcggcggcaggccccggaacgtcaagccttcatccgtgaggaagtggcgcgacttctggaggccggattcatccgtgaggtcatccatccggagtggctggcgaacccggtggtcgttcccaaggcgaacggcaagcttcggatgtgcatcgactataccgaccttaacaaggcatgtcctaaggatccttaccccctgcctcgcatagatcagattgtcgactccactgcggggtgcgaccttttgtgttttcttgatgcatactctggttaccatcagattcgcatggctagggaggatgaggaaaaaactgcgttcattacccccataggaacctattgttatacgacaatgcccttcgggttaaagaatgcaggtcctacttttcaacgtactactcgaatttctttgggtaaccaattaggacgtaatgttgaggcttatgtcgatgacttggttgtaaagacgcgcaaccaggaaatgttactctcagatctagcggaaacttttgagagtctccgctcagcccgcataaaactaaaccccgataagtgtgtgttcggtgtacctgcgggcaagcttctagggttcttggtctctgcccgaggcattgaggccaaccctgagaagatacgggctatagagcggatgcgcccccccagcaaacttagggatgtgcaatgcgtcaccggttgcatggccgccctaagtcggttcatatcgaggctgggagagaaggcgttacccttatttaagcttctcaaacgctccggaccgtttacctggacggaggaagccgaaaatgccctcacccagttgaaggtgtatctaagctctcccccagttctggtcgccccggagccagacgagcccttgttactctacttagcggcgaccccgcaagtagttagtgcggcattggttgtggagcgcgatgagaacaattctcatttcacgcttccccaccctgtgccgacttggcccgggagagagcagggaggagaggctcccgagccgaacggtggcccaaggcccccgacgaccggagttggccctctgcccgcttgtcagacggtgctaggagcccccgacccccaggaaggccctgaggccactgtgggaaggccgcacctatcgcccttcgaccccgaggctaaccctgtgctgacccgacctgggaaagagcagggagaagaggcccccgagccaaacggaggcctaaggcccctgacgaccggagttggccctttgcccgcttgtccgacgacgccaggagcccccgacccccaggacggccccgaagccaccgtgggaaggccgcccctgttatcctccgaccccgaggtcatcagcacagaagataagtgcgcccctgaggccctccgggacgccaaaacccgataccctcaggcccagaagatgctttacgctattctgatggcctcgaggaaactgcgccattatttccaggcgcatcgggtcacagtagttacgtcttaccccctcggtcaaatcttgcataatcgagagggtacaggacgggtggtgaaatgggcaatcgaactttctgagttcgatttgcactttgaaccacgccacgctatcaagagccaggccctcgccgattttgtggcagagtggaccccggctcccgagcccgtctcgatccccgaggccagcacggacccctcgcagctgcctcacaccgcccactgggtgatgcagttcgacggctccctgtctcttcagggcgccggtgcgggggtcacgttgacctctccaagcggagacgtcctcagatacttggtccgcctcgactttcgagcgaccaataacatggcagaatacgagggactccttgccggactaagagtggcagctggactggggatccgccgcctcctggtgttaggcaactcccagctggtcgttaaccaagtctgtaaggagtaccggtgctctgacccgcagatggacgcctacgtgcgccaaatacggcgtatggagcgccattttgacgggattgagcttcggcatgtgcccagacgggataacatgattgccgacgaactctcacggctcgcgtcctcgcgagcccagaccccaccgggcgcctttgaagaaaggcttgcccagccgtcggcgcgacccgaccccttaggggagacggatgcgcctgaccgacccccgaggcccgtcggagtccaggcctcgggacccgaggggagtgctcccaactcccttagattgattgcttggatcgccgagatccaagcatacctcacagataagactctacccgaggaccgcgaagggagtgaacgcgtccattgcatctccaaacgctacgtgctggtagaagggaccctctatcggcgcgcggctaatggaatcctcctgaagtgcattcctcgggaacaaggcgttgtgcttcttgccgatatccatgaaggcgaatgcggagcccactccgcctcgcgcaccttggttggtaaagcttttcgccagggtttctattggccgacagctcttaatgatgcggtcgacctggtccggcgatgtagagcgtgtcaattccacgccaagcaaatccatcagccggcccaggccctgcagaccataccactttcgtggccatttgctgtctggggactcgatatcctgggaccgtttaggcgggccccaggcgggtttgagtatctgtatgtcgcgatcgacaggttcactaagtggcccgaggcttatccggtcgtcaagatcgataagcactccgcacttaaattcattaagggcatcacggcccggtttggagtgcctaaccgtattattacggataatggcacccaattcactagtgaactcttcggcgactactgcgaagacatgggcatcaagctctgcttcgcctcacctgcccaccccagaagcaaaggccaagtggagcgcgccaatgcggaaatcctcaaaggccttaaaaccaagaccttcaacatactcaagaagcacggtgattcatggatcgaggagttgccagcggtgctctgggcaaaccgaactacaccaagccgagcaaccggggaaacgcctttcttcctcgtctacggcgcggaagcggttctcccatccgagctcaccctgaggtctcctcgggctaccatgtattgcgaggctgatcaaaatcagcttcgcagagatgacctcgactacttggaagagcgaaggcggcgcgcggccctccgagccgcgcgctaccagcagagcctgcggcgctaccatcagcgccatgtccgggcccgatcactctgcgtcgacgacctcgtcctacgccgcgtccaaacgcgtgctggattgagcaagctttcaccaatgtgggagggtccatatcgagtggtcggcgtcccccggccgggctccatacggctggccacgggcgacggcactgagctgcctaacccgtggaacatcgaacaccttcgtcgcttctacccctga

SEQ ID NO: 68270 - DNA, 294 bp, Oryza sativa
  Clone ID: PAT_MRT4530_69048C.1
cgggcacgggcgcgagcgcgagataggggtaagtgggtgcgggaaatgcggcgcacgcgcaggcgtggctgacgtggcccggagaaggcgcaggcgtgtacccgtcggcggttgcgggcgcggcagcgccggctggtggaaggagacgggcccgacaggcttaggaggagaacttcagggtgtgacaagggaggaggaggaggaggagggaggggggaggccggctcctaaatctggtcggaggagggagggggaggccggcgggggcagcggcggcgacaacggcatggggcg

SEQ ID NO: 68271 - DNA, 550 bp, Oryza sativa
  Clone ID: PAT_MRT4530_69049C.1
atttctctccctcctctaaagccacacacagtgggaatggggatagcggcgacgggggcgggccagcggctcgcgtcatagaggccgtgaggtgcgccagcctcgcgaacgctgcctcctcctcacgagccccactgccatcgctgccgcgtgagacgctgttcgcgagctctgggcctcttgtgccgctgcggcctcctcccgtgagcgccgctattgctggatccatgcttatctgtgaccgtcgccgccgccgcagctcttgcgacctgcgtctccctgctgctcaccgagaccattgctgcagcatgcaagcagcaacacgtgcatctccactcactcgccatcaccatctcgcccattggcctacctatctctgttgtgcttctcctgtttgtgatgttaattgatttgtttcagccaagtttgatatggcggttgggttcaattgtcaaagccaagtagctaacaatagcttatactgtgatctggaatgatttgctaatactgtggttgtatttatgtcaattgaggtgtgatgtgctctcgc

SEQ ID NO: 68272 - DNA, 519 bp, Oryza sativa
  Clone ID: PAT_MRT4530_6904C.1
atgtggaagtacggtagtgctttgcaacagaggcccgaagaccgccgaggggaggggcgctcggaccgggtccacgggagtggggcccccgcggcagcctcacggtccacggtggaccgggcgcacccgggctcacacctgccggcgccgtgggtcccacgcatcagccgcaccccaggacgcgggcggccgacggccgggccccacgcggcagccgcacgcgacggcggaaacggcgaccggagcggaaaaaggcggcggcgcggctcgggtggacgggggcgacggtgctccggcggtcagcgaccgaaacggagagtggacgaggtcggcgaggatgcgccgaagccgaaggaggcggcgccgaggtgggaggtggtccggggcgacgacggcggcggaccggagctcggcggcgacggcggagagagagagcgacggcgcgagctcgattccggcgaggagacggtgcggcaagggcggaaacgggcgagggaggcgcggggagggtttatatag

SEQ ID NO: 68273 - DNA, 453 bp, Oryza sativa
  Clone ID: PAT_MRT4530_69050C.1
tcagggcgtcgacttggagccggaggtgttctcggcttgggcagggacgcccagcggcggtgcaccgtgctgacacaatggcggccaaacaggtaggcggcaccgcagcacacgggtaccttgctggtgagctccgatagcaggacggctcggggaggagaggggaaggggggagtttggcatagagaagatgaggaagacctcaattttggacaaggatcgacgatggcgacgaattccgaagtctaagtcagcggcaataaccctaagcttcggccagaacggctccgctgccgacgagcgcaacggcaaaccaacctcgccaccctcgcggcgatgacaacgccactgccgccgttcttgagcaggccgtgtaccatgcgcaacaccagtaccgacggcggcggcaggcggcgacgcggcctcttcggggtttggttgcttcgggatcat

SEQ ID NO: 68274 - DNA, 1106 bp, Oryza sativa
  Clone ID: PAT_MRT4530_69051C.1
gaaggaggcagtatcaggtagtattagcatacacaatcgctatcttttccaaaatccaagtagaaaaaggaaaaaaacacacacaaaatctatatctatatttacattgtgaagcctctgctgctgctactaatgctactcattgctctgtagaaatcggtgatcacggagtttatgcacgctggtttgtcctccagagggatcgatcaccttgtacaatggtatgcctttctttttctttttacctgctatttttttctcttctgtacatacatactctcatgttgttgcatttaaccatttacataattgagcctttttttggtctttgctcctgtatgtcccttcagaaagggatccatgccttgattaatccggtttcagtcccgcagaaaataatgtcatttgcggtgaacatgctcgtgatcttgttccctgcagatagcctccctactttctgctgattctctctcaaccatatctgaatgatactagggcttttgtcgcagttcaggtagatgaagtcctccaccactgccattgcctctacatttgttccctttgatatcgccatcgtcattgtaggtttgcatcgcttcttccagtcctttatggtggatccttccacttgagtaccagcacagtacatccaatctttatatactacaatggaactaatgggttgtttcctaattcgccagcttcttgtaggtgctcttatctcgatttttgaccccactgctacgtctaattcctgtatactcaagtctgtgcaaccaagataagctttgccatgagccacagctagagatttgacatgcttgctcttgtaaaatgtctgggtgcttcttgatgagtaagagaacttaagaacgttgttcggtgtaagcacaatgattttgtcattgtaaatttcaaattgctccacagcttctcttatttgaattacctctacacattcgagcttgcgttgcgccattttccatactctaattgacttgtcagctgacccgctcaagagattttctccagtgtctgatagtgcaaaacatgtaactgctctcttgtgctctttaacctctcttatgactactgctctttggcct

SEQ ID NO: 68275 - DNA, 1266 bp, Oryza sativa
  Clone ID: PAT_MRT4530_69052C.1
atggcgaggaacccgacccgcaccgtctagctagggcactggaccgcaccggtaccttcaacattagtgtcttagatcctaaatgagctacgaggttgaggtgacatatccatagccagcgacatcgagtcgagtacccccgaatatctcgttttaagggaaaaagaagcccagaagatcgcactgtgtgctgctgcgaatcattgaatatctcttcggctgcagggtaaatttctccagtatgcgatctgtggtatagtcaaaccctcatctcaggggaataatcaggagatgccccatcaccaaactgcatcattccagtaatgccctcagtctagtcatgtaacattaccaaagcagccgcatacttgaggcatcataatgaactgcccgtggtacacatcccaacggaatcaaagggtaaatggtgggacaagagattatggtgttttcagaggtattatcctatacagtgctaccccccatgtcattaccagattgggcccgatgcaaagctacgggcggttcagcaatggtacgtatgatggcagtacatgcatatttggttcgattgttaatggtagagatggaggttatgttttgaatgctgctggccatggagctcccaggcgcacaatgtagtatccgtcctacttggcgccaaaaaagggagtctgcgacgcggagttggtggcccaggacaccggtttgggatgcctctaccacagttcgaagtaccaacactgccactaccacaccttcttcaggcggtggttgttcgctttccttggcgattacaacgtccgaacatccaataccaagacgaaccaaacgcctggcagcgccgagacggtccggttcctgcagcgcgtccgcgacgcgttcggcagctgcggcggcggcggcggcggcggcgcgaccaggcggcgcaaccagcgcgacgacgccgtggacgccgtcgtgtggcagttcgtgcgggcgctgcgggcctccgcgggaagagggacggcagcgctgttccccggcgacgactcacgaggtggaggtgacgcgtcgagcgccgacggcgacaaggacgacgaggaggaggaggatgatcgtggcggcgaagcgatggccgtcgcggcggacggcgcgcggcggcgaacgcggcgctcgtggtggcgctacagcaaggtcgtgatcggcgtggagttggtgctgttcctcgtcctgttcgtcgtgtggatgatcgtgtgcaaaggcttcaattgtgtccagcgatga

SEQ ID NO: 68276 - DNA, 3729 bp, Oryza sativa
  Clone ID: PAT_MRT4530_69053C.1
atgccgccgcatgaagacaccctcgatgccggcggcggcgacgtgctcaccttcaggctccaccccctcgccgtcttgaaattatccgaccgcatccgcgagttccagtaccaggcggcggcggcggcgcgcgtcagttacagctcctcctcctcctcgtcttccgggacggcggcgccggaggatcctcctcctcctcctactcggatgtctgggtgcgtgatcggggttcggcgtggtgggacggtggatgtctccgacatcttggacatcttgatcttgcacggccccgaccccgcaaccttcgaccgcgccttactggagaaggatcaggagatctacaagaaggccttccccgacttgtccgttctcgggtggtactccattgggaccaatgtgcacgccaccgacatgggaatccaccatggggactacaccgacatgcaaatccaccagacagccgaggtcatcgacatgctccgcaagcacagctacctcaaggagctcgttgttgagctcgcgacgacgtggcggcggcggcagcagggcgagctcgtggcaggagcgcccgtcgcggtggcgacggcggtgcgaggcccacggcggtggcggcgtcagccgtcggcaggagctcctggaggtggtgctgtcggcggcggtggctgccgacggcggccgcggtatccggagcgtccacagcggctcacggccggtctgggtgtggccgagtgttggtcggctagcaacgtctgttggcgacagcggcggcggtgtggtcgtggcagttggcggcggcggttgctagctgcttggtggtggagggcgacggcgcagcggcggtttgcggaggcggtggctcgcgtcggtggcagcggcgacggcggccatgactgtggaggcagtggcgatgtcggcggcggggatggtgacggcgaggtggctgagcgttcggcagcagcggctgcggtggtggtgaccgtgtctgcggtcatcagaggcatggcggcctcggatggcttgccgagggcgtgggagacggctgcaactggccggcgcggcatcgtttggtggaggggtcggagaccggcttggcgcagagaagcgcagccgatggcagcggaggccggctcggcacgagaggcgcgggcggcggagatggaggccggcttggcgcgagaggcgcggccgatggagggaggccggattggcgcgagagacgcgtccggcagaggaggctggcctggcgcagataggtacggccggcggtggaggaggcgacctaggtgtgaggaggagctgccggtgggtgtggagcagtctttggcgcacgaaggctggccgccggggggtgctggtgcaggggtcccacatgtcggcagagctagtgttgtggtggagcattggtgcgtcagtcgtggattcgcaggtggtgagcgaacttcacaccgtctcgtgcgagtcgttcaaaaaaaaaacaagtgcgccttcacctccatctcccatcacctgttcgacaagatggtgatcccgaagcaaccagaccccgaagaggccacgtcgccgcctgccaccgccgtcggtactggtgttgcgcatggtacacggcctgctcaagaacggcggcagtggcgttgtcgtcgccgcgagggtggcgaggttggtttgccgttgcgcttgccgtcggcggagccgttctggccgaagcttagggttattgccgctggctttgacttcggaattcgtcgccatcgtcgatccttatccgaaattgaggtctctctcatcttctccatgccaaactccctccttcccctctcctccccgtgccgtcctgctgttggagctcaccggcaaggttgtattcaaagtttaacatttgaggatacaatgttcactcctgtgagaatgaaaactgaaatttttgatgagttgatggatgctaatggaacagccttttatcttctattaaatcctgcaatcaacttttcccagaaggatatccctgtgactatttatgaaagagttacaaatactacttacaaacactacaagcatgttttattgaagattgtaggggtagagaggatatctttagaccatgctgattttgtctatccaagtccatgcgtagttttcgatgttcttgcgccacctcttggaaaagagttcagtgttttgggctgtgttgcacagccccaccatttggctagagtaggcatagctttgtgctcgccatttttgaatgcgaacaaacgctgttgcaggtattacctgatacttcgcaagtatcacatgatacgtgataggaatcgcctaataccttataggtatcaggtgatacttgcgaggtatcagatgatatctatcaggtatcatgcgattcttaccacgtatcaggtgattacttccgaggtatcagatgatacctatcaggtatcgtgcgattctaccacgtatcaggtatcagacgattcttatcacgtatcaggcgatactcgcaaggtatcatgtgatacttatcagatattaggagctgggcatcgaggcgtcgttgccggcggccgcgtcctcccctgtccacgctccacaccgaacccgaacctcgtcgccggcagccgcatcctcccccgtccacggtccacatcggagctcatcgccggcgaccgcatcctccgtcgggagctcgtcaccggcggccgcgtccgtcgtccacgccttagccggcggccgcgtcctccacgccgaagctcgtcgccggtgccgttgccatcaccacacaggatcctccaccgtccacgccccacgtcagagctcgtcgccggcgccatctttatcaccaacaggatcctttgccgtccatgcgaccatgccccacgccggagctcgccggcggccgcgtccgcgccgccggtgtcagcctcgtctgcgctactcccacggaggcccgcgctctcgcgtctgagggaggtggagagggagcgatcccgttgggacagtatcccaacgggattccgaaaaaatgcatttaggacgatgctgtttgaaaccccttcgggatttgtaatgttccgtgtttcagatgttttgtttagatatcctgaggacatatggtcgagttttactgatccacgtaccgcacaccaggctgttcgtaccattggttttattgagaacattggctgttggtttaatgggcgtattgttcctgagttgatttggggactaaattatgccctggatgaatttgtgcctcaagagaagggcaacctatcaaatgaatgccattttccactgagcaagcaattgcatgagcagttaaaagcatatggatttagtatctcaccacaattgattaacagagagtttataaccagttttggttacttaaattatctggaacgtacttcaaattgcatttccggagatttacaccagaaatttgatcgtttcttttgtggacttgagatgtctgagggagagtttgtaagaggagttgcacaccgtctccattccatggaggaagtggcatctacaccaggcagacgagaggcattgagcaatgctgaatttcttttggcggttcctaagaagaagtataacacattatctcgtcttaagcgtatggaggcagaagttaggggttcagggccttgggttttcgtagctgtttttgcagtggccttcggggttatggaaggattgcgcattgcaatgaagcgagcaaattag

SEQ ID NO: 68277 - DNA, 1016 bp, Oryza sativa
  Clone ID: PAT_MRT4530_69054C.1
cccacgcgtccgcccacgcgtccgttcatgaataacatggaagctctgtctgaaaaagaaccacttgattcagactgggtcgtgtgtggaggcaaggtaatgcacaacatcagaaagcaactcgggaaatcattcctcttattacaagcacagcaatatgatggcacaatcctagaatgtgatgaggcttgcaatcacaagaaaaccaaccaggatgagaagcgccttcaggtacacatccgcctgctgttgttgcccaggcggtccatggcggggagcagcagcagcatgggcatgtccgccgtggaacgcgtgcccatgaccgtgaccgtggccgtgtccatatccgtagggaaaaccagcaggctgcccataggcggttgcatctgggaacccatggacttggaagctgagcagggggaacaaacccccaaatgccgccgagaaggtgtaattcccccaccgtgcattggctagtgggatgcctccacccatgaaccaagggttggggttggcattggggaagtgggtgttaggattggcctgcggagccgtggcaggcctctgtccagctgggcgattaggaatgtcagccccagggacgttctttgaccttgggtcaacacggtccttaccacggccatagagggggacaagcttatcctcctcgacaacagccttgcagaccgggcactcaggtgaatgcgagtggatgtgcagccacttgtagaggcatggccagcagaagaggtggccacagagcgtgacaataggctcctgcggaagctcaaagcatatgttgcactcgaagcttcccccagaatcggcaccaccgctgctgctgccacttgtggattccccaacattggctgccatagtgggatgagatgagcggcgggcggcggaggaggagtcgcgtcgacggaggaggattcgccgcctgcgtgcgccgcagaggaagacgaagaggaagaggaagaggaaggcggagaaggttcgaggcgggcgcctcgtgc

SEQ ID NO: 68278 - DNA, 2125 bp, Oryza sativa
  Clone ID: PAT_MRT4530_69055C.1
aacaacagtagtccaaacaagttacgtatctcactggcagaatgttcagaacagtttactgggtcaagaatcacgcaagcattgcaaaacaaatcaatatactccatatgaactgcaagcttggtcgcagtggttctgtaagttaatttgcagatcagcgcccaaccacatagatatggagcataccatacctacagaggatcattggttcaacagcaacatacaaacacagatagatcgaacccctcagtctaaaattagcaggcattcacaatgtccatgccataacaatgcttttaatcagtctagccgactcatcattaggagttataccacggtactgctaaacagtatacccctgggctcaacgcttcctcttgttcttcttccactgattgaggacgtattggacgacctctttgagtgttgctttccggttctccttgaagttccaaagctctggtacaggatagcggccactggggttgtactcgttaagttctagcagtgcttttgttaccatggcacagatttcttcaccatgctcttctttaagttcgcaaagtttcccatcatcttcagaaagaatttccatctctttaccgtcgaccatgacaaccctaaaagggtgccagtctgaatttttaatctcattttcccagagagaacaaagctctgcagcactaacatctgcatcctcttctaaggatctctgtttgtaagcatttgtaaatgctttgaaatcaatcacacccattctcttgatgcctatatttgttcgaccaactataatatcttggaagccttctatcagcaccttccgggcatgttgcagctcatcattgctttgtctttccttgataaccagtgcttgattgagtgactctattgattccatttcagcatacttatcttttagctcctcactgagttcatgtattttactcttcgcttcggagtcttctttacctggcatatgcttcattacttccaatttgccctgaagctgttgtatttctaactcaagcttctgcttagcattcaactgctgctctaacttgagaatcttgtctagagcagcttgtttctccctcttgtgttcttccacaagcttcagcacactttcatctgccttttgttgctccaatgttgccatcttaagatgcttagttttaatatcgtttgcaaatctccttacaaagtaaaatgatacatagataacatctgcattacccaaaattcctattgctaaattaacattcttttccttctctttctcaaggttcattctgtcagagttactttggacagctagcttgtcaagctccttggaccttgagtcaagtagttgcatcttggattccaaatctgaacgcagcttcttattctcatccatgatcctctgtgaatgtctgagcgcaaggtcttgcatcttacgaatttcttcattgtaagcctggagctgctgctccctttgctccatcaccctttcaagtgacgctgtggtctcattgtactgagattcaagctcctccacatgccttttcttgacctcaacctggctagccaaattggcaacaagcttgtcagtcttgcgtgttccttcattctcaagatcagcaacagtcttgagatcaccgttcttgcgcagataaaccccaatcggccccggagagttgtgatcatcggccctggcgacccacccaaacatctgtgaccccctgtacttgttccccatccatgccctcctgccatacccttgttgctcgaagtggacctcgaacgcgagcgcgttctcgaaaccggtccagtctttggcgaactccacaatggcgttccccgtgtgacccctgtgattccacaacgggatgaccttgtgtgggcagaaccgcgcgaatccctccttgaggcggttcccactctccccaacctgccgcccgttcttccactcggtaggcacgttcaccagaatccccatccatgggaagacgaaccgctcgtccacgctgccccgtgaatgctcctcaggcaacccacgctccgagcggtcggcgatggcgtgggcacggtggtggtggtggtggtggcggcttgcattctcggcggcggacctggcgtccggcat

SEQ ID NO: 68279 - DNA, 391 bp, Oryza sativa
  Clone ID: PAT_MRT4530_69056C.1
aaagataagtatgctgaaatggaatcaatagagtcactcaatcaagcacttggttatcaaggaaaggacatagcaatgatgagctgcaacatgcccggaaggtgctgatagaagtaagttgcctgtgttgtttgaccacatgcccaatattagttatgtgacattttattgatgatgacacctatggttccgttgttttaacatcggatctcaaaatcattccctccttttgatatgttgtatgctctgcagggcttccaagatattatagttggtcgaacaaatataggcatcaagagaatgggtgtgattgattccaaagcatttacaaatgcttacaaacagaaatccttagaagaggatgcagatgttagtgctgctgagctttgtt

SEQ ID NO: 68280 - DNA, 359 bp, Oryza sativa
  Clone ID: PAT_MRT4530_69057C.1
tcgtttacgcgacggggctggcgcaacaatgctgactgatctcacattctggggacttgttgagccatgcttttaccgtgataagtgcggactgtccttggtcactgctggcatgcattgtattaatgctgatcttgcactgatagacacattagttaacaatatacctttccagtggtaccgcctggctttctttggattttggagctgcgcctatgtaaccatttaatggtgacttcatgcctgcggagctctatcctggtggccatacccatttcttgacctttcaacgtcaggtgctcctctatggtacctagtcatggccattggtcataacccttgcttctgtctgaattggt

SEQ ID NO: 68281 - DNA, 302 bp, Oryza sativa
  Clone ID: PAT_MRT4530_69058C.1
cgtgatgtggcgattgcaaggatcaaagcgatgctgaccagaattgtcacgaccggaaataacccaacgggcgttcctgatgtgcgtgcattaatccttgtcccaggaggcaaggcccagcacacacaaagacaaacgagaagcaacggaagactagggcgaccaccacaggcgcttgacggcaggcacgagctagacaccaaagccttcatcttcaaggggatcctcttctgggttaggaaaaattgagcaagactgagtacaaccaccgtactcaacaagacacacccacaagtgcataa

SEQ ID NO: 68282 - DNA, 1036 bp, Oryza sativa
  Clone ID: PAT_MRT4530_69059C.1
aaccggtgctcccgggtcgaccccgcgtccggagatccttgacagtgcagtgccaagactcgggggggcaattttgctccctcttcccgctcgtgcccaggccggggccttgcttgctagctagctttgaagccagccagcaacgccgccgccgcaggcatgaaggggagcggtgcagcgatgccgtcgtccatgttctacgtccacgaggcggacgtcgcccaaatccaccacttcctcgaggagtgctccctctgcggcaagtccctctccggtgacatcttcatgtacaggggagacacgccgttctgcagcgaggagtgcaggcagcagcagatcgaggtggacagggcgaagcaccggcggaagaagcgtgcggcggcgcacgcggtgtcggtgcggaaggagcaccggaaccaccaccaccaccaccggcaccaccaccagcagccacagccgcggccggccatcgacgccaacccgtggggcaccgcgcgaggccccgcgttgcgcgtgtgagaccgatcgagtcgcatccgcgcgtcgggcgcgcggggaggccttgtcttttttattttcgggacttctggtgcgacacgggcaggacgacggagacaaatacattttcacaacaataaaactggaagccgtttgtttcgccgaagctgttagggggatttggaggtcatcaagggcctgtccctttgccaagctgcaaaatctaagtgcccaaggagtcctgacagaaaaacaagttcttgaagttaaggttatggtccttctagatgttagcatggagtagatttctttatgatgagaacacagagttgtgtctttagtatgtcgatgcaagcttatttacttgttctttagaaacagagaggaaaaccccggttccaacatatttgaaaccgaagaggcttgctttacttgttgcttccctacttttgcttttgctgggctcaactgtaagcgtgtgaaacccaacaagttttatgaacactcttaggctgactcttaggctgtgttcgcatgc

SEQ ID NO: 68283 - DNA, 447 bp, Oryza sativa
  Clone ID: PAT_MRT4530_6905C.1
atgctacatgaagaagggcaaacatgcacgttgctaagctgacacgtggtggacaaggatgactgatctgtgaccagtctgacactggtcgcgtcatcaacagacagccataatcccacgtcgcacctgtttccggcggaagtggaaatccaccaaaacacaggagtagggtattacgcttcccagcggcccgaacctgtatacatcgcccgtgtctcgcgtttcttcctagctggcgatctttccacataccgagagagcttgagatttcaccctaagcccccggccgaaccggcaaaggggggcctgtgcggtctcccgcattttcatctctactcctctcccgtgcgcctccactcgaaccctagcctagctgccgccgccgccggtcgtctccgtctccgtcgccggcgcgccaccgccggtcgtcgccatcgccggcgcgcc

SEQ ID NO: 68284 - DNA, 366 bp, Oryza sativa
  Clone ID: PAT_MRT4530_69060C.1
gttacttgaaaaatataggggtgtttcttgaaacatttttttttgaaccacccgcaagagacgggcccaagaactatggagggggccggaaaaaaccactagatcacaaccctaaaggggcgaaccccggaaaatggaaaaatataccaccacccaaacaccgacggctccaccacaagggaccgggacaaggaaaaaaccgaaccggccccccctaaacttgaccgactgccgctagaccaacagggaaacatggttgacatcgcccaaaagaacacccttacaaccaatacaaagccaacccctaaagggggcttgcaccaatccaccgaaaggccccgctaggggaaaccaaaacgacgtttt

SEQ ID NO: 68285 - DNA, 477 bp, Oryza sativa
  unsure (1)..(477): unsure at all n locations
  Clone ID: PAT_MRT4530_69061C.1
aggatttatacanaagaaatgatgtctgctatggtgctatcttttttagttttgaaatgtttttttctgtttaaatttgttgaggactacgtctcatatttgtttcttctttggcaagagatattctgtctatgctggatattttggactagctaatctagaaaatcaactttcctttcaaaaatgaaaacgaagttcagtgtgtaataatcatgtaataattgaaagttacttataatttttttaggttcatagtgaacagaaacgggtgagcaataccccaacttttagtaaatagtgaactacgaaagtgcttttttgatttttccttttactggtcggcctcataattattgccagtcagggcttctatgatattgtagttatttcgtagatttcattttccatgcaagttagcagagaacaaatagcaaattgtgatgaatgtttcatgggtgagttgaagcagtgtttaca

SEQ ID NO: 68286 - DNA, 245 bp, Oryza sativa
  Clone ID: PAT_MRT4530_69062C.1
ttctcttccttcctcctccgtgcttaatgctctccgcattataaccacccacctctcctcctccccccacctcctctctctctatctccatctccaccgctacgcttcccagccatgggcaactccctcgcctgcttctgctgcggcggcggcgccagaggacaccaagcgcaggcacgaggccgccgcggatcattcgacggaagccaatggctactgggacaccacctgcatctacaatgaca

SEQ ID NO: 68287 - DNA, 154 bp, Oryza sativa
  Clone ID: PAT_MRT4530_69063C.1
aggcataaaatcccgttacatgagagatcaaattctgagtatgaacatgcatcaaggcaactatcaaaccatggtccaaaatacgaaaaaaaacaattccacattgatccatgaatgccatctcacaagatgtaaacaatcactcatccatatc

SEQ ID NO: 68288 - DNA, 6084 bp, Oryza sativa
  Clone ID: PAT_MRT4530_69064C.1
atggccgagccagcaaaggcgcacgacctctccccgagtatgagcggtgacgacggggagccaaacccacgccgtcgagctcgtactccaccgccccctccacgccaaagtcctaggcgggagaaggcgctcgagagggccgaaggatccgtgacttcgacacccacaggaggtggagaagggcggcgagatggggagcgtcgcctcctcgtctacggcgacggcagcacgccccagggcgcgctccaagctgcgggcgcgctcctacgtcacccgcccgtcgcccatgacccggagtctccagcccaacgttggctggacgatgtggccaaattggtcatgactgcacggcagcgcctagatgctggtgggcggtcctccgccaccaaggcctctggtgctgctaccaccggctccgcatcgtcaagacggagggcgcggcgagcggcagccgctgttcgccattcggccgccactccttcgtcaacgcctccgacccgggaagatctgcgtggggaaccggatgctcgcatcagtatcgagcgccggcgtaatggccgacgtgctccccacgcaacggagggcgcctcctcgtccggagtgtcacctcaccacggacgcggggatcagccctccgtgcccccggttggtggtgtcggctgtagagcctttgtggcgagccttcggaatgtccgttggcccccaaggttccggcccaccatcgccgaaaaatatgacgggagcgtcaaccccgccgagtttctccaggtctacacgaccgggatcgaggccgccgggggtgacgacagggtcatggcgaatttctttcccatggccctgaaaggacaagcgcggggttggctaatgaacttgccacccgcgtctgtccactcttgggaggatttgtgccaacagttcaccatgaacttccaaggcacatatccgcgcccaggtgaggaagcggacttgcacgcagtacagcgaagggatgatgagtcacttcgctcgtacattcagcggttctgtcaagtccgcaacaccataccatgcatccctgcgcacgcggtgatttacgcgttcagggggggtgtgcggcacaaccgcatgcttgaaaagatcgcctccaaggagccccagactaccgcggagctttttcagctcgcggaccgagtggctcgtaaggaggaggcatggacctggaacccctccggttccggtgtggcagcttcggccgcccccggatccgccgctcagatagggcggcgtgacaggaggaggaagaagaggtcagcccataccgacgacgagggtcatgtcctcgccgtcgagggcgcttcgcgggccacccgaaaggggaggcctgcgggaggcaaaaagaacgaggccggcgctcccaacagggagcgcccaaccggcaagtggtgcaccgtccacaacacttcccttcacgacctcgcggactgccgtgcagtcaaaagtttggctgagcggacgaggaagtgggaggaggagaggaggcaggagcgccgagagggcaaatccccggcggttccttccggtaatcggcgaagtgaggccaagcagaaggcccccgccgaggacatcgatgacggcgatgatgacctaggtttccaagagcctggggccaccattgccaccgtcgatgggggagcgtgtgctcacgtttctcgccggagcttcaaggccatgaagcgagagcttctggccgcggcccctactcatgaggcgacgtgtcgggcgcggtggtcggaggttgccctcaccttcgaccagaccgaccacccaccgtgcgttgcccggggagggcagattgcgatggtggtttctcccaccgtttgcaacgtgaagttggggcgtgtcctcattgatgggggagcggccctcaacatcctttcccctgcggcctttgacgccatcaaggccccggggatggtgctccggccgtcccagccaattatcggtgtgacgccggggcacacgtggccgttaggtcacatcgacctaccggtcaccttcggtggatccgccaacttccgcacggagcgggtgaacttcgatgtggcggacctcagtctgccctacaacgcggtcctggggaggcccgcgttggtgaagttcatggcggcggtccactacgcctacctacagatgaagatgccgggccccggtggccccatctctgtccatggcgacctcaaagtcgcgctcgcttgtctggagcagcgcgcggaccacctcgccgctgcatccaagcccgagggtggcgacgagaggcttggcgcttccgcccccgccaccccgaggcaacggatgatcacaggcgacgaggtcccggaagacgcgctcgtctccttcctgcgggcaaacgctgacgtcttcgcatggagaccggcggatatgcccggggtccccagggaggtgattgagcaccgtctcgccgtgcggccgggcgcaaggccggtccggcagaaagtgcggcggcaggccccggaacgtcaagccttcatccgcgaggaggtggcgcgacttctggaagccggattcatccgtgaggtcatccatccggagtggctggcgaacgcggtggtcgttcccaaggcgaacggcaagcttcggatgtgcatcgactacaccgaccttaacaaggcatgtcctaaggatccttaccccctgcctcgcatagatcagattgtcgactccactgcggggtgcgaccttttgtgttttctagatgcatactctggttaccatcagattcgcatggctagggaggatgaggaaaaaactgcgttcattacccccataggaacctattgttatacgacaatgcccttcgggttaaagaatgcaggtcctacttttcaacgtactactcgaatttctttgggtaaccaattaggacgtaatgttgaggcttatgtcgatgacttggttgtaaagacgcgcaaccaggaaatgttactctcagatctagcggaaacttttgagagtctccgctccgcccgcataaaactaaaccccgataagtgtgtgttcggtgtacctgcgggcaagcttctagggttcttggtctctgcccgaggcattgaggccaaccctgagaagatacgggctatagagcggatgcgcccccccagcaaacttagggatgtgcaatgcgtcaccggttgcatggccgccctaagtcggttcatatcgaggctgggagagaaggcgttacccttatttaagcttctcaaacgctccggaccgtttacctggacggaggaagccgaaaatgccctcacccagttgaaggcgtatctaagctctcccccagttctggtcgccccggagccagacgagcccttgttactctacttagcggcgaccccgcaagtagttagtgcggcattggttgtggagcgcgatgagaacaattctcatttcacgcttccccaccctgtgccgacttggcccgggagagagcagggaggagaggctcccgagccgaacggtggcccaaggcccccgacgaccggagttggccctctgcccgcttgtcagacggtgctaggagcccccgacccccaggaaggccctgaggccactgtgggaaggccgcacctatcgcccttcgaccccgaggctaaccctgtgctgacccgacccgggaaagagcagggagaagaggcccccgagccgaacggaggcctaaggcccctgacgaccggagttggccctttgcccgcttgtccgacgacgccaggagcccccgacccccaggacggccccgaagccactgtgggaaggccgcccctgttatcctccgaccccgaggtcatcagcacagaagataagtgcgccccgcgaggctgcttggacgaagagtgccccagggatgcggcccctagcgaagaggatcggccccaccgaaaggtgcagcggcccgtctactttgttagtgaggccctccgggacgccaaaacccgataccctcaggcccagaagatgctttacgctattctgatggcctcgaggaaactgcgccattatttccaggcgcatcgggtcacagtagttacgtcttaccccctcggtcaaatcttgcataatcgagagggtacaggacgggtggtgaaatgggcaatcgaactttctgagttcgatttgcactttgaaccacgccacgctatcaagagccaggccctcgccgattttgtggcagagtggaccccggctcccgagcccgtctcgatccccgaggccagcacggacccctcgcagctgcctcacaccgcccactgggtgatgcagttcgacggctccctgtctcttcagggcgccggtgcgggggtcacgttgacctctccgagcggagacgtcctcagatacttggtccgcctcgactttcgagcgaccaataatatggcagaatacgagggactccttgccggactaagagtggcagctggactggggatccgccgcctcctggtgttaggcgactcccagctggtcgttaaccaagtctgtaaggagtaccggtgctctgacccgcagatggacgcctacgtgcgccaagtacggcgtatggagcgccattttgacgggattgagcttcggcatgtgcccagacgggataacatgattgccgacgaactctcacggctcgcgtcctcgcgagcccagaccccaccgggcgcctttgaagaaaggcttgcccagccgtcggcgcgacccgaccccttaggggagacggatgcgcctgaccggcccccgaggcctgtcggagtccaggcctcgggacccgaggggagtgctcccaactcccttagattgattgcttggatcgccgagatccaagcatacctcacagataagactctacccgaggaccgcgaagggagtgaacgcgtccatcgcatctccaaacgctacgtgctggtagaagggaccctctatcggcgcgcggctaatggaatcctcctgaagtgcattcctcgggaacaaggcgttgtgcttcttgccgatatccatgaaggcgaatgcggagcccactccgcctcgcgcaccttggttggtaaagcttttcgccagggtttctattggccgacagctcttaatgatgcagtcgacctggtccggcgatgtagagcgtgtcaattccacaccaagcaaatccatcagccggcccaggccctgcagaccataccactttcgtggccatttgctgtctggggactcgatatcctgggaccatttaggcgggccccgggcgggtttgagtatctgtatgtcgcgatcgacaggttcactaagtggcccgaggcttatccggtcgtcaagatcgataagcactccgcacttaaattcattaagggcatcacggcccggtttggagtgcctaaccgtattattacggataatggcacccaattcactagtgaactcttcggcgactactgcgaagacatgggcatcaagctctgcttcgcctcacctgcccaccccagaagcaatggccaagtggagcgcgccaatgcggaaatcctcaaaggccttaaaaccaagaccttcaacatactcaagaagcacggcgattcatggatcgaggagttgccagcggtgctctgggcaaaccgaactacaccaagccgagcaaccggggaaacgcctttcttcctcgtctacggcgcggaagcggttctcccatccgagctcaccctgaggtctcctcgggctaccatgtattgcgaggctgatcaaaatcagcttcgcagagatgacctcgactacttggaagagcgaaggcggcgcgcggccctccgagccgcgcgctaccagcagagcctgcggtgctaccatcagcgccacgtccgggcccgatcactctgcgtcgacgacctcgtcctacgccgcgtccaaacgcgtgctggattgagcaagctttcaccaatgtgggagggtccgtatcgagtggtcggcgtcccccggccgggctccatacggctggccacgggcgacggcactgagctgcctaacccgtggaacatcgaacaccttcgtcgcttctacccctga

SEQ ID NO: 68289 - DNA, 186 bp, Oryza sativa
  Clone ID: PAT_MRT4530_69065C.1
gtttttgtcaaatcctttcctttttttcttacaccagagtgtccctcttatccgagacgcgtgcaaattaattgggcccgcaccttttcacacgcctcttgttgcatgcagcaatcgggcccgcccctgagcttgttttccacacatgcctttgtgcgccgctgcgattgggcccgccctcgttcc

SEQ ID NO: 68290 - DNA, 684 bp, Oryza sativa
  Clone ID: PAT_MRT4530_69066C.1
atgaagagcttcccggttgccggaggccgcagcgtctccctcggcctcttctccgacgtctccaacagctgggagctcctcgagctgatgcagtcagggaagctggagccggaggtcgcattcctcaacgcatcactggtgccggatgtgttcccggttctcgcggcggcgcacaaggcggtggtgtcgcaggggagggagtctctgaccacaagaactctgcattcggagctcgtctataactactccgggtctaagcatataacggagtctttgaaacgatgcggaatctccgacgacacgagttatatccttgcagctcgttttgatgcttcgaatgaggagataaaagctgtggagaagctcatctgtggcactgagattgatctagcggaactggaaacaagagcaaaccagccacagatcctgaagatttgcgtgcaagcaacctgcgagcatcttacattgttgactcactcaaaaacctatctttcagtgacatcacggatcaagattgaaatctgggaggcctggtggttttttgcacatgatgatgtggtaccgtactactggactactggtgccttgggttcacgtgctgctgggacagcgttgcagctgtcgtttctgtccaagagaaaaacatggacagagaagctgagatgccatgccaacatgatgtaa

SEQ ID NO: 68291 - DNA, 1042 bp, Oryza sativa
  Clone ID: PAT_MRT4530_69067C.1
caagaatagggttccaccgccgccgccgccgctcgccggagagagagagatgaagagcttcccggttgccggaggcagcagcgtctccctcggcctcttctccgacgtctccaacagctgggagctcctcgagctgatgcagtcagggaagctggagccggaggtcgcattcctcaacgcatcactggtgccggatgtgttcccggttctcgcggcggcgcacaaggcggtggtgtcgcaggggagggagtctctgaccacaagaactctgcattcggagctcgtctataactactccgggtctaagcatataacggagtctttgaaacgatgcggaatctccgacgacacgagttatatccttgcagctcgttttgatgcttcgaatgaggagataaaagctgtggagaagctcatctgtggcactgagattgatctagcggaactggaaacaagagcaaaccagccacagatcctgaagcattataaaataactccccaggaactatcaatatctacactgcccgatgcaattgtatgcaggattgctgctcgagatgccctttgagtgacatcacggatcaagattgaaatctgggaggcctggtggttttttgcacatgatgatgtggtaccggtatgtttgttactgtatgatgatggttgctagtactactggactactggtgccttgggttcacgtgctgctgggacagcgttgcagctgtcgtttctgtccaagagaaaaacatggacagagaagctggtaacctgcccgccattgcagctgttactgcaaattccagttcaatgtttcttttgcatgatccatcaatctatcatgcatgtaatttgaaattcaagaaccccactggttttgttttttgtttttttggccaaaacactctgctgtgttctgtttgtttttggagtctgtatgatggtatctgtcagtatcattatcttgctcatcagttcgtctatcaattgggacaacagccaccaagttttattttggccctgtaaaaaaaaaaaaaaaaaa

SEQ ID NO: 68292 - DNA, 674 bp, Oryza sativa
  Clone ID: PAT_MRT4530_69068C.1
ctccactgcgcacttcaccaccgcggtggctccactgctgcccgcgcttcgccgccggccgctcgtcggcgccaccactctctctctctctctctctctctatctctctctctctctctctccctccctcccagtctcagtctcggccgctccaccgaatgtcgtcccggtcgtcgtccacgagtgaactcgtcctcgaccgaacgacatcttcggccggtcgtcgtccacggccgaacctcgtcgtcggccgttcgtcgtccatgaccgaacgtgtgtgcatgtgggtgtttctatttatatgtgtaagttcgaaacgatggccgatagtactaaagggaatgaagagaagggtttatgggaggaagagccattccttcctattctggttgctccagaaccaacagtcccgccggaagatatttccgacaacgacgtagctgacgatgatgatgagaactcgtcgttaagtgatccttgtccaagcccgaagagatgaaaaacgggcgagggtgaaaaaggcgacaaagactacattccctctaaagaaggggaaacggcgccatggcgatcaaaacagcagccgaagaaaaaagataagtcaaaagacgacgagcctctagagtcgacctgcaggcatgcaagcttgagtattctatagtgtcacctaaata

SEQ ID NO: 68293 - DNA, 829 bp, Oryza sativa
  Clone ID: PAT_MRT4530_69069C.1
gcacgagggagagagagagagagagagagagagagagagagagagagagagagagagagagagcgagagagagagagagcgcagagtgagacagccactgagagaccgagtgtctgtcccccctctcttggctgtcggtctcgttctttccatccctcgcagccgcgtgttgtttgctctcttcggaactgtcgatggtcatcttgactttcctctcccccgcacgtgcttctccttgcttctcgatggctgactacctgctgttttttgctcttcgcctcccttcatcttccgtgcccacttttctgcctccctcaggtctcttgctgtcgctgatcgcttgttttctctggccctctttgcccatgctctcatgcgcgtctttccttctcttgccatatcttccctgatcgagcctgttccttccttcctcttctctctttccttccttatttctctctcctctgtctgtccctctctccctctctttctcctctctcattttcctcgccttcctctcttttgtctttctttctcttctttctcttcttcttctttcttcttttccctctttttgctttctccttctttcctcttcactctcttcccccttctcttcttcttttttctgtttgtctcttccttctctttctttcccctctcctctctttctcttcttctgtcaccccaccttgttttttttttttctcctctcttctctctctttctccttctcttcttctctcttctccctcttctccctttctcttctcttcctctttttgttttctctctctttctatttctttttctttttatttttttttta

SEQ ID NO: 68294 - DNA, 821 bp, Oryza sativa
  Clone ID: PAT_MRT4530_6906C.1
atggcggccggatcttccgcgcccgtttcccccacatccggccactctctccccctcccaaccctatataaacactccccgtgcctccctccgccgtttccgaccctcgccgctctctctctccgccggaatcgagctcgcgccgtcgctctctctctccgccgtcaccgccgagctccggtccgccgccgtcgtcgccccggaccgtctcccgcttcggcgccgtctccttcggcttcgccgcgtcctcgccgacctcgtccacctctccgtttcggtcgccgatcgccggaacgccaccgtccccgtctacccgagccgcgccgccgccttcctccgctccggtcgccgttcccgtcgtcgccgtcgacccggggtgagccgtggaccgccgattcgtttcccccttcccttccctctctcgggcgcctctccgccgcgccggtggtcgccggcggcgacaatcggggcacgagtgcgccacctcccgtcggctgtgccggcgtggccgccttcgggctcgtcccacggctgccatgtggggcccggccgtcagccgcccgcgccctcgggtgcggctgacgcgtgggacccacggcgccggccggcgcaagccgcgtgaaactggtccaccgtggaccgtgaggctgccgcgtgggccccactcccgtggacccggccatgctgcacctccgtcgctcctccgcattcgtcagaagccgttaggtcgccatccgtgccgccttcccaaggagtgccaccgcctcatccccgttgtcggccacttcccgcaccgcctcaccggcccccacgctcggtga

SEQ ID NO: 68295 - DNA, 266 bp, Oryza sativa
  Clone ID: PAT_MRT4530_69070C.1
acgtctcattatggactgaaagaacatctacagcatcgggacaaattgacgtcgacccaagcagtccataaatgctgatatcacgcagacgggacctgccgaatgaaggatatatagaacaatctggcattgctgatagaagttatatacctatcagatagcgatcgactggaaaattatctatgtgcctcatttgcctggtttgataatttcttgattgataattcgtacctaaaaaaaaaaaaaaataaaattatatataatgg

SEQ ID NO: 68296 - DNA, 277 bp, Oryza sativa
  unsure (1)..(277): unsure at all n locations
  Clone ID: PAT_MRT4530_69071C.1
gtcgagcctccgttcttggaagcgagagagagggagggaggagggaggcaattgccgaggcttccgccggaggaaagggacagctccggccccagcaccctgctgctcctgtngctcactcaccacgctatcctctcaccaaactctctcttatccccctccaagatcccaacccccaagcttcactagcttgttcgggctgaggaggaccatgctctggatctttcaagcccagctccagcactcccccacgctcgatggcagctccagcacagat

SEQ ID NO: 68297 - DNA, 186 bp, Oryza sativa
  Clone ID: PAT_MRT4530_69072C.1
atggcggcggcggctgtggagcggccggcagcggtggagaggtcggcggcgcggtggaggggccggcggggtagcggtcagtggcagcggagcggtggagcggccctcgtgtcggggcacaggatcagtctcttcagtgccatcgaactccgccttcatcttgcgatacttgtgatttgtgcgtag

SEQ ID NO: 68298 - DNA, 221 bp, Oryza sativa
  Clone ID: PAT_MRT4530_69073C.1
tttttcggtccccgccgtcgtcgccgtttttttggagaggagaaatccgtaggcttagaggatttttggtagtcttgtttcgagatattcatgaagagggggggagcttacgggggattcttatgatcactagtgtatcacgcagtgccacgcgttgtatcggacgttccaaacacaggttgctgtatgaatctacgctgatgtactaatggggtgtcagg

SEQ ID NO: 68299 - DNA, 723 bp, Oryza sativa
  Clone ID: PAT_MRT4530_69074C.1
atggcgctgctccggcaatggcgccgcggcctcgccctcgccgctctgctcgcgctccacctcgccctcgccgcggcacagtcgcctgcggccgcgccggcgcagcccaccccaaccccagtgcccacggcgccggccaagtcaccgcccgcgccggccacgcctgctcccaccgccactcccactcctcccgttgcaccggccaaggcgccgccggtcgcgcccgccgtcgcgcctgtcacgccgccgccaccgacaccgaagaaagcaccaccaccgccggtgacgcccccgccggtgacacctcccccggtgacacccccgccggtgtcgcccccgcccgccaccccgcctccggctctcccgccatcgacgcccccgccggtggctgcaccggccgaggcgcccgcggcgttgcccccggcgacgacaccaccgccagtggccgaagcgcccgcggagctgcccccggcggaggctccgaccaagagcaagaacaagcacaggaagaagaacaagcgcggcaagaaggcctccgcgcccgcgccggagccgttgagcccaccggcgccggccgcgctgtcgcccgccgacaaccaggccgacgtgtccggcccagcaccatcagcattcgatctcaatggaagcaacaggcagtacggacaatgggggtttgtccttcagactgtcatggctgcactgctactatcattagcatggtga

SEQ ID NO: 68300 - DNA, 399 bp, Oryza sativa
  Clone ID: PAT_MRT4530_69075C.1
ggcccgcttacatctgatagctttcataggtcatagactgccctcacaaaccaacacatgtcttttttgcacactttgtcctcatggccggcagcatcaaccgtcgtggcctggacctgactagctttgttttggagctacggggcatgtgcgttgtcctggggtatccgcatggagtggactaccagggcaagcagctcccggagcaggatggtgacgatgcagagccccacgctgcttgggaggtcactgcagtcttcctcactggctcacccgagaggacctcgttggcagtcaccgtgggtggagattctttcccatctcataaacccaatacagtccttttggcggtgtccactctttccacaaaagtagcacccatccttttcttttcccttt

SEQ ID NO: 68301 - DNA, 503 bp, Oryza sativa
  unsure (1)..(503): unsure at all n locations
  Clone ID: PAT_MRT4530_69076C.1
acgccttctgtggagagggagaccacgagatcatcggcgatggctctgatccggcaatggggccgcggcctcgccctcgccgctctgctcgcgctccacctcgccctcgccgcggcacagtcgcctgcggccgcgccggcgcagcccaccccaaccccagtgcccacggcgccggccaagtcaccgcccgcgccggccacgcctgctcccaccgtcactcccactcctcccgttgcaccggccaaggcgccgcctgtcgcgcccgccgtcgcgcctgtcacgccgccgccaccgtcacctaagaaagcacctccaccgccggtngacgccccctgcgggatcaccttctccggagacacccccgccgttgtcgtcacggtctaaaaccccggctccggttatgcctgcgtcgacgccctcgacggtggctgcaccggccgaaagctccgcagggttacccccagcgacgacaccaccggcagtggtcgaagcgcccgcggagc

SEQ ID NO: 68302 - DNA, 1296 bp, Oryza sativa
  Clone ID: PAT_MRT4530_69077C.1
atgaacgccgccgccgcagccccagcgccgaccatgaacttcgccgccatccactcggtatggcacgacaactttgacgccgaatcagcccagctcctcgccgtcgcgccgcgcgctgtccacgtcgcggtcggccttgccatccgtgccaacgacgacgacggcgacagcggcgagctcgttgtattcgagttcaatctccggggcttcgacatcaacaacccggctgacctgagggacccggcctccatcgcacacctccggggccgcggcgtcgacttcggcaggctcccgtgcgccggcgtcgagccgcacaggctccggttgctgctcctcggctccggcctgctccaagcgtggccgtcatgggcgacgttcactggcgcgtaccatgtcgggtacttgatgaagatcctgacgggggccgagctcccgtccggcctcgacgccttcacgaccatggcgaccgggaccctcggggagggcgtctacgacgtgaagcggctggcggcggaggtgaacacagcgtgcgggttctcgctcagggagatcgccgcgtgcatcggcgtggtgccggtggcggcccaacatgggatggtcgccagcgccggcgccgtctcgacgctgcaatgcttcaaggcgttgagggagcgcctcggacaacttcaaggccgagtccgacatcctacgctccgtcgcgcggcgcgcccgccacgtcgcgcttatattaacgtgcaataccccggctgccccgtccccggcggcgagccgaggccgttcgagcagctcactgccgagcagcggtacggggtgctcaaggcgaacgtcgacgcgctcagggccatccaggtcggcctcgccatccgcactggcgatggcggcggcgaggcgttcgtcttcgagtccaacctgaacggcttcgacgtcggcaacctggacttgccacgccagagggacgccaggtccatcgcgcacctgcgatgcgagcccgcggcgtcgacttcgccagaggctgccgcgcggcggcgtcgattggcgacgttcgctgtcggctaccacgtggcctacgccgtcaagttgctcaccggaagggatcgagctcccggccagctcgacggcttcacgcggctggtggcctccatcttcgtgcgccgcgtctacgacgtcaagaggatcgcgagggagcatgagccggtgcacgtcggcgcgctcaccagccttgccgagcggctcggtgttttcatcgtatacctatacgacatatatatccgactgggtatggggtgccatgcatag

SEQ ID NO: 68303 - DNA, 3284 bp, Oryza sativa
  Clone ID: PAT_MRT4530_69078C.1
atggactccaccaacttgccggagacgacgactccgccgccgccggccgacgacatgatcagcggcctcaccgaagacctgctgctgataatcctcggcttcttgccggcggcgagggacgtggtgcgcacctccgcgctgtcgacacggtggcgcaacctctggaccctcgccccggcgctccgcttcgacatcggccagcgcaacctgcggctaaccgacgacgccgaggccgctgccgccggccgcctcgtcgccgccgtggactccgtgctcgcccgccgcgacgtcgacgccggcgcgcccgacgtgaaggacctggagatcaacttcgtgttccgatccgttgttggcgacgaccagaccaccgccgccggccgctactaccggtcctcctcccggttcgggcttagccggcaccggcggcgcctccccatggacgtcgcgccggcgagcgtcgccgcgtggctccgcttcgccgagtgccgcgtcgcgggggcgttctcgctcgagctccccgcgctgtcgtcgtcgaggaaagtggtcgccgacctcccttgctccgagaggcttcgcacgatgcgcctcacgctcggcggcgccaccgtcggcgtcccggtcgccggcgccggcgccgacgcctaccgctctctcgccgacctgcttctcagcaacgtctgcctcgacgacggcgacggcgtccgcctctgcaacctcctctcctccaccagctgccctagcctgcgtcggctggagctcagcgtcatcaccggactaaccatccttcgcctcgacgccgccgccacgctcgaggagctccggctcatcggcctccgcgacatggagcagatggaggtggacgcgccgggcctccgggacctcaccgtgaagggcatcaccgtccacctgatggcggcggcggcggcgaggatcgctgcgccgaggctgcaggcgctggcgtacgaatacaggcgctcgtgggacgactgccagctgatggtgctcgacggcgagcgcaccgcgaagctccgggtgctctcccatggcgaccccgccggcaagcacaacaacggcgcggcggcgtggttcctgcagcactgcgccgccgcggatcgcctcgacatcgaactaaagatggaatttgatgaggaaaaactccatgcgggtattgaggatgtgatcaaggacataccgaaacttccgaatataacagatttgagaataacggtagccatgtccacagataccatggatacacacgcggtagccatgtccacagataccatggatacacacgctatcggggcaagcacaaccaagctcattgcaaagtttagtagaattgagtatctctccattgacattgacaaaaagccggcgccgtttcctccatctggttcttttggttttgtcttcttggttgacatcgccgtgtcggggaataatggcaagagcagatctggctactgggtcgcgctaacacagtgcagggtcgactgcggcccgcgggcggcgctgcgtgcagttcagccgacatgggatgacttcgttccatggtcacgtgggaggcttcttgaggagacggcggcgccagcggcggcggcggcggacgtcgatatcatcagcgacctcaccaacgacgtgctgctgataatcctcggcctcttgccggcggcgagggacgtggtgcgcacctccgcgctgtcgacgcggtggcgccacctctggacccgcgccccggcgctccgcttcgacgtcggcccgcgcagctggcggctaggtgggtgtggagccaccgacgaggccgccgccgccgcccgcctcgtcgaggcggtggactccgtcctcgccaggcgcgagggcggcgccgacgtgaaggacctggagatcaacctcgtccaccaccgctccgatggcggcgacaggccgcccatgtgccaccactacgccgccatgttcgtctcctccccttcaccttcacggcaccgggaggagccgcggtgcgacctcctcgccgtgcccctggacgtcgtcacgccggcgcgcgtcgccgcgtggctccgcttcgccgagcgccgcgtcgcggggtcgttctctctcaggctgcccgcgctgtcgaggaggatcgcggccgccggatctccccccgccgtcctcccttgctccgagaggctccacaccatgcgcctcgcgctcggcggcgcggccctcgccgtcccagacgccgtcgctgccgccgcctaccgctctcttaccgacctgctgctcagcaaagtctccctcgacgacgacggcgacgacctccgcctctgcagcctcctctcctccgccagctgccctaacatgcggaggctggagctcagcgacatcgacggcctgatcaacctccgcctcgacgccgccgcgacgctcgaggtgctccgcctcatcggcctccgccacatggagcagatggaggtggacgcgccgggcctccgggagcttgtcctcaagcgcatctacgcccacctgatggcggcggcgtcggcgtcgtcggtgaggatcgccgcgccggggctgcaggcgctgacgtacgagtacgactacgcgtgctggggcggcgccttccccatggtgctcgacggcgagcgcaccgcgaagctccaggtgctgtcccatggcgtccccgacaaggacaacaacggcgcggcggcgtggtttctgcagcactgcgccgccgcgaatcgcctcgacgtcgtactgaagatggaatttgatgaggagaagatggaagaggatattgaggatctgatcaaggatataccagaagttcttaatataaccgacttacgaataacggtagccatctccacgggaaccgtggatacacatgcaattggcgcaagcgtaaccaagctcattgcaaagtttagaagaattgagtatctctccattgacatagacaaaaaggccggtgattgtacaaattttgactgcaaatgtgagcagcataaaggctggagcaacgagatgattccactagatcatctccggatggtagacatacgtgacttcctacctttcaatgaccaaatagaactcgtatgtgcactgattgcgagtgcgccggcactggagaaaatgattgtagcattgcacgagtcatatgaagagacaagagagcgtacaaataacatggaggcgtaattatgcattccaagctgtggtgggtcgttggaccccttgtgcttggaatgggggtaaaattggcagtgctactaaatatgagtgggaaccatgtaagc

SEQ ID NO: 68304 - DNA, 759 bp, Oryza sativa
  unsure (1)..(759): unsure at all n locations
  Clone ID: PAT_MRT4530_69079C.1
ccaagagttttggtgatgattttccttgcgaactgggcatgatacatatatgctcaagaagatcatggagcaacaagtaagaaacactgatgatttaccttgcaaactggccaaagtctgttagctgatacatagagagctcatcaccattcaggtgatttctgcaacactggagctctctacgtagttttgcatatgcagaatttatgcatgcatggaaacagaaacaagcaagttctgcacaaaactcagagactacgagaagccattggttacctggccatctgttgcttcccttgcttcttcttccgtcgccattgctccagatcaggacgggaagaagatcaggatgggaagaagaaaagaaagtgaaaacaaaagaaagaacgaaagaaagaaagagaggcttcttccctagaaagtcttgtgggtgcttgaaaagatggcggtctttataccagcctttcttctgtcgatatattttctattgctgagcagcggttaggaaagcaatggcagactgacactgctcttgattggcggttagcgctttgcttagccataatctagattaagtggtagaatttatcgctgaaatggttgatcagtgaacatggaaacttagcattaggtgccaaaatgccaactggtacatgaggcacatggntagtggtggctggaccagtgtgtctagcattcttgcattgctggacccacagaaccttttctgtgtgaaattattgcatcgataattgctct

SEQ ID NO: 68305 - DNA, 634 bp, Oryza sativa
  Clone ID: PAT_MRT4530_6907C.1
gtatgggcgcaaataccgcacaccgctaatgtggaaccaagttgaagaaagccaagtgttcggaactgatatcttaaaagaagctaaagctaaagtcagaaccattcggaataatctaaaggtggcacagtcccggcaaaaaagttatgcagataaccgtcgccgtgatctggaattcgcagtggatgattttgtgtatcttcgggtcacgccattgcgaggtgtacacaggtttcggacaaaagggaagctcgcacctcggtatgtgggtcctttccgtatcgttgctcggcgcggagaagtcgcttaccaattggagctgcccgcctccttgggcaacgtgcatgatgtgttccatgtgtcgcaactcaagaaatgtctccgagtgccatccgagcaggccgactcagagcaaattgaagttcgcgaagacttgacctacgtggagaggccagtaaaaatcctggacaccatggagcgcaggaccaggaaccgggtaatccgtttttgcaaggaccagtggagcaaccacgccgaagaagaagctacctgggagcgcgaagacgagctgaaggcagcccatccagatctcttcgccagttcttccgaatctcggggtcgagattccgtttaa

SEQ ID NO: 68306 - DNA, 576 bp, Oryza sativa
  unsure (1)..(576): unsure at all n locations
  Clone ID: PAT_MRT4530_69080C.1
cggacgcgtggggttcagctgtatcatgcagcatggagatgttttgcttcgagtctgtatattcttgtaacatagatttatcttttcacggaataactatatttgtttactactttactgtacaacatttagaattcgaaacttgcatatctagaaattccattggacaggcatcctgaccttgatagaaaaaaaaaaaaaaaaaaaaaaaaaaaaaaaaaaaaaannaaaataaaaaaaaaaccaaaaaaaaaaacaaaaaaaaaaaaaaaaaaaaaaaaaaaaaaaaaaaaaccaaaaaaaaaaaaaaaaaaaaagggggggccctttttagggaaccaaattttccttcccggttctggaaccaaaaaatttttttttaggggcccctaaaataaatttcaggggcggggttttaaaaccgtggggatgggaaaaccctggggttccccaaatttaacggtttgggagaaaacccccttttcccccggggggaaaaaaggaaagaggcccccccacgtgcccctttccaaaatatttcccccccccttaatgtggaaagggggcccccccccc

SEQ ID NO: 68307 - DNA, 379 bp, Oryza sativa
  Clone ID: PAT_MRT4530_69081C.1
ctttgactgatcgtcttcctcctcttgtttcgcgagaaaaaaagaaaataaaaatataggcgaggaggtctctcgagctaccaaaccctaggggtcgattcggtggcgggggggagggggctggatctgcgcgatcgcgcggtcagcatccaccgcagggagggtattacaatagagaaggtgcgactgatccttgaatgtcttgcagctcgaagagagcggcgcccggtctgagtacatcatccagaatgggttcaccttgcaatgagtgattaatgtcaggggcggcatgctaatgttcatgtagaccttgagtggcacgaccatcagcctagaggtcgaggcttctgacaccattgacagtgacgagggctagatc

SEQ ID NO: 68308 - DNA, 1050 bp, Oryza sativa
  Clone ID: PAT_MRT4530_69082C.1
atggaggcgaagcgggagttcttcttttgtagcggcgggcttggcttcaccaatgttgcgctcgtgctattcacgacatggttctacagctacgagtggtgcggtgggttcagcatcaatgagcatgttccaaaaactaacggggacattccttctgttgatgaagccttttcagatcaccaaagactccttcacaggttggagctgtatgatcttgctgagctcaaggttgaaggggatggcaattgtcagcatgtatcttatacacagttccgagcattgtccgatcaattttaccgcaccactgaacaccacagatttgttcggcaacaaatagtgaaacagcttgagtcttatccggaaatttatgcaggatatgtccctatggattatagggaatatctaaaaaagatgataaagcattttcactttgtggccacaaaatcgaccaggaacggggagtggggtgaccacgttacattgcaggctgctgcagactcgtatggtgtaaagattttcatcctgacatcattcagagatacttgctacattgaaatccttcctgttgttcagaaatcagaaagagttatatgcttgagtttttgggctgaggtgcactacaactcgatatatccagaaggagagttaccagttatggagaacaaaaggaaaaggtggtggcatttttagatcagaaagagttatatgcttgagtttttgggctgaggtgcactacaactcgatatatccagaaggagagttaccagttatggagaacaaaaggaaaaggtggtggcatttttagatcagcaactggtgtacactccattgggctgggtacactccatttgatttgatttgatgttggttagatcagtggccattttgttggggctatatgtcagtgtaggaatgttgatttgtgagtgtacataacacatttagtcaggaggaagaatagctgtgacaatagatgaatgtatcatgtattggatattattgatgttatatagggtcacttagagttgggtttaaaaaaaaaaaaaaaaa

SEQ ID NO: 68309 - DNA, 462 bp, Oryza sativa
  Clone ID: PAT_MRT4530_69083C.1
acccacgcgtccgaaaaaacataagcaaacgcgataactaaagtgatctggataaataagctagtacaaacaaactcatgcctaggggcatcattctgatgtgtattatatctctatttttgctgtgctggaacatcgttttccctgattttgtcctttgttagcctgcctatggtcgattaccccttctttcttcacgtagggtattctcgcttcgatgcctgatcccatttgaacacgtactgtctctacttctctgcctttgccacacgtgtactctttttggtcatgtacatactcgcgtagctttttaggtgcaacttgtatagcttctgatgctgtggttctttatttctgtttttgaccctgaaagcatcggttcccttacactcaactgcacttgcagcggcatgcctctttatagtatccatgcttatgtatgtggcacttattggacatatc

SEQ ID NO: 68310 - DNA, 690 bp, Oryza sativa
  Clone ID: PAT_MRT4530_69084C.1
tcttagtacggtactagtttagtaattaccgtggaagatctggagtatcatgagaattttcgttttcataaaataactaatctctacaaaagaaaaccacgccgatctcctacgcgtgggaaggagaacgatgaagaagtgttggcaaagcccataacgacagcgccgtgctcgcccaccagcgtaacgcctgaacctccaagcagcttgcacgttgctccacattggacacatgctaggctgtgtagccgctacgtgttcgtgctccatcccgcactctcgtcgtccactcctttgcagcgtcaccctcatcgcgccggccgcatgcccactcgaagatgggctgcttgtcctaccagtcgcatgctcgaggacatcggcgacaacggcgaggggctacaactatgcggccgcgtgcacgaggacaacgaatatgcgttgctcgttcacccggccatggatgaggacgacaaggggctatggaaatgtctgaacaatcgcccggcagacaagcaaccatcagaagacagaagaaaaatgaccgtgctctctgtacaacaatacgctactggagtagtacactgcttgcagcttgctcgaggagtagtacatctgtactacatgccactgtgcaagcatggatggatgcatggcttggctgctgcgttggaactcgacaccctgatgaac

SEQ ID NO: 68311 - DNA, 236 bp, Oryza sativa
  unsure (1)..(236): unsure at all n locations
  Clone ID: PAT_MRT4530_69085C.1
ctttattgttacatggtggagccactgatggtgggggctgggtgaaaatgtttgaaggcgccccatagtcttcgtccaatcagggatgctttcaaggggacgaatattgctggtggcggctactataaggccgatcggaataaagcantctccactggatatactgatttggctgcctatgggcgctatgtgtcggctaatcctgatttgcctccgaggtttgaaatagatgcttc

SEQ ID NO: 68312 - DNA, 432 bp, Oryza sativa
  unsure (1)..(432): unsure at all n locations
  Clone ID: PAT_MRT4530_69086C.1
catcncaaaacggacnctttaaacnctaatccaaaaaacaaacaggttcacagcttgggggatnccccnaggccaanaatttaaacaaaattcnccanctaccctttnaactgaancaataataatttncacaatcatggtggcatcaacctctgnattctgnacggcatggcagctggcacaaccacctacctacctgccaaaaagggacttnatccaccacaccccncggtcnccggcnctctgctcggtctccggcggcgggtccgggtgccccttcttcttcancttgctcacttcntaccccncctccttggccctctccaccaactggccgtacccnccncctccatttgcggntgcctgcccaanatccaaaagtttttnaaggaaggctggcccanaaacncntnagaatngctctcnacttga

SEQ ID NO: 68313 - DNA, 1233 bp, Oryza sativa
  Clone ID: PAT_MRT4530_69087C.1
cgcgtccggagtttcaggtactctcattctgaaacatatagaggagctaggagcaaagagaagtatttagagtgagcttaagtagtaattaattagaggaggttaattaattatgggaagatgataggatggggagatgtgtacaaggtggtgggggcaatggcgccgctgtacttcgcgctggggctagggtacgggtcggtgaggtggtggaggttcttcacggcggagcagtgcgccgccatcaacaccatggtggtctacttctccatgcccttcttcaccttcgacttcgtcgtccgcaccgacccgttcgccatgaactaccgcgtcatcgccgccgacgcggtgtccaaggcgatcgccatcgccgccatggcggcgtgggcgcgcacgcgctgcggctgcgccgccgccaaggccggggcgcagtcgtggtccatcaccgggttctccctcgccgcgctcaacaacacgctcgtcgtcggcgtgccgctgctcgacgccatgtacgggaggtgggcgcaggacctcgtggtgcagatcgccgtcgtgcagtccatggtgtggttcccgctcctgctcatggcgttcgagctccgcaaggcctgggtcgtcggcggcggcggcggcgtcgggccggcggtgatgtcgtcgtcgtcgccgccggagaagcagagcgacgtcgagatgaacggcgccgtcgtcgcggcgccgggcggcggcggcggcgtccggctaccgttctgggcgacggcgaggacggtggggctgaagctggcgaggaacccgaacgtgtacgccagcgttctcggcgtcgtgtgggcgtgcatcgcgtacaggtggcacctgagcttgccggggatcgtgacggggtcgctgcaggtgatgtccaggactggcacggggatgtccatgttcagcatggggttgttcatggggcagcaggagagggtgatagcgtgcggggcggggctgacggcgctggggatggcgctgcggttcgtcgccggtccgctcgccacgctcgtcggcgccgccgccctcggcctccgcggcgacgtcctgcacctcgccatcatacaggccgcactgcctcaatcgattgcttccttcgttttcgcaaaggagtatgggcttcatgccgatgtactcagcacggcggttatattcggaacattgatctctctgccgattctgattgcatattacgcggttctgggctttgtctaa

SEQ ID NO: 68314 - DNA, 225 bp, Oryza sativa
  Clone ID: PAT_MRT4530_69088C.1
atgaatgagccgccaatcccattgtttgcactcaaattcaatgcacctccatcacctgaagagagtatcactggtaaactaaatgatgttgagattaatcaagaaatcgggttgatttgcaccggcaagatcagcaacccacgaagaggtgtatcgatcgctaaggcgcaatgcaaagtcttgtacggttgtagtcgagtcgtcaacgtttctctcaaatcgtag

SEQ ID NO: 68315 - DNA, 335 bp, Oryza sativa
  Clone ID: PAT_MRT4530_69089C.1
cggacgcgtgggcggacgcgtgggttggacttgaaaaaaactatgagattttatgcaaggcatttgaatctgaagcaaagtccatattagaggaaggcaactgaaaactcccatcgcaatgaccaatcttgttacaatgtgatgtgatgatggatgttgttcttcactacagtattgacacgttaccgggtacagcgctacagctcacgcttgagcggcatatcgtcaggccaccgtgttactgcaatgcatacagattgcaccagttttgtctgaatgaagctagtcctgctaatccattctgggaaacatacacgattggctggcccatattc

SEQ ID NO: 68316 - DNA, 324 bp, Oryza sativa
  Clone ID: PAT_MRT4530_6908C.1
gggagaggtgtactttttagttgagcacccaaactattctctttatattttatgaacatatgcagcaacaagttcactctgcaaattatcactgtctgtgggataggaccgccaaacagcctaaatgtcgggaataaagagcattcttgcacagatgggccaacacaatggtgccactgtaacaaacacctatttgtttaatgactaattaacgaccagaatctaaattgctaaagttttaaggctaactggggccggcagaggctgacgaattggtgaggcggcccgtattgagagggacaccctcgtggttgacttgtagcc

SEQ ID NO: 68317 - DNA, 200 bp, Oryza sativa
  Clone ID: PAT_MRT4530_69090C.1
tcaaggcagttgtttggcccgatcttttggtgagtttagataactacgatttgagagaaacgttgacgactcgactacaaccgtacaagactttgcattgcgccttagcgatcgatacacctcttcgtgggttgctgatcttgccggtgcaaatcaacccgatttctgcaaacaaatagaagaaacaagcaagaacaaga

SEQ ID NO: 68318 - DNA, 483 bp, Oryza sativa
  Clone ID: PAT_MRT4530_69091C.1
ttacccataggctgattgatcttggctgtgtgattttttgcttgggtttttgagctgattcagcggcgcttgcagcctcttgatcgtggtcttggctcgcccatttcttgcgattctttggtgggtcgtcagctgaatcttgcaggagtttttgctgacatgttcttgggtttactgctttcggtaaatctgaaccaagaggggggtttctgctgcagtttagtgggtttactatgagcggattcggggtttcgaggaaaaccggcaaaaaacctcaaatcctcgacctttagttttgctgccacgttgctccgccccattgcagagttctttttgcccccaaatttttttttacttggtgcagtaagaatcgcgcctcagtgattttctcgactcgtagtccgttgatactgtgtcttgcttatcacttgttctgcttaatcttttttgcttcctgaggaatgtcttggtgcctgtcggtgg

SEQ ID NO: 68319 - DNA, 354 bp, Oryza sativa
  Clone ID: PAT_MRT4530_69092C.1
atgaccatgaggaccagcagcctcctgctcgccgccgtcgccgtcgtcgccatcgtcgccggcgccacggcggccaccgtcgggtcatgggagccggtggacatcaacgacccgcacgtccaggagctcggccggtgggcggtggcggaggaggacaggggggtggcggcgggcgggctgacgttcgagagggtgaccgacggcgagaagcaggtggtcgccggcgtgaactaccgcctcaccctggaggcgtcgagcagcggcgccaaggacggcaggtacgaggcggtggtgtacgagcaggacccgcggagcaacgcgcgcaagctcgtctccttcgagcccatccactga

SEQ ID NO: 68320 - DNA, 666 bp, Oryza sativa
  Clone ID: PAT_MRT4530_69093C.1
atggatagacgaacaatgcgactgtctttgcccaaaaggcgacggatggaaatttgtgtgatgaacggaacggacttgccgccgccgattcatcaatctgctggtcgctgcattctactcgccgccggatctcgcgcctttgggctcgtggccagcaaatccgacggctggaggaaggtcgccggatcggttggcagcgacaaagttcgttcgcgggctacaggcggacggatccggtggcagcttgggtcgcgggcggcggatccggtgtcggctcggggcatgggcggtggatccggcggtgacggtgacctagggcgcgaatccggcgagcacgggcgcgagcgataccgcgggcccactctccaccacgcgcgctcctcggtctcgtgcactaggagagtgacaccgctacggtatcgcgctttgcgtgtgcgataccaccacctaacgacgcgccccgtgatgcgacaaaggcggtcccacaactcactcggtctcgctctgtgcgagcgcgagaccgaccttgttctcgtgctttggagtagcgacaccattgggcccacccgccaaaactacctcccaaattgcgaggacggggcggaagttgagcacgacgacgaacggccgaccagtggccttagtccgaggaggagctccatcgcc

SEQ ID NO: 68321 - DNA, 330 bp, Oryza sativa
  Clone ID: PAT_MRT4530_69094C.1
atggagtgccatgggacttaccgcccgtgctcgccggattcgcgccctaggtcaccgtcaccgccggatccaccgcccatgccccgagccgacaccggatccgccgcccgcgacccaagctgccaccggatccgtccgcctgtagcccgcgaacgaactttgtcgctgccaactgtgggaggaacccgctgccccgctgcctccctccacgagctccgagtctccgacgcacccgatccggcgaccttcctccagccgtcggatttgctggccacgagcccaaaggcgcgagatccggcggcgagtagaatgcagcgaccagcagattga

SEQ ID NO: 68322 - DNA, 445 bp, Oryza sativa
  Clone ID: PAT_MRT4530_69095C.1
ccccccccccgagcgcgacacgtcctcctcacctcacgcgctcgctcgcgtacgaggcggcaacgcaagtggtctcgtactcggtgtactctcgtcgtcgtctcatcacgctcgcatcggcggggcggcaaacggcttggctggctgctgcactggacgcaattattcccggggcccccggggcggccgctgccgctacacggtggctggcgaccgatccatcacgcgatgcccggggagatgcgcgcacgacagcgattccgccacgcccccccgtggaatcggatgccattgccccgccgccccaaacgccacgctccgaatcacgcccactactcgtactccaccccaccccatccgcggctacaaaccgccgagaatcacccacgcatcaacaactcgtcgtggctcgcacggctcaacgccacacggaaaactgccctaa

SEQ ID NO: 68323 - DNA, 342 bp, Oryza sativa
  Clone ID: PAT_MRT4530_69096C.1
tgggttttttacaagaaggggcgaaacctccaccttaaaaatttgagtaccatggaaagtcccgatatatcacccaccccgtaagacaccaaaactgaaacgtgccctcatttctcgaattgaaagaaatccccttggaagattaattaaaaagggaaagtccggttttaacaacacattgaaacagcttggatataaacactaaacgcaccgttcatgcagatgatccttaacaaatatggagaatcaaaaaaccatccctagccaaccgatacagaactacggtgtggaaagcagcttacaaatgcaaacctatcaccactttcttggaggcaacccctc

SEQ ID NO: 68324 - DNA, 976 bp, Oryza sativa
  Clone ID: PAT_MRT4530_69097C.1
gcacgagggagagagaactagtctcgtgttttttttttttctataaacaaaatttttgtatatatattttacggagatcgaacataaatccagttatgaactcataaacttacatcggcacatatctaccaaaccctgtcgataaacatactctaatggacaaacgacacaagctgttgaaatctattgaaaaactattttacaatgaacctaaacaccacggtttaactattataccgacaaaccgcaaccagaaaaatgttttcatgcacctatgttgccaagccagaagaacagggggaattgcgaaattgccaggaagagcaggaaatagtgctgccgcgtcgagtgcctctcgctgctcctcatctccgtgaagagcaccctcttcatcgtcctcaccaagaacacccccatacaaaggctcatccatggcatcataacgaagtacgagtaagcccacagaagcctcgagatgacagcaagggaaagcccggcaaatagatatccgccataagctaccaggtcgagcagcggcacctctccaccgcccatcgagtagagcagccctttcaggatcacaatctgcaaggcccatccaatgagtcctctgctgaactgcagatttatagcttctggagtaaacatgtgctccccgtgcgacagctctgttgctccccgtgcgacgacgacctccacggcggtgccctcgtcaagcccttcatcccccacccatcgggcgatgtctgcaggatgcagcaggacggacgacggcggcttccccttgctctggattctgctcgcgagacggagatcggcgcaggcgcaaggagcggagacgagacgggagtttttgttttgtgttgtttttttttttgttctctttttccccaaggacgccgttagcatccgctagttgccgctcctcttctccatgcaccgccctccctgctccttctctatgagccaccgccat

SEQ ID NO: 68325 - DNA, 653 bp, Oryza sativa
  Clone ID: PAT_MRT4530_69098C.1
gcacgggggcggcccgcccatctctttctgctccgtctcctccccaaccttatcttcttcttccccctcctctctcatggctacggtgccctccttctcctcccctcctcctctcacacgctcggcggcgctctcctcacgtctctcggcggcagcctcctcctcgcaacgccatggcggtggcgccctcccggcgaggaggcggtggcggtcctccccgccactagatctgatggtccggcgagaggaggcggtggcccgacgacgacacaacggcgaactcccctccgccagatccggtgggtggggaggtggtgggtggcggcggcttaccgagagcggcctccccacctagcggtggcagccgacagtggaggcagcagcggagcctcccctccaccaaatctggccggacttggcgacggcctggtggaggcgaatgggagcgaaagcgacaacggtggcttggtagcggatgcagcggcggcggcacagcagtggatgttcatgcttgttcttgtgtgttcatcttgtgttcatgtgtgttcatcttgtgttcttaatgttgatgtgtgttcttagatgtttatgttgtgttcgtcagtgccgccttcgtggtgtcggttgggacctaagggggtttcccaaccggc

SEQ ID NO: 68326 - DNA, 217 bp, Oryza sativa
  Clone ID: PAT_MRT4530_69099C.1
tagctgaggcttgggttctaggctggcttacctatagctagatagcttacatgatggccggcggcggccacgctgccgcggggcaccggatacagataccagctggcccggcgtcgcaatcgggaccagctgatcataaggcggtcgccgcggcgccgccttatccaagaatataacttttttcattttaatgcggaggtcgcaaggacagccaaag

SEQ ID NO: 68327 - DNA, 3084 bp, Oryza sativa
  Clone ID: PAT_MRT4530_6909C.1
atggcgtctctgtttctatcttacctgtcgttgtcaatgtgggaaaatgcacaaataagtgaaaatgaacagggttggtcttaccctctacaggtcctcctccacgtccaactcggactagaaactaatggaaacccgaaacatgccttcccgagtaaggaaacccgagacccgacgaaaacggagtctgactcggactctgctgggaaaaaaacagttgaggacttctggagtatgaaaacgatagaaatgaagtctttcattcatggatgtacatcaagagaaatcaagaacttgcagcccatccccaattcccccctctcctcttgctgtgagcgtcggatggcggaggtggccgcagttggctggggcatatctgctgtaggttgggtcgtctcaccgatcatcaccaagatcctcaacaaaggcttctcctacctcggctttcatggatcagagaagctgaaacaacttcagactaaagttctacagctggaactagtgctggaagcagttgaggagagtcctcacaggggccgtttggaggaatggttgcagcagcttaggtcggctgtctatgaagctgaagacatcttggatgatattgagtatcaccgtcttgaaaggcagatctcatctcagcctgatgacaatttggagtcaaacggcaggcctcctcgtaggaggaatttggcgccgcctcctaatatgtcaaaattggagttgaagaaaatcctaaagaagatagaaaatattatcaacgatggacacaaaattttgcagcttctgaatttgccaggccacagtaatatcaacaagagacaaactgtttctgacgattcacgtattgcagtcactactgcatctcctccatttgtagtaattggccgagatgaagatcgtgataagatcttagtattgcttcatgagacagaaaatgatggtcaacatgaacccagtcgtgcattatcccattccatcattggcatccatggcattcctgggtccgggaaatctacccttgcacagtatgtttgtgcccatgagaaaaggggcaggcaagagaaagaggctggccatttcgaccttatcatgtgggttcatgtttctaggaattttaatgtggataagattttcagtaagatgcttgaagaggctacagggaactcttgccctcagttcaatagtcttaacaccctagagcagaagctggaacaggcattgagtcgaaaacggttccttttggtactagatgatgtatggtacaacaaggatgacagtcaggaggagctacaaaagattctttttccacttaaggttggggctttaggaagtaagatcctactaactagtcgaactagagatgcattattagctttgggtgctgcaaaatgtattccgatatctgaattggatgacactgtgttccttgaacttttcatgcactatgctctcgacagtgcaggcatagatgaacgcgatcggatgatattcagagctataggatctgacattgcaaaaaagctgaagagatcacctctggcagccagaacagttggagggcaactacacatgagaccaacaattgacttttggcaagatgctcgaaatcagaacctcttgaatgagacaatgggagctctatggtggagctaccagcaccttgatcagcaggtaagacggtgctttgcttactgcagtattttccccagaagacatcggctggaacgccatgagttaattaacttgtgggtggcagaagggtttataacgactactgaagtaggattagaaatggaggctgttggtagaaagtactttgaggaattggtatcagcctcatttctgcaactaggagaaaaacaagcagaaaggtttggtgcctccgaatacttcacggttcatgatctgcttcacgatttagcagagaaggttgctagaaatgattgcttcaaagttgagaatggctggacaggagatcttcctggagatgttcgccacctttatatcgagagttataataaaacgatgattactgaaaaggttttgaaaatgggaaatttacgcactctgattatttatagtggcaatacagaaataccaactgaagaaaagatatttgaaagaatgttcatgaggctgaggaagttgcgggtactgagcgttaaaatcatcacaggatcgcatgtgttctcattcccagaatctattggtcaactgaggcatctacgccatctttgttttcggacaaccttgatcagacaagttttaccaaacacaattgccaagcttcgctatatgcatgtgctagattttggtgtatgtggagatttagtgtttccctctggcgaagacatgagtaatctcatcaacttgcagcatataatcgccacggctgatctgaattgtccaaacatcggcatgctaacgtcactgcaaacattaccattgttcccagtaaagaaggaaccagggtatgaattacagcagctgagacacctaaacaagcttcgtggcaagctacatatccacggtcttggaaacgttgggagcaaggaggaagctcttgaagccaaattagatggcaaggaacgcctgaaagaactggtacttgtctgggatgatgagagctgcagtccagaggttgaggcagaggtgcttgagggcctttgcccaccattggagcttgaaagactagaaataacagattatcacggttcaagctacccagattggatgatcggaggtcacaaaggcccaaagtacctgcgcgaacttgagctcagtggatgcagccgactgggacctgcccctgaactctttgagtttttcattcatctccgttcactctggctttggaaaagcagctggaacttcttgccagataatctggagcaactcatgtcactccatgaactgaagatgtatttttgcttgaacattcagtcgcttccaaagctgccccgatctcttgaggagtttggattgggggcctgcgatgacgagttcatgaggtcttgcaaaacaattgggcatccaaactggcacaagatccagcatattcctagagtaacaattgctttg

SEQ ID NO: 68328 - DNA, 651 bp, Oryza sativa
  unsure (1)..(651): unsure at all n locations
  Clone ID: PAT_MRT4530_690C.1
gntnctgggtgagnattcggcacgagggncnacctacatctcgncgangcgaggcnaggtggatccgncgtcggcaaaacctntatctcnccgtgccacncatggatatatggtnctggaccgcatantccgtngctggagngganttggaggggacgaccancccacngcgtcggaaatcgcctacncctgcagcggncnccccatccagcgtctccctccgcgtcgccgacccngncgncgtctccngcctctacntcnancgacccggctggtctcgcgtctaccaccnngnccacntccangtcntcnncgcncatcgcggttcnanccacctctcggcncgcgtccctttcgccgncctccacccntcgngccgngncgattccccctggantacttcatctangaaggnnancccggnaaagggttgcnggngtnggtcacgcggctgccccttgcttcatgggtggattctcctcccctaggtntaacgacntttccactcntnnngntganaacagaagcgggtcctggtnaaatataaagtccgnttcttctgacactctgaaaanacccgcnaattcacnggtgnggggagntctccntcccnaaaaggttaanggcntcnaannttttnttcctcnnccn

SEQ ID NO: 68329 - DNA, 260 bp, Oryza sativa
  Clone ID: PAT_MRT4530_69100C.1
atggtgtgttgtgagcacatggttttgatggtcgtgctcatgacaattaaggaccggttcacgagtttcggttgtgaaacattaaccgtgccaaccacaagccagaatgggcaacagctggacactttgtataacaaggctcattgcggagcaccagactgagaagtggcggagataagcccacgggggtcgctggggagtccatgcctctggtttttgagggggtgactacaatccaggaacggtgcactgctttgggt

SEQ ID NO: 68330 - DNA, 368 bp, Oryza sativa
  Clone ID: PAT_MRT4530_69101C.1
ggccgggatgtaagcttttatataaaccaaaccgccccgttttaaaaacaaaggaccatcccccccacatagcgctgctatttggatcttagcccgcccactaagctctcgacttacgaaaaacacaaccccccttattccattctaaggcccccctaacaatggaccacgttctaacagctcccatttgaaggtgggggccgcaaaaacctttggacagggggggagaaacaggcccacccaaacccaaatgacggggatgcccatcacgggcagaatcgttggcctgtacaggaaggcccccgccgccaagttggggaacataaaggcctgacggctgcaggcgtttaaccttggggctggggggg

SEQ ID NO: 68331 - DNA, 529 bp, Oryza sativa
  Clone ID: PAT_MRT4530_69102C.1
gagtataaaagttttgctcgtaattagttgtttcgtctattttatttctacagctttttattcgtaacaagacagtaataactcatcaaccaataaaacaccaagtatatactccctccatactcgtaaagaaagtcgttttggacagagatatggtctccaacacacaactttaacttattatttctataaaaatatttattgaaaagtgatatatgtatacttttacgaaagtatttctcaagacaaatctattcatatatttttttacattttcaaagtcaacaacttgagagttattcataatttatatttttaaggtttgacttaaacattatcctaaacgtctttctttacgagtacgggggagtataatactatatccagcaaccaatctgagaaagtaaaaagaagaagctagtactaaaacactagaatagctagttggattaatatccatcatcagctgcattatttatttatttggctcagatcttataaatcatcccgacctgaaggtcttggcatg

SEQ ID NO: 68332 - DNA, 236 bp, Oryza sativa
  Clone ID: PAT_MRT4530_69103C.1
actcgtactactggtatgactatgttctttaattccgtggcccagtgccagagaaccggtaaaggagccgcacaccagaacgggcgcagacttccacttcctgctcgagcaagctcgggctcagccacgccaggagaagggcctctactcccaggattcgtcattcaattatatgcaggcataaaacctataagcttgaaagctaaaggaagaagagactaaagtcctggacggga

SEQ ID NO: 68333 - DNA, 329 bp, Oryza sativa
  Clone ID: PAT_MRT4530_69104C.1
acccactcatgcgcatccatatatccttgcgcggtgcgtactagcgagaatagaaggtggcgagggcaaagcgatgtcgtccgatgaatctgtacggatgtgacgctttcgtggaacggacaaggtgcgtgtgggtgttggaggaggccggcacctagtaccagatcatgccgttcgatttctggaaaggcgagcgcaaggtccgcaaccacctgaccatgttcccgtttgagtaagctgccgagtttgcagagtggaacttgatcctctggaagtcacccgcaattgtcaaagaatgcctgccgcaagaacagacccgagctgggggc

SEQ ID NO: 68334 - DNA, 434 bp, Oryza sativa
  Clone ID: PAT_MRT4530_69105C.1
ttttttttttttttttttttttttttttttttttttttttttttttttttttttttaaaaaaaaaaaccctttttttttttcccccaagctgcccgcaaaattttttacagttcacaacggttttttattttttacaaaattcccggggatcatttgctcaattggcccttaatcctacaaaaacccttgtgcttttctcctgaaccaaaatggggggttttttttttccggggggtcggggaaaagggaaatttttttttaaccccttccccaaacttaaaagcagggattgcccatttagggattgctctgaaaaaaaaggccttcatgcccttttgtttttggactggaacctttttctcctttaagtttatgtcacccgggcttttaaaaatgctagaaattggggctcgcaatccgcttactggcccgg

SEQ ID NO: 68335 - DNA, 225 bp, Oryza sativa
  Clone ID: PAT_MRT4530_69106C.1
atgccggcagatcaacccgaccgcaaatcaccaagtaagcagaacatcagcaagaaatctgcagctcccatagaaagtaggaagcagcaacagcagcaagaaccagctgcatccatcaactccagcatcaagtttgacaacatcgggatctctcttgtgcctaacgccccgtgctccattctcatcatattctcccggtgctccgccctccgcaaccttgcctaa

SEQ ID NO: 68336 - DNA, 1280 bp, Oryza sativa
  Clone ID: PAT_MRT4530_69107C.1
aaaagattgaatttgctgccagtatggaataatcatgatcaagaaatgttacatcactgtaatatacatctcccctgcttctcattcaatgaggaaggtacaaattttgaagcctacaacttctaaccaaaaaacagagattttttttcctttttaaacgaaaacgaaattaacatacatgatggagaaaaaaaaatagtagataaattaatttgacacatctgagttagcaggttagctagggaggaaatgatgaatgaatcatctgagcgtcaagatgcggaggttgatgagcaccgggaggatgaggacggcgatgaggatgatgccggcgaggacggcgacacacgcccacttgcggctgctcttctggtgctcccgcgccacctcgagctcgacggtgcccctgcggacgaaggagctggcgtgcgcgacgtggctctcgatgtcgttgagctggtgtccctgggcctcgacgagcgccgccatgtcgaggaacacctggtgcaggtcgagcaggctgcgctcgatgtccttgacggcgtcgtgccgctcctggatctccgagatggtgtccatcacctgcccccgcccttgctcctggatcgccttctgcaggaacgactcgctctcccccgactcgatgagcgaatcgatcgtgctgtcctccgccttctcccccgtcaccgtgtagtacctcctcgccaccgtctccttgtactccgccgccatcctcgtcctcagcccctggaagtcgtccatgatgtccttgagcttcttgccgaggccggcgacgacggaggtgcgggtgcggtcggtggaggagccggggccgcagccggggaccttgcgggaggtggcgttgtctctgtcgagggcctcgagcttgcccttgacggccttggcgcggcggagcacctgctcgacgtcgccgtccatgcgggagcggagggccttcacggcgcgggcgtcgtgcgccgtcttcgtctcctcgttcgtcgactgcagccgcttgtacagcgcctccagccccttcatgtcctccttcaccccctccacgtcctcgaagaacctgtccaggttcaccacgccctcgccgccggcctccatgtcgctgccgccgacgccgctcgccgggctcgcgtccgcatacttcttgaacgagctcgacgagaacaggtcgttcatctccgacgaacgcttgtggatcagcagcagcagcagcgacgaggcaagcggatgaactgaggagcggacgcggggtcgagccgggaatccgg

SEQ ID NO: 68337 - DNA, 477 bp, Oryza sativa
  Clone ID: PAT_MRT4530_69108C.1
atgggcaagcttgatgaggccaagcacgtgctcgcccgcatgaaggcagcggaggttgcctcagacgtcgtcttcttcaacaccctcctcgctggcttcgttgccgacgggaggttcgaggacgcgttcgagctggcatggaagatggagcagcgtggctgcccgcccaccaccgccacctcgcctagccttcacgctgcctctggatctccgcgttgtgctcctcctcgctgtccatggccacctggagagagggggccggcgagcctcttccacaccaccaccgttgccaccaccgccacctcgccccgccttcgcattgccttcggatctccgtgcctagcccccgcgccgccaccaggagagagagtggggtgggcgcaggagaagaaggggagaagggtagaaggattggagaggggggatgacatatgggccccacatatcagtgggtcccacaatatattttttgtgtga

SEQ ID NO: 68338 - DNA, 306 bp, Oryza sativa
  Clone ID: PAT_MRT4530_69109C.1
atggctcgttttttctccaccattttcctcttgctcgcgttagcttttgtggctgaagtttcagggagcacgaatggaggcttttaccgaccagttggtgcagaaggttctgtctccatagaagaatgcccacagaaatgcgactaccgttgctcggcaacaaagcgccaggaaccatgcctcaagtactgcaatatctgctgccagaaatgcttgtgcgttccatccggcacgtccgggaacaaggaagagtgcccatgctacaacaatttgaagagcagccagggcaattccaagtgcccatga

SEQ ID NO: 68339 - DNA, 2427 bp, Oryza sativa
  Clone ID: PAT_MRT4530_6910C.1
atggccgagcaagcaaaggcgcacgacctctctccgagtgtgagcggcgacgacggggagccaaacccgcgccgtcgagctcgtactcccccacctcctccacgccaaagtcctaagcagggggaggcgctcgagagggttgataaatccgcagcatcaccggtcgtgggtgatgcaggagaacggcgagatggggagcgtcgcctcctcgtctacggcgacggcagcacgcctcagggcgcgcttcaggctgctagcgcgctcctacgtcacccacccgtcgtccatgaccctgagtctccagctcagcgatggctggacgacgtggccaacttggtcgtgacggcccagcagcgcctgggtgctggtggacggtccgccaccaccaagacttccggcgccgccaccaccggttccgtgtcatcaaggcggagggcgcggcgagcggcggcggctgcacgtcattcggctgccactccctcgtcgacaccttcgactcgggaggatcagcatgaggagccggatgcccgcctcaacatcgagcgccggcgtaatagccggcgtactccccgtgcaacggagggcgcctcctcgtccagagtgtcacctcgacatggacgtgaggaccagccctccgtgcccccggctggtggtgtcggctgtagagcctttgtggcgagtcttcggaatgtccgttggcccccaaggttccggcccaccatcaccgagaagtatgatgggagcgtcaaccccaccgagtttctccaggtctatacgaccgggatcgaggccgctgggggagacgacagggtcatggcgaatttctttcccatggccctgaagggacaggcacggggttggctaatgaacctgccacccgcgtcggtccactcctgggaggatctgtgccagcagttcaccatgaactttcaaggcacttatccacgcccaggtgaagaagcggacttgcacgcagtacagcggggggatgatgaatcccttcgctcgtacattcagcgtttctgccaagtccgcaatactataccttgtatccctgcacacgcggtgatctacgcgttcagggggggtgtgcggcacaaccgcatgctcgaaaagattgcctccaaagagccccagactaccgcagagctttttcagctcgcggaccgagtggctcgtaaggaggaggcctggacctggaacccctccggttccggtgtggcagcttcggccgcccccggatccgccgctcagacagggcggcgtgacaggaggaggaagaaaaggtcggtccattccggcgacgagggtcacgtcctcgccgtcgagggcgctccgcgggccactcgaaaggggaggcctgcgtgcgacaaaaagaaagaggctggtactcccagcagggagcgccccgccggcaggtggtgctccgtccacaacacctccctccacgatctcgcggactgtcgcgcagtcaaaaacttggctgagcgaacgaggaagtgggaggaggacaggaggcaggaacgccgtgaggacaagtccgcggcagttccctccggtaaacggcgaagtgaggccagacagaaggcccccgccgttgaccccgatgacggtgatgatgacctaggtttccaagaacctggggccaccatcgccactgtcgacgggggagcgtgtgctcacgtttctcgccggagcttcaaggctatgaagcgagagcttctggccgcggcccctactcatgaggcgacgcgtcgggcgcggtggtcggaggtggccctcacctttgatcagaccgaccacccaccgtgcgttgcccggggagggcagattgcgatggtggtttcccccactatctgcaatgtgaagttggggcgtgtcctcatagatggaggagcggctctcaacatcctttcccccgcggcctttgatgctatcaaggccctggggatggtgctccgaccgtcccagccaattatcggtgtgacgccggggcacacgtggccattaggtcacatcgacctaccggtcaccttcggtggacccgccaacttccgcacggagcgggtgagcttcgatgtggcggacctcagtctgccctacaacgcggtcctagggaggcccgcgttggtgaagttcatggcggcggtccactacgcctacctccagatgaagatgccgggccccggtggccccatctctgtccgtggcgaccttaaagtcgcgctcgcttgcatggagcagcgcgcggaccacctcgctgctgcgaccaagcccgagggtggtgacgagaggcttggcacctccgcccccaccgccccgaggcagcggattgccacatgcgacgaggtcccggtcaaggaggttgccttgggcgacggcccatccaagaccacacggatcggtggtcttctggatggcaaatag

SEQ ID NO: 68340 - DNA, 183 bp, Oryza sativa
  Clone ID: PAT_MRT4530_69110C.1
tttgaatgctcattatttggaatttgatcctgtctatgatgtagcagcttgaagtgcattagtgtacgcactgaaaaggtgcatggcgatttaatagcagtcgattatggggtctcgcatatggaagggggatacgcgaatagaggcataccgcatttggaggactacatatgcgaaaattag

SEQ ID NO: 68341 - DNA, 418 bp, Oryza sativa
  Clone ID: PAT_MRT4530_69111C.1
aaaaaaaaaaggaaggaaatttcggattttaattccaacgaactgaacattgttaacaaggtcccaatcgggaatatttgaaatactgaacttccaaaggggaaactggtgttacccattaaaacccaaaatgcccaaccttccaatcctggcaaattagacggcttttatgaccattttggtgggagtgaatccggcaaaaaaatttctataatgggccaggggcctataaacttaaaccagtacaatccctaaaagggtttttgacctctttgatccaaaatgttccatgacaggcaggaccaatagggcccaaacaggctgctaatggttcagccaaaaaaaccacggtggccaaggttcccttggagccctttaaatcgttgctcttctagaggatcaggactcttaaaatccc

SEQ ID NO: 68342 - DNA, 784 bp, Oryza sativa
  unsure (1)..(784): unsure at all n locations
  Clone ID: PAT_MRT4530_69112C.1
cccacgcgtccgccacgcgtccgctcactcactcgcaccaccggacctcacctgccgcggccatggagttgctgctcctcccttctcgaggcgccgccacacgcccgcttcaccaaccgagccggcgacgcgtcgccggcgtgttcaccgcccggccggcggcggtggcaagctccagcaacgtcgaggtcatcgacaccaccgctgcggcggcggcgaggggggacgtcgccaagaaccgccaagaatggcgcgcggcgggcgggctcgggctcgggctcaacctgtcggaggacatgaggcgcgggatgatgtggcggatgctggcgccacccgcggcggcggtcgcggcggaggccgcgttcctgagggtgcttgacggcgcggcgagcgacgcggcgccggcctgggccggctccgcgggctccgccgtgctgttcgccgtggggctgctcggtttccactacgggttcctgtcgtcgaggtggaacgccgcggagaggggctcgctggtggggtgggagctcgccgctagccactggagcgaactgtccatggccaagcattcctccatagacgacgaagtggacgacgacgaggacgaggaggaggaagacgaagatgaggaagaagtagaagatgaagacacttgactaattaactcgatttcacaagcacttttgttcgattaaacacattgaaatacttcagtaaagttggtttacagactttgtagtcangacactatatattcagatnntaatagagattgggtagtatgtac

SEQ ID NO: 68343 - DNA, 834 bp, Oryza sativa
  Clone ID: PAT_MRT4530_69113C.1
atggagggagtgcaacatatggaagccacatcgaagtgtcaaacacgccacacacacactgagcagcagcagcagcagcagcagcatcagacagcgaggcacaacgagagatcacttgcgtttcaagccatcaaacgttttgacatggtgaagacggcggcgagcaatggcgcggcggcggcgaggcgcgtcggcggcggcggtgatgggaagagggcggcgtacaagggggtgaggatgaggagctgggggtcgtgggtgtcggagatcagggcgccgagccagaagacgcggatatggctgggatcctactccaccgccgaggcggcggcgcgcgcctacgacgccgcgctgctctgcctcaagggctccgccgccgccgacctcaacttccccgtccgcctcccgttcgacctccccgccgccgccatgtcgcccaagtccatccagcgcgtcgccgccgccgccgccgccaatgccaacgccaacgccagcagcagctgcagcgcggccgtcttcgccggcgtcgacgacagcggcggcgccagcgccagcgaggccagcacacctgcctgcagctccagcgatggtgccgcctcgccgtcgccggtgagctccccggagacggtcatcagcgacgtcgacgtggactacagcttgctcgccgacatcgaggcgttcttccagtctcccaagtgcatggagtacgccatgatggacccgtgcagcgcgttcttcgcgccgccgccgccgccggcgatggcgatggaggaggagtgcggctgggaggaggaaggcgacattgcgctctggagcttctcctctctggactga

SEQ ID NO: 68344 - DNA, 323 bp, Oryza sativa
  Clone ID: PAT_MRT4530_69114C.1
atgttagccccgatagcgcgggccattgagacgtgttacctcttttgctaagaactcgctgaaaacgaagaaaatacaattgccttaatcgagccctctctctaattggcaatgacggttatcccaatctaggcccataccaagcccaagttatactatatcagttgtatcggccatcaatcttctcaacttattcagtcttcagcctctgttttcagccgatgcgcagtccgatcctgagtccaactcgattcaacaccaaatccgcttcaatcttccttcttcctttccgaatctgatgacaaattccgttgctaacactt

SEQ ID NO: 68345 - DNA, 165 bp, Oryza sativa
  unsure (1)..(165): unsure at all n locations
  Clone ID: PAT_MRT4530_69115C.1
gtgggttttttggttttttttaattttttattcaaacgcgcacttaattagcagcagcaagaggagcgacatttcgaagcattgtggtcgtcttggcgcncnaaaccacacanaagcnnaaccacaaccacctcattggggggcatctctctcgggggggggggg

SEQ ID NO: 68346 - DNA, 254 bp, Oryza sativa
  Clone ID: PAT_MRT4530_69116C.1
gcgaccgtgaaggaacaaacacggccgagagggggcgacgcgaaatgagaagcgacaccggagtaaacgagcctgccaaggccgagcaatcaggacaagaccgcgccgaccaaacagaaccgcggcgaatacaatacagcgccccgataagggccgagaccatggcgaaaaagcgaagaggcgggaacaacaaacggaaacgatcgaacaggggtgcacacggcagcgcgaaaaagagggtggcaaaaaagtag

SEQ ID NO: 68347 - DNA, 462 bp, Oryza sativa
  Clone ID: PAT_MRT4530_69117C.1
gggctgctatggcttgccacctggtgcttggcgccgcccgcaccagctcgccacgggagcctggacggggcgacggaccatagagtgacggctaaccacggggcggaacccaaacatcgcactactcgcctgatagctccggcactgagaccttctacttaaccaaactcttgtcacctagggaccacagggctacgtacatcgctttggaggcgaaccagactggataggaaaaccgcgccatggcctgtatgctccggcttctgaacctccgggaaggacttgattccgctcagcgaactcacggagctgctacttcgtatgcagcaagagattcttgacattaccggcctgaatggagacatcgccggccacaccgatgaagcacaatagccccagctgaccacaccgacaaccacggaggccacagacactgacaggatgacggcgctgacggcctgc

SEQ ID NO: 68348 - DNA, 237 bp, Oryza sativa
  Clone ID: PAT_MRT4530_69118C.1
cataccatacaaacaatgagtctttatttatagtactactaataaaggagtagcaatgtagcatgaaataaaattaaaagcaggtgcggatctgttggtaatccgatacattttcaaatgggtgacatgttgtgttggttcctcagtgcttcagttcagttaatttcctcccatgacagggcatcctgagcctgacgcagcatcagtagcagcagcagcaggcgcgctcaagaagct

SEQ ID NO: 68349 - DNA, 888 bp, Oryza sativa
  Clone ID: PAT_MRT4530_69119C.1
catgacggggtcaatgttctaccacctaaagctgagtggtattgtccaacatgtgtagctcgtagcaagggaaaacccctgcctccgaaatatggcaaggttacaagaactgttgttgcaccaaaggttaatcttattagtggagttccttcgcagggagtttctgaaaatcgaactacaaaggataataatcaagaacttgcagcagatggaacagttatcgataaaaactccagtgaagctaacaggattgtacataatagtgataagttggctttggagagttcaaaagaacaatcacaatcaggctctgcttctgcagctgttgataagggaagaggaaaacctcaaggtgtgggaacaatggaaaataatgccatttcagaacgtggcaatgttcatgagttgacatcgaatggggatttatctacaaagaatgaaattgttataggcgatgctaaggataaaactattgtttgcagcacagatcacagtattgtgggttgggttggtgatcctctcagagtagtcgagaacaagacttactattactcttgtaacattgatggtatagcatacaatcttgatgatcatattttggttgcctccaaagataaggagtctgctccatccaagctgcagtcactgtgggaagagcatgattctaggtctaagatggctttggttagtccatatttctttgcttcagatattccagaattgatcagtaaaccatgcactgcagaagagaatgaggtatttgcttcctgtaatcaaagaactgtaacagtttccgcgatttgtggccaatgtgaggttcttcatgttgacaagtttagagaagaaactaagggaagtcaggtttgtctttttgatgctttgtcttaa

SEQ ID NO: 68350 - DNA, 2295 bp, Oryza sativa
  Clone ID: PAT_MRT4530_6911C.1
atggtgcccccaatcgccgggaacggccgcgccaagtccggccgccttcctttgccgccggccgccattcccgtcgccgttcccgctcctcccgtggccggctctctcccccatcctataaaatgggatcctcatccttcgttctatcgttttagccccttcccgagcctccccgtggtcgtatcacctctccccgccttctccttctccctctccgacgccggccggcctccagccacctctccctcctcaccggagcatcgtccggccgtgccgtcgcctccctcggctctgcaacaccgtccccttcaccggccttaccgtctcctcgccggaaactcgccggaacggtgcccccgccggcaaccagtggcattggtgccactgtactccctccagccggctgctgttcatcgccggtgcgccgatcgacgccgccgtctcctccttcgacaccgcggcatcgccttcttccccggcatcacctcctcctcgcccgaatttcgccggaacgccgtcgcccgcgccggcctcaccttcctcctcgtcgacatctcctccggctgccccggtcgccgcgccagagcgtcggccgacgtcgccgtctcctccctcggcgacgccgcatcgccctccaccccggcctgccctcggtttcgccggaacgtcgccgcgaacctctccgtccgcctcgccggagttgttcggccgcccgtccctcctcgccgtgtaccggtcggccacctccaccaccatcttcggcatcgcagtcgcgacgtcgtcctcggcctcgcctccccttcgaccgaaccccgccgcggcgtggtcctcgtcgtcctcgtccccgtgcagccgctgccggctgtcctcgtcgcctcctcgccggtcccggtcgtcgtcgtcgtcgtcgtcctctcgtcgttcccggtcgtcgtggcccccgtcctcgtgttcgtcctcggctccgcgtcgtcaagcctcgtgccggccgcagctcgccttcgcccaaggatcgccgccgaagccgtcccctcgccgttcgtctccgttgtgcccctttcgtcgttccggaggttcccgaagcgtggttcgtggtcgtcgccgaagaattggaacaacccagcaggggcaaccaacgttcaagtgcctacagtccagcaacagtgcaagttatcagaatttctcaaaactgagcctccaacctttgccattgccgtcgatcctatggaagccagtgagtggttgcgcaccatcgagaagaagctagggttgattcagtgcaccgaccaggagcgggttggcttcgcaactcatcagctggttggaccggcttcagagtggtgggataactacgaagcatcacagccagaaggacataccaccacctggaacgagttttcatctgtattcaggagatcacatgttccctcgggaatgatcacactaagaaaacgagagtttcgctacctgaagcaaggagatttgaccgtcgcagagtacctgcacgggttctatcgtttggctcactatgcaccagaagatgtggaaacgggcgaagacaaacaagagaagtttctccaggggttaaaagatgagctcgcagtgcaactacttctagaggattatgaagattttgagaaacttgtggacaaagccatgcaactcgaaagtgagcataatcggatgacgaattgcaagagaaggatggttaacaacccagtatttccaggtggtaaccaaagacagcgcactgagccacttcagatcaccggatcttctgttgtgtatccagagttcctgccccaagaagatgaacgcaatgcagacaacaacaatagcaatactaatgctgatgataccaccaacaaccatggttcttgccccattcatgaccacttagatcaagcgtacaatgtcaacatcattcaccaagatatcgacgatagtatcaatgaaggcacccagaatgacaaccttagcaatttcgacactgagaaagactccaatggtgatagcaataatggcaccactgatgccgatgttagcaaggatttccaaccaccaattccaactcctaatcagaacgatcgttcccagacggacaactcagcaaagaagacgttgatttgttacaactgcaaagaaccaggtcatttctctagagattgtccacagccgaagcgtaacctgcgccatcactccggccattatgcaagaagaagacaggtcactcgtcttgtggtcactggagcaaacgccgtacctgtgaggcctcatattaattctaacccatag

SEQ ID NO: 68351 - DNA, 147 bp, Oryza sativa
  unsure (1)..(147): unsure at all n locations
  Clone ID: PAT_MRT4530_69120C.1
cccacgcgcccccgggccgcgtgggttcgaccctgggaatattcggacacgggaccttggagggcggaccacantttcctctatagggagggcgaatataagaacttggcggtgaaacaatgggcaaatgactggttcctcggggga

SEQ ID NO: 68352 - DNA, 288 bp, Oryza sativa
  Clone ID: PAT_MRT4530_69121C.1
atgtcgagaatcagacttatcaatgaattggccaagaatgcaaaaatgacacgatcaattggaccaaaattcacaagtctgcgtatgggagcaatagaggtggtcacctgccgaaattgggccaggccagcccagcccatgattcggccgaacaattgggtttggccgaacccaccgcggctccgttcgatgcagggttctgatggacggctgggattgatccccaatgacggttggagggtattaccgacctttccaaccgtcataaccgtcatactcaagctataa

SEQ ID NO: 68353 - DNA, 1792 bp, Oryza sativa
  Clone ID: PAT_MRT4530_69122C.1
ctaggcgtgggtcggccagcaagctcgagcttgctcgcttgtcggcggaaaggctgagcggcagcggcgctcgtcggcggaaagtctgtagcggtgggtggcggtggcaagcccgacgtcttccgtcgccgccgccttctccgccttaccgtcgccactgctccgccgctgcctaccgccgtccccaccgccaccgccgctgctccctaccgccgccaccccgagcccggtggcgagctccgcggtgacggtgtccttgccgccacgggtgctcgactcgaagacgaacctggagctgaggcccgtcgtgttcctggccttgacgagcctatccctcgcctgctcgagctcgtcgccgtcgacgaggagcagcgcgccggccgcgtcgagcgcgaccttcacccggacgggagctccggcaggtggaacaccttggcgctgctcgtgtacagcgcgacgagacggtagatctgctcgtgcccgtccatgtgcttgatcatgtcgacgaacttctcccgaccccgggtggttgtggtggtgtgggtgatgccgcggctgcggccgaggcggaggcgggtggccggagttgccgaggaaggcgaagcgaatgagggtctcgccggacttgagcaggctgcagaagttgtcggcgacggtggggattgtctttggcctagcatccgacggcggcgcaggcaacgccatttcgatgtctggtccctgaaggccctggacggctgcacgcgccgatgctgctgcccaatagccgctcgcccgtggcccagtggcccgtcttgctgtcacgctggcctccccgtagccgtcaccgtcgcatgcgtcctttgcctgcctgcctcgtgcccgtgagtccgtcaccgctcctgctcccagtagtccagtaactctcgctccactctcctcgccgagtcgccgtcgccgcctcggccagcttcggattgggttccagcaccggggcggataatctgctgctgctgctgctgctgcaaggtctcgaatacccagacttcgagagatggcaacaactaccgtcaccacaccaattctctgcaacctcagcgccaagccacgcgacaccctgcgcctgccgacgacgcgttcgccgaacgacggcacgaggcgaacgacgctccacctgagctcgtcaagagcccgcggcgacttgatccgcgccgccgccgccgtctacacggtgaagctcatcgggccggaggggcaggagagcgtgatcaaggtgccggaggacacctacatcctggacgcggccgaggaagccggcgtcgacctgccctactcgtgccgcgccggcgcgtgctccacctgcgccggcaaggtcgtcgagggcggcgtcgaccagtcggaccagtcgttcctcgacgacgcccaggtcggcgccggctacgtgctcacctgcgtcgcgtacccgaccgccaacagcgtcatccagacgcacaaggaggcagacctgatccacgtgccgccgactcggaacggcgtcaccacgcggccacaccgggccgcgtcgatcgccaccgccccatcaccgcgcaccgacgcctctgccccgccacgccccgcgtggcggccgccgcgccacggcggaaaccaatcggaattcgggaacctcgcggccgggccggcgcgcgccgtattttcgtcgccgcccggcgcgcgcgtcaccgtccgcaaccgccacccggaaagggcatcccagggccgggggtgcacggaactgcttctgcgagctgagctggtagtagcgacatacacgtaa

SEQ ID NO: 68354 - DNA, 155 bp, Oryza sativa
  Clone ID: PAT_MRT4530_69123C.1
agtccagcgccaccgatgccgctgcaaagcacaccaccaccgacccccttctctccctcgaccatctccgttcgtcgctacaatcccctaacggtccggcaccggagcgtgtccatggagtcgatggagaacttgtggaggcgagcaaacagtag

SEQ ID NO: 68355 - DNA, 2037 bp, Oryza sativa
  Clone ID: PAT_MRT4530_69124C.1
atggcggcggcgggggacgtgcagatggcggagaaggagacgttcgcgttccaggcagagatcaaccagctgctctccctcatcatcaacaccttctactccaacaaggagatcttcctccgcgagctcatctccaactcttctgatgcgcttgacaagatccgcttcgagagcctcaccgacaagagcaagctggacgcccagccggagctcttcatccgcctcgtcccctacaagccctccaagactctctccatcatcgacagcggcgtcggcatgaccaagtccgacctcgtgaacaatttgggcaccatcgcgcgctccggcaccaaggagttcatggaggcgctgcaggcgggcgccgacgtgagcatgatcgggcagttcggcgtcggcttctactccgcctacctcgtcgccgagaaggtggtggtcaccaccaagcacaacgacgacgagcagtacgtgtgggagtcgcaggccggcggctccttcaccgtcaccctcgacaccgccggcgagcgcctcggccgcggcaccaagatcaccctcttcctcaaggacgaccagctcgagtacctggaggagcgccgcctcaaggacctcgtcaagaagcactccgagttcatcagctaccccatctacctctggtccgagaagaccaccgagaaggagatcagcgacgacgaggacgacgacattgacgactccaaaggcaaggagaaggaaggcgacatcgaggaggtcaaagataagaagaagaagaagaaggtgaacgaggtgagccatgaatgggtgcagatcaacaagcagaagcccatctggctgcggaagccggaggagatcagccgggaggagtacgcgtccttctacaagagcctcaccaacgactgggaggaccacctcgccgtgaagcacttctccgtggaggggcagctggagttcaaggccatcctcttcgtgccccaccgcgcgcccttcgacctgttcgacacccgcaagaagatgaacaacatcaagctctacgtgcgccgcgtcttcatcatggacaactgcgaggagctcatcccggagtggctcggcttcgtcaagggcgtcgtcgactccgacgacctcccgctcaacatctcccgcgagatgctgcagcagaacaagatcctcaaggtcatccgcaagaacctcgtcaagaaatgcatcgagatgttcttcgagatcgccgacaacaaggaggattacgccaagttctacgaggccttctccaagaacctcaagctggggatccacgaggactcgcagaaccgcggcaagctcgccgacctgctccggtaccactccaccaagtccggcaacgagctcaccagcctcaaggactatgtgacccggatgaaggaagggcagaaggaggtctactacatcaccggcgagagccgcaaggccgtggagaactcgccgttcctggagaagctgaagaagaaggggtacgaggtgctgttcatggtggacgccatcgacgagtacgccgtcgggcagctcaaggagtacgacggcaagaagctggtgtccgccaccaaggaagggctcaagctggacgacgacgacgacgccaaggagaggaagaggtcgttcgagccgctctgcaaggtgatcaaggacattctgggcgatcgcgtggagaaggtggtggtctcggaccggatcgtggactcgccgtgctgcctggtcaccggcgagtacggctggacggcgaacatggagcggatcatgaaggcgcaggcgctgcgggacagcagcatgggcgcgtacatgtcgagcaagaagacgatggagatcaacccggagaacgggatcatggaggagctccggaagcgcgccgaagccttgaagacccaaaaaaccttcgcggccaggatccaccgcatgctcaagctcggcctcaacatcgacgacgacgacgccgccgcggccgacgacgacgctgacatgcccgcgctcgatgacgccgccgccgaggagagcaagatggaggaggtggactga

SEQ ID NO: 68356 - DNA, 602 bp, Oryza sativa
  Clone ID: PAT_MRT4530_69126C.1
ccacgcgtccgggaagctatagctgctcatacaatccctggtgacctaatttgtatggagaaggtgagtatgaggctgggattggtggcgctggtgttactaggcatcatgctggcggcgagccagcaagctgtcgacgcatccagccctacatcggcaataagctatgaaggcctttacaggaaacctgaggacaggcccaagaaaggtgatcccgtcatgaaagctcgtggttgcacagaagctatgaagtgcaatggctgaccgacaagtgcacaatttgctccactctctggattttcatttgttggtttcttcctggcaacgaaagcggcattgcattgtgttagctattttcttttgcttcagaaaatttttttacatctttttaaaagtatgaatagaattgccttgctttgtcacagagtacgcgtgaagaaatccattgtatgtactcgatcaattggccacttaagaaaacgtgttagtttgcatggagacatgatctccaaaatgtaattttgtctactactttctgttgccatctttctatacatacatatattaagtgggtactttatagtatcactcatgttaatcag

SEQ ID NO: 68357 - DNA, 1557 bp, Oryza sativa
  Clone ID: PAT_MRT4530_69127C.1
ccacgcgtccgcttagcttaattacatagctcctcctcctttctccactgactgctcagtgtgttttgcatctctccattgagcaagaggagaagggaggctcagctagctagctagctaccatctatactagtatcaagtttttttgttcagatttttttgttggaggaagagttctagggagatcgatatggccttcatgtccatggaacgcagcacttgggccttcacctttggcatcttaggtaacttaatctcactaatggtattcctttcgccactgccgacgttctaccgggtgtaccggaagaagtcgacggaggggttccagtcgacgccgtacgtggtgacgctcttcagctgcatgctgtggatgtactacgcgttcgtcaagtccggcgccgagctgctggtcaccatcaatggtgtggggtgcgtcatcgagaccgtctacctcgccatgtacctcgcctacgcccccaagagcgccaggatgctcacggcgaagatgctgctcggcctcaacatcggcctcttcggcgtcatcgcgctcgtcacgctgctgctctcccgcggcgagctccgcgtccacgtcctcggctggatctgcgtcgccgtctcgctcagcgtcttcgccgctcccttgagcatcatcaggctgggtgatccggaccaagagcgtggagttcatgccattctcgctatccttcttcctggtgcttagcgcggtgatctggttcttgtacgggctgctcaagaaggacgtgttcgtggcgctgcccaacgtgctgggcttcgtgttcggcgtggcgcagatggcgctgtacatggcgtaccggagcaagaagccactggtggcgtcgtcgtcgtccgccgtggtggcggccgggctggagatcaagctgccggagcatgtcaaggaggtgcaggccgtcgccaagggcgccgtcgcggcagcgccggagggcaggatcagctgcggcgcggaggtgcaccccatcgacgacgtgatgccctcggaggtggtggaggtgaaggtggatgacgaggagacgaaccgtacggacgagatggccggtgacggcgatcacgctatggtcagaacggagcagatcatcaagcctgacatggccattgttgtggaagtgtagtctgattaagcttagagaactagtagtaattctctcatgtgaggtatagccagctagctggtggtacacaaacataaacacgaacacatgttcatcgcgtacgtactagctactaggtgagacacctcttggcgtagtacgtacagtagtactccggccagatctagtagggactgtattggcgcgtgactcgcctggttcgtccagcttgcatgcagagaccgaccgagcaagcaagctaattaagctggcccgaccgaccgagtgcatgcgtgttttgtgaacctagctactgaggggggagtgaagggtgtgggtgtgcaatcgaccggcctgtcgcgtcgatgctcttgcttagcttcattcgattcatgcagttcaataataaaatttggattttactgcc

SEQ ID NO: 68358 - DNA, 755 bp, Oryza sativa
  Clone ID: PAT_MRT4530_69128C.1
tggagaaagttgttgttctcggaaccggatcgtggactcgccgtgctgcctggtcaccggcgagtacggctggacggccgaacatggagcggatcatgaaggcgcaggcgctgcgggacagcagcatgggcgcgtacatgtcgagcaagaagacgatggagatcaacccggagaacgggatcatggaggagctccggaagccgcgccgacgctgacgccaacgacaagtccgtcagggacctcgtcctcctcctcttcgagacggcgctgctcacctccggcttcagcctcgacgacccaaacaccttcgccgccaggatccaccgcatgctcaagctcggcctcaacatcgacgacgacgacgcccgccgcggccgacgacgacgctgacatgcccgcgctcgatgacgccgccgccgaggagagcaagatggaggaggtggactgaattaaataagtactcgctgccatgtcgaaatgcatcatggtgcccatggttgggtgtgtctgcgctgcacttcaacagtgtgtggtcgtgtttgcgtcgtgtcgcccagtgttagacatgagtcttacgtaagtatatgtcgccagtgttagtatgttgcatttgcgttactcatgcgtacatctttctaagccatcgttgagaaagtagtagtatcagtattaaaaaatgatcgaattcctatgtctgaaactgaaatgatcgactaagctccaatgttttcaattcaaaaaaaaaaaaaaaaaaa

SEQ ID NO: 68359 - DNA, 1654 bp, Oryza sativa
  Clone ID: PAT_MRT4530_69129C.1
gggaaagaacaagtcgacaaatgtactgcaaattttcactgagggggcacggtaacaatacatgaacgggtgaacccgataaagtatatatgtacatcgatgaaggggcaaacaacaaaaaaaaaaaaaaaaacgactccctacaaaattgctggctgtgtgagaacagccgtcataaggtatttacacagcaggaaacaaaaagcctgcccattatcatcatcatctactcattaggttccagccatttcttcaggttgcaaagggcctctgaagacaggctcttgcaacatctaaccctcctgatcggcgcctgctccgaagacggtgaaccaccaccgagctcagatccaaagcagatgactatcaccgtgaggttgtcaaaggtctggagcctcttcgcctccatggcaagctccctcgcgcacctctcggggtcatcgtgtcgtcggagccccttgcggactatggtcaccgcgtgctggctgctcatgacgtcccatatcccatcgcagcctatgatgaggaactcgtcgtcttcggtgagtgtggtttgctggaactctggctcggcgatgagaggcgaccgcgagccttgaggcattttcatgtcccaatcccccaatgccctggtcacagatagtactccattgaggtagccatcctcaatgtatcccccacactcggtaatcctttcatgctctgcatcatatgttggcctgtgatcacgagacatctccacagctacacctttccgacacaggaccgcgcggcagtccccagcattcgcgaccaacagctgccttccaaatatcaaagcagcaagagctgttgttcctgatgatcggctgatagccaaatcgtcagcgagagcaaggtctgcgctcaagaatgcattgtggatagatttctcaactgattcataaaatgattcatcttcttctaatgcctgtgggaactcagaatcctcaaagaacagccttatagcatgccttttcatgtaggctgctgcatctggacccccatggccatcaaagaccccatagaaggcattaggtgcagggcacatcaacagtgagccaagatgaccagaaagatcatcaattctgatatgttcatcttccatgtaccgcctaggtccaatatcggcaaagctaccagatcgaatgttgggggaaaactgtagtgattccacgggtgccttaaccatcagttcaggcacctcgatggcggcttccgaggcagcctccggcgacatctcctccaccggcggcgacacctcgtcgacccccttcacggagcaccggcggtggaacgacgcctccagcagcggcacgacctgatgcatcacctccgccccggccaccatcaccgcctcctcccccgaaccgctcaacaacccgctcgtcctccccaaccgcgaaatccaaccggaaaccaccccccacaaaccaaaccaagaactcccccaaccaaccaagcttccaacaacacctctctcgatcacacgcaaagcactctctctcgaaagattttgactcggctgcaatcaaagcttctttccggggaaaacatacaacgaacacgaacacggagacttgttcttcttcttgcgtgacccgaagaggagaaagaaagaaagcctccgcgtggg

SEQ ID NO: 68360 - DNA, 611 bp, Oryza sativa
  unsure (1)..(611): unsure at all n locations
  Clone ID: PAT_MRT4530_6912C.1
ccctctcgtgatganccgattcctgcacagatctcactttgctgtagctcctgtgtatcctctttatttactgtgtcttctacacaaccctttctcactcgtaatgtctccgtcaccccggtggtattgcttttaacaaccgtctgtctagccatgtccccctcctgtccctttccagctctttatgttgtctcttgctcacctggcccccgtgccacccacatccaactccagtatcttatgctttatatgcaatatattgccctcagtcacttctctngtagccacttagtgtctgccacgtcgtgcattattacaaccatcaagcttcgcgcaattcatactacgtcttgtcttgtctctagctgtccttctaatcactagtcttctataattgtcattcactatgttccatctatttccatcatgtatcccacctgtatccccagttaccatttgtcccgctgcctatcttggtctgtctatgtccatgtacggctactgttatgccaacagtgtatatcctgcttgtatgcctccattcattcatgcctgtccgtacctttacatttactttgagcggcatgtattgctattgatatagctaaccc

SEQ ID NO: 68361 - DNA, 725 bp, Oryza sativa
  unsure (1)..(725): unsure at all n locations
  Clone ID: PAT_MRT4530_69130C.1
cccacgcgtccgctgcacagctgcacttgcatttcagccagcgacaagaaagcaccaaatctctttgcattcaagcagcaggcaacattgttgaggagggatcaccgatcggttcggagcagtgaactgaaatggcggcggcgggggacgtgcagatggcggagaaggagacgttcgcgttccaggcagagatcaaccagctgctctccctcatcatcaacaccttctactccaacaaggagatcttcctccgcgagctcatctccaactcttctgatgcgcttgacaagatccgcttcgagagcctcaccgacaagagcaagctggacgcccagccggagctcttcatccgcctcgtcccctacaagccctccaagactctctccatcatcgacagcggcggtcggcatgaccaagtccgacctcgtgaacaatttggggcaccatcgcgcgctccggcaccaaggagttcatggaggcgctgcaggcgggcgccgacgtgagcatgatcgggcagttcggcgtcggcttctactccgcctacctcgtcgccgagaaggtggtggtcaccaccaagcacaacgacgacgagcagtacgtgtgggagtcgcaggccggcggctccttcaccgtcaccctcgacaccgccggcgaacgctcggccgcgggcaccaagatcancctctttctcaaggacgaccagctcgaagtanctggaaggaacg

SEQ ID NO: 68362 - DNA, 306 bp, Oryza sativa
  Clone ID: PAT_MRT4530_69131C.1
atgacgccgaggcaacacagtgccgagacgagcacgccggggatggagataaaggcgtcggcgttttctttggtggcgcgaaaacggtggacgacaaggatgcaaagggtggtggatcgagcggcggaaattgaatcgcgggagcgggaggagcagcgtggtgcgatcaagggcaaggacggtgaactggtggccggcgtcagcggctctgcccctgagcgcaaggagacaagggcgttggtcggccacgacgctgcgtgcgagggaatcggtatgacggattcaaacggtggcgagcggagttag

SEQ ID NO: 68363 - DNA, 4150 bp, Oryza sativa
  Clone ID: PAT_MRT4530_69132C.1
atggaaccaaacaagcttgtgacttggggtcggaactgtcgtggcttggggtcggctgcgacagtgggtgaacttcgctggttagtgaagtctttgagaccctcccttgtcttcttgtctgaaacgaagatgagggacaaacaggcaagaaatttgatgtggtcacttggtttctccggctcctttgctgtgagctgcgagggccttagtggaggcttagccctgttttggactacagcctacacggtttctcttagggggttcaactccccatttcattgatgtgctggtctctacggaggagttgcctccttggcgaatttcctttgtgtacggtgaacccaaacgtgagcttcgacattttttctggaacctccttcgccggttgcatgatcagtggagggggccgtggctgtgttgtggcgacttcaacgaggttttatgcctcgatgagcacttggggatgcgagagagatcagagccacatatgcaacacttcagaagttgcttggatgattgtggtcttattgacctaggatttgttggtcccaaatttacatggtccaataagcaggatgctaacagtaatagcaaggtccggcttgatcgtgctgtcgcaaatggcgagttctcgagatactttgaggactgcctggtggaaaatgtgataacaacatcctcagaccactacgccatctctattgacttgtcgagaaggaaccacggtcaaaggagaattcccattcagcagggattcaggtttgaggcggcttggttgcgggcggaggattacagggaggtggtagaaaattcttggaggatctcttctgctggatgcgtggggctgaggggagtttggagtgtcttgcaacaagtcgcagtgtctttgaaggactggagtaaggcttcctttgggtctgtgcgcaggaaaatcctcaagatggagaggaagctgaaatccctgcgacagtcaccagttaatgacgtggtgattcaggaagagaagttaattgagcaacaactctgtgaacttttcgagaaagaggagattatggcgcgtcagaggtcccgagtggattggctccgtgaaggggaccgcaacactgctttcttccatgccagggcatcggcgagaaggcggactaatagaatcaaggagctggttcgtgatgatggctctagatgtatttcccaagaagggatcaagcgcatggctgaagttttctatgagaatctgttttcctcggagccctgtgattcaatggaggaagtcttggatgctatcccaaataaagtaggcgactttatcaatggggaattgggcaaacagtacactaatgaggagatcaagacagcactgttccaaatgggatcaacaaaggctccggggccggatggattcccagctttgttctaccaaacacattggggtatcctagaggaacacatctgtaatgcggtgagaggtttcttgttaggagaggagatcccggaaggtctttgtgactcggttgttgtcctcattcccaaggtaaacaatgcgagtcacctctcaaaatttcgcccaatcagtttatgcaatgtcctgtacaagattgcttcaaaagttcttgcgaaccggctgaagccttttctcccagatattgtgtctgagttccaaagtgccttcgtgccgggtcgcctcatcactgacagtgccctagtggcatatgaatgtttgcataccatccgtaaacaacacaacaaaaatcctttttttgcactcaagattgatatgatgaaggcatatgatagagttgagtgggcttatctttcgggttgcttatcgaaacttggtttttcccaggattggatcaacactgtgatgcgttgtgtctcctcagtgagatacgccgtcaaaattaatggagagctgactaagccggtggtcccttcaaggggcattcgacagggggacccaatcagcccctacctgttccttttgtgcacagaaggactgtcatgtttgctacacaagaaggaggtagcgggtgagctacaaggaattaaaaatggcaggcatggaccccctatctcccacttgttgtttgcggatgatagcattttctttgctaaggctgacagcaggaatgtccaagcactcaaaaacacgctgcgatcatattgcagtgcgtcgggacagaaaattaacctgcacaaatcttcaatcttttttggcaaacgatgtcctgatgcggtcaagatatcggtgaaaagctgcttacaagtcgataatgaagtcttgcaagactcttaccttgggatgcctactgaaattgggcttgctaccacaaatttcttcaagtttctgccagaaagaatttggaaaagggttaatggatggactgaccggccgctgtcaagggccggtatggagacaatgctgaaagcagtggcccaagcaattccaaattatgttatgagttgtttccgcatccctgtctcaatctgtgaaaagatgaagacttgtattgccgatcattggtggggctttgaggatggtaagaaaaaaatgcactggaaatcttggagctggctttctactcctaaatttcttgggggaatgggctttagggagttcactactttcaaccaagcaatgttaggaagacagtgctggaggctgcttactgatcctgattccttgtgctcgagggttttgaagggaagatacttccctaactcgtccttctgggaggctgctcaaccgaaatcgccgtctttcacttggcgaagcttgctgtttgggagagaactgctggcaaaaggagtgaggtggggagtcggtgatgggaaaaccatcaaaatcttttcagataattggatacctgggtttcgacctcaattggtgacaacgctttctcccttcccaacagatgccactgttagctgcctgatgaacgaggatgccagatgttgggatggagatttgataagatccctcttccctgtggacattgctaaggagattctacagattcctattagtagacatggtgatgctgacttcgcttcttggccacatgacaaactgggtttatactctgtgcgttcggcttacaatctggcgcgatcagaagctttctttgctgatcagagcaacagtgggcgaggaatggcgtcgagactgcttgaaagccaaaaggattggaagggcttgtggaaaatcaatgcgccgggaaagatgaaaattactctctggcgtgctgctcatgaatgcttagcgactgggtttcaacttcgacgacggcatatcccctctactgatggctgtgttttttgcaacagagatgacacagtggaacatgtcttcctgttctgcccctttgctgctcaaatctgggaggaaatcaagggtaagtgcgctgtcaaactaggaagaaatgggttctcaaccatgaggcaatggatctttgatttcctgaaacggggatccagccatgcaaacacccttttggctgtcaccttttggcacatctgggaagcaaggaacaatacaaagaacaacaatggcacagtgcacccccaacgtgttgtcatcaaaattttgtcttatgtcgacatgattctaaagcacaatacgaagacggtggatggccagcggggtggaaacactcaagccatacctagatggcagccaccgccggccagcgtatggatgatcaattctgatgctgcgattttcagctcgtccaggaccatgggggtcggggctttgattcgtgataatacagggaaatgcctggttgcttgctcggagatgatcagcgatgtggtgctacctgagcttgcagaagcgctggcaattaggcgggcactgggtctagcaaaggaagagggcctggaacacattgtcatggcatctgattgtctcactgtaatcagacgcatccaaacttcaggaagggatcgctcaggggtgggatgcgtgattgaagatatcaagaagttggcgtccacctttgttttatgctcttttatgcatgttaaccggttgtccaatttggcggctcattctctagctcggaatgccgagctgtctacctgtactgtgtaccgttctgtaataccggattatatccgggacatactttgtgatgatgttgcttaa

SEQ ID NO: 68364 - DNA, 508 bp, Oryza sativa
  Clone ID: PAT_MRT4530_69133C.1
atgcagctcaacccgaaagcaagaactcgtcgaaataaaactaaagcaaaaaggactctatccatgtgcggcaatcatcttgaagcacctcaatttaacccgatgtcatacatcaagttgcattgtcggaatcggctgcatcggcttgcctagcccgactcagacccagccgatcctaatcgtagccgatctggactccagctgatttctgctctgttttcgaactcgatctccgcctccgactttgcttcgatctaatcttctttcccgatgccgatattaccaaatttgcgaggtctcctctctttttctcctctttaatcccctccccggggtctcctctctctccggctgcgaaaccaacgacggcaccccaaaccgcctccgcctccgccgccgcttccgctgctccccacggcggcgttgtcggctcgcgcattcctcgacgtgcttcccagtggagtggttcagacattggatccttgcgtgacaacgggtagcggtggcc

SEQ ID NO: 68365 - DNA, 570 bp, Oryza sativa
  unsure (1)..(570): unsure at all n locations
  Clone ID: PAT_MRT4530_69134C.1
acaaagtaccgtgcattcggattacatatttgtggagacgtgcattgcacgtgcatgattactagtaggagaatctaatcctaaacttctccgtgtgctctattacttttcagcccaataatatacatatctgggggagtaatagatgttccatgtgtcaatgcatcaactaaaataccctgatgaacatgtataagattcttaggaaattacatatggcacacacgccaactttaattttgttttctgcagcatctcagggcattgatttttcatccaagattttgtggcactacgctatatggactggatgacaaggatttgcggattgccaaacaaggacactttgttggattcgcaggaaatgctgatagatacaattgaaactnattgtggctgtggaatgaaacatagatggctgtggtgggggtaactttcatctgttgacataattcagctttcctagaattattcgatgtcttagtacaggacctagcaataccttaaggttactgaaaaatatatgtcgnactttgngcaacgttagcccaaaaaaaaaaaaaaaaaaaa

SEQ ID NO: 68366 - DNA, 358 bp, Oryza sativa
  Clone ID: PAT_MRT4530_69135C.1
gttggtggggatgttcttatactgctgaccacagctgctgctggtcttgctgttagcgctatggctgcttttctgacagtgctgcaggaataggttaattgtgcgctgtgatgccacatgaattcatgacagaactgaggctctgtatgctgccgactacacaactgtctgaatttgaaaggactatgccatactatctgcagtcttggtgcaactatgactctttgtggcctttgtgaggcgcacgggtatatatacaggtgatgttctgacaccataagtgatcattgagcttattgggggagctatgctaccataatggttctaagccccgactatgaaaaaaggatgccacagc

SEQ ID NO: 68367 - DNA, 498 bp, Oryza sativa
  Clone ID: PAT_MRT4530_69136C.1
cccatccgacacggggaagtagtgacaatgaaatacaataccgggcgcctttagttgtctggtaattggaatgagtacaatctaaatccttacgaggatccattggaggcaaagtctggtgcccacagcccggtaattccaagctccaatagcgtatatgttaagttgttgccagttaaaaagctcgtagttggaccttggccggccggccgtccgcctcacggcgagcaccgacctgctcgaccttctgccgcagatgcgctcctgcttaactgccggtcgtcctccggcccgttacttgaagaaattagagtgctcaaacaaccatcgctctgatacattagcatgggaaacatcatagattccgtcctattgttgccttcggatcggataatgataataggcatcgggccatctattcatattcagagtaattctggattatgaaagccgaacactgcgaaaccattcccaggatgtttcatatccaaaaaaaaa

SEQ ID NO: 68368 - DNA, 472 bp, Oryza sativa
  unsure (1)..(472): unsure at all n locations
  Clone ID: PAT_MRT4530_69137C.1
ggacttcggcacgagatttctggcgcgattaanancnnggtatatagtccactngggtttagnntgtaccaaaatattngtttctncnganaaactgaaggnnctcanantgctcncatcatncctacccaagcatatnntccccnatcaggaaacccccancaccgtctacnaaaatngccacttccattttggtccaccaccataggaatntangatncacncntgcncgggtgtgcactgcacccagctgcatatcgtcgtatatttcanaacccgagaagnaccggagccacgggctggtcgctgcagcttctcctccacttcaccaancanccgcggtgtgcggggaaactcatcggatcatacagatgcntgcactctttgccgtcgcccgtgacacanccttctcatcctcnccggnggccgacgaacactccccaacgancaccangcggtcacctctggaaca

SEQ ID NO: 68369 - DNA, 1068 bp, Oryza sativa
  Clone ID: PAT_MRT4530_69138C.1
atgcccgccgtggccgggagcttgtacatggcgagccagcacaagggagtgcctccgccgctgccgccgccgccgcggccattgccggtgatcaacctgggccggctcaccatggacagtgcctcgcgggcgctcgccgtgcgggatatcgtgctggcgtgccgtgaacgtggctgctttgaggtggtgaaccatggcatcagcaggtcttgcatgaatggcgccctcgaagccgcctccgagttcttccagctatcgacggagcgcaaggaggagttcgcgtcggacgacatccggcagcccatcaggtacgacacgagctcgagggacgggatcagcatgtccaggtcatttctgaagcactatgccaatcccctggacgactggatcaagttctggccgacgcagccaccaacttacagggagaaaatgggtgagtacgccgtggagacgcagcgagtgtcaatgcagctcatggaagcaatcctgcagggcctgggattagggccatcgtacctgcaagaaaagcttgaaggaggggtgcagttcgtggccttgaacaactacccgcagtcatcggcgaagaaagccgacaagatcggcttggctcctcactctgattatggcttcctcaccatcctgttgcagagctccccagggcttgaggtgatgcaccatgaggatgatgcctggacatctgtccctgctatccctggggctctccatgtccatgtaggagaccacctggaagtgttgagcaatggccagctcaagtcccttgtccatcgagccgttctcaacccaaacgagtcaaggatttctattgccagcatccatggtctctcgatggatgaagaggtccactgcgccgaagagctcgtcgatgaacaccaccccaaaatgtacaggggaagcagcttccaggacttcctggacttcctgccagcaaacatgaacagatgccaccactctgacaacgacagtggcatgcgaaggcagcagccagcagggaatgcaaaacggcggcgacgtttgcagcagttgaaaggcaaagcaggacaaggttga

SEQ ID NO: 68370 - DNA, 168 bp, Oryza sativa
  Clone ID: PAT_MRT4530_69139C.1
atggcgctgcaagcctgcaacagccactggagggagggagtcgggaaactacaggagacccacgccgtccccgccactcgctgctctccgcccgcggaccacgccatccccgcctcctaccatatgaagttttgtgaaggtctggtatgtacaagagggataacttga

SEQ ID NO: 68371 - DNA, 348 bp, Oryza sativa
  Clone ID: PAT_MRT4530_6913C.1
atgggttgggagtggggcagtgatccgtgggtgtgggtatcggtggcttcccattggctggggttttggtggggtggatcgatgggcgcgagaacggggaggcatcggacggacggtggagatgggttgggagtggggcagcgatccgtgggtgtgggtatcggtggcttcccattggctagggtttgggtggggagtggatcgatgggcgcaagcaccggaaggtgtcggatggagacggacggtagagatgggttgaaagtggggcagcaatccataggtgtgggtatcagtggcttcccattggctgggcttcgggtggggtggattgacgggcccaccggttag

SEQ ID NO: 68372 - DNA, 2142 bp, Oryza sativa
  Clone ID: PAT_MRT4530_69140C.1
atggcgagcgcgtcggtgccggccgccggctacggcgcggacggcgtgtaccgctcgctgcgcccgcccgcgcccgtcgcgtccgacccgggcctctccctcaccgacctcctcctccgccgcgccgacgcctgcccctccgcggtcgcgctcgccgacgcggccgccggcggccgcgccctcaccttcgcggagctgaggtcggccgtcctctccaccgccgtcgcgctctcctcccgcgcgggcgtgcgacccggcgacgccgtgctcctcctcgcgcccaactgcgtgctctacccggtctgcttcttcgccgtcaccgccctcggcgccgtcggcaccaccgtcaacccggactacaccccgcgggagatcgccaagcaggtctccgacgcgcgcgccaagctcgtcatcaccatctccgccctggtgcccaagattgcggggctccgcctccccgtcatcctcctcgacgacgacgcgaacgccgcggccgcctccttgcctccggacgccaccgtcacgctctacaccaacctcgtcgccggcgtgaaggaggcggattaccgccgcccaccaatcaagcagagcgacacggcggctctcctctactcgtcgggcacgacgggggatagcaagggcgtcatcctgacgcaccgcaacttcatcgccgcggcgaggatggtgacctccgaccaagacgagcgccgggaggggcccaacgtgttcctctgcttcctccccatgttccacatcttcggcctgtccgtcatcacgtacgcgcagctgcatcgcgggaacgccatcatcgccatgtcgcggttcgacatcaactccctgatggaggccgtgcagaggcaccgcgtcacgcacctgttctgcgtgccgccggtcattatcgcgctcgccaagcacgggaaggccggtaagtacgatctcagctctctcaagttcatcggctccggcgccgcgccgctcggcaaggatgtgatggaggtcgtggccaagaaattcccggacagtgagattgttcagtgggcattgaactggttcattcgtaaactagtcctatcagatctgtttggatcaatttggtatattccaactgttctagactcaagaggtgtgcaggcatttctaggttatggtatgactgagacttgtggaatcatatcgctcgagtacccagaaaaaggacaggctcgtgaatttgggtcaactggcacgcttgtctcaggagttgaggcaaagattgtcgacataaagacattaaaacatctaccgcccaatcaagtaggagaaatttgtgttcgagggccaaatgtaatgcaagggtatttcaacaatgtgcaagctcctgaatttacaatcaagcaagggtggttgcacactggtgatcttggatacttcgacggaggaggccagctttttgttgttgatagacttaaagaactgattaagtacaaaggtttccagattgcacctgccgagcttgaagggttacttctatctcatccagagattctagatgctgttgttatcccgtttcctgatgctaaagctggggaggttcccattgcctatgttgttcggtcacctgacagttcattgacagaagttgatgtccaaaaatttattgaaaaacaggtggcgtactacaaaagattgaagagagttacctttgtgggcagcgtgcccaaatcagcttcaggaaagattctgagaaggcagcttatcgcccaattagggataggacattacctctccaatgaatgtctcatccctgcaaggtcaatagtgcagcaagcggcaaaaggtagtggtagcgatgtgtgctacgctggcagccttgctgcacgtgtcatcgtggaggacgtacgtgtaggcaggcgtcttgatggacgagctcctcggctcttctacgggtccggtgcttgtgacttgggagagatccgagagggtaaaccggccggcgagaaacgggaggaggcagcttgcgagcagcaggggtgcatgcctcttgcgggacacgagcgaaaatgccgtgcgcgtggcgcggaccgaatagttgatgggccgaataccggcacgagagggccgtggtttagcgggcccctcatggaccgtagtttggccttttag

SEQ ID NO: 68373 - DNA, 343 bp, Oryza sativa
  Clone ID: PAT_MRT4530_69141C.1
aaactgaaaaattggaccgaactgtaagagttacattcattgcttgaatataaaaacgttggaaacaaaacaatttgggtccatttgagggttagctaaagatactgataaaagtcacagctaatcaaatttggggctgggttccttaaaagctaagcaaagtgccaaaggggggggagtatcccagagttttggagaaatccaacacgatcacgcccgggctttagccggagatctggatggacttgacgttgggctttttggggttttccttggcatggggggccttaaggaccgttttttttttggacacatggattttgtttggaggaaccgggggtcc

SEQ ID NO: 68374 - DNA, 426 bp, Oryza sativa
  Clone ID: PAT_MRT4530_69142C.1
cccacgcgtccgcccacgcgtccgcccacgcgtccgcccacgcgtccgaggacttggaccagttcagcaggcagtgctttaagaagatgctgtgagcttgtgactactatttgtcattgttttaaaacgagcaaaaatgaccaagttttagtatttttgttttcacagtttgtactgccaactgtgcatagtatgacagctactcttgcttatccaggaaaactaatgaaaaacgatgagttatattgttttcatagtttacttttcacaatttatagtgccaagtgtgaaagtatgacagctacttttattatatcttaccagagtaatgaacttggtcacttggacatggtttgatattttgatcaggctttatctctcggttcacttacctaattatcttaagataccataagatttttatgg

SEQ ID NO: 68375 - DNA, 402 bp, Oryza sativa
  unsure (1)..(402): unsure at all n locations
  Clone ID: PAT_MRT4530_69143C.1
gtcgtcgctgccgtcctcgcagaggacggacgaagaggagccgcagtagctgtggcaatcctcctcctgggtcgcctccatgggggcggcggagcgggctaaggcggatgcggctnctnctnanaaatnggagcctcctcgcctcgccctatcccaccaagcccacgtacgcgcacacgtacatacggcgatgcagaagtcgaagcagcctcagacagagccgtagacgaagatccagaaccggggcgtgcggaagctgccgtcgatgaggtacgccgccgagatccggaacccgactaagaagaccccgatctggctgggtaccttatactccgccgaggtggcagcccgcacctactacgactcctaccgatctctccgcgggcccacagagcggaccaa

SEQ ID NO: 68376 - DNA, 198 bp, Oryza sativa
  Clone ID: PAT_MRT4530_69144C.1
gtgcagaccaacctctacgtacattatattgacggcatcggcaaccgggagcaagaccggttcgaccccaccgcccaccggcgacttctgcacctctgcccccacaccaccatgaagctccacatgggggcatggcgctacccatatatacacactgcacgcgccctggcatcctcggttggtgaggacagggaatag

SEQ ID NO: 68377 - DNA, 2295 bp, Oryza sativa
  Clone ID: PAT_MRT4530_69145C.1
atggacgtgatcctgcggtccggcacgccgtggaatagcggatggcatttagggaaggacgacggttaattaggactaccggattgcgcgcaaaggcttgatcagaattaatccatttaattctgctctgccttgcaaggaactttgcctgcaggcttctccatggattccaactccatccagcgtttggctggcaaggtggctatcattaccggtggagccagtggcatcggaaaggttacagcaaaggagttcatcaagaatggtgccaaggtcatcatcgccgatgtccaggacgagctcggccactctgcggcggccaagctcggcccggacgcctcgtacacgcactgcgatgtcaccgacgaggcgcaggtcgaggccggccgtggagctcgctttgagcctccacgtccaccacgacgtgtgctacgggcacgctcgccggaggccaggccgggcgccgcccctccgcgcctccctcgcccgccccggatccatcctcgaccggcggcggtgtcaccgaagcggcgcaggcgcgcgcctcgcgccccccgcgcgtgagggcgccgcgccgcggccaggtacgcggacgcgatgcccgcgccccgggtggcatggtgggcccgaacatcgccatgtactccgtctctcgtgcgaccgccatcgccatcgtgcgcgccgcggcggagccgctgtcgcgccacggcctgcgggtgaacgccatctcgccgacgggcaccaggacgccgatgatgatgcatatcatctcccagatgacccccggcgtgggcgaggacgacctggagcggatggcggacgccgccatcagcgccggcgtggccatcgagccggagtacgtcgcgagggcggcggtgtacctcgcctccgacgaggccaagtacgtcaacgggcataacctcgtcgtcgacggcggcttcacaacgcataaaggagacgacaatcgcatgaattaatgacacacccaactaattaatcgatcgaacacccttgttcgtcgactcgtcagaataataaggttgtggtgcatatgtacgtgcattgcacttgatagtgcagcggcaaggagtgtgtccctccaattctcgtttttttattcccgaattttggctaatatatatgttctcagagttataaaaacaaagataatatttttttataaaagaaaagaaaaccgtggacctcgctgtgaggctccacggccacctcgacatcctctacaacaacgctggcatcatcggcgccatgccgcaggacgacatggcgtccgtcgacctcgccaacttcgaccgcatgatggcgatcaacgcccgggcggcgctcgtcggcatcaagcacgccgcgcgcgtcatggcgccgcgccgcagcggcgtcatcctctgcacggcgagcgacgcgggcgtcatgcccatcccgaacatcgccatgtactccgtctccaaggcgaccaccatcgccatcgtgcgcgccgcggcggagccgctgtcgcgccacggcctgcgggtgaacgccatctcgccgacgggcaccaggacgccgatgatgatgcatatcatctcccagatgacccccggcgtgggcgaggacgacctggagcggatggcggacgccgccatcagcgccggcgtggccatcgagccggagtacgtcgcgagggcggcggtgtacctcgcctccgacgaggccaagtacgtcaacgggcataacctcgtcgtcgacggcggcttcacaacgcataaaggagatgacaatcgcatgaattaatgacacgcccaactaattaatcgatcgaacacccttgttcgtcgactcgtcagaataataagggcaggtacaacgcactgtcccttgccgtagacatgcagaaaaaaattgcaaacacccccccgcgaccatcgttcgatgcaaagccggcgtctggttcagctacggctgtggctcgtggtcctaggcgcggggacatgcgacgtgaggtgaagaagtctttttacgttggaaaattaattaccctgtagacagcagctgtccacactgttgtacaaaatgtcttttcagctgtctgtttgtgccaaaagacagcagctgtctgcattgctgtacttgccctaaggttggagtgcacatgtacgtgcattgcacttgatagtgcagcggcaaggagtgtgtccctccaaatctcatttttttattcccgaatttcggcttatatatatatatatatatatatatatatatatatattgctcagagttataaaaaaaaaaaaaaaaaaaa

SEQ ID NO: 68378 - DNA, 465 bp, Oryza sativa
  Clone ID: PAT_MRT4530_69146C.1
cccacgcgtccgcaattatttccaaaatatcaagcgtcgaaaagttaatatctaaattttgtgctgtctatataaccatcgtaaaacaaagaagaagcaccggccgggaagccacagcttcatacaaagcaatcacacaaatgggcaagcagatgccgaactgtagccgaggacttctgcttctgttgttggcccttctaggctgttttagcattcctggccatgtgtatggtaaaaatctggattacaccaggagtgcatccatgaatgaaggacgcaacaatgtcaatataaatggtttggtacccgtaccatgcaacattttctccccatcgaaggtttgatgtagaaatgtatgctaccctagcttgcaagcctgtgaggcaaattgcaagccaattgtttgatcggcttatcaagcctgtaatagtaaagaaatgataataatattatccgttgttcacg

SEQ ID NO: 68379 - DNA, 1167 bp, Oryza sativa
  Clone ID: PAT_MRT4530_69147C.1
atgatgcagatcttctccgtcaggatagctgctctgtccgccgccgctgctccggttcagatctatggctacatggctgcccgggatctctacgaactcctgcgcaactacgtcttccgccgtagccgggacgaccccttcgtcttgccaggacactactccgatcccgattcactcgtaagtttgtggggtcctaagcgagacacatctcgttgcagaattcctccatgcatgatcgagtacgacctcaagatgaagagaggggaggaggaacaggacgacctgcagctcatcaatggggtggccgccttcagcgacctctcaccgtttcacggggtgtactcacaacggatccatggcgtccatggcgccgtggacatcagcttggcgctcctccgcgaagggatggaatgcaccattgaaatcagggtccccaaggagcagccgatcaagaacgccgtccacatcgtggagatcccggtcaccggcgacggggcttgtcctgatggcgggaacgcggaggtcgccgcgtttcttgacaaggcggcggaggcggagtcttccgggagccatccgcttggcgagatcgccgggagcgcggggcacctgctgctgctgaagctgtggcagcgggaggagtcccgcctcggccgccgcgcgtgcgcgctcgaggcgctcatggacgcggcgcgccgcgacgcgttctacctctgcgcggccttcctcgccttccacggcctctccctcgcgctcctcttcgccgcctccgtgtccgcgtccgccgtctcgccgcccgcggagcagcgcgccgcctgttgcagcaggtggtgggtgccgtcgtccctgtcgctggtcgcgtccctcgcgctcgcggcggccgtgcagctccgggtctgcgcctactggcgcgcgtcgcggcggctgcgccgggagcgcggcgacgcgcgcgcgctggcgcggtgcgtgcaggagctccggatgaagggtgcggcgttcgacctgtccaaggagccgcagtacggggtgacgagggccaagtgcgccagcgtcgagggcgccggtgcgtggggcccgctccggtggtgctaccagaacatcgtcgccgcctgcctgctcgccgtcgccgccgccaccatgtgctccggcaagttcatcttgtgctcgtag

SEQ ID NO: 68380 - DNA, 113 bp, Oryza sativa
  Clone ID: PAT_MRT4530_69148C.1
ccgtgaacaaaagtaccgacccaaccctgcctacggccggtatctcgggacaggcaggccaggattgagccccgagcaacaggatctagaccgggtgcgccacacgcataagg

SEQ ID NO: 68381 - DNA, 749 bp, Oryza sativa
  Clone ID: PAT_MRT4530_69149C.1
aggagcagccgatcaagaacgccgtccacatcggggagacaccggtcaccggcgactgggcttgccctgacggcgggaacacggaggtcgccgcgtttcttgacaaggcgggggcggaggcggaggcggaggcggaggcggaggcggagtcttccgggagccatccgcttggcgagatcgccgggagcgcggggcacctgctgctgctgaagctgtggcagcgggaggagtcccgcctcggccgccgcgcgtgcgcgctcgaggcgctcatggacgcggcgcgccgcgacgcgttctacctctgcgcggccttcctcgccttccacggcctctccctcgcgctcctcttcgccgcctccgtgtctgcgtccgcgtccgccgcggtggtctcgccgcccgcggagcagcgcgccgcctgttgcagccttgcaggaggtggtgggtgccgtcgtccctgtcgctggtcgcgtccctcgcgctctcggcggccgtgcagctccgggtctgcgccgggagtgcgcacggcgacacgcgcgctggcgcggtgcgtgcaggagctccggatgaagggcgcggcgttcggcctgtccaaggagccgcagtacgggggtgacgagggccaagtgcgccagcgtcgagggcgccggtgcgtggggcccgctctggtggtgctaccagaacatcgtcgccgccgccaccatgtgctccgacaagttcatcttgtgctcgtaggccggaggctaaggtaa

SEQ ID NO: 68382 - DNA, 266 bp, Oryza sativa
  unsure (1)..(266): unsure at all n locations
  Clone ID: PAT_MRT4530_6914C.1
gcggacgtgtcagngnacgcgtgggcggacgngtgggcggacggtgggcggacggtgggcggacgntgggcggacggtgggcggacggtgggctcttcccgatccccccaacacccaaaccctaaccctcgaagcgacgcaacccaccggcggcgatggggcagggcactcccggcgggatggggaagcagggcggccttcccggcgatcgnaagccggggcgacgnnggcgcngcgacaagaaggaccgnaagttcgagcccccc

SEQ ID NO: 68383 - DNA, 600 bp, Oryza sativa
  unsure (1)..(600): unsure at all n locations
  Clone ID: PAT_MRT4530_69150C.1
tcgtcgttggccttcgtagtctgtgctttgtcgtttctgctgcgagcgagccaccctccggcccgccgcctgccccgcaacaccatacgaccgcgcgagctagcgaggggagcagggcgacatgggcgcgagctgctgcttccaggggataaccttggcggcgcataggatggagctttntgaccagagccaggaggccttactgatgccataagtcagcgggggcacgcgtgtcctatgctggagactactgcttcactgccctaatgactctatgatgacagccagcctacgactagggctggcatttataggggccaccaatgctttgcctaatatgccgatgtttccgagctactaactgactctggagagctctacaagggtggattaggtgacttgctcgaactacatgactggggtccagtagagttctctatcatggtctaacattctgattcggatggccaaccactgtatgcgtatactgcgcagtacatggtgcaccttctcttccatgggctgctcgatggatgcggataactgcgcgatgagattatacttgcggttagcattgtgatgacacctggtgtaaactgt

SEQ ID NO: 68384 - DNA, 2302 bp, Oryza sativa
  unsure (1)..(2302): unsure at all n locations
  Clone ID: PAT_MRT4530_69151C.1
atggctcccttaggtttccgggcccagccatgggatttcatccccgcccacgaaccactcttctgcatcggcagggcctgtttgcacgggaaggttccgcatggaccgggcacgtcatccatgcttggaagagcaaaggagagtttataccggaatccagctgcaagaaacttttcagttctctcaacatgtagccagaatgcatttcatggtcaacttgcttggaagcaactcatgacaatcggttctcatgtaccaaaggcatctccgattttaagtagggttgcttgtgccattagcttggctgccactagatctaatttagttccttacctctttgctttcgttgctggggagataatgctagctcagaagaccagtgcagacggagagtacttaccaattcgtgatagtctttacacgcgtgctcaagatggtcgtatctatgtcacctccttgatattttcagcagtagagctggtcatcataatcttcagatcaatatatttggcattgttgttcactccaagtatactcatggccccatttgcagatactcttggcagtaagtacaggaaaacatggctccgtcttgtgcatcgtaccctggagaaagcaggtcctgcatttattaaatggggccaatgggctgctactcgccctgatttatttgaaagtgacctctgtgctgaattgtcaaaactacacacaaaagcacctgctcacagctttgcttataccaagaagactgttgagaaagcttttggtcgaaagctatctgatctttttgagaattttgaagaagagcctgttgcttctggaagtgttgctcaagtgcaccgagctggtttgagattccggtatcctggccagcatataaagcgtgtaacagttgctgtaaaagtaagacatcctggcgtaggagaatcaatacggagggatttcactatcattaatgcagtagctaaaatttctagatatattcctacattgaattggttgcggctggatgagagtgtgcaacagtttgctgtctttatgatgtctcaagttgaccttgcaagggaagctgctcatttgagccggtttatctacaacttccgaaggtggaaggatgtgtcttttccaaaacctctttacccacttgttcatcctgctgtattggttgaaacttatgagcaaggtgagagtgttgcacactatgtcgatgacctcgatggacatgatcgaattaaaagcgcccttgcacatattggcactcatgctctcctgaaaatgcttctggttgataactttgttcatgcggatatgcaccctggaaatattttggtccgtgttatacaaccaaggaattcaaataacacccttttgaagtctaggccacatgtagtattccttgatgtaggaatgactgctgaactttcaagtaatgatcgtgtgaatttactggaatttttcaaggctgttgcacgccgagatggtcgtacagctgcagaacgtacactgaggttatcaaaacagcaaaactgcccaaatccaaaagccttcattgaggaagttgaacggtcgttttccttttggggaacctctgaaggtgatgctgtccacccagctgagtgtatgcaccagttgcttgagcaagtacggcgccataaagtaaacattgatgggaacgtttgtactgttatggtcactacattagttcttgagggctggcagcgcaagttggatccagattacaatgttatgaaaacattacaaactttactttttaaggaagactgggccaagtctcttcagtacacaatcgaagggcttatggcaccttagggatgcattggaatccactaaaaaattttgaccccttttttgcgcagttgatgagatattggaggatgctccttcgcaccagtacatctagtttctttttcctgtttacttttaaattccancagttttgtacccatcttggccagtgctgcttaaacggccatgtctaattaataattgcagcattttttcaagctaccagagaagtgtgctctggacccacaataccctgggattatctgcttatgcactctgcaggcccaaggatgcgttctcctccatgaaatttctgttaatagctcttagaagatgtagccaaaggccttcgctgatgatctttttgtaactcgagaggtgtcagtgaaccagaggttttttattgtatacacagatacagctaactgttcccaaaaaaaacctacgtcatgcctgacaaattcatggattgccccaaaaaaaaaaaaaaaaaaaa

SEQ ID NO: 68385 - DNA, 2226 bp, Oryza sativa
  Clone ID: PAT_MRT4530_69152C.1
atgggcccaccctgcgaggcccaatcccttctctctctctttgcgcgatttcttcttcttcctctcgaacgaatccccttccccttccgctcgactccaactccggcgctgctccattctcggcggcgcgagctgcgaggcgtgggcggaatggaggggcatcgccgcggcgaagcggacgacgaggaggaggagctggggctgcgtctcggcctcgctagcgccggcgcttccgccgcggcggcggcggcaggcgagccgccgtcggtggggatggagttcccgacgtcggaggcggccagggagttctactgcgcctacgccgaccgcgccgggttcgccgtgcgcaccgacaagtcccgccgctcccgccgcgacgactccgtcatcatgcgccgcttcgtctgcacccgcgaggggttccaccccaccaggcacgacgacctcacggagtcggaggccgccgccgggaagaggcggcggaagcgcctcatcatccgggaggggtgcatggccatgtgcgaggtcaccaagaaggagccccccttgcgctgggtcgtcaccaagttcgtcgcccaccacgtccaccccgtctcgctcccgctctgcccccgccctcctcccgccggtgagtccgatggtctcgccggagagcacgccgcagcattggatgaacctacccaagccgccaccgaaccctcggacgaacccaccggagctcctgctgcagtgggcaatggggcgcccaatggagggccatccttctgcaataggctcgtcagagcgaatccagctggggtgcgtgccgaggtgcaagatttgctcgattacctcaggaagatgcaggccgagagcccgggattcttctacgcgatgcaggtagatagcggcaattgcgtgaccaatgtgttctgggctgatgcaaaggcaaggatggcatacaagagctttggagatgcagtgacatttgataccacatacaggaagaccaagtacatgatgccgttcgcggtgttccggggaatcaaccatcatttgcaggggatcatattcgggtgctgtctgctgatggatgagacaaagagttcatacacctggttgtttgatacatggcttgctgcaatgggtggccgccaacctgatctgctggtgacagaccagtgtaaggcgatggaagcaggaattgcgagggtgttgcccaacacccgccatcgtttctgccagcggaacattttgagcctatgtaagcagaagttgtctgctgtgtatatacagcacatcaacctgaaagctgatctgagggaatgtgtctttgaggctgagacaattgaggagtttcaggctcggtgggactatgtcatccataagtataatctcgaggagaacacttggcttcagtcgttgtatgacactcggcagcaatgggcttgggtgtatcagaagggatccttctttccagagttactcaagtcgcaaagatctgagaggctgaacaagttttttaagacgcatttcaacatgaagactccactgcttgttcttatctctaggtttgatcaagtgatggcgttgagtttcgagaaggaagctcaagcaaactttgtgacagcatattcaaagcctaccctgaaaactccttctgtaattgaaaggcaggctgcggccatctatacaagggcagtgtttgacatatttcaggaggaatttatcgaatcgctaggctatcatgctgataaaattgaggatggagttatcctcaagtacaatgtggccagtgaggaagaaaatggccggggctatatagtctctttcaaccagctggacaggaaagcagagtgtacatgttgcaagtttgagtacgctggtatattatgcaggcatgcgctaagaatcttcttcatggtcggggttcggaatctaccggaggaatacatcatgaagaggtggacaatggatgctgtgagtagtgttgtaccagacgagcgatcgttggagactggagttagctttcctgagcgcctagttgcttggtacaacgatctctctctcgacggtttgacatacggaatgagaggagccatgtcaccagaagtttacaaggttgcaaaggctgcacttcagaaagcatttgatgatgtcttggctgcgaaatatcagcaaatgagtgagcatcaggacatgcctttgccaaagtcgcaagctaaaaggacacatacaagagcatag

SEQ ID NO: 68386 - DNA, 324 bp, Oryza sativa
  Clone ID: PAT_MRT4530_69153C.1
atggcgccacagcttccggcgggtgctgatcgccgggaaccggaggccacgttgggggcagtcggcatcgccaccgtctccgcggccaccgccgctctggccgcagcgctcgagccgccgccgggtagcctcgtcgccgacaccttctaccgcctcacgctcaccggggccttccttggcggggtcgccctggtcggcgcttcaatctgggtggccgacaacccggccgcccgccgtgccgccggcaagaagctgctatacaccgccgtcccgccgctcctcgccgccgtcgggatatcggtggcggcgctgctgtggctttga

SEQ ID NO: 68387 - DNA, 696 bp, Oryza sativa
  Clone ID: PAT_MRT4530_69154C.1
atgcagaggcatcagtgttcgatcttccacatatcacaaaaaggaggagggaattggggcaccggccggtatatgaacttggaacaatttccagcacaacaacatcatatttcaggaggagggggagggggaggaccatcggagaagaatatcctaggatgggagtcagccggcaacatcaccaatgaggaggtcgttgaggcccaaggaggaactgaaagctctactccgttcctaccatatatgccaccggtgaagcaaccttgctgccgtgccaaggacaaagacggagcggcaatgctgcgtgggatgctgacgctcgggacggggatgaggcacactgccgcccgctgcatgcacagcggcagctggcgtcaccgcccctccgcgcagcagaagctagcggcgctcctccgcgcaggcagcagccggcgctgcaatccctcctcctccttccctctttccatgcggcagcaaccgacgcagccgcctttcctcacagctgcagccgacgccaccgctgctccgcgcaccgacgccactgcttcctccgagcgccaacgccgctgctccctccctcctcgcggccgccgctaccactcccacggcacgtggccgccgccgccgccgccgccgccgccgctccctctagcctggccggccgcgactctctccgtcactggtgacaaaaactag

SEQ ID NO: 68388 - DNA, 430 bp, Oryza sativa
  Clone ID: PAT_MRT4530_69155C.1
gtcacgctctacggcttcgacttctggttcatgggctgggggaggttctaggcgtccctgcaggagctggagaaggccgtcgcgcagtcgcagtcgcagtcgcggtcgcaatgacctgaggcgatccgccggccggcccggcgtttgttgtgctcctgtgtcgcctgcttcatctgtgttcatatgtagtagggtttcggttttcttgatgatggattgcttggcgttcttggcattggagcaagtccggtatacattgattatacaggagaacaaaaaatgggatattagattgattacgtgatcggtgatgctgagtaaatcttctacggcgccagcgtaaaagtgtcttcgatgaggtttacatgtaacatgtgtcatgaaaaccacaaatgcttgtgcgacgaaatagattgtggtaactgaactc

SEQ ID NO: 68389 - DNA, 361 bp, Oryza sativa
  Clone ID: PAT_MRT4530_69156C.1
cccacgctttttgttttcttatcctccccctcccggttcggatcgggtcgggtccggattcgatttcgatattttatcttcttaccggggtcggtgggaaagcatggcgacgccgaatgttgagtaccactgcttcatcatgcggtctcgcctgggccaccgacgaccgctctctcgaagccggcttatccaccttcggggagaccctcgagaccaatatcatgaacgatcgggaaacggggaggtcagcgcggattcgggttactgaccgttctcgagcgagcaggccatgcacgacgccattaaggggatgaacgggaaggagctctacggccgcaacatgaccgagaacgaggcccaa

SEQ ID NO: 68390 - DNA, 145 bp, Oryza sativa
  Clone ID: PAT_MRT4530_69158C.1
tcgggaacgtgcgatgaggaaggcggcggctgaagaggaaccgttgaccacatggcagaaactgtgtacaacaacggctgagcgtacgccaccaacttagtaccgggcaagtgaagtggggaaccgtagcttaacaacggttaat

SEQ ID NO: 68391 - DNA, 398 bp, Oryza sativa
  Clone ID: PAT_MRT4530_69159C.1
agggggggccttagcattcaaaactgattttataaaaaacttttacaggacataacaacaacccaattgcttgcaatttatttatttattgggggggggattctttatccccattgccaacttaaaaggattcccccacattataaacctcttgggagctcttgtattggaggggggggaatgcccccaactcatctcctctgttatgcttgagcccctgagcctttttttttgagaagcgatatgcatttgctaaaacatcaattgggagagcaccgaaaaaggaactctttcctgcaatggggcttaccaaaaaattaggggttgtcttaaatgcaaaggaaacacatccttttttttgggccttctttacaaccacataggggtgggggacaaaa

SEQ ID NO: 68392 - DNA, 853 bp, Oryza sativa
  unsure (1)..(853): unsure at all n locations
  Clone ID: PAT_MRT4530_6915C.1
ccccccgttnccatataaccctttttgtgtggnccgcaccaaanttagtccgttggggggaatggcgtcttaatataagggggggggccccaaccccgcgcccgggatnccggctccccanccccccgcggtgttgttgttgggttgttctggcgtgtgaagaatggntgttgttgttcccccaacnttgaaagtccntggtgaacccanattgtgccaaattgtnccttatgatttgagcgttcccacgtgtggtcctctgtggaacnttganncgtcccacgtctgtcacgatgtgcacccacgtccacngtggtgtcccacgtgatgtctcacgtccacgtccggtcacagcccacatgtttccgcccanagggagacgtcacggtacccacggagaaagaaggtacacacgtgtaatggtataaaagttagtcgtaacccccacttgggaggaaaagtgccgcgtgcgtgcttgccntgctgtggtgttttaaagtatccgctgacccgcggggccacatgccgtgggtttgaaggtaggtagggtataggtttaacggaagtataatgtatgatgtggtggaagaactgagaagaacactgctttaagctaggggaaccccgtgccgtgtgtcccgtgtcgtgttgttgtgttgtgtcgtccgtgtgtcacgtttgtttggtttgtcgtgtcccactgtgttgtgaagtcctgtagccacgtgtgcccccgtaccaggtagtgttagcgtgcgtcccccgtggttgttttggtgttgctctttcatcatgtaaatccnatccccatcncaatgaaccctctttccttcaaaaaaaaaaaaaaaaaaaa

SEQ ID NO: 68393 - DNA, 436 bp, Oryza sativa
  Clone ID: PAT_MRT4530_69160C.1
acttctatgccttcagcaattggacacaaatatggtggacacacttttacccttacacaacccgtttgttccctgcacactctacagtagaagtacataaccagatgcgctatggtagtgggacttgtgttggtcccccttgccctaccccttctcttacctgagggctttggtttggagggaattgaagagaattggaagggattgagcgagaataattccacaccataatagatatagaataaatcctgtccaatccctcttttatggggattaaccgaataaggcctaaggcagaggcggcgagtgccctgtattgctgtctattccatctcgagcggctctacgctaccaggtccacaaccgatcacggtggactataatttgccatgccttcaaactcaatgaactttcttttcccctttcccccaacctt

SEQ ID NO: 68394 - DNA, 471 bp, Oryza sativa
  Clone ID: PAT_MRT4530_69161C.1
tttttttttttttttttttttttttttttttttttttttttttttttttttttttttttttttttttttttttttggggggagggccttagcattcaaaactgattttataaaaaacttttacaggacaaaacaacaacccaattgcttgcaattaatttatttatttatttagttattctttatccccattgccaacttaaaaggattcccccccattaaaaacctcttgggagctcttgttttgggggggagggaatgcccccaacccatctcctttgttatgcttgagcccctgagcctctttttttgaaaagcgaaatgcatttgctaaaacaacaattgggaaaacacggaaaaaggaaccctttcctgcaatggggcttaccaaaaaataagggtttgtcttgaaagcaaagaaaacacatccttttttttgggccttttttacaacaacaaaagggtgggggac

SEQ ID NO: 68395 - DNA, 216 bp, Oryza sativa
  Clone ID: PAT_MRT4530_69162C.1
atgacgtacgccgcaggaggagtgccgcacgcgcgtcgcgtcgcgggagccagggaaatcggccgcaccgcccgcacgctgcaccgcctcgcggcggtttttgcgatcaaacggagggacaagtcggcgcgggtcgacgcttgttgtgcggagatcgtcagccgcgcgctgctgctggccgcggagaaaagagaaatcccgtggaaaatgtggtag

SEQ ID NO: 68396 - DNA, 2406 bp, Oryza sativa
  Clone ID: PAT_MRT4530_69163C.1
atgggtatctcaagtgccatccaatggtgggatgagtggcagctgcgcattctcgcactgagcagcctacttgttcagtatatcctcctcgtcatggctcctcggcgtaagtttcctatgaaattctacctgagatacattatctggcttgcataccttagcagcgatgccctagcgatatatgctctcgcaacactcttcaatcgacataagaagcaggattatggccatgcacacaacacgagcatcctagaggtgctgtgggcacctatcttcctgatacaccttgctggacaggacagcataaccgcgtataacatcgaagataacgagctgtggacaaggcacgccctcacatcgctgtcccaaatcaccatagccatctatgtgttctgtaaatcatggccaggtggtgacaggaggttgcttcaggcagcaatcctgctcttcgtccctggtgttctcaagtgcttggaaaagccctgggctctcagtagtgcaagcattaatagtctagtgagctctcccaagaatgttcggaggacgacaaacagagaagtaaagaaagatccgattcaagattttatagacaaggtaaatgaatctcgtttggaggatggtcgctgggaagaatcaagctctcctgccgactttaagcccagtgagctatttgttgaccttgcatctccttcttccgatgatcggcttagtaaacttttgtcattcttacaacgtgaaggagatgaatcgtatattttgttgcagaaaagtctgtatgaaaccttcgatcttctttacaccaaagaaaagatgtttccaattattcttagtgctctaaagagacaacagaattatgtgaataccaatgttgacaccgatgagggaaagaaagagcaagaaactttaaaagggttttgcggttcgatgctgcgaggattacttccgtacttgtcctttgtagccatcggcctgttccaccaaagtcacagaaaagcttataatcacactgatgtcaaggttacatataccttgctttgttgtactgctgtcctagagttatacggacctaccttacagaaaatcttgacctcagggcaagcaagggttcaaaaaacgagttttaatatgaacagccctaagtcggtcgggaaagtaaatcatgctaaacatgatgtccaagcgaagtcaaaggccaaaggaaagctaccagtatatgatatcatggatgacatggtctcccaatatagcctattaggatactttgtccgcaacagaaaacattccgtgataatgggtgttgcggaattcctcagttgcaaggattatctcgaccaacgttggagaatgaagtcctgttcctcctcgcgcaacattactaacttagttcttggacatgtgaaacgttggtggaacgatgaaataactaatgtttcctgttacaggaagttcaatgataacaggggccagtggactcttgaatctgaggtgttccttcagcaactaggctggagcttagagggtgcattcgatgagagtgtccttctctggcatctcgccaccgatttctgctactaccacatctgtggatctcatgactgtgaacatgctacaaaaacgtgctttcaaggcacctctgatctcaaaagtgaaagtccaactttctgcgaagaatctattcaccaaggaagagctgttcattgccgagaaatgtccaactacatgatgtacctacttgttgtgaatcctgagatgctaatggcgggcagcaggcgaaacttattcacagatgcctacaaccaactgaagggcatgttcaacaagaagagtacaccactgaatgaaggagaacttgcagggacaataatcagtgaggtgcaggtgcatgtgcaacagccaatcaaggagaaaaccatcgaagacaagacaccagcaccatccaataaaacagggctcatagacgacgcttggtctatagctgaagtgctcctgaatttacatgacgaggagaagatgtggagagtgatcgaaggcgtgtgggtggagatgctctgcttttctgctgccagatgccgggggtacttgcacgctaagagccttggcaccggagtcgagttcctgagctatgtctggctgcttatgcattacatggggatggagaccttggcagagaagctggccagggcagagctcccaaacggagcatgctcaggtgattcacgcactacccatgctgaacactcctctggtaaagagcaggttgctggagcatcctccaacgatggcattacagttgttgtggacaaaaatgggtgatttatatattgcttaaaagaccaacccgttccagtatgctgcttttatttgcttgttgaatgcttatatgtatcagttttcttacgattcaat

SEQ ID NO: 68397 - DNA, 2912 bp, Oryza sativa
  Clone ID: PAT_MRT4530_69164C.1
atggctcgtccgccacgacttctccttcgaggacgcccatggcacgtcctcccctcctcgccctcgcagccgccatcttcgccgccgcctcgcgcttccgctgatcgctcctctgctgctgcagatctcgacctcgggaccggccgctccggcgagcactccgtgcaccgcgtcttcctcgaccccggcgggaagcactgcgtcgccacggtggtccacccggggggcgccgagacgtactaccaccacgccaggtggccgcgccccaagctgctcccccgcctccgcaacgtcctcgtcaatgccgtcgcgtggaaccgccaaaccatcaccgaagcgtcgaccaaggaggtgatcctggggacagaggatgggcagatcttcgagattgcagtagacgaggccgacaagaaggagaagtatgtgaagtcgctctttacgctctctgagctgcaggagggcttcacgggactgctgatgaagaccgcccaggttgggaagagtacaatgatctctgtgaatacgctcaccctatcactgttcaactcaatcgcgtgcgtcgttgcattagtatttgttttatgaagctattctattcataagctgtagttcttgcattaacggtggacttagagcttgcaaaagcagaagcagataatgttgaagatgatgaagaacttagaaagaagctgtggcttaaggttgcaaagcatgtcattgagcaagagaaaggagtcacacagctctacaagtggggatgagaactttgtcgaaaataaaggtttttttgactactcaaaattgggagaatctggtatcaagccaaggtcatttgcattgtctgaattccattttctgcttctcatcagggacaagattaaggtagtgaacagaatcagccagcaaatagtggaggaacttatagtcgatagggcacccaaaattacaaaaggaattggtgcccttgctcagagatacactgtaatgcttcgtgaggaggaatgtggggtgtgcaagcgcaaaatattgactgctggaggactagcacaaggtaggaagaagctacacatctaccggacacatagtccccttttatgtgttgaggagatcagcttaaaatttatatctgttggtgagcaggatgctctcaggactttcttgttgagaaggcttgataacctaacgaaagatgacagaatgcagattacaatgatctcaacttgggctactgagctgtacttggacaagattaatcgcctcctgttggaagatggcacaggagccacgtcaaatgctgtagcagattctaaagactcggaatatcgttcaatagtaaatgaattccgtgcttttctaagtgatagcaaagatgtattagatgaggcaacaacaatgagactgttggaaagttatgggagagtggatgagctggtttattttgctggtttaaaggagcaacatgaaattgtggttcatcattacattcagtataaatttgctccagatttaatcatgttagatgcttatgaaactgttgaatcatggatgatggcaagaaataagttgaatccagggaagcttataccggcaatgatgcgttatgtgagcgaaccacatgccaagaatgaaacacatgaagttatcaagtacttggaattctgtgtaaaagatttgaacaatgaggatcctggagtgcataatttgttgctctcactgtatgccaagaaggacgatgagtctcagcttttgcaattcttggacactaagtttggtaaaggacagacaaatggccctgagttcttttacgaccccaaatatgctctgcgtctatgtcttcaagagaagagaatgcgtgcttgtgttcgtatttacagcatgatgtccatgcatgaagaagctgttgcacttgcattaacggtggacttagagcttgcaaaagcagaagcagataaagttgaagatgatgaagaacttagaaagaagctgtggcttaaggttgcaaagcatgtcattgagcaagagaagggagtcaagagggagaacataaagaaagctatagaattcctatcagagactaacaacttgttgaagattgaggatatcctgccatttttcccagacttcgtattgatcgatgactttaaagaggaaatatgcaaatctctcaaggactatgacagccaaatcgatcagctgaaacaggagatggatgatgctactcgtggggcagacaacatcagaagtgatattggtgcccttgctcagagatacactgtaattgatcgtgaggaggaatgtggggtgtgcaagcgcaaaatattgactgctggaggactgcaccaggctgaaaaaatactggacctccaaaagcggcttagcctaatggacaggaaagcagcaaaggaaaatggcggaaacatgaatggtgaatctattatcagtgcgacaccaattgacaagttgaggtcccagctggatgatgctgtagcgagcgagtgccccttctgcggcgatctgatgatcaaggagatttcattgcctttcattctccctgaagagtctgatgaaaaggcttcgtgggaaattaaaccgcaaccaacgggtcagaaaattcttccaatgaccatgtctatatgattctactagtaaaagctgagatggaatagaatgtttttcgagtttgtatgtgattttgtaatgctgaatatatgctctttcatgtccaatttctggttgggtggctttggtttttgataattgcccagctcgtgtatctttctgacgagcagaacattagctatcctatccagaatagtttgtgtacagaaacatcatcttccacttcacttgggctcttgtacatgcctcctttcatcaactttgctcataataaagttgcgatttgttagggc

SEQ ID NO: 68398 - DNA, 216 bp, Oryza sativa
  Clone ID: PAT_MRT4530_69165C.1
atgtgtgctttgatgatgaggaggaagaggttaagcactaatgcttttggcgctgaggttgggcgcttcagcgccaacgggtctaacgctgacctcgtgccatcgtggcggccgggccgatcccccagccgacgtgtcaggtatctcaacgtcaaccgcttcggcgctgaggtgcccaacctcaacgctaagttggcgctgaccttggctacttag

SEQ ID NO: 68399 - DNA, 785 bp, Oryza sativa
  Clone ID: PAT_MRT4530_69166C.1
gtgatagcaaagatgtattagatgaggcaacaacaatgagactgttggaaagttatgggagagtggatgagctggtttattttgctggtttaaaggagcaacatgaaattgtggttcatcattacattcagcaaggagaagcaagaaaggcattggaagttcttcagcgacataatgttctagtagaccttgtgtataaatttgctccagatttaatcatgttagatgcttatgaaactgttgaatcatggatgatggcaagaaataagttgaatccagggaagcttataccggcaatgatgcgttatgtgagcgaaccacatgccaagaatgaaacacatgaagttatcaagtacttggaattctgtgtaaaagatttgaacaatgaggatcctggagtgcataatttgttgctctcactgtatgccaagaaggacgatgagtctcagcttttgcaattcttggacactaagtttggtaaaggacagacaaatggccctgagttcttttacgaccccaaatatgctctgcgtctatgtcttcaagagaagagaatgcgtgcttgtgttcgtatttacagcatgatgtccatgcatgaagaagctgttgcacttgcattaacggtggacttagagcttgcaaaagcagaagcagataaagttgaagatgatgaagaacttagaaagaagctgtggcttaaggttgcaaagcatgtcattgagcaagagaagggagtcaagagggaggacataaagaaagctatagaattcctatcagagactaac

SEQ ID NO: 68400 - DNA, 402 bp, Oryza sativa
  unsure (1)..(402): unsure at all n locations
  Clone ID: PAT_MRT4530_69167C.1
atggttccagttaaagtcccagtctacaaggaantcattgtcaagaagccagttcnnatcccagtaccagtttacattaagaagaagccngtctatcatccaccttcatacgaagcatggaaggccgctgccantcaaaagcacgagcaaaaggttgccccnaacactccaatcaaacctgagcagagtaaaaactagataagtccatcaccattaaatcctcncaaacacactcaacacgcgccatcattcatcgaccacacaacaccaaccnttttcatccctctctttttttcnttttgtatcgctgtatacnaaaacatagaccttttncnaaattgnataaaaaacatcgactcatcntcnacatcatcanaacaatcaactcttgattagaattgt

SEQ ID NO: 68401 - DNA, 321 bp, Oryza sativa
  Clone ID: PAT_MRT4530_69168C.1
atggcgatggcgcggcagcggcggcacggggcgcaaggcgacgcgatgggcggcagcggcgacgcgacggcggcggcgcggcgcggggcgcgaggcgacgatgggacgcgcgcggcgacgggacggccgacggcgacgcgacagcggcgtggggctcgaggtgagggaacggcggcgcggcgacgcgacggaaacgacggtgacggcggcgctgggctaggggtggccaggcgtgtgcgggtgttacagccatcagctgagttcttgcgccagtcgggatttgattttcacatctactttggtattctccatgagggataa

SEQ ID NO: 68402 - DNA, 759 bp, Oryza sativa
  Clone ID: PAT_MRT4530_69169C.1
atggccggggacggcaaggtcgaggtacacgacggctggtccgcaccgccggtcgccaccatcgcctcatcccagatgcggtgcgtcccgtggtttttggcggcggctgcgaccgagagcggtggcggcggacgggcgagggccggtcgcaacgccgccgagctcgtgtgcgccctccgcgccgtcctactactcctctacctccgtcgccgcctgccaaagcgccgccgcctttcgaggctatcgccgggggtggagaagggaaaggggagaggcggcaccgccgagatctcgcccgccctctatcgccgagctcggatgcgtcctccacaccgtcgagctactcctctatctccgccaccgcctgccgaagcgtcgccgccgtccgagaagggagaggggagaggcagcgcagcgaaaggtggggaaggagacgcggacggcgacgacgacatcgagatggcgaggcaaagctggaggggatggtggacgctccagcgctcacctcccacccgccaccgccgctccagccctcgcccacatgccgtcgtcgccgctccagcgcctgccgccgctatcactctggccccgcccgcccacccccactccagccctcacccgcacgctgctgtcgccactccgccgccgcccgccgccgccgccgatgaggctctcgctccccgcgtgcgtccgaagaggaagagaaaaggaggagagaaaagagagagaaggaagagagaagggaaggagaaagaatga

SEQ ID NO: 68403 - DNA, 201 bp, Oryza sativa
  Clone ID: PAT_MRT4530_6916C.1
tttatttccagctagcaccagaaaagatcatctgaagcatcgtttgattatggatgacgtctagatgagcctgtcgtacccggtgcgtcggttatttccagaagctgactggtagcatagatggtcggagaacggacacgtctacgactagggttccactggtactcgtacctcctagagcaatggctttcggctgaaaac

SEQ ID NO: 68404 - DNA, 392 bp, Oryza sativa
  Clone ID: PAT_MRT4530_69170C.1
ttttttttttttttttttttttttttttttttttgtttttttggaactctttaccgttttttattctaacacctttagaaagagggaaaaggggaaccaaaaacccaatttaacaccaaaacctctaaaaacatggacaacgggccgaaaatttccattatgccataaaactctattaaaaaatggattaacaggtgaagatggccatgtcccacaagacccttgtctaaaagcgaacaatagtgccacgggcggtgctctaccatgcccccactctaaacctctaaaacatgatccaaccccatttgcctaacgctgaggaattaccaacctgtaaaccttaaaagaaaccccattttgtaaaacttgtggttggccaagtgggcagaatg

SEQ ID NO: 68405 - DNA, 286 bp, Oryza sativa
  unsure (1)..(286): unsure at all n locations
  Clone ID: PAT_MRT4530_69171C.1
cccacgcgtccgcccacgcgtacggtagagattgtaagtataagatgaacactgttctcttattttgccaaatatgcaaaatgcagtctattaattaagacactaagtttgtactggatttgttttgatcagttacttatataaaatctgaaaatattgcgttgaaatgataactatttgtcaccaaaagtaacaggagcttatgccatgtattttccatatgcttctagaatgtttttttttttnatacatntnanatgatgttattttnaagntttattattta

SEQ ID NO: 68406 - DNA, 342 bp, Oryza sativa
  Clone ID: PAT_MRT4530_69172C.1
atgtctagtgaaaacagggcaagagggactatcatactcaaagtcacggaaagtaccccaccgaatagaggggagctagctgttggagtgcacactaacgctggtacatgcccatatcaagaagcattaagcaagaagaagaagaagaagaagaagaagaagaagaagaagaagaagcatatgaaaaatgcatctccttgtatatccatggatactcgcataaagaaattggcaatgagacctatcatcggcaatgtctcttttagacaacaaaactcattggcagtcaaccaggagttgaatggaattaatgaactagaagttgaaaagaactcaacctga

SEQ ID NO: 68407 - DNA, 624 bp, Oryza sativa
  Clone ID: PAT_MRT4530_69173C.1
tcatctctctttctctctcttcgtcgtcagcagcgggcagcgccgcgcatgccggcacgccatggcggagaggcgagtgccggcggaagcgtcggcgaggggaggcgagcgccggccggcagcatcttgagcgctgataagcgtgaggccgcggccgccggcggtcaaggcggagcacgagcgcaagctctttgccgctggggcgagcaaggggacgacggacgatgctcctccgagagattccctgcggcgacgatgatggtggggagcatcgggaatgccctggtcgcacggaagcggagctcgcccaggcggcggtcggctgaggcagagcccggcgctggccgaggcgaagacggactgagcgggcggcgacggaggcggaggctgaggctgtcgcgcgactgcctcctcacggacctcgcccgcggcggcggtcggttcccgagatgtgctacatgcattttcgtctgtcccattgtttgttatagcttgtgtgcgcgcctggtctgtgtatgtcttgtcgtgttcttgtttctttcgtggcgtgggtgctttagttgttgcgtggtcgtagttgatcagtgtagtggggtccagcttgccatcgttgtttcgtgccat

SEQ ID NO: 68408 - DNA, 376 bp, Oryza sativa
  Clone ID: PAT_MRT4530_69174C.1
acgctgacgcgtgggcggacgcgtgggcggacgcgtgggcgcccacatcacacgcagaaatccgcatgaacagccatccatggcgtgcacgctgaccaacgtaatgctgtctaccacgacgggagcggcctcacccctatgtaggactaccgccggaaccacacccgtgttgtttacccgtgttgcccccacctgaataactgctgtaacggcaaactggccaacgacaccgacgcacattacagaccactaaccgagtacgtatcccaatgccaactgagcgacatgctagaggacactacacagccgtctgtacccaggtgtcttggaccagggggatgagccaaacccaggtggcagtccaccgcgccacaag

SEQ ID NO: 68409 - DNA, 523 bp, Oryza sativa
  Clone ID: PAT_MRT4530_69175C.1
gcacgagggagagagaactagtctcgagtttttttttttttttttttttttttttttttttttttttttttttttttttttttttggcctagttcacaccaccattccatttgatccttcacttttccgcaccacctaaatgccaatgcgtagaaaccaaagaaaacgcaaggtggagaaaagttttagccttggtactgaactagtgaactcacagaagaacaaactccacagaaaaattgaacggtgggaagtcaatgtaatgtataaaatggcagagcaaaagagagagagagagagagagagagagatcagctctcaggtccttctcaactatgaacaaaagagacattaccaaccaagcactgcagaggatcgattcggcagtggcatcacatggagtgaggcagcagatcaacattatcacaagacgacatctccagattatgatgattgtccttgcaattttttcccattcgcatctcatcatgcaaacaaaggttgcttgtccagtatcctagag

SEQ ID NO: 68410 - DNA, 381 bp, Oryza sativa
  Clone ID: PAT_MRT4530_69176C.1
atggccggtcctcagatgtctctgccctatgacttcatcactgacatcgacatccttcaccataatcccttggacattgtcccaacacggcaggagaagaagaacgggaagcacttcttcacccgtaaggagaaaaagcaccatggcgacaactgtaggaaccatgccgccggcgttgggttttggaggaagtcttcatttgccgagagcatggaatgggcaatgcaagagttccaactagctggttcctacctcttgccttgctttgtgatgcggtttgccaccagtgatggcacagaacaaccttttggctgcactagagtgaccattgccaacatgagacactgcatcctaacaccatattgttgttttattggataa

SEQ ID NO: 68411 - DNA, 146 bp, Oryza sativa
  Clone ID: PAT_MRT4530_69177C.1
ctggacgcccgccggcacggttccggacttactggccggatctacccacgcgtgtttttgaccgcgtgcagcaagtgtggatggggtgggtatctaacagttcaatggttgcgtaaaggctccacggagcccaaaaagtttgaagg

SEQ ID NO: 68412 - DNA, 1682 bp, Oryza sativa
  Clone ID: PAT_MRT4530_69178C.1
atgccactcccgttactctcccgtcaatctttccgtcttccccatcttctccccgttctcctcctctccaccgccccggatgacgctgccgccgacgcggtgctcggccacctcgccgaccgtaggtacgtcgcgacctgcacctcgtcgccgagctccgcatcgagcgcgcgaactccgcggtcaccttctccacaccctgcgccgcagccggcggcggcaagaagaagcggcggtgcctcctcccgccctcgtccgccggccaccgctccaccattgctttcctcgccttcgacgttgattctgtagacgagcaggcggcatcgttcacggcagctggcgcggtaggccatggcgatgtgcgtgtcggcgagcgcgagcgacatgaggaacatggcctgcagccccagcccggcctcgtcaggcgccgcgccgaacaccacggccgccttggtgacgacgtagcacaccggacggagcggtggtcatgggagagcgtcccctcgccatcgccgccggccgtgaccccatgttcgtcaccgcctacgccgtgcacccggacggccacgacagcgacttcctcgacttcctcctcgagctcatggccgtcggcaagatgaaggagcgggtcaacgtgctcattagtttaccgacgatggaagtggccaccaatacggcgacacgatcgccggtgaagctaatgctggtgctgacactgtcgccggcgagcaaggtgatcgccaagggcggcggcggcgtgaagcgggtgcacctcgacggcggcgcgttccagtgccggacatgcgggcggcggttctccacgttccaggctctcggcggccaccggaccagccacaagcggccgcgggtgcgcgccgacggccttgacctcctcctcggcgcgcgccccggcaagctcggcgccggcggcgcctcgacgccggtagtgcaccggtgcgacatgtgcggcaaggtgttcgccaccggccaggcgctcggcggccacatgcgccgccaccggccgctggtgagtcgtaatggcacaatgtccacgacgtggacggcggcggcggcggcggcggcgacaatgtccggctcctcgtcggaagagcgtgacgacgacgacgacgacgacgtgcacaattataatttcatccactttttctgacgtcttcgtcgtcgtcaccgccatggaccagcaggaggactacactagtgatctgcagcttgagctcgaggaagaagaagacgataaccaacttagccagctcgcggagctcgacgtgcagctctcgctgtcgctggcgtgcggctcgacgacggcgatgtcatcgtccggcgatgaggaggacgcggagccacggcgtcgccggcgggacgaggaggcggcggcggcggcgttcgagtgccggacgtgcgggcggcggttcccgtcgcaccaggcgctcggcggccaccggaccagtcacctccggcccactaccaacaagcggcggcccggcccgtccaagcctctaatccacgcgtgcgaggtgtgtgggttgggctttcagatgggccaggccctaggtggccacatgaggaggcatcggcctagaaatattgatctgggccataagcagatcgtcatgccagaaattcggcccagttcctccctgcagctgcttgatctcttcgtttag

SEQ ID NO: 68413 - DNA, 171 bp, Oryza sativa
  unsure (1)..(171): unsure at all n locations
  Clone ID: PAT_MRT4530_69179C.1
gcccaagcnatgttnnccctaaacatgccgtcaatatacaggtatctacccaagctacaacactagcatccctgtaagcatatcccaccgtcagagagtatctaggtattgaattgtagcagnngngncaggagagaaaaataagtcatgcatcatcggtgtgacagtgac

SEQ ID NO: 68414 - DNA, 574 bp, Oryza sativa
  Clone ID: PAT_MRT4530_6917C.1
aaaaactgacatttggctaaggaactcagacaacccgttgcgatgctacaaaagtgtatgaaataatagcggtactacctgaagatgcatttctaattactaaatgcatagaaagataaagtacaaatgtatatgcagaatctaacaagagtatatgcaggaggtatgccattgactctgagcatcctggcgtggcctgggggtccagatctgtgacgaggctgcgcagtgtgctgatgcttgttggttgctttggttggtacaggcgagtgcatacggcgcggggaacagcgtggcgtaccaccgtggggcgtgcttcgccaacgacatcgtcatcgtcatgtaagtaagagggtcctttctgcagttctgcagtttggccatgtctgtcttttatggcttctgattacatatttagatcggtggccagagcactgctatagtggtgaattgattaaaggatgaatggctgtttgtgttgactgtgttcttctcgcggcagatggttgtcaggtcaaattaagttatcagtcaatcacgatctaaattcggacgaaaataaagtctttaaaaa

SEQ ID NO: 68415 - DNA, 202 bp, Oryza sativa
  Clone ID: PAT_MRT4530_69180C.1
gagttttctccccccgtctcgtcgtctcctccgctgggtgcgcctacccaacacgaggggcggctgaacagaagagggggagtaggcggtgatctccatctggcgactcgcgagcatagcaagggaggggatcctgatctggatgaagctctcctcttaacttcagcgccttaaccttaatacatgtaccagtttgagtttg

SEQ ID NO: 68416 - DNA, 1509 bp, Oryza sativa
  Clone ID: PAT_MRT4530_69181C.1
ccttttctcgttcttctttgttcttgctagctagctcgctattgctaactcgtttgtgttaatattctgggtcctttgcttaatggttggtgttggttttttctgatgaattgccgtcgatcttatgtgtcaggtttagtagatgcgattagccaggcagcagcagcaggtggtggtggctgcgacgatggagcatgacgtgcaccaccaccggcagatgatgcagcagcagcagcagcaggagatggacctgccgccgggcttccggttccaccccaccgacgaggagctcatcacgcactacctcctccgcaaggccgccgaccccgccgggttcgccgcgcgcgccgtcggagaggccgacctcaacaagtgcgagccatgggacctgccatcgagggcgacgatgggggagaaggagtggtacttcttctgcgtgaaggaccggaagtacccgacggggctgaggacgaacagggcgacggagtccgggtactggaaggcgacggggaaggaccgggagatcttcagggggaaggccctcgtcggcatgaagaagacgctcgtcttctacaccgggagggcccccccgcggcggcaagaccggatgggtcatgcacgagtaccgcatccacggcaagcacgccgccgccaattccaagcaggatcaggagtgggtgctgtgcagggtgttcaagaagagcctcgagctggcgccggcggcggcggcggcggtcggcaggagaggcgcgggcgcggggacggacgttgggccgtcgtcgatgcccatggcggacgacgtcgtcggcctcgccccgtgcgcgctcccgccgctgatggacgtgtctggcggcggcggtggcgccggcacaacctcgctgtcagcgaccgcgggcgcggcggcggcgccgccgccagcgcacgtgacctgcttctccaacgcgctggagggccagttcctggacacaccgtacctcctccccgccgccgatcccgcggatcacctcgccatgtcctccgcctcgccgttcttggaggccctgcagatgcagtacgtccaggacgccgccgccgccggaggagcgggcatggtgcacgagctgctcatgggcggcggctggtattgcaacaagggcgagagggagaggctgagcggcgcctcgcaggacaccggcctcacgtcgtcggaggtgaaccccggcgagatctcgtcgtcgtcgcggcagcaacgcatggatcatcacgacgcgtccctctgggcctattgaaatattcattcatcatcattgaaaattgcattagccattattattagtactgttggccaccgattattgattgtgttgtaatattggtattgttgattataattaattagtacgccaaagagacaaatcacaagagaacgaagtgtgtatgctgtagattaattccgtatgtttgtgaaaatattcttgaacccaagtgaatgttactagtgcttttcagatgctcatgtttggagcgccg

SEQ ID NO: 68417 - DNA, 339 bp, Oryza sativa
  Clone ID: PAT_MRT4530_69182C.1
ggaatcctgttttttttagacttgccatatatatacagggagttcttgatttagagctcttataaatagtactaactgcacataactgggcgatttttttaccggagaaagagtcttatgcatcagttatttgtaggggtcagaaagttataacaacctgatacagtactgtttttcgagtagaaactggataacaacatttaccccgaacatactactgtaaatgtcaaaacaagccagtaatatgcgctcctaaaagcgtagccttcttcactactgaacagacatactgtagcgcactggagatataaacctttaccaagccatttatctaccggg

SEQ ID NO: 68418 - DNA, 201 bp, Oryza sativa
  Clone ID: PAT_MRT4530_69183C.1
atggcgtgggaggaggaggcggcggtggaagaggagtacgagtacggggaggagatggaggggtcggggtcggaggcggaggacgtggtggtggggcagatgccgacggtgatggtgcccaagcacatcaacaaacgcgccctcaagaacaaggccctctccgtctccctcgacaagaaagccctcaagtccgtcctctaa

SEQ ID NO: 68419 - DNA, 502 bp, Oryza sativa
  unsure (1)..(502): unsure at all n locations
  Clone ID: PAT_MRT4530_69184C.1
ctccgcgangncgaccgcgcngcgccnctgatcaaatgtnggagganctgnacnnagtggtcgntgtnccgcacggtgatcgcgganttcatcccgacctcctcttcctgtncatcncngtgggngaccgnggatcnggtggtancaacagtcggacgccncnntcannactancnacacgatcngcaggtgcgtcagcatctncagcntcacctggggcttcgngngcatgatcttntnccncctctactntacngccagngtntctcgtgngnacnncatcnncgcggttnccttcggggnttcctccgnaanaaagnntcctcaatttgggcgggaggnttcaacncccccaaagacagtgngccatctgaagngtgggggnnnctcctggggattcccaantnttnatnncnccggttcagatggggnatcttccaaacctncaaagaggtttncccttggccccgnccccggccnngtaattttcnggaaaccttaa

SEQ ID NO: 68420 - DNA, 1192 bp, Oryza sativa
  unsure (1)..(1192): unsure at all n locations
  Clone ID: PAT_MRT4530_69185C.1
agaccacacactgtgtcgctgtcacacacacaccgggccgagctgagcctgagcttgttcggcgatggccagggcggcgcacggcggcggcggcatggggcttctcgcgcgggcggcgctcgtggcattcgtggcgcttgtgggcgtcggcggcggcgcgagggcccagctgcggcagaactactacggcagcacgtgccccaacgcggagtccaccgtccggtccgtcatctcgcagcacctccagcagagcttcgccgtcggccccggcaccctccgcctcttcttccacgactgcttcgtcagggggtgtgacgcgtcggtgatgctgatggcgccgaacggcgacgacgagagccacagcggcgcggacgccacgctgtcgccggacgcggtggaggcgatcaacaaggccaaggcggcggtcgaggcgctccccggctgcgccggcaaggtctcctgcgcggacatcctcgccatggccgcccgcgacgtcgtctccctgaccggcgggccgagctactccgtggagctcggacggctggacggcaagacgttcaacagagccattgtcaagcacgtcctgcccggccctggcttcaatctggatcagctcaactccttgttcgccagcaatggcctaacgcagaccgacatgattgcgctttccggggcgcacacgatcggggtgacgcactgcgacaagttcgtgcggcggatctacacgttcaagcagcggctggggtacaacccgccgatgaacctggacttcctgcggtcgatgcggcgggtgtgcccgatcaactacagcccgacggcgttcgcgatgctggacgtgtcgacgccgcgggcgttcgacaacgcctacttcaacaacctccgctacaacaagggcctcctcgcctccgaccagatcctcttcaccgaccgccgctcccgccccaccgtcaacctcttcgccgccaactccaccgccttcttcgacgccttcgtcgccgccatggccaagctcggcaggatcggcgtcaagaccggctccgacggcgagatccgccgcgtctgcaccgccgtcaactagcttgtttacgtagtacttgcatatcatcttctngctacttaaaaagtggagtacttagctgggtaggatggtgaaagaaaaacacgtagtagtagtactacgattaattaattt

SEQ ID NO: 68421 - DNA, 971 bp, Oryza sativa
  Clone ID: PAT_MRT4530_69186C.1
tcttgagggcggtttcgctcatgtagcacgttgacttggtccaacctactaagttatcaatggggcccacatgcctcctttctttctcctctcctccactttccccacaccgctgagctatcagggagagccagtgatggcagtcgtcggcggcacgatggtgacgaggagtgtgacagcagtcggcaagcaacccttgacggcagcgacgaaaccaaccctaacaagacagctccaactaggaagatcttcagctctggtgtgggagaaaagagagcaagactgagtactacccactgtactcagcaagtcataccggaagaggaggtattgggcagtcccctcgtgcgccgcggtgaatccggcagctggacaaccggataccccgtccaacccaactccatcacgcccaccctcaccaccggtgcctaggaaagggtcgagctatacttcagatcaagcagttacccactcccgcttgtggtaagcacggtaagtctcccagggtttccagcaaaccggtccttaattgccatgggtgcgactagcaaaaatgcaacatttaatagaaatgcgggatatttgtaaattgagtacaatatgatcaattgtaatgcatgacttgccttgctctcgcactgatgagaccacaacaacgtctttgaggaaccgcggattgacaaaacggccgaaatctacgcgacaaacaaagcacacaagcgtgggtggcggctaggcacggctcggctcggcacaaagccggccggccggccatggggagcggcggcgcacggccgatgcggcggcgcagccaaaggcggcggtgcacgcgggaaggggaagaaaaggaggggggagtcctcaccggcgacacagcggccggagcgggaggcgaaggcggtgacgacgacccgacgagcagagggggcggacaggcggcgacgacacctagaggaggggaggagagaagt

SEQ ID NO: 68422 - DNA, 300 bp, Oryza sativa
  Clone ID: PAT_MRT4530_69187C.1
atgtcggatgatcccgtgagtgaagccatccccgtccacgccaggtggtgccaccgccaacaacgacaaggaggcggctatgagcaccaccgccgacaacgacgaggaggcggttcatcttactccttgcctgtcgttgccgtcgccgctgatgaggcggcccgccgcgacgaccggatccgtgccgtcgtcgccatcaaggagctaggcaccagtgcaactaggaactcggtccaatatcttaacaagccaaacccagagttcggtgcggccctgagctcgagcccctttggctactga

SEQ ID NO: 68423 - DNA, 156 bp, Oryza sativa
  Clone ID: PAT_MRT4530_69188C.1
atggatgtaacaacacctatactcgccgtcagggaagcacgcccctgcggccttgcggtggccggtgccaagccgcctacaagctgtttcacaccggcccgcgactcagacgccaagacgaacaaccccatggaagcgtggatctccgacttctga

SEQ ID NO: 68424 - DNA, 264 bp, Oryza sativa
  Clone ID: PAT_MRT4530_69189C.1
atgacggttttgcccttgggagtgaaggaaagtggccgcaagtgggtcgtcgtcaactccggccagctgccctcccccgcgggatcccgctcccctcccctccccttccttccctccccagatccagcagaggggagggcgttggcggcggtgcggcaggaagggagcgcggaggtcggcgggagggcgaatccgtcggccggcggcgcagaggccgccgccgccgatgatgagagcgggagcggcgtcctcagccgccgctga

SEQ ID NO: 68425 - DNA, 3552 bp, Oryza sativa
  Clone ID: PAT_MRT4530_6918C.1
atggaaatggtattgccagtcgcgaatgctacggctgcggcacttgcacgggtttctgctgtgttcaatgccccacttgcccgtgctgttgtctttgggattcatattgatggacatttggttgtggaagggcttctcattgctgccatactgtttcagctctccaggaagagctacaaacctccaaagaagccactcactgagagggaggttgatgagctctgtgatgactggcaaccggagcctctatgcccacccatcaaggaaggagcacggatcgacacgcctacattagaaagtgctgctggacctcatacaactgttgatggaaaagaagttgtaaactttgcatcagcaaactaccttggtttgattggcaatgaaaagataattgattcctgtgttggctcagtggagaaatatggtgttggatcatgtggaccacgaagcttttatggaactattgatgtgcaccttgactgcgagagtaaaatagcaaatttcctgggaacccaagattcaatcttgtactcctatgggatatcaaccatcttcagtgtaattcctgccttttgcaagaagggagatatcattgtagctgatgagggtgttcactgggctgtgcaaaatggtttacagctttcaagaagcactgttgtatatttcaagcataatgacatggcttcacttgcgagcattttggaaaaactaactcatggaaacaaacatacagaaaagattaggcgctatattgttgtggaagctatttaccagaattctggccaaattgctcccttggatgagatagttcggttgaaggagaaataccggtttcgtgttatattggaggagagccattcttttggtgttcttggcaagtctggacgtggccttgctgaacactatggagttcctcgtctaagcagctctggttatgttttttctgcctcgttgccaccataccttgctagtgcagcaatgtctgctgtgaaccacctggaggagaacccatcagttctcgccaatctaagatcaaacatcgcccttctgcataaagagttgtcagatatacccgggctcgaaattgctagcaatatcttgtcacctattgtctttctcaaattgaagacaccaaccggttctgctgttgctgacctggaactccttgagattattgcagagaaggtcttgatggaagattcagtcttcattgcagcaacaaagaggtcgagtttggacaagtgtcggctcccggttggaatccgcttattcgtgtcagctggtcacactgaatctgacatcttcaaagtatctgcatccctgaagagggttgcagcatcagttgtctattctggagggagggttgttacaatgaaagtgatcaaatcaactggcacgctagcatacccgaaggcgagttttggacctgcactggagttaagcagatctcctaggcctcgtgttttacgtcaacatgcttttggcacgcctggtgggacagatcagaagtcagaatcacaacaacagcttttccccatggctgagaaaccgccagcatcgccatcctcggctggtgaacctggctctgttaaagctaagatccataagctgggtctatctgaggttgatgaaggcaacattgtgcccgtcactatggataagttgacacctgatcagcaaaaggatcttgaggcaatgatgcagcaagcacggaatcagttcttgagctcatttacggagacccacaagggaacacttgttcagaagtataaagtaaaaatggttctcgaggagatcaagatgatggctctcaaggagttcagggtgttggttctcaaggaactcaaggtgatggtgttcagggatttcaaggtgaaggagcagtttgggctcaagccgaaagacgctggaaatttgtatcggcaaccttaccctgaatggtttgagagagtccctctacctaaccggttcaagggtatgattgctcctatcagggagaagttctcgtctcaagattttgatagcttgtcacatcttgcacagaaggtgaattcggctaaaattatcaacaagtatcagaagaagtatgacaaacagcaggagagacattacgaggaaggtgatgatggttttgatcctcattggggctgcgaattttttagattttgctggaataagggtatgaggctgccatctatcaaggactgtcctgggtgcggtaatgttgcagaaagttcaagccgatcgtataatagaagcaatcggctaaagcagacaagggttcctgttcatcaaaggttgggcccggtgaaccaagattgtaaccaagaggacaatgaagacaggaagactcaatggtgtccttctggtatctttacaaagaatcagaaaagaagggttcaaagattaaggaacagggagcgctttcaggaggtcgaacaagaaatcaatcatcggctaaagaaaacgaagccgaggcaggagtggcgcgttaagaatcaagctcctgtagccgatgagcccacagccgatgaagcaaagagattgcctaaagggaaaagtgttgtaactgtatcggttaacatggttttcatgttgcctgctgaatttggggtcaagcaagccaatgtcgataaagttgaagaggaatcggctaagttgattttattaccagaacaagcagtcttcgagaacctggaaggaacagagaatcggcatcttaaaccattatatataaatggctatgtcaatgggaagccgatgtccaagatgatagtcgatggtggagctgcagtaaatctgatgccttatgctacattcaggaagttgggcagaaacgctgaagatctcatcaagacaaacatggtgctcaaggattttggtggcaatccatcagaaactaaaggagttttgaatgtggaactaaccgtcggcagcaaaactatccctacaacgttctttgtcatcgatgggaagggttcctacagcttgttgcttggaagggattggattcatgccaattgttgtattccttcaaccatgcatcaatgcttgattcagtggcaaggcgacaagattgaaattgtgccagccgacagggttacatatcaaagagccatgaattatatatatcatgatctgatcggctggttggttgaagtctacattgatgatgtggttgttaaatctaaagagatagaagaccatatagctgatttgaggaaggtttttgagagaactaggaaatatggcttgaaaatgaacccaacaaaatgtgcttttggtgtatcggctggccagtttttaggatttcttgttcatgagaggggaattgagattactcaaaggagtgttaatgcaatcaagaagattcagcctccagagaacaagacagagttgcaggagatgatcggcaagataaattttgttagaagggtatttttggccgacaatgctgaaagattgtttcaaatattacaagggatgtcaagattgtcagaaatttggggcgatccagagagcaccggtgtcggctatgaatcctatcattaa

SEQ ID NO: 68426 - DNA, 649 bp, Oryza sativa
  unsure (1)..(649): unsure at all n locations
  Clone ID: PAT_MRT4530_69190C.1
ggcnggcgaattgggtaccgggccccccctcgagttttttttttttttttttttttgttttcaaaacatttcattattcattatttgttttgatcactatcatcgttgcatncaacacagcaacggtgtgatcctactagctatgaggctagccngctnancctagtactggccggcggcgaanatgctgcactgctggggctcaacccggcacatcnacggcagctgcgccgcatactgcntcgncctggtcagcctcacgcgggtcatccccngctgntgcngcngctcgccgtnntagccctcctccnangancctcgccgtattaacntgntccgacaacnaccctcgccgggcataatactccgntcacgacgacaacnagccttggatccagtgggcatcngnatgctctcctcntntctcntgcaccntcctntggatgggaagcncttcagcactcccnagtcncattcggntaactgctggnaaaagntgcatccgcgaggcgnccccccncnggggnggaatntcggnttgaacantcccggggnntactccgncaanaatgcngaggtttcncgggtttnttcaccccctngnnnccntccnaannntncanncntttccccgaaantnatgcccccc

SEQ ID NO: 68427 - DNA, 879 bp, Oryza sativa
  Clone ID: PAT_MRT4530_69191C.1
ctatgacagcatcaccatctgctcccccttcagccaactgccctgcacagtttgcactgccactataaagcgctccctgctcctcctcctcctagcttggctcgcctctgctccgcttcgcctttgctccgacccggtcggcctcgccgccgtcgccgccgccaccgcatcacgcgcgcgcgcgcgcgacggcgcgagcgcacgggtgaggtgagagaggggtagtagagcagcagccgcccccgaccgcccacgcccgggccgggtggtggagcacaccgtggcatgattgggtccatggcctcctgaccccgcctccctctcctcctcctctgctccccttttgctgctgttgctgcttcctactctcactctgcttctgctgctcaatccacctgctcctctccttctcttctctctcccgagcggccgagaagaggcgaggggagaagggaggacttgattcttgcttgttgctgatccattctttcttgctctgctctgctcttgtgtggtgtggtgagcaatctgtgctggctcttctcctttcctgctctgctgattcttcgtttctttcttttctttttctttttttctgacgagcttggctggtagctgttcttgcagtgtgtccaggcttgccgcattaaaggagaggtggtttttgttgaccctgtttagcagcagcagcagcagcagcgaccaagatccgtctcgtcggggaagatgaggagatctgcatctgtatgcttccaatccctctttagctttgggataatgaggttgtgctctgctgacactgtagctttcttgatctctctgggggagatggatgccggtttggagggtggtagcagggttttggtgggatccaatcat

SEQ ID NO: 68428 - DNA, 1483 bp, Oryza sativa
  Clone ID: PAT_MRT4530_69192C.1
atggcgccgccgccgacgccgcggaagccattgccattgctcctcctctccctctccctccctttcctcctcctgcttctctccctcgtcttcctcctctcgcacaccaccttcagcctcctgctctgcccactcctcccgcggccaacttcgaggccgaatgccacgacgatggctacgacgacggtggccgctgctcctcctacacttgatgtatccatggacaagtcgctgcgagccttccatgcatcgtcgccgccgccgccgacaccgacgacgacgacgacaccgacaccgacacctcctcttccgccgccggctcctcctgcttctcctgccaagagcaacaagaaggcgtccgcgaagaggaacaagagcctcctcaagctgctgctcagggagactccccggacgcggcggttcgcggcgcgcgcgggcgagctcttcgcctcgccgcggccgtgcacgcggcgctttttcatgacgtggctctccccgctcgcgcggttcggccgccgcgagctcctcgtcgtggagagcctcttcaggtcgcaccgcgacgcctgcctcctcatcgcctccgacaccatggactccgacggcggcggcgacaggctcggcccgttcctcgaccgcggcctccgcgtcgccgccgcctcgccggacatggcctacctcctgaacggcacgccggcggaggcgtggctgggcgcggtgcagcgcggggacgtcagccccggcagcatcccgctcgggcagaacctctccaacctcctccgcctcgccctgctctacaagtacggcggtgtctacctcgacgccgacgtcgtcgttctcaggcccttctccgacctccgcaacgccatcggcgcgcaggccgtggacgcgtccaccggcgactggatgcgcctcaacaacgccgtcatggtgttcgaccggggccacccgctgctccgcgagttcatcgctgagttcgccgccaagttcgacggcagcaagtggggccacaacgggccgtacctcgtgtcgagggtggcggcgaggtggcgtcgccgccggaggccggaggcggaggctgacctgacggtgctgccgccggcggcgttctaccccgtcgactggaacaagatcggcgggctgttcgttgcacccaaggacaggaagggcgagaggtgggtgaaggccaaggttgagagcatcaaaggtgagagctttggcatccatctgtggaacagggagagcaggagcctggaaatggaggagggcagtgtgattggaaggttactctcagacagctgcttgttctgcaattcctccatgtttgcaaagtatgaatagttgcacaaatgcaaagagataacgagattggaatatgtgggatgtcagacaaaatgtacatcttcacttggcaggtaagcaatgacaaaataacagtggctttgcacttgtaagattttgtcggcacggcaaaaaaaaaaaaaaa

SEQ ID NO: 68429 - DNA, 492 bp, Oryza sativa
  Clone ID: PAT_MRT4530_69193C.1
tgaggtatgcctccaacaaaaagggccaagaaagcggctgcggcgggcggaggcgacctcatcggcgccctcccggacgcgatgctgcaccgcatcctctccctcctcccggcgcaggaggccgtgcggacgtgcgtgctggcccggcggtggcgccacctctggaggtccgccccaggcctgcgcgtcgtccgcgccgccggtcggccgccggcgaccgtcgaggagctccaggggttcgtcgaccacctcctgctcctccgcgggggctcctctctcgacacctgcgagctttccttcgatcagatccgcagacaagacattccccgcgtgaacctctggattcgtcacattgtcatgtgcaaagtccgagtgctcgtgcttcacctcaatccttattgtcatgaattggacgaactgcctctggtgtcgcagcacctgacgagggtggagctttctggtctgatcttaaacgacagcttcctcaatttc

SEQ ID NO: 68430 - DNA, 169 bp, Oryza sativa
  Clone ID: PAT_MRT4530_69194C.1
gaacagttgaggctgaagatgacgaaccgaaagaaggtgaagaggctacagagggtgaaaagaagaagaaacagaaacactcactgagaagtactgagattgagaattgggtaatgaaacaaagcccatatggatgagagatccacaggaagttgagaaaactgagtac

SEQ ID NO: 68431 - DNA, 188 bp, Oryza sativa
  Clone ID: PAT_MRT4530_69195C.1
aagctttttttttttcgattcgtgatgtttacaccacctcccaaaacacaaaaacccaacaagtcaagcttcttgcgcacatctctgcgcgctgtccactgctcaataacccaatccgcgcctagtcaactacctctgctaacaattacctgccgtgccttcaccctgatccagccgctctaaagctt

SEQ ID NO: 68432 - DNA, 1025 bp, Oryza sativa
  Clone ID: PAT_MRT4530_69196C.1
ccacgcgtccgggtgtatgcaagtccttggctactttccatgcattggagctcctgaaggtgttttttcttagctcatcatcggggtcagaagtgcaagctacattaacagcaacgttccagctttattcagagcgcgaaattttaactgctgtttcctttttgagagagaagaatttcttggttactggaaatggaatgaaacctgcaaccctttctggaaaattttttattgacgcttctcgttcacccttcccatttggttcaggaaaaaaggcttctgagtttttgaaatggcttatagggcagcaaaagaatactacagacagtacagtttatttgtatccagatctacaatgtggggaaattgttcacctcttttctttggtgttttcaggagagctgctcatttcaccttccttgccaagtgaaggagttggtgaaactgatgagcctagcagcttcagacctttcatcaaagattccagtgaattggatgactgtactcacaaacgcaaggctgtggagttaataagcagcaagagtaagaaacgcaaacctttgcccaagatagatactgacttctgctatcgtcgagagaaaggtttccctggtatccaagtggctttgaatcaagagaggattcaaacaagcaatctcatgcaagtgttacatcataaagaatgcctcatgtttactttagccagggaaatgggcagcaaggatgttgattctcaggaatgcaatatatcgaattggttgttgatacccttgaaagatttcagctggccattaaggtcaatgcatatgatggtgtgcagattgttgattcattacataagccaaaatatcatataaccacacttgctgaatacagtcaatgcaactgtttgtgagctccggtttctgagacagaatcaactggggacaccagaaatataatgaaagagaagtatgctgtgcctattaatttgcaggaaactgtaaaaaagcttggtgatggacaacatggttcagttctcaatg

SEQ ID NO: 68433 - DNA, 315 bp, Oryza sativa
  unsure (1)..(315): unsure at all n locations
  Clone ID: PAT_MRT4530_69197C.1
cttaatggacagcgtaacaaaacgcgcttgcgtcggctgccccggcacgaaggcgaggctcgacgacgtcgactggtgctagggcagcctgagaggctgcagagagacgctggatgacaccgaccagctgatgatggacccgatgatgctgttgcagctgccctactccgacggttacgaggccatcgacagacgtcttcngcgtcggtgaccccaacagcgcgaacacccacattaacgccagcgtcatcatgtggagctaccacgactacctaatcgacggcgcccttttctgatgtactcttccattgatgc

SEQ ID NO: 68434 - DNA, 1092 bp, Oryza sativa
  Clone ID: PAT_MRT4530_69198C.1
atggcgttggaggcggtggtgttctcggaaggatactacttcggatgcggcggtgccatggcggcggaagcagctgcaggaggagcttggagctggagccacgggtatggcggtggcgttgatcaggggaagggggcgatggagttagtggtggacgacggggtggtgaacgccttctgggacggcggcggaggcggcgcaagctcttccccggtgatggccgccgtctcggggtttattgaggagccggacggcggtaattcctccgtcgcagacgcagcgccgccgccggagcacggaggtgcgtctgtcgtcggacgggatggctccgcggcggcgccggcggcggccgcagggaggaggaagcggcggagggcgaggaccgtcaagaacagggaggaggtggagagccagcgcatgacccacatcgccgtcgagcgcaaccgccggaagcagatgaacgagtacctcgccgtgctccgctccctcatgccggcctcctacgtgcaaaggggcgaccaggcgtccataattggcggagcaatcaactacgtcaaggagatggagcagcttctccaatccctggaggcgcacagacacgcccgccgcgcacgcaccgacgccgccgccgcgttgccattcgcgggcttcttcacgttcccgcagtactccatgagcgccgtgcccacgacaaccaccaccactgtagcagcagcagcaacggaaaacggcaatgccgtcgccggcgccggcgcgggcgacgacgcggacgcggacgtgtcggggtcgaagccgtcctcggtggcggacatcgaggtgacgatggtggagagccacgccaacctgaaggtgctgtcgcggcggcggccgaggcagctgctgaggatggtggcagggctgcaacaccaccgcctcgccgtgctccacctcaacgtcgccagcgccggccacatggctctctactcccttagccttaaggtggaagaagactgccagctcacgtcggtggacgacatcgcggcggcggtacacgggatcgtcgagacgatcgagcaagagcagcagcagcagcagaagcagagctgtagctag

SEQ ID NO: 68435 - DNA, 712 bp, Oryza sativa
  Clone ID: PAT_MRT4530_69199C.1
cccacgcgtccgcccacgcgtctccgcccgcgccccccccctccgcccaagaaatcgcttcttcttccgcctccgcctcccatggcagctcccagctcgtgggacacctccttccacgaagcaaccacagcaaggcaatagcgccacccaccgctcgcatccacagctgctgattcgtaggaggagcaggccagggagggattcgttgattttatttggcagggaaggagatccgagaggaagaaggggaatatagatcgatggggaagtacgtggagctgctcgacatgggggtgcgcatcgccgcgcggttccactcccactgcccgcagacggcgaggatgtactaccacccgccgccgtcctcctcctcgtcgccgtcttcctccgccgccgccggttcggccgacggcggcggcggcggctgcgcgggcttcgccgcgaagaggatgccccgggccgccgccgacaccgcggagatcatcctctacgccgtcgtctagagttagcctctagactctcgatccagacgcttcacgcggaaatggaggaatgtatttttcttttgtttttctttaaagaggaaaaaaaacaaagtggacttggagattggttggtttattgatggagtgaaatgaaatgaatggaatgatttgatatttacgtgaaaaaaaaaaaaaaaactcgagactagttctctctctcctcgtgc

SEQ ID NO: 68436 - DNA, 1068 bp, Oryza sativa
  Clone ID: PAT_MRT4530_6919C.1
atgtcgccagcagaccgccatgattccgcgtcgcgcctgctcccggcgaaagtggagggtatgattgctccgattagggagaaattctcatctgaagactttgatagcttgtcacatctgatacaaaaggtaaccttgcacgagcataggtctgcggaggctaggaaaagctctaagaaggttaatcatgtttgtccttacatgtatgggtcggatgacgatgaggatgactctgaaatagctgcagccgaatgggtgaggagtaaaaaggtggccattgagggaggcaagattaagtttgatgattccaaaaagccgatgaggatcgatggtaactcatttcccgttaacatggtacacagagctgaccgaacagctgatacggggtgcatgaggggttatcaaggggttcaagccgattgtacgatggaggcaatcggccaaaacaaacaagagtacctgttcatcaaagattgggcccaggaacgcttccaggaggtcgagcaagaaattaatcatcggctaaagaaagaaaaaccgaggcaggagtggcgtgttaagaatcaggctcctgtagcccatgatgttgcagccgatgaggcaaagaggttggcaaaaggaaagagtgttgtgatggcaccagttaacatggcggtgttcgagaagcctgaggggacagagaatcggcttcataaaccattctgtataaatgctatgaagttgggtagaaatgccgaggatctcatgaagacaaatatggtgctcaaggactttggtggcaatccatcggaaaccaaaggtgttctaaatgtggagctgacagtcggcagtaagactattcctaccacattttttatcattgatgggaagggttcttacagcttgttgcttggaagggattggattcacgctaattgttgtattccttcaactatgcatcaatgcttgattcagtggcaaggcgacaatatagagatcgtaccagccgacagccagttgaagatggagaacccaagctattattttgagggcgtcgtggagggttcaaatgtctacgctaaggatacg

SEQ ID NO: 68437 - DNA, 1451 bp, Oryza sativa
  Clone ID: PAT_MRT4530_691C.1
ccacgggtgagaactcccccggccccgcccccgtaggggcgggtccccggcccaacggggaaattgccacaccctctataaatgtttatgtagaccctgatatcgtttgtggggtagcgattacacgacgtcttgaacttgttctggtcgtagccacatcgcaaacgttgcgcttgatcaaagagaaagttccatccgtgagcctcagacatcgccgccgtgagccctagcctcgccgccgcggcgcgtcgatggacgtcggcgagggcaaggggttcggagccgtggttgatggcgtcttgccaccggagatgctgcacgagagcttccccagattctgtgtcgatcttgtcgacctgtctggcgacattgtcaagcagctgatcccaaaaccccaatcccaagtggggagaggcatggttgtgagtgcgacctcagacgacctcgtcttcctcgacgcgcattgggattatcatttttatgtggtggatctatggtttctaactgattctgaaaagggtacatggtccaaagagtacaggattaatgttgatccatctttctatgggattggagattgtgtgaaagtgcatccgttgcttgtgacggatgagggaaatgtagtactctggttgcagatgccatcggaagggatagtgcagatttataatccagtaactaacactttctgggatataactcaaacgagcatctataccggagtagatggttggatcagagattggtttctctattctgatatgatttatttcacccttcagcacttagtaatacttagggttttggaaatgaatgaatatggaaggaaggccaaagagattccagaagcccagatgcatgatcttgttagagaaatagccctaaccatatccaagaaggaaaaaattgctaccatatgggactgtcctaactcggatggaattaccaatggatcacaaaagtgccaattgttttacttgcactacctaaacttcgggtacacaaaactgaaagacataccgagattgatagggaagcttagcaatctgcaaatgctttatctcaatggttctgtactggagttgccaagtgaaaccacaatgttaactaagcttcaccacctactcgtagatgggcggtttgggatgtcagcaagtagcaaaataagtcaactgcaacatctacagtctctgagaagcatagaagccaacagctacatgggtggtccgcaatcatatagtaggccttggcttaacgtgagagttttctacttccgtgtcctctttcggcaacttgttggtgttaaggaattcgataagcggtgttcactagtcctgagtggtctcgatgtctgtgacgattttgtcaatctaagtagtagccctcgagccaacgtcggtggtgctatcgatgtcgtcgtctggcgaactcttgacggatggactggttaa

SEQ ID NO: 68438 - DNA, 202 bp, Oryza sativa
  Clone ID: PAT_MRT4530_69200C.1
ccccactcgctcgcttcccgaactcggctaaccaggagaaggcaagttgccttttcgcagaatcagttccgaagaacagttccaatcctaccctgggattttacaaccaagccaaggagatctgcggagcggactccagcttgacgatcttcaacttcgtcagagttttgctccccatcttcagtcaatggaacatcgccag

SEQ ID NO: 68439 - DNA, 342 bp, Oryza sativa
  Clone ID: PAT_MRT4530_69201C.1
atgcgggctggcgaggcggagagctatcggcagcgggaggccacggcggcttcgacccccatcccagtcgcgtgcggtagcgcgggaggtgtgccgtgcgtgccggcggcgggggatgcggacgcggtctcctcagcgtctctgcgggcggcggccgtcaacggcgagtgcaggcggtcgattgaagacccgtcggctggcttttcaagggcgaaccgacgatggaaagccgatggcacgattctgcggccatcggtgaagggggacgacggcggcactagcatgaggatttgggccgactcgttcggaatcggtgatcatgttagccagcggcttgtctga

SEQ ID NO: 68440 - DNA, 696 bp, Oryza sativa
  Clone ID: PAT_MRT4530_69202C.1
atgtcgacgcagcgggctcgagtggcggcgaagcttgaaggtaggggggcggcggcggcggatccagaggagggggactcggcggtggcgaaacttggaggtagggagagcagaggcggcggatctagcgcaggggatctcccgatccagccgcggcgacgacggtgggctagcgggttgggtgctccggcggtggtggccgtcctgctgctgccgctgtgcttgatccggttgttccacgcgtggatgcaggtggcgcagtcgacggtcgttgacgccacgccgcggtgccgggtgcgtgctccggtggacgcccaccacgtgaggccgtcgcccgcaccgcgtacgtacttctcctcggcctcgcacgagctaagccccgcgccgatcgtcaagcaatgccctgaaaggctggacggcgaggatccaatgaacagggacgcgcgcatgtggcgcgtcaacgatttgtctcccatggggatcgacggccccggcgcgtgcgcgggacggtacgggacgcgggcacggaacaacaacgatttgcccccaatcatgcggcgaatcatcacaggcccgggccgcctcgcgccccgcatcactcggtgtcacgtatcaaaacccacgatttcgcgcgtggcgcaggcgggaggtaccgttgggctagtcgattccacggctccacagtccgctcggtga

SEQ ID NO: 68441 - DNA, 284 bp, Oryza sativa
  Clone ID: PAT_MRT4530_69203C.1
caccactcatttcgatgatgcatacgggcgagtccataacgaacattcacaatacgagcacgttgcataacaatcataacgctcgaactccatacacgggacacggactcacagctacccgacggatctatcgtttagaacaatttgaaggagagctgaccacacacgcgtgcaggacttttgacctggggtacagttagtactaccgtaaacccgcccagtaccctgcacggttgcaccgcgcgtaccgtgtactagacggccacccaacgtgtacgcgaaaa

SEQ ID NO: 68442 - DNA, 750 bp, Oryza sativa
  Clone ID: PAT_MRT4530_69204C.1
gcggggaaagggagatatattactcagaatcagaacaaacaagttgcaaaataagattacaactatcatcagcctagaacttagtgagatattcagtacgggctttatttgctaaaacatgactgacagaattctgagaacgatgggggggcttcagtatgatcttccttcttcctctcaacagagtatcgatgtctctgacaagatgagccaacgctgacgccaggggcggagccagtgtacaaccattggtgtcacatgacaccaatggcttgtgtcttgtcttcattattccttttactttgcaatgagtgacaccaaattaacttgctttgtgacaccatcctatgtgagcatggacagccagacagtagctagcagcttaattaactattgatagcccaaaactcacaatatttgactcgtggtcaaagttgtttgatagcctaaaactcacagttagtggtcagagttgttttatgagacaatgttcttatccaaaacggcaaatattattaacctagaaagaatattattattcacttgcacatgtatatctagcaattttaatttagtcttttataatttaatttcaccaattagatagttggcatgaatacaagtcgaattatttttgaaaagaaaattctattttactttatcaattagcactaattttattttacttaagttgctatcattgatagtgacaccatcgatctattattctggctctgcccctggttgacg

SEQ ID NO: 68443 - DNA, 804 bp, Oryza sativa
  Clone ID: PAT_MRT4530_69205C.1
atggggaggcagccgtgctgcgacaaggtggggctgaagaaggggccgtggacggcggaggaggaccagaagctcgtcgccttcctcctcacccacggccactgctgctggcgcgtcgtccccaagctcgcagggttgctgaggtgcgggaagagctgcaggctgaggtggaccaactacctgaggcccgacctcaagaggggcctcctctccgacgacgaggagcggctcgtcatcgacctgcacgcgcagctcggcaacaggtggtccaagatcgcggcgcggctccccgggaggacggacaacgagatcaagaaccactggaacacacacatcaagaagaagctccgcaagatgggcatcgaccccgtcacccaccagccgctggagccgcctcgtcctccgccgcgcgagcaggatgccacgccgccgccgccgccgccgccgcctcaggagatcgaggagagcgaggaggaggagcaggagccttcgccgttgatcgagccgcacgagatcaccgcgccaccgccggcggccgcggccgaggccgccacgagcaactgctctgtttcccctgcttcggtgctctccccgtcctgctcctcgtcggcgtcggctgcctcggcggtggacgtggcggagtggccggagcccatgtacatgttcggcatggatggcatcatggacgtcggctggaacggcctcatctccggcgccggcgtggacgtcgacgtcgacgtcgacccgttcgaccattactaccacgacgccagcttcgacgatcaagacgtctggatcatctga

SEQ ID NO: 68444 - DNA, 393 bp, Oryza sativa
  Clone ID: PAT_MRT4530_69206C.1
ctaatcctgatccatgtcccccctgcactgcgagtgtcctgccaccataaaccggagcctgcaacagctggacgttggattcttagctctcgagctatgtgaaatacccttctcatctgtggaaaatacacaactaaaggggtggacaagattgaccagagactcttcttcatcatgcactgccgtcatatgcaatacaatgttgatatcatcatatacggcgtaagacgaacatcttgagcggagccagcccgagagcccgccatcgcggcggcctcggggaagacgaagcgcgggtggaggaggccgttcatccatcggcagaatgccactcccctcgggccagaactccggcgtgctctgctcgccacccccaaccgccgcggccgccat

SEQ ID NO: 68445 - DNA, 377 bp, Oryza sativa
  unsure (1)..(377): unsure at all n locations
  Clone ID: PAT_MRT4530_69207C.1
acaagaacagattgaacagatttttatcaacaagaacacaagaaaataccgtctatactccctatccaccaaccaatcaaagtctgcacataaaatataggtgatcttagccgtttaattcctcttccacccangctgccanctctttataacccacacataaaantatcagcccagtaatccatataccctataaaagagataggctatacactaaatnctaacccttccaaaccggtttatctctgtncnncgcnnatttgtatgggcttntatttaatctcggttctntccncctcctngtagnaggagnccacttnnnattttngggntggtaaccttgttggtattttaanaggtccagataaatcagggtg

SEQ ID NO: 68446 - DNA, 447 bp, Oryza sativa
  Clone ID: PAT_MRT4530_69208C.1
atgtcgatgttccctttcatgggtgcatacaaccttgaagatcccctacactgcccgctacagaagctcccgccggcgccgccccacacggtcgtcgacgtcgccgccgccgatgacggtaactacgtcgagcggcggagggtgcccccgcaccacctcccccaccgccccatgacccccgcctgcaaaaacttcgtcacagttttgttcgtcgtgtctacggtggtggtgctgggtgtgatcgcgcggatggtggtggtggacagcaccagctggggggaggcgctgctcatgctgccggtcatgctgctggtcatggcgatcatcgtcgtcatccaagccacggtgtacctgtccatcatcagagatttctcggcggcggcggcggagggacacgacggcggcggtgacagccagatgcttcttgatcagatggagcaagtttaa

SEQ ID NO: 68447 - DNA, 377 bp, Oryza sativa
  Clone ID: PAT_MRT4530_69209C.1
gatcttaacagtagaaccattacattagccgcttttaaacggagaacagaaccgcggccaaggtacacatactggtggcatcatattctttgagacgcctatactatttgaggaggacataactctaaagcctagatcttcgactggtcagaaaggcctgggtaggactgatgctgatacataagattgaacgcaccgatcgcttctcccctatgatgatcaccgttttgagccagctgcctggatatgcaggaagcatccgcgaccacatccactgacttggcacgaaaaatggtgtactaccctgcaaggcggctcaccatggagccggcaatgctcttgaaagacatggattgacccactaaaggctctgctct

SEQ ID NO: 68448 - DNA, 3114 bp, Oryza sativa
  Clone ID: PAT_MRT4530_6920C.1
atggccgagaagccaccgctgtcgccatcctcggctagcccaagcactgttaaagaaaagatccagaagttggggttgactgacgtcaatgaaggaaacgtcgtgcccatcgatccagagaaattcacacctgagcagaagaaggattttgaagcaatgttgcagcaagcctgggatcagttcttgaactcattcatgcagacccgcaagggaacactggttcagaagtataaagtaaaggtagttgccgatgatcctgggaccagttcttccaaaggtgaagacgggaaacaagctccagatggctcggctcaactgagtgacaaaggtgctaccgacggttctctaggaagtcaaggtgacaactctcaaggggtccatggagttcaaggcgatagagtgcatggagttcaaggtgatggtgctcaggggttgcaaggaggaaatcttaatcagaatagtgatgcagcacaagattttttcaataatttccaagaccgggtcaactatgctgtgcaccatgctttgatcaatcagtctggggtctttcctcgtcacaccatcagctcagccgacggcgccggcatcgactcccttacctacttcgtcagcattggcaccaggccagctgcaacaagttgtgcaactagtccaacaaacgccaccaaggcaacagcctccgcggccgattcaacaaacgccgttaagacagcaaatcgttcagccgattcagcatcaaggctcaatgagcgcatcggccgggtttgtggcacctgccttcttctccgcaagcccaatatcagccagggggactggctcaacgtcagtttgcgtctcagtacggacaagatggtgtcaacttatgagcacattagccgatttttagctcagtgtggtgaagcatcggctgtggacgctctgagggttaggttgttccgtggggttcatgagatgaagttatctgacttgacggcgattaagcatcgacatgatgaacctgtgcacgagtatattcagagattcagggagatgaggaacaagtgcttcagcttgagtttaactgacgctcagttagccgatctggcctttcagggtatggttgctccgattagggagaaattctcgtctgaagactttgatagcttgtcacatctgatacaaaaggtaaccttgcatgagcataggtctgcggatgctaggaaaagctctaagaaggttaatcatgtttgtccttacatgtatgggtcggatgacgatgaggatgactctgagatagctgcagccgaatgggtgaggagtaaaaaggtggccattgagggaggcaagattaagtttgatgattccaaaaagccgatgagggtcgatggaaatatgacaagcaacaggaaaggcatcgtgaagaagataatggtggctttgatcctcattggggctgtgagttcttcaggttctgttggaatgaaggaagtcgagcaagaaattaatcatcggctgaagaaagcaaaactgaggcaagagtggcatgctaagaatcaggatcctgtagctgacgatgttgcagctgatgaggcaaggaggttggcaaaaggaaagagtgttgtgatggcaccagttaacatggtgatgttcgagaagcctgaggggatagagaatcggcatcttaaaccattgtatataaatggctatatcaatgtgaagccgatgtctaaaatgatggttgatggtggggccgcggtgagtttgatgccttatgctacgctcaaaaagttgggtataaatgccgaggatctcatcaagacaaatatggtgctcaaggactttggtggcaatccatcggaaaccaaaggtgttctaaatgtggagctgacagtcggcagcgacaaaatagagatcgtaccagccgacagccagttgaagatggagaacccaagctattattttgagggcgtcgtggagggttcaagtgtctacactaaggatatggtagatgatctcgataacaagcaaggtcaaggttttatgtcggccgatgatttggaagaaatagatataggtccaggcgatcggccaaggccgacatttattagtaagaatttgtctccaggatttagaaccaagctaatagagctcttaaaagagtttagagattgcttcgcttgggagtattatgagatgcctggactcagccgatcaattgtagaacatcggctacctatcaagccaggggttaggccgcaccagcagcctccgaggagatgcaaagctgatatgcttgaacctgtcaaagttgagattaagcgtttatatgatgctggttttattcatccttgccaatatgctgagtgggtttctagcatagttcttgtcatcaagaagaacggcaagttgagggaagttgaagccgatgctattgaaatcatgggggattctttgatgcatgtatctcgagaacaaaatattgaagctaatgatttggcccaaggggcatcggggtataagccgatgatcaaagatgttaaggttgaaattgcagcaataacagccgatgattggagtatcacttacttcggctgcagcctgatcaacattgtcctcaatatcttcttcatccagagcttgttcaatggatggatccaaagcaggcaggtcgtcggtgttcgacgtggtcccctagccctagaccctcctctgccgcgtgcccggccatgccccgagccccgcgccgccgccgtcgcgccgtcgctgtcgccgtcccgtcgctgtcgcgttgccgcgcgccgtcgccaccaccgctgccgcgccgcctcgttccgcgcgcccttcgtctcgcgccccgtgccgccgcgcaccgtcgccgtcgctgtcccatcgtcactccgagccgcgcgccgtcgctgccacgccgtccccatcgccatcccgctgccgcgccgcgtgagccgccgtctcctcaagccccgtccagttgtcgcgtcggtcgccccgcacgccgttcacccattgtgtttttgtctcacgcgcagcgctactgccgcgccggtcgcccgttgcatcgccgtcgcctgcgccccgagcccccgtgccgagccgggccgagccctgtgccgggcataa

SEQ ID NO: 68449 - DNA, 2034 bp, Oryza sativa
  Clone ID: PAT_MRT4530_69210C.1
atggagaagcttcatagagatggacttctacactcgtttgattttgaatcatttgagacatgcgaatcttgtttacttggcaaaataacaaaggcacctttcacgggtcaaagtgaaagggcaagtgaactattgagactagtacatactgatgtatgtggaccaatgagctcaactgccagaggtggttttgggtactttattatctttaccgatgactttagtagatatggttatgtctacttaatgaggcataagtctgagtcctttgaaaagttcaaggaatttcataatgaggtacaaaatcatttggacaagacaatcaagtatctacgatctgatcgtggtggagagtactggagccttgaatttggtaatcatctaaaggagtgtggaattgttccacaactcactccgccaggaacgcctcagttgaatggggtgtctaaacggaggaatcgtacattgttggacatggtgcgatcaatgatgagccaaactgatctgccgctaagcttttggggttacgctctagagacagctgtgttcacagtaaacagggttccatcaaaatcaatggataagacaccatatgagatatggacagggaagcgtcccagtttgtctttcctaaagatttggggctgtgaggtttatgtaaaacgtttgcaatcggacaaactcacacctaaatctaaatcagataaatgcttctttgtggggtatcctaaggaaacgaaaggatattatttttataatcgggaagagggcaaagaaacaccggaaaacgcttcaacgtccacacaaccacaacaagctgagcaagatgttgttcaacaggttgaacaagttgttgttgaaccagttgtggaagcaccggcttcacgaaggtccgaaaggatacggcgtacacctgcgaggtatgcgttgttaactacaggacaatgtgatatattgttgttaggcaacgatgaacctactacctatgaggaagcaatggtgggaccaggctctgagaaatggcttggagccatgaaatccaaaatagaatccatgcatgtcaatcaagtttggaacttggttgatccacttgatagtgtcaaagccattgagtgcaaatgggtctttaagaaaaagacagatgtagatggaaatgttcacatctacaaggcacgattggtggcaaaaggtttcagacaaattcaaggtgttaattatgatgaaactttctcgccagtcgccatgctaaaatctattcggattgttttagcgattgctgcctatttcgattatgagatatggcaaatggatgtcaaaacagctttcctcagcggaaatcttgatgaggatgtgtacatgacacaacccaagggatttgttgatccacaatcagctaaaaagatatgcaaattgcagaaatccatttatgggttgaagcaagcatctcggagttggaatattcgttttgacgaagtaatcaaggcattgggctttgtcaaaaacgaagaagagccttgtgtatacaagaagattaatgggagcgcactgatgtttctaatcctatatgtagatgacatattattgattgggaatgatattcctatgcttgaatccgttaaaacatcgttgaaaaatagtttttcaatgaaggacttaggggaagcagcatatattctgggcataaggatctatagagatagatcaaagaggctaattggattaagccagagtacatacattaacaagagtactgcaaccactaggctatatgccctttcacatttgatcaattacttgaaccaagatatcacaaaacttaaatttagcacaacggatcttgctatgggcttatttggcacagctccagctccagctccacctctcctggaactggagctcagccaaacagttttagggcctgtttggcacagctccagctccagctccagccctcttggagcgggagctcagccaaacaatttcagctccactaaaactgggagtggagctgggtggagctctctcacaaaataa

SEQ ID NO: 68450 - DNA, 309 bp, Oryza sativa
  Clone ID: PAT_MRT4530_69211C.1
tggtgtgtgaactcaaacttgtaaagaaaagccgttaggatcacctgatcgtggagagcttgtcctgtttgaaccattcgtctgccagtgggttgtatttcatctttcattgccactttagtttgtatctgaccttattctgagatcattttggttaacactctgggtatattttggctacctcttatggtgtctatttatgatcacaggcataccagctactagtctgagactattgacttgatctagatggatgtcattggatcagactacagtatcgaatcaactccagtcatgcaatgtcttata

SEQ ID NO: 68451 - DNA, 1002 bp, Oryza sativa
  Clone ID: PAT_MRT4530_69212C.1
atgaggaggctcctaggtatcgtggtagacaccgatgtgggtgccttgggtgaaggcgacgttgggaacgcatgggctgatgaggacgtcgcacttgtcgatgagcgtcgggtcaaagagcatgtgaaggcagcggtgccgaaggcggtgggtcaacgccgagaaagaaaaggaagactccacgccgctctactcaccggattgtttggcaccaatgagctattggcactagtacatactgatgtatgtggaccaatgagctcaactgccagaggtggttttaggtactttattacctttaccgatgactttagtagatatggttatgtctacttaatgaggcataagtctgaatactttgaaaagttcaaggaatttcataatgaggtacaaaatcatttggacaagacaatcaagtatctacgatctgatcgtggtggagaatacttgacccttgaatttggcaatcatctaaaggagggtggaattgttccacaactcactccgccaggaatgcctcaatggaatggagtgtctgaacggaggaatcgtacattgttggacatgcaaatggatgtcaaaacaactttcctcaatgaaaatctggatgaggatgtgtacatgacgcaatccaagggatttgttgatccacaatcagctaaaaagatatgcaagttgcataaatccatttatgggttgaagcaagcatctcggaggtggaatattcattttgatgaagtagtcaaggcgctgggctttgtcaaaaacgaagaagagccttgtgtatacaagaagattagtaggagcgcactggtgtttctaatcctacatgtagatgacaaattgttgattgagaatgatattcctatgcttgaatccgttaagacatcgttgaaaaatagtttttcaatgaaggacttaggggaagcagcatatattctgggcataaggatctatggagatagatcaaagaggctaattggattaagccatagcacatag

SEQ ID NO: 68452 - DNA, 1179 bp, Oryza sativa
  Clone ID: PAT_MRT4530_69213C.1
atggactgcgggccgacgtcgacggtcgagggcggcgcgcgacgcgggacgccgggcgtgggtctaggattcgtcggcggtcgagggcggcgaggaggcagcggcggtcgagggcggcgaggggcgtcggcgttcgatggcggcgaggaggcggcggcggtccagggcggtggcggtggagggcgcgcggggcgtcggcggtcgagggcggcgatgagggggcgaggaggcgcggccgcaggcgacctgttcctcggcgccgccatgcacacgcggtacgccaagtcgcacctccctttcagtgctgtcagcatgacacatggaatcatggatcttagagcaagagcagccaaagagattctcaatttgactccttacagtgcatcaacacatgtggtgctctcaaatatttatgccactgttggcaaatgggaggaggctgcacaaatccggaaactattgagaaatcggggaatcagaaagaagcctggctgcagctggatagatcttggcagaatagtacatattttcgttgccaatgatatctcacatcctaggatcaaagacgtgtacaaattcttggaggtgatgtcagagaagatgaagcttgcagggtatgttccagataagatatgggccttggcaaaggatcatgctgccggaggggagacaaggctaaggcacaatagcaagaagcttgcactagcatttgacagattactgttagagatgcacatcggttccattgtttcagcgatggaagctgttcctgtggagattattgaaggtaatccagtgagcccacatgtgatcaaaatgattggttacaccgagagtctggataagcttggctttccccttagccgagagttgactactgatttgattctccagtcgctccctcccagttttgagccattcataatgaatttcaacatgaacaacctgaacaggaccttggcagaattgcatgggatgctaaagactgccgaggaaagcattaagaaaaactccaaccatgtgatggttatgcataagtgcaagcccaacaacaagaaaagtggtcaaaagagaaagctaaactctgatgagatcacaagtactagcaactctaagaccaagctcaagcagaagcagcaggatggaaagagttccacctcaggggctgaaaagaagtag

SEQ ID NO: 68453 - DNA, 2484 bp, Oryza sativa
  Clone ID: PAT_MRT4530_69214C.1
atggcagctcctgtaccatccagttttaacttgcggtctattcttgagaaagagaagttgactggaacaaacttcatggattggtatggcaacctgagaattgttctcaggcaagagcacaaagagtttgtgcttacacagccttttccagctgacttgcccaacaatgctcctgctgctcaacgtagggagcataaaaagcaatgcaatgattatcttgatataagctgcctcatgcttgctactatgtcccctgagcttcaaaggcaatatgaggcattggatgctcatacgataatcacgggactacgtaacatgtttgaggaccaagcaagagctgagaggtttaatacctcaaagtccttgtttgcatgcaggcttgcagaagttaatccatcgctccctcccagctttgagccgttcataatgaatttcaacatgaaaaacctgaacaggaccttgatagaattgcatgggatgctaaagactgccgaggaaagcattaagaaaaattccaaccatgtgatggttatgcataagcgcaagcccaacaataagaagagtggtcaaaagagaaagctaaactctgatgagatcacgagtactagaaactctaagaccaaggttcaaaagacagggcccgctaaggagacaggtcattggaagagaaactgtaagaaatacctagagcagctcaagcaaaagcagcagaatggaaagagttccacctcagagggttatggttttagatctgtggacaatggttgttcagtctattataatgacattttctatttcaatgcacccatgatgaatggcttatacattgtgaatcttgatggatgttcagtctataacattaatgcaaaaaggcaacgtcctaatgatttgaatcccacttttatttggcattgtcgcttcggtcatataaatgagaaatgcatggagaagcttaatagagatggacttctacactcttttggttttgaatcatttgagacatgcgaatcttgtttacttggcaaaatgacaaaggcacctttcacgggtcaaagtgaaagggcaagtgaactattgggactagtacatactgatatatgtggaccaatgagctcaactgccaaaggtggttttgggtactttattacctttaccgatgactttagtagatatggttatgtctacttaatgaggcataagtctgagtcctttgaaaagttcaagaaatttcagaatgaggtacaaaatcatttgggcaagacaaccaagtatctacgatctgattgtggtggagagtatttgagccttgaatttggcaatcatctaaagaagtgtggaattgctccacaattcactccgccaggaacgcctcaatggaatggggtgtctgaacggaggaatcgtacattgttggacatggaaacaaaaggatattatttttatcaggaagagggcaaagtgtttgtcgtccgacacggtgttttcttagaaaaagagtttatttcaagaaaggatagtgggagcatggtgcgacttgaagaaattcaggaaacaccggaaaacgcttcaatgtccacacaaccacaacaagctgagcaagatgttgttcaagaacaagttgttgttgaaccagttgtggaagcaccatcttcacggaggtccgaaaggacacggcgtacacctgcgaggtatgcgttgttaactataagacaacgtgatatattgttgttagacaacgatgaacctactacctatgaggaaacaatggtgggaccagactctgagaaatggcttggagccatgaaatccgaaatagaatccatgcatgtcaatcaagtttggaacttggttgatccacctgatggtgtaaaagccattgagtgcaaatgggtctttaagaaaaagatagatatagatggaaatgttcacatgtacaaggcacaattggtggcgaaaggattcagacaaattcaaggtgttgattatgatgaaactttctcgccaatcgccatgctaaaatctattcggattgttttagcgattgctgcctatttcgattatgagatatggcaaatggatgtcaaaatagctttcctcaatggaaatctcgatgaggatgtgtacatgacacaacccaagggatttgttgatccacaatcagctaaaaagatatgcaaattgcagaaatccatttatgggttgaagcaagcatctcgaagttggaatattcgttttgacgaaatagtcaaggcgttgggctttgtcaaaaacgaagaagatccttgtgtatacaagaagattagtgggagcgcactggtgtttctaatcctatatgtaaatgacctattattgattgggaatgatattcctatgcttgaatctgtcacgaccggaaataacccaatgggcgttccttacgtgcgtgcattaatccttgtcccaggaggcaaggtgcaccaaaagttgatacaattcagagtttaa

SEQ ID NO: 68454 - DNA, 1482 bp, Oryza sativa
  Clone ID: PAT_MRT4530_69215C.1
ctacttcttttcagcccctgaggtggaactctttccatcctgctgcttctgcttgagctgctctaggtatttcttacagtttctcttccaatgacctgtctccttgcaaaagaagcactctgcatccttagcgagccctgtcttttgaaccttggtcttagagttgctagtactcgtgatctcatcagagtttagctttctcttttgaccacttttcttgttgttgggcttgtgcttatgcataaccatcacatggttggagtttttcttaatgctttcctcggtagtctttagcatcccatgcaattctgccaaggtcctgttcaggttgttcatgttgaaattcattatgaacggctcaaagctgggagggagcgactggagaatcaaatcagtagccaactctcggcttaggggaaagccaagcttatccagactctcggtgtaaccaatcattttgatcacatgtgggctcactggattaccttctgcaagcctgcacgcaaacaaggactttgaggtattaaacctcttagctcttgcttggtcctcaaacatgttacgtagtctcgtgattattgtatgagcatccaatgcctcatattgcctttgaaactcaggggacatagtagcaagcatgagacagcttatatcaaggtattcattgcatcgcctttcatgctccctacgtttagcaacaggagcattgttgggcaagtcagctggaaaaggctgtgtaagcacaaactctttgtgctcttgcctgagaacaattctcaggttgcgataccaatccatgaagtttgttccagtcaacttctctttctcaagaatagaccgcaagttaaaattggatggtgcaagagcactcgacgcgctgtgcagcggaagaagatgctgagaagtcgaaagaactctcgcgaagtagcgcgcgtcgatgtagaggaagtagtcaatcgcaccagctcgaccttgtcctcctcgtgcattctcctcgccgtactcccacgcaccaccacgctggtgccagctatcctcccattttagaatcaaggataaatcaccccacaaagtgctcccctcctggatctctttcccgggcgacacatctcgaatggcgacgaccagacggcaagagagaagacggggatgaggttggccgatggtgatggattgccacgaatggaggacggccggcttgtcaccgtcgccgttcaccttctgcaccgagcttccaactctgtcgctgctcctagccgacagccgtcgctcaaccgctccaccgagccaccgcccggcgcacctcaaatagcggcgaccagacggcgggagaaaggatggggatgaggtcggccggcggtggaggatcaccgcgcctggaggacggccgggcttgtaactgccgccgttcagctttcgcaccgagccgccagatccccgtgcgcccagggggctctcccgcacctttctctccctcaccat

SEQ ID NO: 68455 - DNA, 377 bp, Oryza sativa
  Clone ID: PAT_MRT4530_69216C.1
tttcggcgtcccggagaagcgatgaggaatctggtctggcacagaatgagcggtgatcctccgtcctgccggagaagaagaagaagaagtaagtgggaggaggagcccgaggacgagagtgggaggagtaagaagaagcgccgaaccagaggaacccatggtttatcgaccagggtcccggccgaaagttaagtaaacctaaagcccccggccgttaaagcctacctccttaactctgattaacatgtgacctatctacaccatcttagtaccactgtaactttttcctgccactttgtaccatggcgttctccaactatttcctcttcttcttcccccctaataaataaagatccttccctttaaaaaaaaaaaaa

SEQ ID NO: 68456 - DNA, 2643 bp, Oryza sativa
  Clone ID: PAT_MRT4530_69217C.1
atggcgacggtgacgtcgggcgacggcatcgggcaaagcagcgtcggcagcaggcagcgggcgtcggcgatgggagcaggtggcgggcatcgattatggaagtgcatggccatgccaaaggtgattgaggagtcaatcacaagttatataatctatcaacagaagttgactgaaacaaacttcatggattggtatcgcaaccttagaattgttctcagtcaagagcacaaagagtttgtgcttagagagccttttccagctaacttgcccaacaatgcttctgctgctcaacaaagggagcatgaaaagcgatgcaatgattatcttgatataagctgtctcatgcttgctactatgtcccctgaacttcaaaggcaatatgaggcattggatgctcatacgataatcacgggactacgtaacatgtttgaggaccaagcaagagctgagaggtttaatacctcaaagtccttgtttgcgtgcaggcttgcagaagataaatgtgggcaaaagtctgccgcaaagacttatagtatcttagagtttgtgagagataatggtcgtgttcggatcaaatcaactggcacgctaatacatccgaaggcgaggaccttggcagaattgcatgggatgctaaagactgccgaggaaagcattaagaaaaactccaaccatgtgatggttatgcataagcgcaagcccaacaacaagaagagtggtcaaaagagaaagctaaactctgatgagatcacgagtactagcaactttaagaccaaggttcaaaagacagggcccgctaaggatgcggagtgcttcttttgcaaggagacagggcattggaagagaaactgtaagaaatacctagagcagctcaagcagaagcagcaggatggaaagagttccacctcaggtattaatgttatagaaattaatcttgctacttcctctactgattcttgggtatttgataccgggtcagttgctcacatatgcaaatcgttgcaggggctgaaaagaagtaggagcttagcaagagacgaagtggatattcgcgtgggcaatggaccaagagttgctgctgttacgatatggtatgtctacttaatgaggcataagtctgagtcctttgaaaagttcaaggaatttcagaatgaggtacaaaatcatttgggcaagacaatcaagtatctacgatctgatcgtggtggagagtacttgagcctagaatttggcaatcatctaaaggaatatggaattgttccacaactcactccgccaggaacgcctcagtggaatggggtgtctgaacggaggaatcgtacattgttggacatggtgcgatcaatgatgagccaaactgatctgccactaagcttttggggttacgctctagagacagctgcattcacactaaacagggttccatcaaaatcagtagataagacaccatatgagatatggactgggaagcgtcccagtttgtctttcctaaagatttggggttgtgagttgtggaagcaccggcttcacgaaggtccaataggatatggcatacacctgcgagcgattgctgcctatttcgattatgagatatggcaaatggatgtcaaaacagctttcctcaatggaaatctcgatgaggatgtgtacatgacacaacccaagggatttgttgatccacaatcagctaaaaagatatgcaaattgcagaaatccatttatgggttgaagcaagcatctcggagttggaatattcgttttgacaaagtagtcaaggcgttgggctttgtcaaaaatgaagaggagtcttgtgtatacaagaagattagtgggagcgcactggtgttgaagaggttcaacatgcaagattctaagaaaggtttcttaccaatgtcacatggcattaatcttggcaagaatcagtgtcctcaaacgactgatgagcgaaacaagatgagtgtgattccatatgcctcggcaatcggatccatcatgtatgctatgctatgtacacgtctagatgtttcatatgcacttagtgcaacaagccgataccaatcagatccaggtgagagtcactggatagctgtaaagaatatcctaaagtacttgagaagaactaaggatatgttcctagtctatgcaggacaggaagagctcgttgtaaatggttacactgacgcaagcttccaaaccgacaaagatgattttagatcgcagtctggatttgtgttctgcctaaatggaggcgctgtgagttggaagagttccaagcaagatacagtggctgattctacaacagaagccgaatatattgccgcttctgaagcagcaaaggaggctgtttggataaagaaattcgtttctcaactaggtgtgatgactagtgcttctagccctatggacctctattgcaataatagtggtgccattgcacaagccaaggagcctagatcgcatcaaaagtccaaacacattttacggcggtatcacctcattcgcgagatagtgggtagaggagatgtgaagatatgcaaaatacatacagatttgaatgttgcagatccgttgacaaagccactccctcagcctaagcatgaggcacacactagggcaatgggtataagatacattcatgattga

SEQ ID NO: 68457 - DNA, 435 bp, Oryza sativa
  Clone ID: PAT_MRT4530_69218C.1
atggtgggaccagactctgagaaatggcttggagccatgaaatccgaaatagaatctatgcatgtcaatcaagtttggaacttggttgatccacctgatggtgtaaaagccattgagtgcaaatgggtctttaagaaaaagatagatgtagatggaaatgttcacatctacaaggcacgattggtggcgaaagatttttcatatgcacttagtgcaacaagccgataccaatcagatctaggtgagagtcactggatagctataaagaatatcctgaagtacttgagaagaactaaggatatgttcctagtctatggagaacaggaagagctcgttgtaaatggttacactgatccaagcttccaaaccgacaaagatgattttagatcgcagtttggatttgtggtctgcctgaatggaggcgttgtgagttga

SEQ ID NO: 68458 - DNA, 1638 bp, Oryza sativa
  Clone ID: PAT_MRT4530_69219C.1
atgaacaacctgaacaggaccttggcagaattgcatgggatgctaaagactgccgaggaaagcattaagaaaaactccaaccatgtgatggttatgcataagcgcaagcctaacaacaagaagagtggtcaaaagagaaagttaaactctgatgagatcacgagtactagcaactctaagaccaaggttcaaaagacagggcccgctaaggatgcagagtgcttcttttacaaggagacaggtcattggaagagaaactgtaagaaatacctagagcagctcaagcagaagcagcaggatggaaagagttccacctcagtctataacattaatgcaaaaaggcaacttcctaatgatttaaatcccacttttatttggcattgtcgcttgggtcatataaatgagaaacgcatgaagaagcttcatagagatggacttctacactcgtttgattttgaatcatttgagacatgcgaatcttgtttacttggcaaaatgacaaaggcacctttcacgggtcaaagtgaaagggcaagtgaactattgggactagtacatactgatgtatgtggaccaatgagctcaactgccaggggtggttttgggtactttattacctttaccgatgactttagtagatatggttatgtctacttaatgaggcataagtctgagtcctttgaaaagttcaagaaatttcagaatgaggaaacgaaaggatattatttttataatcgggaagagggcaaagtgtttgtcgcccgacacggtgttttcttggaaaaagagtttatttcaagaaaggatagtgggagcatgttgtggaagcaccggtttcacgaaggtccgaaaggatacggcgtacacctgcgagacgatgatgaacctactacctatgtggaagcaatggtgggaccagactctgagaaatggcttggagccatgaaatccgaaatagaatctatgcatgtcaatcaagtttggaacttggttgatccacctgatggtgtaaaagccattgagtgcaaatgggtctttaagaaaaagacagatgtagatggaaatgttcacatctacaaggcacgattggtggcgaaaggtttcagacaaattcaaggtgttgattatgatgaaactttctcaccattcgccatgctaaaatctattaggattgttttagcgattgctgcctatttcaattatgagatatggcaaatggatgtcaaaacaactttcctcaatggaaatctcgatgaggatgtgtacatgacacaacccaagggatttgttgatccacaatcagctaaaaagatatgcaaattacagaaatccatttatgggttgaagcaagcatctcggagttggaatattcgttttgacgaagtagtcaaggcgttgcgctttgtcaaaaacgaagaagagccttgtgtatacaagaagattagtgggagcgcattggtgtttctaatcctatatgtagatgacatattattgattgggaatgatattcttatgcttgaatctgttaagacatcgttgaaaaatagattttcaatgaaggacttaggggaagcagcatatattctgggtataaggatctatagagatagatcaaagaggctaattggattaagctag

SEQ ID NO: 68459 - DNA, 480 bp, Oryza sativa
  Clone ID: PAT_MRT4530_6921C.1
cggacgcgtggggtttcaccaccacgtctcgtagaggattagacgagtaaaacagcgggcgtacggacggccagcgatggcggtgctcccgccgccggtgagggttgcggctgcggctgccgccaccacgttcgggctctcgacgtcgccggcggcggcgacgccagctggttgccgtcgttgtggtcctagaggccgcgctgccgtgcacgtggccatcagcgcgagcgggcgggcttctttctcgcgcggtgcggctggtgatggcggcggcggccgaccggccatcaccgtcgccggtgacccgcccacgttcgtcaccgcgcccggccgccgcatcgtcgccgtcggtgacctccacggtgatctaaaccaaacgagggcggcgctagtgatggctggtctcctgagctcggaatcggatggccatgtatggacaggagggcagacggtgctggttcaagttggagatatccttga

SEQ ID NO: 68460 - DNA, 243 bp, Oryza sativa
  Clone ID: PAT_MRT4530_69220C.1
gttatcatactaaattcccgcagcaatgcgcggggtttcacctagtttataaaagaggaaggtacctaagataagaagacatctcctcgaaaggtaaaaaaccacctcccatgtcaaacattagatacacaaacaaacctaaaatgatactatattacatataccctcttagcaaaaataaattacctactatatacagaccaagcactcaattagcttctatgatcaaacctatggggatat

SEQ ID NO: 68461 - DNA, 2115 bp, Oryza sativa
  Clone ID: PAT_MRT4530_69221C.1
atggcagctcctgcaccatccagttttaacttgcggtctattcttgagaaagagaagttgattgtaacaaacttcatggattggtatcacaacctgagaattgttctcaggcaagagcacaaagagtttgtgcttacagagccttttccagctgacttgcccaacaatgctcttgttgctcaacatagggagcatgaaaagcttgcagaaggtaatccagtgagcctacatgtgattaaaatgattggttacaccgagagtctagataagcttggttttccccttagtcgagagttggctactgatttgattctccagtcactccctcccagctttgagccgttcataatgaatttcaatatgaacaacatgaacaagaccttggcagaattgcatgggatgctaaagactgccgaggaaagcattaaaaaaaactccaaccatgtgatggttatgcataagcgcaatcccaacaacaagaagagtggtcaaaagagaaagctatactctgatgagatcacgagtactagcaactctaagaccaaggttcaaaagacagggcccgctaaggatgcagagtgcttcttttgcaaagagacagtttattggaagagaaactgtaagaaatacctagagcagctcaagcagaagcagcagtatagaaatagttccacctcagtggataagacaccatatgagatatggacagggaagcatcctagtttgtctttcctaaagatttggggctgtgaggtctatgtaaaacgtttgcaatcggacaaactcacaactaaatcagataaatgcttctttgtggggtatcccaaggaaacgaaaggatattatttttataatcggaaagagggcaaagtgtttgtcgcccgacatagtgttttcttggaaaaagagtttatttcaagaaaggatagtgggagcatgttgtggaagcaccggcttcacgaaggtccgaaaggatacggcgtacacctgcaagtttggaacttggttgattcacctgatgatgtaaaagccattgagtgcaaatgggtctttaagaaaaagatagatgtagatggaaatgttcacatctacaaggcacgattggtggcgaaaggtttcagacaaattcaaggtgttgattatgatgaaactttctcgccagtcgccatactaaaatctattcggattgttttagcgattgctgcctatttcgactatgagatatggcaaatggatgtcaaaacagctttcctcaatggaaatctcgatgaggatgtgtacacgacacaacccaagggatttgttgatccacaatcagctaaaaagatatgcaaattgcagaaatccatttatgggttcaagcaagcatctcggagttggaatattcgttttgatgaagacttagggaaagcagcatatattctgggcataaggatctatagagatagatcaaagaggctaattggattaagccaaagtacatacattgacaagatgtttcatatgcacttagtgcaacaagccgataccaatcagatccaggtgagtcactggatagctgtaaagaatatcctgaagtacttgagaagaactaaggatatgttcctagtttatggaggacaggaagagctcgttgtaaatggttacactgacgcaagcttccaaaccgacaaagatgattttagatcacaatctggatttgtgttctgcctgaatggaggcgctgtgagttggaagagttccaagcaaaatacagtcgctgattctacaacagaagccgaatacattgccgcttctgaagcagcaaaggaggttgtttggataaagaaatttgtttctcaactaggtgtgatgactagtacttctagacctatggacctctattgtgataatagtggtgccattgcgcaagccaaggagcctagatcgcatcaaaagtccaaacacattttacggcggtatcacctcattcgcgagatagtgggtagaggagatgtgaagatatgcaaaatacatacggatttgaatgttgcagatccgttgacaaagccactccctcagcctaagcatgaggcacacactagggcaatgggtataagatacgttcatgattga

SEQ ID NO: 68462 - DNA, 2181 bp, Oryza sativa
  unsure (1)..(2181): unsure at all n locations
  Clone ID: PAT_MRT4530_69222C.1
ctcctccgggacaagcgttctggcgcgcacttggccagcgcctaactccctttacccaacacacggttcggcgccgatgctagctgctgctgcctcgtctcgtcgcgtcgtagcctaagcaccgcaacgctagaagccgagactggtctatggctaggctaaagcttgcccgatctggaggttaggcgcgcgccgcagcggggggcgacgatgatataaatggccactagcgctagctacccctcctgctccttgccgaattgccgtgcacagtgcttttttttcttcttcttcttcgtcttctcccttgccatctctgcgctccgatccttggttgagctgctgtcttgtttgtttggctggatcaataatgcatgcgtccgtggggaggangatggatgaagcgatttttttctcaggtcacccacgttgttatgaatgactttgctctgatgaatgaccacaccgtgctgcttcaaggccatgacaagtcaaggatcagcccagctggttatttgacaaggtcaggacctacacagggcggtggcatcagaaacaatattggatattgtgacgggagatccatcaatgaatcctgcggtaaaagaagcacttatccaccaacttacaagaaagatgtcactgttccaaaaagtacaaaaccaagcatttttgatgctgatgaatatgtcagtgttagcaatgtttcagacgttccttcgtcagaaggcaatactatgcaggatgagcacaggaacaaagggaaagatttgttatactgtgattggtctgaactgctcaacttggatgacctcgaagcagatctgagaagtttcgagtccacgtttgagataggaagtaatcactttgaagatccactgtggtcttcagtttgcttaccagatgcccagctagtaccaagcagctgtctcttggacaataccaatttgtcaactgtttcgaatgagagcacaacaaagtctatattatcatcagtttcagtttccgatactactagtgctgaaccattgttccttgatcagaataatatggcaaatcctatcaacatacaacaaccacccagcaaaggaagaagttcggcaactttgaatcatgaagcacttgcctgttcttccggggaaatcgagcgattttcacaacattcagatgttgatgttttctacccatttgacaatgtaacaagctcggaacgcataagtggctgtgagggactagaggctatcttttgcacaaatcaggaaatgctagccccaacaacatcaagcatcatgtgtgatgatgaaattgtatcttcatcgactttctcagcaccggatctcgttgcaacctacgttccgcgttcgatgaagagatctcatgatccactgaatggaactccagacatgatcctcgacgaaatggctggaaatccactagagatgtatttccctccatcattgactgcatatgaacacccagaacatctgaataacgttactttgacacaaacacaccagtttcctgaaggatttgcaggtgacgatgttctgaaaagtgcagacttacagttcctctcgaagggaaagacttcagcagacttatgtgtgaacccttgctcaccactgattctagaagctgtgccagttaaggatcttggcttccataagcttcaggaaggcatgaatcagttggacgtggcatccaaagctcgcataagagatgccttgtatcgattggccaattgtgttgagcataggcatcgcattgctagtacaacagagaccgttaaccaacttggagttatggaatcatcagcttcaaagaggtggagagaaattcagatgatgaaccctatggatcgctcagtggcacagctgcttctccagaaaccgctccaccataaatctccacctgattcggcgctcggcattggtccctgaattgtactgcaccgtgaaaaacacgtaggagtggctgctgatgcgatgtggttttttttactgcacatgtctgatcgattgagcattctaggtccggcaattttttttccctctcggttccggtacgcatgtatatacagtaatcactaaagagtacagacttactagatgaaatgtaatgtgatagcaacgctttgctgttcagagatgtgattctaaatagaaactacagtgttttttt

SEQ ID NO: 68463 - DNA, 417 bp, Oryza sativa
  Clone ID: PAT_MRT4530_69223C.1
atggggtctgcggcggcggctgacccggccgcaagcgccagccgtccccagcaggaagccgcggcgggcgagcagggcaggcgatggggagccagggagcaagaggttatcagcgtggaggagcttgtggaacttgagagtattattggaagggaaaaaaaagaggagcgccagcactgcgcgtgccctgctctggcgcggatgcgcaacccccacccccaacccagtggcgagcaacccaacagtgagcgctgcttcgcccatcgcacgtcgagtcgtggtcctcctgaaggttggggaggccggaaggttggggagaggaggggtggtggtgttagcgggcggcgcaaggtctgtgagagacttgagagtttagagctagtagaagccttccaggtgtccaagctccagttgtga

SEQ ID NO: 68464 - DNA, 606 bp, Oryza sativa
  Clone ID: PAT_MRT4530_69224C.1
atgacgttagaagatagggaactcttggattgtatcatggagaacacctccttcgtttgttgtgaaactgtcctggaaatcgaggatacgcatgaggaacctccgatggccaaatcggagaatacaacctctacatcccatgattcgaccgttgaatcatcacccgaaccacgggaaccgaaggtagaaattcagccttcggaatttccattccagtttgagggtgatctttttgaagattatggaagcccctcaaactattcatgccaaaagagtgcaccggtcctgcgtagttctcccatgccactcaaggagattctgttcaaagagatgcaacaggaattaactaccatcatgagggatgagtggttaagggaggtggagctttcttctgaagtaattcggattaacaccccatccttaactattacatgtctcatgagagaggccatggtgcaaactctttataatccaactattggcgcaaacattatgtctacaatctttgcattaaattgcttaggggatgaaccattggcaccaatagaaaaaacactttcagatcctatctggtcctatcatcgaaggttatgggattctttgtag

SEQ ID NO: 68465 - DNA, 324 bp, Oryza sativa
  Clone ID: PAT_MRT4530_69225C.1
tcaacgtctgcctcgtcttcccttgtcgccatcgtctccgccgagccgagcggacagcgccgctggccacccctccaaccggcgcccgacctcctcctttgcccggcgccgctccggctcctccagcctgacggcctccatcaccgccgcgctggccttcccccatcctccttgccgccctgacctccttccccgatgccgcagggccaccttcaggccacggtgttcatcagtgtcagcgctactaccggagacggacgccggcgcgtcgttgtcttccgcggggaggcggtggaacatgggactggtgaacgcgatggccat

SEQ ID NO: 68466 - DNA, 189 bp, Oryza sativa
  Clone ID: PAT_MRT4530_69226C.1
tcggccacccgttcggccacgcgttcggccacgcgttcggccacgcgttcggccacgcgttcgggggggagaaaaagtgttggggtggccacttttttactttttcagagacaccctgccactggttggattattcatgctttcacaacaaattccgaaaagattacccgccaatctgatattgggatc

SEQ ID NO: 68467 - DNA, 2004 bp, Oryza sativa
  unsure (1)..(2004): unsure at all n locations
  Clone ID: PAT_MRT4530_69227C.1
atggcggtgtcctggcccgggatggtgcagtggtgggaagaatggcagctccgcgtgctcgcgcttagcagtctcttcctccagtgcttcctcttcgtctccgccaccttccgcaggtaccgcatcccggcactcttcaggacatgcatctggctcgcctacctgggctccgatgctctggcgatctacggcctcgccaccctcttcaaccgccacaggaagcccgcgccgggggcggtggccgccgccggcggcaccagcaacggccacgggagatcttccatgctggaggtgttgtgggcgcccgtcttcctcatccacctcggcgggcaggacacaataaccgcgtacaacatcgaggacaacgagctgtgggcgcggcacgcggtggccatgtcgtctcaggccgctgtgtccgtctacgtgttctgtaggtcatggtcccggcgggaaggtgccgccagcattacgtggcacgcaaccgtgagctctgaccgtcggagccggaggaagacgacggcgnaggaggaagaaggcgacatgtcgttagagaactacatacggcaggcaagagaacaagccgccaccaggaacatcgacgacgcggtgaacatcaacgacgacggcgaggctcgtcgggcggcccgccgccgtagccgcgagcagcgggcacagttgcttgcacccaatatcctagaggagctcatggagctgttcatagatttccccgcaccctacgctcgccggattggctacctcacgtccttcatggcgctcgaaaactacgacgcctactacaacctgtgcaatcttctggatttagcattccagttcttctacaccaagaagaacaccaactacaccatcgtcggcatcttcctgtgggtactcttcttcctgctgggaatcacggccgtcgcgggcttcgacgggcttgacagcaacaaggacggacttgacagggacgatgtcaaggtaacctacatccttctgtgctctgccatcgtgatggaattcagttcccttgtttggctgaacgactggaactgggtgccattgtggatgctagcaccagaaatgcaccgcactatcgtgcagttcaacctcatcggcttcgctgcccgcagccgatggccaacaatggtgatgtggatcgctacgttgttggggtgcaagaactatgtcaaccaacactggtatcttgaacatcgttcctcaacagcaaagatcataggtttcatccgcaaggacctgacatccggttgggttagcctacgcagcgtcgccgaccaccggagattcaatgaccggcgaggccattggactctccggcgggagcaatgctacggggagctagggtggagcgtaacggagttgccgttcgacgaggccgtccttgtctggcacatcgccacggccatctgccttcactgcacggatgttccgacggctgctgaagatgccgacggcgccagcgcggcggcgcgctccatggaaatatccaactacatgatgtacttgctcctgttccagccggacatgctgatgcccggcacccaacagagcctgttcaccgtggcctgccgcgagatcaggcgtgccttgagaaaccagaggcagcaggagaagctcagcgagagagagcttgcacgttggctcctcttcagcgtcgacgagcccaccacggccgctgcagagcaaggaggaggaggaggaggaggagaaggccggcatctagcaaatgcgcgcaggctcgccggagcgatgatggagctggacgctgacaggagactaagggtcatcggcggggtgtgggtggagatgatatgctactccgcgagcagatgcagggggttcctgcacagcaagagcatgggcgtcggcggggagttcctcaccgtcgtctggctcctgcttcaccggatgggcatggaggggttggccgacaagctccagaggccagagcttactactggagacgtgcaggatgctgttgttgtgtaa

SEQ ID NO: 68468 - DNA, 369 bp, Oryza sativa
  unsure (1)..(369): unsure at all n locations
  Clone ID: PAT_MRT4530_69228C.1
cggacgcgtccgcccacgcgtccgccggcagccgtcacccttcctcccggctcaagcgaccgcgtgcggcggatggctacggcgactgacagcntgctgcggacggagactgcgacagggcccgcgtgcggcggacggcgacggcgacgacgggggcggtgttgcgtgcggcggacggagacggtgggggcgaggcggcgcgaggcgactacttgcggcggacggcgagaagcggaacctgtcggtgcggccgggtcatggcaacggcgtgcggcggacggcgatgccggtcttggggcggccggattctaggtcggcggccctgaaaccccggatccgacattgtgaggcgacggcgaccaaaggggc

SEQ ID NO: 68469 - DNA, 495 bp, Oryza sativa
  Clone ID: PAT_MRT4530_69229C.1
atgaacagtagtggtacagtacgacgaagcacacaaaacgatgtgcagacatgcgtggtctcctcctctgatacacattccatccacaccggtgtgcatggatcgatcgatcgccatgaatgctgcgctcagatccgaaggaaccgggtggccttcaacgtgacaacatatgtcgtcgtcgtcgtcgtcatcatcgtatcaacgccatggcggcagctgcatgcctgcatgttggcaggctggactcgtactagtgatgacgaacagtttttgttcgtcgatcgaccgacaagggttgctcgcccccatgcgtgctctcatcacgtatatatgcacgcgtattgcgtgtgtatgcgtacactgtacacgctgtacatgcatgcaagagcaaaagagccaagaggtctcgagaggccaggggggacggcatgcatgaatcaagcagcgaagtcgtccaaaggagacttaaaggctgcgtttaatttacaccaaaat

SEQ ID NO: 68470 - DNA, 5591 bp, Oryza sativa
  Clone ID: PAT_MRT4530_6922C.1
ttacaggatcaaatcaactggcacgctaatacatccgaaggagagctttggacctgcactggagttaagcagatctcccatgccacgtgttttctgtcaacacacttttggcacgcccggtgggacctggttagaagtcagccgtcagttcttcctcatggccgagaaacaagcaccaccaccatcaagcccaggctccgttaaaggcaaagtatcgaagccaggattgactgacatcattgatgacaatgtcatgccaatcgatccggagaagttcacgcctgagcagaagcaggagtttgaagcaatgatgcagcaagcgcgggatcagtatttgctcgttcatgcaaacaagcaaaacgatttgcaaagagaaggcggcgacggctcgggtcgacggcgacgagggggctccggtggtcggcggcgaaggaggatgggcggccgaggttcctcacctccgtgcgcacctaacggcggcgacggcaagcggcggcgacgacggaggcggcggcgcgacaatgccgaagacggccggcggcggcggcgaacttggcacacacggcgacggcgctaggaggcacgggagaagtcatcatgctttgatcaatcagttcggggtctttgtcaatacattgtcaaacgtgatgaagacaatagctgatggttcgatagctgagcatcaggctacaggcccggtttacttgcaaggaggcgtcttcccgaattatcgatctttggtcaccgatgttcagccagttgtgcaggcggctccctctgttgcaccaacaactcaaccaacggtgccagcatcaactcccttacccgctacgtcagccatggcgccaggtcagccgatgaaccctcggttgttaatgagggagcatccacagcctactgggcagaccgcgaatcagccgacccaagatcaggttgctgccatgtttttgccacctccacctattgttgatccagtgcagcagcagccgattcagcagacaccaccgatccagccggttatacagccgggttcgcggcacctggggggcaacctgcgcagcaattcgtgaaccaaatcgtcccagagcatttggttcaccatgcacagccggatggcacgatgtaatgagggaacaatttggacttaaaccaaaagaaactggaagtttgtatcggcagccttaccctgagtggtttgaaagagttcctattcccaatcggtttaaagttccagatttctgcaagttttcaggacaagagggcgtgtcaacttatgagcacatcagccgattccttgctcagtgtggtgaagcatcggctgtagacgccttgagagttaggttgttctgaatgggtgaggagcaaaaaggttataccatgccaatgggtgaaaagtcctggaaaaaaggagaagtatgattttgatatcaccaaagctgacaagattttcgatttgctactccgagaaaagcatattcaacttcctgctggtcatacgatcccatcggctgaggaattaggcaagaggagatattgcaaatggcataattctgggtctcattctaaccaatgattgcaaggtctttagacagcaaatccaggtggccattgaagggggaaagattaagtttgatgattccaagaagctgataaaggtcgatgggaacccttttcctgttaacatgatgcatatagctagtcaagcagccgatggggcccgtgcaaagggtttccaagtatattcggctaagattatcaataagtatcaaaggaagtatgataagtagcaggagaggcgttatgaagagtacgacgatgggatgagattgccatccattgaaaactgtcctgggtgtggtgatgtcgtcgagagctcaagccaaccacataatagggatgatcggctgagacgaacaaaactccctattcatcaaagattgggtccgatgaatcaagatcatagccgagaggacgaggtgattaggaagaatcaatggtgtccttctggtattttcacaaagaattagaaaaggaggaaaccaaaaccaagacaggagtggcgtgtcaagagtcaggtccccacagccgatgatgctgcggccgatgaggtgaagaggttggcaaaaggaaagagtgttactgcggcaccaatcaatatggtctttacattgccagctgagttcgggatcgaccaggccgatgtcgatgaagtggaggaagcgtcggctaagttggtcctgtcaccagaacaagcagtattcgcgaaacccgaggggacagagaatcggcatcttaaaccattatatataaacggctacgtcaatggaaagccgatgtctaaaatgatggccgatggtggggccacggtgaatttgatgccttatgctacgttcaagaagatgggtaggaatgccgaggatcttatcaagacaaatgtggtgctcaaagattttggtggtaatccatcggagaccaaaggtgttctaaatgtagagctgacagtcggtagcaagactattcctaccacgttttttgttatcgatgggaagggttcatacagcttgttgcttggaagggattggattcatgccaattgttgcatcccttcgactatgcatcaatgcttgattcaatggcaaggcgacaagatatagatcgtgccagccgacagccaatcgaagatggagaacccaagctattactttgagggcgttgtagagggttcaaatgtctacgctaaggatacagtagatgatctcgatgacaagaaaggtcaaggttttatgtcggccgatgatttggaagaaatggacataggtccagagtttagaaccaagttgatagagctcctaaaagagtttagagattgcttcgcttgggagtattatgagatgcccgtactcagccgatcgatcgtcgagcatcggctacctatcaagcctggggttaggccacgtcagcaacctccgaggagatgtaaagccgatatgctcgaacctgttaaggctgagattaaacgattgtatgtcgctttttttattcatccctgccgatatgttgaatgggtctctagcatagttcagttattaaaaagaatgatttgaataaagctacaccaaaggacgaatatccaatgccagtagccgattagctggttgatgctgcgttagggaataagattttgagttttatggatggaaacgcagggtataatcagatctttatggctgaggaagatatccataagacggcttttagatgtcctggtgcaatcggcttatttgaatgggttgtcatgactttcggcttaaagtgtgctggagcaacatatcaacgggccatcaactatatatatcatgatttaatcggctggttggttgaagtttatattgacgatgtggttgttaagtctaaagaagtggaggaccacatagctgatttaaggaaagtgttcgagagaaccaggaagtatggcttgaagataaatccaacaaaatgtgcttttggtgtgtcggctggccagtttttgggatttcttgttcatgaaagggggattgaggtaacccaaaggagcgttaatgcgatcaagaaaatccagcccccagaaaataagacggagctacaagagatgatcggcaagataaattttgttagaaggtttatctctaatttgtctagaaggttggaaccttttacacccttattgaggttaaaagccgatcaacaattcacttggggggcagagcagcaaaaggctttggacaatatcaaggagtatctcagctcttctcctgttttgattcccccacagaaaggaatatcgtttaggttatatttatcggctggcgagaagtcaatcggctcggttctgattcaagaattggaggggaaggagcgagttgtgttttatctcaatcgacggctcttcgatgctgagactcggtattctcctgtggagaagttatgcttgtgcctgtatttttcgtgtacgaggttgaggcattatctattatctaacgagtgcactgttatatgcaaagccgatgtagtcaggtacatgctgtcggctccaatattaaagggacgagttggaaagtggatattttctttgactgagtttaatcttcgaaatgaatcaccgaaggcgattaagggacaagctatagccgattttattgtggaacatcgagatgattcaatcggctcggttgaaataatgccatggactttattctttgatggatcggtatgcatcatggttgtggcatcggcttagttataatttcccctaggggggcatgtttcgagttcgcttatactattaaaccatatgcaactaataatcaggctaaatatgaagcagtgctcaaggggttgcaattacttaaggaagttgaagccaattccgttcaaatcatgggggattcattgttggtaatcagccaattggcaggggaatatgaatgcaagaacgatacgttgatggtttataatgagaagtgcctggaactaatgaaagggtttcggcgggtcaccttgaagcatgtatctcgagaacaaaatcttgaaactaatgatttggcccagaggcatcggggtataagccgatgatcaaggatgttaaagttgagattgcagttatatcagccgatgactggaggtatgatgtacatcagtatttgagtaatccctctcaatcggcttctaggaaattaagatacaagacattaaagtatacattgttggatgatgagctttattatcggacgattgatggggtattgcttaagtgcttgagtaccgatcaggctaaggttgcaatcggcgaagttcatgaagggttctgtggtactcatcaatcggctcataagatgaagtggttgcttcaacgtgcagggtacttttggccgacgatgctggatgattgtttcagatattataaggggtgtcaggtttgtcagaagtttggagcaattcagcgagcaccagcgtcggccatgaatcctattattaaaccatggccgttaagaggttggggaattgatatgatcggcatgataaacccaccatcaagtaaaggacataaatttatattggtggcgactgattatttcaccaagtgggtagaggcaattcctttgaagaaggttgattcgggggatgctattcagtttgttcaagagcatataatctatcgatttggtcttcctcaaactatcactatggatcaaggttcaatcttcgtgtccgatgagtttgttcagtttgccgatagcgtgggtatcaagttgttgaattcttcaccttattatgcacaagctaacgggcaagccgaggcatctaataagagtttgattaagttgatcaagcggaagatttctgattatcctcggcagtggcatactcgattggccgaagcgttatggtcttataggatggcttgtcatggatcgatccaagttcctccttataaacttgtttatgggcatgaggctgttttgccataggaacttagaatcggttctcgatgaacggagttgctcaatggcaaatatttgaagaaatattacccaagtgtgtgggttcacgca

SEQ ID NO: 68471 - DNA, 396 bp, Oryza sativa
  Clone ID: PAT_MRT4530_69230C.1
tcgtcttcttttcgcgacaggatacataaaacacggcgggaggttacatatctagtgaaggatacattagacaagcttaaacaagctagcgaggcggatcatcgcgttgaagacagcgctaccaaaaagattgctgatgcaaagctagctaaagattttcaagcagtcctaaaagaattccagaaagctcaacgattagcagtagagagagaagctgcatatgcaccttttattactcaagcgggcctgccacagagctacaactcaaatgaagcgaacaatggtgctgataagttggcagagcagcgcacacagcttctagaatctagaaggcaggagttggtcttcttggacaatgaaatagtgctcaatgaggccatcattgtggagagggat

SEQ ID NO: 68472 - DNA, 1281 bp, Oryza sativa
  Clone ID: PAT_MRT4530_69231C.1
atggcgagcggcggcggcacgactccggccaccgaggagcggaccacctgcaggcggcgccaccaccgtggtagtattagtactagtactgctgccgcgacgctgctccggagcgtcgccgccgccgtcctcctggtgctcttcaccggctccctcgtgttctacgcgctgtgcgccgcggccgcgccgccgggagcctcgccgggcggcgtggtcaccagctggaaggccgggtcgtcggcgtggctgctgctctgtttggtggtggacgtggtcgtcgtctccgggctcgtggtcgagcgatttggtgttgggaaggaggcgtcgtctatggtggaggaggatcaacttggaggtgatgtccagggaggtgacaaccatgtgcttccttttgatctcaatattgatgcacctggccctcaagtgcttccttttgatctcaatattgatgcacctggccatcaaggagaaatgaatccagacaatggcgatgcaatggatcaagttctgcaactttatggaggtcacatccataatgcctttccttttgatatcaactccgatgccttcgaggaacacctacaaatgcaagcaggtgtaccaaagagcacgctgcataggatgttgaaagaagggatactaagacgtcactcgaacacattaaagccattgttgaaggaagagaacaaacgatcaaggctgcgatggtgtctttccatgttagattggcatactttgccaaatgaacccaagtttgttgatatgcgcaatattgtgcacatcgatgaaaattggttcaataccactaagaagacaagaaatttttacatggtccattgggaggatgatccatacagacctgtgcaaaacaagaattctattgataaagtgatgttcttggcagcagtggctaggcctagatacaatgaagaaggtatttgcacttttgacggcaagataggcttgtggcctttcaccaaaaaggaaccagcacaaagggcaagccaaaataggccaagagggactcttgtcaccaagacaatcaagaaggatatcgagcaggaatttcaggcttatgatgacaacaagctgaatagggttttcctaactctacaatcttgcttgttagaggttatggaagttgatggtggaaatggatacaggattcctcatatgggtaaagagaggctagagcttctagacattctccctaatacccttagttgtggtcgtcagctatatgacaaggtcagaacagcattatccaaccaagtgcagtaa

SEQ ID NO: 68473 - DNA, 1698 bp, Oryza sativa
  Clone ID: PAT_MRT4530_69232C.1
atggctttagatctaaatgaactagcagatgagggagatgagcaagctgtgcctgaccttaatgaaccagtggcagatgagggagatgagcatgatgtgcctgaccttaatgaaccagtggctacagaagttgaaatgcatgttggtcaagaggaggatcaacttggaggtgatgtacagggaggtgccaaccataaccatccagacggtgccgatgccatggatgaaattctgcaaatttatggaggtcacaaccaacatggctttccttttgatgttaactctgatgcctatgaggaacatctacaaatgcaagcagacatgcaggagtacggtgtgtatgctggtgatgtggaaattgtttttgaacaagaggagttggatgattcagatgaggaagatgaacatccaaacaaaaatcttaccaacatacaaaggcaagagatatatgatgcattggttaagaaaactatcaatggaagactaagaaaaaaagcaacaactgaagttgctgaaatgttcaatatcaaaaggggtagagtgcaagatatttggcgaagagcaaagcagtgccgtgcacagggaattccagtcaatgtaagttctagaaagaaaactaattctggtcgcaagaagaatgaaattgacttgtcagatgttgctaatgcccccctgcaactaaggggcacattacggtcatttgcatcagctgcgggtataccaaaaagcacgcttcataggatgttgaaagaagggctgataagacgtcactcaaacacattaaagccattgttgaaggaagagaacaaacgatcaaggctgcaatggtgtatttccatgttagattggcatactttgccaaatgaaccgaagtttgttgatatgcgcaacattgtgcacatcgatgaaaaatggttcaataccactaaaaagacaagaactttttacctggtccattgggaggatgatccgtacagacccgtgcaaaacaagaattctattgataaagtgatgttcttggcagcagttgctaggcctagatacaatgaagaaggtatctgcacttttgacggcaagataggcttgtggcctttcaccaaaaaggaaccagcacaaaggacaagtcaaaacaggccaaggggaactctagtcaccaagacaatcaaggttgatcgagacaccgtaaggtcgtttctgattgctaaagtactaccagctattatatcaagttggcctcgagacgatgcacacagcactatatggattcagcaagacaatgctcctgctcatgtgccagtggatgattatcaatttgcctatgcagtatcccaaacagggtttgacatccgccttatgcatcagcctcctaattccccagatatgaatgcattagatcttgggttctttgcatcgctacaatcattaacatatagaaggatatctaggaatatggatgagctaatacataatgttgagcaggaatttcaggcctatgatgacaacaagctaaatagggtgttcctaacactacaatcttgcttgttagaggttatggaagctgatggtggaaatggatacagaatacctcatatgggtaaagagaggctagagcgtctggacattctccctaatacccttagttgtggtcgtgaactgtatgaaaaggtcatatcagcattagccaatcaagtgcagtaa

SEQ ID NO: 68474 - DNA, 469 bp, Oryza sativa
  Clone ID: PAT_MRT4530_69233C.1
catgcacacgtcagcttgtatgcctccatgtttagtcgccctcctttttttttttttatgatggatctaaaaaaatttgtgggactaaactcataaagtttcaatactttattaattgatcaagggagagaacggagggggaggtaaaaatattataagtaaataagtcgtaaaaaatcgatcagctggaagaccttcttggcctactaggtgatgtcttagggccactctcggtgggcgactcgccaggaggagggcttgcggcggtcgccactcatgacccgtaatgagcgctactcgccggagaggttggcctatgccttgcaccgctggacctttgttccctgcatcatagtacacttcacccgcttggtgcccttgacctacagcttcaccacttaccccgtgcctcccacgttctttaccatcaccatgttgtacgacgggttccccaacatcgtgtacttta

SEQ ID NO: 68475 - DNA, 449 bp, Oryza sativa
  Clone ID: PAT_MRT4530_69234C.1
aaattccggggggaaaaaaccaaacaaaatacccacagaaatacttacagcaagatttaaacaaaaggcagtggtaggtgagacatgtgaaacatttggctatcaggcaaatgccaataagttataagcaactacaaagtcttatcacaatgaaaaattggaaaaaagccacgggaggcatcaagctgttaacctaaaattctccctactgccaacaaacattgtttagaaagacttctaccccctgggatcacaaaaaaacaaccctgaaacactttacgggcaactaaaaaggggactaactttcggcaacaaacattgaggacagttccataatttaccataagaaccaactcttaacaggatgaagaaaacccacacagcatgagctcctggaagaatcaaatgagggcacgccaagtaggggacagaccctttgggcctctcca

SEQ ID NO: 68476 - DNA, 966 bp, Oryza sativa
  Clone ID: PAT_MRT4530_69235C.1
atggcggaacttgatagcaagatacctgaaattggtttgaggttcagaaatccagatgagtgttggttgttttgggtggcatatggcggccgtactggctttgatgtgaggaaaagatgcacaaatctggattgtgaggagcatattaccaacatattctgggctgactctaagatggtcctcgactatgcacactttggtgatgttgtcacatttgacacaacttttgggacaaacaaagaatataggccatttgaatgctggcaagcatttttgtctccaatgaagggtaaagaggaagatgaaggtgaagagaaagataaaggtgaagaggaagacgaaggtgaagaggaatctcatattctctctgattttagtgcttgtatgtttggccacgaagatgagacatcatttgaagaagaatttcagattatgagatccaaagttcataagcaaacttggttagatagcatttacaagcattttgagaggttagtgcaagagaaaagagataaggaactagagtctgaatttgaggcaaggaagaagctaccgagaagactaatgtgcacacctatgttggttcaagcaaaccaagtgtacactccagttatttttgaagctttccaaagtgaatatgaaaaatccatggttgtatgcgttagagtttggatggagaacacaaatatgctgatgttgttgggaatttgcttgctagaggagaaactcaatttaatatctgctggtggtacaaatgagccctgcgaggacaaagaaaatgttgacccaaatgcgcagcaaagagatgatttgcttagtgatgcacaactaaagaaggaggtccagtcaaactactcaaggagaactagaacttggattgataagctacgcaaggggaagcgcaagaatcctaaatgtacaataccaacaaaaaaagggagtaaagaaacaaaagaaaaagagtaa

SEQ ID NO: 68477 - DNA, 352 bp, Oryza sativa
  Clone ID: PAT_MRT4530_69236C.1
tcaatgccagagccttcccgtcgccgcccgtcctccgcactccagcggcagcggcagcggcagcggcggctcgcatcgcggcgccagcggcggagggagcggaggaggtggtggtggtggaggtgattctaacaaccttaaagatgcacatatatactcagagcatgttctctacgtactgctgtctctagagggtatcgttggacaagttttttgagctatattttaaggcgttttatgagatacgagagctcgaaaatttcttcagggaagagaccccgatgaggtagataggtcctgtgccgatttcaataatcttgtccatgatggtggcaaagaactgaccaaactt

SEQ ID NO: 68478 - DNA, 1812 bp, Oryza sativa
  Clone ID: PAT_MRT4530_69237C.1
atgagccaacccacgccgccgacgacgacggccaccaccaccgccctgcgcgagtggaaccgcctgatccagcacgccgccgcgtcgggctcctactcccgctgcctccgccactacgcctccctcctcgccgcgggcctcggcggcggcggcgcatccaccttcccgtccctcgccaagtcatgcgccgcgctccgcctcccccgcctcggcgccgccgtccacgcccacgccctcctcgccggcgccgcctccgccgtgttcgtccggacctccctgctcgacatgtacgccaagtgcgggcgcctccccgacgcgcgccgcctgttcgacgaaatgccgcgcccgaccctggtctcctggaactgcatggtcgctgcgtacggcaggagctcccaggtggaggagtctgttgcggtgttcaacgcgatgcggcgtgcgggggtcagacccagcgagggcacactcgtcggcgtgctctccgggtgtgtggactccgtttccgcaagcaatcctggcatgtgcgtctacgggtttagcgtgaaatctgggcttgatgccggtttgcctgtgttgaactcggttctcaccatgcttgtccgtggtagccatctggatgctgcgcggttgttgtttgatggaatatgcaacaagtctgtagttacttggactgcattggcatctggttatttacttagaggggattatctggaggtgtttgatctgttcaaccgcatgcggggagttgggaaaaatgttgactcggtagtgctcgtgaatctcatatcagctgctgttctgtttgggaacttgtcggtggccaagggtgtgcatgctctcattattaagcttggctttgaatgtgaggaagaccttgcggcatcattgataaacttgtatgcaaagtgtggagatcttgaatccgctcgagaagtctttgatgcagttcacatggcgaatgtggttgtgtggacttcaatgataagtgggtatgttgaaggtggtcatctgaatgaagcgttggtgatgttcgatagcatggtgtgcgcaaacattgagccgaatgaagcaactctgtcatcagttctttcagcttgtgccaaattggggtctgctaatctggggaaaaaggttgaggagcaggcaattgccactggactgcattcagagccgcgagtagctactggattaatcgacatgtatagcaagtttggtagcatcaatctggctaggaaaatatttgagggtgttaccaatagagatatagctgtttggagtgccatgattaatgggtatgcttgcaatggagaaggaagtgaggctcttgtccttttcaaggagatgaaaaacaaaggttttcaaccagatgggattgcgtttactcatgttcttaccgcatgcaactattctggtttagtagatgaaggtcttgagtgctttcacagcatgacaatggaatatggtatcgagccatctattgaacatcatatgtgcatggttgatttgctttgtaaagctggtcattttgggagcgccctaaagttcttcaagcagatgccaagtgaggtgcaaaataaggttttagctcctataattagttcatacagtgctcgttgtgctgattcatccatagatttcataccagaggaacttctgaatttggagactcaagattctgatcactgtgttctgatgtctaatatgctcagttgtttagggaaatggaagaaggccacaagttataggaggcaactaagcaagcaaggattaatgaaggaacctggatggagttgtattgagctgagtggctaa

SEQ ID NO: 68479 - DNA, 482 bp, Oryza sativa
  Clone ID: PAT_MRT4530_69238C.1
gggaatgacccagttttttttgtaccaccaactaaacaacaagacggttaaaacaccctacaaaaccctaaagggagacaaaatggtaaaactcatctaaatcagtcataaatacaacagggtgctcctccatgcttgcttcctggacatccgagcgaataagcattcaaagctctcaagatgatcaggataccagttgggagttgggactaaataacctggggatgcatcaaactcacatctcgccaaggctgttgaaatccggaaagaaaaggctaaaacatgtcagtcgtggagtgacttcatctggacatcaccaggttggaaaccctcatgaaaagaggttctccactgctcttgcatacttcttcatcgggcgctgaattaagcactgcaaaacttccgcaggggctggactcctccatgtcgccctggctgctgctgccactgccactgctagtgtctgactgccttttggaacc

SEQ ID NO: 68480 - DNA, 2897 bp, Oryza sativa
  Clone ID: PAT_MRT4530_69239C.1
atggacgagctcgcggcggcgtcggcggcggcgaggaggaggtgggtgcagtgggaggaggtcgtggtgtcgaacgaccgggggaggcgcctcgtgcactactacctccggggagcggccgcgggcggcggaggagggggagaggtgagggagcttgcggtggtggggcgggagcggagcccgcggcacatgtcgtacgtggtgcaggggcggttcctgcggtcgctggcggcggcgggggtgggggtgggggtgggggtgggggcggcggtgggggcggtggtggcagtgccgtcgccgtcacggtcgccgctgccggcttccgcggagggcggggcgccgaggaaatggaggtcgaggcgggaggtcgtggactggctgtcctccctcgtttccggatgtaattacggatcttcttcaatgtctaataggttcaatgaaaatccatatgatgacattgagttcactgatgttgctgcttcaaaggatgtttcacatacatcatcagtaaggaataactcaaaagagttcacatggttaggtcctgcatggctttgcgaaaagcgatggaagcactacagatctttctgccgtaaggggattactatttcggtgcataattttgtctacatcctgagtgaggaaaagaagaggctcatcgcccaagtggaggatctgtatgaagatactaattcaaccaacgttgtcatggtacgatggttcgacaaagttgatgaggttggtgtcgaattgccacctgatgttggtgacagagagattttcttttcccctggtctgcaagatctcagtgttgaatgcattgatggattggctgcagtcctgagtgctcaacacttcgagaagttccagagtagtccaaaacatagctattggcagccttatatttgtcgccgacagattgatgaagatggcgtcaaaccttttgatgtaacccaattgcaaggttattggagtcaagaagtgcttaggacaatgttcaatgcagcttcttctcttaaggtacgtttcaaggtcactaaaggtgcttctagttcagatggggcacaaaagaggaagcgtgatgcattcagtgaaaccgatccacagcagtgtgttccttccgctgcattcggttctgatagtctcaagaatgatttggaacataaaactcaaaagcagctatatcctggtagccgtgctgaagtcctatcacaggacagcggtataaggggctgctggtttagatgctttgtattaaagaggcgcggagacaaaatcaaggtgcgatatgaagatcttcaggatgctgatgagacaggaaatctggaggagtgggttttgctaacaaggattgctaaacctgatcagttgggtatacgcatccctgaaagaccaatggtgcggccatatcatgtacatagcaaggatccatgctctttcgatgctggttccattgttgatgcatggtggaatagtgggtggtgggaggggattgtattgcagcagggaaatgacagacgccttcaagtttattttcctggagaaaagcagattgctgatttttgtgaagatgatttgaggcattcacgtgagtgggctggtggcaaatggaattccttgggggaaagaaaagatatcacacacctgttgccccccacttcagttcatgaagagggaggtttgcttagcaaacctgtttcacaagaaggcaatccctcttcaaaattagaatctgacaagaggtgtgatgacaaatcattgggcaccaagatttcacatgatcagaagcatcagaagcgtgttctggctgatctcacaaatgctctgaaattcgataacctgaaatggaggccaagaaagcggagcagaagatctggttccaaaaggcagtcagacactagcagtggcagtggcagcagcagccagggcgacatggaggagtccagcccctgcggaagttttgcagtgcttaattcagcgcccgatgaagaagtatgcaagagcagtggagaacctcttttcatgagggtttccaacctgacaactttgctctatggttttgccagattcttctaccgttctctcttctccggcgagccggaagccgacgaccggtcgtcgcgcgccgccgccaagtggacagacggtgttcatgagtggcaaggtgattatggtgaattggaagtgcagagggggaatggtgtgttctactgcatgaccgtcaggatgagcatcgactgcaatgggtgctaccagaggatcaggagggcactcctccagatgcaagaagatctggatagccacctgatcgaccggaagcagcagcgggtgagcgtctgcggcgccttcgtgccgcaggacgtcgccatcaagctccgcaagaagaccaaccgccgcgtcgagatactggagatcaaggagatcgacgccggcgacggccaccggctgtgagtgatgtccagatgaagtcactccacgactgacatgttttagccttttctttccggatttcaacagccttggcgagatgtgagtttgatgcatccccaggttatttagtcacaactcacaactggtatcctgatcatcttgagagctctgaatgcttattcgctcggatgtccaggatgcaagcatggaggagcacactgttgtatttatgactgatctagatgagttttaccattttgtctcactttagggtcttgtagggtgttttaaccgtcttgttgtttagttggtgttacaaagatagctggctcattccacctcggcagtttccagagtcccttttttgtctttgtttcagcagtccaatatccaatttaatttgttcatcagctgttatagatgttcttatagtatactctctgaaatgataatatttacatcgtcat

SEQ ID NO: 68481 - DNA, 2265 bp, Oryza sativa
  Clone ID: PAT_MRT4530_6923C.1
atgtcatggcacagggccggtgtcctgctgctaggggctcagtcctgcctacctgtcccgggggttccggccgtaggtggggttgggtcggtactcttgtttatggctaggatgggttggaaactatgtcctgtcttccgtctgtataccgtggtggtttttagacagcagattcaggtggtcattgagggaggcaagattaggtttgatgattccaaaaagccgatgaaggtcgatgctggccaagcagccgatagggcccatgcaaggggttttcaggtgaattcggctaagattttcaagaaatatcggaagaagtatgacaagcagcaggagaagcatcatgagaaatacgatgatggttttgatcctcattggggttgtgagttctttagattctgctggaatgaagccgatgaggcaaagaggttggcaaaagggaagagtgttgtgacggcaccggttaacatggtctttaccctgccagccaaattcgggatcgatcaagctgatgtcgatgaggtggaagaggaatcggctaagttggttctgtcaccagaacaggcagtgttcgagaaacccgaggggacagagaatcggcatcttaaaccattgtatataaatggctacgtcaatgggaagccgatgaagttgggtagaaatgccgaggatctcatcaagacaaacatggtgctcaaagattttggtggcaatctatccaaaaccaaaggtgttctaaatgtggagctgacagtcggcagtaagactattcctgccatattttttgtcatcgatgggaaaggttcttacagcttgttgcttggaagggattggattcacgccaattgttgcattccttcaactatgcatcaatgtttgattcagtggcaaggcgacaaaatagagatcgtgccagccgacagccaattgaagatggagaacccaagctattattttgagggcatcgtggagggttcaaatctctacactaagaacacggtagatgatctcgataacaagcaagatcaaggtttcatgtcggccgatgatttggaagaagtagacataggtccaggcgatcggctaaggccgacatttattagtaagaacttatctccagtgtttagaaccaagctgatagagctcttaaaagagtttagagattgcttcgcttgggaatattatgagatgcctggattcagccgatcgattgttgaacatcggctacctatcaaaccaagggtcaggccacatcaacaacctccgaggagatgcaaggccgacatgcttgaaccggtcaaggctgagattaaaagattatatgatgctggttttattcgtccttgccgatatgctgagtgggtttctagtatagttcctgttatcaagaaaaacggcaaggtcagggtatgcattgatttccgaaatttgaataaggccaccccgaaagatgaatacccaatgccaatagccgatcaactagtggatgctgcttcgggacataagattttgagttttatgtacggaaacgcaggatacaatcaaatttttatagccgaagaagacattcataagacagcttttaggtgtcctggtgcaatcggcttatttgaatgggttgtcatgacttacggcttgaagagtgctggagctacatatcaaagagccatgaattacatatatcatgatctaatcggctggttggttgaagtctacattaatgatgtggttgttaagtctaaagaaatagaggaccatatagctaatttgaggaaggttttcgagagaaccagaaaatatggcctgaagatgaatttgacaaaatgtgcttttggtgtatcgactggccagtttttgggatttcttgttcatgagagggggatcgaggtaactcaaaggagtgttaatgcgattaagaagattcagcctccagagaataagacagaattacaagagatgatcggcaagataaattttgttagaaggtttatttctaatttgtctagaaggttagaaccttttacaccattgttgagattgaaagccgatcagcagtttacttggggggcagagcagcaaaaggctttggataatattaaggaatatcttagctctcctcctgttttgattcctccacagaaaggaataccgtttaggttgaatttatcggccggtgagaagtcaatcggctcagtctttgattcaggcgttggaagggaaggaacgcgttgtattctatctcagtcgtcggctcttagatgctga

SEQ ID NO: 68482 - DNA, 116 bp, Oryza sativa
  Clone ID: PAT_MRT4530_69240C.1
ggagtacatctgtcagcagcaggttcatgaaccgtgaacgaatccgcccggagctgaaaggccgtgctgatgcgtcgtcggacacgatccggcccctcaaccgtgcactgaactga

SEQ ID NO: 68483 - DNA, 541 bp, Oryza sativa
  Clone ID: PAT_MRT4530_69241C.1
tgcaggtttttttttctctggagaacaagtttccatgtccttaaagaaatatgcacaagcaatttagtaaaaaaaaaaaagaaagaaagaaaggatattgatcaatattgacaaattgcatcatttggaatcgtgcctagaaatttatatctttatacatgtccatatgcatatgagacctattaaacatttgcatatgtaaatgtgcaaatttctccaaaggaaaggcagacaacacacagatgtctatatagttgcagcaacagaggtccaaaggaatggacagtgggtttagaacacatcatcaccctcaattccttctataagagtaaacaaaaacatgaacatatctaatccttgtatgtcttgccagtttcacggagctttaccatttaaagctttcagcttgagacggctttatgtaacctcctgaacataaataccagctcatttgagctaaaaacgacttgaacttgaaatgggtgccacttttgtatttctttcacgccaaaggaaaattgaaccactgcgcttaacactt

SEQ ID NO: 68484 - DNA, 333 bp, Oryza sativa
  Clone ID: PAT_MRT4530_69242C.1
agcttgatccgcggaagaggaatttctcaagccacatcagaagaaaagccgtgtgctcccgggggtgacagatcctttgcccgtgggcatgtgttaacaaccaaatttggaaatccaagtatcggagatgaggatagaatcaaagcggaattcgagatggagatcgttacggaaatagagcgagaatcgactaaagtccgaatcggctatgatcaggatagacagagttcaagtcggactagagatatgtttgggcaaaagtctgccgcaaagacttatggtatattagagtttgttagagataagagtcgtgtccgacacggacatattttg

SEQ ID NO: 68485 - DNA, 186 bp, Oryza sativa
  Clone ID: PAT_MRT4530_69243C.1
atggatggaaggatggcagattgcaagatgccccatatacaatggtggcaaacatgggcacccttggtgcaaactgtccaaactgctgcttgcctggtgggttggtttgtgagatgcacaaaacagttggggtacagtgtactctagtaataaggtggttgcatactatcgggggcaaacacgtag

SEQ ID NO: 68486 - DNA, 607 bp, Oryza sativa
  unsure (1)..(607): unsure at all n locations
  Clone ID: PAT_MRT4530_69244C.1
gaacaattaattatacacaacagaatgcattaccagcttaattatgtacttatggcacaaatattaggagttatgtattgaaaaaacactgaacatgaaagtaggggttctcatatcggaatttgttgaaaaaaacgaggcttgaacttgagctggctagctgatctctggtgctagcctgaaaacctccaaaccttttctcaaaagttctgtattggggcagtttgtcataaacagctaacttatactgcacccattttactggattaaggaatcccttgctaacttatattccctaattagaaccctcccccttctccccgggttgttgaacaattgttcccttttggccgggcccagaacgttaccaatcctncttttaggggggggnnttttnnttttnttnncccnggnccccnccttggnnaaaaattnaaanccccccanattccccccccccccccaaaaaaanccccttcccccnnnaaaaggnttcccttttttnnaaaaaaaaattttttntaccccccccccctnnaaaaccccccnctttnaaanccccnttaaaccgggtnnttggggncccccctggncccaggggntttta

SEQ ID NO: 68487 - DNA, 306 bp, Oryza sativa
  Clone ID: PAT_MRT4530_69245C.1
atgcggctcacgcgctcgggcttagtggacgcggtatggggttgcggcgcacacgcggtgacgcgggacccgatggtcgccgggctgtggctcgcggcggcgccttgcggcggcgggaggggcggcacggcgcgggagcgaggaggaagggcgacgaacgcgatgccgaggcggcatcgtgtcacggcgggcgtgccggggaaggcaacggaggcgtgcggtggcgcccttggtcgcggcggtggcgttcttggccgcggcgaccaagaaggcggcgatgctccggggttggccgcgcgacggtga

SEQ ID NO: 68488 - DNA, 453 bp, Oryza sativa
  Clone ID: PAT_MRT4530_69246C.1
tcggttctcttcctccgagagggcctcgccaccattgccggctctcttggaatctcgcgggggcgccgccgccgccgccgccgccattagggcttagggctcaggaggctcgcggcgatgtggcggagggccgcgagggctcgccggcggatcgccggggcgcgggcggcgtccacgtcagcggcggcggcgggggagaagagctgccacgccgtggtggtgcctcggttcggagggccggaggtgctggaggtgatgcagggggtgccggcgcccgatctgaagccgggggatgtgcctatgcgcgcgcggagcgacttcatcaacccttttgacctgctaatgcggtctggttatgggcgtacaatatttgagccagtgctacctatgatcattgggccggatataagtcgtgaagttgcagctacagggacttgtgtggcggcctttact

SEQ ID NO: 68489 - DNA, 576 bp, Oryza sativa
  Clone ID: PAT_MRT4530_69247C.1
atgggaactcctcgccgtcgcgtcgagctctatgtccggcgacatctcgccgtcgcacggtccgtcctctgccgcctcctccctcaacctcggtcgccgtcgcgcggccaaccccggagcgtcgccgccttcttggtcgccgcggccaagaatgccaccgccgcgaccaagggcgccaccgcacgcctccgttcccttccccggcacgcccgccgtgacgcgatgccgcctcggcgtcgcgttcgtcgccgtgcgccgctgctcgtccatgcgccgccatcggccttcccatcctcaactcgccgccgacgccatcacctcccgtcgcactcgcgtagctcgcgtcgcgcgtgctctgtttccgccgccgtgcgcaatcgagagccgccgttggcctccctctcggcgactcctctagccaccgccgttcttgagttccctcgctacctccccaagccgctgtttcagccgccggcctcccctctcgccctcgcgtcgcgtcgcccgatccgccgctgccgcgctcggccacttccgctgcgcctcccctgccgtcggcctccctcctatccttga

SEQ ID NO: 68490 - DNA, 1595 bp, Oryza sativa
  Clone ID: PAT_MRT4530_69248C.1
ctctctctctctctctctcggcgtcgcttcccgccgacgccgcccaaaattccggctgcctccttcgattcccgcgcacccgtgcgagtggccgaccacctgggtgccgccatcgccaccctcggtcgtcgcctgccccgatgaccaccgtgtccgcgcttgccttcaaaccgtccccgtccttttgcagtcgtcgccggcgtcatcctcccgggcccggcgccccatgccgcatgcatccaaaaccgtgaggcgcggctcggcagagccgctgacgccgctgcagcgcctcgccgcccccaccttgaccgcacccgctcgccccgcgccaatcctcccgtgctcgcgaacccaccccccgtgcttcctccctcccttgcttcgttccccccccccaatcggcggagccctgccgccatgggaactcctcgccgtcgcgtcgagctctatgtccggcgacatctcgccgtcgcacggtccgtcctctgccgcctcctccctcaacctcggtcgccgtcgcgcggccaaccccggagcgtcgccgccttcttggtcgccgcggccaagaatgccaccgccgcgaccaagggcgccaccgcacgcctccgttcccttccccggcacgcccgccgtgacgcgatgccgcctcggcgtcgcgttcgtcgccgtgcgccgctgctcgtccatgcgccgccatcggccttcccatcctcaactcgccgccgacgccatcacctcccgtcggtgagctccccacctcccttttccgctgtcccagcactcgcgtagctcgcgtcgcgcgtgctctgtttccgccgccgtgcgcaatcgagagccgccgttggcctccctctcggcgactcctctagccaccgccgttcttgagttccctcgctacctccccaagccgctgtttcagccgccggcctcccctctcgccctcgcgtcgcgtcgcccgatccgccgctgccgcgctcggccacttccgctgcgcctcccctgccgtcggcctccctcctatccttgattcccggcgctgccaccttcctcgggcccccctcgacctccccaacccctccccctggccgccgaccttcctcctcgctcccgcgccgtgccgcccctcccgccgccgcaaggcgccgccgcgagccacagcccggcgaccgtcgggtcccgcgtcaccgcatgtgcgccgcaaccccataccgcgtccactaaacccgagcgcgcgagccgcatcccttcccatcgcgcatccacgtcggcatcccggcgagcttcgccgccgccgccggccgtcgtcacgcgtcgtctccccaatccgagccgtggaatcggttcgccttgacctcctctagccaccggtgttcgtcgctcgcttcggctcgccgccgttcgccggattccgccgcgcgccgtgagccgtccgatgccattcccgcccccctttttctctccccatccgacgtggctgcccacgtggcattgaccgggcccgcccctgcccagtcagccggtcagtcgtccccctccccctctctcccctggctcgtgggcttggcccattggccagccttcctcctcggcctaac

SEQ ID NO: 68491 - DNA, 402 bp, Oryza sativa
  Clone ID: PAT_MRT4530_69249C.1
atgagggagctgatgcggaggatgagcttctctgaccgcgttggcggcggcggcggcggcgacggcggcggcggcggcgcggcggcggccgtgaagcgcgggctgatgaggaggctgagcttctcggaccgcgcgggcggcggcggcggcggcgacggcgtgccgcgcgggtgcgtgccggtgatggtgggggacaacggcggcgacggcgatggcggcggcggcggcggcgagcggttcgtggtgcgggtggaggcgctgcggcacccggcgttcgcggcgctgctggagaaggcggcgcaggagttcgggtacaagcaggagggcatcctccgtgtgccctgcgacgtcagccatttccagcaagtcctccacgccgccaccgccgccgccaagagctaa

SEQ ID NO: 68492 - DNA, 148 bp, Oryza sativa
  Clone ID: PAT_MRT4530_6924C.1
ttggaaaacagggactggaggccactcctgagggtgtgttctagtgctgaagtgtccgtgctagaagaccgcaatggagtttactgttaccaagaccccccccccacacctaatgagagtggtgtgctcagtcagtactttaaaggcc

SEQ ID NO: 68493 - DNA, 2298 bp, Oryza sativa
  Clone ID: PAT_MRT4530_69250C.1
atgggaagggatgcggctcgcgcgctcaggcttagtggacgcggtatggggttgcagcgcacacgcggtgacgcgggacccgatggtcgccgggctgtggctcgcggcggcgccttgcggcggcgggaggggcggcacggcgcgggagcgaggaggaaggtcggcggccagggggaggggttggggaggtcgagggggggcccgaggaaggtggcggcgccgggaatcaaggagaggagggaggccgacggcaggggaggcacagcggaggtggccgagcgcggcagcagcgaatcgggcgacgcaacgcgagggcgagaggggaggccggcggctgaaacagcggcttggggaggtagagagggaactcaagaacggcggtggctagaggagtcgccgagagggaggccaacggcggctctcgattgcgcatggcggcggaaacagagcacgcgcgacgcgagctacgcgagtgctgggacagcggaaaagggaggtgaggagctcaccgacgggaggcggcatcgtgtcacggtgggcgtgccggggaagggaacggaggcgtgcggtggcgcccttggtcgcggcggtggcgatgctccggggttggccgcgcgacggcgaccgaggttgagggaggaggcggcagaggacggaccgtgcgacggcgagatgtcgccggacatggagctcgacgcgacggcgaggagttcccatggcggcagggctccgccgcttggggggggaacgaagcaaggaagggaggaagcacagggggtgggttttatagagacagagtgggagcggcaaggtcggttcgaggtggccgcggttttcttggcgctcggctggtgttcatgggcgccgcgagaacgagcgacggcaaggatgcaaagggtggtggaggcggtggatcgtgtggtgggaaatcgaaccgcgagcacgggaggattggcgcggggcgagcgggtgcggtcaaggtgggggcggcgaggcgctgcagcggcgtcagcggctctgccttttgaacaagaagccaaggagtggaggcagggagctcgctacccgggaggggaaaaagcgaaaggaggaggaggaggaaagggagctttgctccttccgttttgggaggaaagggatgagaacgagccgcgcctcacggttttggatgcatgcggcatggggcgccgggcccgagaggatgacgccggcgacgactgcaaaaggacggggacggtggtagatcttgcgaaagaacttattagcatgtttactgccagggaaatgggcaaagtgttctttacgaacagtggttcagaagcaaatgactctcaggttaagatagtatggtattataacaatgcattggggaggccaaagaagaaaaatatcatttcacggacacaatcatatcatggaacaacattcatatcagctagtctatcagggattttgatctgccaggacgttttgttctgcacacagactgccctcactactggcgcttccatctccctgagtgcatttttcgatgaaattaatgatttttgtgggagacagatcgctgccttcattgctgaacctgtgattggtgctggtggtgttatccttcctccaaagacatattttgagaagattcaagcagtggttaagaagtatgacatcctttttattgtagatgaggttattactggatttggaaggttgggaaccatgttcggatctgatttgtataacatcaaaccagatcttgtctccttggccaaggctctttcttctgcctatgctcccattggagcgatacttgttagcccggaaatatcagatgtgattcattctcatagtaacaagctcggtacatttgctcatggctttacatattctggccatcctgtttcctgtgctgttgctttagaggcgctgaaaatttatcgggaaagagatattcctggtcatgtcacacatgttgctcaaaggttccaggagggaatcaaggcctttgcagctggaagtccaattgttggggagacacgtggtgtaggattgctgatagcaactgagttcaccgataacaaatcaccatatgagttattcccttttgagtggggtgttggtgaaatatttggacaggagtgtaagaaacgtggcatgatggttaaggttcttggaaacttgatagcgatgtccccaccactgataataacccgtgaagaaattgataaactggtgagcatatatggagaagctctgaaggcaacagaggaaagagtggcagagctaaaatccaagaagaattag

SEQ ID NO: 68494 - DNA, 538 bp, Oryza sativa
  Clone ID: PAT_MRT4530_69251C.1
gcaacatgcatggggtcaattctagctataaatggacaacgtatatcgcggaggacaattctttaaatggacaattttctctaacttgatctcatccagtaccattcccatcgcccgttcacaacggaccacggcgagccacccgcgagcaccacaagtccatgcgcgcgccacgccaccaacgccggccgccgtgagcaagttccaccgccgcttggtctcctctctgcttctcaccttccgacctgccgaaaaccctagttaattaggccctcgtgaaactccttttaagggaggatctcacaaggataggaatcgagaggtgaagcacaatcattcttggctcaccattggcaccattcacagtgagagcagcagggcctctccccgtctctctcttttagttcctctttacagcagaagaagccataatgcatggcacttgggttgcgacgttgatcatcgatcagcagcgcttgagggctgacggaaggtgagcatgctgggagaatcgactctgacaatcacctctttcccg

SEQ ID NO: 68495 - DNA, 181 bp, Oryza sativa
  Clone ID: PAT_MRT4530_69252C.1
ttgacgcgtgggcgcgcacacgacacgacgcaccaatggcgctcgtctccgtctcctcctccaccaccgccgttgtggcgctccccggctccgtcagggtttggtgcttcctcggtgtgtccggccggagccgcaggtttccgctgagtcagtcctgagtttgttatcttttttacttttt

SEQ ID NO: 68496 - DNA, 558 bp, Oryza sativa
  Clone ID: PAT_MRT4530_69253C.1
atggcgatggtggccagaggtggatcccccccccccgagggcggatccggtgcggggcaagctcgcggcggtggcggcaccgcggagctcgcggtgacgtcggcggtggcaacggcgcgtgagcacggggcgccggcgacggtggcaatgcgaggtggtgtcggcagcagcggctgtggtggtggtgggaggtggcatggtggcctcggtcggctagctgagggtgtggcatacggttgtatctggccagcgcgggagagtacggaggtggggtcggagattggcttggcgcagagaggcgcagccgatggcagcggaggccgactcggtgcaagaggcgcgggcggcggagatggaggccgatggagggaggccggattggcgcgagaggcgcgtcccgtggaggaggccggtttggcgcgagaggcgtggccggcggtggaggaggcgaccctggtgcgaggaggagatgccggtgggtgtggcgctatcttcggcgcacgaagcctagccggcggggggcaccagtgcagggttccccatgtcggcagaggctga

SEQ ID NO: 68497 - DNA, 1427 bp, Oryza sativa
  Clone ID: PAT_MRT4530_69254C.1
atggacgagcagcggcgcacggcgacgaacgcgacgccgaggcggcatcgcgtcacggcgggcgtgccggggaagggaacggaggcgtgcggtggcgcccttggtcgcggcggtggcattcttggccgcggcgaccaagaaggcggcgacgctccggggttggccgcgcgacggcgaccgaggttgagggaggaggcggcagaggacggaccgtgcgacggcgagatgtcgccggacatagagctcgacgcgacggcgaggagttcccatggcggcagggctccgccgattggggggggggaacgaagcaagggagggaggaagcacggggggtgggttttatagagacggagtgggagcggcaaggtcggttcgaggtggccgcggttttctcggcgctcggctggtgttcatgggcgccgcgagaacgagctacggcgaggatgcaaagggtggtggaggcggtggatcgtgtggtggaaatcgaaccgcgagcacgggaggattggcgcggggcgagcgggtgcggtcaaggtgggggcggcgaggcgctgcagcggcgtcagcggctctgccttttgaacaagaagccaaggagtggaggcagggagctcgctacccgggaggggaaaaagcgaaaggaggaggaggaggaaagggagctttgctccttccggtttgggaggaaagggatgagagcgagccgcgcctcacggttttggatgcatgcggcatggggcgccgggcccgggaggatgacgccggcgacgactgcaaaaggacggggacgggttcaaggtggatccaagggaggggtcaaggaagggcttcaaaagcgggaattttggtattcttgggatggatttatatttggcggcacgaaggattatttcagaggatttcaaaaagggaagatcattattcaaaaatggaacaagggagatagcgatatgagggtaaggattttggagagaagtctgaatagaagggttcggacattcgacaaagttcacggatggggttccaggaggggattccgaatagaaggaatcgagcttcgggactacattgggatgggctccttaagatctaaaccatgtactccctcaaggaaaattgaaatgacagtagttgtggagtttagtgctaagaaggaaaacaagggaatggagcttgttaactcgccatgggcagagagagaaaaggcaaacaaaagcaccaaagaggatgaatgggctggttcggctgcgatacagccgtctggaaacaatgctccgtgcattgatatatcgcctcaacccagggccgtgcacatgggcgtgcgacccgtgcgaccgtacagggcctctaaatttccagggcctcaaaaaatcagcccaaccggagaaggcccatgtattcgtgtgaggccagagcgccagaacccg

SEQ ID NO: 68498 - DNA, 2092 bp, Oryza sativa
  Clone ID: PAT_MRT4530_69255C.1
atgggccattcgccctcgcgccacaatgcatgcggcggcggcggcggcgacggcgagtcgccgccctcgccgctgccgtctcgcttcgagcggttccgccgccgcctccgcctgcgccaccgcgaccgcgcggggcgtcccggtggcgacgcccacgcctccgagtcggggacggggagggccatcgccgtcgacgagttcgccggcatcgcgcgcatccggatagtgaaggaaaagaaggttgtggtagaaacaaatggacctcacattgcacgcatatctgtctttgagactaaccgattctccaagaatactttggttggttactgtgaagttgatctgtttgaattgctcactaaggatcccgttgaaacagaacaaagttttgcacgccgtgtcttggctatagtggattacaatgaagatggagagctatcattatctgaattctcagacctgatgaaagcttttggtaataaattagcagttgcaaagattgaagagcttttccgtcaagctgataaaaatggtgatggtatagttgacatggatgaactggcagcccttctagctaatcaacaagagaaagaaccacttatcagtaactgtcctgtctgtggtgaaattcttggtaaacacgacaaaataaatgatatgatacacatgacactttgttttgatgagggaactggtaatcagattatgactggaggatttctaacagataagcaagcatcatatgggtggatgtttaagcttagcgaatgggctcatttttcctcgtatgatgttggtttgcactcgggctctactgcttctcatatcttggttttcgaccggcgaactaagagactagttgaagaagttatagacggaaagattgtgttgtctatgagagctttataccaatcaaaagtagggctaactcttattgacacaggtgtcaaagatctcttgaagaacctatctgagaagcaaggaaaaaagatgagctcacctgaatctgccaaagatattccaaagttccttgagttgtttaaggatcaaattaatttggatgaagtcaaggatcctcttgaaagtttcaaggcttgtgaccttgtgttcatatatttactgattatttttgaaataggtcccttgcctcttgaaagtttcatgacatttaatgaattcttcgtaagacaactgaagcctggggccagaccaattgcatgctatgagcaagacacaattgctacctgtgctgctgatagtcgtttaatgactttcagttctgttgatgaaagcacaagattatggattaagggtcgcaaattttctatcgagggtctccttgggaaggatgtacactctgatgctttgtgcaacggatcattggtaatctttcggcttgcgcctcaggattaccataggtttcatgttcccgtctcaggaactttggagaaatttgtggaaattcctggatgcttgtacacggtcaatcctattgctgtgaacagcaaatattgtaatgttttcaccgagaacaaacgagttgtttcaataatctcaacttcagagtttggaaaggtggcattcgtggccattggagcaacaatggttggaagcatcgagttcttgaaagaagagggtgactacgtccacaaaggagatgaggatgcaatagaatttgacgctgatcttctggccaatagtgccagatcactggaaactctcgtctccgtcggcatgagactgggcgtctccacaaggaacagagatctgcaacctcaagagctagagaaatgttcgcttgaatgatgtgccaatattttgcatgcagaaagtttttttttttccgaggatgacacgaagaaaggttgaaagtagcagcttccatgcttatgttagttcaataggttgtgttaatagttggcttcttgtttggatgattggatccactctgtgaattctgtaaagaaaatgtacatcgggacacgattcatgtttgaatttttgtcccccataccttacagtcactgtatctttgttaggattacagttaatcagtgttcagtgatgcttagcactgctaatgccaccttttgtc

SEQ ID NO: 68499 - DNA, 2052 bp, Oryza sativa
  Clone ID: PAT_MRT4530_69256C.1
ctgtggctctgatcttgcatgtggaatctgttcttcacctgctctttcaacttgctcgagattcaaaacttttccctttgtttctacttgcacatggttcagacgactttgtccaataggcggtgaggtcaacgaggcagaaccactgtttggtggctttgggcgaccatccacgccggccggagtcggaggggagagagaactcaccgacgacgcgagggaaatggggtttcggtggtattccggacagtaccatgaatagtgtctcatctcatggcagatgaaacattcgactcatgccttataaccacgtctttttcaaggtggagggcatggtacggaattgcttccttcaaggcttttattgttgatcactatggtttgctgactagattttgactttgtcgaacgagacgtagaatcagaaccattggaatactgagattctccctgatagtactgcactggcgggtctatctcttgacgcaaaccttctcttgcttgatcctctaaggacattaccttgtgcttcttgtagtcctgcatttctttttctgcatcttctagtaacaaggctttattgaccatgtgctgaaacgttggaaagtcgtgagctaaaggtttcactcgcaatttcgcttccgttccttttagaaaccttttgatcttcttcttatcagtgtccacatcttccggggcatatcgagccaatccgttgaagcgactcaaatactcgttgatgcaagaggatccttgcttgatatttgcaaattcttccttcttcaaatcaattatgctttcagggatgtgtgctaagcgaaaggcttctgcaaactctgtccagatgatggtactagcatctgtatgggtagcacagtagttataccaccaatttgtggtatgtcttcttaactgatgtacggcataaaagggttttcttctacggagtgcactgcaccaaatttaatttcctttccacatctttgatccagtcattggcttcaatggtctcagttgtttgggagaaccccggtgggcgagatcttaagaattcgttcagtcttgaccgacaattatcttgaaccatatggggttgatgctcttgcgtgtgttgtcgttgcataacaactatattctgaatcattccttgtaatatctgggtttgcatggccatgagtgggcaaaagtggctcacggcgcgcggcggaatccggcgaacggcggcgagccgaagcgagcgacgaacaccggtggctagaggaggtcaaggcgaaccgattccacggctcggattggggagacgacgcgtgacgacggccggcggcggcggcgaagctcgccgggatgccgacgtggatgcgcgatgggaagggatgcggctcgcgcgctcgggtttagtggacgcggtatggggttgcggcgcacatgcggtgacgcgggacccgacggtcgccgggctgtggctcgcggcggcgccttgcggcggcgggaggggcggcacggcgcgggagcgaggaggaaggtcggcggccagggggaggggttggggaggtcgaggggggcccgaggaaggtggcagcgccgggaatcaaggagaggagggaggccgacggcaggggaggcacagcggaggtggccgagcgcggcagcggcgaatcgggcgacgcgacgcgagggcgagaggggaggccagcggctgaaacagcgccttggggaggtagagagggaactcaagaacggcggtggctagaggagtcgccgagagggaggccaacagcggctctcgattgcgcacggcggcggaaacagagcacgcgcgacgcgagctacgcgagtgctgggatagcggaaaagggaggtgaggagctcaccgacgggagggttcaaggtggatccaagggaggggtcaaggaagggcttcaaaagcgggaattttggtatttttgggatagatttatatttggcggcacgaaggattatttcagaggatttcaaaaagggaagatcattattcaaaaatggaacaagggagatagcggtagaatgccatag

SEQ ID NO: 68500 - DNA, 2911 bp, Oryza sativa
  Clone ID: PAT_MRT4530_69257C.1
gttaggccgaggaggaaggctggccaatgggccaagcccacgagccaggggagagagggggagggggacggctgaccggctgactgggcaggggcgggcccggtcaacgccacgtgggcagccacgtcggatggggagagaaaagggaggggcgggaatggcatcggacggctcacggcgcgcggcggaatccggcgaacttcggcgagccgaagcgagtgacgaacaccggtggctagaggaggtcaaggcgaaccgattccacggctcggattggggagacgacgcgtgacgacggccggcggcggcggcgaagctcgccgggatgccgacgtggatgcgcgatgggaagggatgcggctcgcgcgctcgggctcagtggacgcggtatggggttgcggcgcacacgcggtgacgcgggacccgatggtcgccgggctgtggctcgcggcggcgccttgcggcggcgggaggggcggcacggcgcgggagcgaggaggaaggtcggcggccagggggaggggttggggaggtcgaggggggcccgaggaaggtggcggcgccgggaatcaaggagaggagggaggccgacggcaggggaggcacagcggaagtggccgagcgcggcagcggcggatcgggcgacgcgacgcgagggcgagaggggaggccggcggctgaaacagcggcttggggaggtagagagggaactcaagaacggcggtggctagaggagtcgccgagagggaggccaacggcggctctcgattgcgcacggcagcggaaacagagcacgcgcgacgcgagctacgcgagtgctgggacagcggaaaaagggaggtggggagctcaccgacgggaggtaatggcgtcggcggcgagttgaggatgggaaggccgatggcggcgcatggacgagcagcggcgcacggcgacgaacgcgacgccgaggcggcatcgcgtcacggcgggcgtgccggggaagggaacggaggcgtgcggtggcgcccttggtcgcggcggtggcattcttggccgcggcgaccaagaaggcggcgacgctccggggttggccgcgcgacggcgaccgaggttgagggaggaggcggcagaggacggaccgtgcgacggcgagatgtcgccggacatagagctcgacgcgacggcgaggagttcccatggcggcagggctccgccgattggggggggggaacgaagcaagggagggaggaagcacggggggtgggttttatagagacggagtgggagcggcaaggtcggttcgaggttggccgcggttttctcggcgctcggctggtgttcatgggcgccgcgagaacgagctacggcgaggatgcaaagggtggtggaggcggtggatcgtgtggtggaaatcgaaccgcgagcacgggaggattggcgcggggcgagcgggtgcggtcaaggtgggggcggcgaggcgctgcagcggcgtcagcggctctgccttttgaacaagaagccaaggagtggaggcagggagctcgctacccgggaggggaaaaagcgaaaggaggaggaggaggaaagggagctttgctccttccggtttgggaggaaagggatgagagcgagccgcgcctcacggttttggatgcatgcggcatggggcgccgggcccgggaggatgacgccggcgacgactgcaaaaggacggggacggtttgaaggcaagcgcggacacggtggtcatcggggcaggcgacgaccgagggtggcgatggcggcacccagggttcaaggtggatccaagggaggggtcaaggaagggcttcaaaagcgggaattttggtattcttgggatggatttatatttggcggcacgaaggattatttcagaggatttcaaaaagggaagatcattattcaaaaatggaacaagggagatagcgatatgtgggtaaggattttggagagaagtctgaatagaagggttcggacattcgacaaagttcacggatggggttccaggaggggattccgaatagaaggaatcgagcttcgggactacattgggatgaaatggcccctgccacctaggtggagggcggcaaggtgtgcgcattttgcactgagatctcttatcgccttctgcaagggctgcaaggagggagtctgcgcgggccgacggccgaccgacagggaggccggtggggcgaggcgggaaaggaggaggtccggttgccggcgacggccggcgctgtggcggctgctccggccgagggcgcaaaggagggagacggtgccgttccgcgaccaagcacggaacacggcggcattgtggcggctgctccggtcgacgacggaggtgcgggtgcgcgccgcgctctcggcgctcggcggcacgggcatccgcgtcgtcggccgcgcgcccaactacgacctccccgccctggcgcacggcgggacagccgccgcggccgcctggatccaggcctacccgacggtgttattccggttcgtcgtcgtgggcaatgaggtcgccggcgccgacacgcagctcctcgtcccggccatggagaacgtccacgccgcgctcgcggcggctagtttgggacacatcaaggtgacgacgtcgatctcccaggccaccattgggatccacatcccgccgtccgccagcgaagtcgttcatgagcgctacgtgatcccattcctggaacggacgcatgcgccgctgctggccaacctgtacccgtacttcatcatctacaacaactcgggcggcatggacatcagcttcgcgctgttcacggcgagcgagcgggcggcaaccggcggaggcggcgtgcgagcgcgcggcggccggcgaagcggaggcgcgcgcggagcgggtggcagcaggcgggcgagcacgcggccaggtgagtag

SEQ ID NO: 68501 - DNA, 529 bp, Oryza sativa
  Clone ID: PAT_MRT4530_69258C.1
cgctgctccatccactacccaggccgagcttctggaggaatggagatggccggtggagagccggccgagaaccggcggctgcggctgcaaccaccctgccacagtgtggcacccacgctgccacgcggcctgctcctgctgctcctgcacacctgaattctatcgtcgtcgtcgcccggctgccactgaggatttattcgtattggaatgcctgtctacctgtgcgatcacgagcctttgatcgagggcccttaattttggcttgcacttagtaccccacgcttaataatgtaggccacggcccttgcctctttgcttctgacgccctaaataaaacccgtcgtcgtcgtttgtcagtgttgtgcgtgttgtcgatcaatgtttggattggatccctagctagcttggatggatcatctatcatcactggtgatctcatcatgtactcctgctccatctcctcatgcgtgccacggcttcttaatataatctacctctgctttcatcccaaaaaaaaaaaaaaaaaaaa

SEQ ID NO: 68502 - DNA, 1920 bp, Oryza sativa
  Clone ID: PAT_MRT4530_69259C.1
cccacgcgtccgcccacgcgtacgcagacgcgagagcgtactttactacatctgctcctctcctaaagcgttcaacgacggcaccatctccgcctgcacacggacgagcagcggctagcaagcgacggggcacagctagttcctacatcacatcctagcaacgtgggctatatatgattggactggcggagaagaaggagaagaagcgaggtaatctgctacaaacgatacagacaaagcatcaagggacagactatctcgaattgaagcagaactgtcactattgaaagaaaagcagaaggacctgactgagcagtgggagcgtgagaagtcggtgatgactaagattcaatctattaaagaagagattgatagggtcaatgtggagatccagcaggccgaacgtgagtatgatctcaatcgtgctgctgaactgaagtatggcagtctgaacgcattgcagcgccagcttcaaacaacagagaaagagctagatgaatatcaaagttctgggaaatccatgctaagagaagaggtcacccaagatgatattgcagaaatagtgagcaggtggactggtattccagtatctaaactaaagcaatctgatagggagaagttgctgtatctagaggaagaactgcacaagcgtgttgttgggcaggatcctgcagtcaaagcagtttctgaggctattcagagatccagggctggtttgtccgatccaaatcgccccattgccagtttcatgttcatgggccctacaggagttggcaaaacggaactagcaaaagcccttgctgcttttatgttcaacactgaggaagctgttgttaggattgacatgagtgaatacatggagaagcattctgtctcaagactgattggcgcgccaccaggctatgttgggtatgaagagggtggtcagcttacggaagctgttcgtcggaggccatattccattatcttgtttgatgagattgagaaagcccatggagatgtattcaatgttttccttcaaatattggacgatggaagggttactgactcgcaaggcaggaaagtgagcttcaccaacagtatcattatcatgacatccaatgttggttcacagttcatactaaacatggatgaagaaggtgggtcaactgattcagcctatgagaatataaagaagagggtgatggatgctgcaagatctgttttccgtccggagttcatgaatcggattgatgagtacattgtcttcaagccacttgagagggaacagatcaacagcattgtcaaattacagcttgcaagagtacaaaaaagaattgccgatcgcaagatcaaactcgaagtgtcgcctggagcagtcgaattcctgggaagccttggttacgatccgaattacggtgccaggccagtgaagcgagtgattcaacagtatgtggagaacgagctggcgaagggtatcctgagaggtgatttcaaggacgaggacagcatcctggtagacacccaggtcaccgtgccatctaatggtcagctccctcagcaaaagctcgttttccacaaaatgagtgaagaatccgcaccagctgctgctgaagacgagaaatttttgccggctgtttgatgggccgaacttttagcagatgaggaataaaatgtagatagaagattagcaaacttgagtggatagcatagtatacagacacaatttcccttgctagttcaacattacataagcacaaagtctgtgctgagaaatgttattttgtctctaatatttccagcgaaatgtcttcacatcgcctgtgcgcaaggataagctttcgggtttatcgtagctgcgtaacctcttgtcttgtcagccgtgttcgtcagttggactcagagaaagacaaatgttgcaataggagactcaatttatat

SEQ ID NO: 68503 - DNA, 3513 bp, Oryza sativa
  Clone ID: PAT_MRT4530_6925C.1
atgtttctgccacctccacctatttttgatccagtgcagcagcagccgattcagcagacaccaccaatccagccgattgtacaatcaatccaacaacaggtcgtacaaccagctcagcagacgccaccaaggcagcagcctcagcagccgatccaacagactccgttaagacagcaggtcgttcagccgattcagcacccggggtcggtgaatgcatcggccgggttcgcagtacctggtggtcagcctgtacagcagtttgtaaatcaggtcatcccagaacatttggttcaccatgcacagccggatggtacagtgatgcctcagatggttcctgagcacttggtgcgcaacatccagccgaatcttcataattaccaagggggtaacttgagctatcaatatcagcccccttccctgcaagcccaatatcagctagggggattggctcagccccagttcgcatctcagtatggtcagttcgagtctatgcaacaacagccacaaggagcagctcagcaacgaccgtgggccgacgtgattgccgatgtaatgagagaacaatttgggcttaaaccaaaagagactggaagcttgtatcggcagccttatcctgagtggtttgaaagagtccctctccccaatcggtttaaagttccagatttctccaagttttcgggacaagagggcgtgtcgacttatgagcacatcagccgattccttgctcagtgccatgaagcatcggctgtagacgctttgaaagttaggttattccggttatctctgtctggatcagcttttacttggttttcttctttgccatatgggtcgatcaatagttgggccgatttggagaagcaatttcacagctatttctacagtggggttcatgagatgaagttgtccgacttgacagcgatcaagcagcggcatgatgaacccgtgcacgagtatattcagaggtttagggagatgaggaacaaatgctttagcttgagtttaactaatgctcagttagccgatttggccttccagggtatgattcctccaatcagggagaaattctcgtccgaagactttgatagcttatcgcatctgatacagaagggttgtgagttcttcagattctgctggaacgaagggatgaggttgccatccattgaaaactgccctgggtgtagtgatttcatcgagagctcgagccggtcatatagtagaggtaatcggctaaggcaggcaagacttcctgttcatcagagattgggtccgatgaatcaagattgtggccaagaggatgaggcaatatttgagaaaccagaggggacggagaatcgacaccttaaaccattgtatataaacggctacgtcaatgggaagacgatgtctaagatgatggtcgatggtggggccgcggtgaatttgatgccttatgctacgtttaggaagctgggtaggaacaccgaggctctcatcaagacaaatatggtgctcaaagactttggtggtaatccatcggaaaccagaggtgttctaaatgtggagctgacagtcggcagcaagactattcctaccacgttttttgttatcaatgggaatggttcgtacagcttgttgcttggaagggattggattcatgccaattgttgcattccttcgaccatgcaccaatgcttgattcaatggcaaggcgacaagacagagatcgtgccagccgacagccaattgaagatggagaacccatgctattactttgagggcgtcgtggagggttcaaatgtctacgccaaggatacagtagatgatctcgatgacaagcaaggtcaagatttcatgtcggccgatgagttggaagaaatagacataggtccaggcgatcggccaaggccgacatttattagaaaaaatttgtctccagagtttagaaccaagctgatagaactcctaaaagagtttagagattgcttcgcttgggagtattatgagatgcccggactcagccgatcgattgttgaacatcgactacctatcaagccaggggttagaccatgccagcaacctccgaggagatgtaaagccaatatgcttgaacctgttaaagctgagatcaaacggttgtatgatgccgttccagttattaaaaagaatggcaaggtcagggtgtgcattgattttcgagatctgaataaagctacaccaaaggacgaatatccaatgccagtggccgatcagctggttgatgccgcatcagggaacaaaattttgagttttgtggatgggaacgcaggatataatcagatctttatggctgaggaagatatccataagatggcttttagatgccctagtgcaatcggcttatttgaatgggtcgtcatgacttttggtttaaagagtgctggagcaacatatcaaagagccatgaattatatatatcatgatttaatcggctggctggttgaagtttatattgacaatgtggttgtcaaatctaaagaagtggaggaccacatagccgatttaaggaaagttttcgagagaaccaggaaatatggcttgaagatgaatccgacaaaatgtgcttttggtgtgtcggccggccagtttttgggatttcttgttcatgaaagggggatcgaggtaacccaaaggagcgttaatgcgatcaagaagattcagcccccggaaaataagacagagctacaagagatgatcggcaagataaattttgttagaaggtttatttctaatttgtctggaaggttggaaccttttacacccttattgaggttaaaagccaatcagcagtttacttggggggcagagcagcaaaaggctttggataatattaaggagtatctcagctctcctcctgttttgattcctccacagaaaggaataccgtttaggttatatttatcggctggtgagaagtcaatcggctcggttttgattcaagaattggaagggaaggaacgagttgtattttatctcagtcgacggctcttggatgctgagactcagtattctcctgtggagaagttatgcttgtgtctgtatttttcgtgtacaaggttgaggcattatctattatctaatgagtgtactgttatatgcaaagccgacgtagtcaggtacatgctattggctccaatattaaagagaagagttgggaagtggatattttccttgactgagtttgatcttcggtatgaatcaccgaaagcgattaagggacaagctatagccgattttattgtagagcatcgtgatgattcaatcggctcggttgagatagtgccatggactttattctttgacggatcggtatgtactcatggttgtggcatcagcttagttataatttcccctagggcggcatgtttcgagtttgcttatactattaaaccatatgcgaccaataatcaagctgagtatgaagcggtgctcaaggggttgcaattactcaaggaagttgaagccgatacattgaaatcatgggggattctttgctag

SEQ ID NO: 68504 - DNA, 278 bp, Oryza sativa
  Clone ID: PAT_MRT4530_69260C.1
attacaaagaaagtaaccgaacaagtgataccgacgagatcgtggtcgagagattcgacgagatctcccggcgagttgactccgtggactccgactttgtaaactttggtgggtgtgttggcgatgagggtttaccttaccgccggggccggggttaccgcgccccggcggaggttaccgcggtatttatattaccgtaccaccgcggtaagcccggtaaccgcggtaaccacgcggttaccggcggtaagttaaaccctgaccgtgagataccttga

SEQ ID NO: 68505 - DNA, 340 bp, Oryza sativa
  Clone ID: PAT_MRT4530_69261C.1
agaaaaagcccacctaaatgagcttatcaaattataataagccacttcaataagggggctgtttttttcagcttactcccaaaaatcgggattataataatcccaagctaaaaaaaagagggcccaaatcctttaattagtattattacggcccaaagggcaataattttgagaacccccccaaaccattaagttataaaaaaaaaaggggataaggatccaattttaaaacaacaagggctggccccagggaaaagtagagctagtttaccagcttcaacattgggatttgggcatatcaaaaagatttcgcttcaacaaatttttgctcaacaagctt

SEQ ID NO: 68506 - DNA, 1649 bp, Oryza sativa
  Clone ID: PAT_MRT4530_69262C.1
gaacttcagataatgtctctgaaccacatggaaggcataaaacagagcatctgttcataaatgtagtgttataagccttatcatctgaaactatttgtgcaatctggcctgtttacaaattacggctgttcttggtattatagaacctccaatacaagtattattgacaataacaagtagctgagagtttttgaataccaactacttggtgaccctgttgatgcatgcagatcttggattatagctccttcttgcataattccaaaactaccttgcgcatatgaagaaacatgatattgattccaggactgtgatgcttgcttggacaatgtgtagtttgagtcatcaaagctgatggtcgagaggaagtacccaagcaactgagacttcgccacaaactccaccttctcctgcacaaccacggcactgtcgaagctgacccagagatcaccgctgtagaagtagtctgccactgactggttgtcatgagtaacaaaaacactctgagacttcaggtactcttcgatctctgcgtacgcgattacgccgatctggttgctctttctctgctttgttccagcagctgcagttggtgctcctagcccgttcttgtccttgtttctgaggaaccaagaccttccaaacagaggtatccccatcacaagcttgcatggagggagccctgcatccagccacgagatgacaccatagctagccgagaagtgagaatccttgtcgtagagaggcgcgtcagccgtggtgacgttgctgttcttgtgcaggctgaacgtgataatgttcacccaatcgaggctgctcgacatgtcgtctatcgggtagttgaggttagtgtcggccatgccgaacaggtggttcgagaagtaaacagtagccgtcagcaggagaggctcggtcgatctggtcgtcgaatcctccatgatctcggctcgccattccgcgagaagatctccgaggttctccatgtccagctgcgttgcgggaaacctccacgccaagtcgaggccatcgaagccattggcacgagccaattcgatcgacgagttgatgaacgctctccgaaggttcttctccgaggccatcctggagaaggcggcattggacacatcctccctgaactcatccgtgccaatggacaagatggtcttgacagcgaaacccccaccggaggacttgatgctgctcgagaaattggaaagaatggagctctcttcaccggaggacggcggcgcgacggcgcagcgggtctcgtcgatggagagcgagctgtagtagagatggctgtacagcgaggtgtcgatgctgccgagaggcgagtagtggctcgaggatggcagccagaagccagctctcactcctgcagacgatgcaccaccgcattgctgctgctgctgctgcgatatggatgcagaaacctctgacaggaaagcgaggagtaggaagatcatggctgagccaacgcgtgcctgctccatcggcgagagatggtggagtggttgcgaatgcaatgtggctgtgatgaggatgaagtggagaaggtgagcatctccttgctgaagcaggggttaggagagcggactgttgggcggacgcgtggggtagactggtacagtagaggtaatgtgcactaa

SEQ ID NO: 68507 - DNA, 290 bp, Oryza sativa
  Clone ID: PAT_MRT4530_69263C.1
tgcttggcatccataatgtgttctacgtctctcagttgaagaaatgtttgagagttcctgaggaacaggcaagtccggatcacatcgaaatccaagaagacttgacgtatgtggagaagccgactcgtatcctcgaaactagtgagagaaggtccaggaacaaggcaatcagattctgcaaagttcagtggagccaccactcagaggaagaggccacttggaaaagagaagatgagttgaatgccgcccatccgcaccttttcgccagctcttccgaatctcggggttaa

SEQ ID NO: 68508 - DNA, 599 bp, Oryza sativa
  unsure (1)..(599): unsure at all n locations
  Clone ID: PAT_MRT4530_69264C.1
ccccgggctgcaggaattcggcacgagagcgaatggatgcacaaaatgaaacaccaaaagatatgtacgtaaaaggggggtcatcggatgaacatgagttctatattaaacgtgatttggctttgacatctcaaacaatcaaagctatgttaagtggacctggacaatatgcggaaaacgaaacaaatgttattcattttcgaagtatcagttcacaaactctcgcatgtatttgttcgtactttgcttacaaatctcgatactcaaattcaactatcgaaatacctgattttccaattccacctgatcaagcacttgaattgttatggcagcaaattttcttgattgtaaacattcgggtttcttttcttttcttaatagagacagacaatggagtaacctaaaattgtatgataaataaaaagaatctaaatgtttgcataataaataagaatttccactcttgacaaannaaaaaaaaaaaaananaaannaaaaaatttaaataaaanaaannnaacaaaaaaaccaaaattaaaaaatatacttatatattaanaaaataaaacctggggggggggcgcggaccaaatattctg

SEQ ID NO: 68509 - DNA, 454 bp, Oryza sativa
  Clone ID: PAT_MRT4530_69265C.1
gaaatccaaaattcctgaattgccaccacagattcaaggttccctaccattcattatttacatccttaacagaaaaagcacaagagctaaataaaaggctttggaaggataaaaaaactagcgccttaaaaatcaagaaccctcctcccttcaacaaaactcccaagtatgaagaacctacgcggaaaggaggaccgccccgccggagggcatgatcttcttctcgggaaacttggaaatcaccttggccttgaaaacaatgggcctctgggggggaagcatccccttgccgagcaccttggggtagccgaactgggtgacgtcgataacgggggccttgccgccaccggcctcagtggccttgccggggggcaccatggcccaaaggcgctcaaggtttcacggggggcaggggaacctgttgctgaacttggggaaatatcgcatgccgacc

SEQ ID NO: 68510 - DNA, 292 bp, Oryza sativa
  Clone ID: PAT_MRT4530_69266C.1
cccccggggaaaaccaatcaaacccgaaaaaaaaaaagcccaaaagaccgacaaacaacccctgacagtacgggggtattggggggccaaaggggggcccccgttaggttctagggtgccacaccatcttaaaagacaaacttttttttttagcctccttgcacgtggtaaccaaaaacacctacgggggggggtagacagcatctgggtctctaaaattattatttgttacatccccgatgctttcaaactccggggggtttccgtcggtggtggggcgcgcgggccatgc

SEQ ID NO: 68511 - DNA, 126 bp, Oryza sativa
  Clone ID: PAT_MRT4530_69267C.1
atggaaggagaagctggggcacaaatgggctccggcttccgcgtggcttctgcggagctgggcggtggagccgagacgtttgggaacagcggctccggcttcggctccggctccagtcgaaattaa

SEQ ID NO: 68512 - DNA, 2991 bp, Oryza sativa
  unsure (1)..(2991): unsure at all n locations
  Clone ID: PAT_MRT4530_69268C.1
cggcgctccgccgctgaccctaccgatctaattaaaatcccctcccccaaaaacccctctcacccgaatttcctcatggactcggtgccggccgccggagtcggcgtcggcggcggcggcgcgggcgcgggctacccggagtccacggagtcatccccacgcagccggggcggcgactcgtgggacgagcccttcccttcctccgccgcggcggcggccgcggctgccgggggagggaggctccgcctcatgtgcagcttcggcgggcggatcgtgccgcgccccacggacaagtcgctgtgctacctcggcggggagacccggatcgtggccgtcgagcggaacgcctcgctggccgacgtccacgcgcggctctcccgctcgctcctcggcggccagccgtttactctcaagtaccagctccccaacgaggacctcgactcgctcatctcggtctccaccgacgaggacctcgataacctcgtcgacgagtacgaccgcatcgccgccacctcctccggcggcggctcctcccgcacgtcgcggatccgcctcttcctcttcccggccaagcccgagtcatcctcctccctcggctccctcctcgacgactcctccaagtccgagtcatggttcgtcgacgccctcaacagcgccatctccggctccctcgacggcatcccgcgcgggatctccaccgactccgcctcagtcaactgcctcctcggcctcgaggacgactcctccacgcactcccgcggcggcccgcctaactcttctcccgccgaggaacagcgcgccaaccagcagaagctcgccgcggccgcggccgttgctgcggcgaggcacccgcacgacgtgcagtccgtgccggactcgccgatgattgacaagaactcctcgttcggatcaacgtcctctgcgccatcgctgtcgaatctaccgccgatacgggtgcggcccgaggatcgcccgccggatagccgactcgccccgcaggttcccgttgaggatcacttcgcccagatggggatctccgatcagccggtgcagcctgtaattgggggatacatgcagccgccgccacaggtgccgatccccaacatggctgtccccagcatctccccctcggatgcgtccagccgagtgttctccgacgatgacaagtccgatcacggcggcggcggaggtcggaagccgcagccacccaagccggaggttccacctgtcgctgaccccaccaacagagccatgtactacaacgatagatcgcctcctgctgaattgaagcgtgacatgccggttggaactgatgctgccagctatcgtgtgcctgtgccagcccaagatgctgctgccgccgccgccgctgcggctgctgctgcccagcaacccccagctgggtatgtgtatgcacagatgcatgcgccgccaccgcagcagcaacccccaccaccacagcagcaacagccagtcccacagcaatatgtcactgcacaaaatcagcatttcattcacaatccagctactggcacattcatcccaatccaatcctattaccaccatccggtccctcagcaagcaccacagccgcccatgccgcagcctgtgccacagccacaacaatcacacgctttcgacccaaatactggcatgtattacattcccatgcgcacgaatgcgcctcaggcatatagcatgcctcctggtgccgctgctgtgccgcctcccacccttgttgacactacaccaaaaccaaccgtgccaattcctcagatggccgtgaagcagcctgaactgcagcaacctggtttgtaccgaactaccgcagcacctacccctgtaccagcgtctaatgctcctgcgtatgctgggatgggctaccaccatgttattcaaacacaccatcatccagcgccacagcctgcagcgactgtggcaggcaattttggatatgactatggtgatcccacgcgagcacaggtcttctactcgcaggcagcggcaccaccaacattgccacctcagtatcagcccatgggctcgcccgatgctggccaggctgacctgaaacaggcccgggcttcatagctcaaggatttgtgaactctggtatgttgagaatcctagaagtgtagttatcctgccgttaattatcactattgttattacatgttacatgagtcagttggcaaccagtggatggatgatggcattaggcagctgtgcatttgggatcaaaataagatgaaaatgggatggtagttcttgtgttgggtgaaactcaagagggtgtttgtgattggttctggagatgccaatcgccaatgctggagcaagtggcggggagtggcttccaattccaattgccgtcttcttattttttaaaaaaataaatatatagtgtctaaagaactcggtacaaattctgaatcaagaactcatcatttgtgtagccctttgtatatttgaacctggaagttattgaggttgaaatgtcagataaaagtgtcattactttgcttgtagaaacttcatttgagttaaatatcatatatatacatcattcctgtctctgtaaaaaaaaaaaaaaaaaaaaatgtttcttatggtttattacattgacttgaatcttgctgctattgggtcatcacagttccgtgtgtgtttttcctttgggccagttgcttttgaattggaacttattggctcgcaagtccaggtgatttgtttcttttcaatgtatatcgctttctgtagactgcccgcttgcaaatcaagtcagcatgaacatctatcctgttcattctataacgtaatgttacgggcacggagacagaagattgtgcatttatatggactgcgagccttcagtatcagtcccatgtattactaggttatcaaatgagcatatatattttttgacgcaaaaaatgagcatatttgcttagctgctaattcattactttttttacannaaaaaaaaaaaaa

SEQ ID NO: 68513 - DNA, 1152 bp, Oryza sativa
  Clone ID: PAT_MRT4530_69269C.1
tcagtgtatgcacttgccgccctcgaacgtccagccgatcttgcccatctgccgctcccaccgcggccgcgccacgtacctcctccagtcccggatcacgttcctcaggtcgtgcagcttgttctccagcccgatgcagcacgtcatgtgcacggtcgcgatgcggttcaggtcccgccccagctggcagaacccgctcaccgccgccgtgtcgatgaacctgatcctcacgccgacgccgccgccctcgcctgcgccggcggcgagctcccgcttgatctcgttgaagacgaactggtcgtgctccccggggaaccggcgccgcgccgcgtgccagtacgccatggcgcgcgcgttgcgcggcgtggccttgaagtagatgaacccggtgttcgggtagttccccaggtcgtccgggtcgccgaagtagaagtcgctcgacgtcgtgatgtccgccgccgccgtgatgtgcaccatcgggttcctgaaccacgccaggtcaacgtcctgccaatgccaacgcgcgtcgtgttcctcgtcgtcaacgcctcgtgtttctcccacaatcatggacgcgcgctgctgcagcttgagcttgctccagacgaggtcgaggtagtccttggtcatgtagctcttggcgccggagaggtcgaggccggcgacctccgggagcagcaggtagcagtgcgggtggatggcgcggcaccgccggagcgcgccctcgtccatggccaccaccacgatgtgctcgacgaaatgcgagatgttctcccccaccctgaagctctccaggaacgagtccatcagcgaccccggcgccgcccacgcctcgttcaccgacgtcatgatcaccgtcctgtcctccatcgccgcccgccgcaccatcctcgcgaactcgtcgtcgtcgtccccaccgccggtctgattagttcttgctgctctgcgcgtctctgaatctatccctttcgcccgtggagcgcaagccacggcggcagccttcttctcctgccttgtcgccggagttgcctccggcgtcggccacgcgggactcgcggtcgaggtgaagacgaagacgatcagcgcggtggccgacgccgcgccgaggaggaagacgaccaccggagataggccattcttggagctcgccat

SEQ ID NO: 68514 - DNA, 133 bp, Oryza sativa
  Clone ID: PAT_MRT4530_6926C.1
actgacatagggcctactattagctatcattggcccagtgagtaaattcccgaagctaacatgatactcaagtccaacaggggtccgttgttgacactacattaacaaaacgaatcggtcgccttggtcagcc

SEQ ID NO: 68515 - DNA, 744 bp, Oryza sativa
  Clone ID: PAT_MRT4530_69270C.1
atgggtcgtggcggagccagatccaaacgccttcgactcctccacccttgccgtcggcttccaggcggcgggcagcagcaggcatcggagcgcggcggcgacgccgaggtatgggagccgcgcgctggtggtggccagatccgtgcgtcacctgcgcgcacaggcgcacaggcggcgcaacagctgacgcagcacgggaacatcgggtatgtgcttcgcacactcatctccatggataagaagcctgcgaggaatctcaccgcctgccttgccgccattgctggcgctgtcgtgaataacagcaatggcggaaagttgcctggtctgtcacggaagctgttccagaaggcgccgtcggaacacaagaagaacgcactgacggaggtcaagagcggtggcaacacgcgggcgctcgccatggtgctgcgcggcgagtgggtggacgagatcgctgcactccgcctccagttcgagcagaaggacattgaggttgagcgcctcaaggacctgtgcctgtggcagcgggaggagatctggacgctcaagggcgccgtgttcttcccggctacacaaccggaccacaacctcacgggacagatccaataccttgctgaaaagatcgcggtggcactaatgggtatacccacgggcacaaataatctcacgggtataggtatgggtaggtactacccgtgcccgtcgcgcccaattgccatccctaaattggatgctgaattgagttga

SEQ ID NO: 68516 - DNA, 289 bp, Oryza sativa
  unsure (1)..(289): unsure at all n locations
  Clone ID: PAT_MRT4530_69271C.1
cacgctgttcgtacagctgtgaccacaacagccaccaactccgcgcaacttcttgaaagggtgtaggtgggaggatgntcggtggcggcggcatgttcnntaggaagccnttggactacgaggtgctgatcgagaacntgaagaaggtgcagtacgcggtgcggggggagctgtacctgctcgcctccgagctccagaaggagggcaagaagatcatctttaccaacgtcggtatcccacactttctcgggctgtagccgctcaccttcccccgccaggttgtggcgct

SEQ ID NO: 68517 - DNA, 141 bp, Oryza sativa
  Clone ID: PAT_MRT4530_69272C.1
atgacgacgaggtcggtgacgcgaagtgagagggcgcgaggtgacggcgcgaagagctctggtgaggcgcgcgtcctagcgccacgcatgcgcaaatccgagctggccacgcgagataacgctccacgtcttgcaccgtga

SEQ ID NO: 68518 - DNA, 2838 bp, Oryza sativa
  Clone ID: PAT_MRT4530_69273C.1
atgaatgagttcaggacaaatctggcgttgttaaagaaagatgtggctgatctgaaatctctcaagggggaggtcaaggaaatcaaggggttgctgttggagctttgcaagcagaaatcagtcgtagaaggtggagaagaggtagtcactgaaacagcagccacgaaggggacgttgggttcgagtactgaagcagctggaacaagtactggaggaattccgaggacagcagctccagaggggtttggaactactcatccagaacccacagtgtttactcaggcaagagaggggaatcaatatgctgaggctgtgattaaggggcccagattggagatatctctttttactggtgaagaccctgtagattggctgaagcagtgtgaaaagttctttgagatcactgggaccccagtggatcaatgggagcctaaaggattgccacccaggaggagttgtgaccatgtgattaatctgaaagtggggtctgagccaccaaatctcagaccatatcgggtaccacactttcaaaagggggccatggaagatattataactgagctgttcagaacacaagagatcagaatcagtgatagtccttatgtctctcctgctgtcatggttagaaagaaggatgggtcctggagattacccctgcatgatttgctgaagaaagatggcttcaaatggggtgatactcagcaggaagcatttgaattgctgaaagagaaaatgtgcaatagcccagttttggctttacctgatttcagtcaaccttttgtgattgagactgatgcttgtgggataggaattggtgctgttttgatgcagaagggtagaccactggcctattttagtaaggcattaggtcccaaagcagctgctcagtctgtatatgagaaagaagccatagcaattctggaagctttaaagaaatggaggcactacatcttagggggaagtttgatcattaagacagaccagcagagtctgaagttcatgatgagtcaaagattggttgagggcattcaacacaaattgttactgaagttaatggagtttgattatgtgatagaatacaagtctggaaaggaaaatctggtggctgatgcgctgtccaggagcccaaacttgaaagaagagcagtgtttacccataacagttgttgtaccagagtgggttcaagacatcaagaggagttatgaagaggatatatttgcacacaaaattttgagtttaattgaaactgatggtgaccctgagagacattataaattggagtctgggctgttaaaggtgacactggaagataaggctctaatcttgcagaagttgaagagcagtataggggaagcacaaaggaggataaagttttatgctgataaaggcagatctgaaagaacgttggagctaggagatatgggtcttgacaagccacccaccgccaccacctccctcccgcggatgagctcaccaattgtgcccctctcctccgccggcgagttcctagggaagagagggataagtcgaccgaaagttgagggagagagagtccacgggttgacagttccactcctgctctcttggaggcttggagatcaatcgatggagcacgtccagatcccgagagtgaagctgggaacccagggcctcgaggtgtccaagctcgggttcgggtgcatgggcctcaccggcgtctacaatgcgccggtcgccgaggaagacggcgtcgccgtcgtcaggcgagcgttcgaggccggcgtcaccttcttcgacacctccgatgcctacggcccgcacaccaacgaagtccttctggggaaggcactgaagcaactacctcgtgagaaggtacaagtggccaccaagttcggcattgcaggatttgatgccaatggcatgcttgtgaagggcactccggattatgtgcgtgcatgctgtgaagcaagccttgagcgccttgctgttgactacattgatctgtactatcagcatcgcattgaccagtcagtacccatagaggaaactatgggagaactaaagaagttggtggaagaaggtaaagttaaatttgttggcttatctgaggccagtgctgataccattagacgagcacatgcagtttacccaatcaccgcagtgcagatggagtggtctctatggaccagggatatagaggaagaaataatcccgctgtgcaggttcatggagcttggcattggaattgttccatatagcccaattggccgtggcttctttgctggcagggctgctgtacagagcataccatctgagagttggctgactagacatccaaggtacaatggggaaaacttggagaagaataaagttttctacacacgaattgaagagcttgccaccaagtatggctgctcccctgctcaacttgctctctcctgggttcttcatcaaggggatgatgttgttccaatccctggcacaacaaaagtgaagaaccttgatgataacattggtgctgtaaaggtaaagctgagcaaggaagacctgaaagaaatctcagctgctgtccctgctggcgaggaggaaccaagggagcagctagctgaccaattctttttgaatggatctcgaggcattgttctcggcttgcgctgcccatgcatcacgcacctcgagcatcggggaatgcgcgtcgaccgcgggacgatggcgatgatggtgagtgcaaggccagggatgcccaccaagaacatatgtgccctccacaggtggaacctttggttcttttcttggaccaccaccactcccaaattctgctgctgcaatgcaatgcaatgcctggaccaaaaaccttga

SEQ ID NO: 68519 - DNA, 886 bp, Oryza sativa
  Clone ID: PAT_MRT4530_69274C.1
gtcacgccagagcggccgcggagagaggccggaggcgttgtttcaccacacatgccaggtgctcgatgagctatgctgtaaaaagactgggtaaagatactttccaatgccagatctcaagcttcgccacgccgttctccgcttttccattgttccctgaactaggagtggccttccttgggcatccagatgtggatgttgttaataacaacatcatgctttggatgttgttggaacaccgtccaataacctgaggcagatgcccttagcccctgatctaccccagcactcatagactgtcccaagcccaattgcccaagtgcctttccattcttgagtaatatctacttggtaatatccatccaaagaacaacattggacatacgcaatatcttttctgatgcattacagaaaacaaattccatatatacggacaagcaagtaagccaacaaccaaaaaaaatggagaaacaaatattttagatgtttataatcgaataacaagacagaagccttaaaaaaatggagataaacaatactagaggtttaccatccaataaaacaggctgacgctttaagattctttcacaagtcattcatttcgtcaaaaatcaaaatgggtagacgtaacctgtcgtaatcccttcggtcaggtcgtgcattaggtgaattgatagtatcaagcactaagtgataaaagttaatgtgatgacaaagtgattttacgaagtacaatcccagatgccactacacaagtaagaagcccccatgatcttactcggtgaagatagcatcccccaccgaagcaagaaaggcatgacagctcggcggtgactctacctcccgagagcaccgcccgatcacaaactcgaggcctcaaaaatgt

SEQ ID NO: 68520 - DNA, 609 bp, Oryza sativa
  Clone ID: PAT_MRT4530_69275C.1
atggccccacatgtcaccatcaccctcccctcctctctctcccatgccaactcaccacttcgccaggagcagggccgaccagagcaggcggggcgacacacgggtgaagtcgacaggcgggcggagcatcggtggcgggtggagcagaccagtggagccgagcgggcgaagcggcggcgcacgaagtcggcaagcaggcggagcaggcggcggcaggcgaagccagtaggtgggcggagcgctggtggcgagcggcacacaaacttaggtttcggcaggaacatcagccgaaagggggcgcctcacggtataccatacgatttgcacggtctcggccgaagctccctactcacccttgcccgtgaggggcttgttggaggtataccgcaaagggccttcggccggacctgccgaaaccgaaagcttgggcaacaggctcagaccggaggcgagcggcgaaggtcgaagaggaaaaccccaaggacgaaagccatggcttgggagtacacgtgcttcgccgaccaagggccctgtcagggggtcacgtgggcgaagatggtgaggcggcccgaaggcatgggtttcgccaagtaccaaatcacaccgtga

SEQ ID NO: 68521 - DNA, 2964 bp, Oryza sativa
  Clone ID: PAT_MRT4530_69276C.1
atgccggccccgtgcttgcccgaccaggcagcggcgctgctccgcctgaaacattccttcaacatgaccaacaagtccgagtgcaccctcgcatcatggcgcgccggcacggactgctgccgctgggagggcgtccgctgcggcgtcggcatcggcgttggccatgtgacctcgcttgacctcggtgagtgcggattggagagcgctgctcttgaccctgcgcttttcgagctcacttcgctcaggcaccttaacctcgcgtggaacaatttcagcgggtctcatattcccaccattgggttcgaacggctcactgagctcacctacctcaatctctccaactccaaatttgcaggccagataccaaatacaataggacgtctcactaatttgatatcccttgacctctccactgattttttccttattgatctagatgatgagttcttatcagttgccacctattcacccgcttggttacttgtggcaccaaacattgtgtcaatagtcgcaaacctccacaacctgaaggaactttatatgggcacaatagacttgtccagcaacagcatggtacagtggtgcagtgccttttcaaactccactacccctcaacttcaggtccttagcttaccatattgctacctcgaggttcccatttgtgaatcattgtcgggtatacgctcactgagtgagattaacctacagtacaacttcatacacggtcccattccagagtcctttggagatttaccttccctaagtgttcttagtcttacacacaacagtctagaagggagcttcccaagtagaatcttccagaacaaaaacttaacctctgttgatgttaggtacaacttcgaactctccggttcgttgccaaaaaatatctcatcaaatgacattttggtagatcttcttgttagcagtactaacttctctggtccaatccctaactcagtaggcaacatcaaatccttggaaaatttgggtgttgcatcaagtgacttctcccaagagcttccctcttctattggccagctgagatcgttgaattcgttagagattacaggggctggtgtagtaggagcagtaccatcttggattgcaaatttgacttcattgacccttctcgacttctcgaactgtggcttatctgggaagataccatctgcgataggtgctatcaagaatctgaagaggttagcgttatacaaatgtaacttttctggccaaatacctcaagatctatttaacctaactcaattgagagtcatatatcttcaatataataacttcattggtacgttggagctcagctcattttggaaactaccagacctattttctttgaatctttccaacaacaaactatcagttgtagatggtgagaaaaataattcttcatgggtgtccataaactatttctacaccttgcgcctagcatattgtaacatatccaatttccctagtgccttgagtctcatgccttgggttggaaatcttgatctttcaggaaatcagatccatggtactatacctcagtgggcgtgggaaacttcgagcgagttgtttatcctcaacttattacacaacaaattcgacaatataggatataattatcttccattttacttagagattgttgatctcagttataacttattccaaggacccatacctataactggacctgacacttggttgctcgattgctcaaacaaccggttctcatccatgccatttaacttcagttcccagcttagtgggatgtcctatctcatggcctccagaaacaacctatctggagaaattccactctcaatttgtgatgcaagggacattctgctccttgatctttcttacaacaatttaagtggcttgattccactttgtttactggaggatatcaattcccttagtgtgttcaacttgaaagcaaatcaacttcatggtgagttacctcgtaatatcaagaaaggatgtgcattagaggcattagatttcagtgagaacatgtttgaaggacaactacccacatctctagttgcttgcagagatttggaggttttagacattggaaataatcagattagcggtggttttccatgttgggctagtatgcttcctaaacttcaggttcttgtcctgaagtccaacaagttcaccggagaggtggggtcttctgccatcgaaaaagataacacttgcgaatttgcaaatctacggattcttgatttggcttcaaacaacttttctggtactctacatcacaagtggttgaaaaggttaaaatccatgatggagacatcttctagtgcgacattgcttatgcaatatcagcacaacgtgcatagtacaacatatcagttttctacttcaatcgcatataaagggtatgaagtcacatttacaaaaatcttgaggacccttgtagtcatcgatgtttcagacaatgcactccatggtagcattcccaagtcaattggagagctcgttctcctccgtgggctaaacatgtcacataatgccctcacaggaccaattccatctcagcttggtgctctgcatgaactcgagtcattggacctctcatcaaatgatctttcaggggagattccacaggagttagcacagctacacttcctctcagtgctgaacctgtcctacaacggtttggttgggagaataccagattcaccccagttctcgaacaatctctcctatctggggaacattggtctatgtgggtttccattgtccaaggaatgcagcaacatgacaacaccaccaagctcacatccttcagaggaaaaacatgtggatgttatactgttcctctttgttggacttggagttggcatcgggtttgcagttataatcgttgtgacatggggaatccgcatcaagaaaaggtcccaagacagcagatttccgttttggaaaaaagttctctgtatgtaa

SEQ ID NO: 68522 - DNA, 753 bp, Oryza sativa
  Clone ID: PAT_MRT4530_69277C.1
ctccctcgtttccatcctcccgaatcttcttcttctcttcttgcggtgactgagaagaaaaaaaaaagaaagagaagaaaaattgctacgagattccttcttcgtcgccgccgctgctgctgcgttatccccaaggtgagagctttttgtgctttgagcctttggatggtgtggtttggtgggggcgctgatggttggggacctgggtggtggtgtttgcccgtgcacaattcgttcccttcttcttttttttttttttgttgttggatgctcgtgtaggctgtggtttctttgcttgctgacttacagtggatttttggtggggtttgggggtgcgattctgaggtgatcggcctcaaaggtggtcgctttggctggattggttcttgggttgagtgaatttcctctttgattttgctgcagttggtgtgtgttcatgccttgcctggtgtttgattggagaattggggtttgaggatttgtgcggtcctctgcgctgttaagttttcggtagagacgtggagttgactattaagagcataacatccttcaagaaaggattctttgcgtgcattttctataggtgcagatcgatttcaggaagtttcagtcgattcgtataggataggtgatggttatttagtgaatttatgttctttgtgagtttgaatttcagttggttgtggcaaagttagatggcaagtccccaccacaagtcttccaataccctgcttgtagtttcttttgggtagg

SEQ ID NO: 68523 - DNA, 180 bp, Oryza sativa
  Clone ID: PAT_MRT4530_69278C.1
ggtctgttagctgcagaggaggaggcagggcaagggcagagtggcccggggctattgagcttgagcttgagaagcagattggataaactgaagaaggatattgaagcacaaaagtagcaaggaagagtgcaactatggaggctagggctggtggatgcagagtaagaaggggtgcaagag

SEQ ID NO: 68524 - DNA, 1343 bp, Oryza sativa
  Clone ID: PAT_MRT4530_69279C.1
cccacgcgtccgcccacgcgtccgcccacgcgtccgcccacgcgtccgcccacgcgtccgcccacgcgtccgcccacgcgtccgcccacgcgtccccgagctcgctctcgcggcgtctcccatggcggaagccgacgcgcaaacccagagccgcgcccactcctcgacggcggcgccggtggcgggggagacggccggcgaaccagtcgggtttccccagaatggcgctataaatggggctcctttgatgtttccggtgatgtaccctatgcttatgacgggtatgcatcctcagcagagcctggatgatcaggctcagggtccagggatctatgccatacagcagaatcaattcatggggagtactctcatgccactcacttacaggattccaacggaaagtgtcggtgctgtggctggtgaagagcaagcacaggatgctaggcaacaacatggccctcagagacaagttgttgtgaggaggtttcactttgcttttcagcttgacttggccctgatcatcaagttagcagcagttgtctttctgtttagccaggaaggatcaaaacaaaggctgtttcttctcatactgtttgcctcagtgatttacttatatcaaactggcgcaattacacctttactaagatggctgcagcgagcaggaggtgctgctgctcgtcctccacaggctccagctcgcccagagaatcgtgctccgctagctgcccagaatgatggcaatgttcaaccgcctgggggaaatcttgcagacccagcaaacaatgaccaagctgcagagaaccaggaaccaggggcagcagctgctaatgagaaccagcaagaagtcgatggagaagggaacaggcgcaattggcttggaggcgtctttaaagaggtccaattgattgttgtagggtttgttgcatcacttctccctggctttcagcacaatgactagagctaatcccatcactgcctaatcttccattggcaatgtaactgtttattgtgagataggcgtgaacagaaaaatggtacaaagcagcacaaagaagagtttgttatagaacaaaaaatggtggcgttgttaatattgttttcttccaagtgctattgttatattttgtttctaaaaaaaaaaaaaaaaaagacttgctgggagttaccactttcactatctagaataatatgactatatatgacttgaagaacttgggtctttccatgggcagaagtatgtatattctgcagccgtcaacagaccgtatgtaaaatgtgattgaactgtttgtatgtgttggttgttgattgtcatgtcctaaaaaaaaaaaaaaaaaaaaaaa

SEQ ID NO: 68525 - DNA, 309 bp, Oryza sativa
  Clone ID: PAT_MRT4530_6927C.1
atggccaccccaagagctctgtttcttcagaggaagattcgtgatggcagcgagaagaagcaattacctgcagcagcaggcgtcgtcagggtcaaggtcgtcctgacgaggaaacaagcggcgcggctcgtctccctcgccggcgaggggaggaggaggaggaccgccgcgcagcttgtccgcgagctgaggaggatggaggacggcgccggccgtgtcgatggctcgccggcgacggcgacggcgacggcgtggaggccagtgctcgagaccatctccgaggagtggttgggttcagaggtgaggtaa

SEQ ID NO: 68526 - DNA, 444 bp, Oryza sativa
  Clone ID: PAT_MRT4530_69280C.1
atgaaggacagctggagggcgcaccggcgcgtcgcgtacgacggcgaggccaagaacctcaccgtcgcgctctcctacggcgacgcggcggcggcccaacagatcccgtgctctggggtgctctggttcgtgtcgcaatggaggaaagccggagagctcgccgatggcgacatctttgacgagatggggtacgacgagcttgccgacgaggagttcttcgtggagagcgggccgtggcggttccggtacagcgacgcgcgtccgcatccaacgcgcgcgccggccgccgccacaccttcctcctcccccgcgcgccggtcaccgccacaccttcctcctcccccgcactccggtcgccgccacaccttcctcgtcccctccgtctcgccgccgcccgaaacggcgtcggctggggcacccggcgcccatggtggaggcggctag

SEQ ID NO: 68527 - DNA, 222 bp, Oryza sativa
  Clone ID: PAT_MRT4530_69281C.1
aaaaaaggggggggggggctttttggttattgaaaattaagctgtttttttttttttgccggcccgaaaaaacaatcctattttaatattggggaagctttaatttacaataatttaaccgccttgcgttttcaagtgggcaaaactgaattttttccctcggggggattacaagggatttccaagataataaattagttaaacctctttttatttacatta

SEQ ID NO: 68528 - DNA, 728 bp, Oryza sativa
  unsure (1)..(728): unsure at all n locations
  Clone ID: PAT_MRT4530_69282C.1
ggggnggngngcttcccaaancggncaaanaagaaaaagctcncaactccnaacctcangatgtcccaatcccccagncggnacctccaggttgngggagcanccttacggggcgctntgcctgtcaaactttgcntcncaggcgtcgganaggcacaacgtgcccgaaatcgaggcgcaaacatcgcccgaggngctgctgactcccctnacgattgcgcgcaacgagaacgagngngtcctcatnnagcccagcgtcaacagcgtccgcatcagcatcaagatcaagcaggccgacgagatcgagcacatcctggtccacaagtttacgcgcttcctgacccagcgcgcggaatctttttttatcctgaggaggaagcccatcaagggatatgacatttccttcttgatcaccaacttccacacggaagagatgcttaagcataagctggttgatttcatcatacagttcatggaggaggttgacaaggagatttcggagatgaagctcttcctgaacgcaagggcaagatttgtggccgagtctttcttaacaccgttcgactgatcgcgaaagttgtgtacgtcgaaagattctgttactggcgttgttggcggaaacatgattccttgtgccttattgaaggtaaaaagncaanccataagattacgaataaattgctcnagncctaaaaaaaaaaaaaaaaaaaaaaaaaaaaaaaaaaaaa

SEQ ID NO: 68529 - DNA, 537 bp, Oryza sativa
  Clone ID: PAT_MRT4530_69283C.1
atggtccttgctgagaactatcacttggctggttcacccacgttggccctgcttgatggctgtcaagtactcagcgccaaccgcatttgcgctgagaacagaaggagtacattgcggaaaacaaaaaagatcacttgctcacaccctactgcaatcctcatcacaatcttgccccttctcttccctcttatgccttcttcgcttgtgctggcctccaccgtccttctagctcctggacttagatgcgccttctctggcatgcctttgccgcctccaattctataccctcacacactgagtctcttcatcgttggctcaaagctatatagattgcctattgtcaggacaggggactctacaatatcttttggcattgacaagaaaaagaaaggaaaaagaaagaaaactgatgtctgctcgattgctctagatgaagatcaaataaatgtttatcaatttggaactttacttaatgtggatcaacttggagggatcgtgacatgtactataattcctcgtgatttgatcattaattag

SEQ ID NO: 68530 - DNA, 467 bp, Oryza sativa
  unsure (1)..(467): unsure at all n locations
  Clone ID: PAT_MRT4530_69284C.1
caagagaaatttagggggggcaaagtaagtgggaagagagaaggggggctatggccgtcgggagccgtgaggctggtggcacactcgaccaatccccctcctgcgcggcggcggccgaggaggggaagctgtcggcgagttcacggcggcgaaatccgtcgctagagggaggggactgagcaggtggtcgaatcaggggagctctgcgagaaaatcaggaagaaggtcataccggctcaatcagacggcgagctctccgtccttcgccgccgccgtcgtcgtctccggctggctgtcatgttgcataccaaaattggaaatagcagcccggtctcttacatcatatttgcaccccctcgccacgccacgccacgcgcgagcgccgccgccgngactgatcacggctcggctagctctctctatctcgctgactaattaatcctctctccttctcctggntaactaca

SEQ ID NO: 68531 - DNA, 423 bp, Oryza sativa
  Clone ID: PAT_MRT4530_69285C.1
attgtttatatctctctgtttttttccacctgtgcggctttctttgtcgggtctggctgtgtcactctctccatttccaaccgcatcgtcgtgctgatgggccatgtacgaccaagccggagagtgagctcgctcgccgccgtgcatgatgggtttgggccgagcgtggactggccaacctacacgcgtgatccatggttgctctgcccggatctgtaccggtggctaggagagctcgcttcaaaggactgtggaatatttggtgttccctactatgtcccctaaggcgctggagcctgcacatgtctgcgcgtgttcagagaaatcaggttaggctacgatactacgggggatctcattcttggctccacagatgcagatcaggccgagtgtgatggcttactttcaacgctggatgatcat

SEQ ID NO: 68532 - DNA, 153 bp, Oryza sativa
  Clone ID: PAT_MRT4530_69286C.1
atgagaattctatctaccagagagttttcttctcgatgtaattgcgtcgaacacctggcgtgcgcgcgctctgccgtcctccgcgaccttgtccggacagcaggtaagtcggtcgcgcctcgcctatgtgcggccgcgcgcagctgcgcgtga

SEQ ID NO: 68533 - DNA, 721 bp, Oryza sativa
  Clone ID: PAT_MRT4530_69287C.1
tagacaagcttaacatccagtagtctcgtcatcttttggcgttgcaatatactagacgcaagagaaagaaagtgtgtgtgcattgcactttgcctacaagatgcgatattatgtgtgtgcaactttgggtacatacacatttctgaccaatcgacaaggcaaactagacatttaacaggacaactctgcaccgtatcacaaagacagccagcagctggcagagtatttatttcctgcggtgagatagatttctaagggggtgaggatgtgacatcccagcctagggcttaataggattaatagaatactcatatcaacaagttgcaacttttttccggaagccgatctccaaagaactccagggttaagcgtgcttggcttggagcaatttagggatgggtgaccgatcgggaaattcttcccgggtgcgcacgagtgaggacaaagtgtgcagaaaagacttgtgttggtctgtgagggcaacctatgacttatgaaagctatcatatgtaagcgggcccgcctgggagaggtgggacgttacaaagtggtatcagagcatggcacatgcgctggcactggacacacggacgtggctaagaggggacgttcctggcctggggttgatcgacgaggacgtcggacgtggctaagaggggacgttcctggcctggggttgatcgacgaggacgtcgatcttctaaggggctatcagatgtaa

SEQ ID NO: 68534 - DNA, 282 bp, Oryza sativa
  Clone ID: PAT_MRT4530_69288C.1
atgacggttgtgacggttggaatggtcggtaataccctccaaccttcattggggcttcatctcaaccgtccagccaaaacatggatccaacgaaggcgagggaggttcggccgaaccatgggtcggcccaaccaacccagctttcagctggcggcctcctccattgctcctttatgtagacttgtgatttttggctcaaatcatcgtgtcaattctgagttcttggcccattcatacatatgtctaattctcgacattgtccgattgatttatcgtctgtgt

SEQ ID NO: 68535 - DNA, 194 bp, Oryza sativa
  Clone ID: PAT_MRT4530_69289C.1
ttctttttcaacgggaaccagaagaccaccggcgagggattttcgcaatgccatacgcactctgcctaatgatcgcgcccagacatgcgctcttgctctacatcccaccgctccgttatgcagacaatgaaaccaccacatcgccggcaccacggacagtgggcacctggctagtgggcacgcacgaggcggaa

SEQ ID NO: 68536 - DNA, 5058 bp, Oryza sativa
  Clone ID: PAT_MRT4530_6928C.1
atgaccgagaagctaccaccgtcgccatcctcggctagtccgggtactgttaaagagacaatccaaaggttaggatttaacaaagtcaatgaagggaatattgtggctgttgatccggaaaagctcacacctgaccagaagaaggatttcgaagcaatgatgcaacaagcacgagaacagttcttcaggtcattcacacagactcgcaatggaacatttgttcaaaagtacaaggtaaaggtgattcccgatgagccggagaccagtatctctaaggaaggagaagaaaaaagagttttagatggctcggctcaagagaatcagggtgacggctctcagggggtacatgcagttcaaggtgatggtgcttatgagccacaaggaggaaatcttaatcagaatggtgagacagcacaagatttcttcaacaagatttcttcaacaatttccaagatcgagtggactacgccgtacacaacgccgcttgctcaggcagttcttccaggtgcactatcggctcagccgatggcatcgccattgacttctttgcctgctccatcagcgtcgacaccaggagcagttcaacaacgaccatgggccgatgtaattgccgatgtgatgagagaacaatttgggcttaagccgagagatactggaaaattgtatcggcaaccttaccctgagtggtttgagaaagtccctcttcccaaccgatttaagagtccagacttctccaaattttcgggacaggatgtcaatagttgggctgatttggagaagcagtttcatagctatttctacagtggagttcatgagatgaagttatccgacttaacggcaattaagcaaaggcatgatgaacctgttcatgagtatattcagaggttcagggagatgaggaacaagtgctttagcttaagtttgactgatgcccagttagccgatttggcttttcaaggcatgattcctccgattagggagaaattctcatatgaagattttgatagcctgtcgcatctcgtgcagaaggtaatattgcatgaacagaggtctgcagaggctaggagaagctctaagagggttaatcatgtctgcccttacatgtatggatcggatgatgacgacgatgactccgaaatagctgcagtcgaatgggtaaggagtaaaaaggttataccttgtcagtgggtaaggaattctggaaaagaggagagatatgattttgatattaccaaagctgacaagatttttgatctgctactccgggagaagcaaattcaactccccgctggtcatgtaattccatcggctgaggaactaggcaaaaggaggtattgcaaatggcataattctggatctcattctactaatgattgcaaggtctttagacagcagattcaagtagccattgaaggggggaagattaagtttgatgattccaaaaagccgatgaaggtcgatggtaatcctttccccattaacatggtgcataccgttggtcggacagccgatgtgggacgagcgagaggttttcgcgtgaattcggctaaaattataaataagtatcagaggaaatgcgacaaacaacaagagaggcattatgaagaagataatgatggtttcgatcctcattggaattgtgagttctttcggttctgctggaacgaaggaattaggttaccatctattgaagactgtcctgggtgcagtaatattacagagagttcaagccgattgtacaaaagaggcaattggctgaagcaagccagagttcccgttcatcaaaggttgggcccggtaaatcaaaatgattacttggagggagacgagaacgcgaagactcagtggtgtccttctggtatttttacaaagaatcagaaaagaagggttcaaaggttgaggagcagggagcgctttcaggaggtcgaacaagaaattggtcatcggctgaggaaagcaaagccaaggaaggagtggcatgttaagaatcaagttcttggagccgatgatattgcagccgacgaagctaagaggttggcaaaagggaaaagtattgtaacaacgccaattaacatggtctttactttgccagccgaattcgggattgatcaggccgatgttgacgaactggaagaggaatcggccaagttggttctatcaccagaacgagcagtctttgaaaagcctgaggggacagaaaatcggcatcttaaaccattgtatataaatggctatgtcaatgggaagccgatgtctaagatgatggtcgatggtggggctgcggtaaatttgatgccttatactacgttcagaaagttaggtagaactactgaggatctcatgaagacgaacatggtgcttaaagactttggtggcaacccatcggaaacaaagggtgttctgaatgtagaattgacagtcggcagtaaaactatccctaccacattttttgtcatcgatgggaaaggttcttatagcttgttgcttggaagggattggattcatgccaattgttgtattccttcgaccatgcaccaatgcttgattcaatggcaaggcgacaaggttgagattgtgccagccgacagccgattgaagatgaagaacccaagctattattttgagggcgtcgtggagggttcaagcatctacgccaaggacacggtagatgatctcgatgacaagcaaggtcagggttttatgtcggccgatgatttagacgaagtggatataggtccaggtgatcgaccaaggccgacattcattagtaagaatttgtcttcagaatttagaaccaagctgatggagcttttgaaagagtttagagattgctttgcttgggagtattatgagatgccaggactcagccgatcgatcgtcgagcatcgattacctttaaaaccagggattagaccacaccagcagcctccgaggagatgcaaagccgatatgcttgaacctgtcaaggctgaaatcaaacgtttgtatgatgctggttttattcatccttgccggtatgctgaatgggtttctagtatagttcctgttatcaagaaaaatggtaaggtgagggtctgcattgatttcagggatttgaataaagctaccccgaaggatgaatatccgatgccagtggccgatcagttggttgatgctgcttcaggacataagatactaagttttatggatgggaacgcggggtataatcaaatctttatgaccgaagaagatatccataagacggtcttcagatgtcctggtgcaatcggcttgttcgaatgggttgtaatgactttcggcttaaagagcgctggagctacgtaccagagggctatgaattatatatatcatgatctgatcggatggttggttgaggtctatattgatgatgtggttgttaaatccagagaaatcgaggaccacatagccgacttgagaaaagttttcgagaggactaggaaatatggtctgaagatgaatccgacaaaatgtgcttttggtgtatcggctggccagttcttgggatttcttgttcatgagagggggattgaaatacctcagaggagtatcaatgcgatcaaaaagattaagcctccgggaaacaagacagagttgcaggagatgatcggcaaaattaattttgttcgaaggtttatttctaatttgtctggaaaactggaaccttttacaccattgttaagattgagagccgatcagcaattcacttggggggcagaacaacagaaagctttggataatattaaagaatatttaagttctcctccagtattgattcctccacaaaaagggattcctttctggttatatttgtcggccggtgataagtcaatcggctcggtcttgattcaggagcttgaaggaaaagagagggttgtgttttatttaagccgtcggctcttggatgcagaaacaaggtattctcctgtggagaaattatgtttgtgtttatatttctcttgcactaagttgaggcattacttgttgtccaatgaatgcactgtggtgtgtaaagccgatgtgattaagtacatgttatcggctccgattttaaaagtgagagttggcaagtggatattttctttaacggagtttgatcttcggcacgaatcaccaaaggcgattaagggacaggctgtagccgattttattgtgggtcatcgtgatggttcaatcggtttggttgacattatgccttgggtattattctttgatggatctgtatgcagtcatggttatggtatcggcttggttataattgcgccttggggggcaagttttgaatttgcctatgctattacacaccatgtgactaataatcaggctgagtatgaggcggttttaaaagggttacagttgcttcaggaagttgcagccgatgctattgaaatcatgggtgattcgttgttggtgattagtcaattggcaggagagtatgaatgcaaggatgatacattgatggtttattacgaaaagtgtcgaacgttgataagtgaatttcggctggtgactctgaggcatatatctcgagaacagaatatagaggctaatgatttgtctcaaggagcgtcgggatataagccaatgacaaaagatatcgagatagagattgctacaattacagccgatgattggagatatgatgtgtttcagtatttacagaatccatctcaatcggctttacggaaattgcgttataaggctttgaaatatactttattggatgatgacctctattatcggacgattgatggggtgttgcttaaatgtttgagtgccgatcaggcaaaagttgcaatcggtgaaattcatgaagggatatgtggtacacatcagtcggctcataaaatgaagtggttgctccgacgtgctggatatttttggccaacaatgctggaggattgtttcagatattataaaggttgtcaagattgtcagaaatttggagcgatccaaagggcgccggcatcggctatgaatcctattattcaaccgtggccttttagaggttggggaattgatatgatcggtatgagatga

SEQ ID NO: 68537 - DNA, 382 bp, Oryza sativa
  Clone ID: PAT_MRT4530_69290C.1
ttggttttttaaatttgagggttttattttttttttttttttttttttttttttttttttttaaaaacaaacgggggttaatcataaaaaatcttcccggagaattagatgcccaaaattcatagggttcttcagcatcttacaacttacaaggggggccaaatcccagcgcaacttttttaaagtaagctgtagggggaaaaggaaccatttttaacaacgggaaaaatattggttttggagggaaaccttttgaaccaatttattgggaaataaatttgggggatcgtttccgtccgatctaaaaaaaaccgggcttttgtacctaaagggggtttggcctccaagtgaccgggttgacctttttggtggggagggtttt

SEQ ID NO: 68538 - DNA, 1137 bp, Oryza sativa
  Clone ID: PAT_MRT4530_69291C.1
ggcgattgggcttcatacgagccggccgggagtacgccctgacgctcgcatcgcatctccggctgagagagatcctaattccgagatggccacgacgcgggggcagctgcccgtcgaggacgtgctgcgcgggaacgggagccggcgattcgccgccgcgctggccggcgacgcccccgtcgccgccgccgctggcggccgcgttgccgctgaccggatgtcggtcaacggcgagttggcagattgcaaccccacgcatcgccagacgtgtgggttcctgtccctcatctcgccgcctggggctcctgccagggggatcttcacggaggttaggaggcgctggccttcgcggccgaatgtcggacatgagatcccagcctaggaagaactgacccaagtggtgctaggagtagcaatcatctttgcttgaaagcctgtctgattcccctcttcaggagttggcagtttgaatagccaatcgtatacagcagcagagcttagggggatttatgtagcacatcttggctctcacacccaacattctgccaataaagcttctgaaattacaggtagctccaaccgaactcgccctccgatcacaacccatattttggatgtcgctcgtggatcgccagcatcaggaattgaagttcacctagagatgtggaaggatgcatcaacacccccatcattcaacaacaaagatttcaatggatgggcaaccctgggctcatcggttacgaacaacgatggccgcagcggtcaactgatggacattgtcaataacgtcgctcctggtttctaccgcataagtttcaacaccagcaagtatgcaccttcagggttcttcccttatgtgagcatcatatttgagataaaaaagaaccagacgaccgagcatttccatgtccctctgttgcattctcctttttcattcaccacttaccgtggcagttaagttagcctgtccccaagtctgcgagatgctgcatattccatctgaaaagttcgtgtgtaatattcctcttggtagcaaaatgtcgggaaaacaagtttgctttggtagcaagggttgcctgtttatgtgcactgacattatgatgcaagaataaatttgatatactaaaatgtatacag

SEQ ID NO: 68539 - DNA, 985 bp, Oryza sativa
  unsure (1)..(985): unsure at all n locations
  Clone ID: PAT_MRT4530_69292C.1
gngtactagtgagtaaccagtgagtagtacgcccggggctcgcatcgcatcaccggctgagagagatcctaattccgagatggccacgacgcgggggcagctgcccgtcgaggacgtgctgcgcgtgaacgggagccggcgattcgccgccgcgctggccgccgcctcccccttcgcctgcctcgccgacgccctcctcgccgcccgccgcatctggctcaacgaggtggacgtcaacgggtggctggaggccttcgccgcgcacccggccatcggcaccacctcctcctccgcccccaagtggtgcaaggaggagcaatcagcagcgcttgcaactgccactgattcgaccgcgcaggagttggcagattggaatgccaggtatagggagaagtttgggtttgtgttcatgatatgcgcgtctgggaggactgcccctgaggtcttagcggngcttaagaggcgctntcgttcgctatgaaaataggccaattgttgaacttgaggttgcggcacatgaagaactgaagataactgaactgcgtcttgcaaagctttttgcatcagagcctgttgcccccccttcttcaacagttggaggtcctactagccaatcggataaagcagcagctcctgaaattacaggtagctccaaccgaactcgccctccaatcacaacccatgttttggatgtcgctcgtggatcgccagcatcaggaattgaagttcacctagagatgtggaaggatgcatcaacacccccatcattcaacaacaaagatttcaatggatgggtgaccctgggctcatcggttacgaacaatgatggccgtagcggtcaactgatggacattgtcaacaacgtcgctcctggtttctatcgcataagtttcaacaccagcaagtatgcaccttcagggttcttcccttatgtgagcatcatatttgagataaagaagaaccagacgaccgagcatttccatgt

SEQ ID NO: 68540 - DNA, 673 bp, Oryza sativa
  Clone ID: PAT_MRT4530_69293C.1
gatccccgggctgcagctccaagtcaagccccactcgcttgctggaataaagaaatctcaggcttttcttctactaagagataatgtaggcagtcattaccgtcgaaatcagcgacctgcttgatgccaccatggggagtgtggaatctgctggtagtggtaattgagtgtgatgcaccgagaccatcagtataaaatcggtgcctgtgggttaaatttcttgagagctagcgtatttgaggattgggaattgtggtggccatgaggaacccctgcatttggtgttgcttggttctgctgaccttggtggtctgcgacagttgtttgcacgaagagaggaaacatcttatggacatttgcgatgcgttcctttggccggctggcaatccgcctgactggagtagcagagattgctgccggtgggagagggtgacctgcagctccatcacagggcgtgtcacggcccttgatcttgatgcagcttatccgtcgtggtatggcctactcaactgcagtatgttccttccattccgtgagctgcagaatttgtccttgggaaatgccggcatcgcgggatgcatgcctggtgcaggttttgaagtatggtctaatttacgccaactggaaatcctcgatctatctgaaaatgagttgaatgatagtagtatcatgc

SEQ ID NO: 68541 - DNA, 479 bp, Oryza sativa
  Clone ID: PAT_MRT4530_69294C.1
gtggtttttgttaacggaggccacgaattatgtggtgcacagccggtgggcaggaggtctaatggaggacgaaaaccgggctgcagatgtgctcgttccataacaccggaatactggaggtgggaatagggaccatagacgatttcaagttgaaacacctaccaggattgacctggatggtgctacttattaccgcacgagaatcaattgacaaggggttcgtgttacccggtggctactgatatacgtggtcattaaatataatggggatgctcatgccactcgtctgtacaagactgctatgaagggcttcttttttgatgttgtttgtgcatataagctagattaaccctggtacattgaaggggcactacggatgcacactgttgcctgaataactctagtggaactaattgcagcttcaaattatctgatgcggctgctttggttgcgattgaggctaggacaaacgacacgta

SEQ ID NO: 68542 - DNA, 1310 bp, Oryza sativa
  Clone ID: PAT_MRT4530_69295C.1
cggactccggccgcgacgtctcctcaactcagatctcccccatttcaactccctcctcctccactttcccccccgcatcgagcagcgaagcggcgatggcggaggagcagccgcgcgcggcggcggagggcggcggcgagacgctgatggagaagatcgccgacaagctccacatcggtggggacgggtcgtcgtccgactccgacgctgacgagcgcaagcagccgaagccctcggcgccgccggccccggccgaggtcgcaacggagtcgtttgttgattcggctgctgctgccgcggccgaggccaaggccaaggtgttccgcctcttcgggcgcgaggagcccatccacaaggtcctcggtggaggcaaacccgctgatgtgttcctatggaggaacaggaacatctctgccggtgtactaggcggtgccactgcgatctggatcctttttgaattgcttggctaccacctcctgactttcgtttgccatgggctcatattctctttgggtcttctctttctctggtctaatgcctcatcatttattaacaagtctcccccgcggatcccagaggtgattattccagaagatttggttgtcaacattgctctatctacacgttatgagatcaacagggcctttgccaatcttcgtcagattgctcttggccgggacatcaagaagttccttattgtgattgctggcctttggttgctttctgttcttggaagctgctgcaacttcttgaccttggtttatattgtgtttgtggtgctgcacacagtcccaattctgtatgagaagtatgaagatcagattgactcatatggtgagaaggggtgggttgagattaagaaacagtatgctgtgctcgatgctaaggtcctgagtaaagtaccaaggggccccttgaaagacaagaagcactaggaagaggtgatgcagtgcctcgtggcaggtgatagtagtggttgggttgtggttcttgagatgcactgctgtcacctattgccttgtgttgtgtatggctcttttgttgtctgatcttgatgggagtagctgagtagcttgcgctacgacagtatgcagctgcagcgcatgctttgctccatcgctgtttgatttttgatctgtaagatgtcgcatgcatattgtttatgcgatattgttttgttactaagattgctgcattttggaatttggtgatatttatgaaccaatgttgagactagatgtcatctaaaaaaaatttttgttgttgacgttggtgaaaaaaaaaaaaaaaaaaaaactaaaaaaaaaaaa

SEQ ID NO: 68543 - DNA, 1158 bp, Oryza sativa
  Clone ID: PAT_MRT4530_69296C.1
atttgtttgggctgtctctttactgttgggctttattcggtcgggcggaggcagaccggcccagccggttcgccggcccctcgggcatggcggcaacgttggaggctgtcgactgtcgactttgaagggatttagggcggtgcacggcgaggaggtcatcgacgacccatccactaccccgattggcaggacggtggcgacgacatcactcccgtgtggcaatttggtgcggtggcggctcggtggcacacgacggagctccgcgtcgacccgcgcatcctcatgacggtggcgaggcgaactcaatgacagcaactgagaccctaacaatggcaaccaaattgcatctggccatatcgtctcggcggaggttaatccggtagcggacagccgacgacctatcatcctcccaccacggctcgacggcagcgtcgatgggaggtcaacggcggtggcgcctcgcttcggcattaactctggcggcaacggcgatatgggtttagggctttctccaagacagcggtttcccgcgacggcatcgacgcaaggccgacggcgtacccaacagtgacggcgaacgatggctaatatgtctctaagtccgactacacagacgtgattagtgtgcttgatgaggatggttgcacactttaatctccagggatctgtgcacgtggccatccggtcaggtgcatgcaacatatgtgtgcatgttttcactattcgttccatcaatccaaggcgtgtgatcccggcggcacgccggcacagccgatgacccgcgcacatgcgggtagatgcacgtggtttggccaccagacagaagcgaacggcatcgctgcgtcgtggcgccgtgcggtagccattgccgatcggccaaatcgcgcaggaccgaaacaggcgctcggcatggcccgacctatccggagcggctgtgctcccgcagggcgcgccgcacatatgcgcgacagcaggggccagcgggcatcgaagcgcttcaagcgcacacgggtacgccgcgtctctgcggtcgctcgacttcccggcgcttgtgtatggacgccatgcttgctggcgtagtgtcgtcccaccggacgatggccaagtccaagctcgggtcgacgctcggccacttgatccgatcttgtgcgcatgcat

SEQ ID NO: 68544 - DNA, 283 bp, Oryza sativa
  Clone ID: PAT_MRT4530_69297C.1
ccgtcatgatctcctagaccacacttttatcttacctgaactaatccgttcgacgggcgggatgccttacattagtgggcgcagaacaatacaagatcctgaaacatactctgcaatatatcatacgtgtctattcaacattggattactagctgacctaatattctggaatatatttaattttgaacagttacctctagcctccattagcaagcgactcttgctttgcctgcacctactaaaattgctcttttgaacagtaaaaatggttctactgttattt

SEQ ID NO: 68545 - DNA, 179 bp, Oryza sativa
  Clone ID: PAT_MRT4530_69298C.1
agtcgaaagcatggacagtacatagcagcaaaacaattgcttgcaatttatttatttagttattctttatccgcaagccgacctaagaggattctgccgcattataacgcttggtagctcttgtatggattgagtgatgcacgactcatctccttgtagctgagccttgagccttcctt

SEQ ID NO: 68546 - DNA, 610 bp, Oryza sativa
  unsure (1)..(610): unsure at all n locations
  Clone ID: PAT_MRT4530_69299C.1
gtgcctccattcctacctatataatcctctctcgccattgtactgctcccacctagcttagctcgccagtggcatcgccggcgtggcacactagctagagctagatccaatcggccgacggcgagcgatgtcgtcgtccggcggcggcggggtggcggaggaggtggcgaggctgtggggggagctgccggtgcgggtggtctgggcggcggtggcggcgcaatgggcggcggcnncctcngcgccacaggtgtcgtccgcgtcggccccggccaatgccgtctcggcgccgttcgtctccgccgcgggcccgtcccttgccgcccaggcgccggtggtctccgccgcttcaccgacccttgccgcctcggcgccccgggtttccgcggcggctccgccctttgccgtctcggcgcctctggtttccgccgcggcccctccgaccacggccgccgtggtgcctctgctgcccgccgcgtctccggcggccgttgtctgctcggttccggttttccgccctgcttttggcggggcggctccccctcgggcgccccccccaccgttcccgcccccttggcctccccgcccctttgccttccccggcgggggc

SEQ ID NO: 68547 - DNA, 667 bp, Oryza sativa
  Clone ID: PAT_MRT4530_6929C.1
atccaagcagctattgaaggaggcaaaatcatgtttgatgattctaagaggccgatgaaagttgatggcaatccttttcctatcaatatggtgcatacaactagccgaatagccgatgggggtcgtgcaagaggttttcaggcaaattcggctaagattatcaacaaatatcagaggaagtatgataaacagcaggtgaagtattatgaagaagatgatgatggctttgatccttgttggggttgcgagttctttagattttgttggaatgaagtcaatatggttttcacgttgcctgccgagtttgggatcaatcaagccgatgacgatgaagttgaagaagaatcagccaaattaattttatcgccagagcaggcagttttcgagaagccagaggatacggagaatcggcatcttaagccattctatataaatggttatgttaatgggaagccgatgtccaaaatgatggtcgatggtgcagtaaacttgatgccttacactatgttcaggaagctgggtaggaacgccgaagatctcatcaagacaaacatggtgctcaaggactttggcggcaatccatcggaaaccgaaggagttttgaatgtggagctgacagtcggcaacaaaaccatccctacaacgttctttatcatcgatgggaagg

SEQ ID NO: 68548 - DNA, 492 bp, Oryza sativa
  Clone ID: PAT_MRT4530_692C.1
aaatgaacaagaaaaaacgttgagaagcttccctgatggccaacggaactgttatacattaccaaccaacagtagcaagaagtatctcatcagagccaccttcacttatggaaactacgatgggctcaactcgtcagagaagggttctttgtttatctttggactccatatcggtgtcaacttctggacgacggtaaacttgacaaagtgggatccatcgagcacggtatggaaaggaggtgatcacggttgctccggacaagtccgtatctgtctgtctgataaacatgggatcaggaactcccttcatatctacactagatcttaggcccttgcaagacacaatgtatcccttcgtgaatgcctcaacgtccgtcagctatttttctcggataagatttggatcggttgatgaatacatcacatgattcccaacggatcagtatgatcgcttctgggagggctgggtctttaccatgcacacctttccat

SEQ ID NO: 68549 - DNA, 317 bp, Oryza sativa
  Clone ID: PAT_MRT4530_69300C.1
gtctctctctactctctctcctgccgcctcgccaaaacggaaacgagagggctgagggctccatggagatcgcggtttcgatgtcggcgaggcgccgtgaactcgcagccggcggtggcaggccagccgttgggcgtgaaggaacagtagcgggctaatatccggccacaagacggcgaccgccgccgggggagtgccgcttggtggcggtgcgcgccacccgttcggcggaatgcccagcgggacttcgccacggacgggcggctcgccgaacgccgcttcagtcgatcgcgagcacgatccacacctcgaggatt

SEQ ID NO: 68550 - DNA, 1130 bp, Oryza sativa
  Clone ID: PAT_MRT4530_69301C.1
gcacgagggagagagagacgagagagcgaactattctcgtagtttttatctttttttcttcttaccgtgtcaatatactcttcataaagtctaacaacgactaacatagtgaacaacaaatttcctttcgtcccacataacacagatttgtcaggctgatcttgctgtgttattttttcacacgatactttagcagctgcggccactattcgagacattttcaccccaaatctctctgaaagtcttgaaatatttacattgcccatggggcaaaggaacatcgtccatttcacaacatttcattggtcattttcacttcaaaactgtaattacaaccgtgtcacctactactagtactgcttagtgcttatgatgatgatgcttgacatgagtgcgtacacgaacctcgcgggcaaatctcctaagcaaataacagagcttgcccgggcatcccttccggcctcggcgagatcgccgccgtcgccggcgaacgcgtcctcctgctcgcgccgagcacggacagctgtcctcccttggacaccttcttgaaggacgcggcgctggcattgccgcagagcggccgcggcgagaggcggccacggcggtgcgcgtcctgcagcccgagcccgacgccgcagctgcgcgacgtcttgaggcgcttcctcatcggcttcgccatgtcctccaggctgcccaccgccgccagcgacgcgaacgactgcgacttgccgtcgaagaacttggagagccccctcttgagcgggagctccgtcatgagcgaggacatctcgaagtggcccgccgccgacgatgacgaccccgacgagctcgcgtcgtcggcgagctccatcccctccgacgacgacgagagcgacagctccgactcagacgggcacccgatgtcctcctcctgctcgtcgcacctgatcatcccttccctccgggagaacaacatgtacgcttccattcacgcacacggatgacactaacgaacgcacggaccaacgatgatcgacgatacgcagcaatgaaaaatggcgtgaggcgagatgggaagaggaggtggaggacgcgaactataaaggtaacggaagtaggaggataagtatgacgccgcgggctactcgggc

SEQ ID NO: 68551 - DNA, 270 bp, Oryza sativa
  Clone ID: PAT_MRT4530_69302C.1
agcgcaagagcggaagtctgagttttgtatatgtagcatgtacaccactcacttgccccattcgcattcccaattccataagctggacctagctagccgtgctgtcacgggattttttctgaggtctgagccagcctatcccccacgttgtcgcaacatgtcatgatgccacggcggcgagctggtctgtcccttcttcctctcctttgctgccccccctctggaggccatagacagacatgattttgtaggcgcctctaatgtccgctc

SEQ ID NO: 68552 - DNA, 442 bp, Oryza sativa
  unsure (1)..(442): unsure at all n locations
  Clone ID: PAT_MRT4530_69303C.1
tcttgnggctcagcagttctgcctgtgctggctgtgctggctgtgccgcaggtccctcacaacccttggtgggcacagtggggctcgtggctgcaaagcgaggtcatgtgcgtcacggtngcagcatatgttgtggccgccgggtngcattgtccggcgaagctgcaggtngccatcctcgctagcagcctgcccatgggnttgcaagcatctggaaacatcctcccctggcatcatcccgcacggacactgttcacncaacacccgggagacatccccccctccagccgcncagactcgcagaaaccaaccacacgggcgcatccccgaatgaaaagaccagccgggcagggctgcctgaggggctgaagctgctggacctgcgttggggtcgaccccggggacatttccgggaaccgtggttaccccttggcacagaggg

SEQ ID NO: 68553 - DNA, 264 bp, Oryza sativa
  Clone ID: PAT_MRT4530_69304C.1
ggaggtggctggtcgttcaaccaaccaacacatgcagagatgggtgtgcccgccaacgaccagcagtcgccgccaatctcgaccggagacaggaacgaccaaagacgtactggatcctgccaaggaaacagagagagagaggcgcatcatggatctcagccgccggcctggaggagcgccgtggacgaggtagcagtcgggaactcaccggcgattttgaggtgtagaggtcgccgtccgatgtggattcgtttccagcggtga

SEQ ID NO: 68554 - DNA, 4937 bp, Oryza sativa
  Clone ID: PAT_MRT4530_69305C.1
aattcctgcaaacagaaataaaaagccagttgtgtgacttggaaaccaaattacataaagaggaattatctgaggaaggctacctggctaaagtcaagtccctcttaaataaggatttgtccttggagaacggaacacacactctcactcaaaaagccaacggttgtcccgccaacgggagccggccaacctggagagcagaaatggcagactcaaatagatccccaagatccaggcccaagcctcggggacccaggagaagcaagtcggacagtgacaccctttttgaaacttcacctagttccgtggctacgaggagaaccaccaggcagaccaccatcacggctcacttcacgaagggccccactaaacggaaacccaaggaagagtcggaagaggggaactcggctgagtcggctgcagaggagagagaccaggataagaaacgcagagttgtagacacagagagtggtgctgcagctgctgtggagaaactggaagaggtaacagcgggaacccagctgggtccggaagagccatgtgaacaggaagatgacaacaggagtcttcgacgtcacaccagagagctgtcattgaggcggaaatcaaaggaggatccagacagagaagcaagaccggaaactcacttggacgaggacgaggacggaaaaaaggataaaagaagttccagacccaggagccagcccagagatccagctgccaaacggagacccaaggaagcagagccagagcaggtagctccagagactcccgaggacagagacgaggatgagagggaggagaagagacgaaaaacgacacgtaaaaaactggagtcacacaccgttcccgttcagagcagatcggagagaaaagccgctttaagcaaaagtgtgatcccgaagatcaactcaccaaagtgccccgagtgtggccagcacctagacgaccctaacctgaagtaccagcagcaccctgaggatgctgtggatgaaccccagatgttgaccagtgagaaactgtccatctacgactccacctcgacctggtttgatacttatgaagattctcccatgcataggttcacttccttcagtgtgtactgcagtcgcgggcacctgtgtcctgtcgacaccggtctcattgagaagaatgtagagctctacttttctgggtgtgccaaagcaattcatgacgagaatccatctatggaaggtggtattaatggcaaaaacctcgggccaatcaatcagtggtggctcagtggctttgatggtggcgagaaggtgctcattggcttctccactgcatttgctgaatacattttgatggagcccagcaaagagtatgagccaatatttgggctgatgcaggagaaaatttacatcagcaagattgttgttgagttcctgcaaaacaatcctgatgctgtatatgaagacctgatcaataagattgagaccactgttcctccttctaccattaatgtgaaccggttcacagaggactccctcttacgccacgcccagtttgtagtgagccaggtagagagttacgacgaagccaaggacgatgatgagacccccatcttcttgtctccctgtatgagagccctgatccatttggctggtgtctccctgggacagaggcgagcaacaaggcgcgtcatgggtgctaccaaggagaaggacaaagcacccacgaaagccaccaccaccaagctggtctatcagatctttgacactttcttctcagagcagattgagaagtatgataaggaggacaaggagaatgccatgaagcgccgccgctgtggtgtctgtgaggtctgtcagcagcctgagtgtgggaagtgcaaggcgtgcaaagatatggtgaagtttggtggcactggacggagtaagcaggcttgcctcaagaggaggtgtcctaacttggcggtgaaggaggcagacgacgatgaagaggctgatgatgatgtgtcagagatgccatcacccaaaaagctgcatcaggggaagaagaagaagcagaacaaggaccgcatctcctggcttgggcagcctatgaagattgaagagaatagaacttactatcagaaggtgagcatcgatgaggagatgctagagtgggcgactgggtctcggtcatttccagatgattcctccaaaccactctatctagccagggtcacagctctgtgggaagacaaaaatggtcagatgatgttccatgcgcactggttctgcgctgggacagacacagtcctgggagccacctccgaccccctggaactgttcctggtgggcgagtgcgaaaacatgcagctttcctacatccacagcaaggtcaaggtcatctacaaagccccttctgaaaactgggccatggagggaggcacagaccctgagaccacactgcctggggctgaggatggcaagacttacttcttccagctctggtacaaccacgattacgcaaggtttgaatccccacccaagacccagccgaccgaggacaacaagcacaagttctgcctatcttgtatccggctggctgagctgagacaaaaagagatgcccaaggtcctggaacaaattgaggaggtggatggccgggtctactgcagttccatcaccaagaatggtgttgtctaccgactgggtgacagtgtgtaccttcctcccgaggcctttactttcaacatcaaagtggctagccccgtgaaacgcccaaagaaggatcctgtgaacgagaccctgtaccctgagcactaccgcaagtattctgactacatcaaggggagcaacctggatgctccagagccctatcgcatcggtcggataaaagagatccactgtggcaagaagaaaggcaaggtcaacgaggcagacatcaagctgaggctctacaagttctacaggcctgagaatacccacaggtcctacaacggatcctatcacactgacatcaacatgctttactggagcgacgaggaagctgtggtgaacttcagcgacgtgcagggccgctgtaccgtggagtacggggaagacctacttgagagcatccaggattattcacaagggggccctgaccgcttctacttcctcgaggcctacaattcaaagaccaagaactttgaagacccaccaaaccatgcccgcagccctgggaacaaagggaaagggaaggggaaagggaaggggaaggggaagcatcaggtgtcagagcccaaagagcctgaggcagccatcaaactgcccaagctccggacctctggtgtgttttccggctgtggagggttatcggaaggattccaccaagcaggcatctcggaaacgctgtgggccatcgagatgtgggacccggcagcccaggcatttcggctgaacaaccccggcaccacagtgttcacagaggactgcaacgtgcttcttaagctggtcatggctggggaggtgaccaactctctgggccaaaggctgccacagaagggcgatgtggagatgctgtgtggtgggccaccctgccagggcttcagtggcatgaaccgcttcacactcccgcacttatctccaagttcaaacaactccctagtggtctccttcctcagctactgtgactactaccggcctcggttcttccttctggagaacgtcaggaacttcgtgtcctacagacgctccatggtgctgaagctcacactgcgctgcctggtccgcatgggctaccagtgcacctttggtgtgctccaggctggacagtatggcgtggcccagacacgaaggagggccatcatcttggctgcagccccaggagaaaagctgcctctgttcccagagcctctgcatgtgtttgcgccccgtgcctgccagctgagcgttgtggtggatgacaagaagtttgttagcaacataacgaggctgagctcggggcccttccgaaccatcaccgtgcgagacaccatgtctgacctccccgagatccagaatggagcctcgaattctgagatcccctacaatggagagccactgtcctggttccagaggcagctgcgaggatcacagtaccagcccatccttcagggatatttgcaaggacatggcccactggtggctgcccgcatgccgcacatcccactgttcccaggatcagattggcgtgacctgcccaacatacaggtgcggctgggagatggcgtcatagcccataagctacagtacacctttcatgatgtgaaaaatggttacagcagcaccggtgccctgcgtggagtctgttcctgtgcagaaggcaaggcttgcgaccctgagtccaggcaattcagcaccttcatcccttggtgcctgccgcacactgggaaccggcacaaccactgggctggctcttacgggcgtctggagtgggatggtttcttcagcaccactgtcaccaaccctgagcccatgggcaagcagggtcgggtgctccacccggagcagcaccgggtcgtgagtgttcgggaatgtgcccgctcccagggctttccagatagctaccggtttttcggcaacatcctggacagacaccggcaggtgggtaatgctgtgccaccacccctggccaaagccattggcctggagattaagctctgcctgctgtccagtgctcgggagagcgcatcagctgcagttaaagcaaaagaggaggctgctaccaaggactagtgttttcacccagagccccacgtgcactgatgtttttaaccctttgagccccatcatttgaagtcttgtgctcagtgtctgtggccatggctgacactaagctgtttgtatgaggtttgttttgtgaccaagctgtgtagtactttgtgcattctgaattttaaggtttttttttttgtttggtttggtttggtttggtttttttcttatcctgtattctatcagata

SEQ ID NO: 68555 - DNA, 1875 bp, Oryza sativa
  Clone ID: PAT_MRT4530_69306C.1
tgaagagggcaggtgggtcgggtcccgaagagaaaccgtgcacaatttctgacaacccagatcaactgcgaaggagccagcgccatcgtttggctggatgttctgatgccgtgccggggtgttctgcttaggtctggctggttgtgctcctgctactgctgctacaactgggcacggctggtgtgtacatacttcatgtcccatcgcctgggaaggctcaagttctttctgtacaacttccacgtggactacaggtcatgcctttccttggacactgcttttttgctcgtggggggaggctgcgagtctcgattccggctgactcaagatagacgatgctgggtcccccatttgagcagaagatagctgaggtgaacactggatcttcatgggctgcacttgcatatgtgcaccaatctgttggtcgatggacttagcatcaaagtaaccaattttgggtgtaggcatacgcagaccagatggtttggaaccttttccctgggtgtctgcatctgctcttgttggagcgtggtcattgctatttctgagggaaggggataatgaagaagaccgtgtactgaagctctcagatgtatggctcatcttccctacagtggaagctgttgaagccccagaaaccacagaactcaagctgtccacagaactgctaggcgaaatgcttggagatacacgattacttttgcccccagttggaatattatttctcgatgctcttgctgggttagctttgttgacatcagtccttgacgttgaacgaacaggaatcctttgagcaattctgctcttgttgcttagggttgatgatttaggtttttgacctagcatattaccaattgaagctgctgttgctgctgctgatgatgataatgatgatggtaaggcacctgattttgaagttgaagtagattttgtcactccaccaggcctagaatgtgcgctaactgaattgttgacagatttaccaactgtctgcctgttgaccacacctcctacaagagaatacatgttagtcttgccaccagtgctgctccttttgtctggaattccagaagccacagctgtattagttggcgctctcattgtagcaactcttggtagagccctcggaggtttcaaagatggttttacttctgtagatcctgaaataggcactcttgcagttgtaggctctttcaaggtagcttggatcctttgttttcctccagcagcaccctggcttgtggaaataggggcccttatcttactctgaggcatcagatcaacccccttccttgctgcaacacgaggaacatttgccttggacttcgggggttttgagataacagcagtaacacctggggcttttccaggattgccgtgcgatctctggatcgaagcacggacgttgtcaaacagctcagtctccagattttccatcacccagctttcgctttcaagagtcgaagttgttgactcccctgacctcctcatttcctcagcgattccaggcaacctggaaccctgtgccttgcggaatgtgctgtttacaacagccaattcctcagtatccagaacaccttcgctggtgaagaaggcgctgtcccaagccaagctcttgcggagattaacgccggccttcgctttcctccgcttcggagactccgactgctcaggggcctcctccgtagcgccatccggatccacaacccgcctcatctccggagaatcgccggcgggatccaggcgagaagcctcggcggccatcacctcatcacaccctgcgtggggcggatcgggatgcagcggcgggggcgaggtgaggtcgagcaggaggtcgtcctccgcggccacgtcgatgagcgagagcgcctccat

SEQ ID NO: 68556 - DNA, 1041 bp, Oryza sativa
  Clone ID: PAT_MRT4530_69307C.1
atgacgcctctgccggctaaccacctcccccaccacgttggtactcctactaatttccatgtgagcccccgcctccgccaaggcccacctgccatggcacagccggtgcattggctggcccgcgaggcggcagatgacgacaggatggggattggggagacggcagcggcacgtgcgagccgcggtggcgtggggcaccactacattccatcattttacatgcctatctccgaccatagccggaaggctgatcaaacagcttactatagaaggccatgcatcctggtgaagcaacccaataactgggctggagcagggcatggttctggtaggagtgggggtgagcgcggtgtgaaagatgatggtgccgctgagctcccctccttattcccgggtggccaacgggtgcagaggaggccggccaggcaaggcgggaaaggaggaggtccaataaccagtgacgggtggcactgtggcggctactccggccaggggcgcaaaggagggagcacaatgcctcccctcctcaccgtgaaggagctcaacgtcgcccagctgggcgccggggtgaggcaggcgacatgcgacgtggcgacatgggagaaggggccacacgacgtcggtggactcggtgggcgcggaggtagactcggcgggcacggtgccccggccttctcccgcgccgcctcctccctcttcttgccggcggagcggcggcggccggatcaggcgaggggcaaggcggtgctccacgctctccctcttcttcctcatcgcgccgtcttcgggcgcttctcgcgccacggcgctcgcctcacagccggcggagtggtggcggagcggagggacgggtggagcggcggggcggcggcagaccgcggggtgagcggaggggcaggcggagcgccggcggcagcaggccacgggcggcggaggtggccgggggaggaggtcgccggcgagcgcggcagctccactccgtcggccgctccgcccgccatgggtctggacatcacctcgccggggaggttgagggtgtag

SEQ ID NO: 68557 - DNA, 721 bp, Oryza sativa
  Clone ID: PAT_MRT4530_69308C.1
tttctcctccctctgggcaagggtgttctgaacgtgtacgacctgagcaacagcctcgcgcggcagctctccacctccttcctccgcaagccaatcgaggccatctggcatacgggcgtgctggtgtacgggaacaagtacttgtacggcggcgggatccagtcgctgccggtggggaggacaccgtacgggcggccggtgcgggtggtggagccgggcgtgacgcacatcccacgttaggtgttcgaggacttcctccgtgagaacttcagcaacgagtggcgcaactcctcgtcggcgccggcaccaccgactacaccctcaacctccccggcgaggtgatgtccagacccatggcgggcggagcggccgacggagtggagctgccgcgctcgccggcgacctcctcccccggccacctccgccgcccgtggcctgctgccgccggcgctccgcctgcccctccgctcaccccgcggtctgccgccgccccgccgctccacccgtccctccgctccgccaccactccgccggctgtgaggcgagcgccgtggcgcgagaagcgcccgaagacggcgcgatgaggaagaagagggagagcgtggagcaccgccttgcccctcgcctgatccggccgccgccgctccgccggcctgctccggccgcggctcgccccacccgtcgcttgctccggccgggagagagagaggatttattttgt

SEQ ID NO: 68558 - DNA, 468 bp, Oryza sativa
  Clone ID: PAT_MRT4530_69309C.1
atgaggtgctgggatctgggaggtgcagaggagcaaagtggagtttcgatgctagcaaaaagtacaccgaagccggccggcggctggggagcaggccaccgggcgaggcggcggcggtggccggccgcgaatggcgtcggcgacgctgcgtcgccgccatcggcgaagcgccccgcgcgggtgggcaccgcggcgttgggcgcggaggcagatgcgaggctgtctcgcgtcgtcaaagtccccgtctcgagtggcgaggaaagcgaggacgaggttgccatcgatcgccgcggggtcatcgccctccgcctcagcggcggcgagggcgcgctcggcggtggcggcggcgagaaggcaggcagcggggagggatgggacagctatcgttgcacaatgtttttcaggaagaagccacctctcgccaaggagcagctcgcgagctcggcgtcggcgacgacggcgaggtag

SEQ ID NO: 68559 - DNA, 4023 bp, Oryza sativa
  Clone ID: PAT_MRT4530_6930C.1
atgcggtggcgtggaaaggcggagaggagcgacgccgacgatgggagggctgcgggcggtcgcgtcggtgtggccgggcgtggaggcagcagcgccaaatgtggccaggggcggaggtggtggtgccggatgtggcggctcagccgggggagccagatgaggtgggaaggagcgacgccggaatcctcgccgtggggagggcaggggaggtgcaacactggcgctggagaggaggtgtgcaaggtgacgggggtgcatggagtaacatttgcaacaccagtgctaagtaacaaaagtgccaccgacagctctctaggaaatcaaggtgacaattctcaaggagtccatgaagtgcaaggtgacggggtgcatggagttcaaggtgatggtacccaggggttgcaaggaggaaatcttaatcagaatagtgatacggcacaagattttttcagtaatttccaaaatcgggttgactacgttgtgcatcatgctttgatcaatcaatctggggtgttagtcaataccttatcaaacatgatgaagtccatagccgatggttcaatagctgagcatcaggctgcaggcccggtttatttgcaaggagccgatgaggcaaagaggttggcaaaagggaagagtgttgtgacggcaccggttaacatggtctttaccctgccagccgaattcaggatcgaccaagccgatgtcgacgaggtggaagaggaatcggctaagttgattctgtcaccaaaacatacagtgttcgagaaacccgaggggacagagaatcggcatcttaaaccattatatataaacggctacgtcaatgggaagccgatgtctaaaatgatggttgatggtggagccgcggtaaatttgatgccctatgctacgttcaggaagttgggtagaaatgccgaggatctcatcaagacaaacatggtgctcaaagattttggtggcaatccatcagaaaccaaaggtgttctaaatgtggagctgacagtcaacaggaaaggttcttacagcttgttgcttggaagggattggattcacgccaattgttgcattccttcaactatgcatcaatgtttgattcagtggcaaggcgacaaaatagagatcgtgccagccgacagccaattgaagatggagaacccaagctattattttgagggcatcgtggagggttcaaatgtctacactacggacacggtagatgatctcgatgacaaaaccaagctgatagagctcttaaaagagtttagagattgcttcggttgggagtattacgagatgcctggactcagccgatcgattgttgaacatcggctacctatcaaaccaggggttaggccacatcaacaacctctgaggagatgcaaggctgacatgcttgaaccggtcaaggctgagattaaaagattatatgatgctggttttattcgtccttgccgatatgctgagtgggtttctagtatagttcctcttatcaagaaaaacggcaaggtcagggtatgcattgatttccgaaatttgaataaggctaccccgaaagatgaatacccaatgccagtagccgatcaactagttgatgccgcttcgggacataagattttgagttttatggacggaaacgcaggatacaatcaaatttttatggctgaagaagaaattcataagacagcttttaggtgtcctggtacaatcggcttatttgaatgggttgtcatgactttcggcttgaaaagtgctagagctatgaattacatatatcatgatctaatcggctggttggttgaagtctacattgatgatgtggttgttaagtctaaagaaataaaggaccatatagctgatttgaggaaggttttcgagagaaccagaaaatatggcctgaagatgaatccgacaaaatgtgcttttggtgtatcggctgtccagtttttgggatttcttgttcatgagagggcgatcgaggtaactcaaaggagtgttaatgcgatcaagaagattcagcctccgaagaataagacagaattacaagagatgatcggcaagataaattttgttagaaggtttatttctaatttgtctagaaggttgaggcattatctactgtccaacgagtgtactgttatatgcaaggccgatgttgtcaagtatatgctatcggctccaatattgaaaggaagggttggaaagtggatattttctttaaccgagtttgatcttcggtatgagtcgccgagggcgattaagggacaagctatagctgattttattgtggaacatcgtgatgattcaatcggctcggttgaaatagtgccatggactttattctttgatggatcggtgtgtaatcatggttgtggtatcggcctagttataatttcccctaggggggcatgtttcgagtttgcttatactattaaaccgtatgcgattaataatcaagctgagtatgaggcagtgctcaaagggttgcaattactcaaggaagttgaagccgataccattgaaatcatgggggattttttgctagtaatcagtcaattggcaggagagtatgaatgcaagaatgatacattgatggtttataatgagaagtgccaagaactaatgaaggagtttcggctggttactttaaagcatgtctctcgagaacaaaatattgaagctaatgatttggcccaaggggcatcggggtataagccgatgattaaagatgttaaggttgaaattgcagcaatgacagccgatgattggaggtatgatgtgcatcagtatttgcataatccgtctcaatcagcttctaggaaattgagatataaggtattaaagtatactctgttggatgatgagctttattatcggacgattgatggagtgttacttaagtgtttgagcgccgatcaggctaaagttgcaatcggcgaggttcatgaaggaatttgtggtactcatcaatcgactcataagatgaagtggctacttcggcgtgcagggtatttttggccgacaatgctggaggattgtttcagatattatagggggtgtcaagattgtcagaagtttggggcaattcagcgagctccggcatcagctatgaatcctattattaagccatggccattccgaggttggggaattgatatgatcagtatgataaacccaccatcgagtaaaggacataagtgtatattggtggcgactgattatttcaccaagtgggtggaggcgattcctttgaagaaatttgattctcgggatgcaattcaattcgttcaagaacatataatctatcgatttggtattcctcaaactattacagctgatcaggggtcaatcttcgtgtctgacgagtttgttcagtttgccgatagcatgggtatcaaattattgaattcttcaccttattatgcacaagctaatgggcaagccgaggcgtctaataaaagtttgatcaaattgattaagcggaaaatttctgattatcctcggcaatggcatactcggttggccgaagcattgtggtcttataggatggcttgtcatggatcgatccaagtccctcctaacaaacttgtttatgggcatgaggctgttttgccgtgggaggttagaatcggctctcgaagaacaaaattacaaaacgatttaacagctgatgagtattacaaccttatggccgatgagagggaggatctggttcagtcacgattgcgagcccttgcaaaggttaccaaggataaggaacgtattgctcggcattataataagaaggtggtacctaaggatttttcggaaggagaacttgtatggaaattgattttgccggttggtactcgtgatagtaaattcggcaagtggtcgccgaattgggaaagaccgttccaaatttataaggttgtgtctaagggagcatatatgttgcaagggcttgatggtgaagtctatgggcgagcgctcaatggcaagtatttgaagaaatattacccaagtgtttgggttaacgcatga

SEQ ID NO: 68560 - DNA, 618 bp, Oryza sativa
  Clone ID: PAT_MRT4530_69310C.1
atggacccaatgggtggagaaagaggacgatcaggaaattgtgaagctggagctggacgtgagtcggtcggtgagtgggtacaggtcattcatgtacgagctgcaacggcagttggccaagctgacggtgaggaccgcaatagagaagcgacctgtgctgcccccatacaagtgatcaacaagggccacggagagtccacgcttgccatcaggcccgataatgtttaccttatcggattcaggacacaagcagcatcgtggttcgcattcaagaacagctataaccagatctctagggcaactgctctcgggtttgatgatagctacacctctctcactggcaaagggggctacacaaatctgaaagatattgtggtcggtaagaagtccgcccaagaagcagtggcgaccctagccaagtacaagaaggatggttccgtcccggaggaggagatcaagaaagcattgaccacattcatcctcattatctgtgaggctgtacgcttggtccctgttcgtacggacgtcattacagtatgggatgaagcggagggaggcaaagttggcaaggttgcctgtgatctcaccgtcaaatggaaagtcatctcttgcgcgtaa

SEQ ID NO: 68561 - DNA, 207 bp, Oryza sativa
  Clone ID: PAT_MRT4530_69311C.1
atggacttggcttcgctggctgtgactactgactcaacacgtagtcgggagctttcgctgcatgcagagattggcgaggctgctgtgatggccgtgaccgcgaggcgcgagagtcacaccacggttgtaatcggcgaagccactaggagaatcttctcgatcattttgtcgtggaaatctgagcatctatcggctcatcccttttga

SEQ ID NO: 68562 - DNA, 531 bp, Oryza sativa
  Clone ID: PAT_MRT4530_69312C.1
atgtgctggcgttctgcccaaacgctccacgccggagaatccgagagagttgttaccacttaccacgagtgtgtctgggcccacaaatctgaagcccgagtggccaaagaaagtcacgcgttcttcgacgggatcgagggtgtggggcatggggaaagagcgtcgcgaccgtgccgtggaggtcgtgtcctctacgccgttcctctgcgtcggcatacgtcctcgctcttcttgttccttcctgcagctggtcagagactcggagctcactgctcactgcacgcatcggccacactgccctccgattcacgcccgtctgaactcgccgccacgccctcgatccgcgcccaccagtgctcgccgtccgtgccgccattcgatccatgccagccgaagctcgccagccgcgccacccctcaatgcgcgccccgcggagctcgccgactgcagctcgtgggccggccggctgcagctcgcgggccgcgcgcccctcgcgggaggccatccgaccacacgcggcaagacggataa

SEQ ID NO: 68563 - DNA, 468 bp, Oryza sativa
  Clone ID: PAT_MRT4530_69313C.1
atgtacaatccagagcagcagcagccgccgctgccgcaccaccagctgatggcgccgccgcggatgtccttctccagcgacttcgcgttggagccgccgccgccgccgtcggggcccgggagggcgtcgatgggggacgcggacttcgagttctccgcggtgggcagccgcccgatgatcaccgcggaccagctcttctccaagggccgcatcctgccaatgcgggaggtctccggcggcggcggcggcggcggccgggccgtgacgctgcgcgacgagctgcgaggccacgacggcgccgccgttgccgacggccgccaccgccgcgcggcccggccggcggggagcggcggcggcggcggcgtcaggtggaaggagatgctcgggctgaagaggccggggcacaggaagcacggcgccgccgacgaaggcggcgcatctacccacgacctcgatcacatggtttaa

SEQ ID NO: 68564 - DNA, 249 bp, Oryza sativa
  Clone ID: PAT_MRT4530_69314C.1
ggaggcccgaatccgaatccaaaacgtatagaactttatctcttgtcttctatggaccaaaagtgacgtggtgagatgaaagaagacttggagaaggtcttggtttggtccccaatcaacttcttcaatcatccatgcattccttacgctcggtctcttttctttcgcccaagcaagtaactcgtcctctcccacgccttctaccgccgttgcgccgagctcgccgagctccgccgcctgccaccgcat

SEQ ID NO: 68565 - DNA, 620 bp, Oryza sativa
  Clone ID: PAT_MRT4530_69315C.1
agctgagctgagcgtagcgtagccctgctgccgtacgtgtgcagccatgtcagccagcagccgaggttttgagcgcccgcctgtcgaggcgggattaaggtggccgtgccatgccagtgccggcgcctacggcggctgtcgcggttggagaggtggtctagctcgcggcggcgcccgcgatgtcgctcggcggccggcggcggcatccactggtttccgtccatgtggggcctgccgggtgacggcctgaggctgattttggggttggttgggccgtacgtcgaggcgatggcctatgttcttagccacgaaataggtgggcacggacgcacgggcgcacgggcgcacgacggggggcacggcagccggcggcggcggcggctgcggcgagcttgccggaagaagcatcagctccgtccagtttcggtggaggattagcggcccaccgtcgccgacacatgtccttgtctggttcgcagcttctggtgtggattgtggagttgtgtcgctagtgcttaacctcgaggtctggttgctcattggtcactttttgtctggggctttgacctttgttatgccgttgcgtttgaatattttcatttttgacgcgcactcacgta

SEQ ID NO: 68566 - DNA, 798 bp, Oryza sativa
  unsure (1)..(798): unsure at all n locations
  Clone ID: PAT_MRT4530_69316C.1
ctttcttttttttctctttcttttcttttgcacagtctgacaaatgcattgatanttttanttcacatggttctctacttctctacgntgttatcgcacacgacactagataatagccaaacacccctataatataacataagnagataacaatagatacacccacaccgctttagactccacaccaaccacacccaccagggaaagccaccgttcggaacgttngacaagggagccatgttagcacctgtatggcatctgcatcgccatcttcatcatctgctgctgcccgaatccaacaacaacatacaccttgattagccattgcctactnggccanttcccattcntaagggccccacaaccctaaggggatttgaccccccaccccaaaagatttgaggggcccacccccttggagaaagagggccaattncaaataagccccctatgcataagccatagccatagcacacaatagcctagctcgcaaaaagacncccaataggctagccgacaatngaancaattgggnntngatagagaacgaccanaaaccccccaactaaagaccccccccaaaaaacnagaataataaanaaaggccgcacattattcaacttatttgattttaaacccccttggggcgccccctcaaaccccaacccgggaggaaattcctccacaataaggagataggaccccccccaatagaggaccatcaacaataggntgtttgggggttgggggggaacaaaaataatcccctcggccgcacttataagcttggggggtttg

SEQ ID NO: 68567 - DNA, 361 bp, Oryza sativa
  Clone ID: PAT_MRT4530_69317C.1
gttgtaaagaaggccccaagagaaggatgtgcttaccttgcatgtccaagacccatcctgaactctgatggtgaagcccccttgcaggaaagagttgccatcttccgtggctctccccaatggatggtgtttgagccaatgcatatcgcatgctcaagagaagaggctcagaggctgcaagcataccacgaggagatgagttcggtgcattcactgcccatgcccataccagagctacccagacgtgttgatgaatgcggccgaatgcctgcttaggtgcggcttggcggatgatagagaatatactgaaataaatgaaatgggccagccatgtggtgtgtgtggctggctatgtactgtc

SEQ ID NO: 68568 - DNA, 581 bp, Oryza sativa
  Clone ID: PAT_MRT4530_69318C.1
ggtggagccccggccgggacctttccccttctctcttcctcttcttcttcttcttcccgttgttgtgtttctctccacttcactgtgctgctgttcgtggaggaggaggagatggcggactgggcgccggtggtggtgggggtggtgctgttcgtgctgctctcgccggggctgctggtggagctccccggcacgcaccgccacgtcgacttcggcagcttccgcaccaacggcaaggccatcttcgtccacaccctcatcttcttcgccgccttcgccatcctcaccctcgccctccacctccacatctacaccggctagctactactcttttccaatttccatccatctccttaattccctccccccttcaatttcacttcgtctctctcctactcctatgcatactaatttctagctagctgcactgtgtaacaagggaaatattactgcaactgtactatgctagcccgctactgcgtgcagaaaactgttaagtcgattgagctcttctgttgaatctagctagtgaagaatgtcaatttcttgttgctgcaaaaaaaaaaaaaaaaaaaaaggcc

SEQ ID NO: 68569 - DNA, 1662 bp, Oryza sativa
  Clone ID: PAT_MRT4530_69319C.1
tcggcacgttcgtttcctctcgcgctcgccaacttaagacgctggttctctgggccttcgaaagcaaacctcctcctcctccgaagcttcgatcccgacacgcctccgccttcgccgcccgccggaggcgagcccgagatgcggcccaacgtcatcacggaggctgggatttcaactaggttgaatcagtggtggggcagcataccattcattacatccggtgttatcttgatatgtggagcgatttatctggtgtgcttgttgactggctatgactcctttgccgagatatgcttcttgccttctgtagtagcatcacgctttcaagtgtacaggttctatacatctgttgtatttcatggttctttgcttcatgtgctattcaacatgctggccttggtacccttgggcactgagttggaaagaattatgggatcagtccgtctcttgttcttgatgtttcttcttgctacgactaatgcgatttttcatctcatcattgctttcttggcggcttacaatccgctctatcctctccactttcttgtggatgaatgctccattggcttttctggagttatattctcaatgattgtcattgagacaagcctgagtggggtgcaaactcgaagtgtctttggcctcttcaatgttcctgcaaattggtatgcgtggattttgctggttctctttcagtttctggcaagcaatgtttcgttgctgggccacctgtgtggcatcttgtcagggtttgcatatacttatgggctgttcaactacttgcttcctggaccatcattttattcttctattgagggcttgtcagtgctatctgtttgtgtaaggcgtcctggcttcattctgtgtactggagggactacatatggccagcttcctacattttctaacacatctactgcaccaggcgctctgattaatgcaggtttcttaagaaatatttcttcatggactaccaagcaggcagacaaccaccactcaggggaatactcaggaacaagatcccaggtttccagggagagcacggacacttagttctgctggaactgaaccaactgcaagggaggcaagtgcaaatttgcatgctagcttgttggatagcacaactccaagtgatccgcttacgagttcacagcatccagcagcaaacacagtcagagctgatgcaactgtagcagctgaccaggttgatacatttgatgaagaacttaagaagctggttggaatgggctttgaaaagactcaagctgaagttgctcttgctgctgccgatggagatccaaatgttgctattgagattctcatgagtcagcagggttaaaggtttcaacatcactgatagcaagcgatggaggctcaattttagggtgtagattctggttagtaaaattcaagaatggaccattctgggcaattgtttttgccaacatggttatattgaagatgcccttaattgtgcttctatgaaggtcaaaactacagttaacaatgacaatagttgcattgaaggctgtttcttgatgtattagtaaaacagtaattgatgctcggggcgctcattttgttggcagatcttcacaattgctatttggcaatatgtctagctagacaataaagcttttacaaaggaaaaaaaaaaaaaaa

SEQ ID NO: 68570 - DNA, 2585 bp, Oryza sativa
  Clone ID: PAT_MRT4530_6931C.1
ctgcgttatggcgagcagtaggctgttcctcgccgccgccctccttgaaacaaactggccctacatcgtgtatctgggatcacacccgtacggcccagatgcgtcggcggaggagcacgcccgtgcgacgcagtctcaccacgaccttctaggatcagttcttggcagtaagcaattggccaaggacgcgatactctactcctacaccaagaacatcaacggcttcgcggcgcatctggaggaggaggtagcaacccagatcgcgaggcaccctgacgtggtgacggtgatggcgagcacgatgctgaagctgcacacgacgaggtcatgggacttcatggacatggagagggacggccagatcctcccggactccatctggaagcacggcaggttcggccaggacgtcatcatcgccaacctcgacagcggtgtgtggccggagtccaacagcttcaccgacgaggaagtggtcggcgaggtgcccaagcgctggaagggctcctgctctgacaccgccaagtacggtgtctcctgcaacaagaagctgatcggcgccaggtacttcaacaaggacatgctgttgagcaacccgggcgcggtggacggcaactggtcgcgcgacacggaggggcacggcacgcacacgctgtccaccgccggcggccgcttcgtgcccagggccagcctcttcggctacgccaacggcacggccaagggcggcgcgccgcgggcgcgcgtcgcggcctacaaggtgtgctggtccggcgagtgcgccgccgccgacgtgctggcggggttcgaggccgccatccacgacggcgccgacgtcatctccgtctccttcggccaggacgcgccggtcgccaccgtcgcctccttcctccaggagcccgtcacgctcggctccctccacgccgccatgaatggcgtctccgtcgtctgctccgccggcaactccgggcccctcgaggacaccgtcgtcaacgccgcgccgtgggtcaccaccgtcgccgccagcaccgtcgaccgggacttccccaacgtcgtcacgctcggcaacaacgcgcacatgacggggatgagcttggagacgacgaccttgcactctacccagctctcctcgatgatcaaagccagcgacgccgcgctcgcgagctctgaccccgccgtcgcgtcgacttgcccaccaggcacgcttgacccggagaaggtgaagaacaagatcgtggtgtgcgtgcgtggcggcgacatcccaagggtgacgaagggcatgaccgtcctcaacgccggcggcaccgggatgatcctcgcgaacggcgagatggacggcgacgacatcgtcgccgacccgcacgtgctcccagccaccatgatcacctacagcgaggccatgtcgctgtacaagtacatggactcctccaagaaccccgtggcgaacatctcgccgtccaagacggaggtcggcgtgaagaactcgccgtcggtggcggccttctcgtcgcgggggccaagcgggacgctgccgtgcgtgctgaagccggacatcgcggcgccgggcgtggacatcctggcggcgttcaccgagtacgtcagcccgacggaggtccccaacgacgagcggcggtcggagtacgccatcctgtccggcacgtccatggcgtgcccgcacatctccggcgtgatcgggctcctcaaggcggcgcgcccggagtggagccccgccgcgatgcgctccgcgatcatgaccacggcgcgcacccaggacaacaccggcgcgccgatgcgcgaccacgacgggagggaggcgacggcgttcgcgttcggcgccggcaacatccacccgaaccgcgccgtcgacccgggcctcgtctacgacctctccaaggaggactacttcgtcttcctctgctccatggggttcaactccagcgacctcgccaagctgagtgccggcaacttcacctgcccggagaaggtcccgccgatggaggacctcaactacccgtccatcgtggtgccggcgctgcggcacacgtcgacggtggcgcggcggctcaagtgcgtcggccggccggcgacgtaccgcgcgacgtggcgcgccccgtacggggtcaacatgacggtggagccggcggcgctggagttcggcaaggacggcgaggtgaaggagttcaaggtgacgttcaagtcggagaaggacaagctcggcaagggctacgtcttcgggaggctcgtctggtcggatgggacccaccatgtcaggagccccgtcgtggtcaacgccttggactgaggcgccgagattcgtgcgcgcgctatcgatccaagacgggcgcagatcagggtttaggtgttcttttattatttattttttgattgagagggataatattatagtccattatagagtgagaggctagatctcttggttgttaataaggttggatattttttcggaattgctgtaaagttgtcgacggttttttctccaaaagattttcactttgtggacctttagattattgttgagatttgtgatacttggcgttcaatatatagttatgtgataaatctttatcttt

SEQ ID NO: 68571 - DNA, 363 bp, Oryza sativa
  Clone ID: PAT_MRT4530_69320C.1
atggtgatcagcctttatctacgccaagaacagagacgtgcccaaattgttcgggtgcaggaaagatatatgggattgttaaatggttcttgtctacttcctccgttttataatttgaatgtagaagaccattggatcaacagtgggactattagcaaactcacagttggcaggacaaatttgaacggtataatcccttatattttgggatggagacagatgaagcctggcatatatctgaccgggatcaacgtgccatcttcaggagataacacgctggctccggctaaggacgagtgcttggaggcgctcatcctgacgggatggggcgaggcgtgtgtcagaccgcttgtcgccacctaa

SEQ ID NO: 68572 - DNA, 786 bp, Oryza sativa
  Clone ID: PAT_MRT4530_69321C.1
atggcttgcccggttatggaggcctgccttgacggtctggttggtgatggggcggccgacccaggagggtgggtgtccgacgtcggggtggccagtccattagatgaggtggctagcctaggtgagtgggcaaccgtccgagccaaagacgtgcgggccgtcccaggcgaggaagaggcgaccaagccaagcaagcagccggattggctaccagaagaggggcggcaagggccaccagatgccgtcgatgtgcaccaatgggatcaagcatcactcgctagctccttcagcaccacgatgctgccattacccgccacaaatgaatgctactgggaaattggtgttcgagacccccaaaatgatgggagcaatgatgtcggcagagagaacatcttggagatgggcggcatcatcgaatggaggcgcggatgggcggtggatattaccggtaggtggaaccatggcgtgtccttcatgagaaccgtgggtgaggcacgtagaagcaaaaagggcggcaaggtccagcggcatgggtgccagggcagggatgccatgggcaccatgggaaggaacgttgcgggcatggacatcgcctgtagggttgtcacggctgccgcggatgcgggggagggggtgagagggtcggtgacgaccggtgtaggggcgagggcagtcgtggccgtgccgaagctttcagccggaggggagggtgctaagagaaggtcactgaggacggtaaagagcgcctcacgcgccgcgtccgaggcccatgttgctgcattctga

SEQ ID NO: 68573 - DNA, 1586 bp, Oryza sativa
  Clone ID: PAT_MRT4530_69322C.1
tcaaccggcggtgacggcaacgacatgggaggcggcagcgacgacgatgtagagatacttctctgctcccctgaccaccacgacacagtcgcccgtgcgcacgtagcacgacaagccggcgctgtggaggctcgactcgagtactcgacgcgcagaagggtagccaatgtcgccaccggcgaggccgtggcgcgcatcctccatgccttcctcggcaccaagggagatggtccagttccctgacagcaaagccaccattagtaaccacctgctaacctcctctcctgtcttccctgtttggcttacttcctgttgttgggtgggttgcttccaggggatctggagttctggacatttcaacggtttgctttgaagcttagtgccttttcttagatcaacatgcacgccatccctccctgggtatccctctgtcacgcccggaaattcactagtaatttccgaacttatttgtgcataaaatcctcgtccaggaatcagccgaggtacacaaacactgtacccacaagacacaactccacaatatgtcaccatatcatcatgtgcccatgctaaacatgtcaccatttgtgtagttgtgacaagacccctcgcatatgtcaactcaccacagtgcaccattcctagatcgtagtcacccccttcgaaacgacggaaacgacaagctaacacgcaaaacgaggaaaaagactaataaaaaccaaataaatagtacacataaagatcacccaaatgatcaaccgaaaccggcgaacggaaccggcagctctgaacggctctaaactaaaggacgactcaacacggacgaacgaacgaagcaaggggaacacctcgtttgaacgaacgagcgaacgactcaataacggctgcgactaaaccggacacggatagacgtcccaccgaaccaaagcgatcggagagagatagatgacggcggtgaaccggcggcaacacacggagacgatgacgacgctagggccatacaagattagattagatgggattaagaccctagggataaactacactgggaacggcataggagcggcggttgccggcgaacgagatggccggcgacgagattgggacggcggcgaggttcgggtccacggcggcgatggctttccggcgatcttcggcggatgacagatggcggacgggcttctcctcgcagctgcgaatccaatggagacgacggcgaccgaaggcgacgacggacgtcgacgaacggctcggctggaggcacggcggcgacggcggcgctccggttcatgatgacggccaatctccggtgggattcggcgaaaaacaaccagcggccgggatagagctcgactttgcggagccgagggaggtggcggcgctgactggcgacggccgaggcgacggcgcactgcggctggagcggcggccggaggtggagagagaaggcgagcgcggggagagcgtttccggcgacggcggaggacgggacttgaggacgacgaggcacgggagctcgggatcaagcccacatcgacgggaaaaactcgggaaagtctagggttctcgccggaaaaaggaaaaat

SEQ ID NO: 68574 - DNA, 570 bp, Oryza sativa
  Clone ID: PAT_MRT4530_69323C.1
ctaggagtccgggtggaagtcctcgtcgacagcggtggtgacctgggacggcgacgctagcgctggtgcaagggtctcagcaaggagaggcaaactagacggaagtggatcccgttggcggcggcagcctaggagtcggagtgaaagagaactctgggtgaggcggcagacctgaaagcggacgaagatggcaccatcggtgatttgcagcgacgacacattaggggcgacgccaccacgcccctcgttccgcacctccacctcgccaccgcctgcgataaaccgggtggttgcaaggatggcgcatataaggctctttcccctctccgatggtgcctgtgggtgtactgtatctgtgtgcacggccaagaccccaaggatggatcctctcatcctcaccttgaggccttcatttatttcatggggaaaatggatgtgccaatctggacaaatgtgatgaacaggactcagcattgccccgccacgtcggcagggggacggtgccagcctctctggcgccgtccagttggacgacggcgccagccactctggcgccccaaaaaggatcat

SEQ ID NO: 68575 - DNA, 703 bp, Oryza sativa
  unsure (1)..(703): unsure at all n locations
  Clone ID: PAT_MRT4530_69324C.1
ggtaataataatggtgctacatttgcttaaggtataaatatagcattgcaagtactacttatactttacattataccaaatatataattgatgttgtcaatattaacattttacatagtgtatgtaagtcactctagtggagatttattgcttgctttcaatcctatatatgacgacttgatatcatgcaatttgctagctatttgtttcatattcattcgctcacttggtactgggcgcgtacagaggagtcctaattgtagcagagagacaaagcattgatggaccatattttctgattccggttttgctcttgcaaattcctcgcgttcatcgataagacatgggtcgatgacatgaagtatttgatgtgaaaggttggtctccacaaatttgacaatgtcgagtccgttcccgaacatagggtctgttggtctttttcctgtcaacatctccagcagtattaccccaaaactataaacatcgccggatgttgatgcatggcctcctcccgcatactctggagcgatgtatcctatggtgccaccgatggaactaactaaaccggtcttctgcccagattcaatacaaagacgtgcaatgccaaaatcagctataagggcattcanatcgtcgtctagaaggatgttgctaggcttcaaatcacgatgaacagtaggccttccacagtcgcctcgtgccg

SEQ ID NO: 68576 - DNA, 231 bp, Oryza sativa
  Clone ID: PAT_MRT4530_69325C.1
tctttttatgctccatgtctttacctccaacccctcggttcacaaccaatgctctgctaggatttagcgggctgagatggctgctctagaaggcgagtaccgttgatacgtcaggaggctgttgctggggcacacaggacacggacctcgaggccgagttttgaagcttacggggagaatcttgacatgccagatcatcaactactgggagactgtgaagtcacggaagga

SEQ ID NO: 68577 - DNA, 1668 bp, Oryza sativa
  Clone ID: PAT_MRT4530_69326C.1
ctacaatgttaggctctcaggatcctcaatgatcttcgcaaatgtctgcaggaatgctgccaaatcagcaccatatataatcctgtggtcagcagtaacattgacctgaaaaggttgggacaagcatagtacagaaacttcacaggcataaatcagcatttcgttcttgatgctaaagaaaccatctttgttggccaccaaagtaggtctcgatcctccaacagccataatagccccctgaccaggtggaaggattgcatcgaatctatccacaccaaacatacccaaattagacagcgtaaaagtccctgaactgtattcgtctggttggagctgcttcatgcgtgccttcttgagcaggcctctccacttttgtgcaagaaggtatacatccaacttatcaacatcctccaagacaggcgtaagaaggccgccctcgatcgcgacagccacagcaatgttgatactactgttgtaactgaagctcttcccatccctgcagctggcattcacaaccgggtgctgcgtgagcgccatggccgcggccttcaccagcaacaatgtctttgtgacccctttcgatttaaccttctcgcatagtgcgtcgagcttgtcagtgcacacggcgtagccgactctgaatgttggcactgacaggctctccatcatgttcctgctcaccgcggcttgcatcgtcgtgaacggcaccaccgtcgcgccaggcaccggtggcagcgctgctggttgccggggtgccgccgccatcggcggcggagggcgaggagcggggtggtgaggcggaggcggagggtgagcagcggggtgtctgtgtggcgatggaggtggaggcggaggcggaggtggagcgccctttgggccctttagctttggcttgatgccagcggccgcctcgacgtcggctccggtgacgcggccgtgtggcccggtgccgacgaccatggagatgtccaccctgtgctgcttcgctagcttcttggcgtgcggcgtggcgacgcccttcgtcggcggcggtccaggaggggcatgtggtggtggtggcggcggcggcggcggcgcagccttgggaacgtggggaggagggggttcttggcccgggcctctcgggagagcctgtgcacgcgcctgcgcgacggcgacctcctcctcggactccgccaggagggcgatgggggcgccgacgggggcggactcaccggccgggacgaggacgacggcgacgatcccgtcgtagaaggtctccacgtccatgtccgccttgtcggactccaccaccaccacggggtcccccttggcgacgcggtccccctccgccgccgtccaggagacgatcctcccctccgtcatcgtcgagctcagcgccggcatgaagatctcccgcaccttcgcccgcacgacgctcaccctccgccgccgcggcgccgccgtgacgggtcccgcgccgcgcgcgcggccctgcgaggcggtggagaccgggagcgagagggacgccagcgacgccatggagacgatcctcccctccgtcatcgtcgagctcagcgccggcatgaagatctcccgcaccttcgcccgcacgacgctcaccctccgccgccgcggcgccgccgtgacgggtcccgcgccgcgcgcgcctcgtgccgaattcctgca

SEQ ID NO: 68578 - DNA, 660 bp, Oryza sativa
  Clone ID: PAT_MRT4530_69327C.1
atggctggcctcgggttcgacgagaccgagctccggctcggccttcccggcgccggcgagctggcagcgaggagctccggcaagaggggcttcgccgagaccatcgacctcaagctcaagctgcagccggcggcgcctgctgccgtctctggggaagagggtgctcaggaggacaaggaagatgccgacgcggcggcggcggccgccgacgagaagatgtcgatgaagaggtcggcgagccagagcagcgtggtcaccgcggagcccgatcccgacaagccgcgcgcgcccaaggcgcaggtggtggggtggccgccggtccggtcgttcaggaagaacgtgctcgccgagaaatgcaaggcggcggcgctggtgaaggtgagcatggacggcgcgccgtacctgaggaagatcgacgtcgccatgtacaagagctacccggagttgtccatggcgttccagaacatgttcacctccttcaccatcggcaagtgtgggtcccatcagcagctgaaggagagcaataagctgagagatgacctggagtacgtgccgacgtacgaggacaaggacggcgactggatgctcgtcggcgacgtcccgtgggacaccaagggcagtggagaaatgcaagagctgaagctgatcaaggagaattaa

SEQ ID NO: 68579 - DNA, 257 bp, Oryza sativa
  Clone ID: PAT_MRT4530_69328C.1
ggattcgtcaagctcatttcaatctgaacccaaacatggtacaggcaggagggagcatcacaccccctttggaattggaccgggcaaatttgaaatggatgggatataaaacgacagggtcacaactcacatgggcgggtattgggttgaacttcgggggtacagaaaccttgggggggggaataccggggggaaccatttttaagctcgcccaaaaaggggcagccaaaccctggattgaaaaaatcagggccccc

SEQ ID NO: 68580 - DNA, 343 bp, Oryza sativa
  Clone ID: PAT_MRT4530_69329C.1
agcggccgcccttgtttctctttttttttttattgcaaaaatttttctgaaacaaaatgagtacattcatcctcctctatcatctccctccttaattaaatcatcacagaataatcatatatttactccgtgatgcagtattatattgtgtgacaaaaagtcggagcttaagtaagaaatccatttttcaatttacaacaagcagcattagtgttataatctccttcataaggcctcctcctccttataacggcaaggtgtagtgctgcgcttgcggcgcgccgtcgccggcggcttgcgtccatacgtctcaaggcccgacaccccttcccctgctcactgc

SEQ ID NO: 68581 - DNA, 492 bp, Oryza sativa
  Clone ID: PAT_MRT4530_6932C.1
atggcctacctcgaagtcgtcgtcggagagggaggggaaggcggcggcgaacgggaggggaaggaaaagccggcagaggggatggggaggccggcctcggcttgctcgtcggctgcgcctagcctcctcaatcctcgcccaccggtgaggtcggcctcaatccgtgccgctgggagctcaccggctgcgctaggcttgatccgcgcctgccacgtgaggccactccatggacaccaccgtcgacgatattgggagtggggactggcaatggggaggagaggcgccgtttgggggtgccggccagggaaggggaagagaggcgtcggccggggaagtggggaggagaggcaccgcctgggggcgccagccgaggaaggggaggagaagcgctggccggggaagaggagaatgcccggggaagagaaggagagacgccagcgtgaggggaagagagatttagaacttgtagctctagcctacgtggcacactga

SEQ ID NO: 68582 - DNA, 504 bp, Oryza sativa
  Clone ID: PAT_MRT4530_69330C.1
atggctcgtcccttgggacctgagatctttatcctgaagcggactcattatctgcttgacttcttctggggctccttcgatcgccttgtagcttccctgcggatttctcttggaaagttggaacttggaatacgattgtctggagtctggactgggtgtagcgaggataacattagagagatggccaaagcagtggaaaaccaacggtggacaacagacataggtaggcgacaaggaaacagagcaacaaaaatggaaaaagacgatggggagacgttagaggagagggcatcatacctgcacctgttaggacttaggagacatggacaatatagcatctcagctgtgcgagccaccgtagatagggaaagaactgtggtaccttccgctcgactttggaggagtaggaagggtgggggaggaagtggtatggcgagccttgttaacggtagcgcttgtggtggcgaaaagaaaaacaaggaatgtgttggtgtcaacgagtaa

SEQ ID NO: 68583 - DNA, 307 bp, Oryza sativa
  Clone ID: PAT_MRT4530_69331C.1
ttgtttttcaccaccccgtcccaggccctggcccttgtccctggcgccgtcgacagccgcgtcggcggcggcggcggcggctctgcgcgggtgagctttccgctcggccgtgttcagcgcctaggtgcgctggggatgcgtttgcgggcgttggtggttatcgataaggagactcccgagagcgagccgcctccgaccttgctgcggaaggaccggtccggggcggcgtccgggtcggcgcgggagcggttcgaggccattatccgccgcgtgcacggtgaggtgtgcgctgcgctggaggaggtcg

SEQ ID NO: 68584 - DNA, 303 bp, Oryza sativa
  Clone ID: PAT_MRT4530_69332C.1
atgcccgatcaccagcgccgcctccctcaatctcacacgctcacggcggtagtggcggctagggacgaccttggctccggcggggacagcgatggagggcggcggcgactggggacgacctcggctacgacggggggcagcggtggagtgcggtggcggcggtggctacggccgggggcgaccacggctcggtctctagtgggggtagctgtggagtgcggcaacagcggcgatagccaggggagacctcggttctgtctccggcggggcagcgatggagtgcggcggcggaagcacggctag

SEQ ID NO: 68585 - DNA, 477 bp, Oryza sativa
  Clone ID: PAT_MRT4530_69333C.1
atggaggaggcagcggtcgtgacaagcagcagcgccacaagcggggaggagggcgggcacctgccgcaggggtgggtgaagcggaagaggtcgcgccgccagcgatcggaggagaacctcgcgctctgcctcctcatgctcgcccgcgggggccaccaccgtgtccaggcgccgcctcctctctcgacgacggggccagcaccgcaatgcgcgtggttttatctagtaactgtaatgtttgaaaacaatttagctcacccaagaaaagcattacctcaggttgcacgtaaaggaaccattttggagtcagcaatcttccgtgtggatctggctgaatatgagctgacaccaagtacccttgactatgacggaaaaaactttacccaagtatatgcttattatcatggagggataaaaggattcaatgggtcagagcagaaacctgactctggttccatagtggcaagcattccatga

SEQ ID NO: 68586 - DNA, 166 bp, Oryza sativa
  Clone ID: PAT_MRT4530_69334C.1
aagaaaataaccacagttaatggccccggggacaaacatcaactttagtgacaatctcgcctacaaaaggacagaacatcagtactacaagcaaccgactacgcagctgagtatgattcttgatgatccaaaaggcaagagccgaatccaaccccccacaaggctt

SEQ ID NO: 68587 - DNA, 138 bp, Oryza sativa
  Clone ID: PAT_MRT4530_69335C.1
atgtacacatcaaggtcacaagttatcagcgacggcatcgccatcagcctcctccggtgcagcgcactgtccggcaacagtggtgcaagtgtgctgattgtgacattgtcgccgtcgttgagccctcggttcatttag

SEQ ID NO: 68588 - DNA, 339 bp, Oryza sativa
  Clone ID: PAT_MRT4530_69336C.1
atgtccggcaattgttcatggcatgaattattcgagagcacgtacaccggcggagaaacaatgttcgccgccttgttttctcctcggttccgggcggtgcggtggggcctcggcgcggctaaagattcggaattagggggtgctgctgcggccgtcgaacagtgcgggcatgtgtggcgacaggtgtgcgtgcccgcgtgggagacgttgcgagaggagacgcggccggcggggtttccgccggctatgggggttagcgcagtggtccgtccgtccgtcctctttgctgcgctggcgaagtggcaagtcagtgaagtcgcaagtgagaagggaaagtag

SEQ ID NO: 68589 - DNA, 534 bp, Oryza sativa
  Clone ID: PAT_MRT4530_69337C.1
gcacgagggtgggatgcttgaccgagtagacagctatgttttcacaggggcactttgttacgcgagttcatcaaagtagctttacctctctttggagtctgatgcagctaggagtgccctgttcatgtacttctgccttcagcagtatgttcgccaaatgtatgattgagccaagtcggcaagtcctgctgagatgtcgaataccagtgggcatcactgcaaaaacgtggctcttgcgaagagagtatgatatctgactttgaagtgagatagaaccatagaatgcggctgttaactttgtcaggattgagctgttttttccttgccataggcaacctgttacaaatatgtcacttctggtgtaaatagtttgttcttacagagtaaaaaggaaacacaactgattcattacaaaaattgtttaattgtatttgggcggcttctggggaaagaaggccttttgggatgaaactgtacttggtcaccattttttcatgcttcatgccttgcattgtaaagtgtcaactatctgat

SEQ ID NO: 68590 - DNA, 377 bp, Oryza sativa
  Clone ID: PAT_MRT4530_69338C.1
gaatatatacatcaggaaaactttatgcactattgttgctgaggatgtactgtgtttagaaacttggaagtcatcaatcagtttttggtttgtgtatttactgttatcatgtgccctttttatatttagtatgcaactgagaccattcagtacactgagttgccaccaccaccccctctacccccgccgccaccacctcctccgccgccacccccgcctttaccgcctaacatgcctcctcccctgcctccaccaccacctcccccaccgccgccgccgccgccgccgcagccgcagcctccggcgccgcctcccaatccgccatcgcgacaatccttgcgtagcacgttgatcaatcctggagacgattatacaac

SEQ ID NO: 68591 - DNA, 702 bp, Oryza sativa
  Clone ID: PAT_MRT4530_69339C.1
atgtggtgtggaatatggatttgccgaagggccaaaacggaaagatctccacccagcgcggataaacaaatagtagtacgacgcgggcccacctgcagcgtccctggcccacggcccatcgcgcattcaatcccacccccacgcggcccgcccactgcaccgacagagccaaagctaaaccaaaagacacttttacgagcaggattagatcgcaagcgcacgagggcccaactgattcgtcgaatgagcatcaggcgaggtgtcaacataaatccacatcaccatgttccctccattcgctatgcttgcttaaccaaacgatcacgtgaacacagcatattgtactacttacatgtggtgttgtctaacaccatctgcaagaatcatacaacacaaactcctacgaattacgattggtacagtgcagttagccttctacaggaagaactgagacccacagtggacttgggcccaacagagaaacgatgcgtccagttgaggaaaaagtccacttttactctctcaattattggttggattttactcatattcctcaaccgcaaatcagaatcgaacaaggagcttccgatggcagcgacagtggtcattgaaacccatcgaactcaagctcaccctccccgtccgcgggaagggagcaagcggcggtggcagcccttaagtcgcacctgtgatgatcgcctg

SEQ ID NO: 68592 - DNA, 1815 bp, Oryza sativa
  Clone ID: PAT_MRT4530_6933C.1
atggccgagaaaccgccagcatcgccatcctcggctggtgaacttggttctgttaaagctaaggtccacaagctgggtctatctgaggttgatgaagccaacattgtgctcgtcactatggacaaattgacacctgaacagcaaaaggatcttgaggtaatgatgcagcaagcacggaatcagttcttgagctcattcacgaagactcgcaagggaacacttgttcagaagtacaaagtaaaagtaattgccgatgttcctgggacaggttcttctaaggttggagaagtgaaacaagctccagatgacgcggctcaaccgagtattaaaggtgctgcagatgactttcaaggagatcaaggtgatggctctcaagaaattcaaggtgatggtgttcagggagttcaaggtggaggtcttaatcatgacggcaatgcagcacaattacagtttaacaacttccaggatcaggttgactatgccgtgcactatgctttgatcaatcaatctagaatattagtcaacactttgtcaaacatggtgaagacaatggttgatgccggcggcaccagtatcggctcctgcacctgctgcaccatcatcagcgccaggagcagtttgggcttaagccgaaagacgctggaaacttatatcggcaaccttcccctaaatggtttgagaaagtccctctacctaaccggttcaaggttccagacttttcaaaattctcagggcaggataggtatgattgctccgatcaaggagaaattctcgtctcaagactttgatagcctgtcacatcttggacagaaggtaaccttgcatgaacagaggtttgcagaagtcaggaagaactttaaaaaggttaatcatgtctgtccttacatatatggatcggatgatgatgatgatgatgactctgagatagaatgggtgagaagcaaaaaggttataccatgccaatgggtaaagaattctggaaaagtggagaggtatgactttgatattaccaaggctgataagatttttgatttgttactccgagagaaacagattcaacttcctgctggtcatacaatcccatcggctgaagaattgggcaagaggctgccatctatcgaggactgtcctgggtgcgagcaagcagtcttcgaaaagccggaaggaacagagaatcggcatcttaaaccattgaagttgggcagaaacactgaagatctcatcaagacaaacatggtgctcaaggattttggtggcaatccatcagaaaccaaaggagttttgaatgtggaactaaccgtcggcagtaaaactatacctacaacgttctttgtcatcgatgggaagggttcctacagcttgttgcttggaatggattggattcatgccaattgttgtattccttcaaccatgcatcaatgcttgattcagtggcaaggcgacaagattgaaattgtgccagccgacaggaaatatggcttgaaaatgaacccaacaaagtgtgctttcggcgtatcggctggccagtttttgggatttcttgttcatgagaggggaattgagataactcaaaggagtgttaatgcaatcaagaagattcagtctccaaagaacaagacagagttgcaggagatgatcggcaagataaattttgtgagaagattgagggcccttgcaaaggttaccaaggataaggaacgagttgctcggcattacaacaagagagtggtgcccaaggctttttcggaagagttgtgtctaagggagcttacatgttgcaaggactcgatggagaagtttatggatgagcactaa

SEQ ID NO: 68593 - DNA, 390 bp, Oryza sativa
  Clone ID: PAT_MRT4530_69340C.1
cgaagaagaaaagcaggagcaatgggcgcgggaggcaaggggggcatatggacagggcaggccctgcagagcacctacgggcaagatcgcaggagtgaacgaccccaacatcacggaaaggaaagggccacactggccaaagcatgagacggagcacgggcagtggaagcacaaggggggaaagggaggaggacgaagacccttctcttcggcgagaaggtggccacagcgacaggctgcaggaaccctgaggagaacccatggggagagactggcgctgagtatgctgtggagaccactggtgttttcactgacaaggacaaggacagggctaacctgaagggaggtgctaagaaggacgtcatcactgctcccagcaaggatgccccc

SEQ ID NO: 68594 - DNA, 765 bp, Oryza sativa
  Clone ID: PAT_MRT4530_69341C.1
atggggaagattttccatgctacacatacgtttttttggatcgccagcgccgtcaaccactgcctcgcggtgaaggcggcgggcgtctccgtctgggccgacgccaggtgcgacgccacgatcgagctcgccgctcccgccgacgtcgtcctgctcatcctcaacgccgtggccgcgcgccgggaggccaaggccgaagcggaggccgacgcgcagatccgcgaggctgcgggtgcagctgcacgcaacgtcgttcctgatcccggcgacctgcagcagccgctggttaccctcgcactaccggcttcgactccgagtccgagaccggagcgcctccgcctgcgtggttccgatgcagtactcatgttcgtcgtcgccttcatctacgtgtgctgtgccgttctcatcgtcgtgggcgagctgctcccagtggtcggcgatctcatccccgtggactgccagcgccagtgccaggtgcagcggcggtgccttgcttggttcttcaagaacatcggctacctgtggctggctgttggtcattgctgcctcattattccttacgccgtgctcaggctgaggaggctcgccaggaagaaggttgccagcttcttcgtgtcggtgccatgcatggtacaccctcaaagcagtcagattggttttgcaaatccagcggacaattatgttgcaaagtacgtacatcatgttctggtactggagctaaatgttgcgtgttggatgtatggttacagccttatactgaactaa

SEQ ID NO: 68595 - DNA, 423 bp, Oryza sativa
  Clone ID: PAT_MRT4530_69342C.1
atgggtggtggtttcggcggcggttggcgcgggcgtgggcggccggagccagaggagatggagacagtcgattcatctgtgactacagacaaagatgaacctactactactactactgctgctgatgagtttgacccatggaaccctccacttccgccgcctcctgacaaccctgattcagcaatgtgctatactccatcagttctcctagagtccttgttttttactgggtttccaacatgcatgcatttcgtttttcagtatgcagatgtaacagaggacatacttacagagtccaggcttacaaacataatcaccccagagcgcactcctaaggttcttggctcacttcatctctctcatcattttcatttagtaggaggattgggcctccttttggttatcctgcaatgtcatggttga

SEQ ID NO: 68596 - DNA, 2493 bp, Oryza sativa
  Clone ID: PAT_MRT4530_69343C.1
atgccgccgtcagcaggcttggccactgagagcttgccggcggcgacatgcccggccaagaaggatgcctatgccgcggcggcgtcgccggagtccgagacgaagctggccgccggcgacgagagggcgccgctcgtccggacgactcgcatctcgacaactaccatcaagttatacaggctcaccatctttgttcgcatcgccatcttcgtgctcttcttcaagtggagaatcacctacgctgctcgcgccatcagctccaccgacgccggcggcatcggcatgagcaaggcggcgacattttggacggcgtccatcgccggcgagctctggttcgcgttcatgtgggtgctcgaccagctgcccaagacgatgcccgtccggcgcgccgtcgacgtcacggcgctgaacgacgacacgctgctcccggcgatggacgtgttcgtcaccaccgccgaccccgacaaggagccgccgctcgccacggcgaacaccgtgctgtccatcctcgccgcgggctaccccgccggcaaggtgacgtgctacgtctccgacgacgccggcgcggaggtgacacgcggggcggtcgtggaggcggcccggttcgcggcactgtgggtgcccttctgccggaagcacggcgtcgagccgaggaacccggaggcgtacttcaacggcggcgagggtggcggtggtggcggcaaggcgagggtggtggcgagggggagctacaaggggagggcgtggccggagctggtgcgcgacaggaggcgggtgcgccgcgagtacgaggagatgcggctgcggatcgacgcgctgcaggccgccgacgcgcgccgccggcgctgcggcgcggccgatgaccacgccggagttgtgcaggtactgatcgattctgctgggagcgcgccacagctcggcgtcgcggacgggagcaagctcatcgacctcgcctccgtcgacgtgcgcctcccggcgcttgtgtacgtgtgccgcgagaagcgccgcggccgcgcacaccaccggaaggccggcgccatgaacgcgctgctgcgcgcatccgccgtgctctcgaacgcgcccttcatcctcaacctcgactgcgaccactatgtcaacaactcgcaggccctccgcgccggcatttgcttcatgatcgaacgccgcggcggcggcgccgaagacgccggcgatgtcgcgttcgtccagttcccgcagcggttcgacggcgtcgatcccggcgaccgctacgccaaccacaaccgcgtcttcttcgactgtaccgagcttggcctcgacggcctccagggccccatctacgtcggcaccggctgcttgttccgccgcgtcgcgctctacggcgtcgacccaccgcgctggagatcgcccggcggcggtgtcgccgcggaccctgccaagttcggcgagtcggcgccgttcctagcctccgttcgggcggagcagagtcacagtcgcgacgacggcgacgccattgccgaggcgagtgcgctcgtgtcgtgcgcgtacgaggacgggacggcgtggggcagggacgtcggctgggtgtacggcaccgtgacggaggacgtggccacgggcttctgcatgcaccggcgagggtggcgctccgcctactacgccgccgcgcccgacgcgttccgcggcacggcgccgatcaacctcgccgaccgcctccaccaggtgctccgctgggcggcgggctccctcgagatcttcttctcccgcaacaacgcactcctcgccggcggccgccgccgcctccacccgctgcagcgcgccgcctacctcaacacgacggtgtacccgttcacgtcgctcttcctcatggcctactgcctcttcccggcgatcccgctcatcgccggcggcggcggctggaacgccgcgccgacaccgacgtacgtcgcgttcctggcggcgctgatggtgacgctcgcggcggtggccgtgctggagacgaggtggtcggggatcgcgctgggtgagtggtggcggaacgagcagttctggatggtgtccgcgacgagcgcgtacctcgccgcggtggcgcaggtggcgctcaaggtcgcgacggggaaggaaatatcgttcaagctgacctcgaagcatctcgcgtcgtcggcgacgccggtcgccggtaaggataggcagtacgcggagctgtacgccgtgaggtggacggcgctgatggcgccgacggcggcggctctggcagtgaacgtggcgtcgatggcggcggcgggtggtggtggccggtggtggtggtgggacgctccgtcggcggcggcggcggcggcggcggcactcccggtggcgttcaacgtgtgggtggtggtgcatctctacccgttcgcgctcgggctgatgggtcgccggagcaaggcggtgcgccccattctgttcctgttcgccgtcgtcgcctacctcgccgtccgcttcctttgtctcttgttacaattccatacggcttaa

SEQ ID NO: 68597 - DNA, 297 bp, Oryza sativa
  Clone ID: PAT_MRT4530_69344C.1
atgctgagaagtgaaggatgtgacggcaaaagtggaaaaccattcaaaaccaaagtcaagtgcttgaaatgcaggggtgaagattgcgaacaaatgcacaatccttatgggccagggcccaaagaatacattgcaaccggtgtgggcaaggatgtaggttttgatctagaagaagcaaaagaaactaaggaatctgacgtcacctatgtcaagatcaatatgcatatgggagttacaatgaagtggaaaagattggcacttcaaatgatcattagagtagatcttgaaaagttttaa

SEQ ID NO: 68598 - DNA, 881 bp, Oryza sativa
  Clone ID: PAT_MRT4530_69345C.1
tttttttttttttttcgcctaaaaagtcgattgaatttatatattcaaatttgaatctgtagcgagagcgtcgttacaaagcacaacttacaaattacatgtggtatacggataaattcagtaacttctaaattatactacacgaagaaggggcgtgtcgcgggcggccggcgattcaaatccgactgaaagaacgcgtggtgattgattcatgcaacatcgaactgaacgagcgaaccacgagatcgattgctcggtcgatcgatcgatcatagcgttggcagcatcatctggagcaggggagccggccgggatcggcgctgccgcgatttgaacttcctgatcgccgccttgagcacccgcctccacccttcctccttggccgggagaggcgacgatggtggcggcggcgagaagtccagcctcgcgcagcccgtctcgtggaggttcaggaatgagccgtcctcccgccgcagcctcagccgccgccgccgcgacctcgacgacctgcccccgatggcggccctcgccctgcgcttcgggttggcgatgagaaagtccctcgagccctcggccccgcctccgccggagcgcggcggcggcggcggcgacgacgacgcgcggggcaccttgttcagcggggaccagatgccgctctgggagtagtcgaagtcgaaggcggaggagtccgggaacatgccgagcaggccccgcgacatggacggctccaggtactccaccgtcaccacgcgctccaccaccaccacctgcggctccacggccgcggcgccgccgcctccctcggtctctgtctccgccgcactattcatctcggcctcgaagcttactagtggtggtctccggcgatcgtcggagctagg

SEQ ID NO: 68599 - DNA, 555 bp, Oryza sativa
  Clone ID: PAT_MRT4530_69346C.1
cgtgccggaggaactgctgcgccttgctttggggtgcgcaatgttggatcctgctgcaacttgcaagtaagatgcatggatagggtgtgccatgccgtggacaaccgttgcccctgtgttgccaacccactgagtgtgtgcacaacgtaggctgccctgggaccgccttgaaatgctggggcaaaatttggagaacttggggttttgctcttgggtgggctgctaatgctgatgatgatgatggtacttgagaggaaaatgaacatgtgatgaatgattggcagggcccctgatgtgcctgtgtgtgcaatgatgctggcccccctgactggtggtaaatgacactgctgaatgatgaatgaatgatgtgatgaatgaattgagagcctgctgattgcccctgctgggctggggctgtgttgtgatgttgagagggactggaggagaactggggacagtgactgcactggatgtggttgcatgatgttgatggtgattgagttgcatgtgccgccccccctgactgtatgacatgagacaaaaaaaaaaaaaaaa

SEQ ID NO: 68600 - DNA, 651 bp, Oryza sativa
  Clone ID: PAT_MRT4530_69347C.1
tcatagcgttggcagcatcatctggagcaggggagccggccgggatcggcgctgccgcgatttgaacttcctgatcgccgccttgagcacccgcctccacccttcctcctgaagaatccaaccagcagaagcctcgtcgtaatggcggagatgattcatgaagcgtaaggatggggggatctgtatgcagaaagctaccttggccgggagaggcgacgatggtggcggcggcgagaagtccagcctcgcgcagcccgtctcgtggaggttcaggaatgagccgtcctcccgccgcagcctcagccgccgccgccgcgacctcgacgacctgcccccgatggcggccctcgccctgcgcttcgggttggcgatgagaaagtccctcgagccctcggccccgcctccgccggagcgcggcggcggcggcggcgacgacgacgcgcggggcaccttgttcagcggggaccagatgccgctctgggagtagtcgaagtcgaaggcggaggagtccgggaacatgccgagcaggccccgcgacatggacggctccaggtactccaccgtcaccacgcgctccaccaccaccacctgcggctccacggccgcggcgccgccgcctccctcggtctctgtctccgccgcactattcat

SEQ ID NO: 68601 - DNA, 994 bp, Oryza sativa
  unsure (1)..(994): unsure at all n locations
  Clone ID: PAT_MRT4530_69348C.1
cggcgatgagctccggcggcaagcaggagggtgcggctgcgggcggcggcggcgaggaggagcggaagacgtcgtggccggaggcggtggggctgccggtggagaaggcgaagaaggtgatcctcaaggacatgcccgacgccgacatcgtcgtgcttccggtggggtcgccggtgaccatggtctttcgtcccaaccgttttcgtatttatttattcaccgtgtctcttattctctccattctttttttatttatcttttatttttattttctttcttgattagtattgttttattataaaaaatttttttacattcacttttctttttttttatttaattttattttaatttttcttttctttcttctattttttttttttttacattccttctcttattcttttacctctactattctctttcttctttttttttttttataatctctcctcttttttttttatatcttttatctttacttctcttcttttctttttttgttcttgtatattttttgaactttctatatattttttttttttttattttcatcttctccttctttttattttttttttttttgttctttttttatttaaattcaacttctaaatcttaacttttctctattattatcatctattttatttttatttatttttttttatttataaacatcatataactatattgtatttatttactattctttattttccattttctaattttttataattcttaccgtcttactaatattatactttcatatcttataattacaacctaacaactccattttaatttacctagtttattgtctttttaatttacatatatcatctgaactctacgtcgcacataaaaattccctatattgttcttattgtttcgctttgtttatcttattctattcatttttattacttactatttttttttttatatttcatttcctcccgccttactccctttaaattctttttccttn

SEQ ID NO: 68602 - DNA, 338 bp, Oryza sativa
  unsure (1)..(338): unsure at all n locations
  Clone ID: PAT_MRT4530_69349C.1
gacagacagagagtttttttcgtgagatataaacaccaactagctggaagatcttcaatgatcacccttgggaaccaccaaaattaaatttttttttttttccctgcgggaattcaattacgctttttatattggtacagaaaattgcaactcagaaatttgagaaaaagaccaaaagaagtttgttttttncttttccttggttcagaaattcagccggtctgaagatacaggggataaaatagactattattcaggtgaacttgaaaaagtgtgaacagtggcatatgagggactattaaagattgaagttggaagaaagtttgaaaagtgtaaaa

SEQ ID NO: 68603 - DNA, 393 bp, Oryza sativa
  Clone ID: PAT_MRT4530_6934C.1
gatacaagaggtattttgggtggcactctgagatcagaggcttgaggatttcagatctacaaaggcgcaaagctgcaaacatgaaaacttcgacaaagatactaacagatattcaacttacgactgagaaaatggtagctgtctcctgcaaaaacagactacagaaaatagtggtcgaccggttctgtttccttatcgaatttcttcagctccagcagagcgctccaggtggggattcagaattatgcaaccgcgggcatgtctttgagccatgcatcaagcggcttgccgatagagtagacaatgaagccaatctccctgagcttctcaggatcgaccacattgcgcccatcgaagacaaatgcaggtttctgcatgttgtcaaagatcctc

SEQ ID NO: 68604 - DNA, 720 bp, Oryza sativa
  Clone ID: PAT_MRT4530_69350C.1
atggaacagtttttctgttttggtgcctacgtgaatggaatcgcttctacgtttcagattgcatacagaaaaatatcttatcggaagtttggacaaggccatacttatgaggtatctagtgatacctataaggtatcagatgattcctaccacgtattaggtgatacttccgaggtatcaggagtcgggcaccaaagcattgtcgctggtggtcccatcgtccacgtctcacgctggagcttgtcggcggcggctgcatcctccaccgtccacgccacgtcggagctcggcggcgacgactgttgcatcctccatagtccacgtcacgtcggagctcgtcaccggcggttgcgtcctccgtcgtccacgtctcacgttggagctagttgccgatggccgcatcctccgccgtacatgccacgtcagaactcgtcgccggcggccgcgtcctccgtcatctacgccccacgccggagctcatcagcgacggccgcatcctccattgtccacaccacatcggagctcgtcgccggtggccgtgtcctcctttctctgcgtctatcaactccgacgatagctccatccccggccatcgcgacaacccacgtccatcagctccgactccaagctcgcactgctcctcaacgtggcacctctcttcgattcagcaatgacggccaagccccgcgcgccgccgctgtcatcagctggtgcgagtag

SEQ ID NO: 68605 - DNA, 505 bp, Oryza sativa
  unsure (1)..(505): unsure at all n locations
  Clone ID: PAT_MRT4530_69351C.1
gcagctagctgttaattaattactagtagtagctaagctagccccgagctgtactagctagttctagcttttagtgtgtcatgtcattatngccctatgattagccatgtagagagagatgagtgtgtgtgttaatttgtgtgttggttggttggttggatgggttctttgggaggtaggggcttttgtttgtgtgatctagcttagcttaaggttaattagcttagctagggccacttccaagctaataggcacttaggcagtgttttgatgggagacagagagggagggagaaagagaggaaaaaagcaagcaattctcctactgttacaggcctaggtagctgagtcacaggtatgtggggcccaggttgcatggcttcccctacatgatagtgtgtggctaccaattttgtacttgatgtaacagcagggttacttgcatanacttccataaccacatatataattaattaatatcgttcctcaaaaaaaaaaaaaaaaaa

SEQ ID NO: 68606 - DNA, 240 bp, Oryza sativa
  Clone ID: PAT_MRT4530_69352C.1
atggtggcgagcagaaggcggcgcgtatcaaggcaggccaggcgacggcggctcgacgaggggacaagacgaaggtgggctcttgtccagacggtggcccggccaagcggtggcggcgagcacgccaagcagcaggccgcgcgcagcgagcagttatcaggggcactgcaagctgttggcaagcagggcacgacggaggtgcacgctgcggcaagcagcatcaacctggctcggctgtaa

SEQ ID NO: 68607 - DNA, 570 bp, Oryza sativa
  Clone ID: PAT_MRT4530_69353C.1
tcctctttgctgcggctgctgttgcacaagtagcatcaccaacctctccctgtctatcccatattattcgtctccttgcgcgcgtcgctgaatatcatcagagcttgttcagactgtgtccctgttcttgctcagcttctaatccagggatacacagagatatcgcccttttttggcagtgattatctctctctctagcttggttgagagagaagaacagcagctcttgcttgcctccttactttcttcttggtgttcttggagagagagggagaggattagaggttgtgatagatgggtaattgctggtttagagggagcttaattgttaacagagtctcttctaatgcgaagcacgagactcccaagatccagagcccatcggagagggaccggagcgacgagagcaagctgccatcgaacgccaaggaggtggaggcgatgcggttggactcgtcgccgcgcaacccgctcgtcgccttctccttcgagggagctcagggcggtcaccagcaacttccgccaggactccctcatcggcgggcggcggcttcggccgcgtcttacaag

SEQ ID NO: 68608 - DNA, 217 bp, Oryza sativa
  Clone ID: PAT_MRT4530_69354C.1
acggtagattcgacgggcgtccttcgacgcccggaaccatacgggaccacgcgaagcctcctcacgaattcggctggtcggccgccggcatcctctcgcccgtcatccaccctgttggataccccctcttttctcggacccccggccgtcaccggccatcgggcatccccccaccagccaacatcccctcctgatgggaggaccatcctacctgtgc

SEQ ID NO: 68609 - DNA, 921 bp, Oryza sativa
  Clone ID: PAT_MRT4530_69355C.1
cccgggctgcaggaattcggcacgaggctgctacggacgcgtgtgtgggcacacgttgcacacaggagtttgaggttgaggaggagatcgagatggtgcccgcggcgaggagcgggtggccggcggcggcggcggtcctggtggtggtgctggtgctgtcctcgccgccggggactagcacggtggtggtggcgagggcggcgctgtcgtgctcgacggtgtacaacacgctgctgccgtgcctgccgtacgtgcagtcgggaggggcggtgccggcggcgtgctgcggggggatccggagcgtcgtggcggcggcgcgcaccacggccgaccgccgcgccgcctgcacctgcctcaagaacgtcgccgccggcgccgcgggcgggccatacatcagccgcgccgccggcctgcccggcaggtgcggcgtctcggtgcccttcaagatcagccccaacgtcaactgcaacgcggtaaactgaggtggaagcagcactttcggcccgcatgcatgtgggctcaggggagccatggcccgtgggccgtgaatgaataatcaacgtgcttgtatgtaccatgtcgtgtactcagcagttcacaagtgtgcttgtccgatcaatcaccaaattaaaggactcttatgactgtgcgcaaaaaaaaaaaaaaaaaaaaaaaaaaaaaaaaaaaaaaaacagtttcgtagttagtcgcgtaaggcacgtggcgaggtgcagtgaccgtgacaatgacatgatcacgctgtatgttctgaatcctctcatcttcgatgcctttagcgtcaggaagtgacgcacaaacgaaggaaataatgggcaaagcagaagacacaggatcgaacgcagcactgctcctatcctccttagcacacatgcactacaaaaaagagagagcataagctcg

SEQ ID NO: 68610 - DNA, 472 bp, Oryza sativa
  Clone ID: PAT_MRT4530_69356C.1
accgacaaaaaggttttttacccgggccccacaaaggggcaacaggggggtcaaacccttaatttaaaaacatggtctggcgcgcggggttgaaaaaaaccaatcccaaatagaaaccgctaatttggggaaactcagccccataaccggaatttagaaaaaaaaaaaactccccctcgcttgatttgggcagcaagttcaaaactacaaacctttgacctttacacgaatcatacacaattaaaatgttttttaaaagacaacagtttccaatttggagggccaagcaattcatgcctaaattaaattgccctgccccacattggcaacatgggtggcaacaagacaaggccggacaatgcgccactgatattaaaccttgggtacaaatttccaggagaaccatattttttacttggaacatgtccaaactatccatttttccaccttttcacacataaagggcttaaaa

SEQ ID NO: 68611 - DNA, 7967 bp, Oryza sativa
  Clone ID: PAT_MRT4530_69357C.1
atggcggcatcggagcgggaggccgcgctcctggcccgtgtggccgcgaaccacctctacctcgggcagttcgaggccctgcgagcggcgctcctcagcctacgccgccgcgccgacccgggcctcgccgcgggattcctccgcgccgtcgtcgccgcgggcggccgcgtccccggggtgctctggtccgccccacccgcgtgcccttccccgtcccacctcgcctggctcaccgcgctcgagctcgccgccctcccgtccacccccaaccccgaggcgctccgcctcaaggccgaattcctcgtcctcctccagcacgtcgcggacgaccccgctgccaccggcgccgaggcgcgggggaccctctctaggctgctggatttgggggtggcgaggctcaagcgcgaggtggagggtggaggggaggcgggcgtaggtagctcttcaacaatacaaaggggatgcaactcatttggtccttgaaatcatcagtacaattgaacgaaggcgtcctgttgacgttgcttctgtccgttctatgtgctcgcattggacagtggtttaggcacggatgtgctcctgtggctgcggcggagcgtgcagcttgcacacctggacgcaatgaaatcacttgtagcggcaggagatctcgagggtgccactgggcatcttcgattcctttgcctcgatcatggagtggaggaggatgagtataatttaaggattgcactaggagatcttgtcagaaggggttggccaaaaccatcgaattatggtggaacatggtttgagtcacacgatagaataattaaaatgtttggatcagctcttcagtctagcactccccagcttgttcaactgattcagctcatcttggatgacattctttctgaagaaatcgaagaccatggtgcctctgatgctaattggatgccccttcctttcaaaaagtttatggaaacattgtccttggagaggggtgcttatttggatgacaaaaccatgctgaatagggctataacatcctgcaagaaagatctgtatcattattcccgaatttctggaaaacatgtccttgaagtcgttatggaaactgttctttctttgattaagagggagcagcttcaagaagcagctaacgccatttcaatgtttcccctactccaaccattggttgctgtcttggggtgggatattctgaagggtagcatgcataaaaaacttgtgaacgattgtgacagcttctattggcagacatcctgcgaggagtacttgtgtgatcttctatgctttcatctggatgttgcatgcttcgtttccagtgttaattctgggcgccaatggaatttgaggaattcactgttgtttacccaacaagagcaagattctgatgttaacagtacagaaatattagacccttttgttgagaacttgatacttgaacggctagctgtgcagacccccattagggtgctatttgatgttgtcccaggaataaagtttcaagatgcaattgagcttgttggtatgcagccactttcttcaacaactgcaatttggaagaggatgcatgacattgagctgatgcacatgcgatatgcgcttcagtcagccgccctttctctaggagagatggaaaagagtgcaattgatgggaatgaacaccattatcagatagccttgtcatatttgagggagatgcaaagttttatggaggctatcaaaagtactccacgaaagatttacatggtcagcattgtattatcattgttacatatggatgacagtataaagctgtcagaagtagccccttctgaatgttctgttagtcatgagtgcttcgatagtaatgttgaatctgaagagaagaacatggtgacatcctttgtcgggcttcttcttgatatacttcgtcataatcttatgttagatatggataatcagtcaagtatggggctatcacctgctggcagacaagcactagaatggagattcaaacatgccaaacattccattgaagatttggattggcgtctatctgttctacaacgccttccacctctgtctgaacggcaatggagttggaaggaggcattagttcttttacgtgctgctccttcaaaattactcaacgtatgtatgcaaagggcaaattatgatataggagaagaggctgtacagcggttttctttgcctgctgaggataaagcttctcttgaactagccgaatgggtagctggtgcgtatagaatagcactggttgaagatgctgtaaatcgtgccacagacaactcaaatgccacacaagaattggatatcttgtcatttcgtgctcagcttggtcctttaactactattctgctctgcattgatgtagctgcaacttctgctaggtcaggagatatgtgccgatttcttcttgacgaggctacaagtttgttatctgaaatatttccaggaagctccccaaaagtaggtccaaattattgggatcagattcaagaagttgctctcatatcagtgataaaacgcatccttcagcgtctacgtgacatcttggatctggagggctatccatatcttcaattagtttttaccgagatgaatgcctcctcatcaactgaatctagcagagttggacaaaagcaacgtcctcttgggcttctgcaccaaatgattgatgatgctttcaaaggaaagcgacaattcttaaatggtaattttttctactttattcggttgagcggtaagcttcacaatgttgcaagagctattgttgatgaggactctgatggtacttattcaaaggagagtatcaagatagaaaagagagatattttgagctctgaaaaaggaataatccttggtcatggacttagaatcctaaagcaagcatctaggactgaccaaacagcgtcaactgttgttgaaaacaatgcagagcacaaaggatctactagcagatacctgggtcctgtatccactaagccatcaacatatttatcaaatttcataatatatattgcaaccattggtgacatagtggatggaactgatacgactcatgatttcaactacttctccttagtctatgaaaggcccaaagatcttttaactcgtcttgtttttgagcgcggaagcactgatgcagctgcaaaagtagctgatacaatgggtgtagactttgtgcatgagatcatatctgcttgtgtgccacctgtttttcctccacgcacaggacaaggatgggcttgcattcctcttttacctaccctttctaaaattaattcggaaaacagatcacaatctgctcaaggatggagtgcgcacgattcatcattgtcttctcgtcaggagcccctttatcctcttcaattaaatttagttaaacatttggcacagttgtcatcagttagagcagttttggcatgtgtgttcggaagtagcatactatctggtgacagtgaattatgttccaatgtaaaagatgcaaaacaagcccctgaaatcaagaggtcattctatgaatttgctcttgagcaatcagaaaggtacccaacattgaaccgttggatacagatgcagtgtaaccttcatcgagtatctgaatctgctgtatcagctgaaactgacaatgaagtcaccttgcatcagcccaagggaaagttttcttcgaagcgagcccgtgaacctgacagtgatgccgaatcggagattgaagatattgtcataagcgggaaatccacttcaaattcactagaatctcctaagtgtgatgaggctaaattagagccaacaacttttatttcatttgactgggataatgaaggaccatatgagaaagcagttgaaaggctaattaatgaaggaaaactgactgatgctcttgctttatctgaccgctgtttgcgcaatggagcttctgataaattgcttcaactgctcattgaacaaagggaagaaataagtttaggggccagacagtcccgtgcatatggatctcataattttgggagtgatacatggcagtattgcttgaggctgagagataagaaactggcagctcaacttgctctgaagtacctgcacaattgggatcttgatgctgcagcaaatgttttaactctgtgcatctgccacttacctgagaatgatccaatgtggagtgaggtgctacgcatgaagcaatctttgcaacgctatggtcatattatgactgcagatgaccattacaccagatggcaagaggtcgaagttgattgtgaagatgatccagaaggtttagcacttcgacttgctgccaaaggagctgtttctgctgctttagaggttgctgaaagtgcctctttatcaattgatttgcggagggaactgcaaggccggcaattggtcaaacttctaaccactgatccactgaatggcggagggccagctgcagcttcgcggtttctgtcaaccttgcgagattccaatgatgctctccctgttgccattggtgccatgaagcttctacctgacctgcgctcaaagcagcttcttgtacacttttttcttaagcgtacagttgggaatctgtcagatgatgatgttgcacgacttaattcatgggccttaggtctccgggttctgtccttattgccattgccatcacaacagcgttgctcttctctgcatgaacatcctcagttgatcctggaagtattattgatgatgaagcaactccagtctgcttctttgattttgaaagaattcccatccctgagggatgacaagttaattgttacttatgctaagaaagcaatatctattaatgttaattctactcctagggaacctcgactaactatctctggctcaagagcaaagcaaaaaaaggttgctgcaccagccaaaacaaattttgtgcagagctttggtaacttccagagagaagcacgcaaagcattctcatgggtccctcgtgatagtggcaccaaaacacccccaaaagatattcttcggaaaagaaagagttcaggttcaggaggtgaaaggtcctcttgggaagcaacacctagtgtacaggaggagcgggcacctgaatacccttctgaggggcaagaaagacttccttttgtctctgctcctgaggaatgggtgcttactggagaccctgataaggataacgcaactcgtgcatgccatagatacgaatcctcccctgatattacattatttaagcacatattgttttcaactgtgtgccctggaagggacttccaaattatccaggagaccaggacatgcaatgcacaggcattgctttcattgtgcaccaatgattcaatagctgggaaaggtgcactcgaaatttgtataactcagatgagggatgtgctgagttccctacagttgcccctcaatgcgtctatggacaacatagctcgagcttatcacgcgacagaaacttatgtacaggcactctcttatgcgaaaaatctattgaaaaaactagtggggactagtgatttgtcaagcagctccgaaagaagtagagatgttgatgatatttctgtggacacgggcagttcaagcgctggaagccaaaatatagatgggctgtctgatctcctacctctagctgatttgtggctagggcgtgcagaactacttcaaagccttctggggtcagggattattgcctcactagatgactttgctgataaagaatcttcaactaatctgcgtgacagattggtcagcgatgaacggtatagtatggctgtatatacttgtaaaaaatgcaagattgacgcctttccagtttgggttgcatggggccatgctctagttcgaatggaacattactctcaagcacgtgtgaagttcaagtatggaaagctctgcttacaagctcttcaacaatacaaaggggatgcaactcattttgtccttgaaatcatcagtacaattgaaggagggcctcctgttgacgtttcttctgtccgttctatgtacgaacatttagcaaaaagtgcagctaccatttttgatgattcactttctgctgatgcttacctcaatgttctctacatgccatccacattcccacgatctgagaggtccaggcaatcgaaaggtcctatggacagccagtttgaatctgttggttcatacctagaagatggtcctcgcagcaaccttgatggaatccgatatgccgagtgtattcattacttgcaagaatatgctcgaccagaaatgcttgctttcatgttcaggcatggtcattatgcagaagcgtgctccctgttctttccatcaaatcaaccaactgatgaaggggaaacatctttgtcttcaattccgcgaaatgatcctttgacaactgattatgggacaatagatgacttgtgtgatctgtgtcttggatatggtgctatgactgttttggagaacacaatcttgacaattactcagtcacccacatatcagggctcagctatgactcagtacatgaatgctatcctcactcgcatttgcaactattgtgaaacacatcggcattttaattacctctacaactttctggttctaaaaggtgaccatgttgcttctggactttgctgtattcaattgtacgttaattcaatgtctcaagaggaggccttgaagcatttgggacatgccaagtcacattttgaggaagccttatcagtgcgagatagaacaactgaggctacaaagctggtgcgaagaactgctcgcaataagagtgcatcagaaaaaatgactcgagaaatgataatgaaattttctactagggtgtcctatcagatggatgtagtgaaggccctcaatagtgtagatggtccacagtggaaaacttccctttttgggaatccaactgatgctgaaactctgaggcggaggtgcatggttgttgaaacgttggctgagaagcattttgatttagcttttcggatgcttcatgagtttgatctccctgctgttgatatatatgctggtgtggcagcatcccttgcagaaagaaaaaaaggtggccaattgactgagtttttgaagaacataagaggaaccatagatgatgatgaatgggatcaggttctgggggctgctataaatgtttacgctaataagcacaaagaaagaccagatcgccttatcgacatgttactcagcaaccacaggaaagtacttgcctgtgttgtgtgtggccgtctaaaaagtgcattccagatagcctcccgaagtggaagtgttgctgatgttcaatatgttgctcatcaggcattacatgcaaatgcgttacccgttcttgatatgtgcaagcaatggttagctcagtacatgtaattccatgtgctgtgccaccccataaatgctggagtgctcagaactacacaaaagaatggtaacatcaggagacatactccgtagttctttggtgaatgataacatcaggggacatactacgtagttctttggtgaaactgccctgagaatgctgagagcaagatcaaagaccatggtgtacagttttccttcctcatgtaaagcatgcgtgcacacccatgcctctatatatatttgttcttgcaagtggccttttttgtggctcatttgcaaagggaggtgcttgtggcttcctctgtggcttaaaattttgtagttaactagtagtacaaagggaggtgcttgtggcttcctctgtggcttaaaattttgtagttaattagtagtagttccgttgcctcttattaaagttggaaaatgtggcgttttttttttgtataatgaaaataattttttttggcaggacaaaaccacaaaccacggcaacccggggtgtaaaaaaaaaaaaaaaactcgtgccgaattcggcacgagctcttggtactggtggaactgctccagccgtcaaggcaagatgcgagatggaagtggattgttctcgtgccgaatcc

SEQ ID NO: 68612 - DNA, 587 bp, Oryza sativa
  Clone ID: PAT_MRT4530_69358C.1
tttttttttttgcgagcttgtgtgtgtatgtgtgtgtgtgtgtgtctgtgttgggcacttgggcattagcacatcattcctgttgtttaaattaatttcagatgcactgaattattcctagaaacaatttttgaatcttgcttattgtaattttagtgctgaattatattgtattgcactgctgtaccactaaccacattgcttcatgaaacgtggttcattttttaaacagcatgaaagattgcagagttctagtcttctagataagacaaagattatcctgtaatcattctgttagagtatatggtagttagagccatattaggataggattgatttgtgtggactccttccatatctttaatccttccttatctcctccccatgtactcctatatatatcggccccctgaggcttaatacaatcgatacacgttacgcagtatatctctccctataccatccaacacattcctcatagactcactttgctcattgtcctttagttctaccttttccttttccaaatttagtatactgaataattgctccactactgatccttccaccctgaccaaagcttaatc

SEQ ID NO: 68613 - DNA, 944 bp, Oryza sativa
  Clone ID: PAT_MRT4530_69359C.1
atgtgccctacgtaccgatcgaaacgttccttgaacttgtagaggaagcggaggtagtcgtcgtcgccgacgacgtcaccgcctactggtcgccgcagctcggtgccctccggcatggccggcgccggcagcgccgccatccggcgggcacaggcatattactatatctttcataagggtcatccttctcctgccacacttatagttcccattcccttatactctgccacaccaaactccagactgctaactccaacttctaactccaaactcctacttcagtgggagctaattcctaatggagttggagactcgttgagaagtgtttggctagttttcagctctagatctgaaaaaaaattgaaaaaacaattaaattgaaaaaaaaattgaaagaaaaaaagaaacctagtcgccggcagcccaatcacatggcgccgcccgccgccgccaatgcgttgcctgccgccgccgcctgctagctcgcctcccgccgccgcgcgtcgtcttgccactgccaacaccgcgggacagccccgaccagagcgccgccgccgcgccctccaccgcgacaaccgacgccatcgccccgatccctctcactcctccgctgtcgtggccgaagctacctgccgccgctgctgccgcccaccgccgcagctattggactcgggaggaagatgggggaggagagagaacgggaggagaggatgtgggtagggatagttcagtggcatttttacataattacactaaaaaattaaagggtaatgggtcttttggggtggagtggagcagcaaaaacctagctccacccccgtagtacaattttgtggagcagttctgctaactctgctccaaaaaacggaggatctagactgtttggcacaactccggctccaggtaagttgggaactggagctgtaccaaacggggcattatat

SEQ ID NO: 68614 - DNA, 237 bp, Oryza sativa
  Clone ID: PAT_MRT4530_6935C.1
atggcgagtacgcgtctcggcctggccgggagcatggacatagagctggccgagctcaagcagcgttgtgctcccgctgccggctggcctgctcgcaactgcctggccgaggagcggcggtggacgatggccgcgtcggctatgaaggacaacaccgatgtccagttacgcgtggatggacgcagactcgccgatggccatgctgctcgcgccggcgacgaggtccaccagccctga

SEQ ID NO: 68615 - DNA, 1374 bp, Oryza sativa
  Clone ID: PAT_MRT4530_69360C.1
atggctttcctcgccggcctcgccgccctcctcgccgcgctcctcgccgccgccttccgccgcatccgccgccacccccaccccgcgcccgccgcggggttcttccacccgtacaccaacgacggcggcggcggggagcgggtgctctggtgcgcggtgcgcgccgcgcaggagctccgcccgggcctcccctgcgccgtcttcaccggcgacgccgacgcctcccccgacggcctcgccgcccgcgcgctcgaccgcttcggggtccgcctcctccgcccgccgcaggttgttcacttgaataggagaaagtggattgaagcaagcacgtatccccacttcacgatgattgggcaaagtcttggctcagtttatcttgcatgggaagctcttaacaaattcaccccgcagttctattttgatacgagcggctatgcttttacatatccactggctcggctatttggctgtaaggtcatctgctacactcattatccgacaatcagttctgacatggttgaacgtgttaagcaacgcagttctatgtacaataacgactctcgtattgctggaagcatatggttgtcccgatgcaaaatcctctactatagcatattcagttggttatatggtctggtcggttcatgcgcacatcttgtgatggtaaattcatcgtggacaagatcccatattgaaaatatttggaggataccagagcgtactaggagggtataccctccatgtgatacttctgccctgcagatgcttccactggaaagatcaactacacctcctattcttatatcagttgcacagtttcggccagaaaaggcccatggacttcagcttgaggcatttgcaattgctcttaaaaagctaagtccagaatttcctaagccaaagcttcaatttgttggaagctgtcggaataaagaggatctggaaagattgcaaaagcttaaagacagatccactgaactacacatagatgagcttgtggagttccacaaggatatctcttacagggacttggtacagcttctaggtggtgctgttgctgggctccattcaatgacagatgagcattttgggataagtgttgttgaatacatggctgctggtgctattccaattgcccataaatcggcaggaccaatgatggacattgtgctagatgaggatggccaacagacaggatttctagcctccgagaaggaagaatatgccgaggcaattgtcaaggtcttgcggatgccggaggcagagaggcatgagatggcaacagcagcacgaaaacgcgctcaaagattttctgagcataggttccatgaagatttcaccgatgcagttcgcccaattttgtcagcaacatga

SEQ ID NO: 68616 - DNA, 180 bp, Oryza sativa
  Clone ID: PAT_MRT4530_69361C.1
atggcccctattagactaagtggctcggcccaattgtttggcgaagcctccggaagacacaacggcccgctgggccttctctcggtgaggttcggccacggctttcgccatgtggctttcgcccatatggttgccttctcggccttcgttgcgcgcctccggcttgagtctttcacctag

SEQ ID NO: 68617 - DNA, 1203 bp, Oryza sativa
  Clone ID: PAT_MRT4530_69362C.1
ccctttctctccatttccgcctccaaaccctcaccaagatgggcaggaagccctcgtccgccgccgcagttgaccacggcgccctctccgcgagcgccaaggccagccgaagacctcctcgcggcgtccgccggatgcggcggcgcccacggccactccctcttcttcgacgccctcgtgcagctcatccccccgcgcttctacctctccgccgccgacgagcaccgcccgtggtaccagggcctctccaagtccgccaaggccgccatgaaggcgcagtcccgcgccaacgtcaaggccgcccgccgcgcccgcctcgatccctccgccccgccctcctccaccctcgacctcctcaagaaatccctcgccgaccaggacgcccacgattcctcctcctcctccggggaagatgctagcgacgacgacgacgatgacgacgacgatgaggtcgaagagcgggaggaggacgaaggggatgaggagggtatgcagctcgcgccggcggccgtggtgtccgaggaccggtcggtgacctacgaggagctgcgcgagcggctccaccgccgcatcgccgagctccgcggcaaccggtgcaccaggccggagttcctgaacaagcccaagagggagaagggcaagaaagggaagaaggggaaggatgtggggaagaagaggaagcgcgaggatggcggcggcggcggcggcgctcaggatggggagggtaaggatgggaagaagtccaagaaggaggaggattccaaggcaccggatatcgtctatggcaatgtgtgggtcgatcctaaggaagcgaggagacggaagaagagaaggatcaagaacaagaagaaggctcttgaggaggctaagcggatgcagcaggcgaaggaggatcctgagaaggcgaccaagctggcgtgggatctggcaagaaggcgggctgctggcgagaaggtgcacgatgacccgaagttgatcaaggagagcatgaagaaggataaaaagcggcagcagaagcacgccgagcagtggaaggagaggcagaagatggtggacaagcagaagaaggagaggcagagcaagagaacggagaacatccgggagcgggctaaccagaagaagatgcgcaagattgagaagcgtgagaagaagcttatgcgccctggatttgaagggcgcaaggaaggatatgtcaatgagtaa

SEQ ID NO: 68618 - DNA, 585 bp, Oryza sativa
  unsure (1)..(585): unsure at all n locations
  Clone ID: PAT_MRT4530_69363C.1
atatcccgttccagtagtaccaaagccatttccctcattttctcggaatggaaagttaaatggtgaaatgtcagagatccaccagaanattcccatactacggatttacagtcaagtttggagacattcctagaggggtttgcagagttttcagatgtttcactgaagaagtatatggaactcgcggttgacattaacaaagcaaaggaacaatatgagaatgtgaagttaaagaacatgggaaagtgaataagttcgacaaagtcagaccaaaggaactaatttctggaaggaagaatgggctacaataactcaaagccatttagaagtggataagtggatcacccatgtgtatattagcctgtttaaacaataggtataaattactgttacttttctttttgggttcagtttgcaagataggtttaggtgggagaggaatacttgtagatttctggccaatgccatgccgcagaagtgtaaatctgaggtttaggtaaaattaaactgatggtgggggatacaatatgtgtatttatcctgggtatatcattatatgagttttcccttttcttctctttttga

SEQ ID NO: 68619 - DNA, 2097 bp, Oryza sativa
  Clone ID: PAT_MRT4530_69364C.1
atgccgatagagatgccgcggcggctccccttcgccgtcgacacgtggggcccctcctcccgccgccgccgccaccgcttcctcacccacgcgcaccgggaccacctcgtcgccgccggcggcgccgccgactccggggaatgccccggcgccgtctacgcgacgcggctcaccctcgacctcgccctccgccattttccccggcttgagcggggggagttcgtggagatggaggtggggaagacggtggtggtggacgaccccgccggggccttctccgtcacggcgtacgacgccaatcactgccctggggcggttatgttcttgttcgagggtcaattcggtagcattctgcacacgggggactgtcggctgacgccagattgtgtacataatttgccactgaagtacatagcaaagaaagggaaagaaaacatttgccgtttagactttgtgttcctggactgcacattttccaaatgcttcctcaagctaccaagcaaggagtcagctattcagcaggttatagcttgcatatggaagcatcctcatgctccatttgtctatcttgcatgtgatcttcttggtcacgaagagatcctaattgaggtgtcaaggacatttggatcaaagatttatgttgacaagagaaggaactcggactgttttcgagctctatctctcatagccccagaaatcatcactgaagatccatcttgtcgattccagattcttggattccaaaacttgtatgacaaagcatgtacaaagattgaagaggcaagggctagccttcagcctgaacctctatttatccgtccctcaacacagtggtatgcgcactgtgctcaaagccagaaacctagcctaacagaagctgtgctggatggttgtggggtctggcacatttgtttctccatccattcctctcgtgatgagttagaacaggccttggaacttctccagcctcaatgggtaatttcaacaacaccaccatgctttgccatggaattgagctatgtaaagaaaaaatgtttcaagacctgcttaactgctgatgatccactgtggaagatattcaagaatcctctccgaaagtcagtgtcctccccttctacattgctggattccgacacgcacacaaatgaagatcactcgatttctgtcgatgatgatcatgatcattcagcctctcctagtggtgaagaatgtacagactttgatatctgcacgcttgaactgaagttcatgccatcccctccagttcaggaaccagatattacactgtttggaagagcaagatttggctctgaagaaattgacataatgagagaagaactgtgcaatcagcgcattgctgttgaagaagccagggcatattcaacagcatatttgatctgtgatggtagcagtgaagttgaaacatgtccaaattcacggactgattttgtcatagtgcaagcatcgaagtcccaacagagttattcaggatatgaagatgaggacccgtcttgtcagtgtgctgcatccccaaggcaattagaaagtcgctcaatcctgtctttacctattggtgagtgcagtttgtcaccggtggttgataaccctaaaaagtctgaagttgttatagagtcagaatcaacaaatcatgctgaaagttcaaacctttgcatggtcagaaggggttattcaggatctgaagatgattgtcagcgtgctgcatccccaaggcaattagaaaaactctcaatccggtcttcacctattggtgagtgcagtttgtcaccggtggctgataaacctgaaaagtctgaagttgttatagagtcagaatcaacaaatcttgctgaaagttcaaacctttgcatggtcagaggagaagaaacaacagattgtgaaaggggtaccttgtgcgttactggatcatcgaaatgcttgaatgcaagtttgaagaggctgtacagatcaaggaatgtccctgtcccacgacctctcccgtcccttgttggacttttggaatccactaaacgcatgaaaacgcaacctggcagtgatggtagttcgttgaattcatggcacaccttacctagcagataa

SEQ ID NO: 68620 - DNA, 430 bp, Oryza sativa
  Clone ID: PAT_MRT4530_69365C.1
gttgtccccaaccaagcagcggcgagccagcgagggcgacacccactgcccaaaccgcggcgctcctcgccgccgccgcggggctgttgctcctcgcgtccggggcgctgccggtcgcgcggtgcgaccccggcggcgacggcgacggtaccgcgtacgacgagctcgggtgccgacggctcccgctggacttgctgccggcgaacgtgcgcgggcacacgctggactccgggtcgggggacttcgcggaggaccccggctcgcgatgccgggttgcgcttccccgggcgagcctcgttggatacccgagggctcgccttaccggtcgagttgcggacccggggctcttttggcgtgcaccgtgacgtccgggacgtgtttgtgccccttgacgacctcctcggcggcgcgcacgacgggagagagccca

SEQ ID NO: 68621 - DNA, 469 bp, Oryza sativa
  unsure (1)..(469): unsure at all n locations
  Clone ID: PAT_MRT4530_69366C.1
tcggttttgtgctcatttggnacccctgttcctcttgattccttgcattattggccatcccttgtctcgagagagcttatctgccaaagattcttgggctagaaggtttcttggttcattgcacggttgagtagtagtgcccaagaggatttgcagcagaggcacaaagtttgatgggtggctgatagtttggtggattggatagagaggagaaggagcaagagggagggcaggagagatggggaattgcatggacaccacggcgcgggtggatcacagcatgaacaatggcgcctaagtgagcttcctactcctcggacggaaggtgaaattttgtcatcttcaaatttgaaggccttctcgttcaatgatctaaggaatgcgacaaagaacttccgaccggacagttcttcttggtgaaggaggatttggacatgtctacaaaggttggtttgttgaacacacgctt

SEQ ID NO: 68622 - DNA, 2537 bp, Oryza sativa
  Clone ID: PAT_MRT4530_69367C.1
tttaaatcatgttttctctagtccttgggaggcagaggtaatttttcgtgttgatcagactggattaacactatgaggtacatgtaactctcaatacctcccaaggaccaaaggaagactctgatagaacatagaaatagggttcattgaaatatcataagcttctattgttgtaaaaagggagtcggcccgggctgacgatccatggagaccagccagcatatttgcttccgccgcctttcaccgtctcttctcgctcccttccctccctcccatctccctgcggtctccgagccatccacctcgctgcctctgccgccttcgtgtcgtgcgtccctctcctcctcctccgcgtgcagccacggcgtggcaggcagctaccacagcagccgctattagctcaaatcctcgctggttgacctcagctgcgacgactcttcaggatgagcgagtagagtttctgtggcctcgtttctttcttgcggattgggggtgggttcgtttgtttctttccttccttcccgcgtgtgaggcagtgagccagtgacacgcgggaatcgatcgaaaggccggatctttttttagcttgggaggaggaggaggaggaggagctgcgcgtgtgcaggttcgagttgactttcggggttggttggttggttctttgcttcgtttgtcgctctgcggatttattttttccggattggtggtcgaggtcgatcgaaacctcgcaaagattggacctttgccgcttgcctgctcggttcttatctcgtctggctgcctcctcccatcaaggaaggagaaattttatcatcgtcaaatttaaaggcattcacactgagtgaactcaaaaatgcaacaaagaactttaagcccgacagtctccttggggaaggaggatttggctatgtctataaaggttggatcgatgagcaaactctcgctcctgcatggccggcgggtggtttggtggtgggccgtcagaggagaaggagcaagagggagggcaggagagatggggaattgcatggacaccacggcgcgggtgggatcacagcatgaacaatggcgcctacccatcaaaagtgaccagcaaaacaagtttatcatctgtcccttccacgcttaagagcaattcaagttgctcgactttgactctgccatctatgaaggacagaagtgagcttcctactcctcggacggaaggtgaaattttgtcatcttcaaatttgaaggccttctcgttcaatgatctaaggaatgcgacaaagaacttccgaccggacagtcttcttggtgaaggaggatttggacatgtctacaaaggttggattgatgaacacacgcttgctccttcaaaaccaggaagtggtatggttgttgccgtcaagaagcttaaaccagaaggtttccaaggacacaaggaatggctgacagaggttaactaccttggccaacttcaccacaaaaatcttgttaagctgattggctattgctctgatggcgacaaccgacttctggtgtatgagttcatgccaaagggaagtttggagaatcatctgttcagaagaggtgctgatcctttgtcatgggcaataaggctcaaggtagctataggtgctgctaggggcttgtcgtttttgcatgacgctgagaaccaagttatatatcgtgatttcaaggcatcaaacattctccttgactcggaatttaattccaagctctcagattttggtttagcaaaagcaggtcctactggggataagacccatgtttccacacaggtcatgggtactcacggatatgcagctccggagtacattgcgacaggtcgcctctctgcaaaggcagatgtctacagctttggtgtggtgttgcttgagttgctcacaggaagacgggccctggacaaatcgaaaccaggcatagagcagaacctagttgactgggccaaaccccacttgggcgacaagcgtaggctgtaccgtgtcatggatacaaagctgggaggccaatatccgaagaaaggcgcccacgccattgcgaacatcgccttgcaatgcatctgcaatgatgccaagatgcgcccgcggatgtctgaggtcttggaagagctggagcagctgcaggactccaaatataatatggcttcaccacaggttgacatccggagaacctcaaacgccgtccctaagtcgccgatgagaatccagccatcgccacggcgctcacttggagcagcagcatccccattgccaggatataggactgccaaagtgcactagaagtgcaacatagaagaggtcttttatctgcacggctgtatagtttgttatgtaagcagtgtttttttgtcctttttttctcgaggaactttctgtttctagtgatatttcttttatctgtgtgacacgagaatctgacgtccattataatgtaaattgtttgccgagataatgggtgccgaattctggtgcctgggttgctgctatgatactccctttgcatttcttctcctagttctctctctccaaaaa

SEQ ID NO: 68623 - DNA, 264 bp, Oryza sativa
  Clone ID: PAT_MRT4530_69368C.1
ggaaaataaaagttgccggcaaatttttttaccctccaattcaaacccgagataccctactatgcagtttacacatgggttttcaaaaaaaaaaaaaaaaaaaaaccggtttccccattttgttcgaaaaaatgtacggagggctactggctagtggctacaaatcaaatgcaaggcaagaatcccattcgatcagcaaagggcacacgggtgggggttctcctccatgctcagggccctcgggtagtaaaactggggcggccc

SEQ ID NO: 68624 - DNA, 324 bp, Oryza sativa
  Clone ID: PAT_MRT4530_69369C.1
tcgcgatctataaccggacgcgtgggtttttttttttttttcttttttttcggggtttttttttttttttttttgcccttcttctcccatttttttttttttttttttttttttttttttttaaaaacccgtcggcgccctcctgtgcccccccttgtttctgaccaacatttttaacaacgacgtgattaacctgaaccaatttctttaagtggagattttttaaattttgagaaaaaaatggacatgggttttccttgcgtaaaattgttcttttttacggatttgaactcagatgcttacaattgagtgcacaaactgcat

SEQ ID NO: 68625 - DNA, 960 bp, Oryza sativa
  Clone ID: PAT_MRT4530_6936C.1
atggaggaacgggactggtcgtctctcccgtccgacgtgctcgccgtgatcctggagcgcctgcggtggtcgagccacccgagcttcgcgttgacgtgccggcactggcgctccgccgtgtcgcccttctacccggcgtggatcaccccgctcctgctcagcaccgcccacgtcggcgtcacgaatattcggtactatagcccctattaccacaagaacttcgaggtcggcggcaaagacggcgaccacgcgggcgccaagatttgctgtgccgctgggcgacacctcacgcttgattcgccgagcgcggtactcgatgtcgagcttgtgactgggaacattaataaggttccacatatatataggggtaattttgattttgtcatctacgacgacagggcgcatagaatattcggtatcgacgcggttctcccactcaagattggctatgccaactggaacagcgatgatggcgtgtgggaggactggacattgatggagctcggcatcaatgggccacgactactaccgtcacctgtcaccaacccggttatccattgcggcttgatataccttctaaacgatcaaggagggttggtaatgtatgacccatgcaagcatgatgaagggtttgagtttcttgacaaccccacgagcttcggtttcaaacactacaatagctacctggttgagtctgatcagcatgagctgatggccgtcctccttggccgacgcgggacactgaaccatgtcatcaagcttaacgaaaagaagatggagtgggagaaggtggagagtttgcaaggacggacgttgttcaccggcacactcacatcgatggtgaagaagaccaagtttaagtggatggaggatagagtgttcctcccggtgttctacaaatggcctgacaccatccatgctgaccttatttctcgtgatgatgaattagcctttgtataa

SEQ ID NO: 68626 - DNA, 393 bp, Oryza sativa
  Clone ID: PAT_MRT4530_69370C.1
atgtctaatgagaagagcgagagcgcaagcgagtatgcgacaaggcgtagggatagcgggagatcaagcggcaggggcaagagcagcccacagcggcgcacacaaagcgacgagcccatgcgggtgagcgcgacagccgacgaggctgcagcccacagcgccgtagccagcagtggtgttcttgaccggcaagatcgtgcgggcgagcgtggcgaccgacgatgccatggcagcgaggacggttcgatggacgaagtcagtcgctgcctgcagcagcgagagcgagcggctatggtggcgtacttggattttggctcgcatctggcacatgatgtgagcgggatctggtggtggcagaatgcaggagggcggcggctggaagcctggaactag

SEQ ID NO: 68627 - DNA, 375 bp, Oryza sativa
  Clone ID: PAT_MRT4530_69371C.1
gtgcggctcagtggtggattgggggtgggaaacgacggacggggtgcggcgtggagcggcagcgctgtgggaggcagcagcacggccagaggtggcctgtctcgccggcggggagcagctggagacggaggaaagagcccgtggctcggcctcacggtgggaatggctttgcgggggtcgaaggggaggatggagtggatgccgaggtggagcttggcatggcggtggcagcgcagcgcgacggcggccctagcggagggaagtagcgactggagaactccggcgacggcggagggagtgagcgatgcgggggaatggtttctaggcgcggggagctcgaggaaaggggaaaagggacgaggtgaggtgcggtga

SEQ ID NO: 68628 - DNA, 321 bp, Oryza sativa
  Clone ID: PAT_MRT4530_69372C.1
atggctagatctagccggaggaacacccatgttgggagagctgagggtgggagaggaggaagagtacacgagttgaaaaggagaagaacaggaaggcttcctaggagccaagaggtatgcggtggcggcgtctcgacgactgacgatggtggcgtgtggcgagagagagggacggagcgagagagaagaatcggggaattgaagaaggggcagttacaacgaggaggaggagttgtggacttgtggtgcgagaagtggagaaacgtgtggagcgtccgatttttgtggtggtatcgaacgaccgagttaaagcgtttttga

SEQ ID NO: 68629 - DNA, 423 bp, Oryza sativa
  Clone ID: PAT_MRT4530_69373C.1
atggctcctcaacttgagccacttgtaatagagtcgggagcaggaaaattggtactacatctcatggatgcttttcatgctgaagttcttgcactcagagctggagttgaagcagctgctaggagaggcatgatgagagttcagtttgaaactgattccctgacgctggtgcaaggcttgaaaagtagtaatggatacagacttgctgcaactggtggtctctgtcttgatatattgcagccctgtgttatttcttttaatgttttcagctttcactattgtcctcgcaactgtaacagagtagctcatgctctagctgcactcggatgtaataactcccagacaactgatgtcagatgggatggttcccctccagatgtggaggatttggttgccggcgatttagccgagcctgtggtctaa

SEQ ID NO: 68630 - DNA, 325 bp, Oryza sativa
  Clone ID: PAT_MRT4530_69374C.1
atgttcctgcaggtcatccgctagaaccttgcgaagacgtgcgcggagctctttttcgcgagcacatgagaccagggaagcactacaccaagatcgacgggtgtttctgcaggaaggtcaagatcgactgccaagaagagaccaccaacaggaccaacatggcttgactgctgaggtaagactgcaccaagagtggtgatgagttgaccagcctcaatggatgcgaagcccggatgaacgagggacatagcgagagctatagcagcactggtgcgagcaagaaggatgatgagaacttcccattgcctgagaaggtgataaagac

SEQ ID NO: 68631 - DNA, 408 bp, Oryza sativa
  Clone ID: PAT_MRT4530_69375C.1
aggcctcaaactgatcgcttaaaaagtacgaattacccctcgaactatcgcggtcgtatgaattaccccctgaaccacaaaaccggacatttttcatcccgaactatacaaaccggacgaattactcccctcgacccaatctgcggtggttttggtctacgtgacgtacatgtggcagtccacctcactcttctcactcttcctctctctctcatggtcgggaagggcgggggcagcggctgagggcagtggcctcggcgcggaggcggcggcggcgagcggtggccggcgcggctggcggcgagcggcggtgtgcgggggccgagcaccgacaacgatgacgaggaggaggagggatccgaggcgagcttctccggcgaggaggagaaggggcggtgacgatagagg

SEQ ID NO: 68632 - DNA, 2821 bp, Oryza sativa
  unsure (1)..(2821): unsure at all n locations
  Clone ID: PAT_MRT4530_69376C.1
ttttttttttttttttttttttttttttttttttttttttttttgnggatatacatattacaaatcaattcacaagtcaacatcaatgaaaagacaaaatcaagtcagggaacaacaagatttcctttccaaaaaaatgctaagagattacacgatcctttttacattctcaaaacctataaaagactcaacatatgatttaaattaacatgtatgatcattcgtgtagaacattaagaaaaaggaaaaaaaaacatagctaatgatctaaccagtctcatccaaaaggccctgccctcatgtcagcaactggctttggcatcacaggacccatgcacgaaaagagcgatgctttctttggcttactaccaaataggaaagttcgaagaggtactccagctttcattgacagagatctgaagctatgttgtgttcggtttcttcttcctatagacagttcaatattctctctcagcttcaaaagagccctcccaacctccacttggaggctcctcacatggtccatcccagtttgtagctctttggtaaccttgctgttctcttgcttcatactgctcacctctccttggaactttgcagcctggaaaggagtgaaatgagcttcatcagtttggcccaatgctgtgatctttgatatctcctcttctatgctgcacagcaatgagaatctactctctagttccccttgtagcagcacattcttttccaaccatacctgcagatcagtgctcaagccacgcaacttcttttcaagcacagctgactcttgttttctagctgactgacaagaaggcacagcatctgagccttcctgcgctttggcatctgtaagtttatccatctcagcttttgctttatcaaatgatttctggaacttctgcatataatgatatgatgtactgaatctcaaccagaagtccaggttttcctccagtattctgctaatttctgctctgaatttatcttccaatgatgggtcatgtggttcttcatgttcacgtatcttcatgtattcttctgtctcagcaatatttttgttttcaagactaggagaggcatttgcttcagatgattcttcagactccacaaaacgctgaggtagagaattgttgagcttggtttgtaaagagctcaacattcgtctgagagagcgaatctcatcatcttttgttgcactggaactctttaactcattcatctctgacattgcctcgagatgatattctcgatttctcttctcaatttctaaaagctgtttctgcgtatctttgtagttacgaaggatggatgcataatcttttaagagaattttatccttatcctctagcccattcaaatctagttgttgccaccctaaagtttcatctggctcttccttatgtgccttgctagagtcatctaatgcatccaataatccttcatcttttgatttgcatgcaattccggaatcatcttgtgatgaatttactatttcatcagtggaatgtgcatccaacttctttacaaaatcattaagactgtcatctacttcagttagttgctggtgaatatttccattctcactgtgcacagactttccaatccgctgaattgtctgcagaacctcctcaacttgcttcaatctttcagacaacttgctagaatcctcaatcaaagctgccttctcgtcctctaagctatccaggcgcttctgtagttcgtctgcctcatttttcattctattgatttgagcattttgtgaagaagctgcaatttctaggctgatgaccttatccacaatttcatcaacctgtccggctagatgcaccgcggacgcctctgaggacgactcaaacttttgtttgaccttttgtgataattcctgcagctcgagcttgcagtctttcataattagatcactatcctctatagatgaaggtatagagctgaactctatgtcttggtgattaggtaggtccttctgatcatcaggatacccacactcgctcttgaaaatcgttatcttcttctttgcatctatgactctttgaatctccatggttgtctcttcatatgatctcttttgctcacaatgcaagctagccaatttatcctcgcaagaaataagggcttgtgcagccattaaagctcgagcttcattgtcttcaataactgcgctggtgctaaaagtctcctgcaagctccatacctcctcttgcatctctgccgcctgtctttcaatgctcaaatacttgttcagcgaagattcatatgagctcttgaagaattccttttcagtctgcaagacaaggattttcttctgtagcctctcaatctcttcttgtgccttgtctttactcatcttagagctgatctttttatgtgtttgcgtcctctttggagctgcgctggttcctctgttgatattaatccctgtgataccttttgggaaaccatcaccattgtcatcttgcagagagagctggacttgctccggaaatgcagttgctatggtgtggttggacttgtgaagctcccctgatacccggtcatatctatcagcaagcgcctggtaagatctatatgtctactctacatggtttataagatcgggcctgctcttgaagtataggtctgccttccttgcaaatgtatcagcctctatatctatgagtttgatcatggccttcacccttatctccatctcttggacgttgttgtcgagccatttggactgggtggtgcggatgtggctcgcccaccaccacgagtaggcgttgctcgccgcgcgccgcagcatcgcgggcagccggacgcgtgg

SEQ ID NO: 68633 - DNA, 611 bp, Oryza sativa
  Clone ID: PAT_MRT4530_69377C.1
taacccagatctagggcttgtccgcgcggttgggacggctctggcgatcaatccgcgcgctccccgctgccatccccgttctctcttcccgaccgcctcgccttcctctccctctctacatgcccacaccgcgtggtcctgggcggcggcgtcgaccttgacttcctcctcgcggtggtgttcctcactatccgtgctcacttgtcgcgcttccggtgcaggaggatcacgaacggcaaagggaaccccgcggacgagtaacccctgctcgcaaagccgccgctgctgtctgaggttgcgatgccccgtcgagggaggttgcggaatggggtcgggctagtgaagtccgtgtgttttatggccgcgtcgctcgttctgctcatgctcgtggacctcatggcttgccacgaagtgtgttcttcgcagcacagttcatggcgtaccttgccattgtggggttgtcatgacagagaaggccgtggcggtgacggcgcgttctcactcggtgcacctccgtctcttctgggttgggtccatgacactggcaaaatgcttttcgccaaaatcagcgtaacaagaagcttcattcaattttaattttcctgaaaacg

SEQ ID NO: 68634 - DNA, 669 bp, Oryza sativa
  Clone ID: PAT_MRT4530_69378C.1
atggggaggaagaacaaggcggcggagggtgcgaggtgccggcggcaccggcagcgtggcggcggcggcggcggcggcggcgcgggggtctgcgcgccctgcctgcgggagcgcctgtcccacctgatgtccgcctcggcgtcggcgtcggcgtcgctgccgtccgtcgtgcgcggcgaggaggaggaggcgtcgtcctgctgctcgtcgtcgagtgaggcgtccagcgacgcttcgtcgtcggccgcgtcagggtccagcagcccgtgggcggcgcggttccaccgggagatggtggcggccggcggccgcggcggcgggaggctgtcgcttctgatgaggaacgagcgggtgttgctggacagcgacgaggtggcgagcgtggtgaggcggatgcgggagaggcggcggcaggcgaggagcttctgggcgaagctgctgcacgcgacggtgggcggaggcggaggcaagaaggaggggtgctcgatggcgcactccaagacgctggaccaggagaggagcaccacggcggcggccaagtggatccttttctgaggccgtgcaaatgcagatgcatgcatgcagcgaagcgatgatgtcaagatgatgagatcgtcagcgtgcgtcgctgtaaattcttcttggctttctagtttggttggaacttgg

SEQ ID NO: 68635 - DNA, 300 bp, Oryza sativa
  unsure (1)..(300): unsure at all n locations
  Clone ID: PAT_MRT4530_69379C.1
cgcgtccgccagaggccagagcaatggttctgtagaatctgtagcttgtgccgtgtatncctgaaaattttactagctgttgtaaggcaaattngcagtgttgattgagtgtaanttgtaagttgtaagctccganttgggntgaggntttgttgcattcgactgttgtaattcctgtaacatgggacttgantggtcgttntaaacctgtaatggntatcgtgttgattaaaaaaaaaaaaaaaaaaaaaaaaaaaaaaaaaaaaaaaaaaaaaaaaaaaaaaaaaaaaaaaaaaaaaa

SEQ ID NO: 68636 - DNA, 500 bp, Oryza sativa
  Clone ID: PAT_MRT4530_6937C.1
gggaaaaaatcacaattagtgcacatccattgccttaagatctggttacagcacacgaatacaacatagcatcccaaaagccataattacacttaaaaacacctcacatcatgagcaacactgaacatgacaaaaagatcagctgtaccactaggaggaccagcaaaatatacacaagaacggaaagctgtatcaagaactgttgagtgttgaaaggcttcaaaacaagaccattcacacttccttgagacacaaattactgaaagcttggatagagcaaaaaggctatatggggaaaactttgattcacatgtcggtgtacatcatattgatcttttaaacatgcaagtccatgtacagcgcatataataatcctgcaaccatgtatagattttagttgtcccgattcgcaaaactgaacttgtttttgtggatctttgctggacactggtgagttcaccaaatgctctctcgagtaaaagcagaagcttggatcagat

SEQ ID NO: 68637 - DNA, 325 bp, Oryza sativa
  Clone ID: PAT_MRT4530_69380C.1
cccacgcgtccggctacacctacgcccacgcgtgcggccgtctccttactgtcaccatgcgtcaccacagctcaagcgttatccagcgtcgagccgatcgtgctagcgtgcgagcgtaccagatgtcggccggccgtgaggaagacaagaatccgtcaccaggagagggatcgtgaagaccatatgaacttcaaggtcaagggagaggataccaacgaggtatttttaaccatcaagagatctacccaactgtagaagctgatgaacacgtattgtgaccgggaaggttggcatagcaatgctattggattcctatggggcggta

SEQ ID NO: 68638 - DNA, 1731 bp, Oryza sativa
  Clone ID: PAT_MRT4530_69381C.1
atgactccgcacctatgtagagtatctagaagatctccatttccacgcgccggacatgttctcagcggtttccgggctggagttgtccatggacaaggaccaacacaaatcatcataggggtgtacaacatcatccattggaacccccatgtgtatcaagccctttcaccatactacatgtataaatttctccgaaagactcaaacaggaggttggatgtcgcttggtggaatccttttatgcgtaaccggctctgaagctatgtatgcagaccttggacatttcacacagaactcaataaagatggctttcacactattggtttacccagcgcttgtactggcctatatgggtcaagctgcttacatttcacgccatcacaattttgaggatggcagtcatattggattctacgtatcagtgccagaaaaaatcagatggcctgttctggggattgcaatactggcatctgtagttggcagccaagcaattatcactgggactttctcaattatcaagcagtgttcgtccttaaactgcttccctagggtgaagattgtgcatacatcctctacagtgcatggtcagatatacataccagagatcaattggatattaatgatactatgcctttctgtaactataggcttcagagacacaaagcacttgacaaacgcacaagggcttgcagttataactgttatgctcgtcacgacatgtttgatgtcactggttattcttctttgctggaacaagagcattgtctatgctctcagcttccttcttttctttggtgcaatcgaagtaatctacttcgcggcttcacttgtgaagtttcacgaaggggcttgggtacctgtcactctttccttcattttcatgatggtgatgtgtgtgtggcactatggaactaaaaagaagtatgagtttgatgtgcaaaacaaggtctccataagttggctcttgaatattggcccttccttgggaattgttcgtgtacgaggaattggtctgatacacacagagcttatgtcagggattccagccattttctcccactttgtgaccaacttgcctgcgtttcatcaggttctggtgtttctatgcattaaatcagtatccgtaccacacgttcagcctgaggagcgatttttggttggccgcattggcccaaaaaagtataggatatacagagtgattgtccggtatggttaccgtgatgtacagaaggatgatgtagagtttgagaaggatctagtcagcagtattgcagagttcatccgctgtgcggactctaaccaaaacagttttatggacggcgcaagccattcatgtgaggggctatctttcatcagtaaaggccttccacttgaggaggaggaaggtgagtttgatggatcagattcaacaggatcatctgctcataaggagataaatccaaacacgacggcaccgaagccaaagagggtgaggtttgcacttccaaaggacacaaagatagaccgggaggtgcgcggcgagctgcaggagctgatggaggcaagggaggcaggcatgtccttcataacgggccgctcccatatgaaggcgaaaagcgggtctggtctgataaagcagattgtgataaacttcggctatgagttcttgagaaggaacagccggggccctgcgtttgcagtaaacttacctcatgtttcaactgtagaggttggaatgatctgcctagtatga

SEQ ID NO: 68639 - DNA, 446 bp, Oryza sativa
  Clone ID: PAT_MRT4530_69382C.1
actcccctgttgcggccgtcgcgcgtgcgcggtgcgccggacaggaggctagggggtaccggcaccaggcaggcaggcaagtacgcccgtgggacgagcagggagctagccgggtaggaagggcgcgcggcgatggagtcggggccgcgagcgccagtccggcgacgcaggagttcgacgacggcgccaacacggggctggcgggtcgcgtgctggcgcagtgcgcggcgggccgcgcgccggcggactgcgtgcagtgcctgcaggactcggcgcgagcgatgccgagatgctgctggaacacacgagggctgggagagagcgtcgccgtcgtgctgagcgacgactgcgtgctccagttcaccatgcacctggcctatctccggcggcaagccttggtggagctctccgtccgtttgtcctcggtgccgttggagcagcagcgc

SEQ ID NO: 68640 - DNA, 237 bp, Oryza sativa
  Clone ID: PAT_MRT4530_69383C.1
atggcggctggtgcgaccggcccgggacgacggtgggcggctcagcgacggccagggaaggcgcggaggagctccggcaatctcccgtcggcagtcacagcgcgtggcgacgcggaggcgagcggcgcggcatggccgccatggccaagctccggggcgggcgtggcgacggcgacgtgcgcacatgcgatggccgagcggtggcttggcgaggacggttttttcggcttagggtag

SEQ ID NO: 68641 - DNA, 907 bp, Oryza sativa
  unsure (1)..(907): unsure at all n locations
  Clone ID: PAT_MRT4530_69384C.1
taactgtagcatttccttttgttgctgtgccacgccacccaacccaacccaaccgacgagcgcgagcaccaaatccaatccatagccagattgaattccccgacgagaaatccgccgcacccgccgcgttgcgccggcggcgatggatcgcggcggccgcccggggtggctgccgtcgctggggttcgcgttcctgagcttcaactgcggcatggcgatctaccgctccagcagcgacccctccgcggtggccttcgtcgtcgtcgcctacctcgcgctcatcgcgctcttccgctgcctccacctgctggagcgcgcccccgcgggggggcaggcccgggcgtcgatgaaggcggcggtgtgggggctctccacgctcctcacgctcatgttctcctacaaggtcgccgccatcatgccgctctggggcgccgcgggcgtctgggtgatggggctcggcaccatcgtcgccggcttctacgccttcttcgtgcaccgcgaggccccctagatgatgatggcgatggcgaacttctgtgagatcgatgggccccctttgcgatgctcccgcagtcccgccagccgccgctgcctcctgtccactgccctcctgtacggtcttcccgttgtctcccctggcctttccctccgtgtttttttgggcttgacaggttggtgattgccacttcgttttactgcaccggancacatttggtatgatgcaaaaaaaaaaaaaaaaaatcnaaggggggccngtaccaattcccctataatgattntattacaattccctggccgtcttttnaaacntcntnatgggaaaacctgcgttaccaacttnatcccttgcanaaatcccctttcccactggnttaataacaaaaagcccncgatcncctttccaacc

SEQ ID NO: 68642 - DNA, 174 bp, Oryza sativa
  Clone ID: PAT_MRT4530_69385C.1
atgggggtaggggaagaggacgagactcctgggctatccggcccgacatattcggcgctaaggaataagttcaccggagaaaaagtggatggagttcttcccagcatcgtctccaaagctcatagcattgagcaggggctatgggccatcgccgatgtctccgtcaacctgtag

SEQ ID NO: 68643 - DNA, 436 bp, Oryza sativa
  Clone ID: PAT_MRT4530_69386C.1
ggaggcaaattatttctttgatggccatatgagtccagaccaggcagggtgccccttcaatctaaaaaatggaaaccaatcctacactagacctttgggtggatctgaaccaaaaactcccagacaaaaatcctaccatttaagggggtttgacccatttaaacaaagcccccctgaaaaaattcccccctgtttaaccggaaagggttccctttgccggctcagaaacaggggcctggggctttggcttctcgacaccaatggcctgtgtggaaaggcccattccagccaccgggggggcattttggggcgcgcatttggcccccttagctgggtcaaaaacccccgcctaaataaagttctaaaccttgtcgtttcatcggaatgaacccggctttccctttggcgttcttgtattttttaaataccattttcc

SEQ ID NO: 68644 - DNA, 2112 bp, Oryza sativa
  unsure (1)..(2112): unsure at all n locations
  Clone ID: PAT_MRT4530_69387C.1
atgtggcggcgggcggcgacggcggcgctggccctgggcgcgggcgccggcggggccgccatcgcctactccgacgacccctccgccaccctcaagatctgcgcgcacctgcccccgcgcctcctccgcgacgccgccaccgccgccaccatcgccttcgactaccagtactccctctggggcctcgacccgggcaccccggcctgggtcagcgccaagcacgacgcccacctccgctccgcaaaccgcctccaggagctctgcttccgcaacggcggcatctacatcaagctcggccagcacatcgcccagctggagtatgttgtgccggaggagtacgtgcagacgatgagggcgtcgatgctgaagagatgcccggtgtcatcatacgagcaagtttgccgagtgtttgggaaagatatgggagaatcaccggaaactgtttttgtagaattcgatcctgttccacttgcaagtgcttctctcgctcaagttcatgcggcaagaacacatgatgggcaaaaagttgcagtgaaggttcaacatgatcacttgacagatacttctgttatagatattgccaccgtgggtttgatagtgaacactcttcattatattttcccttcgtttgactacaggtggttagtcgatgaaatccgtgaaagtgcacctaaggaattagatttcttgaatgaagctaaaaacagtgaaaaatgcgtgcaaaactttagaagattgtctccgcacattgcagggagtatttatgtccccaaggtctattggactctaagctcatctagaattctcacaatggagtttatggatgccaaggaggtaactgatgttaaaggaattaaagaacttgggattcgcccagtcgatgtttcaaatctagtcagtaaagcattttctgagatgattttcaagcatggttttgttcattgcgaccctcatgctgcaaacatgatgatccgacccttgccacaagatagcaaaaaaacttttggatggagaaggccacaattgattcttcttgatcatggtctttacaaagaacttgattatgccactaggataagctatgcttctctttggaaggcacttgtttttgctgatgaaaaatcaattaaagagaacagtgtcaaactaggtgctggggaggatcttcatgcactttttgctggtgttctcacaatgaggccatggaaaagtgtgattgacccggctgtcgatcatcttggtctagatggcagtagtaatgatcgttctgaacttcagatgtatgcttccttatattttccacaaatctcagagcttctaaggagactgccaagggtcatcttgttgatgcttaaaacaaatgattgtttacgttccgtcaatcatgccctgcttaagaagttattggcctgttaatttgtaatcattggacgaatctcttctgaggctgttttggaagctaaaaggatgagtagtagatccattctgaataaactaatgatatggctagaggaaattttactggaagctcgattctttagtttgaagttgctgttgtgttttatgcagcttaagaaggttattggcctgttaagcagcagatcagcatacccactattcttggactagtgtaaaaatattagaagctgtccattttaggttttcctttttgaggagagaaaagtggcatttaggttgaaaaatccttttcctctttttggtatacaccattctttttggttaacccttttgctaccaggcttttcattttgattagccacttcccaacagaagatgatgccactatgacatcgtatgtttattctaatagatggatagaattgtagaaaatcccatcactgcacagtgtatatatataactctagttccatggatcccagccaaatgttggcccgnatgaatatgctgtgcccattgcgttataccagatgtaagagtaataaaattgctactggaaagagagtcactctgacatttgccacgagccaaatttcgtttggtccaatttgtgttcatcgtgaaaaaaaaaaaaaaaaaaaaaaaaaaaaaaaaaaagggggggggcctgcagcccgggggatccactagttc

SEQ ID NO: 68645 - DNA, 2029 bp, Oryza sativa
  Clone ID: PAT_MRT4530_69388C.1
gacgatgaaagaaccaacatagacatataaaattctacatcctttaaattttctactctaattaaatcttctctctctaccctaatacactctccaatgaaaatcatgtgcatgcacacctaaagaacaaacacaactgacaacactgagtccactgaccaataggtgtagtatgactaatgctattagagctactccatatacaaaagggagaacaaaaccaaagcaattaacaaaaaaacgaaagcgattaggggaagggaacaacattgatctcaggctcgagcccctctctgtcgacggcgacgacgactgcatcatccaagcacgtgggctccattagcaggcacgagaaaaggagagagcagctgctgcataaacaagatttggcccatctcttctcatcacagcttccactggcgcccagaaagattcccggtctccaatgcatgcaatggcaacggatgcacctagcaaaagcttcttccaaagtctcctccccatcactccctctgtgttttgtttgcggtggtgggcttcagaagggtaggctcttggaggtggaggaggcggtgagggccttgaggttctccgacgacggcggcgcgaggtcctgcgggaggcgggcgcggcgcacgatgcggcgcatgttgctctggaggctctgctgcaccagctgccgcacggcgcgcttctcgttgctcatgccggcctcgtcggcctcttcttggcgcgcgccgccgccgccgccgcgctcctgcggggccgacattgtcgcgacgatgccggcggcgtcggcaacctgcttgcccttgtcggcccggaggatctcgaggatcctcgacgcgcgcttctgcgccagcgcggtgccgacgagggtgagctcgaggagcgccgaggtggcgccggcctccgccatggcggcgcggtcggcgtagctccggtgggcgaggaccatgaggatgtacgccgccttctcctggcacccgggctcgtcggaccagttgagcacgtcgacgaaggccgggaccgcgtcgggggcgcggctcaccgcgcggcggccctcggggcaggcggccacgaggttgcaaagcgcggcgagcgcgcggtccgccgccgcgggcgcgtcgcccacggcggcgacaagcgacggcgccagccccgcggacagcaggtgcggcgcgttcgccggcccgatggaaaggttcaggaccgcgcgcagggcttcttgtcgcgcgtggaagggggcggcgcccgacgcgccgatgatgggcttgttcgcgtcgagcgcgctgaggcagaggaagttggcgacgagcgcctccgtcaagacgccggacgcgccctccgcgatgcggagcatcttgtgcacggcgccggcctgcacgatcgccgccttgttcgtgtcgttgccgatccccaaattgagcaacgcgtacagcgcggcggcgaccatctcctcgccgccgccgccgccgtcgctctcgtcgagcatcgcgacgagcggcgggatggcgccgagcatcgcgagcatctccctcgcgccggcgtcgtccttcgccttcctccgcacaaccgtggcggcctcgacgcggcacatgtcgccgccgccgccgatgccggcattgtccccgtcgcaggcctgaagcgctccgaccacaaccttcagcttctccagcgcctccaccttcttgacggccgcgtcggcatcatccgcctcgtcgccgcactccgacggctccgcccggagcagctccgccagccggtcggacctcggcctcggcctcggctgcggcgaccggtacccgttcttgctccggcaagaaccccctccagcgccgccgccgccgccgccgccgccgccgcacgtcaggacctcaagaagcttcctccgcagcgcggcggccgagaagatcggccacagccggaacccgccgccgacgtcggcgtgcgcgcacctcgccaccatcgtgcaccttccgaagcaagtcacattggccggttggcgaggcgagcagcgagctctgct

SEQ ID NO: 68646 - DNA, 279 bp, Oryza sativa
  Clone ID: PAT_MRT4530_69389C.1
atggcttgggcaccggaaaaaccagagttggtgcggccggtcgcgacgccatgccaaccagccggcgggcgcgtggaccccacatcgacggcgaggcagggcggcatagggggtgggcgcgagcagcgtctgagtggcgagcggcgacagcaaggcgagcacgacggtggaggaggcgaggcagggcggtgcaggggcgcgggcgcgagcggcgtccgggtggcgagcggcgtctgggtggcgagcggcggaggaggcgagcgcggcggccgacgatga

SEQ ID NO: 68647 - DNA, 1254 bp, Oryza sativa
  Clone ID: PAT_MRT4530_6938C.1
atggctacagtttctgctgcaaattctgcttctaatatttctgctagcatcaattcaattcctgtgcttactggtgcaaactttaaagaatggaaagagaatgttttaatcgttcttggggttatggatctggaccttgcacttcggaaggaacaacctattctctcagacaaaagtactaaagatgaaaatatggaacatgagagatgggatcgttcaaatcgcatgagtcttatgatcatgaagcgttctataccggaagcttttcgagatagtacatctgaggaggtcactacagctaaggttttccttgaaacacttcagaagagatttgctagaaatgagaaggctgaaactagtactcttttagcaaagctcatctcaatgaggtataagggaaaaggaaacatgagggagtacatcatggagatgtctcatcttgcttcaaaattaaaggcacttaagttagacttatccgaggatttgctcatgcacttaattttgatatcacttcctacacaatttaaccagtttaaggtgagctataattgtcagaaggataaatggacagttaataagctcatctctcactgtgtgcaagaggaagaaaggttaaagcaagatagaatagaaagtgctcatttatctatgacctcaaataacaagaaaagaaagagcaaagaagctgtggatgtccaacctcctttgaagaaaagggaaaataactgtggcgaggagccctgttatttttgcaagaaggaaggacatatgaagaaaaactgcaccaaatatcacgcttggcgtgctaagaaaggggaaacagacgaatacaaggaaattaagtgcccaaagagctacagatgtcttagaactgattcatacagatatttgtgggccattccctacggcttcctggaatggtcaacgatattttatcacgttcatagacgatttctcaagatatggcaactcacaaccatggctacagtttctggcgatggctggtggaagaagcaactggaggcgggactcgggatgggagctcgccggttgacgatggagatgtttggaggctcgactcgaccccgtctcttcagcggttgggaatggcggcgacggctggtggcggaggcggggcttgggatgagagcggcggctggggcgaggctagcagcgggggcagtggccggtggcggaggccagggaggagaggcggtaattcgtactttttctattctaataatacgagagtag

SEQ ID NO: 68648 - DNA, 249 bp, Oryza sativa
  Clone ID: PAT_MRT4530_69390C.1
atggaggagaaggtccagcaggcctcgtctacacctttgctctcttccagcgtcagcaagtcgaggaggggcggtggcagtggggtcaagttcgaaaatgcactagatgcggaaacagccacgcccacggcccacgcacaggcgcacaaccacctccccgggagaggcgaggcgaggccacatgcccggccgcgcgccgccttccgcgccgacggcaacatcgcgcgcgccggccggctgggcggctga

SEQ ID NO: 68649 - DNA, 871 bp, Oryza sativa
  Clone ID: PAT_MRT4530_69391C.1
caaccacataaagctattgtcggtgccaatgcctttgcacatgaaagtggaattcatcaggatgggatgcttaaatacaaaggaacttatgaaataatttctcctgatgatattggtctaacacgtgcaaacgagtttggtattgttcttgggaaactcagtggaaggcatgctgtgagatctaaactagtggagcttggatatgaaatcactgacaaggaatttgaggatttctttaaacgctacaaagaggttgcagagaagaaaaagcgtgtaactgatgaagacattgaggcgctgttgtctgatgagatatttcagcccagggtttttgggtcccttgctgatgtacaggcaacttgtggaacacttggtctgtctacagcaactgtcaaactgataggtccggatggagaggagaagattgcatgtgcagttggaacaggtccagttgatgcagcttacaaggctgttgatgatataatacagatcccaactgttcttcgagaatatagcatgacatcggtcacagaaggcattgatgcaattgcaactactagagtggttgtcactggagatgttagcgactctaaacatgctttgactggtcactccttcagccgggcattcagtgggagtggtgccgcactggatattgttgtttccagtgtgcgagcttacctgagtgccctgaacaagatgtccagttttgttggggctatcaaggctagtagtgaagtatctgaaagccaaagagttcaaaccacagaatgagtcttgacttccttttgggttttcatatccgatggttctatgtttcacattcccagcaaggagtatgtgcttgttgaaacatggtttttccgtccag

SEQ ID NO: 68650 - DNA, 1346 bp, Oryza sativa
  Clone ID: PAT_MRT4530_69392C.1
ttttttttttttttttttttttttttttttttttttttttttagtgaaaataaaaggctgagatcaatagatattgagtttgacaaccagataacctttttacatttgttttcaactcttctgatggagcatgaacaacacagttacttacagctggtactttctatttctttcgtgaatggattacaagtgatacctaaccacacggtggggtacgccatgtttgcaaactagatttggacagctggtggatacacccatcacaggtatacacatccttttagccatcagcaggtaactgctctaactgctcttcctcaagctccattttagataggtagcattctctctcaaaaagcaggaattcctgcaactgctgttggctgaacaaatgcattattccagattccgatgaagcaaccaactcaatgagcttatcacaatgatctagagaatcacctgcttcagatagagcgatggatgcctgcatagatcgtagaatagtttctggcaggcagcatctacgacaaagcccacgaattatgtatgcagcagtgctttctactgaaccatgaccatcagaataccaagcatcaagccgtgatatttcaattgaaactccaggttgaaatcgattgagttcacctttgaacccagcagccataattgcagcaagaagacctccatcattggcttcatgaagccccaaaccatcaccttctactgctaggcagaggagagaaacttgaatacagcaaggatctttagatgaaacattcacatccaccttcaattgacgatgcaacacttccgtttcactaacagtagagtacaatgcacttgtcaaagctgtgcatgatgttgcatctggcagcatgcactccccagaaggtaggcagagtattgcagttgcatgtaactcaagaaaaacatgttctgagggctcgattggactactctcgacagcatttaaccatggaatatcttccctgtataataataagaatgctaactccagcgtttctttcgctgcagcaacagcttgactcttttcttctgctgaaagcatttcaggagaaatagacgcattctccatctcaaatttaagccaactccggtaagtagcatccagggagtaatattcatgccaatcttcaaactcccgtaaattatcagatacctcaggatcttcgagtgaaattaaattttctttttgtttcaatggttcagccaggatggcaagcaacttgtgtggtcctactggtagctcaggaactctcctcattgatatcagggaaaactctctgaatagtgtgttgctgtgcatcagtgcccgtatcagaagc

SEQ ID NO: 68651 - DNA, 1863 bp, Oryza sativa
  Clone ID: PAT_MRT4530_69393C.1
atggcgcagccgcggcgcccggagtacgtccccaaccgcatcgacgaccccaactacgtccgcatcttcgacaccaccctccgcgacggggagcagtcccccggggccaccatgaccagcgccgagaagctcgtcgtcgcgcgccagctcgcccgcctcggcgtcgacatcatcgaggccgggttcccggcctcctcccccgacgacctcgacgccgtgcgctccatcgccatcgaggtcgggaacacgcccgtcggggaggacggccacgtgccggtcatctgtggcctctcgagatgcaataagcgagacattgatgctgcctgggaggccgtgcggcacgcgcggcggccgcgcatccacaccttcattgccaccagcgagatccatatgcagcacaagctaaggaagacgcccgagcaggtggtggccattgccaaggaaatggtggcctacgcccgcagcctaggctgccctgatgtcgagttcagccctgaagacgctggcaggtcaaacagagagtttctatatcatattctagaggaagtcataaaagctggagcaacaacactcaatatcccagacactgttggatacactcttccttatgaatttgggaagctaattgctgatataaaagcaaacactccaggaattgaaaatgctattatttctactcattgccagaatgaccttggtctagcaaccgccaatacattagcgggcgctcatgcaggagcacggcaattagaggtgactatcaacggtattggtgaaagggctggaaatgcttctttggaagaggttgtgatggcaattaaatgtcgccgagagctcttaggaggtctgtatactggaatcaatacccaacatatcactatgtcaagcaaaatggtacaagagcacagtggacttcatgtacaaccacataaagctattgtcggtgccaatgcctttgcacatgaaagtggaattcatcaggatgggatgcttaaatacaaaggaacttatgaaataatttctcctgatgatattggtctaacacgtgcaaacgagtttggtattgttcttgggaaactcaggttaaaccttgctcacttgacattgaggaaacctctacctggcctgcttggatatgaaatcactgacaaggaatttgaggatttctttaaacgctacaaagaggttgcagagaagaaaaagcgtgtaactgatgaagacattgaggcgctgttgtctgatgagatatttcagcccaaggttttttggtcccttgctgatgtacaggcaacttgtggaacacttggtctgtctacagcaactgtcaaactgataggtccggatggagaggagaagattgcatgtgcagttggaacaggtccagttgatgcagcttacaaggctgttgatgatataatacaggtgacagttgcaatattcttgatggttcttgcactaatataccagtttaatgggatggaatatggatgtgttttttcaatatatgagaatgaaacatcctgcatctgtaaaactggagaaattttgaaacatctaagaataatttgcaattcacagatcccaactgttcttcgagaatatagcatgacatcggtcacagaaggcattgatgcaattgcaactactagagtggttgtcactggagatgttagcgactctaaacatgctttgactggtcactccttcagccgggcattcagtgggagtggtgccgcactggatattgttgtttccagtgtgcgagcttacctgagtgccctgaacaagatgtccagttttgttggggctatcaaggctagtagtgaagtatctgaaagccaaagagttcaaaccacagaatga

SEQ ID NO: 68652 - DNA, 441 bp, Oryza sativa
  Clone ID: PAT_MRT4530_69394C.1
agcactagctgggccggccctgaagcggaagcagctcgaagacagcgaagagacagagcagcgagcagcacgaagagagagggggagagcagcggcggagatagagctagctcagcctcgccgacgagcaacggcgctccgagacgacgagcagaagaggacacggcggcggcgatggcagcagaagggcgccccgtaaaacgggttaaagaaatcccaccctccaaccgccgacgccgcaagaagaggcggcggcggcgtcgtcgtcaccgtcttcggaggagcgtagtagtaggggcaccccaaatccggcgtccgcgcgcagccgccgccgccaccgccgtcatccacctccgtcttctcttcgtcgtcctcctccccctgagccaccgaagcgagcgccgccggtgcgggcttgaaggacgcaagagacgagttcgt

SEQ ID NO: 68653 - DNA, 1084 bp, Oryza sativa
  Clone ID: PAT_MRT4530_69395C.1
gatcaaagtttacatggccagggtttaagaaggatgtttagaacaatgtgaagttttccaacaagcaaaagctgaacatggcatggctccagatttgttacgaccactccatgttcccctacaagtttgggaaatacctaagtcaggcagattttatattattctagtggtcattgataaattcacaaagtttgcctagttgattcccctatctcatcctttcacaacacttactgtagcccaagctttcatgtccaatatttatgagactttgacatgccaactatttaaattggcatatgtgaaattgaacatgagctcatcctatcatccctagacagatgggcaatcagaaatgctaaatcaatgcgttgaagcatttttgtggtgtgatgttcatgcttgcctgactaaatgatcacaatagctctctcaagctcaacattgatacaacactgatttccatagagcccttggaaaataaccatatgaaattttatttgccagaaagcacacttattttggtgaagtgaatctggggcagagcataatgcctgatgtgcaggtttggctacaggaatactcacagttgaatgtggttctacgtcatcaactgatcaaggcacaacaatggtggttcatcaagccaacaaacacagaactgagaggtggttagaattgggggatctagtatacctgaaacaccaactcttgatacaccaaccctatatgcagataactgtagcatgacgttcctatcataaactcagtttcaaatactatggcccctacagagtgttagattgggtgagagctgtggcatacaaattggagctcctagtgtgtagtcagatacatctggttgttcatttgtggttgctaaaaaaggcattgaaggttggaacgcaagtaattactgatctccctaaattatgttgatactacagctgaagtcgtgcctgaagaagtgcttcaacaccaactgatcaagagtggtagggcaatgattcctcatgtcttgatacaatggaccagactgccaatggagttggcaacctgggaaaacctgtgccagctatgacaa

SEQ ID NO: 68654 - DNA, 297 bp, Oryza sativa
  Clone ID: PAT_MRT4530_69396C.1
aaaaaaaggggcccaagaaaaatgttgaaattttttaccaaaacctggaaaccggggtccgggggtatatacgggtttacaaatgaaaattacacaggtttgggttttcaaattgggggaaggggataataatccgggccggacagggaaaagtcaaatgggggggggaaaaaaagcaaaaaaagaaacagggaactgggttgggcgctcaaaactttaaaattttaattacaaaggttcggggggaaaaaggaaaaattttgggaaaaatttttggggcgggggggggttaaaaag

SEQ ID NO: 68655 - DNA, 424 bp, Oryza sativa
  Clone ID: PAT_MRT4530_69397C.1
agaaaaccaaagtataagcaaagcgatgataatatatactctgtacagaggataatgaaattgtaatgcaaagattaaaactaaaaagtaaagcatctgggtgacttttttttttgagtagtttccagtagtctgaagtgaaattcaaactttttttggcaggaaattagcctgttaccatcatcaccaaaagacgaccatagagtgagtgttgaccagagcacaaacctttaagcgcgtaaccaatggtgagaaagagtcaactgaaatgcctaagttattgaggtgaattttccatagcaattgcattgaactcatcatcatccttcaaataattcatccaacaactcctttaactgctcgggcgtggacttgggcagttgattgtgcattccccttgctgctcgctcctctagatacatgc

SEQ ID NO: 68656 - DNA, 184 bp, Oryza sativa
  Clone ID: PAT_MRT4530_69398C.1
gccgcatataaaaccttctccagaaaatgtgaagatcgataagatgaacaatggaggggacaaggagacacttggagaaggacttagagtcatggaatatcatcgaatacgtccaagtcaaggtggaggcctaaaccaagtcgacctcgagtgcaactcggagtccaggactagtctgcactaa

SEQ ID NO: 68657 - DNA, 389 bp, Oryza sativa
  Clone ID: PAT_MRT4530_69399C.1
tattggaaaatgctaacatgatagtttgagaaggaaaaattgatgtgggcatcactctttcggatacacacaacaatcctccaactgtcattcaaggaccgataacaagagctcgtgcgcgacaattgaatttagaggtgagctcgagacacttggagaaagacttggagccatgtaggatcatcgaggatgtccaagtcaaggttgaggcccaaaccaagtcgacctcgggtgcaattcggagtttaggaccagtctgtactaaaatggacgcccaggtcgcatacgtgctcggattggggcgttctttatatggatggaaatctaataagataacgtttctaatggttttggtcccacgtccaaattccttccaagtcaatgagaat

SEQ ID NO: 68658 - DNA, 616 bp, Oryza sativa
  Clone ID: PAT_MRT4530_6939C.1
aacagttacacaggactaagcttaacaggcatgtatacctgcacacaagctttgcgaaaatactcaactgcccttaatattttaacacccccactcaaatgcaaatgaggatacacattgaattggaaagggagaaattaatatcagaacacaagggtgaccattgtgattatctgcaaaccattgccgacctccagcaaagactgccaattgtacggctgagggaagaagaaaagacctatcgtatttcttaatgaagaagacctaggcgacttcaaaaactagtctttagagctaagaacattaaagcctttacataccggtgtaagggtccaatatgaatgccaaacctggattattatggagggcccttgacaaactgttcttcggaacctcacttatttgatgaccattacgattgggaacatgaatgaccttcaaaaatcggtcttgggtccttcattcattgacggtgatatgaactccgatggggagctggtcatatgatgaagggcacctctgtggagcttgtcatgatgaaatgacaatgaacagatggactggcacaactttgacaaaagaagggaatgcaacggaatttgctggattaatggat

SEQ ID NO: 68659 - DNA, 1005 bp, Oryza sativa
  Clone ID: PAT_MRT4530_693C.1
atgccgccgccgccgccgccggccaccgtcctcgtgaccaacggcaccgtctccccgcaggcaccaccctccgcggcctccttcctcgactccaccccgggcgcctacaccaccgcccgcgccaccgccgccggtggcctcctctggtggccgcgccacctcctccgcctcgccgactccacccgcctcctcgcccgcttccaccctcatctcctcggcctcgccgcgccgccgtcccgcaagccgttcgaggactcgctgagagggatcgagcctctcgtcaaccgctccgtgcgggtcgccctcgacgagatgcccggcgaggacatggcgctcacggcgttgctcagggcctctccggccgaggaggagtcggagctggaggtgtgcgtgcacctgggggcctacgtgcctccggtcttcggagaggccggggcgaggcttgccgtcgctgggaggggaagggacgccgctgccgccaagtacgcgccatgggccaggatgaggaagagcatggagaagatgaggcctcctggggtgacggagctcttgttgacaaacgatggagaccatattcttgaaggcagcatcactaacttcttcgttgtctgccgcagggaggaggagcatccattgaataagcctttatctgttgaaatgacagctaatgagtttgaagtgcaaacagctccactgggtgatggaattctccctggtattatgcgtcagatagtgatagaggtatgccatgatattggaatcccattccgggaggtttcaccatcgtggtccaaacacaaactttgggaagaggcctttgttacaagtagcttaaggcttatccagcatgtggagactgttcaagctcctatattgtgggagaacatagaatcaaaaacctgggccgatgtatcttgggaagtaaaacaatttcagagggaaatatcgaagagagcaatacaagaggaatatgacataaaagatctcttgtgttgcataacatga

SEQ ID NO: 68660 - DNA, 531 bp, Oryza sativa
  Clone ID: PAT_MRT4530_69400C.1
ttttgatcattcatattgctgttccgagaaacagcggagggtattttggccatgtccttgcaaagcttgaacctagcattgacatgaaagataatcttggattaacaccgcttcagctatctattcttcttggcaaatatgctgcgatgcaaaaattgatagactttggggctgacattcatatccattctctttatggaggaccaattcacgcagcagtagcactggatgatgaaattgctcttgaagctcttatgagaaagaccaatacacgtcttttgctatgatgtgttttcacataatatgaatctagtgttttcacataatgtgtctttattaataggtggatgatattattgatggaggtataacacccttagcatgtgcggcatacaatggttcagttacaagcatgaaaacgttgttgcaggctggagctaatgttcagatttcaaagccaatcggcaaagctatagtagctgacctcacttcatctgaatctatggttcaaattctacttgatctggtgct

SEQ ID NO: 68661 - DNA, 1587 bp, Oryza sativa
  Clone ID: PAT_MRT4530_69401C.1
atggcgacgacggagcggcggcggcggtgcggccaacgtcagcgcagggacaagcacaagaggggctcgtcgatgaaggtggccggggccggggacggagcagcggcggtgatgacgaccgtcgaggacgtccccgaccacctcctcgaggtcatcctcctgcggctggactcctccgtctccctcctccgcgcggcggccgcgtgcacgcggtggcgccgcgtcgtcgcggacgccggcttcctccgctccttccgctcgctccatggggcgcgccacgtcgccgggcggtaccacaccgtcgaccctagcttcgggtggccaccgtcggcaggtggcagctctgtcgtctttgtgccgtcgtcgccgccggtgatcggcgtggcaagccgcttcttctcccttgacttcctcccggactacgacgacggcaactcatggtcatgggagcttgtggacagtcgaggcggcctcctcctcttctccaagaagagaaaatccaccggtaggtgggctgcaatggcggacgcccgcggcttcagcttccctgacctcgtcgtctgcgagccgctgacacggcgataccaggggattgcctctgcggtatacttcagaagacacccatgcctcggagtcttcctgctcgacggcgacgcggccgacgccgacgacacaggaggcggcggcatcggcatgtccaatttcagagttgtcgccgctctccacgaccgcacatggcagcacgacggtgccgtgccattggcgtgcgtgttcacctccggaagcgacggcgggtggcgcgtactgcagagcgccgccgccgccgccgtcgacctgccggaacgattcgatttcatcaacttcgcaggccgtgccggcggctgtctctactggggaatcgacggcgaagacggcgccatgctcgtcctcgacgtggccaccatgcgattctcgatcgacatgttcccggagaccatccgggcgtcgtacgacaaatggaccttccgggtcatcgacggcggctacgctctccgcgtcgtccgcgtgatgcgcaacgacctcaaggtgttcgcgcagctcgccggcagcggcgagtgggtggtggagaggctagtgagcctgccggaggccacacgcgagctgccggggcgcagggagacgtacttccggcaagaagccaagatcgtcgcggcgaacgcggcgtacgtcctcctgacgccgcaggagaagaagaggtggctcttctccgtggagctcgagacggggaaggtggagcgccgccatgagaggaacaggggacatgaacaaaaacatatcaacacacaagttagaatagacaccaatacacaccgccaaacatcaacatcagagataagcatagacaaacccaatatggcacctatggatgccgataagagggatctagtcgctgatctcgacgagttcgtactcaaggaggaagactaccatatcgtcgactacatgttggttatctatgccgccaaatattatacttgtgtgatccagatgaacaaagagcaacaccggcttcgaccaacgggagtaggactattacctgtcagataa

SEQ ID NO: 68662 - DNA, 1692 bp, Oryza sativa
  Clone ID: PAT_MRT4530_69402C.1
ggatccccgggctgcaggaattcggcacgagccaccccctaccctgagaagagctaggttttttaccctcctcactctccctcgcgtcggcggccgcgcgcaactttccctgaagccccggatccactcaacccccctccccctccgcgccagatcgttgtgtttatgagctcgaaggagaagcccactcttggaggccagcggattaagacccgcaaacggaatattgctgctcctttggaccctgcatcattctctgatgcaattgtccagatttatctggataatgctggagacctggaacttgttgccaaaagtatcgagtcctcggatctcaacttctcacgttacggtgacaccttttttgaggttgtgttcattggagggcgcactcagcctggcacaataaaacctgaggaagaaggagagcgtcacccctattctgtacttgattgtgcagcgcagcgtgaagcaattttgccttctgttctctacattcagaaaacattgcgcaggaggcctttcttgataaagaatcttgaaaatgttatgcgcaaattccttcagtcactggagttcttcgaagaaaatgagaggaagaaacttgccattttcacagcacttgccttttctcagaagttatcaggtcttccacctgaaactgtcttccagccactgctcaaggataatcttgtttccaaagggatagtgctttcgttcattactgagtttttcaaagaatatctgaaggagaacactttagatgatcttattgcacttttgaagaaaggcaaaatggaggacaatttgctggaatttttcccatcggcaaaaagaacctccgaggctttatctgaacatttcactaaagaaggtctgacaagtcttgttgagtacaatgaaaagaagatgtttgaggttaaacttaaggagataaagttaacactgacaacaatgatcaatgaagaggctgaaatatctgaagtcacagaagctgtcaagcaacaggtgaaagatgctaaatttcctgatatagaggttgttcgcatgctatgggatgtgctgatggaggctgttcagtggtctgggaagaaccagcaacaaaattctaattcagcacttcggcaggtgaaagcatgggctggccttttgaatgcattctgcacaagtggcaggcttgaactcgaactcatatacaaagttcagacacagtgctatgaggatgctaagctgatgaagctatttcctgaaataatcagaacgctgtatgaccaagatgtcctagctgaagataccatcctcctttggttccgcaagggttcaaacccaaagggcaggcaatctttcgtcaaagcactggaaccttttgttaaatggctggaggaggccgaggaggaggaataaatggtgctactggaggctgtgcgaatgtattgtttgaatatttccttatatcccaagtttccagctaaagttatgtatcttttgctcccttgttactgggccgaccattttatgatcacatgctgatcctaatagtctactgaatgttaaaatcccatgcaagaagttattccaggatttgctaaattattggttgttacaacttaaaaaaaaaaaaaaaaaaaaatttctcaaaaaaaaaaaaaaaaaatattttaaattcttatgatttaaaaaaaaaaaaaaaaa

SEQ ID NO: 68663 - DNA, 203 bp, Oryza sativa
  unsure (1)..(203): unsure at all n locations
  Clone ID: PAT_MRT4530_69403C.1
aaggggggtttgnagctcaatctgaattcacctcttctcaaacttctccccttccccagtgttcaggttataacaaaaataaaagaaaagaaaaaagaaaagcaaaaatttcgagctcaacaaggatggtaactggacaagcaatacgaaccggtatctcataccaataggttgcagtaagaggttagtaagtagtagataca

SEQ ID NO: 68664 - DNA, 398 bp, Oryza sativa
  Clone ID: PAT_MRT4530_69404C.1
ctaaaagagggtcaactagttttttacatcggttacatcatagtgcaggtacacattcaacaaggcatgcagggctcgatccacagtcacatcccaatacaccgccaccatttacagcctacttcgatcccaaaagagagaggaaggtagagtcgactaacagtctgttcatatttctagattggcaggcattgttaacactgcaacacctgaagaactcctgatatgggggtgaaggcctgcaagatggtggcgagctcgaagttgggaggatgaacgaagaggttgtcgatggtatcgtggccggactactctgtctggaaccaagctcccatgtcattgagcatggagagccacccgttctagatctcctgggtgcgcagctgcttggattgctt

SEQ ID NO: 68665 - DNA, 473 bp, Oryza sativa
  Clone ID: PAT_MRT4530_69405C.1
tttgtttttttttttttttttgttttttttttttttttttttttttttttttttttttttttttttttttaaacaaaaacatcgaccgggggggaacgaacttttttcctttttttttgggggccatcccagaaattcccgccccaatagcaggggggaaaaagggggccaaaaagaataggggggtttttataacagcggcaccctcagcagttaaagggggggggatgggaaaaaaaaaagggttgattggatttaggggggggggtcgggcccggcaacaatcttggggatctcgccggggatcttggcctggccctggcggttgtaaaccatgggggggttcttccggggctcgatggggttgccgggggccctcctcatgggccccatcctgggggggagctctttggcgggcgactcccggagcgcgcgggggaactggcttttgagggaaaacgggaggagcccct

SEQ ID NO: 68666 - DNA, 1092 bp, Oryza sativa
  Clone ID: PAT_MRT4530_69406C.1
atggcagggcagggtgttgcctgcgcgctagccgtcgcattgttcatcgggtccctcgtgtccatccctacagtttacacgccaggaattaaaccatgcagaacacatactaacacatttgatttgcatggctgcatgcgcgcattgatcgtcgatcaacattcaacagcagtgcgatccatcggcgtgtgcaacggcatattggggaacaacctgccgtcgccggccgacgtggtgaagctctaccagtccaacggcatcgccgcgatgcgtatctactccccgcacgccgccaccctgcgtgcgctcgccggcaccgacatcgccgtcatcgtcgacgagccggccatcgaccaattcctcactctatccgccgcatcagactgggttcagagcaacatcaagccgtaccagggcgtcaacatcaggtacatcgccgtcgggaacgaggtgtccggcgacgccacgcggagcatcctcccggccatggagaacctcaccaaggcgctgtccgcggccggcttcggcaagatcaaggtgtccacggccgtcaagatggacgtgctcggcacctcgtcgccgccctccggcggcgagttcagcgacgccgccgtcatggcccccatcgcgaagttcttggcgagcaacggctcgccgctgctggccaacgtctacccctacttcgcctacaagggcggcgacgtcgacctcaacttcgccctcttccagccgaccacggcgacggtggccgacgacggacggacatacagcaacatgttcgccgcgatggtggacgccatgtactcggcgttggagaaggccggggcgccgggggtggccgtcgtcgtgtccgagagcgggtggccgtcggccggcggctccggcgcgagcgcggacaacgcgcggaggtacaaccagggactgatcgaccacgttggcatgggcacgcccaagagggcaggcgccatggaggcgtacatattcgccatgttcaacgagaaccagaaggacggggacgagacggagaggcactatgggttgttcaaccccgacaagtcgccggcgtaccctatcaagttcagaattagttga

SEQ ID NO: 68667 - DNA, 724 bp, Oryza sativa
  unsure (1)..(724): unsure at all n locations
  Clone ID: PAT_MRT4530_69407C.1
ctataggncgaattgggtaccggccccccctcgaggtcgacccacgcgtccgcccacgcgtcatcacagagagaggtcgagagatggcgacaaataggatggcagtggcgatcatggtgcagttgctggcaacggcggcggcggcggcggcgaagtcgtcggagccggcccttaccggcagcagtatctccgccgccgacgacgacctggcgtcgaaggtggggataaggaggctccttcaggacggcggcgactgcatccctaactacaatgtttgctgcagcaactgcggctggccgttcgaacggaccaattgctgcgacccggacaactacgtgtgccagtactggccggaaatggatccagcacatggccaggactggtgcattcctcgcaattactggagtacttcctccccataatgtttgttcagttttatatcttcacaatttgatttttttttgaagagagagtaagccttaaggccatggaaaacggtccgttctgttaacgtgatcgcccgaatcaaaactccatttttagctaataattggccgtatcccatttaatcgtctgaataatcattcacatgttatacttgatgggtagtatttgggaccttttttagtattatttttttctacatattttgttttacttattcaatataatataacaaaacatgtcgctgtttggtgaataaaaaaaaaaaaaaaaaaaaaaa

SEQ ID NO: 68668 - DNA, 252 bp, Oryza sativa
  Clone ID: PAT_MRT4530_69408C.1
atgccattgcaaagtgggaaaatgatgtgcaagcagctgttggcaggtactgttgccctcatgctattcccatggcagtcatcacttgccatctctggcaacgccatccagcagggggaccagatcaggccagaaggcacaaaggagaacccactggccagatcaagcataggaacattcagtcgaatccagaggggcagggaaggaggagaacagccaaatcctgaggaagtgggtgcactggagccatga

SEQ ID NO: 68669 - DNA, 463 bp, Oryza sativa
  unsure (1)..(463): unsure at all n locations
  Clone ID: PAT_MRT4530_69409C.1
ccgccccgaaactcgtgggggggcgggggggtgggcgccggaatcagccgccgcccttccgcgcgcgcaagtccgcaagcttagtagggtnngggggggttagcnnncttagcgtgagaaggnncctttgnnccgccggctttgcgaatggcggnagggagnnctggtgtcttggaacaacggnncgactccgggaacctgnnntctctgggggggggggtggtgncgtnnnntganntggtgcttcattcnnggcgtgctttccgcttactttttcgtgcgcccaagncttgatgncnngctccnnccgtcgnngcgtcgccccttcnnccccgnacccnncaagctnncgtcaagggaaggggcannnagtggtaactnntagggcgaaggaaaacctgaggnatnncaattcgtcatgtaccatcncnncggccaatggcgcgtgtcaaatcaatcgcaa

SEQ ID NO: 68670 - DNA, 976 bp, Oryza sativa
  Clone ID: PAT_MRT4530_6940C.1
cgttatcggcctgaaagcacttaatgggcatgctgaactgggtcttgacataggcaacaaactcgacgagatgctggtgaacatcggatgcagctggactggggtgaccaaggcgacgatgccataaggtggatgactcggcaaggaagctgtggaccgtgatggcagggacggcagtaggtagagtgtagaggtccccgcgactattgcagcgaagaatcacgcgccgggttcgaaggttgagaataccgtcagtggaggacatatgcgatgtagctcccatgtcaagcacccatggacttggactgttcacagacagttgattgagagcagcaatgagaccagcttgatcccagttgggctggacttgcagcattggaggccatcctggagttggtggagacacataggaaccggcaaaagctgtgtgagcttgaggatacaggccaaggtagccagcactgttgccaggattgctgggagggcgccatgtagaggcctgcacagcccatggattgaagcagaaccacgggccggcagggcgaaaaccggcctgctgctgttggtaggagttgccacccgaatttccgtaaccgccgctgccggagttgttttggcgaccattgctgccaccgccaccattgttccggccaccattgcgacgctggttacgcttgccattgttggaaccaccaccaccaccgcgaggttgggacgaaattgtagtggcgcaggtaccggaggagcaagagaaagcagaggaaacagctgccaccatggctgtttcagtctgaaccttgtgctctttggcaaggcgaagctctttcagcaacagagtattgcgcgcagaggcgaaggaaggcagaacgggagcaccggcaatgttgtcggcagtgttggagaagcaggagttaaggccgctcagcaggttcaggacgagctaggactcggtgacggggtggccgacgtcatgtag

SEQ ID NO: 68671 - DNA, 209 bp, Oryza sativa
  Clone ID: PAT_MRT4530_69410C.1
ggggggcaaaaaactgcaacccaaaataaatcccaagcctcatttacaacaaaaggagcaaattgaaatttccacatttttcacctaggagctttccacattgcaaacccaaaaaaaaaaaaagtaaaccttttttgctttatgtaattgaatctgggcaaaaaatttaaacaattttttcaattccagttaacctaatcctcgggcca

SEQ ID NO: 68672 - DNA, 237 bp, Oryza sativa
  Clone ID: PAT_MRT4530_69411C.1
atggcgatcgatggcggtcaggtcaccggtgaatgctggcaaatggcacagccgctcactgagaagggttaccgtgccctggtggaggttactgtgatttttctattaccgtacctcggtaggaccggtaaccgcggcggtaatgtaaaccctgagcgccagccgcgcacgcagtgcacacatattattgagaccccgaccgaccgcgactggaagcttcgcgtgtgggtgtggtag

SEQ ID NO: 68673 - DNA, 870 bp, Oryza sativa
  Clone ID: PAT_MRT4530_69412C.1
acgcacgcgcgcgtcgggcgcgtttccacccatctccacactttcctcatcccacggcgcccatgcccaccacctgttcgaccacctgacacgcctgccatgcctcccgccctcacctccaaccccccctccttccgccccctctccacccctctaacccgccgccgtgccgccacaaccttcctctgccgtgtcggccctggcaagccttccaaggacaccggcgcggatgacgagccgaagaagaggtcgttcttcgccgatttcggtaagctctcggatggaaggtcgctgataccggccttcccgccggccgcggctgggtctctgttcgccggcgggagggggaggaaggacccgcagacagtgttcgtcgcgggcgccacggggcaggcgggagttcgcatcgcgcagacgctgctgcggcaggggttcgccgtgcgcgccggggtgccggacctcgcgtccgcccaggagctggcgcggctcgcctccgcgtaccggctcatttcccccaccgaggcgcgccgactcaacgcggtggagtccgatttcgaggaccccgaggcgatcgccaagtccatcggccctgcaactaaggtggtggttacagtcggcgcagctgagaaggggcccgacggcggtgtggtcaccaccgacgaggcgctccgagttgtgcaggctgctgaccttgccggcgtgacacacgttgtggtggtgtacgacctgggggccggtgaccccagtggtgagtcgacgtacaatgtgctcgacgggttcacgttcttcttctcgaacctcttctcccgtgtgcagtccttgccactaaacgagttcttggcttaggtggtggagaccgacgtcaggtac

SEQ ID NO: 68674 - DNA, 379 bp, Oryza sativa
  Clone ID: PAT_MRT4530_69413C.1
ctagtacctgcttagtacagaaacgaactataaaacaatagcgagacatacctaaactaccgacacacctcctgacattgactcaaataatcaacacaaggacaggctaatttccctaaaattaaaacactgttccaggagctatataatatgcaatggtgatcgtacaaattatataatgattccttggaccagcggttgacagtagcgtcatcatatgatatatagtaggatacataataacagctctctagaatcagcagcagatgcatgcacgtggtagctcataacaaaaggtagtgataaaaactactagtactctgatttaatagctagaagaaagaataaacgaacgagcaaattaaacatatggcgccca

SEQ ID NO: 68675 - DNA, 210 bp, Oryza sativa
  Clone ID: PAT_MRT4530_69414C.1
gcaaacagcatacaaatctacctgttttgtacatgtacatcagtaacaaaccaaaattatgtaaccaaaagaacaaacaaaccttaaccatgccacgaaagcaacagaccaaaaagcaaaacaaacatgtacaccatcaaccgtgttagcgaagatgccaaaatatgcctgagctagcttttcttcaaatttctagagggaagcacaatg

SEQ ID NO: 68676 - DNA, 2736 bp, Oryza sativa
  Clone ID: PAT_MRT4530_69415C.1
atgctcaccttcgtcaagggcctcgacaatgaggcgtccgcctacatcgtcgacgaggcacgaggccgtcacaggtgcgtgtggaccagctcctgctccgtcgacatgatcggcacccgcaacggcctcatctgcgtcctggacggcgacacgggcgccgtcacggtggccaacccagcgacgcgcgtcgcagtccatgccgccgccgccgtgacaggcgtggctcttgccgtgctccccagacgcgtgcacgtcccgtgctacttcaacaagtctggcacgttcgatgccatgtacccattgtggattcgtcccaccgcaaaacttgtcacgacctttacaacacaggcacacattcgacacaagctgtctaggaaaataaaagcaatcaattcaaggcttgaggacatcattgaaaacaaacataaatacaagatcgaggaggcaaacacgaagacaactaggacatggaaagcttctacatcaatatcttacacccataaaaaattggaatatttgcatgagtcagacgtgccgattcatgtggaagagcgaaaaaaactagagaaagtccttcttactacacctgaagatctacatggcaaagaacacaatccagtcataatctctgtgtttggaaaaagtggtgttggcaagacaactcttgtgagaaaaatatttaaagaaataggtaagcagaagcagttcgacattccagccatggagtgttttgcaccttacctatccgctaccaatatcttacaacaaattgttcaacaactaacaacagacaaccaggattgccctagaaataaggtcctcgaaattttagaaaagaaattaaaagaaaaaaagtatttgttggtgatagatggtgaagttagtggtactgaactgaacaacattttgagtacactcccgattggtcatgcgggtagtagaatagttcatatcacagaaagtaagccagaggagccacctagcaactatcatcatgtcaccattgagttgaaaacaattgacaaaagtatatccaagaagatgttcctacaccatatggaagtacaaaatctagaccttgaaaaccatgaggatgatattatttttcagattactggagggttaccacttgcaattgctcttttatcaggtcttatgaaaaccaaggagtccactggtgagtggcagaaggtattcgaatatcttaagtccaagcaatcaaaacaaattgatgatatgctctcaatttgctttgatgatcttccacatgagctgaaatgttgcttcctgtatcttgctgcatttccagccaatgttaccattgaggcacgcaacctagtgtctatgtgggtagctgagggatttctaaggtcaaaagttggcaagtcaatggaggacattggctacttctacttgaaagagttgtcggctaggaatctagtcagtctggttcaaatggacgatgattccaatgttagcaatatgactgttaccatccaaaacaaagtccatgaatttttgcagtttgaagcacatgaggcaagcttcctagaggtacatagtggtgatgatatccccacattgacaagtgctcgtcgtctctccttgcagaattacactgataaatatgctgttctagcaaatccattgccgaagctacgatccatcttctcccagtttgagcaagagcctaaagaggaattggagaccatgacaaaaagcatccaagcatatgtatgttgttcccctcaacaaggtactatagcttctatgcagaagaagaatatcaaatctcacataaaagaactattgcatggatctgagttcctccgtgttatcaatatacaaggcattgagataggtaacaggttgacacgtgcaataggcaaagccgttcacctccaataccttggaatcacttcttgctcacttgaaaacatcccatcatccataggaaatcttacaagccttcaaacattggatgtaagggaaactaaagtccggaagctcccaaaggcattttggatgatcaagacactaaggcatgtgtttggttttatcctcaaattacccaagcaaactgtcaatttgaagcagctacatacacttgattccatagaacttgaagattttgagcaaggcttggataatacacttggagagatgatccatcttgagggcttagttatttggaaaatctcaaatggtaatgtcaaagctctgttaagtgctctaagaaagcttgagagccttaagactctaaacttacaaggtaacaatattacatcaagtgtattcaccaccttgttcttgcgtcgcctcaagtttatggttctagacggggagttggacttttcatctgatcaactgaataatgggttagccctccctaatctgactatgcttacattgaaggaaacaaaagtaactcaggagtttattaacaagctagcaaagcttccctctcttgtcacacttgcgttgtgtctaggatcctacaaggatcaggaacttgtcttcttttctaataaatttcgatgtctacagaagctcaaggttgacgtggagaaattgaagaaagtagaaataaagttgagtatgcttcccaaactcaaaaaattagaaatccagacacatgacagtcatcactatcaagagcatgaagtaactcatcaggaacacgaacagaagacagtgatctcttggaaaaaggaaaatgctattcaagttgaatga

SEQ ID NO: 68677 - DNA, 1174 bp, Oryza sativa
  Clone ID: PAT_MRT4530_69416C.1
atggcaaacgtctacgattctcaagcgcttggcccacacaagctggtcttcttctccgagatcgtggcctcgccgccgtcatccgccgcgccggccgtcacgctccggctgcttgtcctgatggcctaccgctcgtcgtacggtgacgacgacgacgacgacggcggcggcgacgtggacacgatggaggacgtttcctgccgcgtgccgctccgcgacctgacgatggcgcgtggcggcgacggcgacgatgttggcgctgtgcgggcggcggcggcggagcgggcgttcggggagctggtggccggcctcgagcacccgacgctgcgcccggaggtcgagacggagggccgcgcggaggaggaggtcgccgagctcgagatccgcatgcacgtcgtgctcatcgcgcacgacgcgccgcgggaggagggtgacggcgaggacgacgagagcggcagcgacatggatttcagcgacgtgtgcggcagaaggggcgactggggcgacggcgacgacgccgacgccttcctcagcgacgacgatgacgacgagggggcgcagttcgcggcgcgcccgtacggcggcgccatgctgcgggagggcgggccgagcgacggcacgctgctgctgtcggggttcgcgacgcgctccgacgggccggagctcgacgaccagctcgagctgacgccgcgggacatccgccgcctggtgcgcatggcgctgaagggcaagaacgtggagcgcgacgaggcctaccagcgggcgctcgacggcggcacgcctgtgtcgccggaatcgctcgccgcgatgctcgaccaggcgctgcagtccgtgcgccagcagccgccgcagcagcagcagaactgccagaacacgacgcgagacggcggcgtggttcgccggatgcacacgggattctgacccgatcgatcgatcgatccaccgcccgggatgaggcgcgagcgatgcgacgccaactagttttggttttgaatgttactgtcccaattttttgggggtcaggctgagtcaatctactattgtattgcgagagctctgatttcgtcagatctactatatttgagttggttgtaggaatttcagttggttgtaagcaatacgcaagccttgttcaggttcaataattcaaatctaaaaaaaaaaaaaaaaaaaa

SEQ ID NO: 68678 - DNA, 208 bp, Oryza sativa
  Clone ID: PAT_MRT4530_69417C.1
ggggggccaaaatgccaaagcaaaccgggaatgccctattttattcaccccggaaatttaaaagggaagtttgaacccaacttgaaaaaatttaccaaaccgaaaaaaatagggggaaaaaaaatggaaaaactgaacacaaaatacattcattcccgggtgggaaaggaccaaggcatgggtaaaaaaatggtgcacttttaacaag

SEQ ID NO: 68679 - DNA, 1491 bp, Oryza sativa
  Clone ID: PAT_MRT4530_69418C.1
ccccactcctcaaaaggtagcgggcagtcccctctcgtgcctaggtgaatccggaagcgacaaaggccgttgcagggcccatcctgctccatcacacccacccttgcaatagagcatttgcaatatgggatcaatatgttcaagtgacaagcatgacttgccttgctctgtggctggagggacctcggcaactatctcaaagtacaccggagcgtcgggagagccggaatctatgcgacatacaaggcaaacaatgcaaacaagctataagactacttaattgatttattgcgtaaataatacccctggcgacatcatcagagagagtggcagcgccgacatgtgggccccacatgtcataggctcggggtgcgccggtccacgggatcggtgaggggtgcaccacgtggcggcgacgtgggctgccacgcgggcagcagcgaacggccccgatctactcgagggtagatcggatggcgagggcggctcgcggcctggcacgcatgggcggcttaagccggcccagcggccatggcgctcggcggcgcggtgcggcgcggcagcggcgcaaggcggcgatcggcggcgagcggccagcagcggagagcggcggcgctactagagggagagggagagggataggggatgtcggtcgtcatcgaagggttcagccggcacggaggaaggcgacggcgaacgacgacgacgggcgatggaatgacgatggcgacgagcagccgagcttcggggaaacctagggaatgcaatgggggaaattagagagggagagggagagcagagagggtggaggcgccggccgaaggcggtggccatggtggtgctcaccagcgcgaggaggaaggcgtgctccggcggcggaatcggccgggcggacggcggacgggatggcgcttgggacggcgaacgcgacgggcgtcgacggcgcggatcggcacggcggctagcggcggctggagcggtggcggcgacggcggagaggagggtgacggcgctagggcagtggagtgcacgggagggctcgacgagaacgggaaaaaggtggaggaggatgcaggggtagtttatatagggccggggaggtcggacatggccgagaggtgggaagtggctggcgaagtgggggaggaacgctccttgttgagcgctcttcccttccagccgaagggcgcgggcttcggcaaggagcttgcgggatctatgcgtcagcctctataccgcttctcccccatctttctcccccttttcctctccctctacctcttcgcattagcacttccgacgacggtgcggacggcggcggcgggcgcggctggagacggcgcggaaggcggcggcggcagcgggcgcgcggctggggacggcgctgacggcggtggctggcgcggacggctgtggcggcaggcgtggctggggacggcgctgacggaggcggacggctacggcggcaagcgtggctggggacggcgctga

SEQ ID NO: 68680 - DNA, 368 bp, Oryza sativa
  Clone ID: PAT_MRT4530_69419C.1
accagaacatatatactaatatgcattgaatcacatacagccatgcacatgtgttcaaacactatgttacgatcctaacaattttcaactattacatcaaaacaagacagttctctcaaactaaacataatcatcaataccaatcaaacaacaccacacatttaaacactatcctctaacaccttcaacacacaacacagcactttacaaacaacattttgtacaaatccataccaaacatctaatctctatcctactactcctttaataaatatataacatgacaattcactatataaaacacatacccttaacaacccaacataaaccttatgtatataatactccctaacaaatactcaacatat

SEQ ID NO: 68681 - DNA, 426 bp, Oryza sativa
  Clone ID: PAT_MRT4530_6941C.1
atggcagcgagctcaagccacaccaataaggtacctattcctacggtcaccttggagctgggatatggtgaggacaaggcccacacaccctgcatcgataccacggactgttccaaagagacgcacgccaagtgtttgatggctgcactcaacgtcaatggtggcagcaaccaagctgtggtcgcgttcctgaccatgacggacatgtttaagatcattccaacatatgttgagccaatggacatcttctcagcaagatcgaccattgaccacaaggaaaacataccaatgccacatcgacgaagaatgggctcgcagaatgcctcttggcatctagctccccatcgtcgtcgttgttcccttactcgccctcgcttgttggtcgtgccgccgtctgagaggtggttgcccgatcgaagagcttag

SEQ ID NO: 68682 - DNA, 745 bp, Oryza sativa
  Clone ID: PAT_MRT4530_69420C.1
ttttttttttttttttttttttttttttttttttcaccaggaaatgaatatatatagctcatcacagatgcttaaaaaaagatctttttttttttatggttgaagctcctgaatagggtgtcactggctcactgctttcgctgatttcaatacggtatccacccagaatggatggttaacacttaggtgcacaacaacacaagagattaccattacatgcattgttcaaactaaccaaaattgatggttctcataacagagtaagctttgacacctactttttactaaacctccccttcttcctagcttttcttttatctttcttgatcttcaagtgaagttgtaccttcttcttgctaatgctaccaattggcttcaagaaggacttggacttgttatttccttcatccgccatctcaacgtccatggccgatgccgagctggaggcggcgcgggagccgccggaatccttggacggcggcggaggcgcgcggaccggcagcgcgggcgcctcgagcgcggcggcctgcgcggcgagtttggccgcctccttcttgtcgtagaagggctgcgcgatctcccgccgcagcgtgcgcagccgcttctcccgcttcgaccgcagcgacttcgccatctcgccgcccgccgccgccgcagaggtggggggaagaagggagcgctcgagctagggttttggggggtcagcgaagcgaaagaggccgggccggccggcgcagcacgtccg

SEQ ID NO: 68683 - DNA, 462 bp, Oryza sativa
  Clone ID: PAT_MRT4530_69421C.1
atggcgctcccagtgactgcgccgcccaccccagcagcatcctctccccctctctcgccggattggatcgaatcactggcgcggatcgaatcaccggattggatcgaatcaccgacgccgacgctctcttcctcttgcgatgctgccgccaccggcaagccgacgccgacgccggcagcgactgcggggacggggaaggacggccgtcgtcccgcgctgtccgcgtcatctacatcagctcatgggagctcgcctcttcgcgcgtcgtcgtctcccgccttaccggcttcactcgatacagagaagagagggggtgagagaggagaggagagaggaagcaagttggagaggagggaagaagaggctgacatgggggcctacgtgggtcccacgttgactcagccgtcacgtaggacaaaatcggggtcaaaaccaccgaaggacctatgtggccggttttga

SEQ ID NO: 68684 - DNA, 5508 bp, Oryza sativa
  Clone ID: PAT_MRT4530_69422C.1
atggccacgctcccacgtgcggcggcggcggcggcgccgtcgccagccgcggcgctgctcccgctcccgcgcgccgcgccgctgctggcggggcgcgcggcggcgcgctccgcggcgcggaggctcagggcgagggggacaagggcgccgccgctcgcggccgcgcggcgcgggtggggaggcgtctccccgcgcgcggtgctcgacctgccacgacgacgggaggccgcggagaagcccgcgcagaaggctgcagatttgaatgaaatcttatcagaacgtggtgcttgtggtgttggatttgtcgcaaacttgaaaaatgagccttcattcaatattgtccgggatgcccttgtggctcttggctgcatggagcaccgtggtgggtgtggagcggacaatgactccggtgacggttcaggactgatgagtggtatcccatgggacttgttcaatgactgggccaacaagcaagggcttgctcccctggacagaacaaatacaggtgtcggaatggtctttcttccacaagacgagaattctatggaagaagccaaagctgttgttgccaaggtattcactgacgaaggccttgaggttcttggctggagaactgttccttttaatgtatcagtggtaggtcgctatgcaaaagaaaccatgcctaatatacaacagatatttgtgaaagttgcaaaagaagataatgctgatgacatagagagagagttgtacatctgccggaagctgatagagcgggccacaaaatctgctagttgggcagatgaactttatttctgttctttgtcaagcagaactatagtctacaaggggatgcttcgatctgagattcttgggcaattctatttggaccttcagaatgaactctacaaatcaccttttgccatataccatcgaagatacagtaccaatacaagccctagatggcctcttgctcaacctatgaggttacttggacacaatggagagattaatacaatacaggggaacttgaactggatgcgatcaagggaagccacactacaatctcctgtatggcgtgggcgtgagcatgaaatacgtccatttggtgatcctaaagcatctgattcagcaaaccttgacagtactgctgaattactgctaagaagtggcagaagtcctgctgaagctatgatgattctcgttcctgaggcatacaagaaccatcctacattgtcaataaaatatcctgaggtaatcgacttctatgactactataaaggtcaaatggaggcttgggatgggcctgctttgctcttatttagtgatggaaggacagtaggagcatgtcttgatcgaaatggtctccgcccagcacgctattggagaacatctgatgattttgtttatgttgcatctgaggttggtgttataccaatggatgagtcaaaggtagtaatgaaaggaagattgggtcctggaatgatgataacggttgacctacaaactggccaggtgcttgaaaacacagaagtgaagaaaagtgtggcttcagcgaacccctatggatcctggttgcagcaaagtacacgttcaataaagcctgtcaacttccagtcatctgttgctatggacaatgaaacggtcttgagacaccagcaggcctttggatattcgagtgaagatgttcaaatggtaattgaaacaatggcttcacaaggcaaggaaccaacattttgtatgggtgacgacattccattagctgtgttgtcacaaaagccacacatgttatttgattatttcaaacagcgatttgcacaagttacaaatcctgctattgatcccctcagagaaggtttggttatgtctcttgaagtcaatattggtaaacggcgcaatatcttggaagttggccctgaaaatgctgatcaggttaccctatcaagtcctgtgcttaatgaaggtgaactagaatcacttttgaatgactcaaaactgaagcctaaagtactctcgacatacttcgacatccgtaaaggtctagatggttcccttgataaggctattaaggttctttgtgatgaagctgatgctgctgtgcggaatggttctcaacttcttgtgctttctgatcgttctgaagcactcgaaccaactcgccctgccatcccgatacttctagctgttggtgccatccaccagcatttgattcaaaatggtcttcggatgtctgcttccattgttgctgatactgctcagtgttttagcacccatcagtttgcttgcttgatcggatatggtgccagtgctatatgtccgtatctggcactagaaacatgccggcaatggaggctgagcaacaaaactgttaatttgatgcgaaacgggaagatgcccacggtgaccattgagcaggcccaaagaaactttatcaaggcagtaaaatctggcctactcaagattctttcaaaaatgggaatatcattgctctcaagttattgtggagcccagatcttcgaaatttatggccttggtcaagaggttgttgatctcgccttctgtggaagtgtatcgaaaattggaggtctcacccttgatgagaaattcttttattctattgtaaaggatataccagtaatatccctgcatgaattttgtgggatggagttttgggctgcacaggcatgtgatcctggatttgatccacacctacgcccgtgtgaatatcatgcaaataatcctgagatgtcaaagctgctgcacaaagcagttcgtgaaaaaagtgacaatgcatacaccgtctaccaacaacatcttgcaagccgtcctgtcaatgttcttcgagatcttctagagttgaagagtgatcgtgcccctattcctatcggtaaagttgagcctgcaacctccatcgttgagcgattttgtacaggtggaatgtcccttggagctatttccagagaaacacatgaagctattgcaattgcaatgaatagaataggtgggaaatctaactccggagaaggtggtgaggacccaatccgctggagtccccttgcagatgtagaggatgggtattctccaacacttcctcatctcaagggtctacagaatggagacactgccacaagtgccattaagcaggttgcatctggacgctttggggttacaccaacatttttagtaaatgctgaacaaattgagataaagattgcacaaggggcaaagcctggtgaagggggccaacttccagggaaaaaagtcagtgcatacattgctcggctgagaaactccaaacctggagttcctctcatatccccaccaccccaccatgacatctattcaatcgaggatctagcacagttaatttatgatcttcatcagatcaatccaaaagcgaaggtatctgtaaagcttgtagctgaagcaggaattggaactgtagcttctggagtatccaaaggaaacgcagacataattcagatatcaggtcatgatggtggcactggagctagcccaattagttcaatcaagcatgctgggggtccttgggaacttggtctttcagaaacgcaccagttagcttgtctccagacacttatacaaaatggattgagagagagggtagtacttagggtggatggtggattcagaagtggcctagatgtccttatggctgctgccatgggcgcggatgaatatggttttggttctgtggctatgatagctactggatgtgtcatggcacgcatttgccacacaaacaattgcccagttggagttgctagtcagagagaagaacttcgtgctaggtttcctggtgttcctggtgatcttgtaaactacttcctctttgttgcagaagaggtacgagcgacattggcccaattgggttttgaaaagctcgatgatataattgggcgaacagatatacttaaagcaaagcatgtctctttggcgaaaacacagcacattgacctcaaatacctcttatcgagtgctggattacccaaatggagtagctctcagataaggagtcaagatgtccacagtaatggccctgttcttgacgagacaatccttgccgatcctgatatatccgatgcgattgagaatgagaaggaggtttccaagacatttcaaatttacaatgttgacagggctgtctgtggtcgagtagcaggtgtcattgccaagaagtatggtgacacaggatttgcaggccagctcaacattacgtttactggaagcgcagggcagtcctttggatgtttcctaactcctggaatgaatattcggctagttggagaggccaacgattatgtgggaaagggtatggctggtggagagctggttgtagttcctgtagaaaaaacaggatttgttcctgaggatgctgctatagttggtaacacttgtctgtatggagctactggtggtcaggtatttgtgagaggcaaaacaggtgaaagatttgcagttagaaactcccttggtcaagcagtggttgagggcactggagatcattgctgcgagtacatgactggtggctgtgtagttgtacttggcaaagttgggaggaatgttgcagctggaatgacgggtggccttgcctatattctagatgaggatgatacactcgtcccaaaggtcattgtcaaggttaacaaggagattgtgaagatgcagagagtgaatgctccagccgggcagatgcagctgaagggcttgattgaggcttacgttgaaaaaacaggcagcgagaaaggtgccacgattttgagagaatgggaggcatatctgccactcttctggcaactggtaccaccaagtgaagaagactctcctgaagcttgtgccgagtttgaacgagtacttgccaagcaagcaacaacagtacaatcggcgaagtgatctactgcaattcccaagtgatcagattagacaacaggaaggtgttctttggtactttccaggtgattttttcctgggaccgcatcaaggaaaacaaaataacaactggcatacttgtgaagcaccgaagtgcccccaaagactgcgattttgtggaagctctgcccaaggcatcttttgaaacgaagtttcacatgatcgtggaggattcttctttgcgcccttgcacttgcacgccctagttaaccacccccctgtaaattggtttgctgacgctaggttgctatttgcagaggcagtgaagacacacttctaaacttctccattcctgtacaggattcgtgtcctatgtaatcgtatttttggttctggacacattagttcttacatttatacccgtccagtgggggcatgcgagtcgcatgtgcatacagctatagtgaataaagtgtactgtcaagtagttttctcaggttgttgccagtggaccgtggtgttatcgttatggattataattcaaggtgtcaaatacttcaattattataaaaaaaaaaaaaaaaaaaaaaaaaaaaaaaaaaaaaaaaaaaaaaaaaaaaaaaaaaaaaactcgag

SEQ ID NO: 68685 - DNA, 123 bp, Oryza sativa
  Clone ID: PAT_MRT4530_69423C.1
atgtcagatctgtccaacgacaggcaatggcacgtgctgacggttagaccgcgagaggaccagcggtcagaccggtcaagcttcggtcagaccgaccctagtaggtcggatagaccgccaaac

SEQ ID NO: 68686 - DNA, 645 bp, Oryza sativa
  Clone ID: PAT_MRT4530_69424C.1
tttggtgtttttccaattgaagttgctgctctccaagtccatagggaaattgttgagatgttatttcctttgacttcaccaatttcaacggtgccagattggagtattgatggaatctttgcccatgcaaaaaactttggttcgaagccattgcctgaagatctttgtgtaaagaaaatagctcaaatgaaagtagaaggtaaagaggctttcaagagaaaggattatttacttgcggcacaactctatacaagtgcactgggacttggacctagtcctgatgattctgcaactctgctggcaaataggagtctctgctggttgcgcttggaaaatggaaaacaagctcttgctgatgctaatatgtgcagaatgttccggcctcattggataaaagcctgctatcggcaaggagcagctttcatgcttcttaaggaatatggtaatgcttgtgatgccttttcagatggcttgaagctggacccagcaaatgttgatattgagaatgctctaagggcagcgcttcaggccgtgaagaatgaccggctatgtatgatcactatgtggaatttggtggtgtgctatccggtgtttggagaagccattagtgtcgcccttagttatttgtcggcgtcggtgttgtga

SEQ ID NO: 68687 - DNA, 657 bp, Oryza sativa
  Clone ID: PAT_MRT4530_69425C.1
atgggtataaatatgtacacccggggtcattgtaatgaatctctcaatcaatacaactactctcggcgcatcgccacctctttaccgaggtttttacttatcatccggcaaaatttagcacctggcgcggggctgcatcggttcagttcgatctccggcgaagggggtcaaactgattggcatgcccgtatctcatcaacctttggtcctgcactggagctaagcagatctcctaggccaggaggccgcccgccatcctccgcgccccgtcgtagggagacagcccgccgacctccgtgcgccaccgtggggaggccgcccgccgaccggccgcccctgagcccctcgacgtggccactcgccgtcctctgcgcgccaccgaagggaggccacccgccgacctccacgctccaccgtggggaggccgcccgccgaccagccgcccctgagcccctcaacgcggctgctcacaatcctccgcgcgccgccgtagggaggccgcccaccgacctccgcgcgccaccgtggggaggccgcccgacgaccggccactccctaagcccctcgacacggacgctcgccgtcctccgcgctccgccatggggaggccgccagccgtcctccgcgcaccacctgccaactggccgcccgccgtga

SEQ ID NO: 68688 - DNA, 472 bp, Oryza sativa
  Clone ID: PAT_MRT4530_69426C.1
tttgtttttttttttttttttgttttttttttttttttttttttttttttttttttaaacaaaccccataataatttggaagaaaaaacagggggggttacaaggtacaggcttccaagggggacctttaacgctgggataaatttaacattataacatggttttgccaaactaggtaagttccatccacaatcacaaaacttggctttaggggcggggggaaacaacaaaaaacttacagaaacatgtttcccccattgccactagacccaacagggttcccagagcccggaggacaaaaggaaatgggttttcacttttttttcccgggatcaccagccttggtttttttgaccccacggatctttttagctttggtcttggggtctttcatttggttgggagatttctcaaccttgggaggcagaccattcctgaggagggggtacttggggtcgtactttttcggggg

SEQ ID NO: 68689 - DNA, 310 bp, Oryza sativa
  unsure (1)..(310): unsure at all n locations
  Clone ID: PAT_MRT4530_69427C.1
aaatgacaaaacctgcagagttgtgtatgctgttatgctccccttggctcgagcttagcatgcctncccttctatcctgaaaatttagtagatgcttgcagttgcagaacgtgacaggcttaacacatattcttgattgacctcatatttttcatactagtatacccccttgtaagttgtaacaacaaatgatagtttgtcatactattagcaaatgatagtttgtcatactattgttttgtcgtgctgaatagctctgatgggcaataatctgcttgatcaggtttaatgttaaaaaaaaaaaaaaaaa

SEQ ID NO: 68690 - DNA, 531 bp, Oryza sativa
  Clone ID: PAT_MRT4530_69428C.1
atggccggtgccacgggttggcgggcgatcaagtttttgggtagcgcttcaagcgcgactgctcctgttctttgcgactactgctgctgcatcgatgcctttaccatcatgtcaacaaagattggagacaaggaggtgaacgacatcaacagaggagaaggcgagggcaaagacaactggggcaaaaagatcgagggagattctagcgccaatttggtgcagaagaagaaccctcatgcatcccacaacaacaacaagaaagtcaaacctgacgtcaaacccaatgctacaaccaattttaagaagaaagacaagggaaaggcaaagggcgactactttgtgtgtggtaagcctgggcattgggccaaggattgtcttgagcacaaagacaaaaagtctgcaaacatgtctattagcgagggcggaggaacatcggggtatggtcaggagaggttcctccttgttgttgggaaacggatcgacgccgacgagcacggaaacggcggttaccagagaactacgatacaatga

SEQ ID NO: 68691 - DNA, 1828 bp, Oryza sativa
  Clone ID: PAT_MRT4530_69429C.1
caccacgcgccagcggcactagccactagacaactagccctacggacgcgtggggtagtactgccagaattggggaagccgccgcgcgccatgacgccggtggaggaggtggacctgtcggcggtgaggtaccagtcgccgtcgctgcaggcgccgcacctcaccggcttctctctcagggccttcgtctggctcatggagtcgcccctattcggccgcctcctcacctccgtcctcaagtcgcagaacaacatcacaaggatgctgcaggacacggtgatccccgagcgccccatgtacctccccgagtacccgccgcaggagccggagcaaggagttttgcttctgggggatgacagggaccctgtggacagagttgaggaagcacttcactgccttccgccctatgatccgtctctgcgttggccggccggggacaaaccccctttcctctactggaagatccgtgattttgtgcatgcgtaccgctccgggatcacaaccccgtctgttgtgtgcggagcatatcattgccggtgtggaagagtggagcaacaagaagcctcccatgcctatgttggtttattttaacgcagatgatctaaggaaacaagctgaagcttccacaaagagatttcagcaaggaaacccaatttccatcttggacgggatctttatcgccattaaggatgacattgactgcttcccatatccatcaaagggtgctactacatttttcgacaaaattcgctctgtggagaaagacgcagtttgtgttgctcgtttgcggaaatgtggagtgttattcattgggaaagctaatatgcatgagctaggccttggagtaactggaaacaatccaaactatggaacagcaagaaatccacattcaattgatagatatactggtggttcttcatcaggtccagctgcactagtctcatcagggttatgctcagcagcaattggaacagatggtggaggttctgttaggataccatcttctctatgtggcattattggtttgaagacaacctacggacggacagatatgactggggcactttgtgattgtgggaccgttgaagttgcttctcctctagcagcttcagtggaggatgctttgctagtgtattctgcaatagcaggctctaggcctatggataagcttaccctgagaccatcaccgctctgtgtccctaatttggtgtctcctgacaacaacaatatactgggatcggtgaaaataggaaaatatactgagtggtttcatgatgtctccgatcgtgatatctctaatacatgtgaggatgcacttaaccttctttgcagcagcttcggatgtcaaatagaagaaataatactgccagaacttgaggagatgcgtactgcccatgttgtctcaattggcacagaatcattctgtgatttgaatcctcattacagagcaggaaaacgaactgaatttacgttagacactcgaacaagtttggcactttttggatcattcacttcgactgactatgttgcttctcaacgaataagcatcactgctccagaaataccacaaagttctctgaagttaggagagtccaattacgttgtgtcagcttacctgatgcgattcgtgatagctggcaatcttcttggtttgcccgcgataactgtacctgttggtcatgataagcaagggcttcctataggcttgcaactgataggtcgaccatggggcgaggctagcttattaagggtggcttctgcaatcgaggagctctgtctgcagaagcggaaacggccatctgcatttcatgacatcctgaacgcttga

SEQ ID NO: 68692 - DNA, 1119 bp, Oryza sativa
  Clone ID: PAT_MRT4530_6942C.1
atgagtagagtgtccactagttggggttttgtttattctagggtgaacaagccgaggggaggggcgcgcggaccgggtccacgggagtggggcccacgcggtagcctcacggtccacggtggacctgggcgcacccgggctcgcaccggccggcgccgtgagtcccacgcgtcagccgcacctaagggcgcgggcggctgacagccgggccccacacggcagccgcggggcacgcccgaaggcggccacgccgcacagccgacgggaggcggcgcgcccacgcccctatggtcgccggcggcggccataggtacggcggagcggcggccgagagaggggagggaagggggaaacgaatcggcggtccacggctcaccccgggtcgacggcgacgacgggaacggcgaccggagcggaggaaggcggcggcgcggctcgggtggacggggtcgacggggctccggcggtcggcgaccaaaacggagaggtggacgacgtccgcgaagatgcggcgaagccgaaggaagcggcgccgacgtgggaagtggtccggggcgacaacggcggcggaccggagctcggcggcgacggcggagagagagagcgacggcgcgagctcgattccggcggggagagagagcggcgagcggcggaaacggtggagggaggcacggggagggtttactatagggttaagagagggaacgggtggccggaggagggggaaacgggcgcgggagtccggccgtcattaatggcgcccgcgaggtagggggaaagttcaaacgaatcgagggacagagagagggaaaaatggggggaaagggggaggggatccggggaatatttcccccctcttgattgcacgcggggcggacgggggcggcgggattcgcggcggcggcggcagcgctagggcgcgggcggggcggcgggagcggcgggaggaaggggatgacgggtgggccccacccgtcagctagggtggcgggcgggcccgcccgtcagcggcgcgcgcgcggggaggaggctgaatgggccgcggggaagaggagagagagggaaagagatgggccgagccggcccaagagggggaggggggggggaaaaaggactttt

SEQ ID NO: 68693 - DNA, 1581 bp, Oryza sativa
  Clone ID: PAT_MRT4530_69430C.1
actcagtaactttctcgttaaattttggaagatagaaaatgttacaaaaagcacgaacgccctcagaaagttgctcctgggcttttgattatttgcctaacagtttcatttcacctcgagtttacttaattagctaaggtgtttatcttggccttgcatatcaaagattccaaaagatagcaatgtggcgatgctccattctgagcgtcgccgatcgatcagagctgctgatgtgatcagctctgcttaattagttagatggtggatcagcactgaaataagatggcgagggcgccattgccaaattcaccgaatgaggagacggcggcgggagcttcctgtggccgcgcggcggcggtgctgctgctgctttgccgtgaggcggcggcggtggatacttgtgcgccggaggaggtggggaatgcggcgggtaacgggacggcggcggcggcggcggtggcgaggcgtgagcagggggcggcaggtgatgaggcggcggcgaggcgtgagccgggggtggtgacgaggggtgagcagggggcggcggcggcaagtggtgaggcggcggcgagcggtgagccggtggctgcgcctgtggagcttccccgtggtggtggcggcggcggtggtggtggtggccgtggtgcttgtgctccgtcgcgttgtaggacgacggcggttcagccggcggcgacgacgacgacgactcgtggtggtgatgcttcccgtgctcaggtccttgttgccccgtcaatggcgcctcggcggcatagggagccggagcctcctcatccggtgcttccaccggcggggaggcgtagcgaggcggggaggcggtggcggtggcggtgcagtgagacggcgagagcgccgccgcaagagcgacgacgaggagggcgatgcacttgtggaggggcgcggcggcctctcccgtttgttcgatgttaccaaacccattatcttgagctttggactttggaggactgggccgtgttgcaaggagctccaaatttcacgctgttggtacttggacttggctgcattgatttggacaagatattgctggttctttacctgaggcctgatgaagcacagctgcaattctttctgatcctgataaacacttcaaaattcaggaggcatgatgatagccaactcgacagctgcccgatctcccctgcaatgccgggcattatcatcatcagcggcggaccgtggtccgtggaccatattggtgtgtgttttttttacgcgttcgtaaagaagatcgaagaaattggcgctgattacaagtttgcgttcgtgttcggcagctgtgtttcgctccagttttggctcgtggcggccgtgctcggctacccgcgtctcagagcccacggaggaaaggatcaacatcataccttcagccagctgttctgcattgcattgcctgggcagctgatgagtgatgacaacttcacgaggccggttaagaccgccattactgaaacctaccctataggttattctcatgtcctcacgcacccgggcacaaggttccctcctcttccccttggcccttgctcaatggaaatgcagtag

SEQ ID NO: 68694 - DNA, 480 bp, Oryza sativa
  Clone ID: PAT_MRT4530_69431C.1
atgcgtggtggttcggctaaccgacgcacgagcgaggaggaaggggcggcccaaggagctccaatgaggaggatggacagggcggcacggtggcagcgttccgacgactatcggacaaaatcgaggagtggctggggtggagggcgacgtcggccggtactcagcctcggcgggaggggtggctggaggcggccggcgccggggaaagaggaggaggcggggagaggtggtgtggccatggggaagttcgggaggaggcaaaaacgagagaatggaaggaggggttttcattttatagtggaggggagggagcccgccacgggaaaggcgagggcggcaccaagaatggcggccggcggccatgaaaggtggctggaaatggcgcggccattccgggtgattgagggcgccattcaaggggggaaatttgggggaattgaagaggaaggaaaggggattaattcccccctccccaattaa

SEQ ID NO: 68695 - DNA, 324 bp, Oryza sativa
  Clone ID: PAT_MRT4530_69432C.1
ggggcccagaaaaaagcctcctcagccataactagacgggcatatatatttttggaccatggagaacccacccgggacaaaaattttcggcaatggtgaggagatttttcccacatgggaccaagggaacttttgcttgcgctatgaggtgcactttaaagcttaacggaaaaaaaatatgtagttggatgggaccgcaccaaaggagggttgtagatccccccataggcaattcaacactttttattgtctttggggttggggtttcttggacccctcaagattctgcaaaccaccctgtgttcatcccaaaaaggattgggg

SEQ ID NO: 68696 - DNA, 261 bp, Oryza sativa
  unsure (1)..(261): unsure at all n locations
  Clone ID: PAT_MRT4530_69433C.1
ctaccactgtnncctgtnntctctaanagangagcatctagcttcnggcttcatcatagtatgggtgctnaanngaaattgtgtatggcatcnctgggtcgacctgttngcttctnatagatncacttgncaccgctntntgtcnanattatatcanataactgctgtgcngcncatccngtgtttctcaatactcatgtgtacacncgatnttcccctgtnantataanatanttgacanactggttcccaaannttccc

SEQ ID NO: 68697 - DNA, 526 bp, Oryza sativa
  unsure (1)..(526): unsure at all n locations
  Clone ID: PAT_MRT4530_69434C.1
ttnngggggggggggnnnnaaatagggggtggnngaattgtttgnnccccngggnggaanaangagggtttcngntntaannngnggggggnggnggggggcaacccntntttnannangggaaangtttnnnccntggttaancccccngggtngnggtgngccccctcccnantggggaaaaggaaaaggggngtttncccccnggnggcgcnccngtttgnnaaaaaaccgttncccccgggcnccggngtttnggaccngggaaaaggcgaaccgcttctggggggggnnaatnnncnggggtttttngttttgganggagnccaagnannccccntttttgnggggaagattttggttccnttctccattttngggtaagnntttnntncccaantaggaaagaaaaaatcgggtccgtncaacaantnannnanaananantcatnaanaanaaaaaaaaaaaaaaaaaaaaaaaaaaaaaaaaaaaaaaaaaaaaaaaaaaaaaaaaaaaaaaaaaaaa

SEQ ID NO: 68698 - DNA, 441 bp, Oryza sativa
  Clone ID: PAT_MRT4530_69435C.1
atgaagcaattgcataggacagcagcgcggcaggtccccgagacgggcggcggctcggctgcgacgcctcagagcgtccagatctggggcccccgctgcgtcggtggcggcggcggcggcggtggcggccacgtcgaggccgcgcggcgcagcgacgaggtggcggaggagaccggcaactgccatatgcgcaccggcaacgacacggcgccaggtggccagtgttgctgggctgaggcgccctctagccgcccgcggcacccccatttctcccacctcatcgtccgcaccgaccactacacctcgttccacgccagccactccccgttcaagcagcccatcactgagaacctccactacggtgtcatcaacctcaacaaagctgtctatccccttgtcgcacgagagatggtgactgcagattttgactttttgagttag

SEQ ID NO: 68699 - DNA, 246 bp, Oryza sativa
  Clone ID: PAT_MRT4530_69436C.1
atggcgcatcagatggattggtggaagacgacatcgctgcaggcggaggtctcgcaggagatgaagtcgcccgggagtcgcttttgcgtcggaggaatcgccggagagagagagaggataaagtttcgcttgagcggtgaaaacggaagtcacggtgtgagatttctcgagggtgacgcgaagtcggaggcggagatcgagttcggaaacagagcagagatcggctggagtccggatcggctatga

SEQ ID NO: 68700 - DNA, 878 bp, Oryza sativa
  Clone ID: PAT_MRT4530_69437C.1
atggcggtggcccgggtggcggtccgcggtggaccgagtccccggaccggggaaaggacggcgcaccacgtggcgctgacgtggcgccgacgcggcagccacgtgggcggccgaacgaacggccccgatctacctgggtagatcggacggcggggggggctcaccgccggcacacacgggcacggctcaagccggtccggaggcgcacggcggcgtgagacggcgaccggcggcgaccgaccggcggcggagagcggcggcgcgggcggctaagcagcgactaggcagcggctaggcggcggctaaccagcggctaagcggcagcgcagcggctagcggtgcgggggagagagagggaggggaaggggaggccttaccgacggcgaccgacgacggcgagcaacggagggcagcggcgacggcgggacgatctccggaatcacctaagaaatcaaaagggagggattagagggagagaggcaaaagggagagggcgagggcgccggtcgaaggcggcggccatggcgatgctcaccggcgcacggcgcggagtgaattccgacggcggatttcggcgggcaaggggtggacgggacggcctgcacaacggcgaacgcgacggtgtcgacggcgcagcttggcacggcggctagtggcgaccggagcggcggcggcggcgacggcggatagcggcggcgcggcgctagggcgttagagggcacgggagagctcggccagatggggaaaaagagagagggggagagggggtggcggtggagcttaaataggggaaggggagctcggacgtggccggtagaggcgggaatcgctggccgacatggggagtgggggaggagagagaggcgggattcgaaatt

SEQ ID NO: 68701 - DNA, 138 bp, Oryza sativa
  Clone ID: PAT_MRT4530_69438C.1
atggggaaggggagaggcgcgccggtcggcgtcgccaccgagttcagacgtttgttgacggacaagcggacgtcgatctgggccgtcaacagccagatggacgtccagaactcctcaaggccgtaccctgtgacgtag

SEQ ID NO: 68702 - DNA, 1896 bp, Oryza sativa
  unsure (1)..(1896): unsure at all n locations
  Clone ID: PAT_MRT4530_69439C.1
gaggaggaggagtcgaaacggaagccgcgtcggtnttcggtctggtccccccccggagccacgccacgccatcgtcgtcttcctcctccacctcctcctcgtcgtcgtcgtcgtcttcttcttcttctccccctgcaacgcaatcccatctcatcgacctgcttgcctgcatagtgcgcgccaaccccaaccccttcccctctccaaatctcctactgccccggccccgtgcttcttcgacctgggcacccgcactggtgcgggattggactcacagattctagggtttcgcccctcgcggcgattccaccacccaaggtttgcgttccttctgttggtgcatacacgactccacctatcaccgttatgttctcgctgcgcaatgcatagaagctgcactcacgaggctccatctcctatgcttgtaccagtatactaaacaatggccaaacttccaatagttggtcgcagtgcacctcgcaaacccaacgaaagcatgaggcttcttgtagtaacagttattggggtgatgttaggtttctttattggaatttcgttcccagcagttagcataacaaagcttcacttcccatctagtattgtttcgtacatagaagacaagaactcagcattgacagctcaagcgatactaaatcatgcttggacagctgctaggaatgcaaagggaaatgatactgaatcaagctcagacactgccatgaagatttatgtaccaacaaaccccagaggagcagagagcctggcacctggtattgttgtaccagagtccgattttcatccacgcaggttatggggaaacccagatgaggatctacccttcaaaccgaagtaccttgttactttcactgtcggaatttcgcagaaagagaacataaatagggcagtcaagaagttttctgataattttgctatcctgttatttcactatgatggtcgggtgagtgaatgggatgaatttgagtggtcaaagcgagctatacatgttagtgtacggaggcaagcgaaatggtggtatgccaaaagattcttacaccctgatatcgtggcatcttatgagtacatatttatctgggacgaggatcttggagttgagcattttaacgcagaggagtacattaaacttgtcaagaaatatcagctagaaatctcacaacctggtttagagccagatcggggattgacatggcagatgaccaaaagaagaggggatcaccaggttcacaaggagacagaggagagaccaggctggtgcactgaccctcatcttccaccttgtgctgcctttgttgaaataatggccccggtgttctccagagatgcatggagatgtgtatggcatatgattcagaatgacttggttcatggatggggtcttgatttcgctctcagaagatgtgtagatcctgcacatgagaaaatcggtgtcgttgattcccaatggattgtacatcaagtggttccttctcttgggaaccaggggcagtcagagcacgggagggcaccgtgggaaggggtaagggaacgttgtcggaaagaatggggaattttccagacgagaattgcggaggcagagaagtcatattacgagatgatgggcgtccccccaccaaacgtaacatttgtccactaggctactatacattacctgctgttaatccgctcacctattttttagccccaatacaatagtagcacttgtgtagagagctaagctagatatgatgatggtgatattcatgatacgtgtagagcatacgaaacgtcatatctatctattaattccattttttctgtttgaaaaaaaaaaaaaaaaaaactatgctaatttcatgagttgcacaagcctcctcacttgttctaccttattttttttcc

SEQ ID NO: 68703 - DNA, 393 bp, Oryza sativa
  Clone ID: PAT_MRT4530_6943C.1
atgttcctggatctggagttgcttggtgttgctgctgcttggagaagattggaagacggagaggacggctggctacttgactacttcttgttgcttgttggatttggtgaattggatgtgctcgttgttgcttgttgcttgatgcttgaacgcttgaagagcctgccctacaactcgacgatgctatggacggccgcgagccgcgctgccgcaccaccaccgtgccggctgcggctccgttttcgcggggcggctgctccaccttcgcgccggccgctgttcctgcacgagtgcgctgcgctacgtcgccggccggccgcccgcatcaggccacacaaccgccgcgagttctcgtaccagcaagttctttcgtcgatggtggtggcgaattga

SEQ ID NO: 68704 - DNA, 624 bp, Oryza sativa
  Clone ID: PAT_MRT4530_69440C.1
atggttgtgtatggcagtgagggactttcctctaatccgacaaggtgggcccacctggcagttcttgaggcgacgcaccccagagctttgatttcctcttccacccttctcccctatgtcaccggcccgcgcgtcaagggcgagcgaaaggtgccgcttgccgccggaaagaaaaagggagggcgaggagcgaggtgggcgagcgcgagagaaaaaggaagggtgaggagggggcgggcgtcggcgagtccggtgaagaatgacggtgccatcgtcgatgcggccaccaccggcaccaccaccgtctcgatgcggcgcggccggcgccactccatccgccggggggccagatccggccacggcggcgccggatctgccgcctccggggtcgccgccgccaccttccacgggagagagagagagggagagagcggccagatctgccgcctccggccaccggacgatgacgactgccacctccgccccgtgcgccgctcgccgtcggtcgcctccgccccggatctgctgctccagctaccagacgatgacgatgatgactgccgcctccgtcccatgagctcgattcgggggcggcggcgggagacggtggtgggggagtgctag

SEQ ID NO: 68705 - DNA, 1016 bp, Oryza sativa
  Clone ID: PAT_MRT4530_69441C.1
aggccgggtcaaatcaaatcgagagagagccccatctcgcctcgcctcctcctccctccgccccattcccccgccgccgccgccgagggcgccgcgacctgagagcacacgcccgcccgccatgtggcgccgcctccaaaccctggccccggccctgcgccgcgccgcctccgcctccgcctccgcggcggcatcgggcgccgcgggccccgcctccctcgcccgcgccgcgccgctctccacggcggccgccgccgccttccgccgcaccagccctctcctgtccggggacaagccggcgacggtggaggacgtcatgcccatcgccacggggctggagcgcgaggagctcgcggcggagctcaagggggagaagcggttcgacatggatcctcccgtaggcccatttggtaccaaggaggccccagctgtcattgaatcctactataacaagaggatagttggttgtcctggtggtgaaggagaggatgagcatgatgttgtatggttctggttgaaaaaagatgaaccgcatgagtgcccagtctgttcacaatattttgtgcttaaggtcattggtgatggtggtgatccagatggacatgatgatgacgacgagcatcaccactaaggacgcccatgcctcgtggttctgataataagaatttgatgaggcagatgatttcatttaaacctttttagcaccagactgctctacggcgtccttgtttatgaatgcacacatttggccatcaagcaggtggtagttttttccttagggattttgtccaaacaaaaaactcatcgaggcttgacctgtgcatttccttcggagcatcatcgaataaaagatgactgcatcagctgcgtttttcttgtgtatcctaatggccatctggtgtgatggacctgttctattcagatcatgcaacagtttattttcagtgctcagtgagtccctgtttgcaagcagccactaaatctttaacgatcgtctcatagtccccaatttcctc

SEQ ID NO: 68706 - DNA, 837 bp, Oryza sativa
  Clone ID: PAT_MRT4530_69442C.1
ctagcactcccccaccaccgtctcccgccgccgcccccgaatcgagctcatgggacggaggcggcagtcatcatcgtcatcgtctggtagctggagcagcagatccggggcggaggcgaccgacggcgagcggcgcacggggcggaggtggcagtcgtcatcgtccggtggccggaggcggcagatctggccgctctctccctctctctctctcccgtggaaggtggcggcggcgaccccggaggcggcagatccggcgccgccgtggccggatctggccccccggcggatggagtggcgccggccgcgccgcatcgagacggtggtggtgccggtggtggccgcatcgacgatggcaccgtcattcttcaccgcactcgccgacgccgccccctcctcaccctcccttcttctctctgacagcgagcagccgcatcgagcagacggtggtggcatcagcggtggctgcatcgatgatggcgccgtcgccttcttcaccgcgctcgccacctcgctcctcgccctcccttcttctctccggcggcaagcggcaccttcgcctcgcccttgacgcgcgggccggtgacataggggagaagggtggaagaggaaatcaaagctctggggtgcgtcgcctcaagaacctacctacgcaatgggtttcttcgccccgtccccctggaaaaagcgagcgagcgacgcgtcccccagctagggcgcgcgtttcatcccaggggacgacgcagacgaaaagcctaatggacagcgctagggagacggaccgaagcactacattgtaggggatctgttggagtgctttttttttcactaaaatac

SEQ ID NO: 68707 - DNA, 309 bp, Oryza sativa
  Clone ID: PAT_MRT4530_69443C.1
atggcagtggctcggggtgccggctcatggtggaccaaacccacgggaccagggaggagggtctaccacgtggcgccgacgtggcggccacgcggcagccacgtgggcggcgaggcggacggccccgatctaccctcgggtagatcgaacggcggcgggtgcgcgcggccggtgcgcacgggcttggctcaagccggcccggcggccatggcgcgcagcggcgcggcaccggcgcagcggtggcgagcggctggcagtggagagcggcggcgacgcgacggcgacatgggtggcgctaacggcggctaa

SEQ ID NO: 68708 - DNA, 293 bp, Oryza sativa
  Clone ID: PAT_MRT4530_69444C.1
tcgcctacacatcctgcctacactaactgtggcatatactctacagcatggggacactcagactgtggggtatactctacctggtggttaccccgaacatggtgggctacccactgctgcgcatctacactcggatcatgatggacacatagggccgacattggagtagacgcgcaggacacatgctagcaatgttggctgaaagaacatctgttgttattgccatctatgacacacacactatctatgctcatggggatggtggacacatgggctatggtagcgatggaagc

SEQ ID NO: 68709 - DNA, 204 bp, Oryza sativa
  Clone ID: PAT_MRT4530_69445C.1
ggaactcacttggcttcttcatttcagtaacagatattatttttccaaaaggctactactcaaagttttccatttgtaaacggaaaacaaaccgcttttattctgattaacatgtaaccagcagcagctcatttcagctcttgattttacccgttaaaagggaatgaaaagcttcaattcagagcaaagcgagcagcagcaagc

SEQ ID NO: 68710 - DNA, 243 bp, Oryza sativa
  Clone ID: PAT_MRT4530_69446C.1
aaataggtaagatgattttatttagatttctctgaccctaagtttcaaccgtcacacatgatgatgtatgactttatttttaacatacatacgaactattatcttgttacaaattcagtaccagaccagaccccaccaacagtggcaaatgctcctgggagctatagtagttcgggtagatggacaatatggatcgcaagttgaagctcactgcgatcgagctgagttgagctgtcaagtgcc

SEQ ID NO: 68711 - DNA, 283 bp, Oryza sativa
  Clone ID: PAT_MRT4530_69447C.1
agaatatagaaatctgagaacttggataatgataattctaccagcactattttaataagaatcctgcctggaaatgattaaatgtgtgccgcaacagggatttttttgtttctcacgcctgtttttattccctatgatgatcataaccattagccatgctatctttctagccattcctccatcatctaagtattgtttttttttggtggggaagtattgggatttcttaacttccagtctgatacatactagatttatgttacttcatgactcaaggagcgag

SEQ ID NO: 68712 - DNA, 1050 bp, Oryza sativa
  Clone ID: PAT_MRT4530_69448C.1
atgaagagcctaagctttgtgcttgggcagctcggcattgcagctgggaactatctcaactccagcatcctcagcattgttgtgggtgcgatgtctccgagtcctacttggagaccgcctgacctgcgatataaaagggaccccccaagggacctaaggcatcgaatttcagagcctacacaacgaccacagcctacaaagtcggagactacaggagccaagtcgccgggttctactactattacatcaagcttcgtcgacaacggcgtcaacaccggccccatcctaggagtccctacttcaacaatgctggtgtggactcaagtcggcgaaatcgtctttccggtttacaccacggtaccaatctcgacagattcatcaatgaccagaaacgagaacgtcgtggctataaacccggacgatcctgtgtcaaaggatcctcccgccgtggcggagaacggaacatcgatgccatatgagcccgagaaggttcctagttcggccaaatcttgtccttccgacaagaactgcgagccgacaaggacatcttccgaaacgaagaatcacgacttctcaagctgcaaggtctttctccgcaccatgaaaacgacgcttcctaaggtccaacagtcaggaacctccctcaaggacacagacaaggaacaagaagcgacgttgacctcagatcgattcgttggagtaatcgacatcgatccccatgagccatcggtccttcacctactcgaagactatggctcgtcatcttccagtacaccgcgcgacgtgtttgccatcggtgggactaacacatctgcacaggctaacgcagaggcggagaaccagacggtcacgccgacccaacatctcggcaccgtcaacgcaatactgagagaagctccctacgaccccgtgcttaacaatgatctcgcacagcacaaccagaacgaccaacagctgaaggtgccgacggcgaaccaccgaagcagcggacgtcgccgagatgagctacccctcaacctcgcggcaccggcgatctccatgaccatctga

SEQ ID NO: 68713 - DNA, 5019 bp, Oryza sativa
  Clone ID: PAT_MRT4530_69449C.1
gatctgtgtgactggcctggctttccacaacgcttcggagccttcctcgacagaaacgctctcctccgaacggtcggatactagagcaattaaactaaatcaacaaaacaatgatgacgtcatgctgacgtcagcaatggcggccggttagggtttgcgagctcgccggagctagggcggtcgaccgggtgattggaggacacctacgcgtagaaaacatcgagacgaacccgatggtactcaccacaacgtctatcgacgaacggtgatggccggcgacgaggaggaaggcggtggcagctcggcttgacggcgacggcggagctccggtggtcggcggcgaaggaggacgggcggccgagcttcctcacctccgtgcgcacaagagacaggaatactccattgaggggttgatagcatctcttgatgttgaggagaaagctcgggaaaaagacgccgcgtctaaggatgatggtgggcagtccagtgccaatgttgtgcacaaggcctagaacaagagcaaggggaaatataaagctcaacagaccaccaacttcaagaggcagaagaagaacaacaacaatcctaaccaggatgagaggatttgctttgtgtgtgggcaacctggtcatctggctaggaagtatccacagcgcaaggggatgaaggcacctattattaggcatagtccaatcggctatgacatcggcgagaacctcggacttgatggctgttcgtggtacaaagtggacgtcaaactggcttagctcgactacccatttcgcaatgcggccgataacgtctttgtttctcatgacttcgccaagagggaaggcggagacaactgtgaccctgtgggcttggaagtggtggtgtagctttcttgacgtcatgattactgcgtagagcagtttttggatctgtgcgtaccttgtcttcgcgtcgtggagagctttgctgacgtaatagactggtctctgtacattttctctttcgacaacaatgacagtactcacagagtagggtgtggcggtaatatagaggaataactcttcattaggttggggagcaacaagtacagggggatttgataggtagcacttgagtgcgatgaacgcttcttaggcttcttgtgtccatacaaatttgtcctgctttttagcagtgcgaagaaatgctgtccttgttctcccatcctaacgacgaacctacttagtgccgccatgcatccggttagcttcagtacctccttgagtcttgtgggcgacttcatgttctcgattgccttgatcttctcggggttcgcttctattcctctgccagagacaaggaacccaagcagtttacccgacggtaccccgaacgtgcacttctcaggattgagcatgaggcgatattgtctgaggttgtcgaaggtttcccgtagatcgtcaatcaatgagtcgcatgtcttggttttgacaacaatgtcatcgacgtaggcctcaacattgttacccagttgatcgctaagtgccccttggaccgtacgctggaaaatatttcctgcggttatcagtccaaacggcatttttacgtagcagaatacaccgaacgatgtgatgaatgttgtcttttcctcgtcctcttttgccatgcttatttggtggtagccggagtaagcgtcaaggaagcttaacagctcacaaccagctgttgagtccactagttggtctattcgagggagagggaagtgatccttggggcacgccttgttgaggtcggtgaagtcgacgcacatcctccacttcccgttggccttccgcaccatgactgggttggctagccactctggatggagtacttctctgatgaaaccagctttgagaagtttatcgagctcttctcgtatggcctgtttctgatctggtgcaaatctccgcagcttttgctttactggcttggcaacgggtcgcaccatgagtttgtactcaatcacctccctagggacccctggcatgtcggacagttgccaagcgaatacgtccgcattatcgcggaggaaggtgatgagcgcgagttctgtcttgtcggggttggcactggagagtggaacgattttaattgcgtcgtctggttttggcatcttagtcgttttgatcattttcttgggtggctcggctgtggcgggtgggctgggcgtgtgctcgaccatgtcgaggctctgcttgtcgcattggaccgccagctttgtgtttccttgaatagagattgttcccttcggctcgggcatcttgagtacctgatacgcgtagtgagatgcggccatgaacttcgcgagtgcagttcttccgatgatggcgttgtatgctgtatcaaactcagcaacatcgaatgttatcttctctgctcgaaagttgctcgcttggccgaaagacacaggaagcgtgatctagcccagtggcttggacgaagactaaggagtgattccatggaagggttgatcggtaggcgtcaactcgtttcgtggaatgcccattgcgtccaaggtgctggcaaagagaaggttgatggagctaccgccatcgacgaagactcgcgctaccttgatattccgaatagtgggttcaaccacgatcggatatcgtcgctgtggaacctccgaagatgtgcgagacatgaagatcggaatctggatacgccgagtccgagtcctgagtggttgcctcagtggccttctcaactacacgtactcgcttgcccttctccaaagccagctgctttgccaacgactttttgaagatgaggcactcctccagagaatgtttgtccgacttgtgtatggggcaccatattctcttcgtatcactgccttgtgggtctgggtgtttgggcgggcgcttgtattcagacacgaggacttccgcttgagctttcctcttcccactcttgccgcttttcttcttgcttgattcgggtgtgtccttggctggcttcttctctcctcccgcctttgactcgtcgttcttgcgtctcactgcgtcgtctgcatgggcgcatcgatcgacaacctcaaacaaacttcgagtcgttgtgattcgccttgttgccaactcctgggtagtatagcgatctctgacaccggttttgaaagcacgaatcacagaagcatcggtgatatcggggatcgtatttctgcactcattaaagcgccgaacaacacgtgtaaatcgtcttcgatcgcgtggcgcttgtaagttccctggaagttagcgacgaattgctaccacaaatctgcccatgaagagatcgagtagggtgggaggtgcatcagccacgaacgcgcagaacctttcaacgccgttggcaaatagtttgctaacgcgttgtcgtctgccccagcagcgtatagtaccgtggagtagacctggaggaattcttcagggtcagtactcccatcgtacttctctattgctccgggtcggaatctctcgggccatcggacatcacgtagagaacggttgaaagctctacacccagtgcagggggcggtgggttgtcggcgattgtgtgtcctccgtggatgtctatcggatgacgaagatgaagatgatgacgatgatgacggtggttcactcggctccggtgtgcgattccgagggcgacgtttaggttctcgagaattctgtcgtcatccaccattgttgtcctagcgccgatccccattatcatcaccgtcatgttgacgccctcgaccagcatcgtctggtgtccgctgttcgcgatcgtcgcggtcgcggcagttgtgacgtcgctcttcgttctcgcgacgttgtgaagaaacacgatgtcgggaatgattctcattgtctcgcgtgcgtcgtgcttctcggcggccattcagatggtcgcggagatcgccggtgctgcgaggtggatgggtagctcatctaggtgacgtccgctgctccggtggttcgccgttggcagcgccagctatcagtcgctcttgttgtgctctggtagcggcttcctcgaacgcgttactgagattggctaccgattcccatagtcgttctatccatcgtgcgagatcatcgttaagaacggggtcatagggagcttctctcagtactgcattgatggtgccgagatgttgggccggcgtgaccgtctggttctccgcccctgcgttagcgtgtgcagacgtgctagtcccaccgatggcaaacatgtcgcgtggtgtactggaagatgatgagccatagtcttcgagcaagtgtaggactgatggctcgtggggatcaatgtcgattactccaacaaatcgatccgaggtcaacgtcgctccttgttccttgtttgtgcccttacgagaggttcctacctgctggaccttaggaagcgtcgttttcatggcgtggagaaagaccttgtagcttgagaagtcgtgattcttcgtcttgtgaataggacaatagacatcatgagttggagaagtacgctggattccacgctctttgcaagcacgaattttagcttgtacgttgagaaaaacccagcaagcttgcaagttgtgcttcctggacttgtggataggataccaggacttttttacctcagaagttgtccttgtcggctcggagttcttgtcggaaggacaaggttcggccacactaggaaccttctcgggctcgtatgacgtcgatgttccattctctgctacggcgggaggatccttagacgcgggatcgtccggggttatagccacggcgttctcgtttccgataattgatggaccagccgagattggcaccgtggtgtaaaccgggaagatgatttcgccaacttgagtccacaccagcattgttcaagtagggactccatgaatggggccggtgctgacgccgttgtcgacgaagcttgatgtcatagtagtagaaccttgagcaccaaagctccctacgtggcgcgccactgtcgacgatgggtacccatagaccggatatagagggtattggggtacactggtacgatgat

SEQ ID NO: 68714 - DNA, 4728 bp, Oryza sativa
  Clone ID: PAT_MRT4530_6944C.1
atgagggttcacacacatatgccgcgctacaagcctgagtacttgtttggtgttgagggatttgtccaggagttgcgtacgatgtcctttgccataggatttgggactgcccctttttatgcccagattcctcatgatcatcacgaaaagaagtgccgagtcaaagtcaccttgaacagtaatagtgaggatatcccctcagtgatgttcgaagctggaggaagaaactgcatccatgcatgtcaggaggtggcaaggatcgccataggagagcttcacgatcgctacagtgatcagttggccgacactgagtatcgctaccatcctcgtcaaccacagggaagtgaccgtggcagctaccttgagactgagggaattgagaatgatgctaccacaaggcatttggttgagatgctgtgggctatggatgaaacccgtgcggagactgtgttagcagctcaagatcgtgaagaccggaatcgtggtaagatttgcaagctagaggacaaagtggatcgtttggagaaggaactagccgcattgaagggagaagcaccaccgcagaagtccaggattcgtcttaccgcaaggaagagagctctatttgtccctcgctaccaattggcgccaaaggtccgtgtggtagaaaaagaagttaccccagccctagcagatcctccggtcgtcaacatggtgctcactcgcagcaacgggaatggccccaacaacaacaataacaacaacaacaacaatggagaaaatcccacacttgcccaagtcctgtctcaacaggcacagcttatgaacatgatgatgcagcaactccagaaccagactactgctgaacctatcacttggcttgaattcaccactgctttccggaagacgcatataccatcgggagtggtgtctctcaagaagaaggaattcaggtcgctcacccagggatctcgctctgttgccgagtatctgcacgagttcaatcgtctggctcattatgctccggaagatgtgcgcactgatgaagagcgccaggagaggttcttggaaggacttaatgatgagctttcttatccactcatgactggggattattctgatttccagaagttggtggataaggctattcgccaggaggacaagtacaaccgcatggagcaaaagaaacgccggattgctaaattcaaggcacaacaggggaatagtcaaaggccgcgtcttactttaggaccccagtctatgccacagggaggttcttcgtctgttgctcgtccgcagcgtcaattcttcaacaacaacgcggtcaacaacatccgcaatcaagctccacgtcctgttgcagcctcgacacagcaacaacctgccaagagggagcaaggcagcaagcccgtggtgtgtttcaactgtggagacccaggacattacgctgacaagtgtccgaagccccgacgcgtgaaggttgtccctgtccagagcaactctaccgtaccagcatcaaaggcccgtgtcaatcatgttgctgctgcagaagctcaagatgctccagatgtgattttgggtacgtttcttgttaacttagttcctacaacagtgcttttcgattctggtgctacacattcattcttatctatgagttttgcgggaaatcatgggatggaagtagaagatcttagacgtcctatgatggttagtactccaagtaatcaggcactctctttgcaacgtagcccctctgtcaaaatagaaattcaaggcgtaccatttctggccaatcttatcctgttagaatccaaagaccttgatgtcatcttagggatggactggttagccagatataaaggtgtgatagactgtgccaacagaaaagtaactatcaccagtaatgatggtcgagttgtaactgttcatgcattgtcttctgagtctttaaggtcaagactgaaccaaataactttggaagagattcctatagtccgggagtatcctgatgtgttcccagatgatttacctggtatgcctcctaaaagggatatagagttcagaatagatttggtaccaggaacaactccgatccataagagaccttatagaatggcagccaatgagttggcagaagtcaagaggcaagtagacgatttgcttcagaaaggatacatcagaccgagttcatctccatggggagctccggttatttttgtggaaaagaaagatcatacccagaggatgtgtgtagactatcgtgcactaaatgatgtgactatcaagaataagtatccgctgcccagaattgatgatttgtttgatcagcttaaaggtgccaccgttttctctaagatagatcttcgatcagggtatcaccagttgagaatcaaagaggaagatatacctaagacagctttaatagaagagcatgaagaacatcttcgccttgcactagagaagctacgagaacatcaactgtatgctaagtttagcaagtgtgaattttggttgtctgaagtgaagttccttggtcacgtcatctcagcaggaggagttgccgtcgatcctagtaatgtggaatccgtaaccaactggaaacaaccgaagaccgttttagagattcgcagtttcctaggcctcgcaggatattatcggaggtttatagaaaatttttccaagattgctaagcccatgacacgtctgcttcagaaacatgtgaagtacaagtggtcagaagaatgtgagcagagttttcaagagttgaagaatcgcttaataacagctcctattttgattttgcctgatctaaagaagggtttccaagtgtattgtgatgcatccaaacttgggttaggttgtgttctgatgcaagatgggaaggtggttgcctatgcatctcgtcagttacgtccgcatgaaaagaactaccctactcatgatcttgagttagctgcagtagttcatgcgttgaagatttggcgtcattatcttttcggtactcgtacagaggtgtataccgatcacaagagtttaaagtatatttttactcagccggatctgaacatgagacaacggagatggttggaattaattaaggattacgacatgggaattcattatcacccggggaaggctaatgttgtagcagacgctcttagcagaaaaggctattgcaatgctacggaaggacgacagttgccattggaattatgcaaggagtttgaaagattaaatttggaaattgttagtagaggtttcgttgcagccttagaagcgaagcccactctaattgatcaagttagagaagcccaaattaatgatcttgatattcaagaaatcaagaagaatatgagaagaggaaaggctatcggtttcttggaagatgagcaaggaactgtatggttgggcgagagaatctgtgtccccaacaacaaagatttaaaagatgcaattctgaaagaagctcatgatactttatattccattcaccctggtagtaccaagatgtaccaggatctcaaggaaagattttggtgggcaagtatgaagcgtgaaatcgcagaatacgtagcagtatgtgatgtttgtcagcgagtcaaggcagaacatcagaaacccgccggtttgctgcagcctttgaagattcctgaatggaaatgggaggaaatcggtatggatttcatcactggtctacccagaacgtcatcaggccatgactctatttgggtgatagtcgacagacttaccaaagtggctcatttcattccagtaaagacaacttattctggaagtcggttggcggaattgtatatggccaggattgtgtgtttgcatggcgtccctaagaaaatagtgtctgatcgaggtagtcagtttacttcaaatttttggaagaagcttcaggaagagatgggttctaagctgaactttagtactgcttatcatccgcaaacagacggacaaaccgaaagggtgaatcagattttggaagacatgttgagagcttgtgctttagatttcggtggaagttgggataagaatctaccttatgcagaattttcgtacaacaacagttatcaagctagtcttcagatggctccttacgaagcactgtatggtcggaagtgtcgcactccgcttttatgggatcaaacgggagaacgtcaggttttcgggacggatatcctgagggaagcagaagaaaaggtgaaaatcattcaagaaagattgcgtgtggcccaatctcatcataagagttatgccgacaatcgccgcagagatttgagttttgacgaaggagattatgtgtaccttcgtgtcacgcctcttcgaggagttcatcgttttcacaccaaaggaaaattggcaccgcgttttgtgggaccttataaggttgtcagtagaagaggagaggttgcttatcagttggagttacctcaatctttggcaggagtccataatgtgttccatgtgtcgcaattgaaaaagtgtttaagggtacctaccgaagaagctaatcttgaacagatagaagtccaagaggatctgacctatgttgagaaaccaatccgtatcttggaaacaaatgagagaagaaccagaaatcgagttatccgtttttgcaaagtccaatggagtaatcactcggaagaagaatcaacttgggaacgagaagatgaattgaagtcagctcatccgtatctgttcgccagttcttctgaatctcgaggacgagattctgtttaa

SEQ ID NO: 68715 - DNA, 1418 bp, Oryza sativa
  Clone ID: PAT_MRT4530_69450C.1
ccggccgggacccattccgctcgctcgtcgactcctcgtctccgcgagagagagaaagagagagaggggagggagcggaggtaaacccaaaaccctagcccgcgtcgtcgtcgtcgtcgtcgccggcggcgagatgtcggcggcggtgaacgaggagacctcggtctacgtcggcggcctgccgtacgaggccaacgaggacatgctccgcgacgccttcggccgattcggcaccatcgtctccgtcaaggtgataaatgatcagagagtcagaggcaagtgttacggttttgttactttcactcatgctgatgctgcacagcatgctatctcaggcatggacggcaagagaataaatagacgtgttgttagagtgaatgaagtgcgtactagaggtgcccgagaattcgggcgtgaaggttttcggcgagaacctggaagcgcaagggatgcttattgggacagaagggatagagaaaggagctatgaccgtgacagagatccctaccatgacagggatagtgatagatctcgtgaccgtgatagagacagattttacgaacctagaggctttgatcaagaaattgactatcccatggatcaagatcatggggatgaaaggcgtagagactacgaccgtgcagcagaaatgcataatgttgattcggataatgacagagaaaaagaaaactctaaagactatgatagtgaaagagagaaagaaaaggagcagcgatcaagaaaaaggttcagccgtccaaaagatcatgatagcagggatctatcagtttccagtgatgatcttcacagtgatgcaaaacgacagttgaacaaagcaattcaaatgcgcgaggaccttgaaaatgaggttagtcagatcaaagataaagttgcagcaaaggaacaacacattgcagatttgcaaaagagatcccagaagttagaggatgaattgtctgctgcacggaaagtttcttcagaacgacaattggttgttacaaagctgtacaaatgttttctgcaacttcaagactacaatgacagggtgaagatgtctgaaaaggagctccagtctcttattgacgatgcaatgggtgaggttgacattggtgaagaagccacaaccaaagatggttcaatgtatgagaatggcgtagcatgaaaatctgcacatcacaaaaccggtattattagtttatcatggtgctaactttcctagaagtacaatataccatgaagaactgtaacaagtgattcatgtaagtgaaggctaggaaaccatgtattagtctgcagattgtttagtgtgaacttttgtcggtgtagattattagcccgaggaattcttgcctgactttgacaagtgataatgtgtatgctgtccgtaccatgccaactcgagcagttatctgactttg

SEQ ID NO: 68716 - DNA, 642 bp, Oryza sativa
  Clone ID: PAT_MRT4530_69451C.1
atgccgggggtccccagggaggtgattgagcacaaactcatggtgcgacccgatgccaagccagtaaagcaaaaactgcggagatttgcaccagatcggaaacatgccatacgagaagagctcgataaacttctcaaagctggcttcatcagagaggtactccatccagagtggctagccaacccagtcatggtgcggaaggcccacgggaagtggaggatgtgtgtcgacttcaccgacctcaacaaggcgtgccccaaggatcacttccctctccctcgaatcgaccaactagtggactcaacagctggttgcgagctcttgagcttccttgacgcttactctagctaccaccaaatcagcatggcaaaagaggacgaggagaaaacaacattcatcacgccgttcggtgtattctgctacgttaaaatgccacttggactgataaccgcaggaaataccttccagcgtacggtccaaggggcacttagcgatcagctgggtaacaatgttgaggcctacgtcgatgacattgttgtcactaccaagacatgccactcgttgattgatgatctacgggaaaccttcgacgacctcagacgatatcgcctcatgctcaattctgagaagtgcacgttcggg

SEQ ID NO: 68717 - DNA, 1370 bp, Oryza sativa
  Clone ID: PAT_MRT4530_69452C.1
cttctcaagctgctaggtctttctccgcgccatgagaacgacgcttcctaaggtccagcagtcaggaatctctcttaaggagacagacaaggaacaagaagcgacgttgacctcggatcgattcgttggagtaatcgacattgatccccacgagccatcagtcctacacttgctcgaagactatggctcgtcatcttccagtacaacacgtgacgtatttgccattggtgggactagcacgtctacacatgctaacgcagaggcggagaaccagacggtcacgccggcccaacatctcggcaccgtcaacgcaatactgatagaagctccctatgactccgtgcttaacgatgatctcgcacgatggacagaacgactacgggaatcggtagccaatctcagtaacgcattcgaagaggccgctaccagagcagaaccagaacgaccgacagctggcagtgccgacagcgaaccaccggagcagcggacgtcgcctagacgagctacccctccacctcgcgggaccggcgatctccgcgactatctgaatggccgccaagaagcacgacacgcgcaagacaacaagaatcgttcccgacatcgtgtttctttacgacgtcgcgagaacgaagagcgaggaggccgctcgaacgaagaccaacaccaccataatcgtcacagccaccgcgaccgcgacaatcacgaacagcggacaccagacgatgctggtcgagggcgtcaacatgacggtggtgataatggggatcggcgccatgacaacaatggtggacgacgacagaattctcgagaacctgtacgtcgccctcggaatcgcacaccggagccgagtgaaccatcgtcatcatcgtcatcatcttcatcttcgttatccgatagacatccacggaggacacacaatcgccgacaacccaccgcccctagcgccgggtgtagagctttcaaccgttctctacgtgatgtccgatggcccaagagattccgacccggagcaatagagaagtacgatgggagtactgaccctgaagaattcttccaggtctactccatggtactatacgctgccggggcagacgacaacgcgttagcaaactatttgccaacggcgttgaaaggttctgcgcgttcgtggctgatgcacctcccaccctactcgatctcttgatgggcagatttgtggcagcaattcgtcgctaacttccaaggacttacaagcgccacgagatcgaagacgatttacacacattaacacagaattcgggtgaatctttaagggactatgttggcgctttagtgagtgcagaaataccatccccgatatcaccgacgcttctgtgattcgtgctttcaaa

SEQ ID NO: 68718 - DNA, 1091 bp, Oryza sativa
  Clone ID: PAT_MRT4530_69453C.1
gtcaagcgactgatcgtaaaaggggattccgaactagtcgcaaactaggtgcacaaagattacaaatgctctagccctgagttgtccaagtatctcgcagaagtcaggaagctggaaaaaagatttgatgggatcgaggtctgacacgtatatcgcaaggacaacatcgagccagacgatctagcacggcgtgcatccagacgagagccactcgaacccggcacctttctggacatcctgaaaaagccatcggtgaaagaggcaaacgacgaagatagcccagtcacccccgacatcagctcagggggctacagaggcagagcacgccgttgccgacatcgagaccacggacgactggtggaccccactcattaaattcataagcagcgacgagttgcccgaggacgacgcagaagccgagaaaataacccgtcaagcaaaaatctactgtatgatcggcaacgatctatacaaaaaggcgccaaacggggtacttctcaaatgcgtctcgtccgacgacggcaaacacctcctcctcgacatacacgaaggggtctgtggatcacatgccgccagtcgtacattggttggaaaagcttttcgacaaggatttttctgcctaaccgccctcaaagacacttgcgacatggtacaacggtgtgaagcttgtcaatttcatagcaaacacacaaagctaccagcgcaagcactgcaaaccatccctctcacttggccgttctcgtgctgggggctcgacatactcggtccattcccacgaggacagggcggttacaaattcttgttcatggcaatcgacaaattcaccaaatggatcgaggcaacacccacgggggaaatcaaggccgacaaagccatcaaattcattaaggggatattttgcagatatggattgcctcaccgcatcataacggatagcggctcccaattcatcagcgccgatttccaggattactacattggactgggagtcaagatatgcttcgcctcggtttctcaccctcagagtaacggataggtcgaaagggcaaacggtatagtactacaagggatcaagacccgtgtctacgaca

SEQ ID NO: 68719 - DNA, 733 bp, Oryza sativa
  Clone ID: PAT_MRT4530_69454C.1
cgacggcattgatgactatcgatcgataaggccgaattcgagctcggtaccctatcacaagaacaacatcgagtcggacgatctagcacggcgtgcgtccagacgagagccactcgaacccagcacctttctggacatcctgacaaagccatcagtgaaagaggcaaacgacgaagatagcccagtcacccccgacatcagctcgggggctacagaggcagagcgcgatgttgccgacatcgagaccacggacgactggcggaccccactcattaaattcataagcagcgacgagttacccgaggatgatgcagaagccgagaaaataacccgtcaagcaaaaatctactgtatgatcggcaacgatctatacaagaaggcgccaaatggggtacttctcaaatgcgtctcgtccgacgacggcaaacacctcctcctcgacatacacaaaggggtctgtgggtcacatgccgtcggtcgtacattggtcggaaaagcctttcgacaaggatttttctggccaaccgccctcaaagacgcttgcgacatggtacaacggtgtgaaggttgtcaatttcatagcaaacacacaaagctaccagcgcaagcactgcaaaccatccctctcacttggccgttctcatgctgggggctcgacatactcggtccattcctacgaggacagggcagctacaaattcctattcgtggcaatcgacaaattcaacaaatag

SEQ ID NO: 68720 - DNA, 478 bp, Oryza sativa
  Clone ID: PAT_MRT4530_69455C.1
ctcaagagttagaagacgaagaagagcaagggcaagggacacaagagctatggaaggaggaacagtaactacgcacatggcagaagcattaacaccgagggtcgcacacaagaacgtagactggagagaaatcagattcgaggaaagagatgatgaatacatagacacaggggccaaacgttaaactggagcagctgtaagaaaggataactgccatgacaggtctgaaggaacacgctactgtaaatcttcctgtaggaaaaggagctatatctataattgttgaaagaacaaagaacacatgctagtccaacgaaaaaaaattcaggctgcagaaaatatggaatacaaacataccgaacttttggaatttccgtggtcctgatgcactaacttatacagaacctacttgagctgccaggttatgcatagaaaatacagaccgattacatagtgtactctttggcatgtaccatgt

SEQ ID NO: 68721 - DNA, 378 bp, Oryza sativa
  Clone ID: PAT_MRT4530_69456C.1
cattgtatttcttttagttaaatggtgggtacccgtagaccgaatatagagggtattggggtacgttggtacgaggatcgacgagatcgtagtcgagttgattcgactagatcacccagcgacttggctcctgtaggctccggcttcgtaggctgtggtcgttgtgttggctatgagatttgatgccttaggtcttcccggggggtcccttttatatcgcaggtcaggtggtctccaggtaggactcggagacatcggaccctgcacgatatagtgacgacccagtcctatacgggtaggaacctttccattgatggacttcgagatgaatttccttagcgtatacagagaacgtccatacacgcgcagatgtaccgt

SEQ ID NO: 68722 - DNA, 2147 bp, Oryza sativa
  Clone ID: PAT_MRT4530_69457C.1
agttatccaaaacctcatgtgctcgctcaggtggttgtgattcgccttgttgccaactcctgggtagtatagcgatctctgacatctgttttgaaagcgcgaatcacagaggcatcggtgatatcggagatcgtatttctgcactcattaaagcgccaaacgtagtccctcaaagattcgcccggattcgtggagtagacctggaggaattcttctggatcagtactcccatcgtacttctctattgctccgggtcggaatctctcgggccatcggacatcatgtagagaacggttgaaagctctacacctggcgctaggggcggtgggttgtcggcgatcgtgtgtcctccgtggatgtctatcggatgacgaggatgaagacgatgacgatgatgatgatgggtcactcagctccggtgtccgattccgagggcgacgttcagtttctcgagaattctgtcgtcgtccaccattgttgtcctggcaccgatccccattatcatcaccgtcatgtcggtgtcctcgtccagcatcgtctggcgtccgctgttcgcgagcgtcacggtcgtggcggttatgacgatatggtggtgttggtcttcgttcgagtggcctcctcgctcttcgttctcgcgacgtcgtgaagagacacgatgtcgggaacgattctcattatctcgcgcacgtcgtgcttctcggcggccattcagatggtcgcggagatcgccgatgccgcgaggtggaggggtagctcgtctaggcgacatccattgctccggtgcttcgccgtcggcaccgccagctgtcggatgttctggttgtgctctggtagcggcctcctcgaacgcgttactgagattggctaccgattcccatagtcgttctgtccatcgtgcgagatcatcgttaagtacagggtaatagggagcttctctcagtattgcgttgacggtgccgaagtgttgggccggcatgaccgcctggttctccgcctctgcgttagcgtgcgcagacgtgctagtcccaccgatgccaaacacgtcgcgtggtgtactggaagatgatgagccatagtcttcgagcaagtgtagtactgatggctcatggggatcgatgtcgattactccaacgaatcgatccgaggtcaacgtcgctccttattccttgtctgtatccttaagagaggttcctgactgctggaccttaggaagtggcgttttcatggcgcggagaaagaccttgcagcttgagaagtcgtgatttttcgtcttgtgaataggacaatagacatcacgagttggagaagtacgctggattccacgctctttgcaagcacgaatttcagcttgtacgttgagaaaaacccagcaagcttgcaagttatgcttcctggacttgtggataggataccaggactttgttacctcggaagttgtccttgtcggctcgtggttcttgtcggaaggacaaggtttagccgcactagcaaccttctcgagttcgtatgacatcgatgttccgttctccactacggcgggaggatccttcgacacggggtcgtccggggttatagccacggcgctctcgtttccggtcattgatggaccagccgagattggtaccgtggtgtaaaccgggaagacaatttcgccgacttgagtccacaccagcattgttgaagtagggactccttgaatggggccggtgttgatgccgttgtcgacgaagcttgatgtcatagtagtagaaccttgagcaccaagttcccctacctggcgcgccactgtcgacggtgggtacccgtagaccggatatagagggtattggggtacgctggtacgaggatcgacgagatcgtagtcgagttgattcgactagatcacccggcgacttggctcctgtagttttcggcttcgtaggctgtggtcgttgtgtaggttatgagatttgatcccttaggtcccccaaggggtcccttttatatcgcaggtcaggcggtctccaagtaggacttggagacatcggaccctacacgatataataacgacacagtcctatacgggtaggaatctttccattggcggacttcgtgatggatttccttagcgtgttcagagaacgtctgtatatgcaccgctataccgt

SEQ ID NO: 68723 - DNA, 2544 bp, Oryza sativa
  Clone ID: PAT_MRT4530_69458C.1
atggcggcgggcaccgcatcgccaccgccggacgcggagcctcccgagtgcccggtgtgcctctcccccttcgacgccgcctccgccgcgccgcgggtcctcccgtgcggccactccctctgcggcccctgcatcgcctccctcccgccggcctccgcctccgcctccgcctccgccgcctcgctccgctgccctctctgctcccagtgcgtccctttctcccgcgctctcgggccctcctccctccccaaaaacctcgccctcatctccctcctcccctcgcccccaaacccctctcgttctcgcaccgccgccgcggcgccgccgcctcctcatgtcccgctccacgcggaccactcgcgtctcctctcccgcttccgccacgccgtcctcccggagtccgcttcgccgctccactcgcccgctcccgccgcgggcctcgccatcgggtccttcgcttccgacctcggcgccccgtggttctgcccgcgtggccaccccgtaagcctcctcccgatcgaaacccccgccgccgccgccaagcaggagtccccgttgtactaccggcccagccacgcggcgcgggtggccgccgcgatcgatgcgctgagcgccgcggcgagggatgaagtgatcgatttggtggccgtctcgtcgcggttggcgcggcgggtttgcagggtttacggcttctggatgggccccgaggcggctccgctgtggctgctctccgagcggcattcccgcggagtctcctgcttgttggaggagaggagccgacgagaggagacggtggctctgatcagaaatgtcggaatggaggtctgtgaagcgttcatgggattgcacggagaggggctggtactggggtgcatagggctaggatgcttctgcctcgatcgctttggacactgcctgctcgacctgaatcaggttttggccttgtgccacggggttcgggtaggggtttgctcatccaagtctaaggccttcatggctcctgaggtggcagaggtggtgcatgacaagttgcagataaaggatcatgatttcagtggcttgttagggcctagttcagatgcttggttgcttggttgtttattggtggcacttgtaactggggatgagcagcttgcagcaggatggagtactgaggggtcatacgatgattggaagaatgaagtgcttacgaaggttgatgcttcattggttggcacacatatggaaccatggtctgcaaccatagtgtcatgtttgaactatgatccagaaggccgtccagaaattgctgatgtctggaaatgtattaacggctcattgatgaattccgacattgaagctttgattcctaatgttgatcttgcagctcgaaagagttttatgtgtttgctccttggggagttgtcctcaatgtgctctaaccttggtgctgttgagtcagatgatacaatgcatctttctcaggatttggatgacaaacattcaactccagatgatgcaagcagtggtggtattataaacaacgaagaagttggtgcagctggaatggatgggccaaaatgtggactgtacaattcttcaactctgcttgctcaccgtgactgtattacgggattagccattggagtggatatttttaatgttatgcacttaacaagaactgccactcaaggacttcccaataatagatcttcattgactgcaggaggctttttgtttagctcttcttacgacaagacaatcaatgtatggtcactgcaggacttctctcataaacaaagtttgaagggccatgaacacaaaatcacagcaattgttgttgttgacaatgataatcagtcactttgtataagtggagacagtggtagtggaatatttgtctggtgtgttgatccttcactcagtaatgaaccattgaataagtggtatgaaagtaatgattggatttatcgaggtgttcactgtttggctgtttctggaactggttatctttacactggtagtagagacaaatctattaaggcttggtctctagaggattattcactacgctgcacaatgacaggtcacaaatcaactgtttcttgccttgcggttgcctgtggtattctttacagtggaagttgggatggttctattagatcatggtggctcactgatcacagcccgctgtctgtactggaagatggtacaccaggaagcattactcctgtgctgtcaatttcaacagaactcgattttgttgttgcatcatatgaaaatggctgtttgaagatctggaaggatgatgtcctagtaaagtcagagaaacttcaaaacggtgctatatatgctgctaaattgaatgacaagtggctctatgctggtggatgggataaagttgtaaatattcaggagttattggaagatgattcagaggtggaaatcagagatgttgctacctttacttgtgattcaattataacttcaatactgtactgggatggaaggctgatagttggactttctaacagggagattaaggttttctacaaggcatcttaa

SEQ ID NO: 68724 - DNA, 4272 bp, Oryza sativa
  Clone ID: PAT_MRT4530_69459C.1
aaaactccaaatactagcattcgcttgttgggcgggtacggctattcgaatagttttactctggccagaggtgtactactgtacccacaagacacagcctcaacatcatgtctaccatgcgtcgcgatactagaaagtacccgaatagaggctgtgacaataccccctgcacaacacaactcaccgcagtgcactgttcctggatcataatcaccccctctacaaccagaggcatggactccccagcgacccccatggacttctcgccgcttctcagtctggtgccccgcaatgaatcatgctatacaaagggtaaagccgttgcccacgctggcttgtggttggccacctctctcctttccgaggtcatcaagtcctggtgtcttatccacaagtccaggaagcacaacttgcaagcttgcggggtttttctcaatgcacaagccgaaatccgtgcttacaaagagcgtggaatccagcgtacttctccaactcgtgatgtctattgtcctattcacaagacgaagaatcacgacttctcaagctgtaaggtctttctccgcgccatgaagacgacgcttcccaaggtccaacagtcaggaacctctctcgaggagacagacaaggaacaaggacgttgacttcggatcgtttcgttggagtaatcgatatcgatccccgcaaaccatcagtccttcacttgcttgaagactatggctcgtcatcttccagtacaacacgtgacgtgtttgccatcggtagaactagcacagctttcaaccgttctctacgtgatgtccgatgacctgagagattctgacccggagcaatagagaagtacgatggaagtactgaccctgaggaattcctccaagcctactccacggtactatacgctgttggggcagacgacaacgcgttagcaaactatttgccaacggcgttgaaaggttctgcgcgttcgtggctaatgcacctcccaccttactcgatctcttcatgggcagatttgtggcaacaattcatcgcgaacttccagggaacttacaagcgccacgcgatcgaagacgatttacacgcgttaacacagaatcagggtgaatcttcgagggactatgttcggcgctttaatgagtgcagaaatacgatccccgatatcaccgatgcttctgtgatccgcgctttcaaaataggtgtcagagatcgctatactacccaggagttggcaacaaggcgaattactacttctcgaaggttgttcgaggttgtcgattgatatgcccacgcagacgacgcgctgagacgcaaaaacgacaaaccaaaggcgggaggagagaagaagccagccaaggacgcatccgaatcaagcaagaagaaaagcggcaagagtgggaagaggaaagctcaagcagaagtctttgcatctgaatacgagtgcccgcccaaacacccagacccacagggcaatgatacaaagagaatatggtgccccatacacaagtcagacaggcattctctggaggagtgcctcatcttcaaaaaatcgttggaaaggcagctggctttggagaagggcaagcgagtacgtgtagtcgagaaggcaactgagacaactactcaggactcagactccgcgtacccagattccgatcttcatgtctcgcacatcttcggaggttccacagcgtactcttcaaacactttggacgcaatgggaattccacgaagcgagttgacacctaccgatcaacccttctatggaatcacccctcaatcttcgtccaagccattgggcaagattacgcttccggtgactttcggccaagcaagcaacttccgaacggaggagataacatttgatgtagctgagttcgacacagcatacaacgctatcattggaagaacggcactcgcgaagttcatggccgcatctcattacgcgtatcaggtactcaagatgcccgggctggagggaacaatcactatccaagggaacacaaagctagcggtccaatgcgacaagcggagcctcgacatggtcgagcacactcccagcccacctgccacagccgagccaaccaagaaagaactcacgctcatcaccttcctccgtgacaatgcggacgtattcgcttggcagccgtccgacatgccgggggtccccagggaggtgattgagcacaaacttatggtgcgacccgatgccaagccagtaaagcaaaaactgcggagatttgcaccagatcggaaacaggtcatacgagaagagctcgataaatttcttaaggctggtttcatcagagaggtactccatccagagtggctagccaacccagtcatggtgcggaaggccaacgggaagtggaggatgtgcgtcgacttcaccgacctcaacaaggcgtgccccaaggatcacttccctcttcctcgaatagaccaactggtggactcaacagctggttgtgagctgttaagcttccttgatgcttactccggctaccaccaaattagcatggcaaaagaggatgaggagaagacagcattcatcacaccgtttggtgtattctgctacgtcaaaatgccgtttggactcataactgtagggaacactttccagcgcacggtccaaggggcgctcagtgatcagttgggtaacaatgttgaggcctacgtcgatgacatcgttgtcaaaaccaagacaggcgactcattgattgacgatctacgggaaaccttcgacaacctcagacgatattgcctcatgctcaatcctgagaagtgcacgttcggggtaccgtcaggcaaactgctcggattcctcgtctctggcagaggaatagaaacaaatcccgagaagatcaaggcaatcgagaacatgaagtcgcccacaaggctcaaggacgaagccgaagaggcgttcatcgcactcaagcgctacttgtcaaatccccctgtacttgttgctccccaacctaatgaagaattgttcctctatattgccgctacgccctactctgtgagtactgtcattgttgtgaaagagaaaaggtgcagagaccagtctattacatcagcgaagctctacacgacgcaaagacaaggtacccacagatccaaaaactgctctatgcagtaatcatgacgtcaagaaagctacgccactacttccaagcccacaaggtcacagttgtctccgccttccctcttggcgaggtcgtgagaaacaaagacgttgtcggccgcattgcgaaatgggtagtcgagctaagccagtttgacgtccactttgtaccacgaacagccatcaattcccaggttctcgccgatttcgtagccgattggactatgcctgaaaacaggtcaggcagccagatcgacaacgaaacacggacaatggcgttcgatggcgcgctcaacagccaaggagcaggtgcggggttcatcttgacatcaccttcgggagatcagttcaagcatgcaattcacctcaacgtcaaggcgaccaacaacacagccgagtacgaaggactactcgctgggatgagagctgcagctgcacttggagtcaagcgactgatcgtgaaaggggactccgaactagtcgcaaaccaggtgcacaaagattacaaatgctctagccctgagctgtccaagtatttcgcagaagtcaggaagctggaaaaaagatttgatgggatcgagccatcagtgaaagaggcaaacgacgaaaatagcccagtaacccccgacattagcccgggggctacagaggcagaacgcgccgttgccgacatcgagaccacggacgactggcggaccccactcattaaattcataaacagcgacgagttgctcgaagacaacgtagaagccgagaaaataacccgtcaagcaaaaatctactgtatgatcggcaacgatttatacaagaaggcgccgaacggggtacttctaaaatgcttctcgttcgacgacggcaagcacctcctcctcgacatacacgaaggggtctgcgggtcacatgccgccagttgtacattggtcggaaaagcctttcgacaaggatttttctggccaaccgccctcaaagacgattgcgacatgatcgaggcaacatccacgggggaaatcaaggctgacaacgccatcaaattcatcaaggggatattttgcagatatggattggctcaccgcatcataacggataacggctcccagttcatcagcgccgatttccaagattactacgtcggactgggagtcaataggtag

SEQ ID NO: 68725 - DNA, 940 bp, Oryza sativa
  Clone ID: PAT_MRT4530_6945C.1
cctcgtcacgacacgacgccgcgccacgacgacgccgcgccacgagacgccacgacgccgcacgccgccgccgcgccacgccgatgccgcgcgcggcgccacgccgccgccgccccgccccgccgccgctccgctgccgccacaccgagaacgtgaacgagcgaacgaacgtgaacgagaacaagaacgagcgaacgaacgtgaacgagccaacgaacgtgaatgagaacgagagaacgaatgtgaacgagaacaaggtgaatgaacgtgaacgagaacgttgtcggacgaacatgaacgagccaacgaacgtgaacgtgaaatgcaattataggcagaaagacgttgtcggagtcgtccctcaagccggagtggtagagctagccctcgaaggaattcgcccaggcaaggaaattcttatggacgagcgcaaccctaccatggacatagtagatggtattagtcaatctgtccatgattcacaaccggatggtggtcagtcaagccgtgtagcaatggaggaggacgtgccgtcgcgggttggctcacatgattcagggcatggaattccagagacaagaatggtggtagataatgttgatagcagtgctgtcatacctcctgagtatgctgatcctcaaattcttactccgatgctgggacaaagatttaagactgagagggatgcctataatttttataatgtttatgctgttagtaaaggatttgggatacgactggacaaagatcgcaagaatactaaaaatcagagaacaatgcggcaaatatgttgttctcaccaggggaggaacccaaaaaccaagaagccttccgttcgaattgggtgcccagcaatgatgaagataaataggtctagagctggtagtggctggtcagtaacaaagacaattgtccttccatggcagctgccattagaaca

SEQ ID NO: 68726 - DNA, 678 bp, Oryza sativa
  unsure (1)..(678): unsure at all n locations
  Clone ID: PAT_MRT4530_69461C.1
ccggccgggaactcgccgtcgtcgcgcctcgacggcttttgctcccctctcccccaccgcctcctccgggcgccgccgccgccgctgccgccgcccgacgacgtagtcaggggggctcgtcaggagtaaggagggagatggggctgagggagaagaagcggaaccagaggcgcgtgctcgcccggcgctcggccgctccccgctccggggagggcaaggacttcctgccgctggaagaaaggcctgggaagaagagggcccgggaggagcagcccgaggagccggagaacacgtccaccgtcctctacatcgggcacactttgcaaattgcgattgttccacctgagaaaattcatccaaaattgtggaaaggtgtgcgacgggggtttacaccaattgatcgggtagcaattgaacggaggaggctgaacaaggataaaacaatagaagagcacaaaaagttggttgacaaaatcgtaaaacgggatgagaaacgtcgcanaagaatcaaagctgctgggattgattacgagtgtccaccccttatcggcagcgttcagccttcagctaagaagatcaagtttgaggattagtgccttttgaccagtagtgacaggacagtcgagtaaaatgactggtttgtttttagtgacgaagacgtgtcaacatcatttttgt

SEQ ID NO: 68727 - DNA, 1051 bp, Oryza sativa
  unsure (1)..(1051): unsure at all n locations
  Clone ID: PAT_MRT4530_69462C.1
tccccgggctgcaggaatcggcccgggcgtcgcgcctcgacggcttttgctcccctctcccccaccgcctcctccggccgccgccgccgccgctgccgccgcccgacgacgtagtcaggggggctcgtcaggagtaaggagggagatggggctgagggagaagaagcggaaccagaggcgcgtgctcgcccggcgctcggccgctccccgctccggggagggcaaggacttcctgccgctggaagaaaggcctgggaagaagagggcccgggaggagcagcccgaggagccggagaacacgtccaccgtcctctacatcgggcacatcccccatgggttctatgaggaacagatgcaaggtttctttcagcaatttggaactgttaaaaggttgaggattgcccgaaaccgcaagacaggaaagtccaagcattatgggttcattgagtttgagaaccctgaggtagcaaagattgtggcagatgagatgaacaactacctgctgtttgagcacactttgcaaattgcgattgttccacctgagaaaattcatccaaaattgtggaaaggtgtgcgacgggggtttataccaattgatcgggtagcaattgaacggaggaggctgaacaaggataaaacaatagaagagcacaaaaagttggttgacaaaatcgtaaaacgggatgagaagcgtcgcaaaagaatcaaagctgctgggattgattacgagtgtccaccccttatcggcagcgttcagccttcagctaagaagatcaagtttgaggattagtgccttttgaccagtagtgacaggacagtcgagtaaaatgactggtttgtttttagtgacgaagacgtgtcaacatcattttgttgcgtgtttaatcggtgttgtatcagtgtgaccaaaattgcacaacgaagcaggaaatttctgagattacgactggtatatctttgagaaaatagaaatcatactgtgttttcccgccgctcaaaaaaaaaaaaaaaaaaaaaacaagaaaaaaaaacgcgtgaaanaaaaaanaaa

SEQ ID NO: 68728 - DNA, 248 bp, Oryza sativa
  Clone ID: PAT_MRT4530_69463C.1
gtcccgccgctccgccgccttcgagccaccgcgccgccgccacgaagccgccgcgctgtgccgcgccgtgcgccgtcgtcgagcccgagggagttgcggatccaagtgaaggccaagacccccaagaccttgagcaaggcaagtcatcactattccttgaacatgttgatcccaattgcgaaattattttgtttataaataaaattgcatgcaatgatgaacatcctacttgtgattatgccatgcct

SEQ ID NO: 68729 - DNA, 669 bp, Oryza sativa
  Clone ID: PAT_MRT4530_69464C.1
atggccaagcagctcgccctcgttctcctcgtcgccgtcgtggcggcggcggcgacgtcggtggccgccgccaccaagctgacgctccacaacctgtgcccgtacccggtgtggccgctggtgacgcccaacaccggcttcccttccatctccggcaacaccgcgcggctcgacggcggcgggcgcgggctcgtgtcgtacgacttcccggcgagcttctgggcggggcgcgtcgtggcgcgcaccgggtgcggcggcggcggcggactggtgcggtgcgagaccgggaacgcgccgccggcgacggtggtgcagctggtggtgcactcgccggagggggcacaagacctggccgcgtacagcgtgagcttggtggatgggttcaacgtcccggcggtgtgcccggcgctggggtgcgcggccgacctgaacgccgggtgcccgcggtcgcagcgcgtcgtcggcgccggcggcgccgtcgtggcgtgccggggcacggcggactacttcaaggcgcggtgcccgctgacgaggacgacggggagcgacgtcgagcccgtgccgcagcactgcctcgcccccggcgagctcaaggtcgtcttctgccagccgtccatggtcgccgccgccgtgccggagctcatccgcaccgtcgtcgccaacatctag

SEQ ID NO: 68730 - DNA, 1138 bp, Oryza sativa
  Clone ID: PAT_MRT4530_69465C.1
ccaggcaccaactcactcccttgaaaagctagacacacacacatggccaagcagctcgccctcgttctcctcgtcgccgtcgtggcggcggcggcgacgtcggtggccgccgccaccaagctgacgctccacaacctgtgcccgtacccggtgtggccgctggtgacgcccaacaccggcttcccttccatctccggcaacaccgcgcggctcgacggcggcgggcgcgggctcgtgtcgtacgacttcccggcgagcttctgggcggggcgcgtcgtggcgcgcaccgggtgcggcggcggcggcggactggtgcggtgcgagaccgggaacgcgccgccggcgacggtggtgcagctggtggtgcactcgccggagggggcacaagacctggccgcgtacagcgtgagcttggtggatgggttcaacgtcccggcggtggtgagcccgcaggccatcgccggcggcgggcagtgcccggcgctggggtgcgcggccgacctgaacgccgggtgcccgcggtcgcagcgcgtcgtcggcgccggcggcgccgtcgtggcgtgccggggcacggcggactacttcaaggcgcggtgcccgctgacgaggacgacggggagcgacgtcgagcccgtgccgcagcactgcctcgcccccggcgagctcaaggtcgtcttctgccagccgtccatggtcgccgccgccgtgccggagctcatccgcaccgtcgtcgccaacatctagctgtgtgtgaggtcctcgtcgtgcacacgtggcgcgtcctgcgtgcgccacgtgtacggactagctgtgtgtagaagtgggtaggggggaataataatgacagtgcgtatacacgtatgtgtacaccgtatgtcgactgtacgcgtacggacgggcacagtctggtattagtgttgtacgtgtacaatctacgacgtattttgttttttatgtaagaaaaaaaaatgctttgatgtgtttttattgccaaaaaaaaaaaaaaaaaaaaagaaaagaactggtgatgtagcatcaccagtagatatgtatgtgaacggggatggaagttattggaaagattgtttgttttgtatgtatgtaaacaggcccgcaattaaagcgttctagtttactt

SEQ ID NO: 68731 - DNA, 1884 bp, Oryza sativa
  Clone ID: PAT_MRT4530_69466C.1
atggaggtgatgagtcggcaccatgctcccgatagaagcctgtgcttactgttactgctgctgttcttgcttcttggtgtgcccatggcagcgtccaccgaacaatcgccagcgcgactgaacaaggcacacgaggacatcatgcgagatattctgagctcggtgggcagtaccaagaactggaacacctgctcaaatccatgccaatggagtggtgttcattgctcttcagttgcatcctctgcgtttgtcactaggctatccctccccggatgtggcctctccaatgccaccatccttgcgtccatatgcaatcttcataccttgcgatctcttaacctctcgagaaactcgttcaccgatttgccaagccaactctctccgtgccccatgaaggctgaattgcaagtgctggatctcagtagcaatatgctgtctggtcaacttggtgatttcgttggttttcacaagctcgaggttcttgatttgtcctccaactctttaaatggcaatataagtacccagctgagtgatttgccaaaactgagaagcttgaaccttagttccaatggttttgaaggcccagtccctacaagcatcgctacctctctggaagacctcgtgctctcgggtaataatttcagtgatcatattccaatgggtttgttcaggtatggaaatcttactctgttggatctctgccgcaataatctacacggtgatgtcccagatggcttcttgagcttcccaaaactcaggattttggtcctttcagaaaacaacctgacaggaaaaattccacggagcttgctgaatgtcaccacactgtttcggtttggaggtaatcagaataattttgttggctcaattcctcaaggaattaccaggaacattaggatgttggatttgagttacaacatgctcaatggtgatataccctctgaactgctctcacctgatactttggagaccattgacctcactgcaaataggcttgaagggttcatccctgggaatgtttctcggagcctccatagtattcggcttggtcgaaacttgctcggtggaagcatcccagaatcaataggcaatgccattgacttggttaatcttctgttagatggcaataagttggttggatatataccttggcagctcagcagatgcaagaacttggcactcatcgatctgtcatcaaaccaggtgcagggtaatatacctattgggctgggcaaccttgagcagctcgtagtcttgaagctccaaaagaacaatctcagtggagatatcccaagttcattttctgacatgtcagccctggaaatacttaacctgagtcataactcattcactggagaactacctttcacaaattctactcagtcactgaagctctgctacttaggtttgcatggcaacaagctcaatggtgtgattccatcgtcgatcagcttgctgcagtctctgatcaccattgatctggggaacaatgagttgattggaattatccccacaaacattggaacctttctgaagttggagcgtcttgatctttcaaaaaactacttgtcaggtcaggtgccatcctcagttgcaaacctggaaagattaatgtgtctattcctttcagacaataacctttccggaccattgcctgagctacctaaatgggtgatggtcaatgtaactggaaatccaggcatcatactagacacggaagaaaatagaacttcaggcagtatgaaaggctcccaggatgatttcagatcagctatatgggtcgcagcagcttcttttgtacttggattcagcttgtccttctattgggctggaccaggggaaaaattgatgccaaggttggagactcttcactgtgacgattga

SEQ ID NO: 68732 - DNA, 458 bp, Oryza sativa
  Clone ID: PAT_MRT4530_69467C.1
cgtcagcttcggagcctcctgttgcggccgccttcttttttttgttgttttttgatttttcgggtttatatttttttattttttttttttttttttttgttttttctttttttttttttggaaaaaaacacccacctaaaagcatattttgacccaaagcaggaggcgcgtcaccccccctacgggacgtaaacacctcccaccaaagatgaacccaactgtgcaaccggggcggggcggtaaaaggaatttcaaaaggtttttgcccgggaccccccccgaaagggatggctttgaacggtaccctttcctcctccaactagctgtgatgcggggaacacactaagatcctccgttgatggagggggaattgccggggggcccaaaaagaaataaaaatgcccatccccccgctgcccaatgacaccaagagggccgccccttcattcgggcaaacc

SEQ ID NO: 68733 - DNA, 145 bp, Oryza sativa
  Clone ID: PAT_MRT4530_69468C.1
agggtgatggatgatcagcctctgcttgttgatttcttgtcgatgaccatggtgaaccgtaaaaacaagaaagcagagatctgtttcatggctagatggcactggcaagtggttttttccttctgcattctttgacgagggcgtt

SEQ ID NO: 68734 - DNA, 261 bp, Oryza sativa
  Clone ID: PAT_MRT4530_69469C.1
atgtccctgccatggatggcgtgtatgtgggtgaggcaagaagacaggagatcacaaagggaggaagatggaggcctcacaggcgatggtgatggcaaaaccgagcattggagatccattgatagaggcgtgatgaggtgccccacagtgcgccgctcgcaggttatgcccagggagggacatgtgcacaaggtggagcacgtcggcggatctgtggatcgaatacttcaggttgatgagatgcaggagtgccaatactga

SEQ ID NO: 68735 - DNA, 257 bp, Oryza sativa
  Clone ID: PAT_MRT4530_6946C.1
gtatcgtgagaaccacctattggaaacatctgacatatcccaagctccctccgggagcagataacgcttgaaccattttcaatccttcctgctcctaaagtcctgaagcatgaccgagcacgcgggtatgttttggctctgaacttgtgacagcaacacatttgtcctaactgcattatctattgcaatggtgttgcaaccgtgcatgtttaaccaggtaaaaaaaaaaaaaaaaaaaaaaaaaaaaataaaatata

SEQ ID NO: 68736 - DNA, 599 bp, Oryza sativa
  Clone ID: PAT_MRT4530_69470C.1
ggccgcttttttttttttttttttctttttttttttttttttttttttttttttttttttttttttttttttttttttggtttttttttttttttttttctttgggggccattcataattcattcattaggcataccaaaagtaaaaagtccaggggaaagcaagaagagttgcctcaaatttctgaataatatggcccctctttctggacttacataacccactggttcatttcataacaaacactgggtcgcaaaaggacacacactgacccaaactcgagggcgggcggacaccattgactggcatactccgatcgatcgaacgaacgaacacggttttatttcggtggcagatcgatcaaattattagctagagtaaaagcagagcaaacgcgacgactatgggaatgcaatgcagttccccctccccggaatctaccaggggggggtcttccagggctgggtggcacccttgcaccacttccacagaacgatttcggggccatcggggatgccgccgtgatccttgtccccatggaaggcgtcaaagttgaggcaaatgttgttcaccatgccgatgcaggggaaagcccttgc

SEQ ID NO: 68737 - DNA, 647 bp, Oryza sativa
  Clone ID: PAT_MRT4530_69471C.1
gttagtttctgataaaacagacagcattgagcataaaaaagcaatgaacacaagaaagaaacctctcttttcgaaaaaagaagaaagaaacaaaacctacacaacgaaagcctagaagtcgcactcagcccacagcccacagtcgaaggcctgccttgttaatttcactgtccagaagctaccggaagtccattatatatgcgcagaggatctcaagctacgatcaaggtcaaacctctatttttcaataaggtttaagataagcttgtagttgtgaatctgagccgaaaaatgctctagattcaacaacatctcaggaaacccctacctaatgtaataccttattcccacagctcatcatttgctgaacgtacgccatgtacttgcaaattccaactaaatcatgtcgcatgcataacaaccgttgaaaaattggcagattaaaaaagcaataaataatgctaggaaatattttttttccttgctcggctgtatacgtgtatgtgttgtaaaaaaatgtagggaaaatttataatagtgggcttaaataatgattttaatgtaagtagtataacttatagtttgtgtaaatacttcgtcaaatttcagcaccattatgaatgcatgttgccagttttctgaccaag

SEQ ID NO: 68738 - DNA, 294 bp, Oryza sativa
  Clone ID: PAT_MRT4530_69472C.1
gggaactgctccctaccctagcccccgctgtttagtcgcaaggtgtcccaaccctggttcccgtcaccttgacaacggccggatttctttctcgccgagaaacggacgaggcgccacgaatttttggcccgtaggaacgatgatgaccctcaggtgtccgtcacatctagagctgatggggtcaagtgagagggtgtgtcaacctgatggtcactggaatggtagcctgacgtcatgccacagtgaaggttattataccgatgttgaaaaaaaaacattatacatatttaaata

SEQ ID NO: 68739 - DNA, 225 bp, Oryza sativa
  Clone ID: PAT_MRT4530_69473C.1
gccggtcggccaccacggcgcgcgcgcgcgcgggcggcgcggcgatttgggcggcatcggcgggaacgaccgcgagagtggagaaggagagctcgacgcggctcacgggcagagcggggagagagagagagagagagagggagccggggagggagggggagatgggccgagagggattcggcccatcgaactcgagggaggctaaatagacttttgcggagggat

SEQ ID NO: 68740 - DNA, 2271 bp, Oryza sativa
  Clone ID: PAT_MRT4530_69474C.1
atgtctcatgccaatgcaacccctcctccacctccttcctcttcctccccctcctcctggatggggggtaggagttgcagttgttgggagtggctgcggcggcggagacattggcggcgtcgcaccaggcgagggccttgtcgccgaagaaggagacgaggagctgggcgccggtgggggcggcggagatgacctcgccgggccaggccgggtgggagagcttcttgccccagaccaggtcgccgggggcgaaggggcatgcacctgctcctgctcctgcccctgctcctgctcctgatggaggatgaggattcggatccgtagccggtggcggtggcggtgggggaccctcgtagcccggtggtgctgcggagggcgatgctgcattcgtccctctgcttcctggtcggcctccttgccggcctcgccgccccctccgactggcccgctgccgccggcgccgccgtcttcctccgcacgctccgtgccagcaatgtcatcttcagtcgcagtagcaataggccgcagcagccgcagctggtggtagtggtcaccaccaccgagcagtccgacgactccgagcggcgcgccgccgggctgacgcgcacggcgcacgcgctgcggctggtgtcgccgccgcttctctggctggtggtggaggaggcccccgcggagaagcacgcggcgccgcccacggcgcggctgctgcggcgcacgggggtggtgcaccgccacctcctcatgaaacaaggagatgatgattttagcatgcagatatcgatgaggagggagcagcagaggaacgtggctctgcgccacatcgaggaccaccgcatcgccggcgtcgtgctcttcgggggcctcgccgacatctacgacctccgcctcctccaccacctcagggaccggcgagcggccgctgaccggccgcctccggagacgttaatggaagtgggcgggttcgcgttcagcagctggatgctgtgggacccgcacaggtgggaccgcttccccctctccgaccccgacgcctcgcagtcttccccctcccccttctctctctcaggcgtgcgtcaacgggcaatgcgcgacggcagcggcacgcggacgggcggcgagcgcggcaaggagtggtggggccgagacaggcggcgggcgggtcgggggcgcagcggacgtggtggagaggtggccggcaggcgtgacggcgcctgtgccctcctgtcgcggcggcagcggcgcgcggacaggcggcgagcgggggccgcgggcgcggcgggtggcgcggcagggagtggtggggccggggcaggcagcgggcgtggtggagaggcggccggcgggcctgacggcgcccgtgccccctatcgcagcggagggcggcgaagtggcgagggcggcgaagtgccctcctctcatacctctctctcgggccgtcgggaggtcggtgcgcacgcctgagcttgccgtcgtcatcttcaatgtcctcgggaccttggcgcccgtgcccgtctcgccctccccaccgcgcccaccggagctcgaggcggcaggaggaggggacagcgaaggggagcctgggctcatcgtactccagcaggagcggctcgaacgacgacggcggcggctgggggatgactccgacgactcttccggcctccacgctccctcgccggtctcctcacctccttcctctctgcccgccccgctaatgcaatctacaaaatcatcccaaaaaaattcctcaggcgccgccgcccgccgcctcccctcccaccggatttgacggaggggagtgtgcggcggccgccgttgctgtctccgaggtccgccgtctcctcttcggtcggatcgagcggaggggacagcgccgcggcagccgccgccggccgttcccaaaggtccaccacctcccctccggctggatccggtggaggggagggcgcggccgccgccagccgctgctgccgcctccgcctggccaccgccgaagcccgccgactcccaactgcctccctccacaggctcccctccacgccgccgcctctgtctgtggggtgcccgccgcctccccacctgtcggatctggcggagaggagggcacggccgccgccgcctctgccgcgtccaccgcagcctcctccctttgtgcttcccctccctcactggcttctcgtccaggaagcggctgcggcggcggcaacagcgacggcggtgttggtaggaagcagtggggaggttgatgcgcgagggagtagtcgtcacgacctc

SEQ ID NO: 68741 - DNA, 1975 bp, Oryza sativa
  unsure (1)..(1975): unsure at all n locations
  Clone ID: PAT_MRT4530_69475C.1
cccccagggcaacaacacacacacagaaggcgcggagagggggcggcgcgggaaagagaaaaagaaacaaccccngccacaccccacagagggccgcctttcaaaggggcggggggaccccccaccctttgggagagacgcgcccgaccgcaagagaaaggggggggagacccgccgcggccccccacgatgaggaaggagcccacagccggagacacggaggccacgaacgaacaccaacacgagggagcaccgaggggggggcgacgagagagacagcagacgcaggccacaggcacgcggacggaccgcgacgcgaacgctacgccggacgagagccggcgaagcgaggctaagaccgccacgaggcaaggtcgaggagaggcagccgaggggagaaggggagagcgaatccgtccgcgaaaccgcacaccggacaggcggaggccgcgaacgaacgacaaggaagagcggagaccgaaccccaacaagcgaaagagggggcaagcgggcgaacccgacgagacaaaaaggagagagaatgaagaagcgacccagccgccgcggcgccgccgcacgcggcagagcagaagcactaaggtacacgagtagggcagccgcagcgctacagcaacgcaaccagagaaaccaagcgaacgaaagacggaggggccgcgcgcaggaggagacaagagcgaagaggtgcgccgcgagcaggcagacgaagagagccgcgcggtgaagagagaaacagtcgcgcgacacgacgacgaacagagcacgaccacatcaatggcgcgaagcgcgcagggacgacggaggcaggagggaaacgccgcacacaggaggacgaggtaggcgacaggggaacgaaggccacgaagacacaccgacgcgacgcgggaagaaagganaggagagcggcgcngcggaggagcgaagaagcggctcacggaggccggcggcgtcgcgctgacaatgcgaacaggcgaggcagggagcgagagacgtaggtacagaanacaggaagngacagcgcgaagagagangcgngggacggagcaganccaccagcaaccgaccaagcgcacacagaccaacagacaacgagcacaacgcacacacaaagacaagacagcgacggcacacgcataagaagcgacgcgcaggcgaaggcacgcgcggatactacgactgacgcgcagcacatactcgtcgccacgagagaactcacgcaggcagggctnaagacagaagacaaccaacaagaacggagaagaagatgagggagggctgaaagacagaacgcagcaagcgcgcagacgtcgcatagagacgcgcagaacacacggaggaggacagctgacggagaagagagaggtagagcgcggcgagcgaaccggacgagcgaaggagacgcccgacaagacgagacccacgcaccgcacgaagaagaaggaggcgagggcaaagcacacactcgaacatcgaaagcggcgcctagatcgaaaagcgagcgaagagacggcaggagcagcgcgcggagagaaagaaggaaagacacagatcacaaaccgcacaaggnagacagaatacgacaaccaccaccaagagcgaaatagacaaacagcggcagagaggcaagagataatcgcgcataggagaacgaacatcagtgcaccagagcgagcaacgaagagagcggcaggagtgatagaggagagaaacaagaagcggaagtacagaggaangaatcgcgtncaccgggtcactaagagagagacacgagggcaaccgatagcgaacacagacgggaagcgacaccgagacaataggcgaggatgagcaatgagaagagggtcgcgagaacacgagagagaatgatgatgagagtcacgaggcggcagcggcgaaaggagcgcgagcggaaggagatcacgcagaatagagacgaaggacgagtcaaaagcgaact

SEQ ID NO: 68742 - DNA, 460 bp, Oryza sativa
  Clone ID: PAT_MRT4530_69476C.1
tgttctttcagctagtagcagagaggagaggagaggagttgttctgaggtaggataggagagcagcagatcagatcagatcgatccgggcaggcgggcagcatggcgtcggcaggtggctgcaagaagaagacgggaaatagtcgtagtaggagccctcgtagcccggtggtgctgcggagggcgatgctgcattcgtccctctgcttcctggtcggcctccttgccggcctcgccgccccctccgactggcccgctgccgccggcgccgccgtattcctccgcacgctccgtgccagcaatgtcatcttcagtcgcagtagcaataggccgcagcagccgcagctggtggtagtggtcaccaccaccgagcagtccgacgactcctagcggcgcgccgccgggctgacgcgcacggcgcacgcgctgcggatggtgtcgcctgcgcttttctggctggt

SEQ ID NO: 68743 - DNA, 681 bp, Oryza sativa
  Clone ID: PAT_MRT4530_69477C.1
atgtcgctgggagccgcctcctccgttcttggacaagaagatggcacaagaggggaagtgtggagggagaaggaaagaggtcgtgacgactactccctcgcgcatcaacctccccactgcttcctaccaacaccgccgtcgctgttgccgccgccgcagccgcttcctggacgagaagccatggctgcatggcgaagacggcaagcccccgcggctggcaaccggcctagtggacgcggcagaggcggcggcggccgtgccctcctctccgccagatccgacaggtggggaggcggcgggcaccccacagacagaggcggcggcgtggaggggagcctgtggagggaggcagttgggagtcggcgggcttcggcggtggccaggcggaggcggcagcagcggctggcggcggccgcgccctcccctccaccggatccagccggaggggaggtggtggacctttgggaacggccggcggcggctgccgcggcgctgtcccctccgctcgatccgaccgaagaggagacggcggacctcggagacagcaacggcggccgccgcacactcccctccgtcaaatccggcatgataggtaatgaagtgaagcagagagataattcaagaaatgccattgacaagcgtccaaatccaagaaataccatcgacaagtgtgagttctaa

SEQ ID NO: 68744 - DNA, 457 bp, Oryza sativa
  Clone ID: PAT_MRT4530_69478C.1
gagcaaaacaatcccaagattgtttgtacgccgtactatgtgcacatggtggacgagcccaggccatcatgctgccagatgtagctatattgtatgaaatcactatgagtgtgttgtggagaattttggaagatttattatcagccatttgctgcaaattgatacatgtatagttaatgagttcaaaaaaaaaaaaaaaaaaaaaaaaaaaaaaaaaaaaaaaaaaaaaaaaaaaaaaaggaggaaaattataagaagacaaggggcgggaaacggggatatgtaatatattacttttttttatagtccacccaaagtcaattaacttgccggcgtttaaaaaaaaatatggttgggaaaaccttagtggtcccccatttaattctcttggcagcagccaccttttttccgagggggcaaaatcccaaagggccccgcaccaatcgccttcccaaac

SEQ ID NO: 68745 - DNA, 2136 bp, Oryza sativa
  Clone ID: PAT_MRT4530_69479C.1
atgtccacacccttcgacctcaactccgccgctgacccccaaaccctagcgccgcccaagcgtggccgcggccgccccaggaagaatcccccaccgccaccgccaccggctacggatccgaatcctcatcctccatcaggagcaggagcaggggcaggagcaggagcaggtgcatgccccttcgcccccggcgacctggtctggggcaagaagctctcccacccggcctggcccggcgaggtcatctccgccgcccccaccggcgcccagctcctcgtctccttcttcggcgacaaggccctcgcctggtgcgacgccgcccagctcaggccctacgagccctacttccccgtcgccgagctgtccgatggcccggccgacgacttcgaggccgccctcgatgcctccctcctcgagttcaagccccccgttctcctctcccccaccgcccccgatctcatcgcccgcacattcctaccccgcggtttcatcgcgctgctgcactacttcaccctccaccgaatgggcttctccaaccgtgtccacgccgccgtcgctaaggcgcatctcagagccttcgacaagttcaggggcctacccgaccctcccgagtacaccctccacctcggcctacccaatgtctccgccgccgcagccactcccaacaactgcaactcctaccccccatccaggaggagggggaggaagaggaaggaggtggaggaggaaatcctcgatgactccgatgaggattgggacccacgcaagaagggtgccactgactccgattccgaagtcgatttcgaccgcaagagggtctccaagggcggcaggggcagcggtgcaccacgcgggaggccacgcgggaggcctaggaaaaacaatgctgggaggcctgcacacctcaaggacgaggacgaggtgatccaagaaacagtggagtatcaatatccaccagccgctgacatgtttctacagcttacatccgttgctgctgatccattcaacttcaagggctatgactctgtgcctgtcattcttagcttcttctcaaaatacaaggactcagaagtgccggccacatacgacgacaaggagctgctgcagacattgggtggcaagaaaggtagaaaaaatacggccagaagcttgtacccagctgcaaaagaagaaggtgacttagaggtggcggatggccataggggtcggaggaagtcagcagggagtatctactcagcaagaaaggcagaagactcatattggtgtgatattataatcagtgattttgatgatggagacacatcaagtgactatgagggccgcaaaatgaagcggctgtctcagaacaggagttttaataagaagatgaagcaggaggttgcacctcaagatgaggcctctgctgattcacctgctgtgaaacaggcagatggaccggcagctctgatcttgcattttagtaatgcagaagctatcccttctgtggatgacatcaatagtatattccgtatgcacgggccaatcatggagggtgcgactgaaatcaacaagaaatcaaagatcgcaagagtagtgttttctaagagtgctgatgctgaacaggcatatagcagttcgggaaagtataatgcatttggtccagcccttctcaggtatgatctcaaatacctgccaatggctcctcaagttccttagatggtgcaggctaaactggatatgtcgccatttggagggaaatgcgtaatgaagactggagctaagggatcataagatgttcgcgttactgacttagagctaggaatgcccactggccaggccggacgacttgttcgctggtcgagtgagcaattttttaggttttatctggttaattgcattccgaggactggttgtgtacttgagttcagaggtagtttatattattaaattatttagatggttgatgatctcggcgcgatccctctccttgttatcttagcgatttatccttttttgtattgcctagaaatcattgcacagctgtggatctttatgctatgttctctgagctaatatttccgtcgttagagccgaactcacacagaaaactcgagactagttctctctctctctccctcgtgcgattcctgcagcccg

SEQ ID NO: 68746 - DNA, 660 bp, Oryza sativa
  Clone ID: PAT_MRT4530_6947C.1
atgtcgttggtgctgatagatgtgatgcccacacctcagggatccgcgcgccatggtgagcagccggtgaatcttccgccgtctcctgtccttccgtcgtctgacgagactgagttggagccaccagcagcaatacaaccaacacaacatgcttttgcccgagaggatatgcagcagccgcactgtgctgcggtggcggagtcgacagtgaggctcaagatgaccaggcaaatgattaccatcgaagtggcagaagcattatgtgataatgtggataaggtgcaaatggatcgtcctggtatggataagatcacctttgatgtcgctgaattcgatacagcttacaacgccatcatcgggagaactgcacttgcgaagttcatggccgcatctcactacgcgtatcaagtgctcaagatgccgggaccgaagggaacaatcactattcaagggaacgcaaagctggcagtacagtgcgacaaacggagcctcgacatggtcgagcaaacacctagcccacccgccacgactgaaccaccaaagaaagtgtgcaagacaaacaaggcgccaaaaccgtacggcgcaatcaagatcgttccactctccagtgccaaccccgacaagaccgtcaagatcggggcaacactaagcgagaaatag

SEQ ID NO: 68747 - DNA, 260 bp, Oryza sativa
  unsure (1)..(260): unsure at all n locations
  Clone ID: PAT_MRT4530_69480C.1
acgtacgcatccgtgcatgcatgcatggcttaattgtttaattaggcgggaaaattnaaaagtacgtgtgttaaantagttgtgtggttganttgatggtgatggtctggttgtgtacgtgtggttggtgtgtttatgcgtgtnaaaacatgtgtaatcactcncgtgtttaantttttttttttttgctgtttcaaattcgatcggtggcaaatgaaggaagtgagcttatccttaaaaaaaaaaaaaaaaaaaaaaaa

SEQ ID NO: 68748 - DNA, 277 bp, Oryza sativa
  unsure (1)..(277): unsure at all n locations
  Clone ID: PAT_MRT4530_69481C.1
aggaactgtaaaaaattttattgtagccaatttgaccccttaaaatgcctccgtaacatcataagagtaaagctacataattaatcatgcatattgcagtatctcctttcaatctaagcttactctgtggcgccgcttaaatacggcaataaagttctatgcccgtacctttattattagcactaaaactttattctcncataatatgnngtnnctggtactaggcatctgcatagttcgtgccctatggcctaagataacatccacaaacctacac

SEQ ID NO: 68749 - DNA, 242 bp, Oryza sativa
  unsure (1)..(242): unsure at all n locations
  Clone ID: PAT_MRT4530_69482C.1
tatntgnanatattaaaccttgaggctactaatatagacatcagaaaaccttaccgtcacggttctggctccagaagcgtctggttcttcttcagtggtatccttgaactcagctccaaccacaccaaatagttcgtatgactatcttaatgggtgtgtgagaagatctggcttgggtaaacgtcgatctggttttcgaagaatgtattcattccttgctggctcaccaaaagaaagtgact

SEQ ID NO: 68750 - DNA, 1610 bp, Oryza sativa
  Clone ID: PAT_MRT4530_69483C.1
ccccgggccgctggcatcccacgcgtccggtcacgcgctccttcgattcctcttttctcctcctcctgaaatgaaagacaagaagagctggttgttttcgttttggctataaataaatctgttgcataagccctctccctgcttccgccttgttcaataatcaatatactcttctcctcgatctcttctcttgtccatctccaataattctccatgtacgccgccatgtacccggagaccttcggcttctctgcttacccccagcagcagcagccgccgcccgacgccgcctcctgcatctacaccaccgccttgccgctcatcgccgacccgcctgacatcctcggaaacatggcacaaccatcctttctatcagagtatgaccttggaggggaaggggacctgttcaaagctcctgaacccatcattgaagaaccagtgcttagccttgatccagttgcagcagccatttcgatgatgtctggcagtgagaacgtaatggatgaaactatagaggttgcagatatcagcgacattcagaatgactctcttttaagcgaagtattatacgagtgcgagaaggaactcatggagaagtccgcaatcgaagagactatttctgaactgctggacgtcaagattcctatgctgcaagtggaagagttccctagggaaacccaagtacaactaccggccatggagaaggagaagccatcagttcctgaatgttgttcactccagaaaagtgtcagttctgggtgcctcaactcagctgattggatcaatggaccagccaggccaaacttcctggacttccaaggattggactttgagacagcgtttgggttgaggagggcatacagcgaaggagacattcagaatcttggagctagcacccctcgacccgggaactcaggaaacgctcaattagcatcttgcgagaggcttgtaaccatcagtgacctgaaatctgaagaaaggaagcagaagctatctaggtacagaaagaagaaggtgaagagaaactttggcagaaagatcaagtatgcttgcaggaaggctcttgcagacagccagccaagagtgcgagggaggtttgccaagatcgaagaaggcgacttgctcaagccaaggaagtagtaagaggaagaaacaaattaaagtaactcctggagaggacgagctgccagtgaaggaaggaaccttggcttctagaagcttctagctggtggaggaggaggaggaggaggaggaggagaggaaaggatccaaggtgcaaggcccagcctttgtgtgtagggggagggcgaggccaaggtggaagagaggcgccgtagtcgcggctgcacttgtcggaattaattttagctgctttggatcgtctccttctactactagactagtacttgtaattctattttccttccaatgcatgtgtaataataattagtaataatgctagtagtcggtattacttgctgcgagctgaaggccgcccatccatgtacaaatggctcgatgaagaaacttatcactagtagtaataaacttcagctcccttcaggcttcgcactggcactggaaggcatccattaaaaaaaaaaaaaaaa

SEQ ID NO: 68751 - DNA, 209 bp, Oryza sativa
  Clone ID: PAT_MRT4530_69484C.1
cagcactatgtaactgggagacagaatcagattaagatacggacgccgtaccaaagatccaacgaaacacccagtacatacgtagttacaaaactaaaatatgttgataaaccaacaaataacattattttcatagcagtttctacggaatttattgtttatatatgccagacttttcttcagctaaacagagcagcgacggacacatg

SEQ ID NO: 68752 - DNA, 364 bp, Oryza sativa
  Clone ID: PAT_MRT4530_69485C.1
ttcgtctcctgtaagaactggtctgtggaaggaggagagcaagttgcagctgcagccgccgccgcgctcaccgctgctgctgctgtccaaattccaactgctagtgagtagtgaccgctcgataggctggagtgtctcgcgctcatcagaacgggctgggctggcaagtttagctgcggcacattacggcccaggcccatactgcgacgagatgcagcggggtgtgcacggagcccttggagtggttggtgaactggtgatcgggccgtgcggccacctacctggactggacagactatcagagtctccagctcctcaattgccgatggccgctgttagctttcctttctcttttcctgcataa

SEQ ID NO: 68753 - DNA, 189 bp, Oryza sativa
  Clone ID: PAT_MRT4530_69486C.1
atgtcgacaacaaccaaatcttggagcattagagagagtggaggttggcgagggcatcgaggattgtcagaatcaacgggatcaataaggagggagccaactgtggcaatgaggttggtgttgtcgtgtgtgaggaaaagaggcgtcgaggtcgagggggtgaggtccaaggcatcgacaagaaggtag

SEQ ID NO: 68754 - DNA, 822 bp, Oryza sativa
  Clone ID: PAT_MRT4530_69487C.1
gtgaatccgaaagccgatcaaccggacaccccggccgacccaactccatcacgcccaccctcgcctggggctgacgtcagcaagggggggcgggcggcgccgacatgtgggccccacgggtcagcggctcgagagagagagggaggggcgctggcacgtgggccccacgggcagtggcacaaggcgggagggggtgcggctggcaggcgggccgcaccggcctcggctccaaaagggagggggcggcgtctgccgggctcggctcagctccaagccggccggccggttaggcgagcggcggcggcaagcggccatcgacggcggctaccggcgagaagacggcggcggccggcgacgcgggcgatggcgcatcgcggcgacgcacatgcggggagcggcggcgcgcacgagaggaagagaaggggagggagttctcaacggggttcggccggcgacgcaggaggagacgacgacggtgagtgaccggagggcgacgtcgaacggcggccgagctccaggacaccctaagagaggaaataagagaggtttgaggaagagagggtgtccacggcgagcgagagccatggccgacagcggcggctatggaagggctcaccggcacacgacgaacgacggccttcgatggcggaattcgatggaggaggggtggacgagcgggcggagcgcgcggccggaggagtggaaaaggcggcggcggcgggtgtagcggcgcaaaaaaccataaagggcacggggaggccaagcgggcgggaacagagggaaaaaagggtgggagggggaggtgccgggggggagttttta

SEQ ID NO: 68755 - DNA, 931 bp, Oryza sativa
  Clone ID: PAT_MRT4530_69488C.1
atggagctgctgctgtaatccacacgacagagtcagagatctggggactaagtcccaagaacatccctccctcccctcccagccaggagaaatccaaggactgaaaacattggaaagtgtaactaagcagtaagaagatctgaatatgagtggaagacgtgatgattcagctaagatggcaaaactgaaggagctattgcacagaagtgaaaaccgtatctgtgctgactgcagcgcgcctgaccccaaatgggcatcagctaatataggagtattcatatgcctcaagtgttccggtgttcacagaagtcttggcacacacatttcaaaggttctgtcagtcacactagatcagtggagtgacaatgaaattgataacgtgatcgaagtcggtggaaattctcacgccaatgctatatatgaaaccttcctgccgcagaaccacagcaagccacatccagattctacccaggaagagcgagaaaaattcatcaggtcaaaatatgagttacaagagtttcttgagccaagcctacggattgtttctcatcagtctagcgactccgggaaacatgcaggcagtgcctcccattctgtcagttccaagagcgaagtaggcatgattgagttcatcggaatattgaatgtcaaggtgaaaggaggcaccaacctagccatcagagacatgtcaagcagtgatccttatgtagtcctgacccttgggcaacagaaagcgcaaacctcggtgatcaaagccaacctgaaccctgtctggaacgaagaactcaagctctctgttcctcagcaatacggccctctcaagctgcagttcaccgagtccggcgaggtggagctggagatgcagtggtttccactcaacatgtagaacaaatcacgctgtcacttcggatttcaagctggagaattttag

SEQ ID NO: 68756 - DNA, 351 bp, Oryza sativa
  unsure (1)..(351): unsure at all n locations
  Clone ID: PAT_MRT4530_69489C.1
cttcagatccatcttctcctcctccctcctccctccagatccaccagcaccctctcctactcccttccaacaggcagcggcggttgctccggcggcgtttctcgggtggcggggcgcggcgctccaacagcagcgtgtggcggcgacggcgacagaacgtgtggcggcgacggaaggcgagcgcgccgcggtgcacggtccctccgcctctctccctcctcccttctctctccacggccgccagcctcccttctctctccaccgccgctagcctcccttcactccccaccgctgtgtggggaaggaggcggcggcggnggaaggggtgcggagtggcaccgggaagaggtg

SEQ ID NO: 68757 - DNA, 2202 bp, Oryza sativa
  Clone ID: PAT_MRT4530_6948C.1
atggataaacaagtgaagaaccacagaccttctgatggtacggatggatcaagggaaattcttatggacgagcgcaaccctaccatggacatagtagatggtattagtcaatctgtccatgattcacaaccggatggtggtcagtcaagccgtgtagcaatggaggaggacgtgccgtcgcgggttggatcacatgattcagggcatggaattccagagacaagaaatttggtcccttcactggattggacagaaggaaacccatatgaaaaagaaggagctgggataccgatggaaagaatggtggtagataatgttgatagcagtgctgtcatacctcctgagtatgctgatcctcaaattcttactccgatgctgggacaaagatttaagactgagagggatgcctataatttttataatgtttatgctgttagtaaaggatttgggatacgactggacaaagatcgcatgaatactaaaaagcagagaacaatgcggcaaatatgttgttctcaccaggggaggaacccaaaaaccaagaagccttccgttcgaattgggtgcccagcaatgatgaagataaatatgtctggagctggtagtggctggtcagtaacaaaggttgtttctgcgcacaaccatcctatgaaaaaaagtgtaggagttactaagaattatcagtcgcacaatcaaatagatgaggggactcgtggtattattgaagagatgagcaccttctttggttgtgccctgcttagagaagagactgaagaatcatttacatggttattcaatacattcaaagagtgcatgaatgggaaggttcctattggaatattaacagacaattgtccttccatggcagctgccattagaacagtatttcccaatacaatccatcgtgtgtgcaagtggcatgtactgaagaaagcaaaggaatttatggggaacatatactccaagcgtcatacattcaagaaagtatttcataaggttcttacgcagacactaacagaggaggagtttgttgcggcttggcacaaactgattagagattataatctggaaaaaagtgttaacttgcgtcacatatgggacataaggcgtaaatgggcatttgtatatttttcccataggttctttgctgggatgactactacacagagaagtgagtctgcaaaccatgtgtttaagatgtttgtgtcaccctctagctctatgaatggctttgttaagaggtacgaccggtttttcaatgagaagctgcaaaaagaggactcggaggaattccaaaccagtaatgacaaggttgaaattaaaacaaggtcaccgatagagattcacgcatcccaagtatatactagggctgttttccaattgttctctgaggagttaaccgatagtctatcttacatggtgaaacctggggaggacgaaagcaccgtgcaagttgtacggatgaactcgcaagaatcattccttaggaaggaatatcaggtacttgttcagtatggtttgtcaagaattccagagaggtatatactgaaaagatggacgaaggatgctcgggatactataccacctcatctacatgggtacaaagatgatgtcaatgcttcacaatcgaggagttacagacatgtaatgctgaataggaagactgtggaggtggctaagattgctaacaaagatgtgcagacatttaagatggcaatgacagtcatgaataagcttttggaggacatgaaaaatcagttatctttggatgatggtgacaatagtagagaagctccgaagcgagcagctaggcataaatcaaggtctactgtattgactgaagatggaaacgaagatgttggtggaggtgatgaggacagtgagtatgacgtgccaagtgaggacgagggtggaaatttgactgctgatatacttccaccgttgaaaaagagaagcagaggaagacctaaggtgaataggtataaatcgggtggtgaggttgccagcctgaaaagaagaaaagaagtagggattgagaagaagaacacaaccaatgagtgtgaatccgttgaaaaagaaaaccaagtcattgatcatgaggatgaagtgccctttcctcgtaggttttgccacacatgccacgaagctggtcataattcgcggacttgcggccggacatctacgtacaagagaaaactttag

SEQ ID NO: 68758 - DNA, 144 bp, Oryza sativa
  Clone ID: PAT_MRT4530_69490C.1
cccacacttacgcggacgcatgggcggactcgtaggatgcctcgtgcttcacagtaatcaaccggtggggggggaatactcacatcgggggcaacaactcttattccacacaactcaagaagcgcttacaatcgccgtataaac

SEQ ID NO: 68759 - DNA, 1737 bp, Oryza sativa
  unsure (1)..(1737): unsure at all n locations
  Clone ID: PAT_MRT4530_69491C.1
atgggactaggtagtcttgaaccaactttcgagacattggttgattcattcgtcttcttggacaaaaacaaagatgggtatgtcagcaagaatgagatgatacaagcgatcaacgaaaccatcggaggagaacgctcttctgggcggataggcatgaaaagatttgaggaaatggattgggacaagaatggaacggtgaccttcaaggagttcctcttcgcttttactcgttgggtggggattgatgataacgaagatgacgacgatgaggagggagtgagcgacgtagacgagctaccgaccaatccccatggcgccttgtaatccacaggacagaacacgacagagtcagagatctggggactaagtcccaagaacatccctcccctcccttcccagccaggagaaatccagggactgaaacattggaaagtgtactaagcagtaagaagatctgaatatgagtggaagacgtgatgattcagctaagatggcaaaactgaaggagctattgcacagaagtgaaaaccgtatctgtgctgactgcagcgcgcctgaccccaaatgggcatcagctaatataggagtattcatatgcctcaagtgttccggtgttcacagaagtcttggcacacacatttcaaaggttctgtcagtcacactagatcagtggagtgacaatgaattgatacgtgatccagtcggtggaatttcacgccatctatatatgaaccttctgccgcagaccccagcaagccacatccagattctacccaggaagaccgaaaggttctgtcagtcacactagatcagtggagtgacaatgaaattgataacgtgatcgaagtcggtggaaattctcacgccaatgctatatatgaaaccttcctgccgcagaaccacagcaagccacatccagattctacccaggaagagcgagaaaaattcatcaggtattttattcctctgttagttcgcagcactttcaagtgcagggtaggcatgattgagttcatcggaatattgaatgtcaaggtgaaaggaggcaccaacctagccatcagagacatgtcaagcagtgatccttatgtagtcctgacccttgggcaacagaaagcgcaaacctcggtgatcaaagccaacctgaaccctgtctggaacgaagaactcaagctctctgttcctcagcaatacggccctctcaaactgcaagtgttcgaccacgacatgctgtccaaggacgacctgatgggggaggccgagatcgacctgcagccgatgatcaacgcggcggcggcgttcggcgacccggggctgctcggcgaccggcagatcggccggtggctcaagtccggcgacaacgcgctcgtcagggacagcgccgtcgtggtcgccggcggcgaggtgaggcaggagctggccctcaagctgcagttcaccgagtccggcgaggtggagctggagatgcagtggtttccactcaacatgtagaacaaatcacgctgtcacttcggatttcaagctggagaattttagaaaaagaaaagatgggttttgataatgaagttcattgcatgaactgtttcagcaagtttttgcgttgtttacatggcaaattttgctgcgttcagaaattttaaatttttggtttggcacgagccattgccctgttaacttggttcatttgtgattccaataaaaaggattcttttgtgctctgggttncnnnncnnnggg

SEQ ID NO: 68760 - DNA, 566 bp, Oryza sativa
  Clone ID: PAT_MRT4530_69492C.1
acttaacgggagtcgctctcccataaacaggagacgaacctgaaggacagggggttgcacataaaacatagcacagccccatgctagagaaacacactaaggcacatacgctgctttacccacacacgacctatttcagctgttaacagaggaaacttactgcttgatcatacactccgctacaactctacacaagcgcattttgaaatctaaaacactcatggtcgagcccccaggatacagattgtttctggtgaagccgtacctactaagtttaagaaaaatcaagactatccttctattgaggagagagctacagattgttctaaactctgtactctccttggggatcaacgatctgaaatctccatggatgctataagagccatgaccagggcagacaacacgccgaatccttccccatcatgagtgaagacatgtattgagcacccgaagacactaatggtttatggggtaacttccagaaactttcacatgcctgcgatatgggcaccaaagtcctatggctgctaatggtgggactccttaagggaactaatagcaca

SEQ ID NO: 68761 - DNA, 546 bp, Oryza sativa
  Clone ID: PAT_MRT4530_69493C.1
atggcacaattgataaacagggaggaaaatctccagaaggtaccagagcaggttggtccatctgtgaaattgcagatgaaatggatggaactggtggcttgccgacatccgtcgctttctagctcgatatctcgcaaggccgcaatgcatccaacacgtcgtgggacccgcgatgatgtgggtagacgatttttaaaaactgccttgcacaagttgcttggcttgtctgttcaagggttcagtagtagagtatacgaggatccccagttgaacgcagctaccccggggatttgcacgcggaccgaccgcggattggcccgatccagcagttaccacccaaatcccgtgcgttctcccgtgcgaaaagcacttgcgcggtacacttgtcggccgctgcacccggccagatgccccttcggtcccggccccggcggtagcagtcgttggactggacggatgcgttatcaatgtggacggcagcgggacgagcgtgcgacctgctcggtgccggtgacatacacatctatagcgagacgtttatggtag

SEQ ID NO: 68762 - DNA, 195 bp, Oryza sativa
  Clone ID: PAT_MRT4530_69494C.1
atggcgctgcctggtagcctgtcgcctcccttcccgcaggatctggtgcaggggagggcgttgtcgccaccgccgcttggtagcccgccggatctagcggaggggaggaggacgccgcctggtagcccaccacatcccctcctgctggattgggtggaggggagagggtcactgggctactgccacctgaggtga

SEQ ID NO: 68763 - DNA, 1317 bp, Oryza sativa
  Clone ID: PAT_MRT4530_69495C.1
agcccacctagaccaccttcttcctcttctctctttttctcgttctccccttctctccctcacgttctctccagcgccgccgcttcctaggcagcgccggcgacctcccctgcgccggctgccacaccccactccggcgacccctctagccgtcgccgggctgaatcagcttcttggctcctcacttctctgcccctaagctaaccctagcctctgacctcttcaacctaagatgcaaccggcggccaattctggcgagataaggatttagggaagtttcccaggcccctaccgctggatctactctcctcccctattttaatttttggttacctctgatgattctaccgtgattgaaaaatatgtggttcagctcctccttcagaaatccaagtcttctcttctactgctgctcttctggatctaaggtgattttgctagaactgagcttctccaccttgagcttggttgattgttccccctcttgaactgaaccccctgctctacttggaactcaggtattctcccccctggctcttgctctactggtaatacttactgcttcctgacaggatctgctgctggtgattctcttcctcctcttcagactatcctcttgctcgtcccccgctcccccttccggcgggatttggttcaccactctctgattgcttggccatggttactactacttgttgattcatgtattggtttgagctggacttcagttgagctatttctgtccgggtggagctaacattctagctgattttcctaagcttggttctatgattctaactactactgccgcagctgctgctattgctctactgcggtaggtgcttgaggtggttttccagccgatgcaaccgaggctggggttcactgaatagtttggttgatatatatgtgaatttggtgaagactaggtgactcacctactttagttttggtggttgtttcactgactgacacctaagcagtgcttgatcggtggagtaatgtgggatttcactaaatttttctagttacataaattctgatacaattaggtacttttgcacttgagtccctcggggtctctaaaattgaagtttactctgagattagggactgatttgtaattgttctagaactcaagagtttttctgaaaactaaataattattgtatatgctctcggttcatgcatatgttcaatatatgcaaagcatcctgtctaataagatttttaatatattcctaaaaccatgtatgtatggatggtagcaaaactgcactggtccagtgtcaatagagtggtataccttccatggtg

SEQ ID NO: 68764 - DNA, 1893 bp, Oryza sativa
  unsure (1)..(1893): unsure at all n locations
  Clone ID: PAT_MRT4530_69496C.1
cggacgcgtgggcggacgcgtggggtagtcaagtactagcgccagccaaagccaacacgagtttgcacgggcacgactccgcgccgcggcggccgtctcgtcctctctccacatcatccccgttccctcgcacaccacagcgcgcgcccgcccgccagccatcccgctgccgtgccgtctccatcttctatccctcctcctgctgctgctgctgctgctacttaccccgcgatttctcttcctcttattactcttcctctcggctctcgctcgctcgctccccgcgcgatttctccacgccgcacgccgctcgcgagttagggatcgatctcgtcgggggcgggcgggagagggagagggaggagcgatggcgggggatggtgtggactgggagagcgtggcggaggccacgtccggggcggtgggcgcgctcgtcagcaccaccgtgctctacccgctcgacacctgcaagaccaagttccaggccgagctccagacgcagccgggcgcgcacaagtacaggaatctttcagatgtcttttgggaagctgttcagaaaagacaaattctatccctatatcagggccttaagacaaagaacatccaatctttcatttcacaattcgtttacttttatggctatagctactttaaaagactctacttggagaagagtggagcaaagtctatcggcacaaaagcgaacttgttagttgcagctgctgctggtgcttgcacagttgttgttactcagccactagatacagcatcttctagaatgcaaacaagtgcctttggaaagtccaaagggctgcgggcaactcttgccgaaggcacttggcttgaggcatttgatggcttgggaatttctcttatactaacgtgtaatccttctattcagtatactgtatttgatcagctcaagcagaagctaattcagagacagagacgtaaaaatgcagaagcagggggtggttcttcaccagttgctctttctgctttctcagcatttctccttggtgccatctcaaaaagtgttgctacaatattaacctacccactaatcaggtgcaaggtcatgattcaggctgcagaccctgatgaggatgatgacgatgaatctgaaaggccaggaaaatcaaaatctcccaaaacaatgttgggcgctttgcatgccatgtggagcaaggaaggcatcccaggcttcttcaaaggattacatgctcagatactcaagactgtcctgagttctgcattgctgctgatgataaaggagaagatttcaagatttacttggatttcactgcttgccctgcggcgatatctctttgtttctcagaagagaatcaagagtgcataacttttatcattatcccttcgtaaagaaaatgtaatccatgtggtattgcggtattttgagatcctgtaccaaagaataagtctcaggaataaggaacagatacagaaaagcaaaacatcacgtcatacatgtggggtctttttaatagcgtcagggaatgtttctgaataaattcgtttgtttcttcttttaaaaaaaaaaaaaaaaaaaaaaaaaaaaaaaaaaaaaaaaaaaaaaaaaaaaaaaaatgtagtgactncgtatagtatgtagcgtgtaaacatatcagttctgttcatattccttctttctttgctggaaatgaatcagttgcaataaatttntcttgtaatgtcagatgtctagtgtagngtactagagttctgccagaantcagcagccgaaggcattgtatgtgcnccaaaaaaaaaatgaaagatggtgtttacacttnttgcagttgcaggagtggtggtatttgtggcaaaaaaaaaaaaaaaaaaaaaaaaaaaaaaaaaaaaaaaaaaaaaaaa

SEQ ID NO: 68765 - DNA, 371 bp, Oryza sativa
  Clone ID: PAT_MRT4530_69497C.1
gggtacgacccaacgccgtccgcgtctcccatggccaaaccaccaccacgctcgagactgctagagcttctcggcatcgatgcgcgcctccgctagggcttggctggcgggtgcctgcgcgatggccgctccggcggcggattcggcggtggtgggggtgggggaggattcctggacgagcgcggcgacgagggatggccttctcggagctgcagcgggaacaacagctgcttgcgacctgcacgcgcctgtaccatcagttcacggaacacttggggtcgctggaacgccggctctgcgcgagctccgagacgctccggaccaagcgccgcttgctctgagagcgcacctaccgcaggctaaaggacctg

SEQ ID NO: 68766 - DNA, 540 bp, Oryza sativa
  Clone ID: PAT_MRT4530_69498C.1
atgacaaaccacttcgttgtcaagagacgtctttatatctttgcaccaagggatcctaccttggtcactctcatccgtgagagggaggacttcaagaggcccaaccccaaccttactgtcacctccctctccccaaccccttcacttgtttctccttctctcttaacccatgcgataacaactgtgacgggctatggcaatgataataaattgttctgtgcgaccagttgttttctcgattctaccttgggctactccaccttgatccccattttttcctcctcagacgcacccttcaagtgtagcaatgtagagaagatggaggataccaccccactggcatggaggcgtggatcaatagatccattagcagagcaactcttctttgtcgaagccacaactagcaaagaactagatctagtgacaacatggtgcactcccctcatgaggaggatgcccgcttctttgctcgtgattccgtacattctcgaaggcaggggacaacattggggtgacggcaatgggcatgcacatgcttga

SEQ ID NO: 68767 - DNA, 2550 bp, Oryza sativa
  Clone ID: PAT_MRT4530_69499C.1
atgaggaagaccggccaagatgagaacgagagattaaaggaagttaaagagaagatcatagcaaaatgcaatggttcaccactagcaataatcatgctggcagggcggctcttggtaaacagaaaccgaagcgcaaatgaatgggagatgcttttggaatacgctgcagagccaacagatcatggagatattgacagcatattccacctgtgctatgcggttttgtcatttcctttgaagcagtgcttcttataccactcgcttattcccaaggatcatgtgatcagctgtgacaaagttgtccagatgtggattgctgaaggatttgttggggctgatgctacttcagagttgccagaagtcttggggatgaaatactacaaagaattagttgcgagacatcttttggaacctgttgacgagtatgatggccaaggtcattacaagatggataacttagtccatacatttgctaaaaatgtagtggaaagtgaatcattagtggttgaagagggagaggaaaatcctgaaccgttcgacgtcgaagagggacatattcgacgatcttgggcagcaaaagagaaaattgaatggaaagctccaaaggagctacactcattaaggacattaatcataattggaaatgttattgttcaggcaagcacaggcagaaccttgagctccctttcaaggctaaggacgctacacgttaacaaaaatgaacatgtacatatccttctcgatagtttgcatcatatgaaacacctgagatacttggacctgagttacacagatgcccttgctttgcccaatgatattggtgagatgaagtttttacagtacatttgccttcaaggctgtaaaaaattggtgaaacttcccaagagcattgtggaactgcacaagttaagatatctgaatatctctgagacaaaaataaagtcaattccagaagaagggtttggtggactgaagaatatggtgtcactgcatggtttccccagtcagatgatggaaagcgtcatagcaaaagattggtgcagccttggggagttaaagtatatgtcccaacttatgcatcttgcactagagggtctggagaactgtgcttccggctcaatggctagtcttgccaaaatcgatgataagaagaatcttgcatctttgaggttaagctgcacaagtagactgtcggttaacggcgaggtcgataaggagacagtcgaggaggtgtttgatcagctttgccctccacccaaattgcaggagctaaatattaagggattctttggagctcgactcccgagatggttgatttttaccaaccttgcggaactgagggtattaaagctagacaacttagtatgctgcaaccagcttccatctactttatggcagctcccttgtttggagtacctctacataaagcatactctgaatgtcaagcacatcgggcatggattcctcctccagtcatctatacctggtcctcgtgaaaccgacgttgcagcgacaacaccaacagcagcaacatcagcaactgcagcaacagcagcaacaacaacaacaacaacaattggaggaggtagtacccacaaccgggggccctatcatcggctttctggtgctgggtcagttggttctggcgaggagggagagattgtggctgagagcgcaacagaagacgcagcaacaactacgggaagcagcaatgcaattggcttcccaaagttgaagaaacttgttatgtatggcatgatgaaatggaaagaatgggagtgggaagatcaagtggaggccatgcccaagctagagaacatgcatatcagctggtgcctactgaatcaacttcctcctgggcttgcatcccaggcaaggtctctaagaattttggttgttgataatgtcaagaacctcatctccatcgatggtttctgttcagttgtccagctccacgtctcctccaacttcaaactagagaggatcagtgatcttccaaaaatggaaagcctgacagtttccagatgcccaaagctgaatattctgcagcgtttgccagcattgcagagcatggagttgaatgaccaagagatggaaaggctcccagattgtcttagagatcttccagcaaaactacgtcatctgcggatcacttgcaacttggatcttctcaccctgatctcccgggggaaaggcacccccgagtgggagaagatcaaacacatccagcaagtgaatgcctgtacagatgcggaagacgacaagaccgacaaacggtttgtcttctacaaaagagattccgacagcactgagacgaatatcgagccgagcccgagcacatcccaagttggaggtcgtttctcttatttcttttttattttttgttctagtttttataactataaagtgcacagtaacatggtaagaagatcatatgagtatatgggccaattacaagtggaaaacgccatggggattttgaagggggctaatttacatccagaagttttagctgaagatccaagattgggtgaccgcaaagatggatga

SEQ ID NO: 68768 - DNA, 1520 bp, Oryza sativa
  Clone ID: PAT_MRT4530_6949C.1
ctcaaaactgagcctccaacctttgccattgccatcgatcctatggaagccagtgattggttgcgcacagtcgagaagaagctagggttgattcagtgcaccgaccaggagcgggttggcttcgcaactcatcagttggttggaccggcttcagagtggtggaatagctacgaagcatcacggccagaaggacataccatcacctggaacgagcttttcagtcctgctactttcatggtagtatccatcatggtgtcccgtcaggtaatgtattacactaagaaaacgagagtttcgctacctgaagcaaggagatttgaccgtcacagagtacctgcacgagttctatcgtttggctcactatgcaccagaagatgtggaaacggatgaagacaaacaagagaagtttctccaggggttaaaagatgagccgcagtgcaactccttctagaggattatgaagattttgagaaacttgtggacaaagccatgcaactcgaaagtgagcataatcggatgacgaactgcaagaggaggattgtcaacatcccagtatttccatgtggtaaccaaagacagcgcactgagccacttcagatcaccggatcttctgttgtgcatcaagagtttccgcgccaagaagatggacacaatgcagacaacaacattagcaatactaatgatgatgatgttaccaccaacaaccatgcttcttgccccaatagtgaccactcgaatcaagcgtgcaatgtcaacatcattcaccaagatgtcgacgatagtatcaatgatggcacccaaaatgacaaccctagcaattgggactctgagaaagactccgatggtgatagcaactatggtaccactgatgccaatgttagcaaggatttccagccaccaattccaactccaagtcagaatgaccgtccccagacggatagctcagcaaagaagacgttgatttgctacaattgcaaagaaccagggcattactcgagggactgcctgcaaccaaggcaaagtcgacctccacattaccgccaatttacacgaagcagacatcccaatcgtattgtggtcactggagcaaacgctgtacccgtttctctgaaaggcagcaggctcaagtaccacatcgtcaccagaagcatccacaactctcggagtgaagagtacttagttgacaaagttgacgccaaagatatgaactatgcgaagttctggaactgaagccccatcttcaggtgccgcaacccagtcgaagtcagctaaaggttcaaccagggacaagtcgggtgaagagaagatcccatctgcaacaggagatcgagccaagcagtccagagtggagaagttttgctaggcaagtttgttatagaagacgcgacgaaagaagtccaccaagaagagaagaccgcccaacctatcttcttgctagcctcctcgaatctcggggacgagattcttgtaaggggggtggatttgtcacgtcctgataaattcatcccaaaattaaaaat

SEQ ID NO: 68769 - DNA, 498 bp, Oryza sativa
  Clone ID: PAT_MRT4530_694C.1
ttacgacaataacttaagtttctgaagcgacaaatcaagctcatccttgtgctgctgctttccacagtagaattcggtggggtgcagaacacgtccgggcgggcagaaggcacagccgccattagcggcggcggtggtgagatcggcatcggccggccgctgctggagcacggtgcatgtgtcgacgaagaagctgtgtacgtagggggtgaagcggatcgagctcagcgaaaaccaggcccgatggtcacgcccgcaccgacagcttcgctgctgcctgccatgtccggcctcctctccttcgcctcgtgcccttcctagccttcccttcccgcgccgagaaccgccgccgctcccaggccgcgcctccgcatcgcaggctccgccgccgtgtcccaccgggcatcttcctcctccagagatcgcctccgctagctcgtccgccatggggagctcgacaaggcgctccggctcgtcgggtgcgcgcggaggcctgat

SEQ ID NO: 68770 - DNA, 200 bp, Oryza sativa
  unsure (1)..(200): unsure at all n locations
  Clone ID: PAT_MRT4530_69500C.1
gaattcggtacgaggcaaggacgtcggcaaggntttccgctgcatccgcatggtcaacaacaccngcntcaactnggacgccttccacggcgacaaggaccacggcggcgtccgngacgnnaccaccgtngtgctctgngagtggtncaagggcgacaaccanagctngaagatcctncnntngggccccgaggctcact

SEQ ID NO: 68771 - DNA, 906 bp, Oryza sativa
  Clone ID: PAT_MRT4530_69501C.1
atggacgcgtcccgccgcccggatgcggcatcctcccagtcccagaggcgctccaagcgcccccgcagctcccccacccagcactcgccggagcagcacaagcgtccgcccagggtttggaacccccaagatgaggtcaccatactgcgtgccctcatctcctaccgcgccaagaacggcgcgctcccggggtcctctcaggacacaggcaagctacacaatatgattcgcgggcagcttagtgttaaggcatccactacccagctcagtgataaggtccggcggctcaaacacaagtacaatttgatcttgacccgtgttaccaagagcgggcgggatccggacttgccaactgagcatgaccgtgaggtttacgaacttagcaagaaagtttggggtacaaagagtggtggtgctggcgctggtagtggaggtggaggtggaggtggtggtggtcgtgtgtatgagaatgctgaggtggtacagagtgatgaggagcaagggagcagagatgatagtgatgaggacatggagagtgggtgggacgaccgtgatcacaggaacaggaggctgaaggccattgttgtagcaaatgggaatgggaatgctgtgactgggggtaggagtgtccatggcaatggcagtgggaagggtgatgttgctgacaaggggaaggacatgtatccttacctttgggaggctgtcgaggagctgtccaaggagcacccaagtgggactgcgttcaggaaggcctttggtgtgcttgatggttcaagggcacgggcaatggaggagaagctgaacaggtttaggctctcagagataaggcagcagctgcgtcggatggacctgatgaaggagacgatcaagatggtgcttgatgcgctggagggctctgatctttga

SEQ ID NO: 68772 - DNA, 3396 bp, Oryza sativa
  Clone ID: PAT_MRT4530_69502C.1
ccaaaggataactaaagagtagattacttttgcaatgagtttacagttcaactagttactaactagtccaatgctacaacgtcgcaatggtcacttgccagaaaatacaacaactgttctccactgtttaaacacaatttcacatctatatatcactggatagcaattaagctccccaaattattattgaatcaatcagaagtacccaaaaaaaaacagagaatcccaaaacatgactactgtacagaaatcagtcaggagggccactgcaaacaaggcgtttgcttcatgctcagtttcagtcagcacagcaagaccgacgcttcttcagtcttcacaccaaatccgggtcattcttgggtccagcagccacctcctcgacgtgcaatggcttcttgtagagctggagcagcagcgacgagcagacgacgctcaccgacgaggccgccatgcaagctccggcgagccatggcggcagccggatgccggtgaacgggaacaggacgcccgcggcgaccggcatgcccaggacgttgtagcccagagcccagacgtagttgagccggattcttgagagggtcttcctggagagatcgatggcagtgatcacatcctcgaggctgctcctcatcaggacaatgtcggcagcttcgatggcgacgtcggttccagccccaatcgccaggcctacgtctgcagcggctagagccgatgagtcgtttatcccgtcgccgaccatggccaccgtcaaccctttcatctgcaagtccttgatcttttcggctttaccacagggatcgatctcgacaaatactgggttgatcccgacctcttgagctagcgatttagatgtagcccaattgtcgcccgtcaccatgatactcgagatacccattgagctgaggtatgaaatggcacggcctgcttcaggtttcagaggttatgacacagaaagagctccgcagatggttctgtcgatagcaacaagcacacaggtcctagcaagctcttctgtttcagacatgtgtccctctacttcagaacttattggaacttcaaattcttgcataagccttttgtttccaaccagcaccagcttgccttcaacattggcactcacccctgcccctggatgcacctcaaagtccttggactccattatatggtcactgtgagatccatattgttccctgagcttctttgtgtactctacaatagcctttgatagaggatgctcactgttcgcctctgcaccagcagccaaatcacacagctctagtagcggtatcttggagaacacctttgtttgaacaacagaaggtttaccgacagtcagcgttccagttttatcaaatatgatagctttaaccttgtgagctttctcaagtgcattgccacccttaataagaacaccttgagaagcaccttttccagtggcaaccataacagcagtcggggtagccagtccaagagcacacgggcatgcaacaacaagaacagatattccaaactgcagagcaagctcaaagctatccattgcctttggaatccattctcgagggtatatgtcgaattgcccagctacgaaccagccaagccatgtaagaaatgcagccaccacaaccgttgggacaaaaaaccgtgaaatcctatctgccaacttctgaactggagcccttgcaagttgagcagcttcaactaactgaactatctgtgacaaagctgtttctgacccaacatgagtgaccttaacaattatacaaccattgtcatttacagtaccaccaataaccttgtctcctggtttctttgcaatgggccttgcttcaccagttatcatactttcattcacatgactttggcctttgatgacaacaccatcaacagggactttttccccagggacaatcttaatgacatcatttctctgaagtaactgagtgctgatctccgtttctgaaatggcatttccatctttgtccaaagtaagaagacaagctgtttctggtgcaagttcagtcaacttcgacaaagcatctgatgtctttcctttggccaccacctccagatatttccccagcaatataaaagatatcaacatagcactagtttcgaagaaatcctgtccttcaaatgactctgatgttagtgccttcagaactatatacacagaatagaagtatgcagcatttgtccccaaagcaacaagcacgtccatgttcgagtatcctcgttttagcgcatgataagctccaacataaaatctccaaccaataatgaactgaactggagaacacagcaaccaccgtaatagcatacctatcgtcatgttattgcatactttgtaaaacagccaatccccaaaaggagaaatcattggcagaaccatggagaacatgaatacaggcacagaaaacaggcaactccaaagaaattgattcctgtaattcctaatttcatgatggcgctctgcctctctttgctttggtggtgaatacaagctagcattgaagtatttagggggctgtgcagcatcctgaatgcactgaataagtaatcgtgggccagtgacatcaggatcatatgcaactattattgtctgtcccgctgtgtcacattccacgttattcacaccttcgacagattccagtcttgactgaatgagtttgatgtcttctggggaactcacaccctctagttttaggtggactttgttcacatcatccccggaactaatgagatcagctccaaatccagcatcttcaatagcctcaattataagatcacgacttgtgatatttggatcaaaatggactttagcttcctctagggcaagtcccactgcagctttcttcactccaggtaccatctgaagtgctcgctccacagattccgagcagcttgtacatgccattccttttatctggagtctgcatacagcaatttcctgttcttgaagttcatcgacctcgaaattgaggccttcgatagcttcttttatggttcttgcatcggcttcctctggtctgtactggacaacagcttggccctgaagcggcgaaaccggacgctctcgactcccttgaggccagccaccaccgtctctatcgacacggcgcacgaagcacacgagatcccccggacattgaacatgaccttcctcgtcttcctctccttccgcggcgacgccccggcgggagaagcaccggagccgcctccatctgcctgaagaagtggatctttgagatggttctctccattctgctccatccctcggccgccggtgatcaccgcggcggcggcggcggcggagggtttagtagaggcggtggaggcgaggcgaggcgaggcgaggcggcgaggcggcgaggaggagggaggcgtgaagcagaccgc

SEQ ID NO: 68773 - DNA, 1074 bp, Oryza sativa
  Clone ID: PAT_MRT4530_69503C.1
gttcctgagctctttgtgtactctcaaaagcctttatagagaatgctcactgttcgcctgacaaagttaaaaaaaagttaaggttagatgacatgagacagcaaactaggaacatcacacgacattcaacaaaaattattagcatttgcatctaagaagccaacctctgcaccagcagccaaatcacacagctctagtagcggtatcttggagaacacctttgtttgaacaacagaaggtttaccgacagtcagcgttccagttttatcaaatatgatagctttaaccttgtgagctttctcaagtgcattgccacccttaataagaacaccttgagaagcaccttttccagtggcaaccataacagcagtcggggtagccagtccaagagcacacgggcatgcaacaacaagaacagatattccaaactgcagagcaagctcaaagctatccattgcctttggaatccattctcgagggtatatgtcgaattgcccagctacgaaccagccaagccatgtaagaaatacagcccccacacccgttgggacaaaaaccccgtgaaatcctatctgccaacttctgaactggagcccttgcaagttgagcagcttcaactaactgaactatctgtgacaaagctgtttctgacccaacatgagtgaccttaacaattatacaaccattgtcatttacagtaccaccaataacctgttaaaaacaagtcaattgaaccatcaggatactagttcataacaagagcaaatacaatcaggatccaaaaaataccacccttgtctcctggtttctttgcaatgggccttgcttcaccagttatcatactttcattcacatgactttggcctttgatgacaacaccatcaacagggactttttccccagggacaatcttaatgacatcatttctctgaagtaactgagtgctgatctccgtttctgaaatggcatttccatctttgtccaaagtaagaagacaagctgtttctggtgcaagttcagtcaacttcgacaaagcatctgatgtctttcctttggccaccaccggacgcgtgg

SEQ ID NO: 68774 - DNA, 339 bp, Oryza sativa
  Clone ID: PAT_MRT4530_69504C.1
atggaacatatcgtgcgcgcgttaattacgctcgccgaccgaagcgccattaccatatctccaggcaaaacgaaccggctcgtcccgattcgtgtgctactcgagatgagagcctccaggcactcgtccctagccggagccagcgtgctagctcctggagatagcacgttggtcccggtcagatatatgccaggcttcatcgcaaccattaaaagcaagacattgtatgaagaagggcgaacatgcagattggtaaactgatgcgtggtggacaagaacggtcatgatcccacgttgcacctgcttctggcggagtggagatccaccagaacacaggag

SEQ ID NO: 68775 - DNA, 227 bp, Oryza sativa
  Clone ID: PAT_MRT4530_69505C.1
atggcggcggtggcggcgtgtggtgtggaggcacgtcggcgtttttgccggcttcgccggcgtcgcgaggaggataggggcgtgggggatagggtcgccggcgccggagagaatcgccggtggcagcgcagcgccatgccgcgcagcgccagtcgcgccaccgaaatctcccctcgagctatcggtcaacgggcggacacattgaatgaaacagttaacgtgtacgg

SEQ ID NO: 68776 - DNA, 825 bp, Oryza sativa
  Clone ID: PAT_MRT4530_69506C.1
atgcatgatgcagcactgcaggctctgcctatggttttggaatggctcaagaataagaaactgaagacggccaacgtcgacatgcagcagctcactagccagagagacaatgacaacgggagcacccctcttcacttggcggcatcaatggctgggctgccgtccctagggtcgatgctgctgctggatgccaacgtgtccacggcgtaccagccggacaaccaagggcagtaccccatacacgctgctgcgtcggcggacagcctggaggctgtgaaggccctgctcgagaaatgcccggactgtgctaccctccgagatgcgagaggaagaacttttctccatgctgccgttgagaagaagagttttgatgacgacaacggggtacgattggatatgcggaataaggagggcatgatgcccgccgatgtttcatggagcatgatgcctttaaagacttattatgcatggaattcaagcatacgcatacgaaaattactcttgaaactgggagctccacttggtgaaagtagaggtgacctcttcgatgaaaagcacaatagaatcatcggagaaaaatctaaatgggacatggaaaagatgtcggagaatgtaacagctgcagcacaagtcttggcccttttctccgtccttattacaacagtgacatttgcgtcggctttcacgctgcccggtggctaccgatcagccggcgacgatggtggtgctgctgggacgccgaggcaggcccaaggccttcccacttttcacaagagcaaatcgatgaggatgagtgcgcgccgtgtcaggacggagaatggttag

SEQ ID NO: 68777 - DNA, 381 bp, Oryza sativa
  Clone ID: PAT_MRT4530_69507C.1
atggcgaatcacatcaaaactcttcttctcaacggcagcatggagaaaagttcttcctctcgcatctcggagggtagcacagtccgggcatttctcgagcagggccttcacagcctccaggctgtccgccgacgcagcagcgtgtatggggtactgcccttggttgtccggctggtacgccgtggacacgttggcatccagcagcagcctggtcgccgacgatggccccgccgacttcggaccataggaaccacagcccaggcgttgagtacagcatggtcgcaaatggccctgccgacatcgaccctagggacggcagcccagccattgatgccgccaagtgaagaggggtgctcccgttgtcattgtctctctggctag

SEQ ID NO: 68778 - DNA, 1695 bp, Oryza sativa
  Clone ID: PAT_MRT4530_69508C.1
atgggttgcggtggctccaaagaagctgtggccaccggcaacaccgtcggctccaccggcggcagatccagccgccgcctcttccggcggaagtccagcgtcgtcgccgccgccaacgccgccccgtctcacgcgccgccgccgccgtccgacgagagctcggccgccgccgttgtcaaggaaagcagtgtcaacgaagaggtcaaggggaagggcaaggcgacgccgaaagagaaggccattgatgaggagaagaaggatgtcgaggagagcaccacggcggccgccgccgatgaggtcgtcgtcaaggacaccggcgtagtgatcgtcgagaagacgacgacggcggcggcggccaaggcgacgccggcggccgtgaagaagatcgtcgaggagaagaaaaaggaggaggccaagaacaaacaagaagctgtcaccgatgataagaagaaggagaaggtgattccgaccaaggtcgccattgatgagaagaaagaggatgtagtagtgccaatgaaggaggagttcgtcaaggagaaggagaagatcactgacgccaagaacgacgtcgcatcaaccgagaatgtcgccgccgtcgatgagaaaattaaagcagaggaggacaagaacaagaacaagaacgacgacgaggttgttgccacggcaacaatggaggcagccgtcgaggaggaagacgacgacgaggcggcattagccgaggacgacgacgacgacgacgacgacgagcagcccaacgacgacgaaagcatcaccttcgcggttgcccccgtcgccgaggacgacgaaggcagcgtcaccttccccggcgcccgtgcccggccggtcgtcgccaacgccgacgaggttcatcaggaggatgacgtcactagtgtcacctcgccgacgactgccccggccaccctggagaatgacaccagtagtagcgccgccgccgccttcccggccgctgtcccggcgccggtggccggcgaggaggtagcacaactagagcaacctagctcttctaagtccaacaatggcgaaatggaggcggtggccggagttgatcaggcagaagatgccaagaaggagacaagcaacattgaggcgatcaatgtcgaacaggaggagatcaaggtcgaggaggaggaggagaagatcatcgtctcacaggagacagaggaggaggaggagaaatccgctgtcatttcgagagatgagatcaccaaggtcgaagtcgaacgcgaggagatcaaggtcgaacacgaggagatcatcgtctcccaggagacagaggaggagaaatccattgccgtttcgaaagatgacgatgggcaatcagatgggaaacaaacaattgaattgaaggaggccatgacagcaacaaaaacggatgaaaaaggagaggagcaggtcgctaaggataaaaaggatgacgaacaagaacaacaagccaccgccgctccaattgagtcgccgaaacaagaacaacaagccaccgccgatccaattgaagcaccgctgaattgaaatttgaaaatgagacgcatcgtaccaaacaaaatgcattgatgcatgcctccacgaaatgtccaaattttctcccttcagtttattagcaagaaactgtacatgatgcttatctgttcttgttggttaaatacttcatcttcaactgaaaaaaaaaaaaaaaaa

SEQ ID NO: 68779 - DNA, 279 bp, Oryza sativa
  Clone ID: PAT_MRT4530_69509C.1
atggcgaagccatcggtggtcttgttgcaaataatggtgatcggactcaatggccacgcctcattggcgacggcgcgcggctcgcggaactcctcggtggcgacgctccactccgggatggcagtgacggctcgatctagcttgcaacatggtacgcatgatgttagtgaggtcccaagggtggtgcactgtggctcgtcttggagtccaccggagcgccagaacgtggccgtgcagcagctagggctcgtcggcggcgagagtgtgaattgcgattaa

SEQ ID NO: 68780 - DNA, 2658 bp, Oryza sativa
  Clone ID: PAT_MRT4530_6950C.1
atggataaacaagtgaagaaccacagaccttctgttggtacggatggatcaagggaaattcttatggacgagcgcaaccctaccatggacatagtagatggtattagtcaatctgtccatgattcacaaccggatggtggtcagtcaagccgtgtagcaatggaggaggacgtgccgtcgcgggttggctcacatgattcagggcatggaattccagagacaagaaatttggtcccttcactggattggacagaaggaaacccatatgaaaaagaaggagctgggataccgatggaaagaatggtggtagataatgttgatagcagtgctgtcatacctcctgagtatgctgatcctcaaattcttactccgatgctgggacaaagatttaagactgagagggatgcctataatttttataatgtttatgctgttagtaaaggatttgggatacgactggacaaagatcgcatgaatactgaaaagcagagaacaatgcggcaaatatgttgttctcaccaggggaggaacccaaaaaccaagaagccttccgttcgaattgggtgcccagcaatgatgaagataaataggtctggagctggtagtggctggtcagtaacaaaggttgtttctacgcacaaccatcctatgaaaaaaagtgtaggagttactaagaattatcagtcgcacaatcaaatagatgaggggactcgtggtattattgaagagatggtagacagtagtatgagtcttacaaatatgtatggtatgttgtctgggatgcatggcggaccttccatggttccattcacgagaaaagctatggataggcttgcttatgcaattaggcgggatgagagcagcgatgacatgcaaaaaacacttgatgtcttgaaggatttgcaaaaaaggagcaagaatttcttttatagtatacaagttgacgaggcttgccgtgtgaagaacatattttggtctcatgctgtgtccagattgaactttgagcattttggtgatgtcatcacatttgatactacctacaaaacaaacaagtataatatgccctttgcaccatttgttggtgtaaacaatcactttcagagcaccttctttggttgtgccctgcttagagaagagactgaagaatcatttacatggttattcaatacattcaaagagtgcatgaatgggaaggttcctattggaatattaacagacaattgtccttccatggcagctgccattagaacagtatttcccaatacaatccatcgtgtgtgcaagtggcatgtactgaagaaagcaaaggaatttatggggaacatatactccaagcgtcatacattcaagaaagcatttcataaggttcttacgcagacactaacagaggaggagtttgttgcggcttggcacaaactgattagagattataatctggaaaaaagtgtttacttgcgtcacatatgggacataaggcgtaaatgggcatttgtatatttttcccataggttctttgctgggatgactactacacagagaagtgagtctgcaaaccatgtgtttaagatgtttgtgtcaccctctagctctatgaatggctttgttaagaggtacgaccggtttttcaatgagaagctgcaaaaagaggactcggaggaattccaaaccagtaatgacaaggttgaaattaaaacaaggtcaccgatagagattcacgcatcccaagtatatactagggctgttttccaattgttctctgaggagttaaccgatagtctatcttacatggtgaaacctggggaggacgaaagcaccgtgcaagttgtacggatgaactcgcaagaatcattccttaggaaggaatatcaggtgtcttgtgatttggaaagagaggaattttcatgcgtttgcaagatgtttgagcataaggggattctgtgcagccacatcttaagggtacttgttcagtatggtttgtcaagaattccagagaggtatatattgaaaagatggacgaaggatgctcgggatactataccacctcatctacatgggtacaaagatgatgtcgatgcttcacaatcgaggagttacagacatgtaatgctgaataggaagactgtggaggtggctaagattgctaacaaagatgtgcagacatttaagatggcaatgacagtcatgaataagcttttggaggacatgaaaaatcagttatctttggatgatggtgacaatagtagagaagctccgaagcgagcagctaggcataaatcaaggtctactgtattgactgaagatggaaacgaagaagttggtggaggtgatgaggacagtgagtatgacgtgccaagtgaggacgagggtggaaatttgactgctgatatacttccaccgttgaaaaagaaaagcagaggaagacctaaggtgaataggtataaatcgggtggtgaggttgccagcctgaaaagaagaaaagaagtagggattgagaagaagaacacaaccaatgagtgtgagtccgttgaagaagaaaaccaagtcattgatcatgaggatgaagtgccctttcctcgtaggttttgccacacatgccacgaagctggtcataattcgcggacttgcggccggacatctacgtacaagagaaaactttag

SEQ ID NO: 68781 - DNA, 276 bp, Oryza sativa
  unsure (1)..(276): unsure at all n locations
  Clone ID: PAT_MRT4530_69510C.1
gtggtggtggcatgtactagggggggggggggtagattaggatgcgagatcgtgcgccaatgcaggtggtgttgggaatgtatgtctggatgctgagaaacccacgctgaaatcatgttccgcgttcagagtncgttgaatgaaaccgtgtgcgtagggagacgcgctgatcaatgtgcgcggtttgctgcatcaacaaatacctgtaagtggcatcgtagtatgagcttgttgggtattgatgcttaattgcggttgctatcggtcatgaaagat

SEQ ID NO: 68782 - DNA, 1319 bp, Oryza sativa
  Clone ID: PAT_MRT4530_69511C.1
ccggccgggctcgaccgactctcccgtctcctcgcgagttcacccgcccgccgcctgcggcgatctccatccagcgagcagcggcgccggcgccggcgtaccgctgcttccgccgcatcctctatctctggagatgcctcgctatgatgatcattatggaagcacacgcttgtatgttggtagactgtcttcgcgcactcgttctcgtgacctagaatatcttttcggcagatatggaagaatacgtgaagtggagttgaagcgcgactacgcgtttattgaattcagtgatccccgtgatgctgatgaagcgcggtataacctagatggcagggatgttgatggaagccgcattcttgttgagtttgctaaaggagttccacgtggtgctgctggtggttcacgtgaatatatggggagaggacctcctccaggaacaggtcgctgttttaactgtgggattgatggtcactgggcaagagactgcaaggctggtgactggaagaacaaatgttaccgttgtggagaaagaggtcacatagaaagaaactgccaaaacagtccaagaaatctcaggcgagagagaagttattcgcgctccccatcgccacgccgtggacgtggtcatggtcgtagtcgtagctatagccggagccggagcaggagttacagccgatctaggtccagatccctatctggatctcccaggggacgcagagatcgtgatgataggagatcaaggagtcttagctacagcagaagtcccaggcgatccatctccccagcagcaaatggaaaggagcgcaaccccagcccgaatggtaggcggagtccaaggagtccacaggatcgggtaagcccaccacccaaggataatgatgagcgcaatggtgacagcccctggggcagggagaacagcaggagcccatctgacggctaccgtagccctgtggctgccaatgggcgcagcccaagcccaaggaacaatggaagccctagtccaatggacaacaatagccgaagcccaagggacaacggcagcccgagccctagggatggaaatggtgatggtggtagccgtggcggctcacgctcgcccagagcaagcgagtcccctgaagcttgaaatttaatcccagtctctggcgttcatcttgtggatggtcatgctatggttgtaatagttatatttccggtttaagacgagatcaaggagtcttaacacctgaaaggatttggtgcccttggggctatgctatattgctattggtgtgtaatggatcgatgaactttctattaaaaaaaaaaaaaaaaaaaca

SEQ ID NO: 68783 - DNA, 297 bp, Oryza sativa
  Clone ID: PAT_MRT4530_69512C.1
atggcgacgggctactgtcacggctgtaggtgtcaacgatgctcgtcgcggccatcgcgggaccgggacggcgtggcttgggcgccgctgcagcacgcggctggagggaggaaatgcagaggagaaaagggacgctgggaggacaaggcgacggggaggagggggcgacaccacgacgggaaggagaggggcccgcgggggaagggggagtgcgtgcagtggggctggagagatggatgtcgccgggaggaaaggagggagggggatcaggaggaaggaggaatcacgccgccttag

SEQ ID NO: 68784 - DNA, 1432 bp, Oryza sativa
  Clone ID: PAT_MRT4530_69513C.1
atgctccgtagccgcgctcgcctgccgctgcgcctgcctccagccgtgcgccgctgccgctccccatctgcggcaaaggaaaaggatgccacatcagtaaaaccggacaaaaatactgccgagggacctcaggagatgcctcgctatgatgatcattatggaagcacacgcttgtatgttggtagactgtcttcgcgcactcgttctcgtgacctagaatatcttttcggcagatatggaaggtcttgtgtgtttgacttgaatgatcttgttgaaggtttttcggttttttacacaacccgggagtggaagttgcaagtcggtgatgcatttgagtacttgagtcatgatggcttactgtttggcaaccattggtgcagaatacgtgaagtggagttgaagcgcgactacgcgtttattgaattcagtgatccccgtgatgctgatgaagcgcggtataacctagatggcagggatgttgatggaagccgcattcttgttgagtttgctaaaggagttccacgtggtgctgctggtggttcacgtgaatatatggggagaggacctcctccaggaacaggtcgctgttttaactgtgggattgatggtcactgggcaagagactgcaaggctggtgactggaagaacaaatgttaccgttgtggagaaagaggtcacatagaaagaaactgccaaaacagtccaagaaatctcagccgatctaggtccagatccctatctggatctcccaggggacgcagagatcgtgatgataggagatcaaggagtcttagctacagcagaagtcccaggcgatccatctccccagcagcaaatggaaaggagcgcaaccccagcccgaatggtaggcggagtccaaggagtccacaggatcgggtaagcccaccacccaaggataatgatgagcgcaatggtgacagcccctggggcagggagaacagcaggagcccatctgacggctaccgtagccctgtggctgccaatgggcgcagcccaagcccaaggaacaatggaagccctagtccaatggacaacaatagccgaagcccaagggacaacggcagcccgagccctagggatggaaatggtgatggtggtagccgtggcggctcacgctcgcccagagcaagcgagtcccctgaagcttgaaatttaatcccagtctctggcgttcatcttgtggatggtcatgctatggttgtaatagttatatttccggtttaagacgagatcaaggagtcttaacacctgaaaggatttggtgcccttggggctatgctatattgctattggtgtgtaatggatcgatgaactttctattagcctgcattgtttttgcggtctggtatcaccctgagattgcaacttttgttgctttggtcgctgaacaacgttgacgacagttctcttt

SEQ ID NO: 68785 - DNA, 356 bp, Oryza sativa
  Clone ID: PAT_MRT4530_69514C.1
gtataccctctacccttggatgtatgttgtatgccgatacggtatacctgcgcgtatactggtaatttctgtatacgttaaggaaatctatcacatgatagaaacagaatccatacatgggagaagtcctactcggacaagactgggtcgttaccatatcgtgtggggtccgatatcttcgagtcctacttggagatcaactgacccgcggtataaaagggaccccagggcaggacctaaggcatcgaatctcaccgccaacacatccaccacagcctacgaagtcggagcctacaggagccaagtcgccgggtgatctagtcgaaccaactcgactacggtctcgtcggtatcat

SEQ ID NO: 68786 - DNA, 813 bp, Oryza sativa
  Clone ID: PAT_MRT4530_69515C.1
atccctgccatctaggtttataccgcgcttcatcagcatcacgggtatcactgaattcaataaacgcgtagtcgcgcttcaactccacttcacgtattctgcaccaatggttgccaaacagtaagccatcatgactcaagtactcaaatgcatcaccgacttgcaacttccactaaaacagtcaataacattacaccaagggcacccttcaccaaagtcctcgacaaactttggaagaatggtcaccaattccggagaaaaaagaatggccaccaattccaccaagggcaccccttccaccagaccaccacagacctcccgggttgtgtaaaaaaccgaaaaaccttccatatctgccgaaaagatattctaggtcacgagaacgagtgcgcgaagacagtctaccaacatacaagcgtgtgcttccataatgatcatcatagcgaggcatctccagagatagaggatgcggcggaagcagcggtacgccggcgccggcgccgctgctcgctggatggagatcgccgcaggcggcgggcgggtgaactcgcgaggagacgggagagtcggtcgaggccgaggcaagagtcggaggccagttaatacgctgagctccctcgcccgtatttttgtccggttttactgatgtggcatccttttcctttgccgcagatggagagcggcccgagatgatggcacgggcggagaggcggcggaggaagccgcatcaacatcagcaacaatagcaacaggggagcgcgcggaggaccgccattgccaccgacgagctcgcgagtgaagctcagccggctc

SEQ ID NO: 68787 - DNA, 534 bp, Oryza sativa
  unsure (1)..(534): unsure at all n locations
  Clone ID: PAT_MRT4530_69516C.1
ccttaaaacctttaanctcacaaagtaactaatatataccctttcggagctttatataacattaaacctgatgtccaaaaccagatgatatctggatatcccgatgttgaacagaaaaggcgtgttcagcaggtgaaaattaaattttgggtttaccatgcaggtttgataaccttgtttatccctcaaactctacagatcttagagcatctccaaacagcttctctatcccactctccaagccaaaatttacccattttgaacaaaaaatcccactccaacagcctctccatcccactctccaaccatccggatgcccaaatttcttccctcactagccaaacttgccagctactccacttgccattcactgcaatccatgggtcccaccacgctcctcccttgtcttcttcgtcgtcgcctccaaatggaacccggcgccagcttcccacccaccgcctcagtcgccgccgcttagatatcctcgagggcccaacttacgcgtacccacttttttacaaatgtcctatatat

SEQ ID NO: 68788 - DNA, 441 bp, Oryza sativa
  Clone ID: PAT_MRT4530_69517C.1
atgctcgcgccggcgcggctgccgatcaggaacaggggcctgcagccgggcgagcccgcggcgtacgagcgcacccaccggaccacgtcggcggcgtcctcgaacgcggcggggaggcgcgagtgcggcgcgttgggcgtcatcttgtgggctgttcatgggcagtggcggcggccggctgctcggggcacacatagtggtcatcctcgtcatcgtggcgtgggtgagcttcaccatggcgctgctgttcctggtgctcaacaagctgggcttgctgcgcatctcagccgaggcacaagatggctggcatggaccaggcgcaccacggcgggttaccatgacgacgacgtgagtggcaagccggaccgcggcatcggcgggttcatgctcaagtcggcgcatggcacgcaggtcgccgccgagatgggtggcaatgtctag

SEQ ID NO: 68789 - DNA, 180 bp, Oryza sativa
  Clone ID: PAT_MRT4530_69518C.1
atgagaggaaagacggaggatgcttgccttgcgaatttgcaaaggactaacgagattgtttctatcgccaagatgagccgcttcgggctcaggagactatggtggatgaagatggcgaaggcgcgggcccatgataaggattcccaagcctacttggtcgatttggttgataacttttag

SEQ ID NO: 68790 - DNA, 2880 bp, Oryza sativa
  Clone ID: PAT_MRT4530_69519C.1
atgctccgtgctgtggccggcgtgcgtgggctcgccgccgacgacccctttggcgtggagctaatgcacgtgttgattgacgacactgacatcgacgacaatgtccggcgactggagaacacggtgcccggcgcgtgggcgacggtggagagttgtgatgtcgcggagctgctcctcgccagcctcgatgccgctagctctttccagctggctcggcggcgtgacggcgtggcggtgctcgtcgccagcgaccagagtgcttctcggttcccgtcgacaagagcatgcctcctcctcgaccacggccacgggccggagcagctccacctgcatcagcccgcggcggccaccggcggagctcgtcggcttcacggacttccacgcgcggtcgatgcgcagcatcttgagctccacggcctcctccttcctgtcgtccttgtcactgttgtcttcctcgtcttccagctcggcggcgcagatggggggaaggcagcggtgcgcgcgtgcgtcggttgctgccggcggcggcggcggcctgcgcaccattggctggcggcggtggcgcggatgtgcatgcgatgtcatgcgttggcggcctacgtgggcgcggcagcgggcggcgcagagcgggctcgcctttctccccctctgcccaacgcgctcgtcgcgccgccgccgcgcggaggaggtggcagcggtgctctggccgatgctatccgatccgtgctgtggggcccgccatatgagccccttcctgcactatacattacagatgctcttagagcaagtatgaaaatcatccaaagctttcaagacgtccctgaggattacgaccattgggcgcccggatcaagacgtcttcaaaacaggctttaccaaaggcatcgcgccgccgtgccaccggccacgccgccacacggcgttgccgagagccgcgactaccgcgcgtgctgctatgcaccgccgccggccgcgccccgcacggcgccgccacccgccactgtgatcaccgcgagccgccgccagtgtgatcactctaacattggtcattcatatagcacacgtgtattttacgtatttttgctactgttatgttatcaaagccgccacttcctcccacccagaccccgccgccggccgagacctcgccgcgaggcccccgccgccgagccgcccaccccgacctacacccgcgacgtcgtccgccgcgtcgacgccatcctccgcggccacccctggtcggcggcgcggccgctcctcctctccctcccgggcctcgcctgggactcccacaccgtcgcgcgcgtcctcaaggcgcacccgcctctccacaaggccttcctcttcttccgcctcgccgccggcgcaggcggcgggttccgccacgaccgcttcacctacacctccatgctccacctcctcggcgaggccggccgcgtgccggccatgatgcgcctcctcgccgagatgctccgcgcgggggtggaccccgacgccgccaccttcaccacggtcatgcactggctggcgcacgccggggacgtcgacgccgcgatgcgggtgtgggaggagatgcgcgcgcggaaggggaagtgtcggcccaccctcgtgagctacacggcgtgcgtgaagatcctgttcgacgccgggaggcctgcggaggccagggaggtgttccaggagatggtggccgagggactgcggcccagctgcaagacgtacacggtgctcatcgagcatctcgcgaacgtaggtgaggtgttcgaccaaatgcctaccatgttgtttgttacctctacgttctgtactgcactctcgttatgtactcaatatctatctgaagttcttcattcattgagtcatttgtgctcaacttcctgtgaagaaaagattgaacaattgttagcattctggaatactctgtacatagggaaatttgaagctactatggaaattatggacaagatgcaagaagctggtgtagaaccagataaagcactctgtaatattctagttcagaaatgctccagggctggtgagacatcagtgatgacccgaattcttcaatacatgaaggaaaatttcatcgtgcttcgccgacctatatttttggaagcacttgaagctctaaaagctaatggtgagagtgacaatcttcttcgggaagtgaatccgcatcttgcatttgaaggcatcgaatgtgacccagcatttactgatctaggctacattactgtcaggagtacgatcctgtaccttttggcttctagaaactggtccgccgtagaacacatgataaatgaaatgacccccaagaatatcaaggttgaatcacatatcctctctgacattattcaagcaagctgtgcaaactgcagaccatcatgtgggcttgcagttctgcgttacagtctaagaataggcaatgaacttgatagatctgcatatggcagccttcttggtcattacatcagaaatggttcattcgatttggtgtttgagatcgttgaaatattgattaaatctggctgcaatcttgggacatatctatcatctatattaataataaaactggcttgtgctgggcattcttcaaccgcagtgcgcatttttggattattgactacagacaagaatgttgttacgtacactgcccttatgagtgcctattttcaagatgggaaagttgataaggctctccaactattcttgcaaatgagtgctaatggagtatctgcatgcccagctgaatccttccagcacctattgctgcctgaacatgatgatattgacacacagatgtcattaaattatggagtccatctaggatcaccattatgtaacacaaatgctctttctgagattgcatacacagagtga

SEQ ID NO: 68791 - DNA, 906 bp, Oryza sativa
  Clone ID: PAT_MRT4530_6951C.1
ggcacggacgaagcctactcctcggaatagccaccatctgacgcatactcaaactctggggttggggaaaagtagagcaagactgagtacaaccaccatactcagcaagtcataccggaatagggcgtatgatgcaggatataaccaaaggatagctagagcggttcatttgcataaagcgagcatttataaatagtagttgaaagcagtaaaaatagtcgtaataattaatcaatattaaccatccactgtccaacgctacaccacgttgcaacaggcccaaccatccacctgaacatgacataccagaaagaggccgtgacaggacctttcgcataaccccctctagccaagcacaccacacctcaggtttcacccccgtccccagcgggcaacgggcagtcccctctcgtgcctaggtgaatccggaagcgacagaggccgtcgcagggcccgccccgctccatcacgcccacccttgcattaggacatttgcaatataggatcaatatgatcaagtgacaagcatgacttgccttgctctgctgctggagggacctcggcgactatctcgaagtacaccggagcgtcggaggaaccggaatctagcgacatacaaggcaaacattgcaaacaggctataagactacttaaataatttattgcgcaatattaaccagggctgacgtcgggagagggaggaagggcgccggcaagcgggacccgcatggcagtgactcgggagagggcggtccacggcggatcgggtccacggaccggggaggagcggcgcaccacgtggcggccgaaccgatggccccgatcccagggcaacgcgggaaaagggggggagggggccccccccccctccccccaccctcccaccgggcgcccccaccccggcaa

SEQ ID NO: 68792 - DNA, 954 bp, Oryza sativa
  Clone ID: PAT_MRT4530_69520C.1
tttttttttttttttttaagtttttcttttctttattattattattaagggggaaatgtaccccccccccgtagggggccccggtgccggcgcgccaaaagatccagcaggggttaactactagtcctcaactatagcggcatcctcttggtgctgaccaatttaatgatcctctcgcctatatagaagtgccaatttcttcgttgtagtgagatcgctaatactttgagttcagatcatgacacgcaactcaaccctgtgtggaatcatccctcctgtgatggctcctctgattcagcaggcggcgacgatggagcggtgtacttctggatggcggcgatgatcctctccttgtcccgcgtcgcgaacgcctccagcagcaccccgttcttgtagaaatggaacagcggcaccaccttgatgcgaagccggtctgccacctctgactgctcgtcgtactcgtcgatgacgttgtgcttgaggaagacgacgggggagccgtggtcgccggagcccttgcagagcttcatgaagccttgctcgatgtacttgcagctgccgcaggacgggcggaagaagtccaccaccaccagcgcccccgtcgccttggcgcgctccaggacgcgggccagctcctcctccgtcttgaactccgtcacgcactccaccgggcagaactcctcctcctcctcctcgacgaccacgggggtgagccccggcagcgacccgttcgtgctcccgccgccgccgtcgctctccgtggacgacgcggaggaggaggaggaggagaggtggcggtggcggcggaggggagtaggaggtctcgggaaggtggtggtcggcggcgggagggagcggcggccggaggaggcggcctcgtgcggaattcctaggagggagccggtgatcatggatgcattgtggccgtgaattgtcgtgctaaggatattgctt

SEQ ID NO: 68793 - DNA, 474 bp, Oryza sativa
  Clone ID: PAT_MRT4530_69521C.1
atggatgaagtccgggggcatctatccaccattaaccgaatactggagagccacgatctccaccttccaaacatcgacaagcatggctcaggtgttgctctccaccttccaaacatcgacaagcatggctcaggtagcagtacaggagaggagtctcttgttccaaacatggatcagagcaccagtggtagtggtgttctgcggtcaacaagtcagagttcctggacttcgacagccaagcaggaaccactatcgttgttaaagatatgtgagcagttcctccatgggcacaaggtcatggaggaggacattctatggctggcttcttaccatatgattggcaatgctcaatgttggaacatacacttcgaggaagaggagggcgaaccatcctggccacacttctcagaaaggggtgcgccacagtttcacttcggactaacagcaacaaatcttcatcattggtcttggtga

SEQ ID NO: 68794 - DNA, 464 bp, Oryza sativa
  Clone ID: PAT_MRT4530_69522C.1
aaatgctccgccgcagccgccacttcctcccacccagaccccgccgccggccgagacctcggggcgaggcccccgccgccgagccgccaccccgactacacccgcgacgtcgtccgccgcgtcgacgccatcctccgcggccacccctggtcggcggcgcggccgctcctcctctccctcccgggcctcgcctgggactcccacaccggggcgcgcgtcctcaaggcgcacccgcctctccacaaggccttcctcttcttccgcctcgccgccggcgcaggcggcgggttccgccacgaccgcttcacctacacctccatgctccacctcctcggcgaggccggccgcgtgccggccatgatgcgcctcctcgccgagatgctccgcgcgggggtggaccccgacgccgccaccttcaccacggtcatgcactggctggcgcacgccggggacgtcgacgccgc

SEQ ID NO: 68795 - DNA, 1089 bp, Oryza sativa
  Clone ID: PAT_MRT4530_69523C.1
atgctccgcgctgtggccggcgtgcgtgggctcgccgccgacgacccctttggcgtggagctaatgcacgtgttgattgacgacactgacatcgacgacaatgcccggcgaccggagaacacggtgcccggcgcgtgggcgacggtggagagttgtgatgtcgcggagctgctcctcgccagcctcgatgccggtgtcccgttctcctgtcgtgtcaatggcagctgcttcgcaattgcaagggagaggatcaaacaacaatttacatatagagatggagagatcacaaaaaaaaaaggaggggaaattttgatcgggagggagagagcacatgcacatactcgtgaattccctttcgcatatggcgctgagctagctctttccagctggctcggcggcgtgacggcgtggcggtgctcgtcgccagcgactagagtgcttctcggttcccgtcgacaagagcatgcctcctcctcggccgcggccacgggccggagcagctccacctgcatcagcccgcggcggccaccggcggagctcgtcggcttcacggacttccacgcgcggtcgatgcgcagcatcttgagctccacggcctcctccttcctgtcgtccttgtcgctgtcgtcttcctcgtcttccagcgcggcggcgcagatggggggaaggcagcggtgcgcgcgtgcgtcggtttccgccggcggcggcggcggcctgcgcaccattggctggcggcggtggcgcggatgtgcatgcgatgtcatgcgttggcggcctgcgtggtcgcggcagcgggcggcgcagagcgggctcgcctttctccccctctgcccaacgcgctcgtcgcgcccgccgccgcgcggaggaggtggcagcggtgctctggccggtgtgagggcaggggcaaaatcgcagcggcccgctgtgattgatgggtggcccactcagggggacgtccgccacctgagcaacgccggcctggtgctgggcctatccctcggcagcggccgaggaggaagaacgaccaacgcgacggcacaccgaggtggctgctggtggccgtatcgctaccgctggagtcatcgctga

SEQ ID NO: 68796 - DNA, 360 bp, Oryza sativa
  Clone ID: PAT_MRT4530_69524C.1
tttttgggaaccccggtccggccagggggcgccgattcggcctggcggagaaaaagttcccttacaatatattccaaccagaagctcttcggggccaaaagcaacttcttcttcggttcaaacccaatcaacgcaaaggtccccgtcttcttccacgggaacggaaacggccgccccgtttggaagtccttcgccttcttgaagtacttgaacaacgctttccggaaggcaacccttggcttcttcccttcgcgcgggaacaaccggtacgcgcgcgcccgggcaaggttctgggccaattacgtcaacaaaaaggtgtacccggtgggaacgcggttgtgaaaggtcaagggggaggag

SEQ ID NO: 68797 - DNA, 483 bp, Oryza sativa
  unsure (1)..(483): unsure at all n locations
  Clone ID: PAT_MRT4530_69525C.1
attgttccagnccgtncnangccgggccgangatttgcctcggnaagganctcncctncctgcagatgaagaacntccccgggagcgtgctcctccgccaccgcctcgccgtcncgcagggacnccgagtcgagcagaaaatgtccctcncgctcttcntgaagaacgggctccgaatggaggtncgtccacgcgacctcgcgcccgtcnccgacgaactccgcggcgcggacgtnagggccaccgcaccatgcgcgttgaagatccgagggccccgctcncgccaagattcntgctgatggaggcatggaacattcnntgtgtttattaagagagagtncgagacagtangttnattaaatgggtttggtgggaacatttaagccgcttcttctctgaatttaccatccngatcngagaaacttggattttatttttttttttgccaagacganatctacttggatttggatctgagagagc

SEQ ID NO: 68798 - DNA, 550 bp, Oryza sativa
  unsure (1)..(550): unsure at all n locations
  Clone ID: PAT_MRT4530_69526C.1
ttttaaaaaggttcaangcgangccctgcaccgnanacntcntttnactgggacgcagggangctgacntcatcancgggttnccccccagtgccatcgtgcgctgcaccacngcgcccagnccggncaccggctctatcgncaagcccngccannaagaggccaacaacaaccaggagcaagaacccaacgccgccgccgccgccactccggacgaggccggcgccaacccgcaccgcatccccgacgacgagaccccgccgtctgcgacggcgaccacgtcgttcgccgtggcgcggcgcgtgccgtcggccattctccctcctgtactctgttccgcnccggacggcgctgacncanggggagccgccgaaactacnaaaatcgggtggaagcgccaccaagaacctgccgctggaaaaccccaaggggtgggccatccgcggacttcatggaaaaactngaagggctgatggcncccgggcggtacnggtccngggaactgctgggcacggtggccggcgtngtnacggaacccgcgcgggaagaa

SEQ ID NO: 68799 - DNA, 556 bp, Oryza sativa
  Clone ID: PAT_MRT4530_69527C.1
atgcatgctgatgttgttgctagaagaattgagaatcttgaaaatatgtgtgatgagagagctaggatgctacaagatcagttcaatgtaagcatgaaccatgtgcatgcattggctattttagtctcaacttttcaccatgggaagaatccttctgctattgatcagaaaacatttgaggatttcacggctaggacaacatttgaaaggccattgatgagtggtgttgcctatgctttgaaggtgctgcacagcgaaagggagttgtttgagcaaaagcttggatggaagattaagaaaatggagaccgaagatcaatcccttgttcatgactacaatcctgaaaagcttcagccttcaccagttcaagatgagtatgcacctgttattttctcccaggaaactgtaaagcacattatatcagttgacatgatgtctgggaaggagatgagggtcatgaacaagaggcagcgaagtacaagcaaaggccgcgtaaaaggtttgattagttatgttggatccatctcactagggatgcacacaaccattacattat

SEQ ID NO: 68800 - DNA, 281 bp, Oryza sativa
  Clone ID: PAT_MRT4530_69528C.1
gtatgtatattattttgcttttatttttttttttcttttttttttatttcattttgtatttgcctggtctaacatcatttatttattttatagggggaaacaactccattttcaataacttttgtaagggcacccaacccccactttttacaaattttgttagattttaatccattcgaggcgaccatacccagtaaacaagcttggctaacaaacattacaaaagctttttacagtttatgaagcccaaaggccctagccaggtacacgctttgaaaaat

SEQ ID NO: 68801 - DNA, 355 bp, Oryza sativa
  unsure (1)..(355): unsure at all n locations
  Clone ID: PAT_MRT4530_69529C.1
cggacgcgtgggcagagtacatagctgggcgctgtatgggatcttnccttccagtttgattgnnanganctgacaaactgnaatgcaagatctntttcaggcgcgcatgctttggttctgtgcagtagcgtacgctttcatctagcttcaacatgtgtaatttgctcagttgctcttgggcggagtgggtctacattttgtccttttccttttgtattttgactgtttctattattttccccagtgattcttcttcttgatggccgatgccttctcggtccttatgatttttttgttcttcggcttttcccctttttttttattgctccatgattataagttgtgcctgggttta

SEQ ID NO: 68802 - DNA, 263 bp, Oryza sativa
  Clone ID: PAT_MRT4530_69530C.1
gttgggcagagcaaacagcactcatatagaagagacgagcactacttacatcatacacggtacataacaaacactacagaaaaacgcacctagcctcaaccctaggaatggactaaacaacactaaactcagcatcacaccacacagagaccacagtacacttagaactaatacacatggagtaggatgaccccactgacatgcacaccagcacatcgtaatagatgaccgcgtggaggaagctgaactcactggtatgagta

SEQ ID NO: 68803 - DNA, 3248 bp, Oryza sativa
  Clone ID: PAT_MRT4530_69531C.1
tccaagcgcgcagaagtgcgcctcatggaggagatggggctgctcaccccgggtgaaccggtcggggatgcggcggtaggggcttatgcaaagtcctttgacacaccgcctccgtcgcatgtcatcgccggtctgcgggcgctcacacgcatggatggagtgcacgacatgccggtgccaggcaccagccttcagccggttagtagcagagtagacaggctagaagataatgaaattgcttctacatggccatgtttggattgtagttgtaggtcatggaagaaaatattgttatacttcgcccaaatgttacaacatctgagaattctcaattggaatgttcgcggactaaataacccagcacgaagagaggcagtcctcgaagcagccgagctggccagagcaggcatcctgtgcttgcaagaaacaaaattaagttgtatagaccaatggatcggcaaagagatcgggggaagcaagctgtcgaacttcaatttccttcctgccaatggaacttgtggaggaattgccatcttctaggatgacacaattgttaacatggtgaatttctcccaaggaacacaccatctttcagcgatggcaacgaccataactgataatctcagcttcatcatcacagtagtttatggaccctcagaagactgtgacaaggaaaatttcctcgccgaattagtcgcagccaagccaccaacagacacgccatggttggtcatgggagacttcaacatcatatatgaggctagggataagaataaccagaatttgaacaggcgtcttatggggcgcttcagggcaaccttaaaaacattggagctaaaagacattagattgcaaaacaggtagttcacttggagtaatgagcagggaaacccgattctaagcaaattagataggattctgagcaatagtgagggagatattcttttctatgggcattccttgctagcactatccacatcctgctcagaccactgccagttgctgctagcaccaatgcaagaaccaaagaggaaaccgaggttccgatttgaaaatttctggattatagtggaaggtttcctaggcgtcgtaacccaggcttggaacgagcctatccaggaaggtcaccccacttggcggctaagtcaaaagctcagaaacaacgaagcggccttgaggaaatggagcaagcaaaagtttgggcaatcaaaattacaattcattatggtacaagaacttatctacaggctggatgtagccctggaaacaagaactctgacagcaaaggaacaccaattcaggaaagacctcaagataagaattctagggctagcaggggtggaaaaggcgaggaagaagcaagcatctagggtaaaatggctaaaagaaggtgatgctaacacaaggttcttccacataaagatgaatgctcgaaggagaaaaaatttcatccattgcttgcagcaagatggaaataccctgcacacacatgaggacaaagcagctcaccttcatgcccacttcaactcaatcttagggacaagaagacagtgtggctgcacattaaattgggaagcattaggactaagtacaatacaagatgatagcatggatgagccgttcacagaggatgaaatctgggaagcaattaaaaactctccaaaggaaaaagcgtcgggcctagatggtttcactggcgctttctacaatagttgctggcacataataaaaaagaaaattgtggatgtttttgcaagctttcacaacctcacaggggggaactttggaagcataaacagggccatgataacactgttgccgaagaaagactcgccacgctcggtgaatgatttcagacccattagtctgatccactctgtggcgaagcttatatccaaaactttggcaatgagactggcagcatggcttggtgatttggtctcgcatgcccaaagtgctttcatcaagaagagatgcatacaagatttacttcctctatgtgcgcaacatgatccggtccttgcacatgcaacggaaaccatccctcttcttcaagttggatataacaaaggcatttgattcgatatcttgggaataccttgtcgaaatgctgcagtggagaggctttagtcagcgctggagaaattggattgtgcttctcctatcgactgcatcatctagaatcttactcaatgggatagtgggagaaccaactacacacaggtgaggcctttggcagggtgatcccctctcgccctacctcttcatcctagcaattgacccgattcaacgactactcaatgaggccacgcaagaggggcttctatctccgttatcaaaccgagcagcgcggttcagaatatccttatatgctgatgatgcagcgatctttataaacccgatcaaaaatgatgtcaacaacttgattagcatcctcaagttcttcggcgaggccacaggccttcaagtgaacctgcacaagagctcggtcatgcccatcaaatgcgtagagcagaacctgtccgaggtgttggaaaatttcaatggacagcggggcaattttcccataacatatttgggattgctgctcaccccaggtcgcatcaagagaatacacttgcaaccggtgatggacaagttgcaatcaaggttagtgggatggaaagggaagttaatccagcaatcagggcggaagacgctagtcacgtctgttctcagctccataccaacctacttccttactgccttaaagccgcctaaacagttcctcacagacatggacaagattaggaagaaattcctctgggccggcgatcaagagattagcggggggaagtgcaaagtgaattggaaaaaaagtatgctccccaataaagatgggaggactaggcttgttggaccttgataaattcgcgagagctttgagactccgttggctatggtttgagtgggagtgccctgacaaaccttgggctaggacgacacccccctgtgatgagttagatgagcaaattttcgcggccgcaacaaaggtaacaatctgtaatgggtggaaggcaaaattttggacatccaactggattggccaccagccgctgaaatacctagcgccagcgcttttcaaccactctaaaggaaagcaatgcttggttcaggatgcgttaaccaatgacaaatggattgatgatattaggcatgagttgtccatgccactgatctatcattatgtttcacgattgatcaaaatg

SEQ ID NO: 68804 - DNA, 468 bp, Oryza sativa
  Clone ID: PAT_MRT4530_69532C.1
atggcgcccatgtcttccaaatcaaggtggcggcccttgagtcttctctaccggcgaattgggctaagccgattttgctgtgtatttaccggtatttgtccatctccaggtgatggtgtcttcaactccttcctccaggtgtattctcttgatgcggcctggggtgagcggcaatcccaaatatgttatgggaaaattgccccgctgtccattgaaattttccaacacctcagacaggttctgctctgcgcatttgatggacacgaccgagctcttgtgcagattcacttgaaggcctgtggcctcgccgaagaattgaggatgctaatcaagttgttggcatcattcctgatcgggtttataaagatcgctgcatcatcagcatataaggatattctgaaccgcgctgctcggtttgataacggagatagaagcccctcttgcgtggccttattgagtagtcgttga

SEQ ID NO: 68805 - DNA, 333 bp, Oryza sativa
  Clone ID: PAT_MRT4530_69533C.1
atggtgcgcatggctggtgtgggcccggaatataagcgggcccggcctaggagaggcgggacgttacaaaatggtatcagagccgactcgcggtttcacgggcgcgtgtgtcgcagttgcgcaggcatggtgcgcatggctggtgtgggcccggagtggtcacacagcatggcacatgcgctggcactggacacacggacgtggctaagaggggacgttcctggcctaggaagccaatcttcaaagaactctaaggttaagcgtgcttggtctggagcaatttcgggatgggtgaccgaccgggaaattcttcctgggtgcacacgaatgtaa

SEQ ID NO: 68806 - DNA, 228 bp, Oryza sativa
  Clone ID: PAT_MRT4530_69534C.1
gaattcttcgtagtgttccgccttatctgggataatgagacaaacctagaggaaggagttgaagacaccatcatctggagatggacaaatataccgagaagactcaagggccgccaccttgatttggaagacatgggcgccatccaaatgcaaaaactttgcatggcttgtcctgcaaaacaggatatggacatccgaccgcttgcaactccgacaatggcccaataa

SEQ ID NO: 68807 - DNA, 1440 bp, Oryza sativa
  Clone ID: PAT_MRT4530_69535C.1
atggggaagaagcagcatagcaaggaccggatgttcataacgcggacggagtgggcgacggagtggggcggcgccaagcagaaggaggccggcacgcccttcaagcgccttcccttctactgctgcgcgcttacgtttttaccatttgaggatccagtgtgcacagcagatggaagcgtctttgatttgatgagcataattccatacattaagaagttcgggaagcacccagtaacaggaacaccactcaagcaggaagatctaatgcctttaacattccacaagaactcagatggagagttccagtgccctgttttgaataaagtttttacagaattcacgcatatagttgctgtaaagactactgggaacgtcttctgttatgaggcaatccaagaactcaacatcaagccaaagaattggagagaattgctaactgatgagccctttacacgaaatgacttgataacaattcagaatccaaatgcggttgatagcaagatcctaggtgaatttgaccatgtcaagaaaggcctcaaacttgaagatgaagagttgcaacgaatgaaaaatgatccaacctacaacataaatatttctggtgatcttaagcaaatgattaaggaacttggaactgaaaagggaaagttagcttttttgcatggtgggggagggcagaaagctcaaaaggaaagagctgctgcacttgctgctatattggcaaaaaaggagaaggatgactcaaaatctggcaaagaacctaaacctcatcagcctttcagtattgtagatgctgcttctgcttctgttcatggcagaagtgcagccgcagcaaaggctgctactgctgagaaaacagctgctagaatagcaatgcacatggcaggagatcgagctcctgtaaatgctaaactggttaaaagccgttacaccacaggagcagcttcacgttctttcacatcaactgcctatgatcctgtcaccaaaaatgaacttgagtatgttaaggttgaaaagaatccaaaaaagaagggatatgttcagttgcataccacccatggtgatttgaatttggagcttcattgtgatataacacctcggacatgtgaaaatttcctcacacattgtgaaaatggttactataatggtcttatcttccatcgtagtatcaaaaatttcatgattcaaggaggtgatccaactggcacaggaagtggaggggagtccatatggggtaaacctttcaaggatgaactgaattcaaaacttatacattcaggaagaggtgttgtcagcatggctaattctgggcctcataccaatgggtcccaatttttcatcttgtacaagtccgcaccacatttaaatttcaagcatacggtatttggcatggtggtcggtggcttgaccactctttcggctatggaaaaggttcctgtt

SEQ ID NO: 68808 - DNA, 885 bp, Oryza sativa
  Clone ID: PAT_MRT4530_69537C.1
atgcaagaaccaaagaggaaaccgaggcttcgatttgaaaacttctggattagagtggaaggtttcctaggcgtcgtaacccaagcctggaacgagcctatccaggaagcgctggagaaattggattgtgcttctcctatcgactgcatcatcaagaatcttactcaatgggatagcgggggaaccaactacacacaggtgaggcctctggcagggaatgatgtgaacaacttgattagcatcctcaagttcttcggcgaggccacaggccttcaagtgaacctgcacaagagctcggtcgtgcccatcaaatgcgcagagcagaacctgtccgaggtgttgggaaatttcaatggacagcggggcaattttctcataacatatttgggattgccgctcaccccaagccgcatcaagagaatacacttgcaaccggtgatggacaagttgcaatcaaggcatgaactgtccatgccactgatccgagaattcttcgtactgttccaccttatctgggataatgagacaaacctggaggaaggagttgaagacaccatcacctggagatggacaaataccagctcaaaggcagatgatgtgaacccgttcaggtctctgtcaatgctcgtccgtatcatagatcgcataatgatcaagctgttgtctctctccctgccggctgccgccggtgccaacaactccatccatcctatttgcacggtcgccgacctcagcagccccttgcgtgtacgaactacgaactgcgaagtcaatgggtggatgatgtcgatcgcgagtgtcagcgtggaccgcgacggcgtgagagccaaagtcaagtttgaacagcacgcgcatggcgagtttggtgttcaacgcaagttataa

SEQ ID NO: 68809 - DNA, 2042 bp, Oryza sativa
  Clone ID: PAT_MRT4530_69538C.1
tggaggtggagagggagagggggacttcagacccattagtctgatccactctgtggcgaagcttatatccaaaactttggcaatgagactggcagcacggcttggtgatttggtctcgcatgcccaaagtgctttcatcaagaagatatgcatacaagataacttcctctatgtgcgcaacatggtccggtccttgcacatgcaacggaaaccatccctcttcttcaagttggacataacaaaggcatttgattcagtatcttgggaataccttgtcgaaattctgcagtggagaggctttagtcagcgctggagaaattggattgtgcttctcctatcgactgcatcatccagaattttactcaatgggatagcggaagaaccaactacacacaggcgaggcctccggcagggtgatcccctcttgccctacctcttcatcctagcaattgacccgattcaacgactactcaataaggccacgcaagaggggcttctatctccgttatcaaaccgagcagcgcggttcagaatatccttatatgctgatgatgcagcgatctttataaacccgatcaggaatgatgccaacaacttgattagcatcctcaattcttcggcgaggccacaggccttcaagtgaatctgcacaagagctcggtcgtgtccatcaaatgcgcagagcagaacctgtctgaggtgttggaaaatttcaatggacagcggggcaattttcccataacatatttgggattgccgctcaccccaggccgcatcaagagaatacacctgcaaccggtgatggacaagttgcaatcaaggttagtgggatggaaagggaagttaatccagcaatcagggcggaagacgctagtcacgtctgttctcagctccataccaacctacttccttaccgccttaaagccgcctaaacagttcctcacagacatggacaagattaggaagaaattcctctgggccggcgatcaagagattagcggggggaagtgcaaagtgaattggaaaaagtatgctccccaataaagatgggaggactaggcgtgttggaccttgataaattcgcgagagctttgagactccgttggctatggtttgagtgggagtgccctgacaaaccttgggttgggacaacaccccactacgatgagttagatgagcaaatcttcgtggccgcaacaaaggtaacaatcggtaatgggcagaaggcaaaattttggacatccaactggattggacaccagccgctgaaatacctagcgccagcgcttttcaaccactctaaaggaaagcaacgcttagttcaggatgcgttaaccaatgacaaatggattgaggatattaggcatgagctgtccatgccactgatccgagaattcttcgcagtgttccgccttatctgggataatgagacaaacctggaggaaggagttgaagacaccatcacctggagatggacaaataccggtaaatacacagcaaaatcggcttagcccaattcgccggtagagaagactcaagggccgccaccttgatttggaagacatgggcgccatccaaatgcaaaaactttgcatggcttgtcctgcaaaacaggatatggacatccgaccgcttgcaactccgacaatggcccaataactacttttgccaactctgctacaggaacttggaaacggcgcaacatttattcaagaattgtccattcacgcgagaaatttgggacaaaataatggctaggatgaaccacaaccaacccttcccggtgcacaatccggacgagagcctagttgactggtgggaatcaagaacaaagcaacaaagcaaatgtcaaagtaaggggatgcagtcactgcacatgctcttgagttgggaaatctggtgcgagaggaacagacgagttttcaaagataaaagaacttcaaatccctcaactaacggcaagaataatggacgaaatacatacatggtcggcatgtggggcaaaaaatcttgcgagaatagcgccttaacctctcatcctt

SEQ ID NO: 68810 - DNA, 1788 bp, Oryza sativa
  Clone ID: PAT_MRT4530_69539C.1
atggatgcctctgctgcatccatgctctggactctgatcatcatcctcgccgccgcagccgctgcctcctctgtccatccaccacagcagcagagctatggcgtcggctgcatcgcggcggagcgggcggcattgctctccttcaaagaaggtgtcatggccgacccgctgaggctcctcgactcatggcagggtgcaggagactgctgtcggtggaacggcgtcgggtgcagcaacaggaccggccatgtcgtcaagctcgacctccgcaacactctctactgggatgaccagcgccaagttagactggacaaccctcacgccatgcgtggacaggtaagcacctccctgcttgccctgaggcgtttgaagtatctttatctcagcgggaacaaccttggaggaccgggtatagccataccatcgttcttggggtctctcgagagcctggtctatctcaacctctcctgtatcgatttctttggagaggtgcctactcagcttggcaatctctcccggctgtcctacctcgacgttggcagcatgtattattctggacagattttctcatcggatctctcctggctgggacgcctctcttcactgaagtatcttgacatgagcggtgtcaatctcagcatggtttctgactgggctcatgtggtcaatatgcttcccaatttgagagttctcaatctcgaactgtgtcaactcacgagatcaaacccaccacttctgcattccaaccttacagttcttgagaagctcgttctttcttccaacaacttctatggaccacttgctactaactggttctggggtataaccacccttagaaccctcgaagtggagttctgttccctatatggccctcttcctgatagcttgggaaacatgactgcacttcaagttcttgacatgcaagataatgataatatcacaggaatgtttccaccaactctgaagaatctatgcaatttgcaagaagtcttcactgggactaacctgagcggggacataacagaacagatggagaggctgccaaagtgtgcatgggacaaattgcaggcattaaatctggatgcaaccaacatgacaggcaatcttccagtttggttggtaaacttgaccaacttgaaggaccttagtgtctcagggaaccagcttagtgggcctgtgcctttggggcttggagctcttactaagttgactatattgtatctaggccacaataacttgactggtatcatatcagaagactatcttgctaatctttgcaatatggttatattggacttgagctacacttctttagaggttgttgtgggttccacatggactcctccattcaagttaatcagagcacaactggcttcatgtcaactgggtccgggatttcctatcttgtttaaacaccaaaagggcattatctacattgatgtttcaaatgcaggcatagccgatgcaatcccaagttggttttgggatgaaatttcctatgcattttatgtggatatgtctcacaatcaaattgatggagaattaccagccaaacttgaagcgaggacaaggcaagaattgcacctcaattcaaaccagctaaagggctcaattccgcaattactcagaaatatcaccaagctagacatctctagaaactccttatctgcaccattgccttcagattttcaagctccggaattggcagcacttgtcctattctccaactacattccaggcagtgttccactgtccatatgtgatttacagatttttggctatccttga

SEQ ID NO: 68811 - DNA, 2508 bp, Oryza sativa
  Clone ID: PAT_MRT4530_6953C.1
atgggggagagtggtttgaaacaagaaatggtgaacgcggcgagcccaacgacgatgcagacacaggcagcgccgtgcgccgccgccgttccagacgtcgccgtcgctcgggaagaccgtcgtcgtggtcgccaagtcgtcgccgtcctcgtccgcctcttcgtcgccgccgaagaccgccggagcaccgtcgccgccgtcaacccgaagagcgccgccgcttcttcctcgtcgccgtcgccgtccgttcctcttccgccgtcgctttggtcgccgatgccgcgctacaagcctgagtacttgtttggtgttgagggttttgtccaggagttgcgtacaatgtcctttgtcattggatttgggactgcccctttttatgctcagattcctcatgatcgtcatgaagagaagtgccgagtcaaagtcactttgaacagtaatagtgaagatatcccttcagtgatgttcgaagctggaggaagaaactacatccatgcatgtcaggaggtggcaaggatcgccataggagagctccgtgatcgctacagtgatcagttggccgacactgagtatcgctaccatcctcgccaaccccagggaagtgaccgtggcagctaccttgagactgaaggaattgagaatgatgctaccacaaggcatttggttgagatgctgtgggctatggatgaaacccgtgcagagactgtgttagcagctcaagatcatgaagaccggaatcgtggtaagatttgcaagctagaagacaaagtggatcgtttggagaaggaattagccgcattgaagggagaagcaccaccgcagaaggccagggttcgtcttaccgcaaggaagagagttctatttgtccctcgctatcaattggcgccaaaggtccgtgtggtggagaaagaagttgccccaaccctagcagatcctccagtcatcatcataagtgatgatgaagaagaagaatccaagcgcaaccattccaagattgagtgggtagcaactcaagatgatgaagacgagccgaacgagccttcaatcgacctccgatgctcggaaggactagataccactaatcctgttgaagctggtgattggttgcatgccatagagaagaagttggatttgcttcaatgcactgatcaggaaaaggtctcatttgcatcacaccagttgcatggcactgcctctgaatggtgggatcacttccgcctgaataggactactgttgaacctatcacttggcttgaattcaccgctgctttccggaagacgcatataccatcgggagtggtgtctctcaagaagagggaattcagatcgctcactcagggatctcgctctgttacggagtatttgcacgagttcaatcgtctggctcgttatgctccggaagatgtgcgcaatgatgaagagcgccaagagaagttcttggaaggacttaatgatgagctttcttacccactcatgactggagattatcctgatttccagaagttagtggataaggctattcgtcaggaggacaaatacaaccgcatggagcagaagaaacgtcggattgctcaattcaaggcacaacaggggaatagtcagaagccgcgtcttaccttagaaccccagtccatgccacagggaggttcctcgtctgttgttcgtccgcagcgtcagttcttcaacaacaatgctggcaacaacatccgtaatcaagctccacgccctgttgtagctccaacacagcaacaacctgccaagagggagcaaggcagcaagcccgtggtgtgtttcaactgtggagacccaggacattacgctgacaagtgtccgaagccccgacgtgtgaaggttgtccctgcccagagcaactttaccgcaccagcgccaaaggcccgtgtcaatcatgttgctgctgcagaagctcaagatgctccagatgtgattttggtgaagttccttggtcacgtcatctcagccggaggagttgccgttgatcctagtaatgtggaatccgtaaccaactggaaacaaccaaagacagtttcagagatccgcagtttcttaggcctcgcaggatattatcggaggtttatagagaatttctccaagattgctaagcccatgacacgactgcttcagaaagatgtgaagtacaagtggtcggaagaatacgtcgccgtcgctcgggaagaccgtcgtcgtggtcgccaagtcgtcgccgtcctcgtccgcctcttcgtcgccgccgaagaccgccggagcaccgtcgccgccgtcaacccgaagagcgccgccgcttcttcctcgtcgccgtcgccgtccgttcctcttccgccgtcgctttggtcgccgatggtgggagctttgtgtcaaagtcttgcctggtctttaaccaatgctaatgacgttgatgccctctacgagccgttctccttgaaggaagattgctttgtgctttcaattctgcatggcaaccatcaattcagggaagtggagacatgttaa

SEQ ID NO: 68812 - DNA, 316 bp, Oryza sativa
  unsure (1)..(316): unsure at all n locations
  Clone ID: PAT_MRT4530_69541C.1
gaacaaaacagggggaggaaaaaagaagggcnagaaaaacgaagaacagaaccggccaaaggncaaaaaagggggaaaaaggggggggggaacaaacggacgcgcggggtttttttggaaaaccggaccgggacctggaggggaaccagctttccccaaagggaggcgaattagagctggggggaaacaaggaaaaagctggtccctgggggaaaagggtaaccgatgacaaatccaaaaaaaaaacgaggcggaaggaaaaagggaaaaggctggggggcctaaggagggaggaaaatcaaaaaaattggggggg

SEQ ID NO: 68813 - DNA, 408 bp, Oryza sativa
  Clone ID: PAT_MRT4530_69542C.1
atggtttcccctcaatcaattcggccggagaaggaaagaggcggccggattggaaggaaacagcggcggcggcgcgagctagggtttcggcggcgatggcgcgaggaggacgaaggtcctgacaggcgggacccacctgtcagcggcagcgggcgcgcgcgcgcggcagcggactgggccggctgggccgagaagagagagaaggcgggtgtgacatcctacctgtcggagagagagggagggagaggccgactggggaggcagaacggacttgagggagagagagagccgagcgggccgagggaggaggccggcccgagagggagagaaagggggcgcgcgggccgcgggagagaaaggagggattgggccgaaaggggcccaaagagaggaaggaggattttattt

SEQ ID NO: 68814 - DNA, 689 bp, Oryza sativa
  Clone ID: PAT_MRT4530_69543C.1
acggcggcggcagcggcagctggcaacggtggcggatgctgcggcgggaaaggcattgggcggcggagaagtaggaggagtccaggggggtgcgaacgcggtgtcgccgaccggaaacgggcgatgatggctgcgaaagaacaatggcggcggcggtgaaagcaggcatggcggcttcggacggctagtcgagggcgtggcagagggctacatctagctggagcggtagcgtttggaggaggggttggagactagcttggcgtagagaggcgcagccgatggcagcagaggccggctcgacgcgagaggcgtggccgatggaggtaggccagattggcgcgaggatcatccggtggaggaggccggcttggcacgagaggcgcggccggcggtggaggaggcgacctcggtgcgaggaggggctgccggtggatgtggcgtggtctttggcgcacgaaggctggccgatggggggcgccggtgcagtggtcccacatgtcggcaaaggttgagtggtggtggagcatcggggcgtcagccgtggattcgcaggtgcggcggtcggtcacgcttagcggcgaccggtccggtgttagtattctcccagtcttgtgtgttggcactgtcggtgtgtgggaggtggtatatactttttcctggttactactctctccagggttgtaatcttg

SEQ ID NO: 68815 - DNA, 819 bp, Oryza sativa
  Clone ID: PAT_MRT4530_69544C.1
gggggggggatgtaaagtcaattggacaaagacgggcctgccgatcagccggggggggggggcttgggagtcctaaacttggacaagttcacaagggccttgagattgcgattgttatgatattaatggaaggacccaaccaaaccgtgggtgggactggagatgccttgtgatggattagacaaggacttttttgctgcttcgacaaagataaccgtcggagataggaatacggcacgcttctaggactctgcatggattgatgggcaaagaccaaaagatctcatgccacttgtctatgggatctccaaaaatagaagaaaatccctgcgccaagggaaagagggtgacgcctaggtgaatgacctgaccctcgatgcggcctcgcctatcacaatcaacctcgtcgagcaactggtccgtttgtgggaagcggttcggaatgtgcaactagacagtgaagaaccggaccagattgcctggagattcacaagtaatgggcactacacagcttcctcggcctatcatgcacagtgtttaggggtgccaaactcaagtctaaactccctgatctggaaagtctgggcgccggggaaatataaatttcatgcatggcttattatccaaaatagagtctagacatctgaccggcttgcaacaagaggctggcaaaaaaatggacattgccctctctgccgttctgaagctgagacgggactgcacctcgtcttcaagtgcagatacagaaagagaatttggcacctagttgctacttggatgggctatcaacaattggagccgactgagtgggaggaaccc

SEQ ID NO: 68816 - DNA, 252 bp, Oryza sativa
  Clone ID: PAT_MRT4530_69545C.1
atgctgacgaactgggctacatcttgttgcggcgacgatgctgatgtcagaggcagcgccgctagttttggagacgacagttggtgcagtgaatgggcaattcggcggcaccgcattcacggcgtgtgcgagaaaggaattcagaggctccacttttttcgcatagctggctggatgggtctcacggagttgtctcagccagcaaagatcgtgttgcagctcaaggacgagctgctcaaaaggaggatataa

SEQ ID NO: 68817 - DNA, 1535 bp, Oryza sativa
  Clone ID: PAT_MRT4530_69546C.1
atggatttgatctcccgcgtgagaagagaaaaaacactttcatccatttccaaggcagttgttactacggcgggcgatcaggtttttgggagcgtaaggcgcgactactcactgttcgtcaatgtctacttcgtcttcatcaacatgtcaaacaccggagacaacaacaacactggagacaagaaaaaggagcgggaacaccactccacaggcatcctcgacggcacggacgaagcctactcctcggagaaacctccatctgacacatactcgtactatgggaagcgacagaggccgtcgcagggcccgccccgctccatcacgcccacccttgcctggatgtgtcagctagaggaaagctacactacaagcccagccgttgcccacgctggcttgtgcggcgcacgggtggtcggtctaccgtggaccgggaccacgcgggtggtccaccgccggtccatgggatcgacggcccgggtcggcccggggccgatcggacggtgcggcggcggcctggctcggctcggctcggcacaaagccggccggccggccatggcaagggcggcggcacgcgcgcgtccaccggcgacagcaagcggcggcgtgggcagcggcagcagatggcgtcccagcggcgacggcgaccgaaggcgacggcgagcgcgggtggcggtgacccacggggaatcgggggaaggaaagggaaaggggagggagtcctcaccagaggggacagcgacgaccggcgacgaggagcgacggagggaggtcgacaagcggcggacggggaagagggagagaggggccatagaaggcgggaacgccggccgaaggcggcggacatggcgactctcaccgtcgcacggtgagaacggcgctccggcggcgaacctcgacgaaggaggggtggacggggtggatctcggccacgcgaacccgacggcggcgacggcggggtgcggcggcgagcctagcggcggctagcggcggccggagtggcgggaaaggcggcggcgggtggatgcaaggtgcgggagcgatggagagctcaggagagttcggcgaaatgggaaaaaagagagagggggtggcggcggaggagagggggaagtgggcgcgggaggcgcgggtgcgagggcgacgtggacggcgtggcccgggaggcgcggacgcgaggcgcggcgacggttgcgggcgcggcggcgagcggctggaggttgggggaggacccgacaggtggaggaggtgggggagggtcggggctggggaggattggcggcggctgcaggggtggtcgggagggtgaccggtagcggcaaggcgtcggcgtctcttcgtgtgccgacggaggcagcggaggacggcggcagcctaagtgtcgacagccggtcctagacgggagaaggtggctccgacggaggtggtctggtaggcggcgacggcctaggagtccgggtggaagtcctcgtcggacgccgtcgtccaactggacggcgccaggcgatgctgaggtgactagggggagaaccccaca

SEQ ID NO: 68818 - DNA, 456 bp, Oryza sativa
  Clone ID: PAT_MRT4530_69547C.1
atggctgatcgatcggcgccgttgctcccggccgctgcctcctcctcgtcggcggcggcgcccgcctcgtcgttgtcggcgcccacctcccgccagcctcctgtcagcgccgccactcccggcctccacgcctcccaccgccgacgcccctcccctccgtcggatctggggagggaaggaatgggaggagaggggagccggatcccacgtgaggggcggccggccgccggatccatgcggggacggccgccgcccaccggatcccgcgcctccaccaccgccgcgtggaggaggccgtcgcgcaccgccgtcgctttcgccgccgacctccacacccgcctcggcagcggcggcggccgcctcccaccagcctctcgtcggcgccgcttctctcggcctccacgccgcccgccgccgtcgccatgggctgccgccgaggagaggagaaaggagtga

SEQ ID NO: 68819 - DNA, 209 bp, Oryza sativa
  Clone ID: PAT_MRT4530_69548C.1
tcgtttatatccaaagcgtcatcttggactcgggggacttctagtccatcgacgtgtcaaaccgaactctacaggctatcggcacagtttttggcagactgcccggaaaactcagacaaactaaacaagctgaagaagaacttaatgcagattcaactaatatggattatactagagtgtcgtcactataagatcgtgctgctagatga

SEQ ID NO: 68820 - DNA, 349 bp, Oryza sativa
  Clone ID: PAT_MRT4530_69549C.1
cttcctcctctggtcagccaatatgaaggccccactgggagctttcttctctatgtatgacaaaaggcggatgattttgggaattttttgagaatgctacaatactcaagaacttaggctagaattactggaagtagatgttatcaagaacttcatttggcgaatttttgagatttttctcgtgtatagctttcctatgaaaattcaaaattgttagtttgcatatacattaaaatagtctttacacagtatctaacggaatacaagtgacagagtagtgatggcaataacatttctaggacaaaatgactcgtacaatggcatttcctggaagttgtgttcgccgatg

SEQ ID NO: 68821 - DNA, 552 bp, Oryza sativa
  Clone ID: PAT_MRT4530_6954C.1
atgatcctcgggatctcctctaccttttctcctttggaatctttggctaaatcgttttggaaagcgttggattcgagtttgtctcggattcgttcttcccgatctttccttcctcgtcgccgaccgccgtgggccttcgccaccgccgaagaccgccggagcatcgccgtcaccgtcgacccgaaggttgccgccgcttcctcctcgtcgccgtcatcgtccgttgttcttccgccgccgttttggtcaccggtgagttcgccgcgtcgtcctctacgtgctggtgccctccgtttgtgccgaagtgccgccgttcgccggcgagcgtgcgccgcccgagccgtccgctccgccgagccgccgccgctgtcggtgacgtcattgccgacgtcatcggggtcgtccgccggggtgattatgaaccaggaaggtgcgctgcagtggattgtgttgtatgaggggtattgtcacaactccttcccgaggtaccgtggtggtattgaggcacatgaggaagagttctacaatgaggctgatggtgtggaggattag

SEQ ID NO: 68822 - DNA, 550 bp, Oryza sativa
  Clone ID: PAT_MRT4530_69550C.1
tgcgggcgcgcacggaggaggaggccgcgggagggcgaggcggcggctacggatgcgcgcgggtgggcgaggcggctgcgggtgcgtgcggaggcggcggtggccgcgtcgagggctggcgagggagagcacggcgctgcgggtgcgctcctacggctgcatcgggtgttccttgtcctgtcccttgctgctactcgccgtcgaggtcgccgcctacctccaatggtggcacctcgaggaggtggcattgctcctcgccgttgactgtctcttcgtcgcctcctatgccgggtggatgcgcctccgcctcgactacctcgcgccgccgctgcagttcctcaccaacgcatgctcatgtacaaaaacatcagaagagatgcaaatatttggtcgaaatgctcatcacacaagcggaaatcacaaaatagtggcaaaatcacacaaagctgaaaaaaagggcaaaaatgcaataaccaccaagggtttaaatgtcctttttttacaactaacaccgttaaaaccggctgttaggagtgggctacacggctga

SEQ ID NO: 68823 - DNA, 1035 bp, Oryza sativa
  Clone ID: PAT_MRT4530_69551C.1
ttaaagaccagtttgcccttggctcaaattaatccaatgtgggccccactgtgagcatgtcctcctcatgtcgctgtcataggtgaaccctacgtcggcgccgtcgagcgtgcaccttgctggcctccatgagaagtaggcgccaaaacggccgcaaccgcgcaccctgggcggcacgacagctgcggtggcgtcgatggcgcactcctcgatggcgtcaccggcgttgaacatgtcgatgagcccgacgggcgcgaacggaccacgaagagggaggtgacgctggcgatgcggaagcggcacatcttcccgggcaccacggcgaacaccgccggcgcgcagtccgggtgcgccatgttgcgcgacgccgccaccgtcgtagaactgcagcgggaacaccactccacaggcatcctcgacggcacggacgaagccgtggaccgggaccacgcgggtggtccaccgccggtccacgggatcgacggcccggatcagcccggggccgatcggacggtgcggcggcggcatccaccggcgacaggaagcggcggcgcgggcggcggtagcggacggcgccccggcggtgacggcgaccgaaggcgacgacgagcgtgggtggcggcggcacacggggaatcggggaaggagaggaaaggggagggagtcctcaccggaggggacgacgacgaccggcgacgaggagcggcggagggaggtcgacaagcggcggacggggaccgggacgacttcagggtgtgacacgctctccgtgccgtccgcccatggcgtgccgatctgccggatgtcttgccagtggatggcgacgttctccgtcggcaacgagttcttgacgttgacgacgatggtgtccccctggacggcgtggatggtggggcccaacgtgtggccgttgatggtgacggccagcttgcggacgtagtccaggacgtgaactggtagctgatgtcccagtcgtcgccgcggccgacgcgacactacacagcgctgcgatggcgaggaagaggcagtagccat

SEQ ID NO: 68824 - DNA, 2131 bp, Oryza sativa
  Clone ID: PAT_MRT4530_69552C.1
gaatagttgttactttttttacagtacatcttggcagtaataaatcaccattttcaccattgcaaattacacaccatagtgtggaataatacggacctaactaacatagtgttaaacactaatatgaatataattaactagctacgaagctaccatgcatccatatgatcgagatagtatccaaaacaaaagaattaattgtgataaaaatcaatggcgatcgaacggctagcttctggtaattaatttcagttttactacacgatcatcagtggccgcccctggttttgccgcagcccatgatctccggcggcagctcgccgacgcgctcgacgccctcctcgaagacgatgcccatgcccatgaagaagtgcgcctcgatgtggcagtggaacgcccacacgccggggttgtccgccctgaaccggagcgccgtccacccgaacgggtgcaccgccaccgtgttcttcatgattgggtccctgaggttgtacgccgccgggtgcaccgccgggtcgaaccggccggcgccgtggccgagcacccagaagtcgtggccgtggaggtgccacgggtgcgtctcgctgctgttcgccgccagcatgttggcgttctggagcacgacgtcgacgacggagccgaaccggagccggtacggcgcgtcgctggtggtggcgttggggttcccctgcacggcgtacacgtcgaacgcggcggcgccggcgtacgtctccggcggcgggcgctggtcgaaggcgccgaggagcccgcgcttcatggcgacgaggtacggcgtgtgaggcagcgtgaaggagacgttgttgagcgcccacttgatctgcccgccgatcttgttctgcgtgttgagcagcaggatggtgcggtcggaggtcggcggcgggggcacggcgtgcgccgggtgcgcgacggtggcgaggctctggcggacgcggtaggcggtgtcgttccacgccgggccggcgggcggcggcgtgggcgggcgggcgcgggggctgttgcggcggccgccgtagtaggcgaggacggcggtgccggtgggggtggccggcttgcggctgacgacgttggaggcgagccagtagttgcggttggggtcctggtcggcggtgatgaggacggagtaggtctcgccggagtagatgttgaggttcttcaccacgaacggcttcacgtagtgaccgtcggcctccaccaccgtcatctcgtgcccctcgatctcgaagttgagcgcggagagggaggtgacgctggcgacgcggaagcggtacgtcttcccgggcaccacggcgaacaccgccggcgcgcagtccgggtgcgacacgttgcacgacgccgccgtcgccggcgaggacgagcagttcacgaaccggccgcgcccgttgatgagcagcgactgcggctcgccgacccacaccatgggcacggacgcgagccccgccgcctgctcgtacgtgctccggtgccaccagtcgttgagcagcacggtgtgctccccgtcgtacctgaacggctcccgctcgccgtcgccggcggcgccgggggcgacctcgacgacgatcatgccgttgaggcccgccgagcgctgcatcccgtagtgggcgtggtacatgtaggtgcccgggcggtcgacgacgaaggtgtaggcgaaggtgtcgccggggaggatggggcactgggtgacgccctccgtgccgtccgcccacggcgtgccgatctgccggatgccgtgccagtggatggcgacgttctccgtcagcagcgagttcttgacgttgacgacgatggtgtccccctggacggcgcggatggtggggcccggcgtgtggccgttgatggtgacggccagcttgcgtacgcagtcgggcgacgtgaactggtagctgatgtcccagtcgtggcgccgcgtcgccgcggcggcgacgccgaacagcgcggcggcgaggaagaggctgcagaggaggcggtcgctacaccgcatcatgttcactcttgaggctgcagagcttgttatgctttggtagctagctgctctgcgtgtgcgtcctgttgagctacacaggtggatttggagctcgccgatgagcgagcgagcttgggtttttgatgtttg

SEQ ID NO: 68825 - DNA, 682 bp, Oryza sativa
  Clone ID: PAT_MRT4530_69553C.1
ccgggcccggccgggagcgccgccgcatcgccgctctcgacgtcgcccccttcccgattcgattccgccttgccggcggctagggtttctcggctcctgctcctctccactcccctaccatggcggacgaagccaaccgagcggctttcgtggagctgcagggtcggatgatcgacaccaccgggaagatcaagcagttgcaaactcagatgcgctctaaagagggtgaaaagaagcgtgcttacctcacactggaggaacttcgccaattgccagataatacaaacacttacaagactgttggtaaagtatttattttggagccaaaatcactcctgctgaatgagcaagaacaaaagcttaatgacagtgaaagtgcaatagcatcgatgcagacttccaaggaatatcttgagaagcagttggcagaagtggagaacaacataagagagctacttcagcaggaccctgggctggcacgccagatcctatcaatgacagttcagtgaaaagtagtctttttctatctttgtgagtttattttgtcgaatgcaatgctagaatttgttaattcgacacaacttgcttttgctcctcctgttatgtctctggtgcttcgctgtaatcggatagtgtatatctgcattctatatgatggaatttgttagctgatggggtgaac

SEQ ID NO: 68826 - DNA, 419 bp, Oryza sativa
  Clone ID: PAT_MRT4530_69554C.1
atatctcacgcattgatggatatgtatttggatatatttatatttatgtattcatatctatatttgtatctatatctataccaataaatattttgatatatctaaatctatctatatctatatcaataaatgtcatttatatatttctggatcaataagtgtatctaaatctacctatatctacatctatgatgattgtgctctacaagaagaaccacaccttaatatatctacatctacattgatatttgtatccatatcttacatatgtttttatatctgtatctgtatctgatgcattgatgtatatgtatatgtatatatttatatttatgtactcatatctatatttgtatctctatctatatcaataaatgcactatatatattgcatataaatctatctatatatctatatc

SEQ ID NO: 68827 - DNA, 591 bp, Oryza sativa
  Clone ID: PAT_MRT4530_69555C.1
atggcggacgaagccaaccgagcggctttcgtggagctgcagggtcggatgatcgacaccaccgggaagatcaagcaggatcattcaagggaagggaaaccagttggaaatcgtgtttgtttgcaaactgcagttttagggccagataggtttgacccttcatacttttacttgactgccttgactggatatccaccacagttttccatgttgcatctaactcctatgtctctctatgaagttagctgtttgatgggcagaacattattactcagtcctttgcaaactcagatgcgctctaaagagggtgaaaagaagcgtgcttacctcacactggaggaacttcgccaattgccagataatacaaacacttacaagactgttggtaaagtatttattttggagccaaaatcactcctgctgaatgagcaagaacaaaagcttaatgacagtgaaagtgcaatagcatcgatgcagacttccaaggaatatcttgagaagcagttggcagaagtggagaacaacataagagagctacttcagcaggaccctgggctggcacgccagatcctatcaatgacagttcagtga

SEQ ID NO: 68828 - DNA, 1041 bp, Oryza sativa
  Clone ID: PAT_MRT4530_69556C.1
atggcatcgccaccctcgctgctgcccagcgccggcgaggacgacgaatcccagcgagaagtttacgagcagctccgccagctcgtgtcgacctacccgaccgtgccgagcggcctcgacaccccgtactaccgccaccccgacggctggtacacgttcttgccggcgatggtcagcgtcatggtggcgcagcgccacttcaccgcccgcgacaccgacatcatcatcgccaccttccccaagtgtggcaccacctggctcaaggcgctcctcttcgcgaccgtccaccgcgacggcggcggcgccggcggcgtggaggacgacgcggcgctcgcgcagctcagggcgcggaacccgcaccagctcgtcccgttcctcgagatccaggtgtacgtgcgcgacagggcgcccgacctgagctccctcccggcgccacggctcctcgcgacgcacatcccgcgcccgtccctgccggcctccgtcgccatctccggctgcaaggtggtgtacatgtgccgcgaccccaaggactgcctcgtgtcgctgtggcacttcctggacgcgcagcggccggagccacgcggcgacgtcggcgaggacttccgcctcttctgcgacggcgtgtcgctggtcgggccgtactgggaccacgtgctggcttactggcggtggcacgtcgagcggccggggcaggtgctgttcatgacgtacgaggagctgagcggcgacacgctggggcagctgcgccgcctcgcggagttcgtcggccggccgttcaccggcgaggagcgggcggcccgggtggacgaggcgatcgtgaaggcgtgcagcttcgagagcctagcgggcgcggaggtgaacaggtcagggacgattgagctgatggaggagccgatgcggaacgccgagttcttccggcgaggcgtcgtcgggggctggccgaactacctgtcgccggagatggccacaaggatcgacgagattaccgagagcaagttcagaggctctggactggtgttgcccacgatgatgaccatgtaa

SEQ ID NO: 68829 - DNA, 342 bp, Oryza sativa
  Clone ID: PAT_MRT4530_69557C.1
atggaggaggggaagcggaagcgggaggagtactcaaactccgagcagcgctcgcggtcgcgcgcgcgcagccagcggcggctggcggcgcaggcggccgcgctgcggtccgagaacggcgccgtggaggtgtccgcgcgcgagcccgtgggccggtgcgccgccgtggacgccgagaacgagctgctccgcgcgcgcgaggccgagctcgccgcgcgcatgcgttctctcatcgacctgcagcaggcacagcgcatgcatgaggcgacgcccttttggccgccgccgccgccgcggccgtcgacctctgtcgatttgaatcattcgatcaagaataagtag

SEQ ID NO: 68830 - DNA, 749 bp, Oryza sativa
  Clone ID: PAT_MRT4530_69558C.1
atgacgtccgagttctcgggaatcctgtcatcgtccaccattgtcgttcctgcgccgatctctgtcatcgtcaccattatggtggcgtcctcgaccaacatcgcccgacatccgctgttcgcgatcatcgcgctcttggcggttgtggcggtcatcacggtctcggttctcgcccgagcgtcctcctcgctcttcgttctcgcgacgtcgcgaagagacgcgatgtcgggaacgattctcgttgtctcgcgcgcctcgcgcttctcggcggtcgttcagatggtcgtggagattgccggcacggatctcagcttgtgcgttgagaaaaacccagcaagcttgcagggtgtatttcctagttttgtgaataggacaccaggaccttgtcgcctcaaaagttgtccttgtcggctcgtgattcttgtcggaaggacaagatttggccgcactaagatcttcctcaggcttggatgtcgtcgacattccttctccgcttcggcgggaggatcgttcgacagggggtcgtccggggttacggccacggcattctcacttctggtcattgatggaccagtcgagaccggcaccatggtgtaaatcgggaagacgatttcaccgacttgagtacacaccagcattgttgaagtcggaactccttggttgacgatggggtcgacgctattgttgacgagatttgacgacatagtagtagaatcttgagcaccaagtccccctacttggcgcgccat

SEQ ID NO: 68831 - DNA, 2002 bp, Oryza sativa
  Clone ID: PAT_MRT4530_69559C.1
ctttgccgggaaaattacgatagcagttttatttatatttctttggagtatataaaccaacttgatttcattgtccaaagtactcacacacgaatacaggcttacagttttggagctcttgtacttactaaagaagaagctacaaacgcagcacacacacacccattaatttacatttacagagtaaacatttcggccagtacttgccaaagaattactacatgacaagctatatatgtcacctctactggatttgtgtagtgtatcatatttggagttctgctgttccactttcaaatactctgtaccccctggcctcgacaacataaattaattaacattacgctaatattgtttttgagttgtgttttcttatctaagcgctagagcaaacacctttaccaattcgtttttatctaccttgtgatatgttcatccccatgcttatgtaacagcttgtgtggttgaattgatgaatggcgtgctagctagtatagccaatagcaaatggattgcccattaatttacccaagtatccatgcggaccatgcctgggtgcgcgttcggcggcgctctcggcgttctcagctgcagccgccggcggcgaacccgatcctgctgctcttgacgtcgtagacgacgctgaacgtctgctgctgcgtgttcccgatgatggcggcgctcctggccggcgcgaacgccaggcacgtggtggagtcgtcgacgtcgacgaggaggttctgcgccgacagcttgagcgccgcgccgccggcgaaggacatggtgaccgccggcgcgctcacccgcgaggcctggcccttgaagcacgtgtcgaggatggagtacgccgacgcgcgggacgtccccttcatggccgccgccaccgccttgctcagcgccgagtacacgctcgtcggcaggcgcgtgatcaccgtgccggagtcgatgatcgtcggcaggctggagtacgccgacgacgacacggacagcggattcccggcgaccgtcatcccggacagcttgatgaagtcgagcgagtcgtcgagcgagctgaacaccatcggcgtgtacgagtattgccccgggttgtacgacccgagcgacaggtaccccgatgacgacgacgacgggaggcagtaggtgaaggtgcacgcaaggcttggcgcgagcgtggtacaggagcgagagcttgttgcgggcgaggccgatgaagccggcgggggacaaggggacgcccgcggactcccacccgcagccgtcgtagtcgccgggcacgcagccggcggcgaacgaaaggggcccccacgcatgggagccgacggagaaggagctgtcgccgtagctggcctggtagatgcagacgttggaggaggagcaagccgacgggctgagcgtggcggaggggaggtcgctgcactgctgcgcggagcaccccacggaggcgtaggtgctcgacgacttggggttgaacaccgggccggactgccggtggcacgacacgaggcacggcgagcactgcagccaggtgagcgaggagcccgtgtccacgaccatcacgtactgcgtcgccggcgtgccgaggcccatgcgcgtcacgtagttgcccacgcccaccgacgcgccggggctgagcggcacggacgcgagggagccggcgaggccggcgtcggcgtcggcgtccagggaggtggcgcgcgccgacggcgtcttggcgaggcgcgccgccagcgacgagatgcgcgcatcgtcgtgggtgagcaccgccgtgaacgggaggtcggccgggaccggcgccggcgagcaggggctccgcgggtggtgcagctcaaggtgcaggcccgtgctgttcaggtactggaaatccttgatctgtgacgagcacacatcggtgatgtccctgataggggtcgccactgcgaagagcagggagaaggcaagcaggtgaagaagatgcagcgccatcttatctctaaactctgaaaccacctccgtcttgcaggaa

SEQ ID NO: 68832 - DNA, 1583 bp, Oryza sativa
  Clone ID: PAT_MRT4530_6955C.1
ggtttcacccccacccctcaaaaggcagtgggcggtcccctcttgcgccgcggtgaatccggcagctggacaaccggacaccccggccgacccaactccatcacgcccaccctcgccaccgaatggacctcgctgacgtcatcaaaggggaggggcggcgccggcaagcgggccccaccggtcagcggcacaagggcgccggtccaccgtggaccgggaccaccgaggcgatccaccgccggtccacgggaaccgacggcccggatcggcccaaagccgatcggacggccacgaggcggcgcggctggggcacgggcacggcatgaaaccggctcggccgagccgtggtgctgggcagcgtgcggcctccggaggcagcagccggcggcgccgaacggcggcgagcagccggaagacggcggcgctcacgggcagtggcgatgcacgcgaaagggaaggggagcgggaggaggggctcaccgagcgtgcgggccgacgaggcagagcgggaggtcgccggcggcgggaagaggcggcggcgctcctcggggaggcaacggcgacggcggttcggcggcgttccgtgaggaggaaccggcggccgatggtcggagggacctagggaaggaaatgaagaggttaggagagggtagggagttgcggtgcggcgggaaacgccgaccgaaatgacgacggagctcaccgggaggcacggggagatgagtccggcgacgaccggcgaacacggagggattgctgagccacggatgatggctgcggtaccgcggagggcgacggcacaacactgggcggactgaagaggcggtgcggcgcggccggaggcggaaatggcgacggtggctctggatgcacggtggaagggtggttgcggtggtggaatggggaaacggagcggaggccggggtagagcttggcacggcgatgctataggtggcggcggcgcagcgcggcagcgacgggagcggcggtggcgggcggctggagatcgccggcgagcggcggcgaaggggatcggcgtggagagctcggtagagggcgtgggggactcgggaaaacggggaaaaaggaagaggagtccacggggattgattttatagctcaagggggcgaggagagggccggggagcggcggatttcgaggggaagtggggcggcgaagtggagctcgtggggaggtcaaaccggcgccgtttcttgcggggtgagtgggggaaaaggtggaggacgtggagggggtcgtgtccatgtggttggatgcgagctcgggtgcgggaggtcgccggattttgcggcgacgtggggcggctcaggcggccatggcggttgcagccggccagccagaggaaggaggaggagctgacgggtgggaccgccggtcccacctgtcggcgaagggagagaaggagggacgcaaaacagacttttgcaagcgggccaaggaagaagggagccggcccgagagagggaggaggcgcgcgggccgcgggagaggaaggagggggaggaatttgggccgagcccgaaagggaggaaggggaagtttattttgttttctttttatt

SEQ ID NO: 68833 - DNA, 376 bp, Oryza sativa
  Clone ID: PAT_MRT4530_69560C.1
gcacgaggcgggaggcgatgcggccacactgagagccatcgcagccgtgaagatggctgggaatgtgtggagcaaagtgccgctgcattggtctggggctacgagacgggatgaaggaatggatattgcgaccaatggaggtgaaagcattctacagtccaccgtgagcctcgccgctgatagtgttgcagatgaagcgcttgatttcaggtttcaattccttgtcgtcgattggtacgggaggggaggggggcgtgtgctggtggcgtgggcagtggtgaggccgtttgtgaagcggaggaagaggagaggaggatcatcacccaccgagggcgcgcgacgtaggcggcggtcgtggagagggggcgcgccatag

SEQ ID NO: 68834 - DNA, 1914 bp, Oryza sativa
  Clone ID: PAT_MRT4530_69561C.1
ggatcccccgggctgcaggttttttttttacttaccatgatgtgatattataattctgcaaaaaaggtaacacggcaacatgctcttttggccattgcggaaatgtaataaaacaccaacacatagaaatgacaaataggcgattaaagctgcagtcatttaaatcaaaagaatgaaaagttccacaggctagctttgattccaacacctttgaggctttgaagctcttatcgaatcaatgttgatgcctcatggagaatcttccttcagaacaattccttggtccatatgttaggtgcccattctctctccttttctatttgcagggcaatgatagcacaaaaatgttttaagtgaaatgccaacaaatcatctgtcatgctagaataatcaaaagggagcacacagaagtctacaacatgtaattcataaccacttaagtttctctccatctttgcacgagtcaatactgaatatcatgtacagcttgtctggtttgcatcgttgtaatttcattatatcaagaacatcccacatctccgccaagcaccccaccctcccaaacgcgtccaccaaacagttgaagaacacaatatccaacgttatgtcagaattctcaacgattctcaacactgtctttattttcttaacatccccagcccttccatatgctcgaaccaacgagcagagtgtaacacagttgggctttatacgctcagatttcatcaatctaaaaatatattccatctgttcaaggtccccagcccttccaaatgcatcaataactacattgtatgtgactattgtccaagaatagtaatacttctgcatgtattccatcacagctcccatcttctcatacattttagctttaccataggaatcaagtaaaatattgtaagtcttaatgtttggggagataccggaggcctggaacttctcataacagctttccatagtttcaatttgaccactgccaccgaaagctctgagagtagaattcattgtccatacatcaggcttgcaattttcagtcagcatctccagaagagttgattccatctcagcaaaccttcctgctttcccataggcatcaattaatgtgttataagtcacgacattgggacggatacccgcccgcgccatatcttccatcaaatacttgacccgctcaaaatcataggcgtgcaagcatgacttgatgagaatggagtaggtctgcacatcaggtcggcaaccaggggtggccttcatctgctcgagcaaggagaaggccctgtcgaagcggccactcctgctgtacgcggagacgagggccgtgtaggactcgaggttgggagcgcagccttcgtccaccatggcctggaacagctcgtgcgccctctccggctgcttgcacttgcccagcatggtgatcagcttgacgtatatcccgacgtacggcctgtaccacacctggtcgcgcattagatcgaacaccttgagggcggagtcccagcggagggcggtgatgcgctcgtggagggcctcgaggacggtgcgggggaggaggcggcgggtgcccttgccgggcttgcgcttgtcgaggacggccttggtggcctcgcggcggaggatgacggagagcgccttccgggacgcgatcttacggttcacttcctcctttcgccgccgctccgcctcggcctcgacctcgccgccatcctcctcgcctcgccgcctcctcctctcccccgcggcgccagccaaggaggaggaggatcccctggtgcgagccggctcgcgccccgcggcggctggcggtgggagcagcgcgtcgtggcaccggcgcgcggcggtggaggccgcgatggtggtggaggaggaggaggagggaagcgccgggaatggggaggccaccggcgcggcggccat

SEQ ID NO: 68835 - DNA, 452 bp, Oryza sativa
  unsure (1)..(452): unsure at all n locations
  Clone ID: PAT_MRT4530_69562C.1
tgccaggttctccagggcctttggcgacgctttttcggttcatttttgtgtttgccgtgcttgttgtgttttctttggcttgagagacacgtttgtgtcagaagagaagtttagggatgcatcttacttctccgctccagtaagagtctttcatatggtgaagagggagacctgcagatgtgggagacttccgccgcaggtcagaagggcagtgccagcagagggcagttttgagcatgtggtgttgtcatgcatcgccgcttctgaccacgggattatttggttcgaaaaggaggctcaaaaggctttggatccgatcaattattctttcttccctttttacgaatcggcacaagccaatccccgtggggatcctctagagtcgacctgcaggcatgcaagcttgagtattctatagtgtcgcgtnnaagcgaagcgtcaatcaatgcgcc

SEQ ID NO: 68836 - DNA, 210 bp, Oryza sativa
  Clone ID: PAT_MRT4530_69563C.1
gaatattctccaaagccacgctccaacaagagattttttactgtccttgaggagaggaggtaccatatcctggccgttcgttacactccatctaacggctgggaaagtttcggtacctcgtggtaccgcaccaccgtgagagcagaggcggtgatcgtcggagtggacgatgacaacggagacctattagatgacggcggcgacggactg

SEQ ID NO: 68837 - DNA, 450 bp, Oryza sativa
  Clone ID: PAT_MRT4530_69564C.1
cgaacgcttaaaagtacatacagagcgcggagaggggtttgagtttgagttggatattaagcactgcaccaagactacctctactaatgcgggggctatgcctcttctatgccgggaacatactccatcacccatgtgcttaaagcatagcactatccaggtaattttatcgaaggggtgggtgatccttctctcagcaggggagggggcccatgtccttcttggctgtgagcatccaatggaccattcgaaggcatatacaggaggtgggcagcatggatgatcacgatctggctgctgtgtctgcatctgaacatatgattaacacatcgattggaaaaccactacccggcacggcaggaacacagtggatcccggagcaaagacagggaggcagcaacctgtgcctgggcctttccacttgtgtgtgatttatatgtgatctgattt

SEQ ID NO: 68838 - DNA, 267 bp, Oryza sativa
  Clone ID: PAT_MRT4530_69565C.1
atgtggctgtctgattcagtaaacaacaaagtagggagagaccgagagagcattgtaaccatcggatcagatggatggtgtgttgccccgtgggcccctgaaaccccggtgcagaatggagacggtagcaatacatcacccgacgccggggacggggacggggagcgggagatttcagtatgtccgggggtggggacggggtaccacaacccgacaggggcagccccgttgccatccctatctatatatgaagagcaatctctctaa

SEQ ID NO: 68839 - DNA, 210 bp, Oryza sativa
  Clone ID: PAT_MRT4530_69566C.1
atggagcagctagcaaaaaggaggaagcgattgaagaggcgatttaatgtagagcaacagggtggtggcaaaaaagagacggtggtggggaccgaggaaggaggcggtggtgggaccgaggaaggaggcggtggtgggaccgaggaagggggcggcaaagctcatggtctaggcgatggcaaggacaactggacgaggggtgcggcgtga

SEQ ID NO: 68840 - DNA, 1293 bp, Oryza sativa
  Clone ID: PAT_MRT4530_69567C.1
atggctcctcgcaagcctacgaaggctgggttgactggcgaagaccctggcagccttggcgaagggtggtcgtgcttccttggcaaatcacttgtcaaggaggccgccttagccgagcttgtcctttctggcgttctcgttgcgcggcggctatgtacccgcgacctctgcgaggagttctgcctgcttcggatctctccccttgctcgcgaatggggggtgtccgttagtgaggacgaagaggtgctcgggcttccccgcctcgcttttcctcctggagtcaagcgtcgatcgatccccgccaaggctggtgacgacgacgtcggaacgtcgagaaagcgtaagcaggcggtcgcgaagggtggccaagtgcgatctcatcgtgccacgaaggacacggccgaaagcggtggtgaggaggaggaagacgacagggaggccgggtctgaggacgatggctcccgcggttatactcctagtccgaccccagtgaaatctggggcgggctctcatgtttcacccattcgccagcaagacgttgctgtggcgaacacccttctggcgatctctagtactgcggcgaagccgggatcagtcgcccgagggaagaagaagaaggggaaggtcgtacagattggttgtgcctttttggacagcgacgggtctgacgggacaccgacttcgctggttctgcagcgcgctccttctcgggggaggcgcacgtcacctccacctgctagtgacgccgaagcggcaacaggcgggagtgcttcggcgccggcggccggggcgaacgtctctcaggacgaacgggttgaagcgattccttcgccagctcgccagtgggaagggaaggcttcggcggtcgaagcgactatgtcagacgtgacgcttaccgccccgtacttcgttcccgccgatttcgccactcggccggagatcgccccttttgtggatggggtgtgccaagttatcgcgccctccgaaggccttggtctcttcaccgagatgaacgagttcggcgaaagctgtgcagctgtggagagcttgtccgttcggggtcttgccgcgcacctgagtgcgaagaagtcttcctttgaaaggctggatggttatcggcttcggctccggaaggccaaggacgaccttcgccacaaggaggacaagaggcgcgtcgtggcggacaccatgaggaaggcaaatgcggagaacaagtccctgatgggggagaagaagtccctctgtgccaaactggagtcggcgaacaggcggggcaccgagcatgatcgttag

SEQ ID NO: 68841 - DNA, 231 bp, Oryza sativa
  Clone ID: PAT_MRT4530_69568C.1
atggatgtttcagccttttttggcctattccagcggcagcaaccccagcccatcgctgtcaactcggacgacaagaaggtcgtgcctgggcaggaggtgcagcccatgggcgggccgtgccggcccgatggctgctgggccgtgcccagccgtgcctgggcggggccgtgccgggcgggccctttggccatctatactgatagagaacaaagagatacagctgacttgtag

SEQ ID NO: 68842 - DNA, 2547 bp, Oryza sativa
  Clone ID: PAT_MRT4530_69569C.1
atggccttcaccatagggcttcgcccaaatggctatgatgtctttggcttgaaccctcgttggttcttaggtttcggcaagcccggccgaagggcctcatggcatgccgccaacaagcccctcacgggcaagggtgagatttggtaccttcgcctttgcgtgctctcgtgcctttcgactagtcccctcctttcgccacagactcgatggctcctcgcaagcctacgaaggctgggtcgactggcgaagaccctagcagccttggcgaggggtggtcatgcttccttggcaaatcacttgtcaaggaggccgccttggccgagcttgtccttttctggcgttctcgcggaggaccaggcgacctgtgggggcgaagctgtcgtccgttcgcctggtgacggtcagactgtcgtcttcgccgccttcttcgccgcgggacttcgcctcccttgcgacgactttttgccatccgtgctggagatgtacgaggtcaggctttcccagctcagcccattggtgttcctgaagttaactgtttttgcatggatgtgtcgaacgtgtgggttcgatcccactgccgagctgttcgccgttctttttacggtgacgacgaaggacgtgagcacactggccggtccgaagaggacggtgttcgggtgcgtaaattttatactccaccctgagcgctcatacgcctggctggtgcctgcctcgatggtgaaatgggagcgaaactggattcaaaaatggttttatatcaataatccatattctgccaaagatagcaaggcgaactggcttaggtttgaacaccttgttgttttgatcgcttctaagccgagtgtggagctcgacggtgttctcgaatctcggcttattctccttcgcaaggttgtgcggtggctaggtacccacgacctctgtgaggagttctgcctgctcgtgaatggggggtgtccgttaatgaggacgaagtggtgctcgggcttccctgcctcgcttttacccctggagtcaagcataagttctttgtgtttatcagcgccctctctcggcggccgagcgaaccgagttcattttggcgaactgccgggccgatcgatccctgccaaggctggtgacgacgacgtcggaatgtcgagaaagcgtaagcgggcggtcacgaagggtggccaggtgcgatctcgtcgtgccacgaaggacacggccgaacacggtggtgaggaggaggaagacgacagggaggccgggtctgaggacgatggctcccgcggttatactccaagtccaaccccagcgaaatctggggcgggctctcacgtttcctccattcgcccgcaagacgttgctgtggcgaacacccttctacggatttctagcactgcggcgaagctgggatcagtcgcccgagggaagaagaagaaggggaaggtcgtacagattggccgtgccttttcggacagcgaggggtccgacgggacaccgacttcgccggttctccagcgcgctccttctcttgggaggcgcacgtctcctccgcctgctagtgacaccgaagcggcaacaggtgggagtgcttcggtgccggcggccggggcgaacgtctctgaggacgaacggggccttgccgcgcacctgagtgcaaagaagtccgccttggaaatgctggatggttaccgactttggctccggaaagccgtggacgaccttcgccacaaggaggacgaaaggcgtgtcatggcagacaccttgaggaaggcaaatgcggagaacaactccctccgtgctgatctggaggcggcgaacaggcggggcaccgagcatgatcgtcagcttgctgcggccgaagagaggatcaggtctcttgaggcctgccttgtttcggccgaggccgctgcttcaacccatgtgccggtgacggaatccgccaagcaagcctgttacacgcttaggctggctctcaatgatctcggcacgcgcgcagagggcgccccgggagatgacgggatggctttcgacttttctgagtggacgcaagaggcggccggctcagttgtcgaagtggccggcgcttacggggattgctgtgctcgtgtttcggcaggcttcgtccttagcctgctacacgcgcacggttgtgaacatatcaaggattttcccgaccatgtgacagaagaatggcctttgaactcacagtgctctggggtggccttgaaggccttccgaaagggtttttgggaggacggcagctgggattgtgaagaggggattgcgaaggacgaggaagctgctgccgcccacactggaggggaccccgggttgtcggaaccggcagccgaacacgagggcgaaggcaacagaggccaagaccaccctgaggcttgtggccggaaagcatgcgttcggccccccactggtgattggcgaaaagagaacgagaagtttgttgcggtgaaaggtttgccgaaggttagacgtcctcttcggcccgtttaccgggagatgttaataaacggcaacagctaccaagtcgtaaaggttgcttaa

SEQ ID NO: 68843 - DNA, 294 bp, Oryza sativa
  Clone ID: PAT_MRT4530_6956C.1
tcccaatccctcctaaaaactccctccaaccaaacggaccgtttgggatggagtcgaaaacggtcggaaacgatcggaatcggcagcatcttttcagaaacgatgctcgaccggccggtaattgaccatatttatcatttaaactactcagtattgacattaatacggtgtagaaagaattgtgaaaaaacaacatttaaaaatagccaaaaacggtatggtcagaaacggtacctcttatatggaaacgacgctcagtcgatcggtaggagcaagggggcggaccgcagctag

SEQ ID NO: 68844 - DNA, 249 bp, Oryza sativa
  Clone ID: PAT_MRT4530_69570C.1
gatactggaaagctgaagagggcgactctttttatttatttcttgggattattattaaaatcacattcacggtgaaagcagcttccaaacatgatagatgctactagcaaataccggtacttgattttccggcacccgcctaactgattaaataattaattaagcaaaagcccaatcgattaattactaaggaagttaatgcatgccccccgcaaacatggggcatccaaagaaaccagtgtgtttgtt

SEQ ID NO: 68845 - DNA, 2133 bp, Oryza sativa
  Clone ID: PAT_MRT4530_69571C.1
atgcaaatcccacgaaccgagttgaaaccgagtggtgcgcccttccatggagtcatcccggggttgtcttcaaccccactcggccagatcaccttgccagttacttttggcactcgggagaacttccgtacagagaacgtttgtttcgaagttgctgactttgagacagcgtaccatgctatacttggacgcccggcgttagccaaatttatggttgtcccacactacacctacttgatgatgaatatgccagggcctcgtggagtcatatctttgcgaagcgacatcaagaaagctgtcacctacgacaaggaaagctgcgagatggcccagactcatgagattacacttgcccatgaatcaatccgactggctgcatcaactacgaccgaaggagtagtgcctgcaactaacatgccaaagaccgaagaaggcgatgtcaaaactaagaagattcctcttgatccatccgatctctccaaaactactgtaatagacgcagacattagtgcttttaggatgaaattgaaccctgaaaagtgcaccttcggagtactgtcagggaagctacttggctttatggtgtctcataggggcatacaagccaacccggagaagatcaatgccatcctcaacatgaaaccgcctagctcccagaaagatattcagaaactgactgggtgcatggcggcgcttagccggaaattgtcctattattttcaaagtcactcggtcacagtagtcacatcttttccactcggcgacatactccataatcgagaggcaactggacgtattgcgaagtgggctttggagttgatgtctttggatctatccttcaagccacgaacgtcaatcaagtatcaagccctggcagattttgttgccgagtggaccgagtgtcaggaagatacacttggggagaaattggagtattggactatgcattttgacgggtcaaaaagactctcgggcactggagcaagggttgttatgttttccccgactagagagaggttaagctacgtgctatggatacactttcaagcatctcacaatgtggcagaatatgaagcgctactccatgggctgaagattgttgtatctctagggattcagcgtctggtggtccgtggtgattctcagttggttatcaatcaagtcatgaaggattggtcctgtcttgatgacaatatggctgcatatcgacaagaagttcgtaaattgctagttcatctgccagctcaagagttgcaaaccatccctctttcctggccttttgctatttgggggctcgatatggttggtcctttcaagagggctaccggaggatttactcacctttttgtggttgttgataagttccccaagtggattgaagcgaaaccagtcgttactattacagctgacgaagctcacgatttctttatcaacattgtgcatcggtttggagtacctaatcgaatcattacagataatagtacccaattcactggtggggtttttaaagatttctgtgaagactttggtattcagatttattatgcttccatagcgcatcctatgagcaatggtcaagttgattgcgccaatggtatggtacttcaaggaattaagacactggtttttgaccgacttcgtccctatgctggcaaatgggttgaacaattgtcgtcggtgctttggtctctgcgcactacgcctagtcgggctacgggccagtcgccgtttttcttggtttatggtgctgaagcaatgttgccgagtgaagtggagtttgaatccatgagatttcacaattttaaagaggagcgctatgagaaagaccgagtggatgatctcaaccaactagaagaagctagcgaggcagcattaatccagtcggcctgttatttacaaggacttcggcgttaccataatcgcaatgtcagatcacacgcatttttagtcagggatatggtgttgaggaagattcaaactatacgggatcggcataagttatctcctttatgggaagggccttttatcatctctgaagttactcggccgggttcttatcgactcaagcgtgaagatggttcggtcgtcgataattcttggaatattgagcatctttgtcgtttttatgcttag

SEQ ID NO: 68846 - DNA, 711 bp, Oryza sativa
  Clone ID: PAT_MRT4530_69572C.1
atgccgtacagttggatgcagctgggaacttgggatcatatatccgtggccataccattagcttgccttgataacattatcataccattagcttgtcttgatgtgcaccatatcatcattagtagtggtgtgatcctcgaattgaactttggttcagcattagtttttgatgattcttttgatgctggagagcagacaagaggattccatatgacatcgccatttgttgtgttgtcagatacattttgtgctcctcatcagcagacaagggaaggtgaggctgaccaaatggtacaatccatatcctcagaaggaaagatccaagaagtaagtacgctcgtcctgacaagaggtccaaagatgtgcaattttgtcgattggcacggatacagagttgtatacaaaaggtatgcaagcctttacttctgcatgtgcattgatgctgctgataatgaactggagactcttcaaatcatccatcattttgttgagatattggaccgatattttggcaatgtctgcgagcttgacctgatattcaacttccacaaggcatactttatattggatgaggttctgattgccggtgagcttcaagaatcgaacaagaaagcagtactacgcctgatcactacacaggacaacttggtggaagcagcaaaggaagaggcaagctcattgaggaacataattgcacaggccaccaagtag

SEQ ID NO: 68847 - DNA, 1499 bp, Oryza sativa
  Clone ID: PAT_MRT4530_69573C.1
cccgaccgaatccggtcggcccgggaagaattaagcatgtcgacgccgagagcggcggcgagcctcgccaagaaggcggcgctggtggcgctggccgtcctggccgcggcgctcgcgacggcggcgcgcgccgagcagtgcggcgcgcaggccggcggcgccaggtgcccgaactgcctctgctgcagccgctggggctggtgcggcaccacctccgacttctgcggcgacggctgccagagccagtgcagcggctgcggcccgacgccgacgccgacgccgccgagcccctccgacggcgtgggctccatcgtgcccagggacctgttcgagcggctcctcctccaccgcaacgacggggcgtgccccgcgcgcgggttctacacctacgaggccttcctcgccgccgccgccgcgttcccggcgttcggcggcaccggcaacaccgagacgcggaagcgggaggtcgccgcgttcctgggccagacctcccacgagaccaccggcgggtggccgaccgcgcccgacggccccttctcctggggctactgcttcaagcaggagcagaacccgccgtccgactactgccagccctcgccggagtggccgtgcgcccccggccgcaagtactacggccgcggccccatccaactctccttcaacttcaactacgggccggcggggagggcgatcggggtggacctgctgagcaacccggacctggtggcgacggacgcgacggtgtcgttcaagacggcgctgtggttctggatgacgccgcaggggaacaagccgtcgagccacgacgtgatcacggggcggtgggcgccctcgccggccgacgccgcggcggggcgggcgccggggtacggcgtgatcaccaacatcgtcaacggcgggctggagtgcgggcacggccccgacgaccgcgtggcgaaccggatcggcttctaccagcgctactgtggcgcgttcggcatcggcaccggcggcaacctcgactgctacaaccagaggccgttcaacagcggctcgtcggttgggttggcggagcagtgacgactgacgacgagaaaaataaaaaataaaatggaaacatttgcacggccgcatccgcatgtgccggtgaattgaacgagctccatcatgcatgatagttcagttcacgatgctaataataaagctgggctatgaataaattaatcgtagtatagtaaattggtataaattgtagccggtgggatgtttggttacaagatcaacggaacaatcgcgtgaaaggcataaaaacccgaaacagctagtagcttcgccggcggcgactggctggcggtaaaataagagtgctttgccactcactccctgtacgtgtcgtcgaacaagtacgtacttacaacgtactagtatcgagtcgaagtatggtgtgtcataaacttgtaaccgggctgaaaccgtatatatatgctatgtggcacagtgtcagtccaatatttcagaat

SEQ ID NO: 68848 - DNA, 312 bp, Oryza sativa
  Clone ID: PAT_MRT4530_69574C.1
atggcgaaggctggaaagccgcatcggtactccgaaagtaaaggcatctcgggcgaaggcatctcgggcgaactacaaagactttgccatgacaagttcggcatcaaggaggcccaacaggccgcccccggccttttaggcctgtttgctatagaccagcagcctatcagcccattaaaggcccatatggctgtgcggtgcggccatgtggtaacggtgagcacgtggccgtgcagcggcgaagcgcgagcatcggtgccgtgtggcgacgacgcgtcgggtggctcggtcgtgtgcctgccgagggcttaa

SEQ ID NO: 68849 - DNA, 252 bp, Oryza sativa
  Clone ID: PAT_MRT4530_69575C.1
aagctttttttttttcatatggaagtgccctttattgttaattcatttacaaaaagtaattcgcattcagtaattacacacctaacgagatcactaagatcttgggcgagatcaggatcgcatctcctttcttatttctttcttccaccacgctccttgatacctaattctaactcgacaccagaaacaaagttatagtacgccatgctcttttcgtccttcaagaagcccagatccttcgctctaaagctt

SEQ ID NO: 68850 - DNA, 1650 bp, Oryza sativa
  Clone ID: PAT_MRT4530_69576C.1
ggccggaattcccgcgtcgacccacgcgtccgatttttctcccgcaactcactgcgccgccgcggagaggcaaacccgaaggagactaggagaggaagagcttcaccgcctccgcctccggcaaggaaagccaaagccaatcgaggccaagagcgagggggaaggaagaagaggggggaagggagagatgccgacggtgacctgcaacgcgtgcaacgcggggttcgatgacgaggagcagcagcgcctccactaccgctccgagtggcaccgctacaacctcaagcgcaaggtggctggagttcctggagtgactgaggctctgtttttggctagacaaactgctttagcagaggggagcaactctgatagcactccaatgctctacagttgtgctctttgtggaaaggagtacaggagctcaaaagctcatgcccaacatcttaattcacgatcacatctcatgaaagcttctcaggagcctaatgcatccattgctggaattaccatagtcaagcctcgtcctgagcgagttcaacgcagggctccatctgcagtagaagaggatgaagatgaagatgaggaggaagagtgggttgaagtggacccaagtgagttagagtcgacttcggaaatgcaagtagatgagcattcctccaaatcagatgatgagatagatgagtttgaagagttggatcccacattctgcttcatgtgtgatcttgagcatgacaccattgagaattgcatggtccacatgcacaaaaagcatgggtttttcatacctgatagcgaatacttgaaagatccaaatggtcttcttatatatgttggtctgaaggtgaagcgtgattttatatgcctatactgcaatgacagatgccagcctttccaaagtctagaggctgtgagaaagcatatggatgcaaaaggacactgcaaagtacgatatggagatggtggggatgatgaagatgctgaccttgaagatttctatgattacagcagcagttatgctgatgtggagggtaaggagttggttgctgcagatgacaaggataacattgaactgggaagtggtggggctgagcttgtaataacgaacaagagtgagaaaggaactcgtgtcagaactcttggttctcgggaatttattcgctactatcgccagaaaccacgtccttctgttgcaacagatcgtgctcttgcgctttctctggcttccagctacaagagcatgggtctggtgacagttcagtcaaaggagcaagttgtaaggctgaaagttctccgcgcaatgaacaagacaggtgtggagaccatgcgaaccaagattggaatgaagagcaacgtgatccgcaatctccccaagaactgcccatattagtcgatgccacctgttgcaggatcaaagcccttggagctccagcatcatctttgtggcaatggctgttttttgtgcatctgctagccatggcagagagcttgtgatattcgcaaaaacaatagatctttatattgtttaatttgcacctcaaatgagagtatcatgcttactggaaacaagactgtatccggtataagagttatgacttcggtaaacacatcaccttctgtgattttgaacatgcatactcgtctcatgtttgc

SEQ ID NO: 68851 - DNA, 4492 bp, Oryza sativa
  Clone ID: PAT_MRT4530_69577C.1
atgaagaggaagaagaatggaagacgcgctgcccctgaccgtgatcggcctctcgggccggctcaccacgaggaattaaacccaaccaagccaagcgaaccgcagggaagagtagaaccatccctccttcttcttcttggaagcagccttcctaggcttgttcctcctctcccctcttccttccttcctgtagtaattaagcaaaccgaattccatcagcgctggctcgttggcgatctgaatcctcctcctcctccttgtcacctccttccgattcaggggcaggggcagatgcagatgcagcagcggcggaagccaccgcctgcggcggcgccggtggccgccaagcagccttccccgcgcaggacgcccgggcctctctccttcgccggcgccctgctctccctcctcgtcgtcgccaccttcctctacatcaacgaccacggcaacatgatgccaccccacgcgtcccccgaccccgacctccgcctcctgcaggaggccgcgcaccaaaaggtcaactccatcctcctctcccgccacgcccctgcccctcccccgcgcaccaacaccaacacgtcttcatccgaccaacacctccgcctcatcaacatccccatgtcctccgacttggacttggagttggggggtaacagcgacaagcagccagcggcgtggagattcaatttgagcagcagcagcaggaggaggagaagaatctgagagggtgcgagctatacaaggggcggtgggtgtacgacgcggcggggagggaggcgccgctgtacagggagtcggagtggcgggttcctgacggagcaggtgacgtgcatgcgcaacggccggcgggacgactcgtaccagcggtggcggtggcagccggaggggtgcgacctcccaagcttcgacgccagggcgctgctggagcggctgcggaacaagcggatgatgttcgtcggtgactcgctcaaccgcaaccagtgggagtccatggtatgcctcgtccagtcagcaattccctatggccaaaagacgctcaccaagttcgtcaacaacggatcgctcaaagtcttccgtaaacaggagtacaacgcgacggtggagttctactgggcgccgttcctggtacagtccaactcggacgacccgcaggtgcacagcgtacgtgacagggtcatcgcgtggcgctccatcgcaaagcacgccgccaactggaagggcgtccactacctcgtcttcaatacctacatctggtggctcaacaacttccagatcaaagtgctgaaaagcagaggtgctccgtttgcgggcagcggggggtggagcagccggtacgcgctggtagaccgagcgatcgcctacagggaggtgctaaagacgtgggccaagtgggtggacaggcgtatcgaccccaacaaaacccatgtcttcttcatggccatgtctcccaaccacttcatgccggaggcttgggggggatcggcgggggcggtgaagtgcgcgatggagacgcagccgatcgtgaaccggacatcaggggggctggacatcgggacggactggaggctgcacggggtggcgcgcggtgtgctgcggtcgatgcggcgggtgggcgtgcgattcgtggacatcacggcgctgtcggagcttcgcaaggacgcgcacacgtcggtgcacacgctgcggcagggcaagctgctgaccccggagcagcaggccgaccctcgcacctacgccgactgcatccactggtgcctccctggcctccccgacacctggaaccacttcctctacgcccacatcgtcgcccatgccgcctagcccttccttccttcctgcaactaatctcatctcatttattctcccttgctgctatgcaatctgtgagtagttctttttgtataatcagaaaaaaaagggagggattagaatcggaaacaaacaaagacgaaacacaagagtgtacatcaaacggcctcttgtcgcctttggtgtctgccatgccgaaagaacgaacgtgccaaagaggacaaggacacccgtgtccaagtttgtactaaaaaaaaacgttagagacatcatcgatcctcgcccttgtgaagttgtgattgctcagccacttactttgggttacttttttttcttctctttttttcaccatttttctttctttctctggggttgcgtaaagctgtcttgtgctgttttttactgtatcgaacggcatcacatgtataaatgtacgcgtgtactagtaatagcttacagcacatgtgcaacctcactagacccttggctagttggggtttatcaattttccattgttattttggactatatgacccccgatgcatgcgtatgtttaaacttccagtattccatgactcaaatctttcttattttatggtacggcctcagtcctaacataatttcttttatcaaaatcctactactagggaacgcaacacgctacggagattcatcgaaaagtagaatcatcctagatccctttctcctcccttccgcaagcaagtagaaaccgcacggtcttggttgtacctggaaagtttatggtaggaagatggggtgccttccaggaccatcatcaacaaccaagtaacttcagggtttgcaaaattcttgccaggtcttcacctatcaatttcttccggtatatcaacattcctcagatgtattagctccatttcttctttccaaatagtgtgtcggaattcaatcctgatgtgaggaacatttgtctggtgaatgtcattgccatcatgacctcttttgtagtagtttctcccaatccagtgtgacttgagcctatgagagaaaccagactggtacacagaattcctagcaatttcacataggtcgcatgaacttagcttccacagcgaagcagcgatgctatattcttcaaccaaaggttcttttgtcaggtgaatttgcaaagggtcatcggttgatagagaaacgttaaggcctcttaggaaaaatgttgggaaagggtttcggtgataatcaataaacaatgagttgttgctcaaaggagacatggcaagaccaatctgagctaggtaatacagatactggaggacaggggacttctttaaattaaccccgtgagcaatattatgagaagtaagaaatgctgcagcaagatgatcaatatctccagcctccccacagtgtggacgaagtttgattgttgtcatacccttggactcacgaagcttgttcagcgtgtacaagttagcataacaatagtacacataatatgcatatgctggattgaaaacattagtccattgctcaggtgtaggcatgtgttttgttgggcgtctctctggtttgctttcatcatccactaaatccagcccaacgacctgttgcaagaaaacatggagctgaggatgtgaagcaggatcaacagttacttcaaaaagaggcagaaaaatattgtcaaggaggttctggaaagaattgattgttcccatctccctgtatacattgtatatccgaggaatctgaattaaccaaacaacattctcgctgtacaattcattattcactatccagcttgccatctgatcccactcacttttctttctcccatagatagatattctatactcagccatctgatatttacttgcttcaagatcagaaaatacttcttttgtcaattcagcaagaaatcggccttgaataaggttgtcctgtttaagaaagatctccctcagccgggattggccacaaggattatacttcaaattgaacttgtcaaagcgatggaatgtacttttatcggcatgcacatctaagagatcaacattgaggtcataaccagtcaagtccaaactctcaaaaacctccttaagagtcaaataggtaccatctctaaaaatcacaacctcgtcaggttctttcctcaacttggacttgataaatctcaacagatgcttctgattcatgcatgcagagtgatgaacatgagtatcaaccttcctgacattgtagaagtcccgatggggtgcagctttctgagcaagtagttctctatcggcattgaccatcaaatgaagattgaatttctgttctagaagatttaaacgtttataacatacagttcgaatatccccagcagccaacacacgaaggatatagtgcatatcagtaaaaaaggtagtagcatcagcaacaggatagattctttcctgcagggataatgtccaggccgcagctggtatagcaaattccaagaatttacggagaccggattactcataggcagagctggttggttatacacaatcatcgtactgaaaagagatttttcttcttcttttcttcacattcttttctggcccgttcacctgctgtcaaaagatgtctatcatttgttctttttcttcaggggttaggttaagtgggaagagatcgatacaatatatggttatatatattgctaatgggattgccatgc

SEQ ID NO: 68852 - DNA, 2029 bp, Oryza sativa
  unsure (1)..(2029): unsure at all n locations
  Clone ID: PAT_MRT4530_69578C.1
ccggccgggcacacgactctcggcaacggatatctcggctctcgcatcgatgaagaacgtagcgaaatgcgatacctggtgtgaattgcagaatcccgtgaaccatcgagtctttgaacgcaagttgcgcccgaggccatccggccgagggcacgcctgcctgggcgtcacgcacaaaaccattcaagttcattagtactacaacaacatggcatccataaatcgccccatagttttcttcacagtttgcttgttcctcttgtgcaatggctctctagcccagcagctattaggccagagcactagtcaatggcagagttctcgtcgtggaagtccaagagaatgcaggttcgataggttgcaagcatttgagccaattcggagtgtgaggtctcaagctggcacaactgagttcttcgatgtctctaatgagcaatttcaatgtaccggagtatctgttgtccgtcgagttattgaacctagaggccttctactaccccattacactaatggtgcatctctagtatatatcatccaagggagaggtataacagggccaactttcccaggctgtcctgagtcctaccaacaacagttccaacaatcaggccaagcccaattgaccgaaagtcaaagccaaagtcaaaagttcaaggatgaacatcaaaagatccaccgtttcagacaaggagatgtaattgcattgcctgctggtgtagctcattggtgctacaatgatggtgaagtgccagttgttgccatatatgtcactgatctcaacaacggtgctaatcaacttgaccctaggcaaaggggatttcttgttagctggaaataagagaaaccctcaagcatacaggcgtgaggttgaggagcggtcacagaacatatttagtggctttagcactgaactacttagcgaggctcttggcgtaagcagccaagtggcaaggcagctccaatgtcaaaatgaccaaagaggagaaattgtccgtgtcgaacacgggctcagtttgctgcagccatatgcatcattgcaggagcaggaacaaggacaagtgcaatcaagagagcgttatcaagaaggacaatatcagcaaagtcaatatggaagtggctgctctaacggtttggatgagaccttttgcaccctgagggtaaggcaaaacatcgataatcctaaccgtgctgatacatacaatccaagagctggaagggttacaaatctcaacacccagaatttccccattcttagtcttgtacagatgagtgcagtcaaagtaaatctataccagaatgcactcctttcaccattttggaacatcaacgctcacagcgtcgtgtatattactcaaggccgtgcccgggttcaagttgtcaacaacaatggaaagacagtgttcaacggcgagcttcgccgcggacagctgcttattataccacaacactatgcagttgtaaagaaggcacaaagagaaggatgtgcttacattgcattcaagaccaatcctaactctatggtaagccacattgcaggaaagagttccatcttccgtgctctcccaaatgatgttctagcaaatgcatatcgcatctcaagagaagaggctcagaggctcaagcataatagaggagatgagttcggtgcattcactccaatccaatacaagagctaccaagacgtttataatgcggcagaatcctcttaggtcggcttgcggataaagaataactaaataaataaattgcaagcaattgttttgctgctatgtactgtccagtctttcgactaatgatgataaagcctctctttatccttaaaaaaaaaaaaaaaaaaaaaaaaaaaaaaaaaaaaaaaaaaaaaaaaaaaaaaaaaaaaaaaaaaaaaaaaaaaaaaaaaaaaaaaaaaaaaaaaaaaaaaaaaaaaaaaaaaaaaaaaaaaanagggggcgggcccctttaaaggacccaagtttacttccccgtgcttccgaagtaaaagtttttttatggggcccccaaaataaaa

SEQ ID NO: 68853 - DNA, 699 bp, Oryza sativa
  Clone ID: PAT_MRT4530_69579C.1
ttttttttttttccataagataagggagggtggtccattctcgggttttctcatatggatgaatctccaagaggataccaacagtacatgggaacgggaacacaaaaatagaaagaccatctgtgagggatgtccttagcattcagaactgatattataagaaacttttacagtacatagcagcaacgcaattgcttgcaatttatttatttatttatttagttattctttatccgcattgccaacttaagaggattccgccacaaaccctaactctatggtaagccaccttggcaggaaagagttccatcttccgtgctctcccaactgatgttctagcaaatgcatatcgcatctcaagagaagaggctcagaggctcaagcataacacgaggagatgagttcggtgcattcactcccctccaataccagagctaccaagacgtttataatgtggcggaatcctcttaagttgcgccatgcagataaagaataactaaataaataaataaataaattgccacccattgcgttgctgcctatgtactgtaaaagtttcttataatatcagttctgaatgctaaggacatccctcaagatggtctttctatttttgtgttcccgttcccatgtactgttggtatcctcttggagattcatccatatgagaaaacccgagaaaaaaaaaaaaaaaaaaaa

SEQ ID NO: 68854 - DNA, 5198 bp, Oryza sativa
  Clone ID: PAT_MRT4530_6957C.1
agattccgacgtttccggagagtccgtttttgcaggagaagaatttgaagagttccaaggccagcaaggcatctcctggtttggaatggtatattcctggtttggagatagaactgtgcagccgggatggttgttcaggatggttgggcctgtgcagcatgatgccgcgcttcaagcctgagtacttgtttggtgttgagggatttgtccaggagttgcgtacgatgtcctttgccataggatttgggactgcccctttgtatgcccagattcctcatgatcgtgatgaagagaagtgccgagtcaaagtcaccttgaacagtaatagtgaagatatcccatcagtgatgttcgaagctggaggaggaaactacattcatgcatgtcaggaggtggcaaggatcgccataggagagctccgcgatcgctacagtgatcagttggccgacactgagtatcgctaccatcctcgccaaccccaaggaagagaccgtggcagctaccttgagactgaggggattgagaatgatgctaccacaaggcatttggttgagatgctgtgggctatggatgagacccgcgcggagactgtgttagcagctcaagatcgtgaagactggaatcgtggtaagatttgcaagctagaggacaaggtggatcatttggagaaggaactagccgcattgaagggagaagcaccaccgcagaaggccagggttcgtcttaccgcaaggaagagagctctattcgtccctcgctaccaattggcgccaaagatggtgttcactcgcagcaacgggaatggccccaacatcaacaataacaacaacaacaatgggaagaatcccacacttgcccaagtcctggctcaacaggcacagcttatgaacatgatgatgcagcaacttcagaaccagcagaaccagggaaataaccatgcacctccccagaacaagttagcagaatttcttcgtgtgaggctacccactttctctagcaccactaatcctgttgaagctggtgattggctgcacgccatagagaagaagttggatttgcttcagtgcactgatcaggagaaggtctcatttgcatcacaccaactgcatggccctgcctctgagtggtgggatcacttccgccttaacaggactactgctgaacctatcacttggcttgaattcaccgctgctttccggaagacgcatataccatcgggagtggtgtctctcaagaagaaggaattcaggtcgctcacccagggatctcacacggtcaccgagtatctgcacgagttcaatcgtctggctcgctatgctccggaagatgtgcgcactgatgaagagcgccaggagaggttcttggaaggacttaatgatgagctttcttacccactaatgactggggattatcatgatttccagaagttagtggataaggctattcgccaggaggacaagtacaaccgcatggagcagaagaaacgccggattgctcacttcaaggcacaacaagggaatagtcagaggccgcatcttactttaggaccccagtccatgccacagggaggttcttcgtctgttgttcgtccgcagcgtcagttcttcaacaacaatgctggcaacaacatccgcaatcaagctccacgccctgttgcagctccaacacagcaacagcctgccaagagggagcaaggcagcaagcccggggtgtgcttcaactgtggagacctaggacattacgctgacaagtgtccgaagccccgacgcgtgaaggttgtccctgcccagagcaactctaccgcaccagcatcaaaggctcgtgtcaatcatgttgctgctgcagaagctcaaggtgctccagatgtgattttgggtacgttccttgttaactcagttcctgcaacagtgcttttcgattctggtgctacacattcatttttatctatgggttttgcgggaaatcatgggatggaagtagaagatcttagacgtcctttgatggttagtaccccgagtaatcaagcactctctttgcaacgtagcccctctgttagaatagaaattcaaggagtaccatttctggccaatcttatcctgttagaatccaaagaccttgatgtcatcctagggatggactggttagccagatataaaggtgtgatagactgtgccaacagaaaagtaactctcaccaacaatgatggtcgagttgtaactgttcatgcattatcttctgaatctttaaggtcaagtctgaaccaaatagctttggaagagattcccatagaacaggaatacccggacgtgttcccggacgatttacctggtatgccgcctaaaagagatattgaattcagaatagatctggtaccaggaacaaccccgatccataagagaccttatagaatggcagccaatgaattagcagaagtcaagaggcaagtagatgatttgcttcagaaaggatacatcagaccaagttcgtctccatggggagctccagttatttttgtggaaaagaaagaccatacccagaggatgtgtgtggactatcgtgcactaaatgatgtgactatcaagaataagtacccactgcccagaattgatgatttgtttgatcagcttaaaggtgccaccgttttctccaagatagatcctcgatcagggtatcaccagttgaggattaaagaagaagatatacctaagacggcttttaccactaggtatggattgttcgaatgtactgttatgtcttttggacttaccaatgcccccgctttcttcatgaacttgatgaataaggtgtttatggaatacctagacaagttcgaggtggtctttattgatgacattcttatctactcccgaacaaaagaagagcatgaagaacatctttgccttgcactagagaagctacgagaacatcaactgtatgccaagtttagcaagtgtgaattttggttgtctgaagtgaagttccttggtcacgtcatctcagccggaggagttgccgttgatcctagtaatgtggaatccgtaaccaactggaaacaaccgaagacagtttcagagattcgcagtttcctaggcctcgcaggatattatcggaggtttatagagaatttttccaagattgctaagcccatgacacgattacttcaaaaggatgtaaagtacaagtggtcagaagaatgtgagcagagttttcaagagttgaagaatcgcttaatatcagctcctattttgatttgacctgatccaaagaagggtttccaagtgtattgcgatgcatccaaacttgggttaggttgtgttctgatgcaagatgggaaggtggttgcctatgcatctcgtcagttacgtccgcatgagaagaactaccctactcatgatcttgagttagctgccgtggttcatgcgttgaagatttggcgtcattatcttttcggtactcgtacagaggtgtacactgatcacaagagtttaaagtatatttttactcagccagatctgaacatgagacaacggagatggttggaattaattaaggattatgacatgggaattcattatcacccgggaaaggttaatgttgtagcagatgctcttagcaggaaaggctattgcaatgctacggaaggacgacagttgccattggagttatgcaaggaatttgaaagattaaatttgggaattgtcagtagaggtttcgttgcagccttagaagcaaagcccactctaattgatcaagttagagaagctcaaattaatgaccctgatattcaagaaattaagaagaatatgagaagaggaaaagctatcggtttcttggaggatgagcaaggaactgtatggttgggtgagagaatctgtgtcccagacaacaaagatttgaaagacgcaattctaaaggaagcccataatactttatactccattcaccctggtagtaccaagatgtaccaggatctcaaggaaagattttggtgggcaagtatgaagcgtgagatagcggaatatgaagctgtgtgtgatgtttgccagcaggtcaaggcagaacatcagaaacccgccgggttgttgcagcctttgaagataccagaatggaagtgggaggaaatcggtatggatttcatcactggtctacccagaacgtcatcaggccatgactctatttgggtgatagtcgacagacttaccaaagtggctcatttcatcccagtaaagacaacatattccggaagtcggttggcggaattgtatatggcaaggattgtgtgtttgcatggcgtccctaagaaaatagtgtctgatcgaggtagtcagtttacttcaaagttttggaagaagcttcaagaagagatgggttctaagctgaacttcagtactgcttatcatccgcagacagacggacaaaccgaaagggtaaatcagattttggaagacatgttgagagcttgtgctttagacttcggtggaagttgggataagaatttgccttacgccggattctcgtacaacaacagttatcaagctagtctccaaatggctccttacgaagcactgtatggtcggaagtgccacactccgcttttgtgggatcaaacgggagaacgtcaggttttcgggactgatatcctgagggaagcagaagaaaaggtgaaaatcattcaagaaggattgcgtatggctcagtctcgccataagtgttatgccgacaatcgccgcagagatttgagttttgaagaaggagattatgtgtaccttcgtgtcacgcctcttcgaggggttcatcgcttccacactaaaggaaaattggcaccgcgttttgtgggaccttataagattgtcagtagaagaggagaggttgcttatcagttggagttacctcaatctttggcaggagtccataatgtgttccatgtgtcgcaattgaaaaagtgttttagggtatctatcgaagaagctaatcttgaacagatagaagtccaagaggatctgacctatgttgagaaaccaatccttatcttggaaacagatgagagaagaaccagaaatcgagttatccgtttttgtaaagttcagtggagtaatcactcggaagaagaatcaacttgggaacgagaagatgaattgcagtcagctcatccgcatctgttcgccagttctcccgaatctcgaggacgagattctgtt

SEQ ID NO: 68855 - DNA, 334 bp, Oryza sativa
  Clone ID: PAT_MRT4530_69580C.1
caaaactatcactggatggggcttaagaaaacaatattttgcataaactggtccgcaaaataaaaagcaactacggcggacttcttcttcctcctccgtcctaaccaaccaaccgttggttcccaatcatcgactgaatcgagcatagatgacatgaatctcctattctgcactcaaaaaacataaatgcccacgttctcttaaaaggaaaaaaacaccctcctaaatagccgcgattagacgtccaaatcaaaggcttctcttgagcttcatgactccctttgggacctccggtcaggggcacaagctccattcttctattgctcattctttt

SEQ ID NO: 68856 - DNA, 3140 bp, Oryza sativa
  Clone ID: PAT_MRT4530_69581C.1
cactcactccactagcccccaacactgctactctgggggctcccctcccctccccgcgctagctgtatgccgcctttataacgcggcgaggcagccagcttcccccaagcccagagcgacgccttctcctcctcgcagctccgcgagatccacccggagcccggcaatcccaggcgaggtgtgagagttcttgatcgggtcggcataggggttttgttctgcagtacatgcgagagtgtgattgatggcatttggccgatgctcgaagatggacggcaggcggtcgtcgccgtcgtcgtcgctctgcacgacgaccaccgtcgtcgtgttcgtggcgctctgcctggtcggcgcctggatgatgacgtcatccaccatcttcccgctggagataacctcgaataagaaggcggcggtgaaggagcagccggcgagagttaactacggcgcgtccgaggaggcagcggcggcatccggcaacagtgctgaaggtgtggacaggtttggggacacggacaacaacgataatgcggttccggaggagccgaataacacggtcccttctgaagaagagaagttcagtgagaacacagtggagaagccagtggagagcagtgaagagaaggcgccaccgaaagaaaaggaggagagtaaggatacatttgatgatgcaaatgggaaaacagaacactcgagcgccaaggaggatggggattctgaatcaggatctgggcagtcggatggttcaaagaatggcgacgaggaggagaagagtgaggagaagaaagatgatgagcaatctgatggtgagaggaaagatgatcaagaagagaaggctgaaggcagtggctcaaaggacacgactgaccagccacaaattgaggagacagtggatgaaagtggggagaagggtcagggtgcaaagtccaatgaggtattccctgatggggctcaatcagagcttctaaaggagtcaaacaccgagaacgggtcatttaaaacacaggatgcagagtcaaagaatgagaaggaatctcaagcagcatcaaattcttcagatgatgaaaccacatataactggaagttatgcaataacaatgctggaacagattacataccttgcctcgacaatgagaaggctatcaagaagcttcgaaccaccaaacattatgagcaccgtgagaggcattgccctgtggagcctcctacctgtgttgttccacttcctgaaggatataaacgcccagttgagtggcccacgagcagggacaaggtgtggtacagcaatgtcccccacactaagcttgctgagtacaaggggcaccaaaactgggttaaagtttctggggatcatctcctatttcccgggggtggcactcagttcaagaatggtgcacttcactacattgatactattcagcaggcattacctgatattgcatggggcaaacgaagccgtgtcattctagatgttggctgtggagttgctagctttggagggtatatgtttgagagagatgtactcacgatgtcatttgccccaaaagacgagcatgaagctcaagtacagtttgcacttgagagaggtattccagcaatatcagctgtcatgggcaccaaaaggctcccataccccagcagggtctttgatgtcattcattgcgctcgctgcagggtcccttggcacattgaaggtggcatgctattgctggaactgaaccgcctattacgccctggtggttacttcgtctggtctgccactcctgtttaccagaagctccctgaagatgtcgagatttggaatgccatgtcttctctaacaaaggccatgtgctggaaaatggttaacaagactaaggataagttaaatcaagttggtatggccatatatcagaagccaatggacaacagttgctatgagaaaagaccagaaaacagcccaccgttatgcaaggaaactgatgatgctgatgctgcatggaatgtacctttgcaagcatgtatgcacaaattgcctgctggccaatcagtccgagggtcaaaatggccagagacatggccacaaaggcttgagaagaccccctactggatagatgactctcatgttggaatctatggaaaaccaggaaacgaagattttgaggctgattatgctcattggaaacgagtcgtaagtaaatcttatgtgaatggcatgggaatcgactggtctaaagtaagaaacgtcatggacatgagagctgtatatggaggtttcgctgcagctttgagggaccaaaaagtctgggttatgaatattgtgccaacggattcagcagacacgctgcccattatttatgagcgtggcttgtttggtatgtaccatgactggtgtgaatctttcagcacttacccgagaacatacgaccttctgcatgcagaccatctcttctcaaagctaaaaaagagatgcaaattgttgccggtgtttgcggaggtcgacagaatattgaggccagaaggaaagctgattgtgagggataatgcagagacaataaacgaactgcaaggcatggtaaagtcgcttcagtgggaggttcgcatgacctacaccaagggtaacgagggtcttctatgtgtccaaaagtccatgtggcggcccaaggagatcgaggcaagcatgtgaaatatacagatgttcaagagaactgttactggttagtggtacattagactgaattttggctctagatatgcatactattcttgttgattctgaaaaggcataagccttgatgtaattgtagaatcattttttttctttcttgccaaacaaatgcactctatattctcttcttgctgtgctcttgctccattgctgtaaggttgtattggaacctggaagtgtcacaagtgtgacaagtgtcacaggcaaattatgttcaatccatacagccatgtagtgtacgagaaatttctttgtgttatttaggagaaccttacaaaagtttgtctgtcatatcagtcaaacattctggaactcatgggaactttggattctttcatgagttactgctcatcactcaacagtgacattataattttgtgcaaaaaaaaaaaacaaaaaaaaaaaaaaaaaaacttttttaaggggcgcctaa

SEQ ID NO: 68857 - DNA, 2088 bp, Oryza sativa
  Clone ID: PAT_MRT4530_69582C.1
ccggccgggtctcaaccttgagctatcggttatcttatttatgtgagaagctgccgtttggatattgatataaaaaaaaaaaaaaaaaaaaaaaaaaaaaaaaaaagcattcagttcattagtcctacaacaacatggcatccataaatcgccccatagttttcttcacagtttgcttgttcctcttgtgcgatggctccctagcccagcagctattaggccagagcactagtcaatggcagagttctcgtcgtggaagtccgagaggatgtagatttgataggttgcaagcatttgagccaattcggagtgtgaggtctcaagctggcacaactgagttcttcgatgtctctaatgagttgtttcaatgtaccggagtatctgttgtccgccgagttattgaacctagaggcctactactaccccattacactaatggtgcatctctagtatatatcatccaagggagaggtataacagggccgactttcccaggctgtcctgagacctaccagcagcagttccaacaatcagggcaagcccaattgaaccgaaagtcaaagccaaagccataagttcaaggatgaacatcaaaagattcaccgtttcagacaaggagatgttatcgcgttgcctgctggtgtagctcattggtgctacaatgatggtgaagtgccggttgttgccatatatgtcactgatatcaacaacggtgctaatcaacttgaccctcgacagagggatttcttgttagctggaaataagagaaaccctcaagcatacaggcgtgaagttgaggagtggtcacaaaacatatttagtggctttagcactgaactgcttagcgaggcttttggcataagcaaccaagttgcaaggcagctccagtgtcaaaatgaccaaagaggagaaattgtccgcgttgaacgcgggctcagtttgctgcaaccatatgcatcattgcaagagcaggaacaaggacaaatgcaatcaagagagcattatcaagaaggaggatatcagcaaagtcaatatgggagtggctgccctaacggtttggatgagaccttttgcaccatgagggtaaggcaaaacatcgataatcctaaccgtgctgatacatacaacccaagagctggaagggttacaaatctcaacagccagaatttccccattcttaatcttgtacagatgagcgccgttaaagtaaatctataccagaatgcactcctttcaccgttctggaacatcaacgctcacagcatcgtgtatattactcaaggcccgagccccaggttcaagttgtcaacaacaatggaaagacggtgttcaacggagagcttcgtcgtggacagctacttattgtaccacaacactatgtagttgtaaagaaggcacaaagagaaggatgtgcttacattgcattcaagacaaaccctaactctatggtaagccacattgcaggaaagagttccatcttccgtgctctcccaactgatgttctagcaaatgcatatcgcatctcaagagaagaggctcagaggctcaagcataacagaggagatgagttcggtgcattcactcccctccaatacaagagctaccaagacgtttataatgtggcggaatcctcttaagttggcaatgcggataaagaataactaaataaataaataaataaattgcaagcaattgcgttgctgctatgtactgtaaaagtttcttataatatcagttctgaatgctaaggacatccctcaagatggtctttctatttttgtgttcccgttccaatgtactgttggtatcctcttggagattcatcaatatgagaaaacagagaatggacaaccctcccttatcttatggaaaaaaaaggttctcacctgccagaattggattctgttgatattattctactacattttgataggaatgaataaaagaagcttgctcaagcaaatggcataaagttcctttgccgtggccccccatcttgaagaatatgggcatctaagtttcttatcatacattgtcatcagctccacaaattttcttattctactgatagcagctgatatgtatcag

SEQ ID NO: 68858 - DNA, 224 bp, Oryza sativa
  Clone ID: PAT_MRT4530_69583C.1
ggcaatgcaaatgattgatgtatatacaatattttcatacgatcaagctgtaatccggggggtttctggtcgaaaatcaagagtggaaacgtttgctggtgctaatcggacctacactatagaatctattatggggtacaggaatgttttacaggctggaaccagtcacatccttggacagaacttctttcgttcctttggaacacagtttatggattaatatt

SEQ ID NO: 68859 - DNA, 2577 bp, Oryza sativa
  Clone ID: PAT_MRT4530_69584C.1
atggagggctcgccacctcgccgcaagctgcggccgccgtcgccgccggggtcggcggcgcagccgagcctcgactgcctcccgtcggagatcctggagaacatcgtcgcccgcctcggcatccgtgaggccgtccgcacctcggcggtctccggcgcatggcgccgccgctgggagacctccccggggctcagcttcgaatgggaccgcggcgaggttgaccccgccatcgtcgccaccgtcctcgcgcggtactcgcgccccgtcgcctccttccgctccgggtgggtcgagagggagcactccgccgtcacggatgagtggctcgtcctcctcgccggaaggagcgtcgagtccctcacccttggcttcgcggagttcgacgataggcggttccacaccatccactccgccatgttctcctgccgcgagctcaccgagctttagcgcgcgaactgccgcctcccggcggcaacctcgggcttcttagagcatggtgagagtactttggaggcgatgatctccttgtctctgttgcttgagtggctggatcttaggagtgtttgtactgatgacaaccagatggatgagtgggttattcgggcgccgaatctcaagcatttgactattgaatcagattacgattatttatggagggtagaggagctcccttctctccagacggcaactgtcaaggttgatgatgattctactgatcgtgattttgttcagttactcacatgttttgcccaagtcagcatgcttgagcttcatttgctggccccaaaacagatgcaaaaggtagcaatttttactatcaaatctcgtcttgtagcacttctcctaggccaatgcctcttcaggaattttgcaactgaggataatgctctagatggactttcatgttctttggagaaactgaagagcttaacacttcatgcaaacttccgcagtgtgtctagcattttatgtatattttctttactcatgaggtgccccaacattggagttctggacattgagattatgggaagtgagtttcctcagaatgatgagatagatgcagaatttttcaatacactggaaaccaatgatctgttcactaatctagatgacataaccttgaggaatgccccatgcttgtcaaatgatatgcactttattgagtttgttctgtcaagagtaaggctacttagtaaattttgggtttttcgagatgatagtaattcattgtcaaagcctagtgaagaagcagttattgagatagcaaaatatagaagagcttcaccaaaatccagagtcttctttaggagcatggaagttatcacctcttatttccctgattccctctttctgatactcacacagtggtctgttgcactgcaaaaggctcataacatcttttacatggaccgtggtcaaaattttgtgctccaacagtttgaactaactgaaatcgagctggatgtgctccaaacaaagtcaggcgcgagattcgagggagttgctgggccgagattggcctcaattgctgaatcccgtattgctcgatcgaataatcgggatggtaatgacgccgtcgcctggctgcaagctgtggccgtcgcagggcgatgcgggaacggcggcggcggcggccctggactccctcccgccggagatgctcgccgacgtcatctcccgtctccccatccgcgagaccgtccgcacttcggcgctctcccacgtgtcgcgccgctgctgggagtccgtcccctacctcaccttctgttggccacgccgcacgccccccggcgccatcagcaccgccctccggcgctaatccggcctcgtccgcaagtttaccaacttgtatatcggggaggaggaggaggaggaggcgccgttccgctactccgaccgctggctgctcctcctcgccgggaagggggtccaatccctcttccttgctttctgacggtcggacgaggagatccctatgctgcattctctatcttctcgtgctgcgagctcacccagctcgaacttgcagactgctacatcccagggttgccaacctgcttcgcggggttcccaaatctaaccagtctaagattatcagatgttggcttcccagatggagcaaaaggattggagatattgctcgctagatcgccattgctaaagagcctttcactcctgatgttgctgtttcctgctaaaaacggggtgtatcaccagtgggttattcaggctccaaatctccagaacttttttattactggactgtatgacgatggttggcagatcggtgatctcacgttccttgaggaagcaacagtcgattggccattatactcatatgaccgtgatttcgtcaagcttattacagggttgtctcaagcaagggagctcgactttgcaatgccgagcacccaggaaactgcaacaagtaaagctgaaaacactctatccttagctttattattcatttcattcagaagaaacaaatcctcaaaattcctaggagctaggtgccagccaaaagaatctctacagacacaccacacaaatgaagccatagggcagatctcataa

SEQ ID NO: 68860 - DNA, 366 bp, Oryza sativa
  Clone ID: PAT_MRT4530_69585C.1
gctccatgcttattttattgtcaccaagattttgatcccaataacatctactcaacacttggctcgacaagaaagagcacaccattgtctccccaaaaacatatactgtccgaacagcgcccgctggagagttattaagtcactgtgctatcagagaccttaaggtgccaccatttcagatgattgcccccaagccggaccatgtccagactggaaaacactgaagacggggcaacgcccttgttactctgcttattgcaacgaccaaggcagatcatggggaagctcaccttacaagtctggatcatgaatcacgacaggtggtgctccacgatggacaggagcctttgtgccttggctagccct

SEQ ID NO: 68861 - DNA, 548 bp, Oryza sativa
  Clone ID: PAT_MRT4530_69586C.1
ctaggtggataaaaaaaatatgtgtgggaccccaatgtcattcgcatattgtggcgccgtctctctcttatctctctccccctccctccggtcccttctcccgcaggtggcggcgagggccagagcggcgtgggcaaccggagatggcggcgagcggtggagcccctccctctctttctcccgcggcgtgcgacgagggccggagcggcgcgggcaagcgaagacggcggcgagcggcggcaagggccagagcggcggtgggcaagcggagacggcagcgagcggcagagcccctcccccctccctctctctctcctgcggcgtgcggcgagggccaacgctctgattttggcttgctttgcttgattgtgctgggttccaggtcgaggggtccatgaaccaagttgcgacaaccagatgcgcctctacgatctgccctctgctctgctgtgtcctcaacgttgagctcaaggcggagcaatccaagattccccacccaagccgccgccgccgctccggtgcccaccctcccgccgtcactactgact

SEQ ID NO: 68862 - DNA, 258 bp, Oryza sativa
  Clone ID: PAT_MRT4530_69587C.1
atgattctgaggtgggcatgcgaggaggaggaagaggaggccgagctctcgcgctcactgatggagcagaatgcttgggggcgaattgacaagtacacctactgctacagcaagtctctcagctgcaaccaggacaagggagtgtactgcgacagcatcagcagcagcagcagcgcgcgcgtgtgtgcggggctgtgcgcgatggagacgggagcaagggaggaatttttttgcgtggccatggcgttcgtggattaa

SEQ ID NO: 68863 - DNA, 129 bp, Oryza sativa
  Clone ID: PAT_MRT4530_69588C.1
atgccgtggaggaggtgcgccagcggctacgtgcatctcacggtggaagccgatgtcatgcgcagaaattcacgaactagaattcccaagcggaatgagcatgaaaatccctgtccagtaccagtcaag

SEQ ID NO: 68864 - DNA, 456 bp, Oryza sativa
  Clone ID: PAT_MRT4530_69589C.1
cattgagagcgtccaggacctcacagcgtcatgacgtacccaagaccccttttcgaggtctccaaggaaaccgcccagctcgaggcccaggctttcgagcttgagcagaagaccccacttgccaccgaggcaggtctgtcctcgactcgtgggtccgctacgagggcaggtcaagcagaggcagcagcgcgagcttccgagtccatcattgccaagattgagaaggagctcgagaaccccaagactcttaacagattctcgaccagagcgtttctgacgttgagaggatcgtctcccagaaggcataagcgacctagaagcatcccaatgggccaagttcaaacccaatgttacaccaatctgtgcatagtcaggctcgttcaatatagagtaccctaggcttggggaaatggcccaatcatctcattgtgtcttcaaaaaaaaaaaaaaaaaaaa

SEQ ID NO: 68865 - DNA, 738 bp, Oryza sativa
  unsure (1)..(738): unsure at all n locations
  Clone ID: PAT_MRT4530_6958C.1
ctgtgttttttttttttttttttttttttttttttttttgtttttttttttttttttttttttttttttttttcccccccctcgcctttttttttccttttccntttccctttgggggtccttggttcaaggcccaagccttgaaacaattttccagggggggaggggcggtttcccgcctaatacctcttggggggggggggggggggcctgggtttggggccctccctcccccttattcctgggctttgcttcggtttttaacgggtctgcggggcccctttttggttgggcctccgggaagatttcggttctctccccgtggggttccgctttaccggttccggctctgcngaggggccggggcggccgggtcccttgggtccggggttggttcccgagctgggggggccggctgggggtctttggccgccccccccttgttctcttttttttgggggtcctcccgggggcgccggttttcctggggggggtggggaaaaagctcgctgggttttttgaaaggggggccctcggggtttttggcccccccggcgttggcctgggnttccttttcccccgggccttcttgggggtggtcccccgggcctctggtcggggggttgccccggcggaaccggccgcggggggttccccgggaattccgggccgtgcccctgggggggcccctttttcccttttggggggccgccttcgaggctggggggctttctgggg

SEQ ID NO: 68866 - DNA, 491 bp, Oryza sativa
  unsure (1)..(491): unsure at all n locations
  Clone ID: PAT_MRT4530_69590C.1
gtccgcccaggtcgcatttaaaactggtgattttaaccaccaggtgatcttcatcggtggtttgacggatgggtttttagcaaccgactacttggagcctttgtcacttgcactagaggtcgagaaatggtcactggtacagccgttactttcttcatcatacactgggtatggaatttccagcttagagcaggatgcattggaactagatcaactcatcagttacttgataaacaaagaaaattctgatggagtaatattgcttggtcacagtactggttgccaggatattgtgcattacatgcggacaaattttgcatgttccanggcagtttctggggtcattttgcaggccccagtaagtgacagggagtatagagcaacacttccagaaactgcagaaatgatagatttggcagcaaaaatgttaagtgagggccgtggaatggatttgatgcccagggaagcaaatccagatgctccgattactg

SEQ ID NO: 68867 - DNA, 286 bp, Oryza sativa
  Clone ID: PAT_MRT4530_69591C.1
catccatggcttttttggtgtcagaactgagggagagagcgtgggtggggcccacgtgtcggtgacgtagggaaaggctggagagtaactggaaagcgtaggtggttagttggaattgggttggagttcgggaaaggctacatttgcttttacgtgcgttgggcagtgaaggcgccttttcacttttgccgtcttccaccatgagtgagagtggtttaacaaccctactgcactagtactagcgctgttgctgctgcaaaaaataaattattactagtatagttat

SEQ ID NO: 68868 - DNA, 1427 bp, Oryza sativa
  Clone ID: PAT_MRT4530_69592C.1
cataagtgtcaattcagccgagtataaccaaagtcttgattacaccgtttaaccaatgttaatttgacaaagagagatttgagatagtttcactacaatttacaaattcaagtattgtacataaatgtccacaaaataaacaaaagtgtctcacaatgcttactaaggcaacaaagcaaaacaaataggaattattactataaaaaaatgatcaagaaacatgtaaaaacaagacgttttgctaggggaggaaaatgggatagacatgttacatatggctgttgtatctagctccatggatcgtcccaacctttgggcccctctctcttaacaaaatctacaatggcccgaactgcttcttgcaccctattggagagagcatggtttccccattctatttcaactttctccgcgttgcccaatgcgcgacataatctgtccacaagtgcctccttatcaacgtattccgggacatattcatcccccattgagaaaataacctggcactgtgttgttgacatatgaccaagtctctgcctcaactgatcttcactaagatctgagctgaacatgtcatcatcacccatatatgcacaaagggagtgatacctgtaggcagtaatcggagcatctggatttgcttccctgggcatcaaatccattccacggccctcacttaacatttttgctgccaaatctatcatttctgcagtttctggaagtgttgctctatactccctgtcacttactggggcctgcaaaatgaccccagaaactgccttggaacatgcaaaatttgtccgcatgtaatgcacaatatcctggcaaccagtactgtgaccaagcaatattactccatcagaattttctttgtttatcaagtaactgatgagttgatctagttccaatgcatcccagtgtatgatgaagaaagtaacggctgtaccagtgaccatttctcgacctctagtgcaagtgacaaaggctccaagtagagaacttattgtgttatttttcctatccttctccaattcatcatttttcagatttttctcatgtttgttactctcaacatataatgaattataatcggttgctaaaaacccatccgtcaaaccaccgatgaagatcacctggtggttaaaatcaccagttttaaatgcgacctgggcggacttggggccgtacttgaacagcgccccctgcacctgcctcctcttcccgcccgcgccaacgccagcaccagcgccaggccccgcagcaaccacggcggcgaccactcctccacctccacctccacctccacctccaccgcccctcccacccgcgccatcggagaggggagcggccgcggaggcgacgccgccggggggcatggcggaggaggcgcgggcgatgccggagaaccaggagggggaggatgtcat

SEQ ID NO: 68869 - DNA, 1206 bp, Oryza sativa
  Clone ID: PAT_MRT4530_69593C.1
atgggagacgcgctgtgtgatcagctcctcttggtggacagcgacggcggcgagttcatcccccaccacgccgacgccgacgccgacgacctcttcaccatcctcgagacgtgggagggctgcgccaacgtcgtcgccggcggcgcccccgcgaccacgacgacgttaggtagtcctattgccgccgctgcctgcatctccggcgttgttggtgggcagaatcatcagcagctgccggaacctgccgccgcgaagaccgtgccagccaccaataacaagcggcgggaggaggaggtggcggaccgtgacggcgacggagacgacgacgacggttcgccgcagaagaggcgcaagtgctgctcgccggagtcttcgacgacggacgtggcggcggcgacgacgcccaagacggcgcacatcgccgtggagcgcaaccggaggaagcagatgaacgagaacctcgccgtgcttcgctccctcatgccatgcttctacgtcaagcggggagaccaggcatccatcataggaggagtggtggactacatcaaggagctgcagcaagtattgcactcgctggaggccaagaagcagcgcaaggtctacaccgaccaggtgctcagcccacggccgccggcgacggtggcggcgtcgtgctgcagcccgcgcccaccgcagctcagccccaggctgccgccgcagctgctcaagtccacgccgccgctcagcccgcggctcgccgtgccgatcagccccaggacgccgccgacgcccggtagtccctacaggctcctccggctgccgccgccgccgcccccggcgtccggctccaactacgcgtccccggcgatgacgccgacccaccacgagacggcggcgccgtcgctggacgccatcgccgccgagctgtcggcgtacgccagcaggcaggcgctgggcggcggcctcctcctccccgacgtgaaggtggagttcgccggcgcgaacctggtgctgaagacggtgtcgcagcggtcgccggggcaggcggtgaagatcatcgccgccctggagggccgatcgctggagattcttcacgccaagatcagcaccgtcgatgacaccgccgtcaactccttcactgtcaagtatatctttgggcagattggaattgagtgcgagctcagcgctgaagagttggtacaggtgattcagcaaacgttcacatga

SEQ ID NO: 68870 - DNA, 1572 bp, Oryza sativa
  Clone ID: PAT_MRT4530_69594C.1
cgataagccgcccgcctcctctccttctcgtcgccgtcgccggcgccggctcagcgcctccgccctctccccccacgccgccgcctcccccttcaccctctacccccaccgcgggcgcctcccctcccactgccgccgcctcctcctgctcctcctcctccacgtcaccgacgccggagcttcttcgatccatggcaacggccatttccgtcggcgtcgcagtgccagccgccagcaggaggcgcgaggatggggcagggccgccgctgcttctgcggcggcggtgcctcgtggaaggacaagtgagatgtaggttaccatggttgagaccaatacggcacaatgttagagtgcagacatccaatgtaaatgttggagctggaagctatgaaggtggcgaagcaggtagccatggggaacatttggatagttctgctaccagagattcaaacaaaccaacaaaaccaccttcaggatctcgttaccctcaatccattgctgcagtgctacttctatgtgctctggcatccgcttttattgttttctttaaaggacaaccatctgcagttgtagcgatgcttgcaaagtcaggtttcacggcagcatttacactgatttttgtatctgagattggggataagacatttttcattgctgcacttcttgcgatgcaatatcagagagcattggttttacttgggtcaatggctgctctttccctaatgactattgtgagtgttataattggaaggatttttcagtctgtaccagcacaatttcaaacaacactacctataggagagtatgctgcgattgctctcctggcattttttggtttcaagtcaataaaagatgcatggcaacttccagataatgcaaatggaaaccttcagggaaactctgaatctggggagctggctgaggctgaggagcttgtcaaggagaaggtggctaaaaagttgactagtcctcttgaggtcctttggaagtctttcagccttgttttctttgcagaatggggagatcgctctatgctggctacaattgcgttaggtgctgctcagtctccttttggtgtcgcaagcggagccatagctggacacttggttgcaactttccttgcaattgttgggggagcattccttgccaactacctatctgagaagctggttggcctgataggaggagtactttttttgctgtttgctgttgccacattttttggtgtattctaatatctgaagaatttgtagcttgtaaaggattctgtaggtcaatttaatcctattttaaggttttaagggcaaaactgggccttgtccttgttgtttgtaactagtaggcattatcctccttttcaggagcgattcctttactattggaaaacaaattgacgtgaacacaatcaacacacacgcaagctgagctgcagcacgcaaactatcagctatatgccctagagagacgaattttatcatatactatagagtatatactatgtttataatgaaatgaataaagtattattctgttttgtgaaataaaaaaaaaaaaaaaaaaaaaaaaaaaaaa

SEQ ID NO: 68871 - DNA, 588 bp, Oryza sativa
  Clone ID: PAT_MRT4530_69595C.1
atttacttccctttcccctaaaactcttgctccaccaaaggaaattgagatcgcgtcgccgtcgggtgtcgaacacctggtgagcgaggggttgcaccgctgccgcagggcctctcgcccggtgtgggtggcgggatgtggagaggaggtgctcgtgttgccattgctgctgttggagggagtcgggagctgctgaacaaggaaaaccgggcgtcgaacatctgcgaccatcgccgaccgccggctgcccctttttcgaccacaccgcaccacgcgccatcaaacttcgccgttccgccactccgtgtggatggcaatgaagtcgaggaggatccctatgcttatctttaggaggatgcagaggatgacggcgctctgtaggtcttagttacggtcgttgcctgtggcaatgacatggccgctgccttatctatttctgctttggcatgtattccggaccgttcggtcctatgttctagtcaatgcctgcgggcctatgatgtaataatttatgctagacaatctttgtatgtgtacttggtatttcagcaatgtaacatgagtgattcctgttataaacccccaaac

SEQ ID NO: 68872 - DNA, 248 bp, Oryza sativa
  Clone ID: PAT_MRT4530_69596C.1
catagcgcctggacgccaccgcccacggacgcctaaacaccgacggcacgccggcctcggagtacgccaactccctcctgtgaaaccccgggtcagccgtgagacgcccaaccaccttcaactacgcgtacgactactcgacgacggccgccgccccggaggagaagagcgagcagccatacgggcacctaccctgcaccaccaccgtgctcgggaacctgtccctggggctcccgtatggcctccca

SEQ ID NO: 68873 - DNA, 636 bp, Oryza sativa
  Clone ID: PAT_MRT4530_69597C.1
ccggccgggaaaatcaacctcccatttacttccctttcccctaaaactcttgctccaccaaaggaaattgagatcgcgtcgccgtcgggtgtcgaacacctggtgagcgaggggttgcaccgctgccgcagggcctctcgcccggtgtgggtggcgggatgtgaagaggaggtgctcgtgttgccattgctgctgttggagggagtcgggagctgctgaacaaggaaaaccgggcgtcgaacatctgcgaccatcgccgaccgccggctgcccctttttcgaccacaccgcaccacgcgccatcaaacttcgccgttccgccactccgtgaatacggttggtactcactcttgctgttaaaaattttaatcagtggatggcaatgaagtcgaggaggatccctatgcttatctttaggaggatgcagaggatgacggcgctctgtaggtcttagttacggtcgttgcctgtggcaatgacatggccgctgccttatctatttctgctttggcatgtattccggaccgttcggtcctatgttctagtcaatgcctgcgggcctatgatgtaataatttatgctagacaatctttgtatgtgtacttggtatttcagcaatgtaacatgagtgattcc

SEQ ID NO: 68874 - DNA, 348 bp, Oryza sativa
  Clone ID: PAT_MRT4530_69598C.1
atgcagatcgagctcgtagcagttgtcgccgtccccttctcttctccttcgtgggctgccgcagtgcttggctccttagtggcgctcgaggccgcaaagcggcagatcgaagcggcttcgtccccgtcttcctcgcctctccactcccctgccctctccactactgttggtcaaggggctcccggcggcggcgcggagtgggtggccgagggcgattttgggagtggggggcaaactcatggtcggaggacaactgttgacggaaaacacgatggcctgggagatttgcttaattccagtgcaggtccaagcttgcatctagtgttaagagtttgccagctggtttga

SEQ ID NO: 68875 - DNA, 1977 bp, Oryza sativa
  Clone ID: PAT_MRT4530_69599C.1
atggtggaaacaacggtgagtggcggctggaggtcgatgggaggcagcggcgctcgggttcgcgtcggcgagcagcttccggtggtcttcggcgcaagggaaccggcggccgagaatagattgaggaaagtgcaggtgttttctgtcgacagaagaaggactgcaaagaccctgagaaacagggggcagattgactgcaccaggggtgtgagtagggagcaaagagccataaatagaaggaaaaaacttgagtcgagttctggttatgtcaagtcccgcaagaggctcctaaaagtttacgttgaatatcaaaagagactgaaggcattggatgcttttgaaaaaaatcaatgtgctattgaggaggaacgatttggtgaaggtctttgtgatcgagaagtttcgaccattgcttttaaagaggaatcatttggccatattgtcgaacccagccaacaaacttatcgaaccagtgctagtgatgatcttgatttgtctgacattgtcgtctcccttgctttgtttgatggagataagatgttatttgcattctcgggcatacctctaccatccagaagatctagagaagaactaacaagttttgtgacatcagctgatttggctagagcatttaatgagcatagaaatagggatgataatttgacggttgcagtgcgccttcctgataatacaactactgatgggttcttaggactatatgatcatgatattgttattgtcacatgcttgggtctcgaagaggtcagtcctatagattttaatggaacacctgcctgtcctgatggtagtcctcttctagctgctgggcgtgccttcaagtcaggcaatttaatggccatgagtgggtctgttcatagtggcaacacctgggttcctgatagtcaagatatctctaaggctgtacttagagggccacttcttggaaaggataacatatttcttgggatgaactttagtatttatgatgatgatgatcggactgtgaaatatgctttcctaccaatggaattacttcatgagcgcttgaagcattttgggatactcgatcctaaacatctccacttccggggatattcgttgcctaaaggtgtaaaaagcatagtaccttcagggtttatgaaaactatttaccggttaaaatcctttggctatcccatgccgccaccacttgtgcttgaacgtcttgtgagatcatttgcatgcacaggtttgattataaattggcatggaagcaaagctttgcgccctgtcatcctgacttcagccagtttgatcagtcataataaagacaagattgatagtaacctgaagattgaggtttttctcccaccgaatcaacgtggtagtgggatattggaattctatagtctaaactataatattgctattgtcagtctcaagcggaatttcaatgctgttcgcccagaaaacattttcagtggaacagtggaaatgccatctgaaaaagtagtagctataggacgagacgttactcttggaccattgatggccacaattggtaaagtgattcagcatggtaaaaacaattgcaaacttgattgcaaagatcttaaggtttccacatgtaaaatcacaaaggctgggatcggaggccctcttattaagtttgatgggagttttgttggcatgaacttttatgatggaagtagagtaactcctttcctaccaaaggataagattgttaaagttttaagcacagtgaataatttaccatcggaaagtgggcgtaaccatcctatgcccatagatgttgacgatggcacaaagaaaaatagcttagattattatattcaacaatcaacttatatgggaaatattatattggatgacaggtggcctgtgccagagccatactggtatcatggctcccttgatgttgatatgcattatatacccaagcttattggaagggtttctctagtagactcatgctag

SEQ ID NO: 68876 - DNA, 726 bp, Oryza sativa
  Clone ID: PAT_MRT4530_6959C.1
atgtcctttgtcattggatttgggactgcccctttttatgcccagattcctcatgatcgtcatgaagagaggtgccgagtcaaagtcactttgaacagtagtagtgaagatattccatcggtgatgttcgaagctggaggaagaaactatatccacgcatgtcaggaggtggcaaggatcgccataggagagctccgtgatcgctacagtgatcagttggccgacactgagtatcgttaccatccccgccaaccccaggggagtgaccgtggcagttaccttgagactgaaggaattgagaatgatgttaccaccagacatttggttgagatgctgtgggctatggatgaaagtcgtgcggagactgtgttagtagctcaagatcgtgaagattggaatcgtggtaagatttgcaagctagaagacaaggtggatcgtttggagaaggaactagccgcgttgaagggagaagcaccgccgcagaaggccaagattcgtcttaccgcaaggaagagagctttatttgtcccacgctatcaattggcgccaaaggtccgtgtggtggagaaagaagtagccccagcggatcctccggtcgtcaatgtaagtgatgatgaaggagaagaatcgaagcgcacccattccaagatcgagtggggagcaactcaagatgatgaagacgagccgaacgagccttcaatcaactccgatgctcggaagaactag

SEQ ID NO: 68877 - DNA, 3306 bp, Oryza sativa
  Clone ID: PAT_MRT4530_695C.1
atgctgtcggtggtggtcttgctgctgctagctgcagctctgcccatgagctgcagcaatgacactgacctcactgctctacttgctttcagagctcaggtgtctgatcctctcggcatccttcgtgttaactggacaaccggcacatccttctgcagctggatcggcgtctcctgcagccaccatcgtcggcgacggcgcgccgtcgctgccttggagctccccaacattcctctacatggcatggttacccctcatcttggtaatctctccttcctgtctttcatcaatctcaccaacacggggctagaaggccccatcccagatgatcttggaaggttaactcgtctcagggttcttgatctcagtagaaacagattgtcaggcagtgtaccatcatccataggaaatttgaccagaatccaagttcttgttctaagctacaacaacctgtcagggcacatcttaacagagctaggaaacctgcatgacattaggtacatgagtttcatcaagaatgacttgagtgggaacatacctgaaaacatattcaacaacacacctctgttaacctacataaactttgggaacaatagcttgtcaggatccataccagatggaatcggttcatcattgcccaatcttgaatacctatgcttgcatgtgaatcagctcgaggggccagtgcctccctccatattcaacaagtctagactgcaagagctgttcctatggggaaactacaagctcactggacctatacctgacaatggaagcttcagtcttcccatgttgagatggatcgatctccattggaacagtttcagaggccagattcctactggattggcagcatgtcgacatctcgagagaattaatctgatccacaattcattcacagatgttttgccaacatggttagctaagctaccaaagctaattgtcatcgccttgggcaacaacaacattttcggaccaatcccaaacgtgcttggtaatctcactgggcttcttcatctagagcttgcattctgtaatctaactggtgtaattccaccaggattggtacacatgagaaaactttcaagattgcatctctcacacaatcaactaactggcccatttcctgcttttgttggtaacctaactgaactatcttttctggttgtgaaatccaactcattgacaggatctgtaccagccacatttgggaatagcaaagccctgaacatagtgagcatcggatggaacttgcttcatggtgggcttgatttcttgccaactctttccaattgcagacaactccaaactctcgacatatcgaatagtttctttactggtaatctccctgactatatgggcaacttctctaatcagttggtaattttttttgcatttggcaaccagttaactggtggcatccctgcatctctgtcaaatctaagtgctctcaacttattggatctttcaaacaaccaaatgagcaatataattccagaatccatcatgatgttgaaaaaccttcggatgcttgacttctccggcaatagcttgtctggtcccataccaacagaaatctctgctctgaacagcttagaacgattgcttcttcacgacaataaattatccggtgttttaccacttggccttggtaatctcactaacctgcaatacatttcgctgtccaataaccagttcttttcagttataccaccaagcattttccaccttaactatcttcttgtaatcaatatgtctcacaattccttgactggtttattaccattaccagatgatattagcagcttgacacaaattaaccagattgatctatctgctaaccatttgttcggtagccttccggcttcactcgggaagcttcaaatgctaacctacttgaatttgtcatataacatgtttgatgactcaattccagactctttcaggaaactatcaaatatagccatactggacctgtcctccaacaatttatctggtagaattcccagctactttgccaatttgacctacctcacaaacgttaatttctccttcaataatctacaaggtcaggtaccagaaggaggtgtgttcttgaacattactatgcagtctttaatgggtaatcctgggctgtgtggtgcctctcgtttaggactttcaccatgcctgggaaattctcactcagctcatgcacacatcctaaagtttgtattccctgcaattgtggcagtaggacttgtagttgcaacttgcttgtacctactgagcagaaagaaaaatgcaaagcagagggaggtaataatggattctgcaatgatggttgatgctgtcagccacaagataatctcctactatgatattgtccgtgcaactgataatttcagtgagcagaatttgttgggatcaggaagctttggcaaggtttacaagggccagctgagtgacaatttggttgtcgcaataaaagtccttaacatgcagctagaagaagctacgaggagttttgattccgaatgccgagtactgcgcatggctcggcaccgcaacttgatgagaattctcaacacctgttccaatctggacttcagagcattgttgcttgagttcatgcctaatgggagcttacagaaacacctacactcggaagggatgccgcgccttgggttcctcaagagattggacactatgctggatgtgtctatggcaatggattacttacacaaccagcactatgaggttgtgctgcattgtgacttgaaacctagcaacgtgctatttgatgatgagatgacagcacatgttgccgatttcggcattgcgaaactgttgctaggtgatgagagctccatggtttcagtaagcatgcttggaacaattgggtacatggcacatgagtattgttccatggctaaagcctcgaggaagagcgatgtgttcagctacgggatcatgctactggaagttttcactgggaagatgccgacagatcccatgtttgctggagagctgagcctcagggagtgggttcatcaagcatttccactgaggcttactgatgttgtggacagcaatcttctgcaggactgtgacaaagattgtggtactaaccacaatgataatgcacatgaagatgctgcttctagcaggctgatcactgaccttcttgtaccaatatttgaggtgggcctaatgtgttgcagccatgcacctgatgaaaggccaactatgaaggatgttgttgtgaagttggagaggataaaaagggactatgctgattctacagggagccagaggactgaataa

SEQ ID NO: 68878 - DNA, 3658 bp, Oryza sativa
  Clone ID: PAT_MRT4530_69600C.1
ggccggggcgggtggcgcgggtgggggctccgggggggcgccttacgcgttggcggcgctcccgttccggcggccgccggccatggcgctgtcggcgtccaacagcgagtgcgtgggcgacctggacggggagcagatcaggaaggccaagctgataagcctcggcaggggcaaccgcttcgccgccgtccgggacgacgagcaaaccgcggatgcgctctcccgccgctaccgggactacaactttcttgattaccatgagaaagttattgatggcttctatgacatttttggcccctctatggaatcatcaaagcaagggaagatgccatcactagcagatcttcaaacgggcataggcgacctgggttttgaagtcatcgtaatcaatcgtgccattgataccaccttacaggagatggaacaagttgcacaatgtatcctgcttgactttcctgttgcaaatattgcagccttagttcaaagaatagccgagcttgttacagatcacatgggtggacctgtgaaagatgcaaatgacatgctcactagatggctagagaaaagcactgagctaagaacctcactacacacaagtttgttgcctattggctgcatcaagataggtctgtctcgtcaccgtgccctacttttcaagattctcgctgatagtgttggcattccttgcaagcttgtcaaagggagtaattatactggtgatgatgatgatgctatcaacataataaagatgaatgaaagggagtttttggttgatctcatggctgctcccggtactcttattccatcagatgtcttaagttggaagggcaactcattaaattctaatgcaagactcacccagaatccattggctgggtcatcaagtacaactgattctaatctcagtgccaatgcattaccacccggacataaaggtggccaactgcctttatttagcagtggcgattggatattggccagtcaatctggatatgaaaaagatggagccaccacatcttcacaggcctcttcaagtggcacaacatctgttgctgctggaagcgcttttgatagttcttggacattagtttctcatggacaatcagatgatccatcaacctctgctggtatgtcagcacagcagaaagttatacttccaggtggagaacatccatggaatgagaatataaatgcgcgaaatgagaatataaaacttgtttcagatttacaagggaattcagagtccatcaacttatttgccgaccttaatccttttgggggtagggagcccaaaaggacttcagtgccattaaatgggccagataatagaaataatgagttgcaaagacgcagagagaatgtagtccctagcacacgaagaccccagcagcgattagttatgaaaaactggtctccttacaatgatgtttccaacaacaagcagtacaattatgttgaggattcatttgcacgtagaaatattggtgataatgctgcatcatcatctcaggtggcacggccatctgcaaaaaatactaatcttaatgttggagtgcgcactgatacaccatacatggcagctcataattatgataatagtatggctggttcctctgcaatgaagatgacttctacagctgggattgggaaggttcctgataaggttctgtacggtgatttggacaagggccttactaattctagactgggggatcaaccaccgatagaaagacataaatggggcaattctgtagaaggaaggattccaacaggcacagttcacaatcaagcaaaagaacacaaggagaacttcgatggaaagcaagacaataagaagttacatcctgatccaaagaaatccccacttgacagattcatggacacatcaatgccatcaaggaaccctgaatccgtttcaccatcctttgctaggtcacacaagctagacaccatgttcgacgatgtgtctgaatgtgaaattcattgggaagatcttgtgattggtgaaaggattggcttaggttcatatggagaggtgtaccgtgctgattggaatggaacagaagtagctgtcaagaaattcttggatcaagatttctatggtgatgctttggatgaattccggagtgaagtgcggattatgcgtcgactgcgtcatccaaatattgttctcttcatgggtgctgttactcgtcctccaaacttatctattgtatctgagtatcttccaaggggaagcttatataagatccttcaccgtcctaattgccaaattgacgagaagcgtagaattaaaatggcccttgatgtggccaaaggaatgaattgcctccatattagtgtaccaacaattgttcatcgggatcttaaatcaccaaacttgctggttgacaacaactggaatgtgaaggtttgtgattttggactttcacgcttgaagcacagtacattcttatcatccaaatccactgctggaactccggagtggatggcacctgaggtcttgcggaatgaacaatcaaatgaaaagtgtgatgtttacagctttggtgtcatcttgtgggaattagcaacacttaggatgccatggagtggaatgaatccaatgcaagttgttggggcagtcggcttccaggacaagcggctcgatattcccaaggaaattgatcctctagttgcaaggatcatatgggaatgctggcagaaggatccaaatttgcggccctcgtttgcacagttaaccagtgctttgaagactgtccaaaggctagtaaccccttctcaccaggagtcccagagccctcctgtgcctcaagaaatatgggtgaattcttccaccccttgatgttgaggggcattccactctcaaaattgtgagtaattattgatgattgttgctgttaagtttgttcaagtctgcaaatgtgggcgcactgtagattctagcggccctaatggtagacatccctgctgccgcgacaaaagaacccagcagtagagtatgtatagagactatagtcatcgaccaaaacgatgacccgaagaagaaatccagtctgtggcatctcatttttcatgttcccagtttgcctttgtaaaaccttttggattcgagccctctggaaagcagtgagagctcgtggcgttggattaagaaggatctgtgtctgactgtgtttacaagtggattggataattgttgctgcagaacatgacatcttggaagttaaaaatgttgtaatatgcaatttttttaaacttgcaattcgaatgcagtatatgaacatgatggtaaaaaaaaaaaaaaaataaattaatagtattttataaagaaaaataatgtatataaataaaaaatattttttatatatttggggtgttcttttttaaggtccctttttttttatacctgttatttctatttatttttttttttttatattttaccttaatatttatatctcttttccgttcttttaaataatttttattttttatatatacttactatatttatatttttttttcttcttttgtaatatatattactttttatatttatttgataatttttcattatatgttactttaccctcttatttttatactattctttttttctctattttatttattaaatattcacttatttattttt

SEQ ID NO: 68879 - DNA, 4578 bp, Oryza sativa
  Clone ID: PAT_MRT4530_69601C.1
atggagcagcaacttggcgagctgatgactacgatgacttcaattcagaagcagaacgaggctatcatgatttcggtggaatccatcgaggaaatcaagccgatggttgtggagctagcgggatggaagccgacggtagagaaggtggtggcggaattgcgggacgaggtgggcgacatccgcgctcagctcgagaagatggtgaagcagcccgcgccgtccccaaatcaagtcaagtcggagtccgtcaagccggatcccgtcaagccggaggaaatggctccacgtcttccgacgccgcctggggcaaagcggctgccgaagaggacggtggaaaaccgaccttccacgtcggcgttcggcaaaggagcgcctaggcaattttgccaccacgaggcttcgaatcaccgggggaaggctgtgtggggaaacaactccccacgaactcccccggtcaagggtgcgtataactctacttcccctttccattcagttcctgagtcgagtgggggatgccgtgggtttagttttgggggtcaaatttctgcatctagagtagagtgcccagagtttgcaggggaaaatcctaaggcctggaaactgaagtgtgagacttattttgggctgtgtggaactccttctgatcactggattggtgtggcgatactccagttctcgggtactgcattgacttggttgcagtcgacccgagctcatgaagttagtgggagttgggaggaattcgctgcctgggtgtgtgggaaatttggtagagaggagttccaaagtttgattcgacagttcaataggttaaggcaaactagcactgtgtgggcatatgcagaaaagttcaacgagttgatgcatgggttacatgcgcatcatccctcgtggaattcggttttctttgttactcagttcatggatgggttgaaggcagaagtgagatctgctgttgttttacattgcccaaccgatttggatactgccgtggaattagcttgtttgcaagaggaagtactggaacagaatcgcaaggaggggcgtcgctttgagccgactgggggagcccgaggacccttgcacactggtgttggaccttttgtgccaaagggagatgataagctaactactgaagtttctgctactgataaagttgcagctctcagggctttccatcgagcgaaggggctttgtcacacttgcggggaaaagtggagtcgtgatcatcgttgtggccctactgtgcagctgcatgtgattgaagaagtgctacagcttttttctgatgaggttcctgaggaagtggagtcatctactagccccctgctgaatcagatgatggtgagttattggccatttctcgagaagctgtacttggtattgagtcttctcgtatgctcgctgactcctctgaaggtgaaaatcgcggatggtggtatcttgcaatgttgtcaggagtttcctaattgtcattggtgggtacaaggggagtccttcagcactaatcttaaggtgttaccgttgggctgttatgaggtcattctgggcatggattggttagagaaacacagtccaatgcaaattgattggaagcttaagaccatacaatttgtgttggacagcaggcaggttctgttacagggtgtggtgccggatgttagctgttgcccggttatttcggctgatcaacttaagggtctcttccatcataatgcagtcctacacacagttgaactttgtgccagtgaagctgttgcaatcagtcttgttctgccaagagaagtggagggattgcttcaggaatttgccaaggtttttgatgaaccctctggcttgccaccaccaagagcttttgaccactctattcccttgctgcctggagcccaaccagtaaatttgagaccgtatcgttacagtccggcacaaaaggatgagattgaacgacaggttgctgacatgctcaaacaaggagtgatacaacgcagtgccagtcctttctcctctcccgtgttgcttgtgcagaagaaggatggtacttggcgattttgcattgattatagacatcttaatgctatcactgttaagaatcggtaccctctgcctattatagatgagttacttgatgagttggcacgagcttgttggtttacgagtttggatttgcgagccggttatcaccagattcgtatgaagccagaagacgaacataaaaccgctttcaagacacataatggccattacgagttccgggttatgtcttacggattgaccggcgcaccagcaacgtttcaaggtataatgaatacaatctttgagccattcttgcgtaaaggtgtgttagtcttcattgatgacattttgatctatactcggactttggaggaacatgtgcgcttgttaagggctgtatttgatattctctctgccaatcagttgcaagttaagagatctaagtgtgtgtttgctcggtcatctctcacttatttgggacatgtcatcagtgctgaaggggtgtcaaccgatgctaagaacattcaggcagtactgcagtggccggtgccttctaatgtcaaggaggtcagaggatttcttgggttagcggggtattaccgcaaatttgttcgccattttgggattctgagtcgccccctgactaattttctcaagaagaatgttattttccattggactgctgaaactcaagcttcttttgatgccctaaagactgccttgacttcagctccagttctcgcattgccggatttctcaaagacatttgaaattgagacagatgcttcagctgtgggtgttggtgctgtacttatgcaggagggacatcctttggcatttttaagcaaagcgcttggtcctcgcaatcgtggcttgtcgacttatgagaaggaatgcttggcgattctcctagcaattgatcattggcgctcgtatctgcagggtgctgagtttgtgattcgaactgatcaacgtagtctcattcatctcggagatcaaaaattagccacaccttggcagcaaaaagccttaaccaagttgatgggactgcagtatcgtttggtttacaagaaaggtagtgagaacagcgccgctgatgcgttgtcccgacgagtggccgatgattcaacagaagtattgtctctttcagtttgtattccagcttggcttgaggaagttcaaaaggggtatgatcaagatcctcattcttctcagctggtggctcaactgacactcaaatctgacgcattacctcatttttccttggaatctgtgggtggacattcaggggtacaggttacctactcccgtgtcaagcgtttgtttgcttggacagggctcaggaaagcagtaaagacatatgtggccaattgcactgtttgtcaacaagcgaaaacagaacgggttcgctaccctggccttttgcagtcgcttcctgttccggatcatgcatggcaaatggtatccttggattttattgaaggtctgccgacttcctcgggttttgattgcattatggtggtcgttgataagttctctaaatatgcccattttgtgcctttagctcatccattctcagcttttgatgtggcacaagcttatctctctaacatttataagctccatggactgcctcagtctttgatctcagatcatgaccggatctttacaagcactctatggaccactttgtttaaattggcagacactcagctgtgtatgagtacggcctatcatcctcagactgacgggcagactgtacgcgtcaatcagtgtttggaaacattcttgcggtgctttgtgcatgcttgccctaagaaatggtctcaatggttggctcttgcggaattttggtataacacctctctgcactcagctttgggaacttctccttttgaggtattgtatggccatcctcctcggcactttggtattgttgatatcgcagcctgtgcagtgccggatttgcaagaatggttgaaggaatgcactgttattacttcgttgttgcatcaacatctccaccgcgctcgccagcgcatgaaacatcaagcagacaagaagcgtttggagcggcagtttgctgtcggagactgggtgtttatgaaagtgcaacctcatgcgcaatcctcggtggcggtgactgctcgggtgggggcggtggcttatcggttggcgctgcctgcttcttctatgattcacccggtggtgcatgtgtcccaacttcggaaggcatcggaaccagcttcttctacggtagctaccctacctccagcggtggaagaagcagatcctgttccagtgcgagtgctagcacgcagactgatacgtcggggatcagcggctgttgatcaagtcaaggtttgctggtcgggctgtccaacatcggaggcaacctgggaagatctggagcggctcaaggagcgttaccctgctgctccggcttggggacaagccggatgtgaaggaggggaggatgttaccaaccctgtcaagaccaggccgaagagctcaagacagcgacagcccaacactcgtataattgggccagactgggttgcgtaa

SEQ ID NO: 68880 - DNA, 671 bp, Oryza sativa
  Clone ID: PAT_MRT4530_69602C.1
atatgaaaggatgacaatcctaattgttgcacaaaaaaaaataagagatgacctatcaagaaagaacaaagatacgtgacatattgaaaaaccgcaggagatacaagcatacaaatgcatccacgatgctgacaaactttactttttttttttttttttgaacaggtatcaaccataatcttcgctccttttcacaaatcttataagctggcatcaccaaataaattagggacacccaccctaagctagcgtggctgataggatcatcggcaacccgacaaacaaaaacacttatctaagtggatcaatcctaagtggtcaaacaacagaaccacaagccagacatccttaactacaactcacaacatttcgaatctgggggcaccttgggtgttaacatatcgaagcagatcaaataggagtggaacgcataaataaaggggacccatatgtaccattatctccctccagcctccaggatggcgaagtccaaagcaacggacacagcacacagcggtatgatggggttaacaccgggggcgcccacggtaaggcgacgcccagtctatacctcccctgggggcacacccaggcggtctctacgccaagtggtgcggacagcgttgggtcagacccggggaaattcccggaccggtacctgcaggcgtacc

SEQ ID NO: 68881 - DNA, 168 bp, Oryza sativa
  Clone ID: PAT_MRT4530_69603C.1
atgcgtcttttggaggcggtgcagctccctggtgaccgtcaatctgtcatccactttgttggccttggcaacagcatcgatatggctacaaggcagcgcttggtgactcaggcatacaattttctggcagaatcaccgagaacaactggcacgactcgaggagcttga

SEQ ID NO: 68882 - DNA, 4116 bp, Oryza sativa
  Clone ID: PAT_MRT4530_69604C.1
atggagcagcaactcggcgagctgatgactgcgatgacttccattcagaagcagaacgaggctatcaggatttcggtgggatccatcgaggaaatcaagccgatggtcgtggagctagcgggatggaagccgacggttgagaaggcggtggcggaattgcgggacgaggtgggcgacatccgcgctcagctcgagaagatggtgaagcagcccgcgtcgtctccaaatcaagtcaagtcggagtccgtcaagccggatcccgtcaagccggaggaaatggctccactacttccgacgccgcctggggcaaagcggctgccggagaggacagtggaggaccgaccttccacgtcggcattcggcgaaggagcgcctgggcaattttgccaccacgaggcttcgaatcaccgggggaaggctgtgtggggaaaaaactccccacgaactccctcggtcaagggtgcgtataactctacttcccctttccattcagttcctgagtcgagtgggggatgccgtgggttcagttttgggggtcaaatttctacatctagagtagagtgcccagagtttgcaggggaaaatcctaaggcctggaaactgaagtgtgagacttattttgggttgtgtggaactccctctgatcactggattggtgtggcgatactccagttttcgggtactgcattgacttggttgcagtcgacccgagctcatgaagttagtgggagttgggaggaattcgcttcttggttgtgtgggaaatttggtagagaggagttccaaagtttgattcaacagttcaataggttaaggcaaactggaattgtgtgggcatatgcagaaaagttcaacgagttgatgcatgggttacatgcgcatcatccctcgtggaattctgttttctttgttactcaattcatggatgggttgaaggcggaagtgagatttgctgttgttttacatcgcccaaccgatttggatactgccgtggaattagcttgtttgcaggaggaagtactggaacagaatcgcaaggaggggcatcgctttgagccgactgggggagcccgaggacccttgcgcactagtgctggaccttttgtgccgaagggagatgataagctaactactgaagtttctgctgctgataaagttgcagctctcagggctttccgtcgagcaaaggggctttgttacacttgcggggaaaagtggagtcgtgatcatcgttgtggccctactgtgcagctgcatgtgattgaagaagtgctgcagctgttttctgatgaggttcctgaggaagtggaatcatctactagcccccctgctgaatcagatgatggagagttattggccatttctcgagaagttgtacttggtattgagtcttctcgtacggtgcgtttgcaaggattgatccaacgacatgaggtcttgatgttggttgattcaggaagctctcacagctttatcagtgagaagttagctaataaactgcagggtgtgcgcagctcgctgactcctctgaaggtgaaaatcgcggatgggggtgtcttgcaatgttgtcaggagttccctaattttcattggtgggtacaaggggagtccttcagcactaatcttaaggtgttaccgttgggctgttatgaggtcattctgggcatggattggttagagaaacacagtccaatgcaaattgattggaagcttaagaccatacaatttgtgttggacagcaggcaggttctgttacaaggtgtggtgccggatgttagctgttgcccggttatttcaactgatcaacttaagggtctcttccatcataatgcagtcttacacacagttgaactttgtaccagtgaagctattacagaatttgccaaggattttgatgaaccctctggtttgccaccaccaagagcttttgaccactctattcccttgctgcctggagcccaaccagtaaatttgagaccgtaccgttacagtccagcacaaaaggatgagattgaacgacaggttgctgacatgctcaaacaaggagtgatacaacgcagtgccagtcctttctcctctcccgtgttgcttgtgcagaagaaggacggtacttggcgattttgcattgattatagacatctcaatgctatcactgttaagaatcggtaccctctgcccattatagatgagttacttgatgagttggcaggagcttgttggtttacgagtttggacttgcgagccggttaccaccaaattcgtatgaagccagaagacgaacataaaaccgctttcaagacacatcatggccattacgagttccgggttatgtcttacggattgaccggtgcaccagcaacgtttcaaggtataatgaatacaatctttgagccattcttgcgtaaaggtgtgttagtcttcattgatgacattttgatttacactcggactttggaggaacatgtgcgcttgttaagggctgtatttgatattctctcttccaatcagttgcaagtcaagagatcaaagtgtgtgtttgctcagtcatctctcacttatttgggacatgtcattagtgctgaaggggtgtcaaccgatgctaagaacattcaggcagttctgcagtggccgttgccttctaatgtcaaggaggtcagaggatttcttgggttagcggggtattactgcaaatttgttcgccattttgggattctgagtcgccccctgactaatttgctcaaggagaatgttgttttccattggactgctgaaactcaagcttcttttgatgctctaaagactgccttgacttcagctccagttctcgcattgccggatttctcaaagacatttgaaattgagacatatgcttcagctgtgggtgttggtgctgtacttatgcaggagggacatcctttggcatttttaagcaaagcgcttggtcctcgcaatcgtggcttgtcgacttatgagaaggaatgcttggcgattctcctagcaattgatcattggcgctcgtatctgcagggtgctgagtttgtgattcgaactgatcaacgtagtctcattcatctcggagatcaaaaattagccacagcttggcagcaaaaagccttaactaagttgatgggactgcagtatcgtttggtttacaagaaaggtagtgagaacaacgccactgatgcgttgtcccgacgagtggccgatgattcaacagaagtattgtctctttcagtttgtattccagtttggcttgaggaagttcaaaaggggtatgatcaagatcctcattcttctcagctggtggctcaactgacactcaaatctgacgcattacctcatttttctttggaatctggtattttgcgctataaggggcgagtttggattggtgctaacccgcacgtgcagtctcaaatcttacaatctttacatgctggggcagtggatggacattcgggggtacaggttacctattcccgtatcaagcgtttgtttgcttggacagggctcaggaaggcagtaaagacatatgtggccaattgcactgtttgtcaacaagcgaaaacagaacgggttcgttaccctggccttttgcagccgcttcctgttccggatcatgcatggcaaatggtatccttggattttattgaaggtctgccgacttcctcgggttttgattgcattatggtgactgctcgggtgggggcggtggcatatcggttggcgctgcctgcttcttctatgattcacccggtggtgcatgtgtcccaacttcggaaggcatcggaaccagcttcttctgaggtcgctaacctgcctccggcggtggaagaagcagatcctgttccagtgcgagtgctagcacgcagactggtacgtcggggatcaacggctgttgatcaagtcaaggtttgctggtcgggctgtccaacatcggaggcaacctgggaagatctggagcggctcaaggagcgttaccctgctgctccggcttggggacaagccggatgtgaaggaggggaggatgttaccaaccctgtcaagaccaggccgaagagctcaagacagcgacggcccaacactcgtataattgggccagactgggttgcgtaa

SEQ ID NO: 68883 - DNA, 348 bp, Oryza sativa
  Clone ID: PAT_MRT4530_69605C.1
gggttgcaaattactaatagttcctgcaaaagaaagcaagggctctctcaatcaaagctgctgtttgcatttacttcgactttggtcgattaggcaggagagtgttcatgtccaggtcagttatcgaccaagaaaatattaggcagcacatctgcttgtcaaagcagttgatccttcagtgacgactagacgatggagtgggaaaaaaaacacaaccaggactgacaaaacagtataggagttgccatagttaagataactaacgtgtcaggccaggaacagtgagtgacaataagtagcattctggaatgaatgattcttcagatcacgtggaaacggttgttttgc

SEQ ID NO: 68884 - DNA, 489 bp, Oryza sativa
  Clone ID: PAT_MRT4530_69606C.1
atgccagcatggactgtggatgaatgggacacgctcactaggggtgggcatttgatcagctttctttactgtcatatactcatcgcagattggctttggcgctgctcatcaccgtcggggtggaggaggcaccatcagctcgggcttggcagatgggggcttgaggcctccgggcttcggcagcatactgaaggtggcagcgccaaggcagaggcgacagccatggcgcgcgcggtggatgcctgggcgatgtcggcgcggtggaggctggaggcggtgctggtggaccggcggatggcgggcggtggcgacgacggcgcggtggagacaggaggcggagggcgggcagtggcggcgctggcacggtgctggaggcggcgctggcatggtgctggaggcggtgccggcgcggtggaggcaggaggcggagggcagaccggcggaggcgtcgagcgcgatggtgagaagtgcagcgcagcgctgtggtga

SEQ ID NO: 68885 - DNA, 2979 bp, Oryza sativa
  Clone ID: PAT_MRT4530_69607C.1
atggcggacagggcatggatgaataaagagagatattgtgcgtcatacattgaaggagtcgatatattcatgaaagctgctaagaagaatgctgcatctaagaagaccaaagatattagatatttggaagagatgttgcatcatgctgaacctgaggttgttgctgggtccgctcatgggttggataactttgatgcattgaaaaaggcagcgaatgatcttttgtacgatgaggcaaagggctgtgagaaggatttcacattgttgcggacggtgcttgagcttatgagattgaaggccagaaatgatgcaagacagtggaatgaatttgacagaaagtatcataagtttgcagaggacccaagaaacggaccacgacaacttggcaatgacatggatgtgtttctggagcctttgctggaggatatgcgcgatttgtgggaacacgggatccgagtttgggacgaattcctgcgggagtacttcacgctacatgcaattatctttgtcaccgtcaacgacttgcccacactgttttccctattggcacagatcaaggaaaagaagggttgcgttatttgtgtggattgtaccatgtacaggtatcttaagggatcgaagaagctagtgtacatgtggcaccggcgtttcttaagaaagaatcactcgtaccgctcccaagcagaatatttcgacggtactgttgaggaagacatacgccattctatcgatgtcatgcacctagagaaaaatgtcttcgatagcaccattgggactatactggacataccaactaagaccaaggatgggccgaaatcatgtaaggacctcgtggatatgcaaataaggaaagagcttcatcctgtggatgaagccggcgtgtctgtggacaactttgggctgacaattgtcgactttgacaacgtaggccacaaggatgacccatggctcctccattcgtgcctcctactcctcctctccgccgctgcctcctcctcctcctcttcgctgccgccgccgccagatccagctcccaccgtcattctctctgccaccgccgggtcctcgtcgtccacgccgcctccacctcggccagccgcctacacatcgggagtcgccgccgccggccgcggggcatcgtcgttgccgtcgccgggactcgtcgtcgtgctgggaccttctcggccgcatcaccgccaggacgccgccgccgccgcgcctggactcgtctcgtcgtcgccgccgccgcatcctcctcctctcggcggccgcgccgagacgccgggctgccgcaccgccacgccgagaagcccacaagctaagaggccgagacgccaggtcgtcatcgtcgtcatcgtccggcccaccgcaccacctcaatctcgtcgtcgccgtcgccgcaagcctccagacaaacccacccaagagcaacccacgggtgacaagggcaaggaaactcagctagtcatggaggaagatatttgcacgcaagtagtcgtggaggaatcttcgttgtctagctcaagtgaaccaggcagtggatcgtatcactcgccgagtgacccccatccttctcttggaaagaagagaaagggcggtagcaacaatgaagttgactccgactacgttccccccgaacaggtggaactgggtgcgtgcaagaacaccggccttcatcagaagctccaggaggtagctgtcaatatgaagaacattgtcacgcagcaacaggccgggacgttcgtgccagatagagaccgggacgagctgacctatgccttgggaaaatcagagcaatctggccgtgtatggggagtttcctcaaagactaactggaaggatggattcaaacaggatgctcatacctacaagaagcgtgatcgctacaaggaagagattgactctcaggctagggcagcagctcatgatgaatgcaatatatactggagtcagaaaatgatgcacggtgctgctgttttagagcctgagccgagctatccttttgatgatgtaacggaggatactccgtgcaagctcttgattccggtcggcagggcgggaaagaaaatactcgttgcaactgggaggttcataccaggccacaggtttcattgccaagacattccggatgactacgccaaggtagaggaccagagccacctgttgcatcacctccaggaccagagcctcctgttgcatcacctcggacagaaaaggatgcagaagaacaatcgcaaagaattatcttcgttggcggccgacctaaggctaacgcaagtggagatacttctttgctggcggctgcgttatgtccgccgccagcaaagacatgtcttcgctggcggccgtcctaaggctaccgccagagaagacatctctttgctggcgggtgttcctttctcaaccgccagcgaagatgcattttggctggcgctgctgaagacccttcgagtaagaggtcacacatcacacatcccgttcgacgtctggtacattccgtacctacggcgggcgaagctgttcgtgttcgtcaccatggcgcaacgcccgatgcctctgtacaacgctgcggctctgacggcccttgtcgacatatggcgcccagagactcacacctttcacctacccttcggggagttgacggtcacactggaggacgtcgccatgatccagggtcttcctatacgaggtcaggcagtcacaggtgacacggcctcagggaactggaggcagcgggtggaggagtacctcggtgtggagcctccagtggcagctgatggtcagcggctgacgaagacctccggtgtgcctctgagttggttgtgtgccaacttctcccagtgtctcaccgacgcggacgaggacacggtgcagcgatactgcagggcgtatgtgttatacatatttggcagtattctgttccctgactctggtggagacatggcttcttggatgtggttgccgttactggcggactag

SEQ ID NO: 68886 - DNA, 334 bp, Oryza sativa
  Clone ID: PAT_MRT4530_69608C.1
ccgtttatattcaggaggtgaagggttatgcaacagagggatcataataacaagagacgggggaaaatctacaacatgatcagaccaataaccctgtactgccatcttttgttgctgtgcaacatgatcagaccaataacccagatttgtcatcttctagtgctgtgcaacatgaccacaccaatttgccagacctgccatttcttgtcgttgttcaacatgatcagaccaatacgtcacaattgccatcttctgatgctgtgcaacatgatcagaccactaagccataattgccatcttctgttgctgcacatgatgacctaaccagtgagcc

SEQ ID NO: 68887 - DNA, 126 bp, Oryza sativa
  Clone ID: PAT_MRT4530_69609C.1
atgggccgggagcaactggcgcgcgcgcgccagctagcaacccctgatgctatccctgtccaaggtgccgccgctgactgctcgttcggcaccgcgttcgcgccaatggtcgccgtcggctactga

SEQ ID NO: 68888 - DNA, 165 bp, Oryza sativa
  unsure (1)..(165): unsure at all n locations
  Clone ID: PAT_MRT4530_6960C.1
gctgcgccaccagacaagatcatgcaaggacgccttctaatggtgcgcctgaacgatcataagtgggtagcgagggcgtcttcttcgcggaggagctcatggacnacctccaggacaagttcttctcccacttgaccatcctcaagatcgggaacaaggacagga

SEQ ID NO: 68889 - DNA, 2679 bp, Oryza sativa
  Clone ID: PAT_MRT4530_69610C.1
tcaaaaatctgtgaatagtgtcatgttctcatattgattgtatgcctcgacatcttcgacatcatcaactcctaaaatcttttgttttcccgaaataactatgtctttcttcaaatgagatgggtatgtcacatagaaaacttgagcgacccgatcggcaagcacccatgggtcatccttgtggcctacgttgtcaaagtcaactattgtcagcccaaaattgtccacagacacgccagctgggtgtttcacccattggcaccaaaacagtggaatctgcatatttggcccgtagtctagttcgcagattttttctatgaatccatagtatgtgctcttttgcccagttgtgtcgattgcttctactcgaatgccactgttttggcatgcactccttttgtcttttgcttttgtgtaaaacgtgtatccattcagatcatatgcttgccacaaggtatacacacttgatggcccgtcagtcagcattttaattgttctttcttccatggtatggccatctggtagatcgaggttcttgaaccattcagtaaagtgatgcttgtgtttcttcatgatccatgcattagatcgccccacatttgttgcttgtaattcatgcaagtgttgctctatgtacggctccactattgcgagttgctgcagcacagtgaaatgagcatctttcacttttttgtagtcattgtcgtggattcttttcttcccttttgttcctttcccagataatcttgcttcatgtcgaggtaccggtaaaccaattgctttcccatcttttaggtaatcaatgcaacactcaacgacctcctcggttgtgtaaccctctatcatggatccctctgggtgggcgcggttccatacgtagccttttagaatggacatgtatcgttcaaaagaccacatctgatgcaggtacaggggcccaagtgcaattatttgaggcatgatatgaactatgaggtgttgcatcatatcgaaaaatgatggagggaaacacatctcaagctcgcacactgtctgtatagcgaaagcccagagaggacctaactcttcaagatcaattactttctgagatatgcaattgaagaaataacacagcttagtgatgaccagctttacgtgaactggttcaactactctaattgcaatggcgaggaatacttcatccacatgatgaagctctttccttatttgcatatccacgaggtccttacgtgatttcagcccatccttggtcttagttggtatgtccagtatagtcccaatggtgctatcgaagacatttttctctaggtgcatgatatcgatagaatggcgtatgtctaaatctttccagtacggaaggtacttaaagaaaatggagtgcttcttgaatggcacgctagggcttgctggcacttcggcatcatttctcttccgcttatttgtttccctcttttttaccttcccaaaaacaaccttcaggttttttgtcattctgaacactttatcacccttccatggttctggggcatcaccttcctcaacaataccgtcaaaatattctgcttgggagcggtacgagtgattctttctcaagaaacggcggtgccgcatgtacactagcttcttcgatcccttaagatacctgtacacggtaccatccacacaaataacgcaacccgtctttcccttgatctgtcccaatagggaaaatagtgcgggcaagtcgttgacagtgacaaagataattgcatgtagcgtgaagtactcccgcaggaattcgtcccaaacttggatctcgtgttcccacaaatcgcgcatatcctccagcaaaggctccaaaaacatccatgtcattgccaggttgtcgtggtcccacatgacaagctggggaatcttctttttgttactgtctttgcatggatcaaactcttctacatcgtcaagggcaacatccagaccctcggactggctacggcttgttttgtatcgactactcttgcatgttgggcatctatccaaatcctcgtactctttacgaaataggatacagtggttaacacacgcgtgtatctttcgcacacccagtgacaaagggcatataagcttcttcgcttcatatgtgcttgttggcagggagttgggttgcggaaaaagtttcttcaacagaaccaacaagtcattaaaactactgtcggaccaaccatttctggccttcaatctcataagctcaagcaccgtccgcaacaatgtgaaatccttctcacagccctttgtctcatcgtacaaaagatcattcgctgcctttttcaatgcatcaaagttatccaacccacgagcggacccagcaacaacctcaggttcaacatgacgtaacatctcttccaaatctgcaaaattaccatcatctacgtgtagcctagttcggcacttgcttgctgggatctctccatgatgtgaccagtttgtgtagctttcaacaaatccatgcgtcaccaagtgttgctcaattacagatggatcgttccaacttttctgatttttgcagtgcacgcatggacatctaatatctttggtcttcttagatgcagcattcttcttagctgttttcataaatatgtcgactccttcaatgtacgacgcacgatatctctctttattcatccatgccctatccaccat

SEQ ID NO: 68890 - DNA, 3042 bp, Oryza sativa
  Clone ID: PAT_MRT4530_69611C.1
atggcggacagggcatggatgaataaagagagatatcgtgcgtcgtacattgaaggagttgacatattcatgaaagcagctaagaagaatgctgcatctaagaagaccaaagatattagatgtccatgcgtgcactgcaaaaatcagaaaagttggaacgatccatctgtaatcgagcaacacttggtgacgcatggatttgttgaacgctacacaaactggtcacatcatggagagatcccaagcaagcaggttacgaaccaggctacagtacgcgacgaagtgttgagctgggacgaggatgtcattgtagtagctgaagaagaagaggaagtgtatgcagtagaacccgttgatgatgatgatgttgttgttggtggcaatggtcagcacaatacagttgatgatgccgatgatggtaatgtcagcgtagataatggtaattttgcagatttggaagagatgttgcgtcatgctaaacctgaggttgttgctgggtccgctcgtgggttggataactttgatgcattgaaaaaggcagcgaatgatcttttgtacgatgaggcaaagggctgtgagaaggatttcacattgttgtggacggtgcttgagcttatgagattgaaggccagaaatggttggtccgacagtagttttaacgacttgttggttttgttgaagaaactttttccgcaacccaactccctgccaacaagcacatatgaagcgaagaagcttatatgccctttgtcactgggtgtgcgaaagatacacgcgtgtgttaaccactgtatcctattccgtaaagagtacgaggatttggacagatgcccaacatgcaagagtagtcgatacaaaacaagccgtagccagtccgagggtctggatgttgcccttgacgatgtagaagagtctgatccatgcaaagacagtaacaaaaagaagattccccagcttgtcatacagtaccttccggtgaaagatcgtttgaagcgtttgttctcaaacccgagggatgccgaattgatgcgctggcatcacgaaaagcgaaaaaaggatgggatgattcgacatcctgcagatgcaagacagtggaaggaatttgacagaaagtatcataagtttgcagaggacccaagaaacattaaatcattatatgtctataatctcaacaacaacctcccaacgtggctgtgtccgaaaaggaagtatatcttgttgaccatccttgtacagggaccacgacaacctggcaatgacatggatgtgtttctggagcctttgttggaggatatgcgcgatttgtgggaacacgggatccgagtttgggacgaattcctgtgggagtacttcacgctacatgtaattatcattgtcaccgtcaacgacttgcctacactgttttccctattgggacaaatcaagggaaagacgggttgcgttatttgtgtggatgaatatttcgatggtactgttgaggaaggtgatgcaccagaaccatggaagggtgataaagtgttcagaatgaccaaaaacctgaaggttgtttttgggaaggtaaaaaagaaggaaacaaataagcggaagagaaataatgccgaagtgccaacaagccctagcgtgccattcaagaagcactccattttctttaagtaccttccgtactggaaagatttagacatacgccattctatcgatgtcatgcacctagagaaaaatgtcttcgatagcaccattgggactatactggacataccaactaagaccaaggataggctgaaatcacgtaaggacctcgtggatatgcaaataaggaaagagtaccttccgcctgcttgctacaccttgacaagagaggacaaaattgcattgtgcaaatccctacatggggtgagagtgcctactgccttctcctcaaacattaagcgactagtgtcgatgaaggatctgtcgctttcaggctacaattctcataactgtcatgtaatgctcacagtattccttgccattgcaactagagcagtcgaaccagttcacgtaaagctggtcatcactaagctgtgttatttcttcaattccatatctcagaaagtaattgatcctaaagagttatgtcctctccaggctttcactatacagacagtgtgcgagcttgagatgtgtttccctccatcatttttggatatgatgcaacacctcatagttcatatcgtgcctcagataattgcacttgggcccctgtacctgcatcagatgtggcctttcgaacgatacatgtccattctaaaaggttacgtacggaaccgcgcctacccagagggatccatgatagagggatacacaaccgaggaggtcgttgagtgttgcattgattaccaaaaagatgggaaagcaattggtttaccggtatctcgacatgaaggtagattatctgggaaaggaacaaaagggaagaaaataatccacgacaatgactacaaaaaagtgaaagatgctcatttcactgtgctgcagcaactcgcaatagtggagccgtacatagagcaacacctgcatgaattacaagcaacaaatgtggggcgatctaatgcatggatcatgaagaaacacaagcatcactttactgaatggttcaagaacctcgatctaccagatggccataccatggaaaaaagaacaatcaaaatgctggctgatgggccatcaagtgtgtatacctcgtggcaagcatatgatctaaatggatacacgttttacacaaaagcgaaagacaaaatgagtgcatgccaaaacagtggcgttcgagtagaagcaatcgacacaactgggcaaaagagcacatactatggattcatagaagaaatctgcgaactagactacgggccaaatatgcagattccactgtttcggtgccaatgggtgaaacacccagccggcgtgtctgtggacaactttgggctgacaatagttgactttgacaacgtaggccacaaggatgacccatgggtgcttgccgatcgggtcgctcaagtttctatgtga

SEQ ID NO: 68891 - DNA, 228 bp, Oryza sativa
  Clone ID: PAT_MRT4530_69612C.1
ccccacactcagctggtagcaccaccatctcactacccgcccttagtattgttcaaacgattgtcccacagctacaaactcaaccatttaatggtgtctactttgatcagaatcaagctcaagccccaactctgttgacccttcaacttcccatccatatgtggtatctaccctaactactatagtgctccccggacacttgcccctgttggtggtgtctggtactga

SEQ ID NO: 68892 - DNA, 2064 bp, Oryza sativa
  Clone ID: PAT_MRT4530_69613C.1
atgacgcatggatttattgaacgctacataaattggtcacatcatggagagatcccaagcaagcaagttccgaaccaggttacagtacgcgatgaagtgttgagctgggacgaggatgtcattgtagtagctgaagaagaagaagaagaagaagtgcatgcaatagaacccgttgatgatgatgatgtttttggtgacaatggtcagcatggtacagttgatgatgccgatgatggtaatgtcagcgtagatgatggtaattttgcagatttggaagagatgttgtgtcatgctgaacctgaggttgttgctgggtccgctcatgggttggataactttgatgcattgaaaaaggcagcaaaggatcttttgtacaatgaggcaaagggctgcgagaaggatttcacattgttgcgaacggtgcttgagcttatgagattgaaggccagaaacggttggtccgacagtagttttaacgacatgttggttctattgaagaaactttttccgcaacccaactccctgccaacaagcacctatgaagcgaagaagcttatatgcccgttgtcattgggtgtgcgaaagatacacgcgtgtgttaaccactgtatcctgttccataaagagtacgaggatttggacagatgcccaacatgcaagagtagtcgatacaaaacaaaccgtagccattccgagggtcaggatgttgcccttgacgatgtagaagagttcgatccatgcaaagacagtaacaaaaagaatattccccaacttgtcatgtggtaccttccggtgaaagatcgtttgaagtgtttgttctcaaacccgagggatggcgaattgatgcgccggcatcatgaaaagcgaaaaaaggatgggatgattcgacatcctgcagatgcaagacagtggaaggtatttgacacaaagtatcataagtttgcagaggacccaagaaacgtaaggtatcttaagggatcgaagaagctagtgtacatgcggcaccggcgtttcttaagaaagaatcacttgtatcgctccgaagcagaatatttcgacggtattgttgaggaaggtgatgcaccagaaccatggaagggtgataaagtgttcaaaatgacaaaaaacctgaaggttgtttttgggaagaaaaatgtcttcgatagcaccattaggactatactggacataccaactaagaccaaggatgggctgaaatcacttttcctcgccattgaaattagagcagtcgaaccggttcacgtaaagctggtcatcataaagctgtgttatttcttcaatgccatatctcagaaacaactcgcaatagtggagccgtacatggagcaacacctgcaggaattacaagcaacaaatgtggggcgatctaatgcatggatcatgaagaaacacaagcatcactttactaaatggttcaagaacctctatctaccagatggccataccatggaagaaagaacaattaaaatgctggccgacgggccatcaagtgtgtataccttgtggcaagcatatgatctgaatggatacacgttttacacaaaagcgaaagacaaaaggagtgcatgccaaaacaatggcgttcgagtagaagcaatcgacacaactgggcaaaagagcacatactatggattcgaagatgaaatctgcgaactagactacgggccaaatatgcagattccactgtttcggtgccgatgggtgaaacacccagccggcgtgtttgtggacaactttgggctgacaattgttgacttcgacaacgtaggccacaaggatgacccatgggtgcttgccgatcgggtcgctcaagttttctatgtgacagacccatctcatttgaagaaagacatagttatttcgagaaaacaaaggattttgcaagttgatgatgtcgaagatgtcgaggcatacaatcaatatgagaacatgacattattcacagattttcgaaacaagatattacgcgtcgaagaatcaattggggaatcgctgaagccatacttgagaaatgaaggtgtagggaaaaatgttagatgctaa

SEQ ID NO: 68893 - DNA, 5343 bp, Oryza sativa
  Clone ID: PAT_MRT4530_69614C.1
atggcggacagggtatggatggataaagagagatattgtgcatcatacattgaaggagtcgacatattcatgaaagcagctaagaagaatgctgcatctaagaagaccaaagatattagatgtccatgcgtgcactgcaaaaatcagaaaagttggaacgatccatctgtaatcgagcaacacttggtgacgcatggatttgttgagggatacacaaactggtcacatcatggagagatcctaagcaagcaagttccgaaccaggctacagtacgcaacgaagtgttgagctgggacgaggatgtcattgtagtagctgaagaagaagaagaagaagtgcatgcagtagaacccgttgatgatgatgatgttgttggtggcaatggtcagcacagtacagttaatgatgctgatgatggtaatgtcagcgtagatgatggtaaatttgtagatttggaagagatgttgcgtcatgctgaacctgaggttgttgctgggtccgctcgtgggttggataactttgatgcattgaaaaaggcagcgaatgatcttttgtacgatgaggtaaagggctgtgagaaggatttcacattgttgcggacagtgcttgagcttatgagattgaaggccagcaatgattggtccgacagtagttttaacgacttgtttgttctgttgaagaaactttttccgcaacccaactccctgccaacaagcacctatgaagcgaagaagcttatatgccctttgtcactggagtacgaggatttggacagatgtccaacatgcaagagtagtcgatacaaaacaagccgtagccagtccgagggtctggatgttgcccttgacgatgtagaagagtccgatccatgcaaagacagtaacaaaaagaagattccccagcttgtcatgtggtaccttccggtgaaagattgtttgaagcgtttgttctcaaacccgagggatgccgaattgatgcgctggcatcatgaaaagcgaaaaaaggatgggatgattcgacatcctgcagatgcaagacagtggaaggaatttgacagaaagtatcataagtttgcagaggacccaagaaacggaccacgacaacctggtaatgacatggatgtgtttctggagcctctactggaggatatgcgcgatttgtggaaacacgggatccgagtttgggacgaatttctgcgggagtacttcacgctacatgcaattatctttgtcaccgtcaacgacttgcccgcactgttttccctattgggacagatcaagggaaagacgggttgcattatttgtgtggatggtaccgtgtacaggtatcttaagggatcgaagaagctagtgtacatgcggcaccggcgtttcttaagaaagaatcactcgtaccactcccaagcagaatatttcgacggtactgttgagaaagacatacgccattctatcgatgtcatgcacctagagaaaaatgtcttcgatagcaccattgggactatactggacataccaactaagaccaaggatgggctaaaatcacgtaaggacctcgtggatatgcaaataaggaaagagcttcatcctgtggatgaaggtaataatggaaaagtgtacctaccgcctgcttgctacaccttgacaagagccgagaaaatggcattgtgcaaatccctacatggggtgagagtgcctactggcttctcctcaaacattaagcgactagtgtcgatgaaggatctgtcgctttcaggctacaattcccatgactgtcatgtaatgctcacagtattccttgccattgcaattagagcagtcgaactagttcacgtaaagatggtcatcacaaagctctgctatttcttcaattctatatctcagaaagtaattgatcctgaagagttaggtcctctccggactttcgctctacagacagtgtgcgagcttgagatgtgtttcccaccatcatttttcaatatgatgcaacacctcatagttcatatcgtgcctcagataattgcacttaggcccctgtacctgcatcagatgtggcctttcgaacgatacatgtccattctaaaaggctatgtacggaaccacgcccacctaaagggatccatgatagagggatacacaaccgaggaggtcgttgagtattgcattgattacctaaaagatgggaaagcaattggtttaccggtacctcgacatgaaggtagattatctgggaaaggaacaaaagggaagaaaagaatccacgacaatgactacaaaaaagtgaaagatgctcatttcactgtgctgcagcaacttgcaatagtggagccgtacatagagcaacacctgcatgaattacaagcaacaaatattccactgtttcggtgccaatgggtgaaacacccagccggcgtgtctgtggacaactttgggctgacaatagttgactttgaaaacgtaggccacatggatgacccatgggtgcttgtcgatcgggtcgctcaagttttctatgtgatagacccatctcatttgaagaaagacatagttatttcgggaaaacaaaagattttgggagttgatgatgtcgaagatgtcgaggcatacaatcaatatgagaacatgacactattcacagattttcgaaacaagatattacgcgtcgaagaatcaattggtgaatcgccgaagccatacatgagagatgaagaaaatgattccatttcgcaactaacattaattcaccttcaagcgatatcaatggacaaacccacccaagagcaacccacgggtgacaagggcaaggaaactcagctagtcatggaggaagatatttgcacgcaagtagtcgcggaggaatcttcgtcgtctagctcaagtgaaccaggcagtcaatcgtatcactcgccgagtgacctccatccttctctggcaaggaagagaaagggcggtagcgacaatgaagttgactctgactacgttccccccgaaccggtgttaaatgctccacgtcgctccaaaaggaaagcccaagccgcaactgaacctgaagctgaagctacagctgtcgtgcacacaacagctttaagcaaaaccaagaaaaggaggggcgagcgagggaagaacatgttgttgaaggaagtaagcgtgctgacgcggatgagtgagacaggggaacacctgtcaccggaagactcatgttcgaagtatagcaaccaatgtggggcggtggtcagggatatcatggagatcacatggaaggattggaagaaagttccagagagtcgaaagaacagctgttggacgtcgctgcaaagcaagtttgaatatccagaggggacagacgacgataaagccaaggattatgcgttgaagacaatggggaagctgtggcgaaactggaaaacagatctgaataagaaatatgtccagaagggactcacgccgtttaaggactacggaaggataacacaggcccagtgggatgagttcgttgcccttaagacatcggcggaagaaaaggagaagagccagaagatggctgagctagcaagaaggaatgaatatccacatcatttgggatcgaccgattaccggcaagcggatgctcatacctacaagaagcgtgatcgctacaaggaagagattgactctcaggctagggcagcagctcatgacgaatgcaatatatactggagtcagaaaatgatgcacggtgctgctgttttagagcctgagccgagctatcctttcgatgatgtaacggaggatactccgtgcaagctcttgattccagtcggcagggcaggaaagaaaatactcgttgcaactgggaggttcataccaggccgcaggtttcattgccaagacattccggatgagtacgccaaggtagaggtctggacggtcattgaggcttaccggatgcatgagctcgactttccaactactgagcagattgtgtaccttggagatgccgtcgaccaattcatactatggcacaagaatgatattgaactagggtcaacggatggaactgatcgtccaccaaggataccggtgtcaccgtcgcgtccaccagtcgtagctagtccgagggatagtcctattgcttcaccccctagactagatccaccagttgcatcacctctaggaccagagccaccagttgcttcacctcgaggaccagagccaccagttgcatcacctccagtaccagagccaccagttgcatcacctccagtaccagagccaccagttacatcacatccagtaccggagcctcccgttacatcacctcagacagaaaaggatgcagaagaaccatcagagcctgtacaagcagagcctacaaagctagcggcgggtgaaattgaagcggtgcctgatcagccaatgcccgatcaaccagagcaatcgcaaccagagccatcgcaaccagaggaacctaagggtgccgatgtgccagtgatggtaaggacgcacaagcacaaagcaaaaggtgagtccaagaaaaattatatggtaacgacattccgaggaagggacaatgatatcataaatgccgaatttgataacagaaaattaaaagggttcaaacagaccttcgatgactatctcaactatatcaattccccagacgtgccacacgagtttgagaatggcaaaccattcatttacgactggcaactaagagaaggatcgtggcaactaagaaggtggcacgattggatgaattacgtggaagccgaagcgatgaaaaagcctgtcgcctacctaaacccgtgcaggataagtaagctgaaccacacatacatgctagacgagaagaagctaccggaacacatcaaggcgatgactcccgaagagaggaaagcttacatagcacaaaagcatcttgaaaagatgctcgatgtcgctacgtacgtagctattgcgcttgaatctacgcaggacaaggagtgtgtttatgccccatatgcctttgatgcatttaaaaggtattaccaacgaggtggacaacgcaaaaactcaagagaacgcatatccgtccgcaataagtggccgtgtcacaagcaaccggtgggaacaacactatgcggatattactgttgtgagttcctaagggttaatgggaaatattgtgcaaattacgacgagcttccaaaattccccaagtctgaaagagacctcaatgatacatccattcagaacattcaggtggacatgtgctacttcatccaccgtaagtgcgcacatcagcttgggcagtttttcgacaacgaaggagtcttagccctgccagagaacgaatccctgtctaactggaccagacgtataatatag

SEQ ID NO: 68894 - DNA, 990 bp, Oryza sativa
  Clone ID: PAT_MRT4530_69615C.1
atgactcgccaggcggcggtggcggtggcggcgacggaccgcggggacgacagggggaggaggacagggtggcgaggacgacagggcggaggaagaggccacgctgatggagccttagacggacctgtcgacggctgtcgtccccgtcgccgcccgaccactgctgcttgcgacgccgtcctcctcccgcatcgcctcttcctcctcctcccccacgtcgcctcctcgtcctcccccggtggcgagtgcgcgtgggtgccactgccgccgccgtcctccttccccacatcagcgccctcgccctatggagccggcgctgtcctcccctcgatggcccctccccgatggagccggcgctgtccttcccccttcagcggggccctcctcctccccttcttgctgcccacccccgcgcgctcgctgcccaccggcgacgagcacggccgccgtcgtttctctctccctttctctctctccacggtgagggcattttggtctcaaaactgctcaaagtgtatcctcttcctcctcgccgtcctccttccggcgtctcagctcgccgccggcatcgactcggccctgtacggtgcatgcaagaccgtcgccggcaacagcggggtggtcagcgtcacgttctgcatctacgcactcagctccgacaaccggagccacgacgccgccggcttcaaggactacgccgtcgtcaccgtcgacctcatcacggccaacgcgacgagcaccaagtccaagatagacggcatcctccagaacggcggcggcggcggcgccggcgacgccaagaggcggtgcctccagtcgtgccaggcggcgtacgccggcgtgctgcgagctcagcctggcatcgtcgccgacgtgcagggcggccggttgccggaggcgatttcagcgctggagaagtcggccagcggtgcaggaatgcgagaatggtttcggcaagagcaacgtgacgtcaccggtcaccgcggatga

SEQ ID NO: 68895 - DNA, 2673 bp, Oryza sativa
  Clone ID: PAT_MRT4530_69616C.1
atggtggacagggcatggatggataaagagagatatcgtgcgtcatacattgaaggagtcgacatattcatgaaagcagctaagaagaatgttgcatctaagaagaccaaagatattagatgtccatgcgtgcactgtaaaaatcagaaaagttggaacgatccatctgaaatcgagcaacacttggtgacgcttggatttgttgagggatacacaaactggtcacatcatggagagatcccaagcaagcaagttccgaaccaggctacagtacacgacgaagtgttgagctgggacgaggatgtcattgtagtagctgaagaagaagaagaagaagtgcatgcagtagaacccgttgatgatgatgatgttggtggcaatgatgatggtaaatttgcagatttggaagagatgttgcgtcatgctgaacctaaggttgttgctgggtccgctcatgggttggacaactttgatgcattgaaaaagacagcgaatgatcttttgtacaatgaggcaaagggctgtgagaaggatttcacattgttgcggatggtgcttgagcttatgagattgaaggacagaaatggttggtccgacagtagttttaatgacttgttgcttctgttgaagaaactttttccgcaacccaactccctgccaacaagcacctatgaagcgaagaagcttatatgccctttgtcactgggtgtgcgaaagatacacgcgtgtgttaaccactatatcctattccgtaaagagtacgaggatttggacagatgtccaacatgcaagagtagtcgatacaaaacaagccgtagccagtccgagggtctagattttgcccttgacgatgaagaagagtccgatccatgcaaagacagtaacaaaaagaagatttcccagcttgtcatgtggtaccttccggtgaaagatcgtttgaagcgtttgttctcaaacccgagggatgccgaattgatgcgctggcatcatgaaaagcgaaaaaaggatgggatgatcgacatcctgcagatgtatcttaagggatcgaagaagctagtgtacatgcggcaccggcgttttttaagaaagaatcactcataccactcccaagcagaatattttgacggtactgttgagaaaggtgtagcaccagaaccatggaagggtgataaagtgttcagaatgaccaaaaacctgaaggttgtttttgggaaggtaaaaaagaaggaaacaaataagcgaaagagaaatgatgccgaagtgccagcaagccctagcgtgccattcaagaagcactccattttctttaagtacctttcgtactggaaagatttagacatacgccattctatcgatgtcatgcacctagagaaaaatgtcttcgatagcaccattgggactatactgggcataccaactaagaccaaggataggctaaaatcacgtaaggacctcgtggatatgcaaataaggaaagagcttcatcctgtggatgaaggctacgtacggaaccgcacccacccagaggaatccataatagagggatacacaaccgaggaggtcgttaagtgttgcattgattacctaaaagatgagaaagcaattggtttaccgatacctcgacatgaagccgcgccgggactcgtcatcgcgccggtgtaccttggagatgccgtcgaccaattcatactatggcacatgaatgatattgaactagggtcaacggatggaactgatcgtccaccaaggataccggtgtcaccgtcgcgtccaccagtcgtagccagtccgagggatagtcctattgcttcaccccctagaccagagccaccagttgcatcacctttaggaccagagccaccagttgcatcacctcgaggaccagagccaccagttgcatcacctccagtaccagagccaccagttacatcacctccagtaccggagcctcccgttgcatcacctcagacattaaaggatgcagaagaaccatcagagcctgtacaagcagagcctacaaagctagcggcgggtgaaattgaagcggtgcctgatcagccaatgcccgatcaaccagagcaatcacaaccagagccatcgcaaccagaggaacctaagggtgctgatgtgccagtgatggatgaattacgtggaagcggaagcgatgaaaaagcctgtcgcctacctaaacccgtgcaggataacgaccattggatagtctttcttctctatccaaagtacaatgaagtcatcgtcttggattctctcgacaaagatggcaacacctatcaggaatttctaagaattatcaatcttgcatttaaaaggtattaccagcgaggcggacaacgcaaaaactcaagagaacgcatatccgtccgcaataagtggccgtgtcacaagcaaccggtgagaacagtactatgcggatattactgttgtgagttactaagggttaatgggaaatattgtgcgaattacgacgagcttccaaaattccccaagtctgaaagagagctcaatgatacatccattcagaacattcaggcggacatgtgctacttcatccaccgtgagtgcgcacatcagcttgggcggtttttcgacaacaaaggagtcttagccctgctggagaacgaatccctatctaactggaccaggcgtataatatag

SEQ ID NO: 68896 - DNA, 672 bp, Oryza sativa
  Clone ID: PAT_MRT4530_69617C.1
atggcgggagacaggtgggaggacagtccatgtgtgaggatggaggtgacgttaaatgtacttggaggcgacggcatcaagggtcaagggagctgggccccgacggaaagccgtgcatcggcgggcgggagcggcggcaggcaggcaaggcccgaacaactcgccatggccacccgccgccgtgccaccacagccgccggcgtagaccccagagccgtggagcaactcagatgctcactcactcgccacggcgctctcctccgcagtaatggtcgcgcggcgtccacatccctcttcggcgaggcccgcatcaccatccgtaagtccgccgcgaagcccaagccgtccgcctttggcagcccgtggtacggacccaaccgcgtaatccgctccaccgatcggggcaggtgcgtgcggagcccggcgaggagggaggaagatgggggcggccttcgccactagctctctccctgccagccaccgtcggtcgccgagctctccgctgacccgcagtcgctccgacccccgcccgtcggagccaccgctccagcgcctccagtgcccaccctcccgtcgctgctgccattgcctcttgcagaaggccgaagcggagagagagaaggggaagagagggaggaagaagagagcgaggatgacatgtagggctcacat

SEQ ID NO: 68897 - DNA, 2475 bp, Oryza sativa
  Clone ID: PAT_MRT4530_69618C.1
ttagcatctaacacttttccttacaccttcatttctcatgtatggctttggtgattcaccaattgattcttcgacgcgtaaaatctcgtttcgaaaatctatgaatagtgtcatgttctcatattgattgtatgcctcgacatcttcgacatcatcaactcccaaaatcctttgttttcccaaaataactatgtctttcttcaaatgagatgggtctgtcacatagaaaacttgagcgacccgatcggcaagcacccatgggtcatccttgtggcctacgttgtcaaagtcgacaattgtcagcccaaagttgtccacagacacgccggctgggtgtttcacccattggcaccgaaacagtggaatttttttgtagtcattgtcgtggattcttttcttcccttttgttcctttcccagataatctaccttcatgtcgaggtaccggtaaaccaattgctttcccatcttttaggtaatcaatgcaacactcaacgacctcctcgattgtgtatccctctatcatggatccctctgggtgggcgcggttccgtacgtagccttttagaatggatatgtatcgttcgaaaggccacatctgatgcaggtacaggggcccaagtgcaattatctgaggcacgatatgaactatgaggtgttgcatcatatcgaaaaatgatggagggaaacacatctcaagctcgcacactgtctgtatagcgaaagcccggagaggacctaactcttcaggatcaattactttctgagatatggaattgaagaaataacacagctttgtgatgaccagctttatgtgaactggttcgactgctctaattgcaatggcgaggaatactgtgagcattacatgacagtcatgggaattgtagcctgaaagcgacatatccttcatcgacactagtcgcttaatgtttgaggagaagccagtaggcactctcaccctatgtagggatttgcacaatgccattttctcctctcttgtcaaggtgtagcaagcaggcggtatgtacacttttccattattaccttcatccacaggatgaagctctttccttatttgcatatccatgaggtccttacgtgatttcagcccatccttggtcttagttggtatgtccagtatagtcccaatggtgctatcgaagacatttttctctaggtgcatgacatcgatagaatggcgtatgtctaaatctttccagtacggaaggtacttaaagaaaatggagtgcttcttgaatggcacgctagggcttgctggcacttcggcatcatttctcttccgcttatttgtttccttcttttttaccttcccaaaaacaaccttcaggtttttggtcattctgtacacggtaccatccacacaaataatgcaacccgtctttcccttgatctgtcccaatagggaaaacagtgcgggcaagtcattgacggtgacaaagataattgcatgtagcgtgaaatactcccgcaggaattcgtcccaaactcggatcccatgttcccacaaatcatgcatatcctccagcaaagactctagaaacacatccatgtcattgccaggttgtcgtggtcccggaaggtaccacatgacaagctgtggaatcttctttttgttactgtctttgcatggatcggactcttctatatcgtcaagggcaacatccagatcctcggactggctacggcttgttttgtattgactactcttgcatgttggacatctgtccaaatcctcgtactctttacggaataggatacagtggttaacacacgcgtgtatctttcgcacacccagtgacaaagggcatataagcttcttcgcttcataggtgcttgttggcagggagttgggttgcggaaaaagtttcttcaacagaaccaacaagtcattagaactactatcggaccaaccatttctggccttcaatctcataagctcaagcaccatccacaacaatgtgaaatccttctcacagccctttgcctcattgtacaatagatcattcaatgcctttttcaatgcatcaaagttatccaacccacgggcggacccagcaacaatcttaggttcagcatgacgcaacatctcttccaaatctgcaaaattaccatcatctacgctgacattaccatcatcggcatcatcaactgtactgtgttcttcttcttcttcttcttcttcttcttcttcttcttcttcttcagctactacaatgacatcctcgtcccagctcaacacttcgtcgtgtactgtagcctggtttggaacttgcttgcttgggatctttccatgatgtgaccagtttgtgtatccctcaacaaatccatgcatcaccaagtgttgctcgattacagatggatcattccaacttttctgatttttgcagtgcacgcatggacatctaatatctttggtcttcttagatgcagcattcttcttagctgctttcat

SEQ ID NO: 68898 - DNA, 572 bp, Oryza sativa
  Clone ID: PAT_MRT4530_69619C.1
atggtggacagggcatggatggataaagagagatatcgtgcgtcatacattgaaggagtcgacatattcatgaaagcagctaagaagaatgttgcatctaagaagaccaaagatattagatgtccatgcgtgcactgtaaaaatcagaaaagttggaacgatccatctgaaatcgagcaacacttggtgacgcttggatttgttgagggatacacaaactggtcacatcatggagagatcccaagcaagcaagttccgaaccaggctacagtacacgacgaagtgttgagctgggacgaggatgtcattgtagtagctgaagaagaagaagaagaagtgcatgcagtagaacccgttgatgatgatgatgttggtggcaatgatttggaagagatgttgcgtcatgctgaacctaaggttgttgctgggtccgctcatgggttggacaactttgatgcattgaaaaagacagcgaatgatcttttgtacaatgaggcaaagggctgtgagaaggatttcacattgttgcggatggtgcttgagcttatgagattgaaggacagaaatggttg

SEQ ID NO: 68899 - DNA, 248 bp, Oryza sativa
  Clone ID: PAT_MRT4530_6961C.1
cattgaaaatttgctgagcagaagaaccagatgttgttccatgttgcatgatcaattaataatgacacttcattttcatttttaattatgatggaaaacatcaataccgtaatcataaatactgaatcctaagttgtactcaacatcttgagtctaaatagatcccaatcacgcctacctgatattacttttagtattctcgtgtcgacaataaatctaccatgttgtgagtgatcgatcctattatt

SEQ ID NO: 68900 - DNA, 499 bp, Oryza sativa
  Clone ID: PAT_MRT4530_69620C.1
ggcggtggcgtttcgtttcttactactctctgctggtggcggtgctgctgtttttgctgttgtgtggtgctgatgctggaactggatctcatactgcatcttgttgccgtcaacgtcgtcttcgtcgtcgtcgttatcgtcaaaataatcatcctcgttgtgcgggggcatgttgtttctgttcacgccggcgacgccaacggcgccgtccgttcggttgaaggcgttgttcgacaacaccggatgctgcggcctctgcttcatcatctacttcctaaggaactgtggctttaaatgcgcagcgttacgcaattcatcatgggctcaccaagaacgaacagcaccgtaccatttgtgtacgcgccaattccctacgggcacacggggaaatgcacactggaggatgcacgtagcttaccttaccttcttcgccgacagcgccggtgaagaacttgttgacggccaccacgctgacggtgctcacctgcatttgcatgcc

SEQ ID NO: 68901 - DNA, 365 bp, Oryza sativa
  Clone ID: PAT_MRT4530_69621C.1
gcgagagctcagtggagggagaagaccatcaccaccatgggcgccagccggagcctcgtgccgctcctcgactacttcgcgcgccgggagttcgccgccgccggcctcagccccggcgccgtcacgctgccgtacccgggcgacggcggcgaggcgacctgcaccgtccactactgggcctccacgggggagccgctgctgccgccgctgctgctcgtgcatgggttcggcccacgggccacctggcagtggcgctgccaggtgggcccactgtcccggcatttccacctcatcgtgcccgacctcatcggcttcggcggcagctcgttcgggcggcgactccgccgcttcgccgccgttcggga

SEQ ID NO: 68902 - DNA, 2898 bp, Oryza sativa
  Clone ID: PAT_MRT4530_69622C.1
atggcggacagggcatgggtgaataaagagagatatcgggcgtcatacattgaaggagtcgacatattcatgaaagcagctaagaagaatgttgcatctaagaagaccaaagatattagatgtccatgcgtgcattgcaaaaatcagaaaagttggaacgatccatctgtaatcgagcaacacttggtcacacatggatttgttgagggatacacaaactggtcatatcatggagagatcccaagcaagcaagttccgaaccaggctacagtacacgacgaagtgttgagctgggacgaggatgtcattgtagtagctaaagaagaagaagaagaagaagaagaagaagaagaagaagaaaaagtgcatgcagtagaacccgttgatgatgatgatgttgttggtggcaatggtcagcacagtacagttgatgatgccgatgatggtaatgtcagcgtagatgttagtaattttgcatatttgccagagatgttgcgtcatgctgaacctgagaaactttttccgcaacccaactccctgccaacaagcacctatgaagcgaagaagcttatatgccctttgtcactgggtgtgcgaaagatacacgcgtgtgttaaccactgtatcctattccgtaaagagtacgaggatttggacagatgtccaacatgcaagagtagtcgatacaaaacaagccgtagccagtccgagagtttggatgttgcccttgacgatgtagaagagtccgatccatgcaaagacagtaacaaaaagaagattccccagcttgtcatgtggtaccttccggtgaaagatcatttgaagcgtttgttctcaaacccgagggatgccgaattgatgcgctggtatcatgaaaagcgaaaaaaagatgggatgattcgacatcctgcagatgcaagacagtggaaggaatttgacagaaagtatcataagtttgcagaggacccaagaaacaaaaggaagtatatcttgttgaccatccttgtacaaggaccacgacaacctagcaatgacatggatgtgtttctagagcctttgctggaggatatgcgcgatttgtgggaacacgggatccgagtttgggacgaattcctgcgggagtacttcacgctacatgcaattatctttgtcaccgtcaacgacttgaccgcactgttttccctattgggacagatcaagggaaagacgggttgcattatttgtgtagatggtactgtgtacaggtatcttaagggatcgaagaagctagtgtacatgcgacaccagcgtttcttaagaaagaatcactcgtaccgctcccaagcaaaatatttcgacggtactgttgagaaaggtgtggcaccagaaccatggaagggtgataaagtgtttagaatgaccaaaaatctgaaggttggttttgggaaggtaaaaaagaaggaaacaaataagcggaagagaaatgatgccgaagtgccagcaagccctagcgttccattcaagaagcactccattttctttaagtaccttccgtactggaaagatttagacatacgccattctatcgatgtcatgcacctagagaaaaatgtcttcgatagcaccattgggactatactggacatactaactaagaccaaggatggactaaaatcacgtaaggacctcgtggatatgcaaataaggaaagagcttcatcctgtggataaagtattcctcgccattgcaattagagcagtcgaaccagttcacgtaaagctggtcatcacaaagctctgttatttcttcaattccatatctcagaaagtaattgatcctgaagagttaggtcctctccggactttcgctatacagacaataattgcacttgggcccctatacctgcatcagatgtggcctttcgaacgatacatgtccattctaaaaggctacgtacggaaccgcgctcacccagagggatccatgatagagggatacacaaccgaggaggtcgttgagtgttgcattgattacctaaaggatggaaaagcaattggtttaccggtacctcgacatgaaggtagattatctaggaaaggaacaaaagggaagaaaagaatccacgacaatgactacaaaaaagtgaaagatgctcatttcactgtgctgcagcaattcgcaatagtggagccgtacatagagcaacacctgcatgaattacaagcaacaaatgtgggtcgatctaatagatggatcatgaagaaacacaagcatcactttactgaatggttcaagaacctcgatctaccagatggccataccatggaagaaagaacaattaaaatgctagctgacgggccatcaagtgtgtatacctcgtggcaagcatacgatctgaatggatacacattttacacaaaagcgaaagacaaaaggagtgcatgccaaaacagtggcgttcgagtagaagcaatcgacacaactgggcaaaagagcacatactacggattcatagaagaaatctgcgaactagactacgggccaaatatgcagattccactgtttcggtgccaatgggtgaaacacccagccagcgtgtctgtggacaactttaggctgacaatagttgactttgacaacgtaggccacaaggatgacccatgggtgcttgccgatcgggtcgctcaagttttctatgtgacagatccatctcatttgaagaaagacatagttatttcgggaaaacaaaggattttgggagttgatgatgtcgaagatgtcgaggcatacaatcaatatgagaacatgatactattcacagattttcgaaacaagatattacgcgtcgaagaatcaattggtgaatcgccgaagccatacatgagaaatgaaggtgtagggaaaagtgttagatgctaa

SEQ ID NO: 68903 - DNA, 1467 bp, Oryza sativa
  Clone ID: PAT_MRT4530_69623C.1
atggagggcaagcccatccccaccgagctccgcaacaaagacctccaggaccaggaaagagcagaaaaagtaatgctgaaggctgttgatgtgcttgctagcagtttgatcactgtaaaggaaaatgtctctggactcaagccagtgctccatggctttcatgtgcatgcacttggtggcaccactaatggttgcatgagaaatggattgtggtgcgcgagttggggaaattgttctaaaagtgtaggaataatatactccaatccaactaggaaggaacatggggggcacaagaagtcccctcatgcgtttctgcgcaagatgatggagagtacaatggatgactggtcaatcagaaagggtcttcaacaaagtggaggtgtgattaatgatatttttgaaatcccattgcaatgcacacgcaatatgcacaagctagcaagaatgaataatttggagatacttcctgtcagattccattataatggggagttcgccaattctagaaggattgtgcaatacgttggtggagatgaagggatgttatatatagaaaatgataagatttctatgcctgaaattagaggacaccttgcagaccatgtcgaggtcaaggatgccatgcagcttcactgttgcattgctgaaggtggagtggctgaaatttttgtggaggaaacaatgtcagattataattctaaagaaagtgattgggaaactgacagtgtgaaatctgatgagatggaaaacgtggaagggacacaatatgatgcaaacaaagaaggaagtgtgggagaagatagtgacactattgatagtgactatcaaccagaaagtggaaatagctcaccagatgatgaggaggtagtaaacctacgaaagtttgctgagatgtataacaaaaagttaaaagcaatgaggctaattctacaagatcctgatgcaaacagtgtgcccattgagttaataggtcatggagatgatagcttgaatgagataattgatgaacctacatatgattctagtgaaggttattcttatgacgatgatagtggtgaacacaacgaccatacagtgaggagaaagagtaggtggacaaggtatgactctaattctgctattccccatttttcggttggcatgacatttagagggaaagaggaaatgaagaaagctttacttaagtacggaatagtgaccaaacgacatatcgtgtttatcaaggatgagagggacaagatcagggctcctagatgtccttggctgatttatggttcaaagagaagcaaatgtgattggtttcaagttggtactctctgtgatgaacacacttgcccacctaaggaggaggcatcacatagcttgcaaggagcaggggaaggaacaattcacaggctaggaaagacacctgtaaggagctccaagaaggtttcactgaagggcaagccaactggagtagcaatctga

SEQ ID NO: 68904 - DNA, 402 bp, Oryza sativa
  Clone ID: PAT_MRT4530_69624C.1
atgctggtcctgatgcagccggatgggccaccggagccgtctcctacacctcgcgtggccgacggagccgtctcctacacctcgcggggccgccggagccgccgcctccacctcgcgcggccgccggagccgcctcctccacctcgcgcacgcaccgcagccgccgccaccacctcgcgcggccgccgcagccgcctcctccacctcgggagcatcctgaggaggctgacttgctcggacctggccgagggagcacattgggaggtggtgctcatggcgctctccgcggcagcaacggcactgctcgtgctcgcagctgcagcagcgatcgatgaccactactcagcgaggcacctcacgtcgtcgtccaattcaaacaaatcagaggctgacttcgactag

SEQ ID NO: 68905 - DNA, 454 bp, Oryza sativa
  Clone ID: PAT_MRT4530_69625C.1
attcggcacgagggccaaactcgcgccgtcgcacggtatcactttgcaaccgcagggccacgccgctccgcggcgccgccgtggaagatggtgtcgccggtgtgatgacctagagttagcggcatgatgaatcgagaagtctgggtttgggtgagattgggatggattcctggccggccgcgtgaaatatggggccgctgatggatgacctagagccgggggcaggacaaatcgaggcgagatggcggacgaccttgcgatgaaactctggactggaacatttcggagatcataacaagcgcacgaactggccgcaggagggcgattgggagcgagcgtggccgcctacttctagggagcgaggactccggagatgggaactaggattttgggtttcctgtatagggctaccgttggaccttgtttttttttcaaaactccgaaaaatcttgat

SEQ ID NO: 68906 - DNA, 531 bp, Oryza sativa
  Clone ID: PAT_MRT4530_69626C.1
atggccgcattctccatccacgcctcacgccggagctcgtcaccgacggccgcatccttccctgtccgtgccacgtcggagctcatcggcgacgggcgcgtactccgtcatccacgcctcacgccggagctagtcgccgctggcggcatcctccaccctacgccggagctcgtcgcgggagccacatcctccatcatccacaccccatgccggagctcgttgccgacggccgcatcttcccctgtccacgccacgttggagctcgtcgccggcgtccgtgtcctccttgctccacgtctatccactccggcgacagctgcatccccggccgtcgcgacaacccacctccataagctccgacgccgagctcgcgctgctcgtcaacacagcacctcagcgacggcggccaagccccacgcgtcgctgccgtcctcagctggcgcgagagtgttcggtaggccggctgctgtggctgcggctgctcacagtgagtacggcattgttcgtgctagctgcagctgctcgcagtga

SEQ ID NO: 68907 - DNA, 718 bp, Oryza sativa
  Clone ID: PAT_MRT4530_69627C.1
tcactgcttttatagaataagtgcaagtcaattctcctgtcattatcggcgcaaaaggcggtgccggcgccgttcttgaccaagacgtatcagctggtggatgacccggccactgaccacatcgtctcgtggggggacgaccgggtgtccaccttcgtcgtgtggcggccgccggagttcgcgcgcgacatcctccccaactacttcaagcacaacaacttctcgtcgttcgtccgccagctcaacacctacgggttcaggaaggtcgtgccggagaggtgggagttcgcgaacgagttcttcaggaagggggagaagcagctgctcaccgagatccaccgcaggaagacgtcgtccgcatcgacggcgtcgccgtctccgccgccgttcttcgcgccgccaccaccacgcgttcgtcggcgacgacggggttgtggcggcgcatggcatcggcatgccgttcccgcagccgcattggcgggagccgaacttgccggtcgcgacgcgcctgctcgcgctaggcgggcccgcgccgtcgccgtcgtcggcggaggccggcggcgccgggcgcgccgccaccgccgcggtgctgatggaggagaacgagcgcctgcggcggagcaacacggcgctgctgcaggagcttgcgcacatgcgcaagctgtacaacgacatcatctacttcgtgcagaaccacgttcgtcccgtggcgccgagc

SEQ ID NO: 68908 - DNA, 198 bp, Oryza sativa
  Clone ID: PAT_MRT4530_69628C.1
atgatggggaggagggcaaactggtacgtgcttgctatgagcgtgagcatccaccggagctcccactcccttcccttccctcgcgattcctcctcggttcctcctcctcgtcgccggcgagaggcgccgccccctgttgctggtgctcggccgtcgcgcagtgggcgcttccctagccctcagttgctgccgttgtga

SEQ ID NO: 68909 - DNA, 933 bp, Oryza sativa
  Clone ID: PAT_MRT4530_69629C.1
gggttcaggaaggtcgtgccggagaggtgggagttcgcgaacgagttcttcaggaagggggagaagcagctgctcaccgagatccaccgcaggaagacgtcgtccgcatcgacggcgtcgccgtctccgccgccgttcttcgcgccgccgcacttccctctgttccaccaccccggcgtcgcggcggctcagcaccaccacgcgttcgtcggcgacgacggggttgtggcggcgcatggcatcggcatgccgttcccgcagccgcattggcgggagccgaacttgccggtcgcgacgcgcctgctcgcgctaggcgggcccgcgccgtcgccgtcgtcggcggaggccggcggcgccgggcgcgccgccaccgccgcggtgctgatggaggagaacgagcgcctgcggcggagcaacacggcgctgctgcaggagcttgcgcacatgcgcaagctgtacaacgacatcatctacttcgtgcagaaccacgttcgtcccgtggcgccgagcccggcggcggccgcgttcctgcagggcctcggcatgcaggcgcgcaagaagcccgccgccgccaacgtgctcaacaactcaggcgggagcacaacgtcgagcagctcgctcaccatcgccgaggagccttcccctccgccgcagcagcagcatctagccggcgagaagagcggcggggaggcaggcaacagcagcgccgctcggtcatcggcgccgaccaagctcttcggcgtgcacctaagcgccgccccgtgcggcgccggcagcaagagagcgtcttcgccggaggagcacccgcccacgtcgccggccacgaagcctcgcctcgtgctggagtgcgacgacctaagcctgaccgtcgcgccgtcgtcgtcgtcgcagcagcagctgtcagccgcctcttctccaacaagcaccagctag

SEQ ID NO: 68910 - DNA, 2223 bp, Oryza sativa
  Clone ID: PAT_MRT4530_6962C.1
atgtctgtccttcttggcttcctcctcctactctccctgcaccctccgacgagctatgccactacggacacggtgtcacccggccaaacactggccggcggtgacaggcttatctccaacaacagcaagttcgctctcggcttcttcaagatggacagtaagaactcctcctacaccagccgcaactcttacctttgcatatggtacaacaagctccccatgataactccactgtggtccgccaatggcgaaaacccagtggtggaccccgcttcaccggagctaacaatatccggcgacggaaacatggtcatcatggaccaggctaccaagtccatcatatggtctacccgtgttaacaccacaaccaacggcaccgttgttgtgctgttgaacgatggtaatcttgtgctgcagagttcatcaaactcatccatggttttctggcagagctttgactacccaacagatagcctttttgccgatgcgaagatcggctggaacaaggtgactggcctgaaccgccgccttgtttctaggaagaattcaattgaccaggctgctggtttgtactctttggaatttgatatcaatggtgttggtcatttggtatggaactcaactgtaacatattggtccagtggggattggaatgggcaattttttggctcagcaccagagatgtttggtgccaccatacccaatttcacatttgtcaacaatgacagagaggtttacctcacatatactctgaacaatgagaaggcaattacgcatgccgcaatagatgtcaatgggcaaggtttggcaggtgtatggttggacagcttgcaggattggttgatcaattacaggatgcccttacttcattgcgatgtttacgcaatctgtggaccttttacagtctgcaatgacaacaatgatccgttctgcgactgtatgaagggcttctctataagatcacccaaggattgggagatagaagatcgaacaggagggtgtatgaggaatactccattaaattgtggtagtactatgaacaagacaggtttcagcgataagttctactatgtgcaaaacattatattgccccgtaatgccatgcatgtgcaggaagctgcaagtaaagatgaatgctcagatgtttgcttgagcaactgctcctgtactgcatattcctatgggaaaggtggatgctctgtttggcatgatgagctgtataacgtaaggcaacagtctgatgcttctgctgtcggaaatggtgataacttttacattcgccttgctgcaaatgaggtgcatgaggtgcaaagtgcggaaaggaagaaaaagagtggagtcatcattggtgttgccattggtgcaagcactgctgctttctgtttgatgatccttctactgatgttttggaggagaaaagggaaactgtttgctcgcggagcggaaaatgatcaaggcagcattggtattactgcatttcgatatattgatctgcagcgtgcaactaaaaacttttcagaaaagttgggaggaggcagttttggttctgtatttaagggatacctaaatgagtcaactcccattgcagcgaaaaggcttgacggcacatgccaaggggagaaacaattcagagccgaagtggattcaattggaatgatccagcacatcaatttagttaaattgattgggctttgttgtgaaggtgataagaagttacttgtgtatgaatacatgccaaatggctcccttgatgtgcaactatttaaggataatgataaagttttggattggaatcttagataccaaatagctattggagttgctagaggccttgcctacttgcatgatagctgtcgagattgcattatacattgtgatatcaagccagagaacatacttctcaatgaatctttcgttcctaaaattgctgattttggaatggcaaagattttggggagagaatttagtcatgctctgactacaatgagaggaacgattggatatcttgcccctgaatggattagcggaacagttgttacagctaaagttgatgtttacagctatggaatggttttgtttgaaatcttatcaggaaggaggaactcaagtcaagaatatttcaaggatggtgaccattcgcctattttccaatgcaagtcgcccgccagcttatcaatggagggattggaaatctggtggatgcaaaattgcatggtgatgtga

SEQ ID NO: 68911 - DNA, 222 bp, Oryza sativa
  Clone ID: PAT_MRT4530_69630C.1
tgttcccgagcccgagatttcaggggagcagatagcaaattcgtacaagttctgaaattctgggcggagaggagacagagagagagagagggggaaaggcgccgcgccgccgccgctgctctcctccggtggtggacggtgtgtccggtccggttcgccgcgccgcccttgcgtgagcgcgagcgtgcgtgcgtgccgcggagaggaggaggaggaagagga

SEQ ID NO: 68912 - DNA, 1264 bp, Oryza sativa
  Clone ID: PAT_MRT4530_69631C.1
gctgcaggacccacgcgtccggcgagggtgggcttagtgcatggctattccctctctgccttagctagatcaagctagctccttttcattcttggagaaggatcgattaggaagataagttcttcgcaaatatagatagcttcttttcttaattttctccttctcagttctcgtttttttcttcttgatcgaaaccgatcgatcatatatatagttagctagcatccttgttgtttttaatcccaaggatctagttaattaattacttcttgcaaatttcatgcaaaaactgatacacagacacaagttcgatataatttaatttcgagctttgatcatatcgtccccttgatcttttccttctctctttggaaatcccatcaaggctccatatttccttttgtggaaaaacgccttagatcgacgatctgagcgagaaattcgaattacttttcgtctcctcctagagatcatcatggacaacgttcttctggatcgccggtcttccgggagcttcgagttcccgaggagaggcggcggattccggccggggcacctcggcggcggcgcgacgccggcgatggcgccacgccagcaatacaaaggtggcgcgtggagccatgcatcactacccgcgctcccgtacgcgaggcctccgctgtactcgtcgccgtctctgcctctcctgccgtccaaccagccacctctcctgccgctcccacccgccgccaccaagtacgccactttcccgtacccgcctccgccgcagcagccgccgcgcagcggcagagctagtactccgtcgacgcgccagagggacaggaggaggaagccgtcgaggccgccgccgtcgacggagacgacgaagggaggaacacagaagaagaagccgctggagcgggcaacgccgctgccgccggcgccggcggtggcggaggccctggacgacctggagcaggaggtggcccgcaacttcgtccaggacctgctgcacgtgctcgcgccgccgccgagcagcctgccgctgcccaggttcgtgatcacgtcgtcgtcgtcgtcccccgccgccggcaacaaggtggtgccgcctccgccgcccgccccgtcatgcaacgccgaggcggccgccgccgacagcctccgccgcgtcctccgcctctaggatcgatcgatctatcacacggggtggccttggatcctagcgtggcatgacctggctaattaaaggggttattattatttcccaccaaaattattttttttg

SEQ ID NO: 68913 - DNA, 372 bp, Oryza sativa
  Clone ID: PAT_MRT4530_69632C.1
atgggatcggatgagatcactgtgcagtcaccgtcgtccatcgcctgggggaggggaccagagccatacgtgggtcgtccggtcggcggagggcagggtggctggatccggctcagtggagggcggggtgtcttgaggaggggaggcggcagagggctcgaggaggtggcggcaggtggcgggctcgagaaggtggcggcaggtggcgggctcgaggaggggaggcaacagagggcttgcctgcagggaggagccctcccctccgctagatctagtgagaggggaggcggcagcatgggcgacgggatcgtggaggagatgcagcggcgggttcaccgacgggaggtggcgcgacgtctcaaagacgactga

SEQ ID NO: 68914 - DNA, 2693 bp, Oryza sativa
  Clone ID: PAT_MRT4530_69633C.1
tttaaaaagaataaatgaacatatatcatgattaaggggccggggatgaaatcacatctcgtcccctggagtacaaaatcaatgaatggtcaagatcagccgcgtgcactagtggtaaaaacagcaagaaaaacccgtcaccccacttccggggaggaaaggattaattcgctagcctccacatacatgagcctaaacctaccgagcgaaaagtaaagcaccatcaaacgttaacacgcgtggcaatctagtaatcatcatcaagctgctatcttttaggctccgctcgaccagtgctctacgccggtgcagcccccatggaggcggcgctcttgccgccggtgccggcacagacgaggatcgggctgcgcaccacgtactttttccccgacacccacttcagctgcccctcgatcgtgctggccggcgccttgccggaggccgtcttgacggtgaccgtgtagttcagcacctcgttcagcgccctgaactccagcttcgccgggttcacctccaccgccagcgtcgccggcacgtccacctccacggcgtacgtcgaggtggccgccccgacgttcgtcgccgaccggttgatgctcacctcgtacggctccatgtccaggacggccgtgatggacgggtagttgagatccttctgatcgaccttgggcatcttggcgcactccaccgccggccccgggtggatgatcgagttcaccttctggtccttgtacccgagcccgcagaggtaggggatgtagtccagcgacgacaggttgtacacgagccccgggtcgatggctttccgcgcgttcacgtagccggcgccgatggcgtagtaggtcgccggcgcgccgtccacgtcggttatcggcttccggaggttgtcggtgtaatcggccgtcgtcatcatggccgacttgatggcggccggcgaccacgtcgggtgcgcgttcttgatcagcgcggcgaccccgctgatgtgcggcgcggccatggaggtgccggacttgatgtcaaacttgggcatcacttcctcggccccgagcgccaagtcctcgatcttggggacgccggcgaggatgttcactccggggcctatgatgtcgggcttgaggatccccctgctccgcctgttcggcccccgcgacgagaagggcgcggccaccggcgacttcgctttgaacactgtccctttgaagatgaagttcgccgtcgggctcggcgtgctccggatgtaagccttgatcttctgccctatcatgaatggcatctgcaccgtcgggaggacgtgcggcctcgggacgatcaccgaaccgtacacctgaggggcgatgacgatcatgccggcggcgccggagcggagcaccaacttggccttcgcgacgctcacgtcgccaccagcatcgcagatgatgatcttaccggtgacattcatcgccctcagtacgctctcggtggtgcacatgccgtcgcccacgtcgtgcaccagcggccgcatctcggctccgaagtccttgggctcgctgagcgactcgccgtcgaggctaaccccgcttccaagcttcacggtggcgacgaaccgccggtcggtggtgcctgcccccacggtgataacccacggcgcctcgttgacgacggtgctcggtcccgggccggtgttgccgccggccgcgctgaccagcacgccatgcatggcagcgctgtagcctccgagcgagaccgggtcgtcggagaagtcgccggcctgctcgtcgccgagcgacagcgacaggatgtcgacgccgtcctcgagggcgtcgtccaccgccgccagtatgtcgtcgcggtcgcagcccttctccacgtagcacacctggtagaaggcgatgtgcgcgcggggggccatgccgcccgccgtgccgaccgcgtagccggagacgttggcgccgggcacgaacgagccggccgccgtgctggacgtgtgcgtcccgtgctgcccctcgttgatcggcaggaccgggtcgcgcagccctttccacttccacttcgccgactcgaagtaggagcgcgctccgatgagcttgttgttgcacaccgtcttgttgaagtcgcaccggccgctccacttggccggcggcggcttcatgcccgccccgtcgaacgacgggtgcccggcgtagatgccgtcgtcgaggatcccgatgatgatgccctcgcccatgttgctggtgttccacacgccgccgcggcgggcgccgcccatgaggccgagcagctgcggcgtgtgggtggtctggagctggtacgtcttctccgggtcggcgcggatgaaccagtcgttcttggacatctcctccacctcctccggcgtcaggcgggcggcgaagccattgacgacgttgcggtaggagtagatgagccgggacacggaggaggggtccctctccagcgcctccttcgccatgtcgcacaccgacgccaccagcgacgcgtgccagctcgacacgttcttgtacaggttcgtgtcgtacgcgtacggcttgcgcacgatgacgaggtagttgctgtgcaagccggtgtcatcgtgcccggcatggctcgccgccggcgtggccgctagggagacggcgaggaggaggacggcggcgccaacggcgagccgcggcaacgagcaccgcccatggttacgattgtccattgagtgcgacaga

SEQ ID NO: 68915 - DNA, 1398 bp, Oryza sativa
  Clone ID: PAT_MRT4530_69634C.1
atgggcaaggcggcgaggtggttccgcagcctgtggggcggcggcggcgggaagaaggagcaggggagagaacatgggaggacggccgcggcgccgcccccgccggacaggaagcggtggagcttcgccaagtcgtcgagggactcgacggagggggaggcggcggcggcggtgggagggaatgcggcgatcgcgaaggcggccgaggcggcgtggctcaagtcgatgtacagcgacaccgagagggagcagagcaagcacgccatcgcggtcgccgcggcgaccgcggctgcggcggacgcggccgtggcggcggcacaggcggccgtcgaggtcgtccgcctcaccagccaggggccacccacctcgtcggtgttcgtctgcggcggcgtcttggatccccgtggccgcgccgccgcggtcaagatccagacagccttccgaggattcttggcgaagaaggcgctgcgagcgctcaaggcgctggtgaagctgcaggcgctggtgcgcggctacctggtgaggcggcaggcggcggcgacgctgcagagcatgcaggcgctcgtccgcgcgcaggccgccgtccgcgccgcgcgctcgtcgcgcggcgccgcgctgccgccgctgcacctccaccaccaccctcccgtccggccgcgctattccctgcaagagcggtatatggacgacacgaggagcgagcatggcgtggcggcgtacagccgccgcctgtcggcgagcatcgagtcgtcgtcgtacgggtacgaccggagccccaagatcgtggagatggacaccgggcggcccaagtcgaggtcgtcgtcggtcaggacgagccctcccgtggtcgacgccggcgccgccgaggagtggtacgccaactcggtgtcgtcgccgctcctcccgttccaccagctccccggcgcgccgccgcggatatcggcgccgagcgcacgccacttcccggagtacgactggtgcccgctcgagaagcccaggccggcgacggcgcagagcacgccgcggcttgcgcacatgccggtgacgccgacgaagagcgtctgcggcggcggcggctacggcgcgtcgcccaactgccgcggctacatgtcgagcacgcaatcgtcggaggcgaaggtgcggtcccagagcgcgccgaagcagcggccggagccgggcgtcgccggcggcaccggcggcggcgcgcggaagagggtgccgctgagcgaggtgaccctggaggcgagggcgagcctgagcggcgtgggcatgcagcgctcgtgcaaccgtgtccaggaggcgttcaacttcaagaccgccgtgctcagccgcttcgaccgctcgtcggagccggccgccgagagggaccgcgacctcttcttgcagaggaggtggtga

SEQ ID NO: 68916 - DNA, 210 bp, Oryza sativa
  Clone ID: PAT_MRT4530_69635C.1
atggcgtcgagctcaacgtcggcagcggccagcaaaaccctccgtggactgcttcccggaggagaatcagcgccgccttttcgctccgaccactccggcgtcctccgtgagtccaccgcgacggcaagcggctccccgcgcgccgccgcgccgctgcctaccggctacctccacgccagatcggtcgccacaatcagaccgatggtttag

SEQ ID NO: 68917 - DNA, 1301 bp, Oryza sativa
  Clone ID: PAT_MRT4530_69636C.1
atgaagttgttattaactgcttttgaaaagttatctggcctaaagataaattttcataagagtgaattaatttgctttagtcaggcaaaggagtgtcatgagcaatattcaaacatttttgtatgtaagttaggtgattttcctgttagatatcttggcattcttatgcattttagaaagcttactaataaagattggataataattgaacacagaattgaaaaaaaagcttagtatttggaaggataaacatgtctgttgctgggagattggttttgattaattctgttttgtcaagtctagctatgtttatgatatcgttttttgagattcctagaggggttcttcaaaaaatcgattattatagatcctgtttcttttggaaaggggatgaacattgaaaaaaaagtatagattgacaagatgggacattatatgccagccaaaagattagggtggacttggagttcacagtttagaaattcaaaaccaatgtcttttaagcatatggttgtttaaattaataaatgagcaaggtgtgtagcaagatttattgaaaagaaaatatcttagtgataaatcaataactcaggttgagaggaaacaaggggattcccatttttggtcaggtctgatgaaggttaagaattcctttttaaatatgggttcctgaattattaataatggtgaacaaagtaagattctagaaggataattaagtggttagggaattattctttgaaggacaaatatccgtcgttgttttcataattagaaggaaaaatgcctcaattgctagtgttatgggttttgttccgcttaatgtttcttttagtagagtagctgttcagaatctagttatatggcataatttgtgtgcttccattgtacatgttaacttaacagacaaggatgacatttttagatggaattttcatcaaaatgaccaattttctgtttgatctatgtatttaactttaattaataatggatacatagagaggaataagatcatttggaaacttaaaatgcctcttaagattaagatacttatgtggtatctccttaaaagggttgttttaacaaaagataatcttgctaggaggaattggaatggtagtttgagatgttgcttttgtatgaagaatgaatcaatttaccatctattccttgagcataatgaagatatcaagctaataaatgatgcatgtcataaacttgagatgacgattacgcaactatttgccaatttcgggtggaggttctctagtagtgaaagttttcaaaagtgggttgaaagt

SEQ ID NO: 68918 - DNA, 1056 bp, Oryza sativa
  Clone ID: PAT_MRT4530_69637C.1
atggcgggggttgtgagctggtacgggccgctgatcgacctctcggcggcggccgggcacttgggcgggttcgtgcaactcctggcgtccgttcggcgcgtgcttccccaccaggaacaaaatgctgcagatggacgggcgtttcagaagactatgcttgaggttggtgacgatacgaggtcgaggttttgtgtctcgctttggcccaagcgtggttcgagcgtactcgccggtgatgttttactattgcaaaatattaagatagttgaatttagaaatggcttggagggaagagcttctcagatatctgctgtccaagtattgctgaactccaaagacttggtgaggttgaagaactggaaagatgaaaaagaaaaggaatcgggaaacttcttatctatctcagagctactgtctcagagcaaattacatggtgttggtgtttatgcatccatttccaaaatggtgttaacaggttctctggcgtctcacttcaataggaagttttcagtcattgaaagattttccctgaaagaacatgatgatattttcagagatttagttactgctggatgcacgttatgtggttcacctttatatccaaaaaacctccatggagaaaatacttatcccattgactgcccaaaaagtccaaaatatcttcatgttattgggcagatatacaaacccttcatgatatatgtgcgagaccaatctggacaaattcctgttcttgtaaggaataaagctgcagagatcttgtttgcaaacattattgcagatgatgtatctgaatgctataagaaccatcatcctatgttgttagatacttgtgactgtggcagcttgaacacttcaggtggcgagacaggaattataaaaaggaaaaggacaaaagaaaagcctgattggcatctcatttggcttataataattaaatgtctgttgaatcaacacaagaacagcccattctgcttacaaatttcagtcaatactgacaagagtgtcgaagatggacgttttgaactggtttctctgacaatgacaataccatga

SEQ ID NO: 68919 - DNA, 354 bp, Oryza sativa
  Clone ID: PAT_MRT4530_69638C.1
ggctagctaacacggatcgccatggcggcaacatactgattcgtaaggatgagaatgggcagattgagctgataccaattgatcatgggtattgtctgcctgaaagctttgaagactgcacatttgattggctttactggccccaagcacgccagcctttcaatgttgaaaccctggactacataaagtcacttgacgaggaagaggatatcaagttgctcaagctcaatggttgtgaaccatcatctaaggagaacattacaaccaaatcaaagattgaagagattgttgaagaggcagagcatgttgttcttcctgggataggtgaaaaggcattcatggaagccatctcag

SEQ ID NO: 68920 - DNA, 1490 bp, Oryza sativa
  Clone ID: PAT_MRT4530_69639C.1
ccatatcttgttcttgacccaaaagagcatcagtactattccaatcacaatggcaacaagggcatacttgcgaataagggcctgacgattgagatccttcgccttctccgcataaattctagtatcagagatcaacctattggacatttcactcacctcaacaccgagaacttcttgaaaattgcgagtcataatctggtgcacctctcataaagctcatcattcaacttggccaggttcctttgggttctggtatccaaatacaacttcttcgtcttctgtatgaaagtgtctgagatggcttccatgaatgccttttcacctatcccaggaagaacaacatgctctgcctcttcaacaatctcttcaatctttgatttggttgtaatgttctccctacacaacatgttaccgatctcatatggagttagacctctcacagcacccttcttcaacatcatggtgcttagacgaaaaacacgaacacacttagatgatggttcacaaccattgagcttgagcaacttgatatcctcttcctcgtcaagtgactttatgtagtccagggtttcaacattgaaaggctggcgtgcttggggccagtaaagccaatcaaatgtgcagtcttcaaagctttcaggcagacaatacccatgatcaattggtatcagctcaatctgcccattctcatccttacgaatcagtatgttgccgccatggcgatccgtgttagctagcctcatatccaaaacagcaatcttgtgcacctcttgcacagggaaagccctaggaccaaactcctcacaactcccagaattcttcacaaacatttgcaaggacccaattttcggttctttctccgcgcaatcatacttagtctgatcaacataaccattcaaacatcgaacaagaactgtcggaggaacaccagcaaaccctagttcatcgctcacgcgataaccactaataggatggtcaagaatgtatgctgcaacctccctgaatgcaccttcaccgactcttgttcctctctttaatccttccccatcactggacaaagggtagccattaggattgtcctttgccattggctcttcatttattggcttgaaaacagcaacatactcttggcctgatgaatctagcatgaagtagactcccccagtgccctctgaggacatcacaggtgtgtgctccatttctagcccagcaagtgtagcttcgatcatacccgtaatttttggagtaagggtaacacttgggttgacaagaactggttcaatcaggggatatttctccttggcatcatcaaattgtaaattgtttccaatgtcagaagaaatggataattgctcaaaagattcttctatttcatttccattaaaattttctgacttgtttgcaagaaaatcggtatcagaagtgttggtctcacaaatggtggagattaatgtgctttcatcaagcttttcaccattgaccaaagtcat

SEQ ID NO: 68921 - DNA, 4245 bp, Oryza sativa
  Clone ID: PAT_MRT4530_6963C.1
atgcagacccgcaagggaacattggttcagaagtataaagtaaaggtagttgctgatgatcttgggaccagttcttccaaaggtgaagacgggaaacaagctccagatggctcggctcaactgagtgacaaaggtgctaccgacggttctctaggaagtcaaggtgacaactctcaagggatccatggagttcaaggcgatggagtgcatagagttcaaggtgatgctgctcaggggttgcaaaggggaaatcttaatcagaatagtgatgttgcacaagattttttcaataatttccaagaccgggtcgactatgctgtgcaccatgctttgatcaatcagtctgggattcaggtggccattgagggaggcaggattaagtttgatgattccaaaaagccgatgagggtcgatgataaccaatttcccgttaacatggtacacaaagctggccgaacagctgatccggggcgcatgaggggttatcaagtaagttcggctagaattataaacaaatgtcaaaggaaatatgacaagcaacaggaaaggcatcatgaagaagataatggtggctttgatcctcattggggctgtgagttcttcaggttctattggaatgaaggtatgaggttaccatctatcgaggattgtcctggatgcagtgatgttgcagggggttcaagccgattgtacgatggaggcagttggccaaaacagacaagagtgcctgttcatcagagattgggcccagtaaaccaacgtggtgattcggaatatgacgaaaataagaagactcaatggtgtcctcctgttatttttacgaagaatcagaaaagaagggttcaaagattgaggagtagggaacgcttccaagaggtcgagcaagaaattaatcatcggctgaagaaaccaaaaccgaggcaggagtggagtgttaagaatcaggctcctgtagccgatgatgttgcagctgatgaggcaaagaggttggcaaaaggaaagagtgttgtgacggcaccagttaacatggtttttaccttgccagccgaattcaggatcggtcaagccgatgtcgacgaggtggaagaggaatcggctaagttggttctatcaccagaacaggcagtgttcgagaaacctgaggggacagagaatcggcatcttaaaccattgtatataaatggctatgtcaatgggaagccgatgtctaaaatgatggttgatggtggggccgcggtgaatttaatgccttttgctacgttcagaaagttgggtagaaatgccgaggatctcatcaagacaaatatggtgctcaaggactttggtggcaatccatcggaaaccaaaggtgttctaaatgtgaagctgacagttggcattcctgtcatcaagaagaatggcaaggtgagggtatgcattgattttagagatctgaataaagctacaccgaaagatgaatatccaatgccagtagccgatcagctggttgatgctgcgtcagggaacaaaattttgagttttatggatggaaacgcagggtataatcaaatttttattgctgaagaagatatccataagacagcttttagatgtcctggtgcaatcggcttatttgaatgggttgttatgactttcggcttgaagaatgctggagctacatatcaacgggctatgaattatatttatcatgatctaatcggctggctggttgaggtctatattgatgatgtggttgttaaatctaaggaaataaaagaccacatagccgatttaagaaaagttttcgagaggaccaggaaatatggcttgaagatgaatccgacgaagtgtgcttttggtgtatcggctggccagttcttgggatttcttgtccatgagaggggaattgagataactcagagaagtataaatacgatcaaaaagattaagcccctagaaaacaagaccgaattgcaggagatgatcggcaagattaattttgttcgaaggtttatttctaatttgtccgagaaattagaaccttttacaccattgttgagattgaaggccgatcagcagtttacttggagggcagagcagcaaaaggctttggataatattaaaggatacctgagttcccctcctattttgattcctccacagaaagggataccttttagattgtatctgtcggccggtgagaagtcaataggctcaatcctaattcaggagttggatggaaaagaacgagttgtattttatctcagttctcgactcttggatctagagactagatattctcctgtggagaagttatgcttatgtctatatttttcatgcacgaggttaaggcattatttactgtccaatgaatgtactattatatgcaaggccgacgttgttagatacatgttatcggctccaatattgaaaggaagggttggaaagtggatattttccttaactgagtttgatcttcggtatgagtctccgaaggctattaagggacaagctgtagccgattttattgtggaacatcgtgatgattcaatcggctcggttgaaatggtgccatggactttattctttgatggatcggtgtgtactcatggttatggtatcggcctagttataatttcccctaggagggcatgttttgagtttgcttatactattacaccttatgcgactaataatcaagctgagtatgaagcagagcttaaagggttgcaattgctcaaggaagttgaagccgatgctattgaaaacattggggattctttgctggtaatcagtcaattggcaggggagtatgaatgcaagaatgatacgttaatagtttataatgagatgtgccaagaactgatgaaggaatttcggctggttactttaaagcatgtatctcgagaacaaaatatggaagctaatgatttggcccaaggggcatcggggtataagccgatgatcaaagatgttcaggttgaaattgcagcaataacagccgatgattggaggtatgatgtgcgtcaatatttacataatccatctcaatcggcttctaggaaattaagatataaggcgttgaagtacattctattggatgatgagctttattatcagatgattgatggagtgttacttaagtgcttgagtgccgatcaggctaaagttgcaatcggcgaagttcatgaaggaatttgtggcactcaccaatcggcccataagatgaagtggctacttcggcgtgcagggtatttttggccgacaatgctggaggattgcttcagatattataaggggtgtcaagattgtcagaagtttggggcaattcaacgagcgccggcgtcggctatgaatcctattattaaaccgtggccatttagaggttggggaattgatatgatcggtatgataaacccacgatcaagtaaagggcataagtttatattggtggcgactgattatttcaccaagtgggtggaggccattcctttgaagaaagttgattctggggatgcaattcgatttgttcaagaacatataatctaccgatttggtattcctcaaactattacaacaaatcaaggttcaatcttcgtgtccgatgagtttgttcagtttgccgatagcgtgggtatcaaattgttgaattcttcacgatattatgcacaagctaatgggcaggctgaggcatctaacaagagcttgatcaaattaattaagcggaagatttctgattatcctcggcaatggcatacctggttggcggaagcattgtggtcttatcgtatggcttgtcatggatcaattcaagttcctccttataagtttgtttatggacatgaagctgttttgccatgggaagttagaatcggctctagaaggatagagttgcaagacagtttgacagccgatgagtattataaccttatggccgatgaaagggaggacttggttcaatcgcgtttacgagcccttgctaaggttaccaaagataaggaacgagttgctaggcattataacaagaaagtagtgcctaaggatttttcggaaggtgaacttgtatggaggttgattttgccgattggaactcgggataacaagttcggcaagtggtcaccaaattgggaaggaccgtttcaaatctataaggttgtgtctaaagggacatatatgttgcaagggcttgatggtgaggtttatggacgagcgctcaatggcaaatacttaaagaagtattacccaagtgtttgggttgacgcatga

SEQ ID NO: 68922 - DNA, 2736 bp, Oryza sativa
  Clone ID: PAT_MRT4530_69640C.1
atgcaacccccgacgggcgccgtgtcagggtcgtcgtcgtcgtcgctggagtgcgtgagctcgtgcaggacgtcgtggaggggcggagggaggccgtacgaatgcagcgtgctctcgtgcgcctggaacgcgccgcgggcgctcacgggggcgctcgccagcaccaccgcgcagtgctcctcctgcagccacgccgaggctggggcagggtggaggcggcggggccagtcgcagcggagtaacaattcgttactgcacataacctgggcagaaggcatcaacagggggaagtttggttatggttcatcagcccattcttttcccactggaaattttttcaaatcttggtcaacttccgtggatccaacatggagagttttctgctattcatcatctgaatcgttcaatcatatttctccagaaactttgtgggaggatctcaagccagctatctcgtaccttcaacctgaagaattgaactttgtacacgatgctctgaagttggcatatgaggcacataatgggcagaaacgccgaagtggggaacctttcattattcatcctgttgaagttgctcgtatccttggggagcatgaacttgactgggaatcaatagctgctggtttattgcatgacactgttgaagatacagacatggttacttttgaaagaatagaaaatgagtttggtgtaaccgtacgccgtattgttgaaggggagacaaaggtatctaagctaggaaaacttcagtgcaaaaatgagggtaattcaaaacaggacgtcaaggctgaagatttaagacagatgtttcttgccatgacagaagaggttcgtgtaatcattgtgaaactggcagacaggctgcataatatgcgtacactcacacatatgcctcagcacaagcagtatgccattgccatggagacactgcaggtttttgcacccctagctaaacttctcgggatgtatcgaataaagtctgagctagaatatctgtccttcatgtacatgaatcctggtgatttcgctgaactaaagaaaagagttgaggacctctacaaggcccatgaacaagaattggaagaggcaaatcaaatcttaggggaaaagattgctgaggatcaatttcttgatcttgttagtgttgaaacacaagtgcgttcagtctgcaaagaactctacagcatttataaaactgcgctgaagtccaagagttcaataaatgagataaatcaggttgcacagctgcggatcatcataaagccaaaatcctgcaatggtgtggggccattgtgcactgcacaacagatctgctaccatgtccttggtcttgttcatggtatctggacacctatacctcaagctataagaacagaggatatggatctcatagcagaaagaggcattgctgcgcactacagtggaagaggggttgtttcagggcctgttcgtcctggaatatcaagtggaaggaattcaaatgggaaagtgatatgtctgaacaatacaggctttgctctgaggattggttggctcaatgcaatccgtgaatggcaagaagagtttgttggtaacatgagttctagggaatttgttgatactatcacccgagatcttctgggaagccgtgtctttgtgtttacaccaaaaggcgagattaaaaacttgcctaagggggccactgtggttgattatgcttacctgattcacacagaaattgggaacaaaatggtagctgcaaaggtgaatggcaatctagtttcaccaatccatgtacttgcaaatgctgaagttgtggagattataatttatgataaattatctgctaaatatgcattccagcgtcaccagcagtggcttcaacatgcgaaaactcgcagtgcaagacacaaaattatgaaattcttgcgggagcaagctgctctttctgctgctgaaataactgccgacgccgttaataactttgttgccgatcttgaagatgaaagtgactatgagcagtcgattccaagctctgaaaataaggactatacattcaactggcagaagatattgaattctgacaaactatcctttggaaacaagaagagcgactgctttttacctgttaaaaatgtctctgtgccaaaggttaatgggaagcacaacaaaactgtcaaagaactgggcatcaaaattaatggttcaacatttcgtggtgatagcttcactgattttattcaccctggtgtttccagcagtaaagaagttctccctagtgtggataactggaaagctggtatggttgcggaagtttcatcagctctaacagcgtgtggaatcaccatatgctcgtgtgtggcggagcgagataagagaaggggaataggtgtgatgttgttccactttgagggggcatatgagaatgtggtcagtgcatgctccggtgttgatatgattcttggggttcttggttgcggacaacaggcatcacgctgcatcagttcaccatctccagcaaaaaggagagacaattttgaagcaccaagaaatcagtccgctcaatggttcaggagcagtccgatcttggttgatgatgctgtgcaacccataacttgtccttcaaagaagaatgtggacaatgtggaccaagccaagccattttctcacgtcttaccgagacgaatcgctcgtgccaaggactcattgacccttgattcagttgagaaatgggagatatttctgtttggcatttga

SEQ ID NO: 68923 - DNA, 170 bp, Oryza sativa
  unsure (1)..(170): unsure at all n locations
  Clone ID: PAT_MRT4530_69641C.1
tttcttgagatccttttttagcggtcctgccctttttattttttggtttttttttgattagatagatagatctaattaagcaaagcatgcactgtaggagctagctagggaacctgaaataatcgcccagnatattatatctaaagcccggaacttagtaatttaattta

SEQ ID NO: 68924 - DNA, 3525 bp, Oryza sativa
  Clone ID: PAT_MRT4530_69642C.1
tgttttgtgtggccttcgtctcgtgttatctcttctcttcttcccaccccctctctctctccttctcctcccttccgccttcatcatcggcggcaaaccccttcttccatccacttcccccaccgaattcgcgcgcgcgcgccccgtggctgcggcggaggggaaggtgaggacggcggcgggcacggccacggcctccgagccgccgatgagattgcgcgccaccgcgacatgcaacccccgacgggcgccgtgtcagggtcgtcgtcgtcgtcgctggagtgcgtgagctcgtgcaggacgtcgtggaggggcggagggaggccgtacgaatgcagcgtgctctcgtgcgcctggaacgcgccgcgggcgctcacgggggcgctcgccagcaccaccgcgcagtgctcctcctgcagccacgccgaggctggggcagggtggaggcggcggggccagtcgcagcggagtaacaattcgttactgcacataacctgggcagaaggcatcaacagggggaagtttggttatggttcatcagcccattcttttcccactggaaattttttcaaatcttggtcaacttccgtggatccaacatggagagttttctgctattcatcatctgaatcgttcaatcatatttctccagaaactttgtgggaggatctcaagccagctatctcgtaccttcaacctgaagaattgaactttgtacacgatgctctgaagttggcatatgaggcacataatgggcagaaacgccgaagtggggaacctttcattattcatcctgttgaagttgctcgtatccttggggagcatgaacttgactgggaatcaatagctgctggtttattgcatgacactgttgaagatacagacatggttacttttgaaagaatagaaaatgagtttggtgtaaccgtacgccgtattgttgaaggggagacaaaggtatctaagctaggaaaacttcagtgcaaaaatgagggtaattcaaaacaggacgtcaaggctgaagatttaagacagatgtttcttgccatgacagaagaggttcgtgtaatcattgtgaaactggcagacaggctgcataatatgcgtacactcacacatatgcctcagcacaagcagtatgccattgccatggagacactgcaggtttttgcacccctagctaaacttctcgggatgtatcgaataaagtctgagctagaatatctgtccttcatgtacatgaatcctggtgatttcgctgaactaaagaaaagagttgaggacctctacaaggcccatgaacaagaattggaagaggcaaatcaaatcttaggggaaaagattgctgaggatcaatttcttgatcttgttagtgttgaaacacaagtgcgttcagtctgcaaagaactctacagcatttataaaactgcgctgaagtccaagagttcaataaatgagataaatcaggttgcacagctgcggatcatcataaagccaaaatcctgcaatggtgtggggccattgtgcactgcacaacagatctgctaccatgtccttggtcttgttcatggtatatggacacctatacctcaagctgtgaaagattacattgcaaccccaaagcctaatggataccaaagtctacacacgacagtgataccatttctgaatgagagtatgttccatttggaagttcagataagaacagaggatatggatctcatagcagaaagaggcattgctgcgcactacagtggaagaggggttgtttcagggcctgttcgtcctggaatatcaagtggaaggaattcaaatgggaaagtgatatgtctgaacaatacaggctttgctctgaggattggttggctcaatgcaatccgtgaatggcaagaagagtttgttggtaacatgagttctagggaatttgttgatactatcacccgagatcttctgggaagccgtgtctttgtgtttacaccaaaaggcgagattaaaaacttgcctaagggggccactgtggttgattatgcttacctgattcacacagaaattgggaacaaaatggtagctgcaaaggtgaatggcaatctagtttcaccaatccatgtacttgcaaatgctgaagttgtggagattataatttatgataaattatctgctaaatatgcattccagcgtcaccagcagtggcttcaacatgcgaaaactcgcagtgcaagacacaaaattatgaaattcttgcgggagcaagctgctctttctgctgctgaaataactgccgacgccgttaataactttgttgccgatcttgaagatgaaagtgactatgagcagtcgattccaagctctgaaaataaggactatacattcaactggcagaagatattgaattctgacaaactatcctttggaaacaagaagagcgactgctttttacctgttaaaaatgtctctgtgccaaaggttaatgggaagcacaacaaaactgtcaaagaactgggcatcaaaattaatggttcaacatttcgtggtgatagcttcactgattttattcaccctggtgtttccagcagtaaagaagttctccctagtgtggataactggaaagctggtaaaatttgtgcgtggcacaatacagaaggcagctctatccaatggctctgcatagtgtgtgttgatcgaaaaggtatggttgcggaagtttcatcagctctaacagcgtgtggaatcaccatatgctcgtgtgtggcggagcgagataagagaaggggaataggtgtgatgttgttccactttgagggggcatatgagaatgtggtcagtgcatgctccggtgttgatatgattcttggggttcttggttggtccgttggatgcagctgtaatcctttgggtgttcttgaatgctagcggacaacaggcatcacgctgcatcagttcaccatctccagcaaaaaggagagacaattttgaagcaccaagaaatcagtccgctcaatggttcaggagcagtccgatcttggttgatgatgctgtgcaacccataacttgtccttcaaagaaggtagagtgagggtagagcaagctggagccggatattctggttcgtttggaagcgagaggagtgtacatagctgagcaagctactagtgaactgttagtccagggattggttgggttatagtattatacaaaagcctccatgaatgaccaacaatggcagcttctctcttctattttttttgtttgccattcgtacactagttatgtatgacatgtgcagctagaattttgatctgatgggattccaatgccccaaattttgcccgtaaaaaaaaaaaaaaaaaaaaaaaaaaaactcgagactagttcactcgtgccatctaattcctggacaaaggtgaaaatattttattagctttacctctataatttattagttttaactaataagacgttgcaaacatgtccacattttgttcctttctgcacaactatttacatctaatttatttttgggttatg

SEQ ID NO: 68925 - DNA, 452 bp, Oryza sativa
  Clone ID: PAT_MRT4530_69643C.1
aaagcacccaactgcaacattgttaaaggcaaaacatgctaaagggtggttttgttccttccccccatagggaagaaccacaaacgggtagctggtttatattttttaaggcattacaaatgggtataggcctaattttttcccgttttttttaaaaccaaagcctcccagggcacccttttgccctgccttggcctaaagctccttaagggcctgttggaaaaaaatgcatgcaattgatgtcagcaaactaaacccccagttccatggaaaaaaaaaaacaaaaaactggaaagttgggaaaagggccccacctttccctaatttttttttttcggaaaatacccgagatccctttacaaaaagcaccaaattcagacctccaggtttgcaactaaccattaaagttccttatataataatggcttaaataaaaaatgcactagttttcc

SEQ ID NO: 68926 - DNA, 143 bp, Oryza sativa
  Clone ID: PAT_MRT4530_69644C.1
aaaacacataaacaggggggggatactattctggcatacgggccttcccttagggggcttaaacaagcttcttaggcccaggggggaaaaggattactttcaaaaaactttcaagggcggtcaaatcacaaattaaacccttt

SEQ ID NO: 68927 - DNA, 2434 bp, Oryza sativa
  Clone ID: PAT_MRT4530_69645C.1
atggctgatttcccccctattcaccgtgctgagctcgcaaatatgacattggttgccggctacattgaagcttcagagtacacagttattgagcccctcagtggagagttgctgcatagagttcgcttggaagttcatggtagtttgggcacccctctggttaatatggtggttgagacttctagaggaacaatagagcatgcttgccaggaagccgtatatttggtgatgaccaggatttgagagaagtttgttttcatcttcgatggaattgcttaccgttatcatccaagctgttcagcaggaggcattgctagtagtttcagttcagcttcaagtgagaatgatactacttttggtcgcatgaggactgtgatgagagcgcttgacaagatgcaccaggatcttcaccgagcctcagagacgttgaacgacaagaagcttattcaaatagctcgtttgcaagatgaggttgatcgtctcaaggtcgagagcgcaatgctccaaggtcgtccagcaccaagaagagccaaaatccggacaatgtcgaggaagaggtctacagctcccattcgcatgcagttggcgtcccgccccagtcgatgtcctagccgtcgatcccgttcccgtcccagttcgcgcgtcttcgcagttgccgatgctctccgccgccaaagccgcaacagttagtgatgcagtgaagtggatcgtgtcaatctctagtagcagcagttcgagtggtgatggtaactgtttttctccttccctatttctcttctcgtcttctgcttcagatggtgaacacaaggactacccgttctggaaacaatgtcaatgaggaacagctgttaggaaatggttcaggagatatatcagagaatcctccgcttgcctagacaatagcaagacagactcagataatgacaaccatgataaatcagatgcaacaacagtatcatcagatgatgcaacatatgatgcagcaacagtagcagaaccagcagcacaatggtccccctcagtccaagttgccaaagttttgatgtgtccgtccgctgactttctcgagcacaagtaacccaatggaggcttacgattggttgtacgccattgagaagaaacttaatctacttaagtgcactgatcaggagaaggttgcgtttgccacacatcagttgcaaggtctagctttagcttggtgggataattaaatgattacctattcagccggaatagaagttacttggatgagttttgtcgtgttttcaggaaagcccaggttcccgatggaattgttgcatagaagaagcgagagtttaggtctctacatcaaggaaacatgactgttactgagtatctgcatgagtttaatcgtctagcacgttatgcccctgaggatgtgcgaaccgatgctgagagatgggaaaagttcttggcaggtttgtatgatgagttgactaacgagttgatttctagagattatgctgattttcagagaattgtggacaaagccattcgtcaggaagactagcgtaacaaaatggatcgcaagaggaaagctatacagttcaggagtcagcaagatggacaatagaagctccgctacggtccttgacagcacaatggtccaactactatgattgttcgacagcacaggccgtatcagccaggaaatttcagccaaggcaatagtggaaatcagaacaaccgtaatcccgttccgcgcccgccaatgaaacagtctcaagcttcgcagccccaacagccgaaggagttaggaggaaagcccctcacatgtttcaactgcggagatcccggacattttgcaggtaagtgtcctaaacgaaagcgcaatggacccaagattgttcaagctcgtgttaatcacgtgtctacggaagaagctcaagcagcgctggaagtggttttgggtacgttccctgcgaactcaattcctgctatagtttttttttttctggtgctacgtattcatttatatccaagagatttgttggggtacacgggttaagaaaagtggaacttagttctcccatgaaagttaatacaccgggaaatagctcaacattagttagtttttgtccctctacgatgatagaaatccaagtgtcaccttttctagccaatcttatccttgtggagtgcaaagacctagatgtcatactgggaatggattggttgacaaaacacaacggagtcattgattgtgcaagccgcacagttacgttagttaatggaaaaggagaagtggtagtgatgcagtctccattaactcagaagaaaggagtaagtttgaatcaagtggaaagtgaacaccaggtccctttattaactaaaaatgttcaaattttacactacaaaccttatggcactaagtactatcatacatgtaccatttccttacccatgccccact

SEQ ID NO: 68928 - DNA, 318 bp, Oryza sativa
  Clone ID: PAT_MRT4530_69646C.1
atggcggaggaaggcgaggacggcggcagcaaggcggcgatggcactgcagcggtggagactgaagcgggagggattgagaggagggactcggctttatagtggaggcgagagtaaagtcatagagaacacaatattcttgccggactctaaagttcatttagtcaagaagccatttgggatctcttggttcatggagattggcactggtcagcttgcggcgctagctgtgtttgtctgcatttttgcctgtgtaggcatggctgatagccagaacatcaccggtgatggttcaaggctagctgagagacaaaagtaa

SEQ ID NO: 68929 - DNA, 720 bp, Oryza sativa
  Clone ID: PAT_MRT4530_69647C.1
aaacaaacacctctagatgcatctctgaagcttatcaaagcagcttaagtacagtagtagtacgtctacaagctaaattaagtagctaatctagctactaataactctactagcagctaatagaaatccacatatatcgatcggtattagccctggtactttacataccaaacaagacaaccctttttcttctcctaaacaatgcaggggccttcggtgattacctgagaaacaaacacttttcccttttcaggagagatcgaagaaagaaacaaagaagagcaaaaaaatcttgtcgtctccctcctcaatcgctagctagcaagctcgtcctccatcaatcgtcgtcgtcgctgcagctactgatagagctaggatcgatcaccggaggaggctccggatgatctcggcctgcgggctgttgttgtccatcgtcgacatgagctccgacagccggtcggacaggtcgtccacctcccggtgcaggctcttgatgtagctgcacgtctccttgagcagcttcgacgccgacgaccggcttgcgccgcggctgcgggaggactccgggaggagggcctgaagcttggagatgagctcggtgatctcctcggcggggatcctgcctgctccccaccaccaccacggcggttcgacatgtccgccgtctgcattatccccaccacacctctactgccttcttctgcttgaactccgtcgacc

SEQ ID NO: 68930 - DNA, 150 bp, Oryza sativa
  Clone ID: PAT_MRT4530_69648C.1
gatcacaattcacatcaaggtgatataatagcacctggcgagaggctggtgatgaatcagaggcctctgatcatctgctgcatccattatggcctcactgctaaagcctacaatcttaatattttggggtctggtgttgctggcaactag

SEQ ID NO: 68931 - DNA, 2205 bp, Oryza sativa
  Clone ID: PAT_MRT4530_69649C.1
atggcggaagagagagaaagctttgagagtcagtgggcgccctccgatgtaacggaggaaaacctgaaggagatggtggcgcacggcgttcttccggcaaaggagatcatcgggtggcgtccagcatgcggtgaaacatttccgacccccgacacacacgaggtggtgctgttctcccatttcttctacggcgggttttctgttccaacctcaagtttctttcgggcgattttggatttctatgggatcagtttgcatcacctaaaccccaactccatagtccacatcgccaatttcatccacgcttgcgaggcttttctggggattaggccacattttgctctatttcgccgcatcttcttcctcaagccccagccaaataagagcaaaccgtgcgtagttgggggagccggatttcaactgagggggaccttgagccaaaaatacttctccatgcccttcaagacctcgaacaaaggttggcacgcgaactggttctatgtgcaaaaccccaagccagcgcttcccggatactcctgtctgcctccagtatatcgcgatacctggaactcactttctatgggagaagaggctgcccaagcgcttgacttattggatcgcatgctgaagcttaaagaacagggtctgcaaggagagcaaatcacccggcactttatcaagagccggctggcgccaatcaaggagagatcccgcacagcttttgagtttgatggcaagcatgaccccaaccgagagaacccagagtctcttgagttcaaaattatctattcacacttattgctagtcgtgccatacaatacgttcaaccctcctccaccggaattcgctttgatgaaatccgatactccaattgctcaacgccgctcacctcgccggcacactggccaagccagtggagggccgaagatccagtcggacgtccaacccaacacctcgaggtcaactaaccagtcagattctcgtaagaggaagttggtttcaagtgacgatgaaggtgatgacgcggaaaagacggacaacaaaggggtgattgggaaacagccaaagcaagccaatccgaagaagaaaacgtccagtcgtcccatgccaaaaataaggaagtcatccaggaaaccatctgacatagatccctctggaaaagaccccatgccgactggcacagagactagtccttcagcagaaactgggccaactgctgaagaccgcccaggtaataatcaaccggcaaccggcaatatagatactagcaacgagcccccgactggaaaccagtcagccgaagctgaagtcggtgctgatcaagagcccccgactggaaaccagttgggtacagaacaaaatagagatatcccagaagtggaagctcaagccaacagccctcccaagacggacgctgctgctgaccctggaactaactctcctgttagggtgcaaggacctgctcgtccccgaccggaaattataatggggccaatgatcggtaatgaagaagaggtcctccagatacgatcaggtgaagattctcgcccacccatattagtcaagtggtgggatgatgaaatgcaaccacagggaatcgtgataaataaacaaaaggaagacgaggaaagaatccatcttaggaatgaggcgaagaccgcaaccctcgaaaaattagttccccaccttggaacccttgaagcaaccagagaccagctgcgtgaagccaaagagcttgccaggaagactgagcatgacctcagagatcggactgccgagcttcaagactccaactttgagctgagcggttcattaaaagatcgcaaaatcaaatcccaagctcagttcgacgtcttgcttaacaaaatcaagaggcttgagggagctagagatgaggtcgccaacgccgctacaccactcgtccaagccatgttttttataacaacaatgaatatcaaggaagctggaagtatgggagcaggcctggcgttggcaatgaccaagtccttgtacccgaagattgatattgatgccattgatggctttgcagacgggacaagcgaagaagccactcttgacctcatcaatgacacgcagaaagctgccgacaagatagctgctgatgttgttgagagattccaggacaacgacctctggccgactagatctaataactctgacgatgaaaagactgaaactgattga

SEQ ID NO: 68932 - DNA, 2283 bp, Oryza sativa
  Clone ID: PAT_MRT4530_6964C.1
atggagaccacacgaagcgatggcagcatcatggtggtaggggcggtcgatatcgattgcccccagcaccggctgtgcgggtaccgcgacttgatacggggcgtctccggcggcggcgccgccatgtcgcgctggccggaggcggcgcccttcgtcccgcagatcgccagtactggtggcgatggtggtgcagcggtggccggcggcggctggtcgagcgggagctcaagcccggctccatcgtcttgcagctcctcctcctcttggcgcgagggagactgctgctacgacgtctgctggtgttcttcttccacggtccacgagcttcgcagcatcgcggagcggatggtccgtgacggctacatcgaggggctcatcagggctttcggtggcgcggccactgccggagccgccggacggcgtggccccccagacgagcttctcctccataactggttctcgcagctcgacgtggagtgggtcctgctcctccatacctgcagcgaggaagaagaagacgaacacgtacgacgacctcctcctcttcccgtggaagatttgatggcgcttatggagcggtggatccgagccctcctaaccatggtgcaggttctctgcatcacgcagctcgagctccgcgccaagaagccaaccgtcgccggagtccggagagccatccagttcttcctgctccgccgcgacagcaagacggcgcacgcggactacgtgcagcaggtggtccagttcgcgcggttcgcggaggagagcatcctcaggatgctggccttcgtcgacgccgccactctcgccgtcgtcgaggaggacgacgacgaccaccgggtggccgaggcgctcccggggatgttgcaggtgtacgcctgcatctccgaggcctctccgaccgtgctcgccatgttcaaagaagcatccgatctcctcgcttccggctcctcccgccatggccaggaggcacaggttttcgacggcatggacggcatcttcctgcgcaagaggaagaagctgagcgacgcgatctgggacatgatggagaaggttcgatcctccttcttgcaggatggatgctggcaagtctcgccggaggcatcagcatcaggagtccatgagaccaccgtgctgatgatgaactacatcgcgcttctctggcgcaacgacgacgtcctcaccttcatcctgcaggatcaccacttcagcgtgttcgtctctcacacccagggcttcagctcggtcgtgaacctgatcaccgacatcatctcttgccttggccacaaattggaggaaattgcctcctccctttccaattccatcttggacccagcgttgcgttgcattttcttgctaaacaattggcagcttgtgttgcaccgcatcgaatccctggacctgccatcttgggccttgatagacagatgcaggacacggaggtacatagacacttacattgacgtcttctggtcgcctctgttgtgctgcatcttcatcggaaattcttctgatactcctcgaaagaaaacctacagacctgctttcggcttccgaagatacctgtctcttgaaaattttgagatagaattcagaaaaacctacgcgaagcacaagtttttcaaggttccagaccctaagcttcggcagagattacgtcaagccatcatccagaaaatcattccgcattatagcatacgccgcctcatccccaagcttcacactctggtcgcctcaaaccagagcgcattcatcaaagatcgctgcatcccggacaactttacgatgttctatcaatcaaccaagcgtttgcacgagagacggcggccggccttgcggctcaagttggacatcgccgaagctttcgattccatctcttggcagttcatcatcctggaagtcctggagcacaagggctttggacaacgttggaactcctggattgccatgcttctgcgtacggcaagcatgaagatccttctgaatggcatgccgggggatgtgcgagagatcagggcagccacggagatcctcaacatcttcggtgaggcttcgggcttatgggcaaacttcgccaaatgcgcggccctgccgatacaatgctctgaagaagacctattactagcgcaagctgaacttccttgcccacttgcagctttcccgtgcaagtatctggggctccctctgtctattttccggctaaagaaagaagatctgcaacactcatcgacaaagtcactaaccggctaccgacgtggaaggctgagcaaatggaaccgatag

SEQ ID NO: 68933 - DNA, 414 bp, Oryza sativa
  Clone ID: PAT_MRT4530_69650C.1
atggcgatcagtgacaccgtccttaacatagggatggcaacggggcggggcggggccggattgagttggaacgaccctgcatccactcctttgcgcgtctactcggccctagcctcggactggtggccgggcaaggatgctcgacgcagcgacgacggaggtggtgcgacgacgggcggaggcagagctgagacggcgacgagcggaggtggtgtggtgacaggcggagctggaggcggcgggtcaaggcagcgtgacgacaggcagaggaggagcggaaacatcagcgacacagcggcggccagccagcagtggatgtggaggatgtgtgaggggagtgggactaggaaggcccttgtggctccctccttagcatggcaactccctctcatcttcatggagctggccatctag

SEQ ID NO: 68934 - DNA, 165 bp, Oryza sativa
  Clone ID: PAT_MRT4530_69651C.1
atgaccgaagtcatgagtgccgcctccatggtgttggttgggaaaccgacacctatgggggttcctaactgcaaggacgacgacggtgaggaggagaagcagaagcaggttcagcagagctctcaaggagtgccgagccaggctctgcatcgtccgctggcctaa

SEQ ID NO: 68935 - DNA, 1386 bp, Oryza sativa
  Clone ID: PAT_MRT4530_69652C.1
atggtggcgcacagtgttcttccggcaaaagagatcattgggtggcgtccagcatgcggcgaagcattcccaacccctgacacacatgaggtcgtggtattttctcatttcttctatggcgggccgcatttttccctattccgctgcatcttcttcctcaagccccagccaaacaagagcaaaccatgtgttgttgggggagccggttttcaactgagggggaccttgagccaaaaatacttctccatgccattcaagacctcgaacaaaggttggcatgcgaactggttctatgtgcaaaactccgagccaacgcttcccaggaaagaatgtacaaaatcttctcgaatgccatcgtggtcaactattcacacttattgccagtcgtgccatataatgccttcaaccctcctccaccggaaaccaactgacatcgatccatctggaaaggactctgaaccgactggcacggagactggtccttcgactgaaaccgggttgactaccgaagatcgcccgagtggtgaccaatcagcaaccgacaatgtagcaaccagcaataagcccccgattggaaaccagtcagctaaagctaaggtcagtgctgatcaggagcccccgactggaaaccagtcgggtacagagcaaagtaaagatatcccagaagcagaggctcaaaccaatagccctcccaagacaaacactggcgctggctctggaactaactctcctgtcagggtggaaggacctgctcatccccgaccagaaatcataacagtgcaagctgccaagatgtctgagctggaaaggcgaaacagggctctggaaaaggataagggcgaactgacgaagcagagggactcggctctgaaagatgtcgaagatcacaaaatcaaatcccaagcccaattcgacgtcttggttaacaaaatcaagaggcttgagggagctagagatgaggtcgccaacgccgctacaccactcgtccaagccatgttttttaataacaatggtccgagttcatttgatgcttccgaaatcttcgacaagctgagaattgccccagatacatattttaagaacatcaaggaagctggaagtatgggagcaagcctggcgttggcgatgaccaagtccttgtacccgaagattgatattgacgccgttgatggctttacagacgggacaagagaagaagctgctcttgacctcatcaatgacgcgcagaaagctgccgataagatagccgttgatgtagttgagaggttccaagaaaacgaccttaggccgactgggtctggctacttcacgggcttcctccagtcggttgatatcgtctactcggtcttctccgtagcgctcctcgctgaagttgcaaaatcgtaa

SEQ ID NO: 68936 - DNA, 1908 bp, Oryza sativa
  Clone ID: PAT_MRT4530_69653C.1
atggcgaaagagagagaaagctttgagagtcagtgggcgtcttccgatgtaacggaggagaacctgaaggagatggtggcgcacggcgtgcttccggcaaatgagatcatcgggtggcgtccagcgtgcggtgaaacgtttccgacccccgacacacacgaggtggtggtattctcccatttcttctatggcgggttttcccttccgacctcaagtttcttccgagggattttagatttctatgggctcagtttgcatcacctaaaccccaattccatagtccacatcgccaatttcatccatgcttgcgaggcctttctggggattaggccgcattttgctctattccgtcgcatcttcttcctcaagccccagccaaataaaagcaaaccgtgcgtagttgggggagccagatttcaactgagagggaccttgagccaaaaatacttctccatgccatttaagacctcgaacaaaggttggcacgcgaactggttctatgtgcaaaaccccgagccaacgcttcctgggtactcctgtcttcctccagcatatcgcgatacctggaactcacttcctatgggagaagaggctgcccaagcgcttgacctattggatcgcatgctgaagcttaaggaacagggtctgcagggggagcaaattacccggcacttcatcaggagccagctggcaccattcaaggaaagatcccgaacagcttttgagttcgatggcaagcatgaccccaaccgagagaacccagttcaaaattatgcaggagagaatgtacaaaatcttctcgaatgccatcgtgatcagctattcacacttactgccagtcgtgccatacaatgccttcaaccctcctccaccgatccttttggaaaagaccccatgccgaatggcacggagactggtccttcagcagaaactgagccgactgccaaggaccacccgggaccaatgatcggtgatgaagaagaggttcttcggatacaatcggctgaagattctcgcccaccaatattagtcaagtggtgggatgatgaaatacgatcacagggaattgtaataaataaacaaaaggaagacgaggaagtatgcctgctgaaaaagacactcggccaagctactcatcttgtaaatagaatccatcttaggaatgaggcaaatactgcaaccctcgagaaattggttccctaccttggaaccctggaagcaaccagagatcaactgtgtgaagcgaaggagcttgccaggaagactgagcatgaccttagggactggatcgccgagctccaggactccaactttgagctaagtggttcatcaaaactggaaagcaatatagtgcaagctgccaagatatccgagctagaaaggcgaatccaggctctggagaaagacaaggtcgaacgggcaaaacagagggactcggctctgaaagacgtcgaagatcgcaaaatcaaatcccaggctcaattcgacgtcttggttaacaaaatcaagaagcttgaaggagccagagatgaaatcgccaatgccgctacgccactcgtccaggccatgtttttcaataacaatggtccgagttcaattgatgctgccaaaatcttcaacaagctgagaactgctccggatacatattttatgaacatcaaagaagctggaagtatgggggcgagtctagcgttggcgatgaccaagtccttgtacccgaagattgatattgatgccgttgatggcttcgcagacgggacaagtgaggaaaccgcccttgacctcatcagtgatgcgcaaaaagctgctgacaaaatagccgctgatgtagttgagaggttccgggacaacgatcttaagccgactaggtctgataactctgatgatgaaaaaactgaatctgattga

SEQ ID NO: 68937 - DNA, 412 bp, Oryza sativa
  Clone ID: PAT_MRT4530_69654C.1
tggggtggttttttttttttttgggggtttttttttttttttttttttttttttttttttttttttttttccccccggccaaaaaaaaatttattgggggggggaaccaaaaatacaaaaacggaattttctcaaaattaaacccgggggcccaagggggaaaaaaaaattatttatgggggcgggaaaggaaaagttccgggggaaacccaaattccttggaaaaaccccaaaaaaaaagggccccgcctattgccggtattgcggaagggttggggactgaaaaaaaagccaaaagaggggggggggggggaccccccccccccaaatggaattggccaaaggggaaatcaaagggggcccctggaggttttggggaggccgggaaagacctttcccggggggggggggg

SEQ ID NO: 68938 - DNA, 1996 bp, Oryza sativa
  Clone ID: PAT_MRT4530_69655C.1
atggtggcgcacggcgttcttccggcaaaagagatcatcgggtggcgtccaacatacggtgaaatgttcccgacccccgacacacacgaggtggtggtattctcccatttcttttatggcgggttttctctttcgacctcaagtttcttccgaggaattttggatttctatgtaatcagcctggaccacctaaaccccagttccatagtccatatcgccaatttcatccatgcttgcgaatcttttttggggattaggccacatttcgctttattctgccgcatcttcttcctcaaaccccagccaaacaaaagcaaaccatgcgtagttgggggagccggatttcaacagagggggaccttgagccaaaaatacttctccatgccattcaagacctcgaacaaaggttggcacacgaactggttctatgtgcaaaaccctgagccagcgcttcccggatactcctgtcttctcccagtctatcgcgatacctggaactcactgccgatgggagaagaggccgcccaagcgctcgacttgttggattgcatgcttaagctgaaagaacaaagtctgcaaggggaacaaatcacccggcacttcatcaagacccggctggcaccaatcaaggaaagatccagaacagcctttgagtttgacggcaagcatgaccccaatcgagagaacccagaatctcttgagttcaaaattatgcaggagaggatgtacaaaatcttctcgaatgccatagtggtcaactattcacacttattgccagttgtgccatacagtgccttcaaccctcctccaccgtcgactgagaacttggaagaccatgcacaggaattcgctttgatgaagtccgatcctccaattgctcaacgccgctcacctcaccggcacactggccaagccagcggagggccgaagattcagtcggacgtccaacccaacacctcaagatcgactaaccagtcagattctcgtaagaggaagctggtttcaagtgacgatgaaggtgatgacgcggaaaagacgggcaacaaaggggtgattggaaaacaactaaagccaaccaatccgaagaagaaaacatccagtcgtcccatgccaaaaatcaggaagtcatccagaaaaccatctgacatagatccctctggaaaagaccccacgccgactggcatagagactggtccttcagtagaaactgggtcaactgccgaaaaccgcccgggtaataatcaactggcaaccggcaatgtagataccaggaatgagcccccgactggaaaccagtcggctgaagctaaagccagtgctgatcaggagcccccgactagaaaccaatcgggtacagaacataatagagatatcccagaaatggaagctcatgccaacagccctcccaagatggacattggtgctgaccctggaactagttctcctgttaggttgaaaggacctgctcgtccccgaccggaaattatcacagggccattgattggtgatgaagaggagctcctccggatacgatcggctgaagattcttgcccaccaatattagtcaagtggtgggatgatgaaatgcgaccacaaggaattgtaataaataagcaaagggagcatgcacttgtccaagccatgttcttcaataacaatggtccgagttcatttgacgctgccgagatcttcgacaagctgagaattgctccggatacatattttaagaatatcaaggaagctggaaacatgggagcaggcctggcgttggcgatgaccaagtccttgtacccgaagattgatattgatgccattgatggctttgcagacgggacaagcgaagaagctggtcttgaccttatcaatgacgcacaaaaagctgctgataagatagctgctgatgttgttgagagattccaggacaacgaccttctgccgactggatctaataactctgatgatgaaaagaatgatactgattgatgttgtattctaa

SEQ ID NO: 68939 - DNA, 433 bp, Oryza sativa
  unsure (1)..(433): unsure at all n locations
  Clone ID: PAT_MRT4530_69656C.1
cccacgcgtccgcccacgcgtgcgcgcactctgccgcgacaaagaaacagcagaagataagaattaagaattagtttagatactgcaagtattttgccttgaaggtatatggcagacccaactaacatatgaccatgttcttattagaacttcatctgtaacttttttctttgcggggggggggctggccaaatacttgagcggggtgtcagttagtttgatggtgagctgacctgttcctgcagcacataagacaaagaagcctacatgttgttttggcagtgtgcagtgcctaccgatatcctctagactctggcacatacttaaagttctgatctggagatcactagcgtggtgggccattggccagntaacagattttgatcttccataggggtgtttgagcacnggnaaaaggggattttcctgttat

SEQ ID NO: 68940 - DNA, 651 bp, Oryza sativa
  Clone ID: PAT_MRT4530_69657C.1
atggcgacggtggttccggcgaactcaggtgagggcggcggatatggtgagcatcagtggagcaaggggagcgtggtggtagcggcggctcagcctggggaggccgggagcggcggcgcgccgtgcggctggaggcggccgaacagagcggcgacgccgggaggcggaaacggcggcactccggcgtcggattggatgggaaaacagaagggaatgggagtactcggcaccgggggttggtgcggatttgaggaggtgaaagaggttgaaattgcgcttcttttgcctccggtcttgagccttctagttgaggaacgacggaattatggaggcaggaagctggaggtgtcgtccgggcattcgttcgtcgttcgtcctcgtggaggcatgagggagagaaagatcaacctcgtcggtgctcaggggtgtgatgtgggagaggaagctcaagctctagatctgaaaaaaaagaaacccagtcaccggccattcgccatccccaggcatgccgccggtcgcgcgtcgtctccacatgtgccgcccgtcgttgtcccgcctgctgccgccgccactgctgttgcccgctgcttcccgccgacgctgcctaccgctgtagacacttctgccgttgtctgccaccgctgcccgtag

SEQ ID NO: 68941 - DNA, 2436 bp, Oryza sativa
  Clone ID: PAT_MRT4530_69658C.1
atggtggaagagagacaaagctttgaaagccagtgggcaccctccgacgtaaaagaggggaacttgaaggagatggtggcgcacggcgttcttccggcaaaagaaatcatcaggtggcgtccagcgtgcggtgaaatgtttccgacccccgacacacacgaggtggtggtattctcctatttcttttatagcgggttttctcttccgacctcaagtttcttccggggaattttggatttctatgggttcagcttgcatcacctaaaccctaattccatagtccacatcgccaatttcatccatgcttgcgaagcctttctgggggttaggctgcatttcgctctattccgccacatcttcttccttaagccccagccaaacaaaaacaaaccatgcgtagttgggggagccggatttcaactgaggggaaccttgagccaaaaatacttctccatgccattcaagacctcgaacaaagtatatcgcgatacctggaactcactgcctatgggagaagaggtcgcccaagcactcgacttgttggatcgcatgctgaagctgaaagaacagggtctgcagggggagcaaatcacccggcacttcatcaagagccggctggcaccaatcaaggaaagatctaggacagcctttgagtttgacggcaagcatgaccccaaccgagaggacccagagtctcttgagttcaaaattatgcaggagagaatttgtgccataaaatgccttcaaccctcctccaccggatacacttgtcttcccctagtatatcgcgatacctggaactcactgcctatgggagaagagatcgcccaagcgctcgacttcttggatcggatgctgaagctgaaagaacagggtctgcagggggagcaaatcacccggcacttcatcaagagccggctggcaccaatcaaggaaagatccaggacagcctttgagtttgatggcaagcatgaccccaaccgagaggacccagagtctcttgagttcaaaattatgcaggagagaatgtacaaaatcttctcaaatgccatcgtggtcagctattcacacttattaccagttgtgccatacaatgccttcaaccctcctccacagacgggcaacaaaggggtgactggaaaacagccaaagcaaaccaatatgaagaagaaaacatcaagtcgtcccatgccaaaaatcaggaagtcgtccagaaaaccatctaacatagatccctctggaaaagaccccacgtcgactagcacagagactggtccttcagtagaaactaggccgactaccgaagaccgcccgggtaataatcaaccggcaaccggcaatgtagataccagcaacgagcccccgactggaaaccagttagccaaagcagaagccagtgctgatcaggagcccccgactagaaaccagtcgggtacagaacagaatagagatatcccagaagtggaagctcaagccaacagccctcccaaaacggactatgggccaacgattggtgatgaagaagaggtcctccggatacgatcggctgaagattctcgcccaccaatattagtcaagtggtgggacgatgaaatgcggccacaaggaattgtaataaataagcagaaagaagacgaggaagtatgccagctgaaaaagacactcggccaagctactcgtcttgtaaatagaatccatcttagaaatgaggcgaagactgcaaccctcgaaaagttagttccccaccttggaacccttgaagccaccacagaccagcttcgtgaggccaaggaacttgctaggaagaccgagcatgatctgagagaccggatcgccgagctccaagactccaacttcgacctgagtggttcatcaaaagtgcaaacgaccaagatatccgatcaggaaaagcggatcaaggcgctggaaaaggataagggcgaactgacaaagcagagggactcggccctaaaagatgtcgaagatcataaaataaaatcccaggctcaattcgacgtcttggtcagcaaaatcaagaggcttgaaggagctagagatgaagtcgccaacgccgctacaccactcgtccaatccaagttctttaataacaatagtccgagttcatttgacactgccaagatcttcgacaagctgaggattgctccggatacatattttaagaatatcaaggaagctggaagcatgcgagcaggcctggcgttggcgatgaccaagtccttgtacccgaagattgatattgatgcaattgacggctttgcagatgggacaagtgaagaaactgctcttgaccttatcaatgacgcacagaaagctaccgataagatagctgccgatgttgttgagagattccaggacaacgacctctggccgactggatctagtaactctgatgatgaaaagactgatactaattga

SEQ ID NO: 68942 - DNA, 290 bp, Oryza sativa
  Clone ID: PAT_MRT4530_69659C.1
gtttccgtttcagaacagcccaagcccttcttcgatgggggcaggatgatcctgcccgagaagaagctcgcatcgtgaggagaacgaccaacgatggtcgatatcatgaacaagctgtggggctactggctcggtcagacggccaacatggagatctcctgcgccggccacaacataaagacattgtcgacgggcggatgagagggggcaacgtgactggcgtacaagctgaatgggatgccgtagaagccgttgtaggagctgctactgcagcactacctgacctaggg

SEQ ID NO: 68943 - DNA, 5700 bp, Oryza sativa
  Clone ID: PAT_MRT4530_6965C.1
gctgccgatcaaatcgactggtacgctagcatacccgaaggcgagttttggacctgcactggagttaaacagatctcccaggcctcgtgttttacgtcaacactcttttggcatgcccgatgggaccgataagaagtcagacaagcaattccttctcatggccgagaaaccaccgctatcaccatcttcggctagttcaggcactgtcaaggagaagatccagaagttaggtttgaccgacgtcaatgaagggaacgtcgtacccatcgatccagaaaaattcacacctgatcaaaagaaagattttgaagcgatgatgcaggcagcacgtgatcaattcttgaactcattcatgcagactcgcaaggggacacttgttcagaagtataaaataaaggtggttcttgacgatcccgagactggttcctctaaggatggagaaggaaaacaaactcaagatggctcggctcaactgaatgacaaaggtgctacagatggttttccaccaaatcaaggtgacaactctcaaggggtacatggggttcaaggtgatggttttaggggcattcaagatcaggttgactatgctgtacaccatgctttgatcaatcaatctgagaaatatggtgaagtcaatgattgatggttcaatggccgagtatcaggttacaggaccagtttacctacaaggaggggtgttcccgaattatcggccgttaatcaccgataatctaccagtcgccagtcagtccctcttaatgcaccatcagctcagccgacgataccagcatcggctcccgcacctactgcaccaccttcagccccaggccaattaattaatccccgattgttggtgagagaacagccacagcacactggacagaatgtgaatcggctaacgcaagaccaggttgcatctatgttcttacgtcctcaacacaccattgatccagcccagcagcagccgattcagcagacactaccaaggcagcaggttgtgcaaccaggtttgcaacacctggtggtcaacccatgcagcatgccgcaaatcaggttgtcccagaacacttggttcatcatgtgcagccagatggcacgatgtcatgaaggagcagttcgggcttaggccgaaagacgctggaaacctatatcgacagccatatcctgaatagtttgagagagttcctctgcctaaccgatttaaagtttcagatttttcaaagttctcagggcaagatagtacatcaacttatgagcacattagccgatttttagctcaatgcggtgaagcatcggctgtagatgccttgagggttcggttattccggttgtctttggctggatcggcctttacttggttttcttctttaccgtatggatcaattaatagttgggctaatttagaaaagcagtttcatagctatttctatagtgggattcatgagatgaaattgtctgatctaacatcgatcaagcaaaagcatgatgaaccagtgcatgagtatattcagagattcagggagatgggaaataagtgttacagcttgagtttgactgatgcccagttagccgatttggctttttagggtatgattgctctaattaaggagaagttctcatatgaagactttgaaagcttgtcacaccttacacagaaggtagccttgcatgaacaaaggtatgcagaggctaggaaaaattctagaaaggttaatcatgtttgcccttatatatatggatcggacgatgaggatgatgattatgagatagctgcagctgagtgggtaaggagtaaaaaggttataccatgccaatgggtaaagagctcaggaaaaaaggagaggtatgactttgatatcactaaggctgacaaaattttcgacttgctactccgagagaagcagattcaacttcctgccagtcacacaattccatcggctgaagaattaggtaagaaaaggtattgcaagtggcataattctgggtctcatatgactaatgattgcaaggtcttcaggcagcagatccaagcggctatcgaaggaggcaaaatcaagtttgatgactctaagaggccgatgaaggttgatggcaatccttttcctgttaatatggtgcatacagctggccgaacagccgatcggggtcgtgcaaggggttttcaggtgaattcggctaagattatcaacaaatatcagaggaagtatgacaagcagcaggagaagcatcatgaagaagacgacgatggtatgaggttgcaatctattgaagactgtcctaggtgcggtgatattgccgagagctcaagccgatcatatagtaggggcaatcggctaaggcagacaagagttcctgttcatcaaagattgggtccagtgaatcaagatcgtggctaagaggacaatgaaaacaagaaaaatcaatggtgtccttctggtatctttacgaagaatcaaaagagaaggaaaacgaagccgaggcgggtgtggcgtgttaagaatcaggttcctgtagccgatgaagccacagctgatgaagcaaaaaggttagctaaaggaaaaagcgtcgtaactgcttcggtcaacatggttttcactttgcctgccgagtttgggatcaagtaagccgatatcgatgaagttgaagaagaatcggctaaattgattttgtcgccagggcaggtagtttttgagaagccagaggggacagagaattgacatcttcagccattgtatataaatggttatgtcaatgggaagccgatgtccaagatgatggtcgacggtggggctacaatgaacttgatgccttacgctacattcagaaagttgggcagaaacgctgaagatctcatcaagacaaacatggtgcttaaagactttggcggcaatccatcagaaaccgaaggagttttgaacgtggaactgacagtcggcaacaaaaccatccccacaacattttttgtcattgatgggaagggttcttatagcttgttgtttggaagggatgggattcatgctaattgttgcattccttcaactatgcatcaatgcttgattcagtggcaaggcgacaagattgaaattgtgccagccgacagccaattgaagatggagagcccaagctattattttgagggcgccgtggaggattcacatgtctacaacaaggacacggtagatgatctcgatgacaaacaagggtagggttttatgtcggctgatgatttggaagaaattgatataggtctagaatttagaaccaagttgatagagctgttaaaagaattcagagattgcttcgcttgggagtattatgatcaaatctttatggctgaagaagatattcataagacaactttcaggtgtcctggtgcaatcggcttgttcatatgggttgtgatgactttcggcttgaagagtgctggagctacatatcaaagagccatgaattacatataccatgatctaatcggctggttggttgaggtttacattgatgatgtggttattaagtctaaagaaatagaggaccacatagccgatttgaggaaggttttcgagagaaccagaaaatatggcctgaagatgaatccgacaaaatgtgcttttggcgtatcggctggccagtttttgggatttcttgttcacgagagggggatcgaggtgactcagaggagtgttaatgcgatcaagaagattcagcctccagagaacaagacagagctgcaagagatgatcggcaagataaattttgttagaagatttattactaatttatccggtaggttagagcctttcacaccattgttcaggttgaaagccgatcagcagtttacttggggggcagagcagcagaaagctttggataatattaaggaatatcttagttctcctcccgttttaattcctccatagaaaggaataccttttagattgtatctatctgccggtgagaagtcaatcggctcagtcttgattcaggagctatattgaaaggaatgagttgtattctatcttagtcgtcggctcttggatgctgaaactagatatttccctgtcgagaagttatgcttgtgcctatatttttcatgtacaagattgaggcattatctactatccaatgagtgtactgtcatatgcaaggctggtgttgtcaaatagatgttatcggctccaattttgaaaggaagggttggaaagtagatattctctttaactgagtttgatcttcggtatgagtcgccgaaggcaattaagggacaagctatagccgattttattgtggaacatcctgatgattcaatcggctcggtcgagattgtgccatggactttattctttgataggtcggtatgtactaatggttgtggcattggcttggttataatttcccctcgaggggcatgtttcgagtttgcttatactattaaaccttatgcgactaataatcaagctgagtatgaggcggtgctcaaagggttgtaattactcaaggtagttgaagccgatgctattgaaatcatgggggattctttgcttgtaatcagtcaattggcaggagaatatgaatgcaagaatgatacattaatggtttataatgagaagtgccaagaactgatgaaggaatttcggctggttactttaaagcatgtgtctcgagaacaaaatattgaacctaatgatttggcccagggggcatcgaggtataagccgatgatcaaagatgctaaggttgaaattgcagcaataacagccgatgattggaggtatgatgtgcatcaatatttacataatccatctcaatcggcttctaggaaattgagatataaggcgttgaagtacagtctattggatgatgagctttactatcggacgattgatggggtgttgcttaagtgtttgagtaccgatcaggctaaagttgcaatcggcgaagttcatgaaggaatttgtggtactcatcaatcggctcataagatgaagtggttacttcggcgtgcagggtatttttggctgacaatgctggaagattgtttcagatattacaaagggtgtcaagattgtcagaagtttggagcaattcagcgagtgccggcgtcggctatgaatcctattattaagccatggccattcaaaggttgaggaattgatatgatcgatatgataagtccaccatcgagtaaaggacataagtttatattggtggcgacccgattatttcaccaagtgggtagaggcgattcctttaaagaaagttgattctggggatgcaattcagtttgttcaagagcatataatctaccagttttgtattcctcaaactattacaaccgatcgaggcttaattttcgtgtccgatgagtttgttcagtttgctgatagcatgggtatcaaattgttgaattcttccccatattatgcacaagctaatgggcaagctgaggcatctagcaaaagcatgatcaagttgattaagaggaaaatttctgattatcctcggcattggcatactcgtttagccgaagcattgtggtcttatcggatggcttgtcatggatcgattcaagttcctccttataagcttgtttatgggcatgcggctgtattaccatgggaagttaaaatcggttcgagaagaatagaattgctcaatggtaagtacttgcagaaatattacccaagtgtttgggttaatgca

SEQ ID NO: 68944 - DNA, 2193 bp, Oryza sativa
  Clone ID: PAT_MRT4530_69660C.1
atggtggcgcacggcgttcttctggcaaaagagatcatcggatggcgtccagcatgcggtgaaatgtttccgacccccgacacacacaaggtggtggtattctcccatttcttttatggcgggttttctcttccaacctcaagtttcttccgaggaattttggatttctatggaattagcttgcatcacctaaaccccaattccatagtccacatcgccaatttcatctatgcttgtgaagcttttctggggattaggccgcatttcgctctattccgccgcatcttcttcctcaagccccagccaaacaaaagcaaaccatgcgtagttggagaagccggatttcaactgagggggaccttgagccaaaaatacttctccatgccattcaagaccttgaacaaaggttggcatgcgaactggttctatgtgcaaaatcccgagccagcgcttcctggatactccagtcttcccccagtttatcgcgatacctggaactcaccaccgatgggagaagaagccgcccaagcgctcgtcttgttggatcgcatgctaaagctgaaagaacaaggtctgcaggggaaacaaatcacctggcacttcatcaagacccggctggcaccaatcaaggaaagatccagaacaacctttgagtttgacggcaagcatgaccctaaccgagagaacccagaatctcttgagttgaaaattatgcaggagagaatgtacaaaatcttctcgaatgctatcgtggtcagctactcacacttattgccagttatgccatacaatgccttcaaccctcctccgctgtcgactgaaaacttgaaataccatgcacaagaatttgctttgatgaagtccaatcccccaattgctcaacgccactcacttcaccgacacactggccaagccagtggagggccgaagatccagtcggacgtccaacccaatgcctcaagatcaactaaccagtcagattctcgtaagaggaaactggtttcaagtgacgatgaaggcgatgacgcggagaagacgggcaacaaaggggtgattggaaaacaaccaaagtcaaccaatccgaagaagaaaacatccagtcatcccatgccaaaaatctggaagtcatccagaaaaccatctaacataggtctctctggaaaagaccccacgccaactggcacagagactggtccttccgtagaaactgggccgactaccgaaaaccgcccgggtaataatcaactggcaaccggcaatgtagataccagcaatgagcccccgactgggaaccagtcggccgaggctgaagccagtgcagatcaggagcccccgactggaaaccagtcgggtacaaaacagaatagagataccccagaaatggaagctcaagtcaacagccctcccaagacggacacctgtgctttccctggaactagttctcctgctagggtccaaggacctgctcgtccccgaccggaaatcatcacagggccaatgactagtgatgaagaagagatcctccggataagatcgactgaagattctcgcccaccaatattagtcaagtggtgggatgatgaaatgctaccacaaggaattgtaataaataaacataaagaagacgaggaaatatgcctgctgaaaaggacacttggccaagctactcgtcttgtaaatagaatccatcttaggaatgaggcgaagaccgcaaccctcgaaaagttagttccccacctcggaacccttgaggccaccagagaccagctacacgaagccaaggaacttgccaggaagactgagcatgatctcagagatcagatcgccgagcttcaagattccaactttgagctgagcggctcatcaaaaggctcaattcgacgtcttggtcaacaaatcaagaggcttgagggagctagagatgaggtcgccaatgccgctacaccactcgtccaagccatgttttttaataacaatggtccgagtgcatttgatgcttccgaaatcttcgacaagctgagaattgctccggatacatattttaagaaaatcaaggaagctggaagtatgggagcaagcttggcgttggcaatgaccaagtccttgtacccgaagattgatattgacaccattgatggctttgcagacgggacaagcgaagaagctgctcttgacctcatcaatgacgcgtag

SEQ ID NO: 68945 - DNA, 1248 bp, Oryza sativa
  Clone ID: PAT_MRT4530_69661C.1
atggcggaagagagagaaagctttgagagtcaatgggtgccctctgatgtaacggaggagaacctgaaggagatggtggtgcacggcgttcttccggcgaaggagatcatcgggtggcgtccagcatgtggtgaaacgtttccgacccccgacacatacgaggtggtggagagaatgtacaaaattttctcgaatgccatcgtggtcagctattcacacttattgccagtcatgccatgcaatgccttcaaccctcctccaccgataccagcaacgagcccccgactagaaactagtcggccgaagctggagtcggtgctgatcaggagcccccgactggaaaccagtcgggtactgaacaaaatagagatatgccagaagcaaaagctcaagccaacagccctcccaagacggacgctggtgctggccctggaaccaactctcctgttagggtgcaaggacctgctcgtcctcgaccggaaattattacagaagaggttcttcggatacgatcagcttctgaaaaagacactcggccaagctactcgtcttgtaaatagaatccatcttagaaatcaggcgaagaccgcgaccctcgaaaaattggttccccatcttggaaccctggaagccaccaaagaccagctgcgtgaagccaaggagcttgccaggaagactgagcatgatctgagagaccggatcgcagagctccaagactccaacttcgagctgagcggttcatcaaaagtgcaaactgccaagatatccgagctggaaaggcgaatcaaggctctggaaaaagataagggcgaactgacaaagcagagggactcggctctgaaagatgtcgaaggtactcacagctgcaacttcaagaaaccactctcatcttcatgcccactcgctgatgcgaatctacttgtgcagatcacaaaatcaaatcccaagcccaattcgacgtcttggttaacaaaatcaagaggcttgagggagctagagatgaagtcgccaacgctgctgcaccactcgtccaagccatgttcatttgatgctgccaaaatattcgacaagccgataattgctccagaaacatattttaagaacatgaaggaagctggaagcatgggagcgagtctggcgttggcgatgaccaagtccttgtacccaaagatcaacattgatcctatcgatggctttgcagacgagacaagtgaagaagctgcccttgatctcattaatgatgcgtag

SEQ ID NO: 68946 - DNA, 810 bp, Oryza sativa
  Clone ID: PAT_MRT4530_69662C.1
cccacgcgtccgggcagaggcacggcggaggccagcgaacgagcgagagtggaggcacggcggaggcgcggagaggccggtgagctcctcccaagtccaaatcgttcatcgccggcgagctccaccgcgtggaaagagaggaggcggggtggccgcggtcgtcggcgatgagttcgaaggcgagggcccagaggaggcgcggggaggccggcgagctcctcccaagtccaaatcagtcgtcggcgagctccaccgcgtggaatggaggaggtggggtggccacggtcgttggcgatgaactcgaaggcgggggtccagaggaggcgaggggagagctccttagggatggagcggacggcgacgaggagcagggcggcggagtggaggaagcggcaaacggcgcatgaggagtcctccagcgccgcgcgccatcttgtcgtcctcctccagctcggtcaacgcctccccgcgctcgccgccggcgtcggtgtcggcttggcggtggcggcagcacaagaacggccggcatatggtggtgccgatgaccgtgcattgcgccgcctgtggaagggccgctgggtctccatcgccaccagggggagggacgccgccgccctccaccgcttcatcgccgccaccctcctccgctcgcttctcccccacccggatgttgcgccgccttcgtccgccatgccgaatgccgtttcgccgcagaccggggggacaagcgcccgtcttggagaacctcgtcgtcagagcctggtgcttgcgcccgttgccgaccagcatgccggccactggcctcgatga

SEQ ID NO: 68947 - DNA, 2184 bp, Oryza sativa
  Clone ID: PAT_MRT4530_69663C.1
atggcggaagagagagaaagctttgaaagccagtgggtgtcctccgatgtaatggaggagaacttgaaggagatggtggcgcacggcgtccttccggcaaaagagatcatcaggtggcgtctagcatatggtgaaatgttcccggcccctgacacacacgaggtggtggtattctcccatttcttttatggcgggttttctcttccgacctcaagtttcttccgaggaattttggatttctatgggatcagcttgcatcacctaaaccccaattccatagtccatattgccaatttcatccatgcttgcgaagcttttatggggattaggccgcatttcgctttattccgccacatcttcttcctcaagccccagccaaacaaaaacaaaccatgcatagttgggggagccggatttcaactgagggggaccttgagccaaaaatacttctccatgccattcaagacctcgaacaaagtctatcgcgatacctggaactcactgccaatgggagaagaggccgcccaagcgctcgacttgttggatcgcatgctaaagctgaaagaacaaggtctgcagggggaacaaatcacccggcacttcatcaagacccggctggcatcaatcaaggaaagatccagaacagccttcgagtttgacggcaagcatgaccccaaccgagagaacccagaatctgttgagttcaaaattatgcaggagaggatgtacaaaatcttctcgaatgctatcgtggtcagctattcacatttattgccagttgtgccatacaatgccttcaaccctcctccaccggaattcgctttgatgaagtccgatcctccaatcgctcaacgctgctcacctcgccgacacactggccaagctagtggagggccaaagattcagtcggacgtccaacccaacgcctcaagatcgactaaccaatccgattcttgtaagaggaagctggtttcaagtgacgatgaaggtgatgatgcggaaaagacgggcaacaaaggggtgactggaaaacaaccaaagccaaccaatccgaagaagaaaatatccagtcgtcccataccaaaaatcaggaagtcatctagaaaaccatctgacatagatccctctggaaaagatcccactccgactggcacagagactggtccttcggtagaaactggaccgactgccaaaaaccacccgggtaataatcaaccggcaaccggcaatgtagataccagcaacgagcccccgactggaaaccagtcggctgaagctaaagccaatgctgatcaggagccctcgactggaagtcaatcgggtacagaacagaatcgagacatcccagaaatagaagctcaagccaacagccctcccaagacggacactggtgctggccctggaacgagttctcctattagggtgcaaggacctgctcgtccccgaccggaagttatcacagccaaggagcttgccaggaagactgagcatgatctaagagaccggattgccgagctccaagactccaacttcgagctgagcggctcatcaaaaggtaactctcatccttgtctgactcattttatgctgctatccatgtgctatcaaccaacaagaagcaatacagtgcaagccgccaagatatccaatctggagaagcggatcaaggctctggaaaaggataaggacgaactgacaaagcagagggactcggccttgaaagatgtcgaagatcgtaagatcaaatcccaggctcaatttgacgtcttggtcaacaaaatcaagaggcttgaaggagctagagatgaagtttgcaacgcagctacaccactcgtccaagccatgttcttcaataacaatggcctgagttcatttgatgctgccgagatcttcgacaagctaagaattgctccggatacatattttaataatatcaaggaagctggaagaatgggagcaggcctggcattggcgatgaccaagtccttgtacccgaagattgatattgacgccattgatggctttgcagacgggacaagcgaagaagctgctcttgaccttatcaatgatgcacaaaaagctgctgataagatagccgccgatgttgttgagagattccaggacaacgacctccggccaactggatctaataactctgatgatgaaaagactgatactgattga

SEQ ID NO: 68948 - DNA, 205 bp, Oryza sativa
  Clone ID: PAT_MRT4530_69664C.1
actgttgttcacattttattaaagaacccgcaggaggcaccctggttatagctcatgaaaatacggagcggagcttaaagacgaacaaaattttccatatagggagggacatcaaaagttggggaaaagatggcaaaaactgtttcctgtgaaaaacagttatccgctcaaaatccaaaaaaaaataaaagccgaaaccataaat

SEQ ID NO: 68949 - DNA, 327 bp, Oryza sativa
  Clone ID: PAT_MRT4530_69665C.1
aaaacacaacacacttatgctaaaccacagcgtttaaggaaaaagaattactcaaaacattatccagcattaacataaggagacgtaccatataccaacaagacaaaagccaactgaaaacatgaagcaaacttatgacgagaactcaccggcatgaaacgagcaaatcgataggtaactgaggcagggccttgcactctgcttacactggcacacatcgctaagtactacgctggacgaacggagaaaccccttgcgctgcctccacccaaactacacatgtgaaacgatagctgcaaaaccgtaaatatgggcgtgaacatcacc

SEQ ID NO: 68950 - DNA, 2091 bp, Oryza sativa
  Clone ID: PAT_MRT4530_69666C.1
atggcgaaagagagagaaagctttgagagtcagtgggcgtcttccgatgtaacggaggagaacctgaaggagatggtggcgcacggcgtgcttccggcaaatgagatcatcgggtggcgtccagcgtgcggtgaaacgtttccgacccccgacacacacgaggtggtggtattctcccatttcttctatggcgggttttcccttccgacctcaagtttcttccgagggattttagatttctatgggctcagtttgcatcacctaaaccccaattccatagtccacatcgccaatttcatccatgcttgcgaggcctttctggggattaggccgcattttgctctattccgtcgcatcttcttcctcaagccccagccaaataaaagcaaaccgtgcgtagttgggggagccagatttcaactgagagggaccttgagccaaaaatacttctccatgccatttaagacctcgaacaaagccaacgcttcctgggtactcctgtcttcctccagcatatcgcgatacctggaatcacttcctatgggagaagaggctgcccaagcgcttgacctattggatcgcatgctgaagcttaaggaacagggtctgcagggggagcaaattacccggcacttcatcaggagccagctggcaccattcaaggaaagatcccgaacagcttttgagttcgatggcaagcatgaccccaaccgagagaacccagttcaaaattatgcaggagagaatgtacaaaatcttctcgatgccatcgtgatcagctattcacacttactgccagtcgtgccatacaatgccttcaaccctcctccaccggaattcgctttgatgaaatccgatgctccaatcgctcaacgccgctcacctcgccggcacactggccaagccagtggagggccgaagatcaagtcgaacgtccaacccaacacctcgaggtcaactaaccagtcagattctcgtaagaggaagttggtttcaagtgacgatgaaggtgatgacgcggaaaagacgggcaacaaagggaaaccatctgacatagatccttttggaaaagaccccatgccgaatggcacggagactggtccttcagcagaaactgagccgactgccaaggaccacccgggaccaatgatcggtgatgaagaagaggttcttcggatacaatcggctgaagattctcgcccaccaatattagtcaagtggtgggatgatgaaatacgatcacagggaattgtaataaataaacaaaaggaagacgaggaagtatgcctgctgaaaaagacactcggccaagctactcatcttgtaaatagaatccatcttaggaatgaggcaaatactgcaaccctcgagaaattggttccctaccttggaaccctggaagcaaccagagatcaactgtgtgaagcgaaggagcttgccaggaagactgagcatgaccttagggactggatcgccgagctccaggactccaactttgagctaagtggttcatcaaaactggaaagcaatatagtgcaagctgccaagatatccgagctagaaaggcgaatccaggctctggagaaagacaaggtcgaacgggcaaaacagagggactcggctctgaaagacgtcgaagatcgcaaaatcaaatcccaggctcaattcgacgtcttggttaacaaaatcaagaagcttgaaggagccagagatgaaatcgccaatgccgctacgccactcgtccaggccatgtttttcaataacaatggtccgagttcaattgatgctgccaaaatcttcaacaagctgagaactgctccggatacatattttatgaacatcaaagaagctggaagtatgggggcgagtctagcgttggcgatgaccaagtccttgtacccgaagattgatattgatgccgttgatggcttcgcagacgggacaagtgaggaaaccgcccttgacctcatcagtgatgcgcaaaaagctgctgacaaaatagccgctgatgtagttgagaggttccgggacaacgatcttaagccgactaggtctgataactctgatgatgaaaaaactgaatctgattga

SEQ ID NO: 68951 - DNA, 516 bp, Oryza sativa
  Clone ID: PAT_MRT4530_69667C.1
atggagattgagggtgcattggtggcgcagatgagaagatggctggggggtcgcgcggtgtccggcaaggaggtgccaatcgcggtgactcgcgacctgcggcaaggaggtgggaggaatagcggcgtccgtatcgtgccggcaccggtggtagcaccggagtcgttggtggaaggccggaggcgtagcggcgctggtccgggtctgcctggtggggtttggctgtttgcgatttgggatggcggcgctggtccggcggtgcggcggcgctggcccgtcgcgaggaaggaggatgcgtgcggagggaggagaagcgaggaggcggcggggaatcgcggggcggagtcagcgcggcggggatttgcgcgacgggtcatcgcgtgggtgcggaatcggtgcaatcggcgaggaggacaacggatggataagattagagtcgatcgtcgatggacgaatgagatgagaggggatgatttcacccgtaggattgctaggcacaactcctcctttttatat

SEQ ID NO: 68952 - DNA, 1293 bp, Oryza sativa
  Clone ID: PAT_MRT4530_69668C.1
atggctcccgcccactcccaccggcgtggtgcgacggaggcgaacgagcagatgaggaggaagaaggagaaggcgcttcgagagaaggaggccggcgacgacgacttcgacgagggccgctacaagcgcgccgtcgagcactacgcccgcgccgccgccctcgaccccggcgacatctccttcccgatcaagtgcgccaaatcctacttccacatggaccagtacgaggagtgcgtgaggcgatgcgacgaggcggtggagaggggaagggagctccgcgccaagaaatcgctggtggcgctggcgctgttgttgaaggggacagcgctgctcaatctcgccgactgcgcttcggattgcaaggcggcgatcagggcactgaagcagtcgctggatgagcattatcataaggggacagaggctatcctggacgaggcggagagcgccatggaggagatggaggagctggagaaggaagctgccaagcaccaccgagaaaaaggcaaagaacttctcagtaagaaaaagtacaaggaagcagcaatccagtttactaaagccataaaaaggaatccattgaatcccagaaattttagcgacagagctaaatgccgcatcgagctaaatgcattggctgaagggcttgaagatgcagataaatgcattgaggtagatcctactttttggaagggatatttttgtaaaggtgaagttcagttcttgatgcacaattatgaagatgctatgacaacttacctagacggtttgaaatatggcccccaaaaaacaacaatttatgatggaataaagagatgtttagaacaaattaaaatggctaaggaccgtgatgtcagggataaggacttgtgggaggcattcaaaaaatcgagttctagccaagtcgaaaaacttacgatgcagcgcgatgtcgtcactgtggagcttaagtcagccaaggagcgtaacgctaatctagaactgcaactctcagaacagataggccgtattgaacggcttctgtcgatccaaaacagtgaacctccacatttcatctgtcctatatctcaggaagtcatgaatgatcctcactttgcagcggatggacacacctatgaagctgagcatatcaggaaatggctcaacgatggacatgacacatctccaatgaccaacgagcgacttcaacataaaaaactcactcccaatcacgcactgcgctctgctattcgggagtggcaccaacaccgaaacatgaggcatacttctccgcggcgccaacagctttttttgtga

SEQ ID NO: 68953 - DNA, 933 bp, Oryza sativa
  Clone ID: PAT_MRT4530_69669C.1
ttatttgaagacgaaggccacacagcagcggaggctggttgggggatccgtggaattaatcgccgccgccgatggccgctgtgtggcggcgccgccgtttctcgactcctccgcagcgccgccgcaatcctctcccatcctccgcctcaacgacgtccgaggaggtgttcggtcggcttcttcagcgcccctcttttcgtcggaggttcgtctcttgagaggggagtcatcaccgccggttggttggtcgcccatggggacattggaggcaggtgcccacctcatcccttcatctccatgcttctgttgcagatgcgcaaccttgtccagcagcctctgcttgtggtttttgagcaactccacaggatcactcgctcccgcagcaacatcactcgtggcggcatcacccgaactcaaacttgctctcctctttcttaccgcaactgcatcctcttccagataccatgacatttcgtgcggggtgatgagatactgctgcacgtcatccgccccgaagcccaatcccttggccactcgcccgattagctgtgcctccagcgtgatttgttccaggatgcgacgagtcgacgatgggtgagaagaagtaagcacatccgtggaggcggtccggatccaatcgaacaacgatttcttgacagggacgccgtcgcgcagatccagccgcataaggtccatgaactcgtagaggaggtcgagattgaggtagtagtccgccgcggatctcagcatatccatgcccccgggactcagctcccaacgaacctcgagctcccgatcgccgatgagccgaagcagctcatcggcctcgaaaacgttggccacgttgatggtgacccgtacgctctccccggcgccgtacttgcctatagcctcctccaactcgcgaaccgaggtgatattgatcggctccat

SEQ ID NO: 68954 - DNA, 405 bp, Oryza sativa
  Clone ID: PAT_MRT4530_6966C.1
ttctgaaccacatgataggcgctgcgattgttatgctccggtttctgaaggaaggcgctacacgaactaactcatgctgtggagagtgattgcatctacacaccggtggacactgcatgcgacactggctgccatggatcattgctagaggttgagattcgaaggaatgatgcacggcgcagttgagctggtggcatcagattgccctcactggaatagatcagagggggctgatcatctatatgttacaccagatgacttgggcgctgggttgcactagcacgaagaagaggcactgggccgtggcatgctgccatagcttcacagtgctatgctggttgagacctctggacagagaaaccatgtctgatagaaggacggatagatcaccattgcgtcttatgc

SEQ ID NO: 68955 - DNA, 1176 bp, Oryza sativa
  Clone ID: PAT_MRT4530_69670C.1
gccaacgccacggccgaaagcttttctcagcccgagagatccgctgcgagggcgcccccaacccgacggtcgccggagaagcagcagccgccgcccacccacccatccagtcgatggcgccgccggataccagccgcgcgccggcgcaaggcgaggaagccgcctccacatccccgtggcctctccggaagctccagagttttacaccagggttgtgttcgcagtacaaagcttatgagaatgcatttgtggatatggctaaaggaactatttcggatgcaatggttcttgtgaacgagcaccagacagaggcaattggatgtgccactgtggcaggattcatcttattgagaggtcctcggagatttttataccgcaatactctggggcgtttcaagactgagaaggatttactgaatgatgctgagcaaagtatgatggagtacaaaacatctatcgaacagttgaaaaaagattcaaaatacaccctagacaaaatagctgttggtgaaagtgatttgcagcgtggacaaactgatttgaggtctactggtaagcagattcgatctcttattggttccatttacaaggctgaatccacagctacaggtttgatggatcgactccggacaattccaaccagacaatctcttgaactgcgagcagaggtggcttccatggcctctgatttgaaaaaccagagatgtgttctacaagaaaggatcaacaaaatatctgaatatggtgtccgcgtctgaacttcagtaatcatatttcccatgataccacacttgcccttccaaggtggcaataaactgaatcactgcaggagatgctgtttatcgtttgatcaggccagtaccatctccggactcttaaccttttctgtaagcattttaaataggagagcaaacaaaatcactcgccataaccatggatttcatggcatattcactgtatttctgtgctgcgcttgcgcattgttccttcagcttatgtgatgtgtttcctgtaagcaatccttttggcattctggttcagaagaaccctccggctgctttttcccacatgggccccctcatcgtactaccaagttatgtgatattctgatgtaagacatctctgctccaagcctccaggaaggccataggacaatgaaattatgtttcattcttc

SEQ ID NO: 68956 - DNA, 717 bp, Oryza sativa
  unsure (1)..(717): unsure at all n locations
  Clone ID: PAT_MRT4530_69671C.1
cccaacccgcctcctcgagcgacggcgcagccatggcggaagcagcagcagcacctcccgccgccgcgtccaccaactacgaggtggacctcggcaacctcatggcctacgacccgtcgcatcacctccccgccgcatcctcctccagggaggagctgagggaggagtgcctgcggaaggggacggagctggcgcaggcggtcgccgacgccctcttcgcgctgccggccaccgaggaccgcgacggccccatggtccgcctcccgccgcccaccacccgcttcccccgcgagaagcatctaccaaggccgaagccccctactaaatgggagcagtttgcgaagatgaaagggatcacaaagcacaagaagaacaaacgtgaatgggacgagcaaactcaaacctggaagcggacttatggctatgaccgtgttaatgatgataaagacattccaatcattgaagccaaggcgacagatgagcctggtgttgatccttttgctcaaagaagggaagataagaagaagcatgttgaanagcaagaaaagaacagactnagaaacttgaaaaaagcagccaaagttggtgctttgcctagtcatatacaacttgctgcaacagcgttgcctatcacgggaactaaagcagacatacccaaaaaatctagaaagaaagatctccgagatgttgctggcatggcttcatcagcaacagcta

SEQ ID NO: 68957 - DNA, 999 bp, Oryza sativa
  Clone ID: PAT_MRT4530_69672C.1
atggcggaagcagcagcagcacctcccgccgccgccgccaccaactacgaggtggacctcggcaacctcatggcctacgacccgtcgcatcacctccccgccgcatcctcctccaggtccgcacccatcgccgctactgctattgtgccgtgctgctttgattccgtgaccaagtttcccggggttgcgcgcagggaggagctgagggaggagtgcctgcggaaggggacggagctggcgcaggcggtcgccgacgccctcttcgcgctgccggccaccgaggaccgcgacggccccatggtccgcctcccgccgcccaccacccgcttcccccgcgagaagcatctaccaaggccgaagccccctactaaatgggagcagtttgcgaagatgaaagggatcacaaagcacaagaagaacaaacgtgaatgggacgagcaaactcaaacctggaagcggacttatggctatgaccgtgttaatgatgataaagacattccaatcattgaagccaaggcgacagatgagcctggtgttgatccttttgctcaaagaagggaagataagaagaatcatatacaacttgctgcaacagcgttgcctatcacgggaactaaagcagacatacccaaaaaatctagaaagaaagatctcgaggatgttgctggcatggcttcatcagcaacagctagtggtgggaagttcgatgaaaaattgcctggcgagaaacctccaaaaaatcctggcaaacatagaaagttcctccctgttgttgaaggaaaaggaatgggcaaccaggagaaacagcaaaatgacaaaatcttgaatgctctgctggccaaaagttctgaggatcaaatggatgttggcagggcaattacgatgtacaaggtgaagaaggagaaacaaaggaggaaagataaggaaaagtcttcttcatcgaacaagctgaagccccagaagaaaacactcaagaaatcttcgaagaaaaaggcttag

SEQ ID NO: 68958 - DNA, 1325 bp, Oryza sativa
  Clone ID: PAT_MRT4530_69673C.1
atggcggaagcagcagcagcacctcccgccgccgccgccaccaactacgaggtggacctcggcaacctcatggcctacgacccgtcgcatcacctccccgccgcatcctcctccaggtccgcacccatcgccgctactgctattgtgccgtgctgctttgattccgtgaccaagtttcccggggttgcgcgcagggaggagctgagggaggagtgcctgcggaaggggacggagctggcgcaggcggtcgccgacgccctcttcgcgctgccggccaccgaggaccgcgacggccccatggtccgcctcccgccgcccaccacccgcttcccccgcgagaagcatctaccaaggccgaagccccctactaaatgggagcagtttgcgaagatgaaagggatcacaaagcacaagaagaacaaacgtgaatgggacgagcaaactcaaacctggaagcggacttatggctatgaccgtgttaatgatgataaagacattccaatcattgaagccaaggcgacagatgagcctggtgttgatccttttgctcaaagaagggaagataagaagaagcatgttgaaaagcaagaaaagaacagactagaaaacttgaaaaaagcagccaaagttggtgctttgcctagtcatatacaacttgctgcaacagcgttgcctatcacgggaactaaagcagacatacccaaaaaatctagaaagaaagatctcgaggatgttgctggcatggcttcatcagcaacagctagtggtgggaagttcgatgaaaaattgcctggcgagaaacctccaaaaaatcctggcaaacatagaaagttcctccctgttgttgaaggaaaaggaatgggcaaccaggagaaacagcaaaatgacaaaatcttgaatgctctgctggccaaaagttctgaggatcaaatggatgttggcagggcaattacgatgtacaaggtgaagaaggagaaacaaaggaggaaagataaggaaaagtcttcttcatcgaacaagctgaagccccagaagaaaacactcaagaaatcttcgaagaaaaaggcttaggttaattacattcttcggacctgctgtaggaggtgagcatagttttcgagactcaaggagaattggcaaattttgctgtctgtttgtccaatttgaacacatcggagaaatcttgttattgcaattgttggttatgatgtaagaacctgaatgctattataacatggttgtcatgaatatgcaatacatatgcattataatttcaaaaaaaaaaaaaaaaatcctcgtgccgattcctgcagcaaaaaaaaaaa

SEQ ID NO: 68959 - DNA, 517 bp, Oryza sativa
  Clone ID: PAT_MRT4530_69674C.1
ctttatctctaatctatctttatacctagtaaaaaaaagtaaggattcctagtaaaaaaaagtaaggattccgtgtatttgattccgtacgtcgtccatacgtgtctaatccattgccaggcgcctccagccaccgccgcaccacgcgggccgaaccctgacgccgcagccacgtcgatctatctccccatgccgccatgcattttctcctctaactaattgcaaaaaacaattcttcaatcctccctcattctttccccatgatttcccctttcaaattggcttttcaattcactagatttaatcttcatttaatgatagtgaatgatggctgaccggtgattttccctcagctgtttttatccctagttttgcagatttgctccgattttaggaaaaactgaaagaagagatcaagtagatcaaaagcccctcaatcaattttaggagatcgagaaagataatagatttgatagggatgattggctttagcattgtacgggcacagaactggctt

SEQ ID NO: 68960 - DNA, 284 bp, Oryza sativa
  Clone ID: PAT_MRT4530_69675C.1
gctggagttcagtgactggactatccctattagcaacccagacagtagtaaaaacggggatgttactgaaccatattccaacataccaattgggagaggtgatgttgccagacttaacgacgacgcttggctggaagaagccgagcgtgaacctgccgtttcttgacacaagcttgtcaccaacggcgagcacttcgcctgccgcgagagtatcattcgtggcggcagagcatggcggagtaacgtgcagggagaagagaagaaagccaagcgatatgtaaagc

SEQ ID NO: 68961 - DNA, 944 bp, Oryza sativa
  Clone ID: PAT_MRT4530_69676C.1
ttttttttttttttttggcaacaaaaatggatttttcatttatcgtgcacagcaactgcacttctcaacaatccatcatcgtttaattacattcaatatatactttcatcaaaatgatgaggacaaaaacatccagaagttcacctcagatgtttctttttctcattttgttttgttttaacatctctcgcataatattctgaaagtaagtgctaacaccacataatcctctaatattttcctagattgttgcctttttcaatgtaaaggaatagaggaaaggatagcaaaacaagaattagtacttgaagtagtaagaagcactggccaccaggataaccgggtgcatcctattatgtagagggaaacttccataaccccttgctaagcttgactgcagacccattgctaaaggtccacatgatagcaacaagtaaaaccattaacgagatgaaaattagcccaccgcctcttcttctggtgttgataagagtactgctaacttcttctcttgcaggttgttgtgacctaaagctcgaaatgcgttgcagtgttctgttaagacctatgttttcagccagccatagctggactgctaggaacagaatcgcgccaggcagatagagccccattgaaccatgattgtgaagcatttgaactccggttaggcggttgctcattcactgtatgaataatggtagcatctgatgaatgtgcgaagacaacatggttgtccttcatatggttccgcacatttagagcgacttgattatgtgcccataattcagttgtatgctgaaatccctggttctgaattccactagcaccaaattcaacataatggttttcagccaccacaccagtgtcatgaccaggcagaaacattggagcatcagagtattgcaaactatcaaacactccatcatcagcaggaatcaagcctg

SEQ ID NO: 68962 - DNA, 470 bp, Oryza sativa
  Clone ID: PAT_MRT4530_69677C.1
attggtgttccaagaacctctgcgcagtgaactaatcgtcgaacacttggttggcgtcgccccgccggtcagccagcgtgtcgccaccgccgccgctcgccgccatcggccagtccatgcgccgccagcagcccgcgccctgccgccagcccgcacgctgccggtcaccgccgaatcgggccagtctcaccggcgatgatgggagaatatgaggaaagagaatggaaggagttgtttaggggtagttcagtggcatttttgtgtaaatacattaaaaaaattaaagggtagtaggttttttgggatggagtagagctgtggagcagaaaaaccagctccaccctcgtagtacaaatttgtggagcagctttgccaaccccgctccaaaaatgagaatctgtaccatttcagctccagctctagataagttggagttgggagctggagctataccaaacggggccttaatt

SEQ ID NO: 68963 - DNA, 718 bp, Oryza sativa
  Clone ID: PAT_MRT4530_69678C.1
tcgttcacgcgtcggacgcgtgggttggagaggagggaggggggacaaggaggaggagcgcaccaccctctcggagaggtcgcctccgttcttgcatcgttttctttggatagggcagcgctttgacagctttggggagttagtcgagaagtgtgcacatggagtccaacagtggtgaaatcgaggagttgccacctcccccacctttgccaccaaatgctgagccaattaaaactgatgatacaaaaaagttatcaaaacctaagagggccttgatggctcgctctggttgtggcaaaaaagggcagccgatacagctgctgacgaaccacttcaaggtttcactgaaggcagcagacgaatttttccatcactactatgttaatctgaagtatgaggatgatagaccagtggatggaaagggcataggtagaaaggtgctggacaaactccagcagacctatgcgtctgagctggcaaataaagattttgcatacgatggtgagaagagcctgttcaccattggtgctcttcctcaagtgaacaatgagttcacggtagttctggaagacttcaacactggaaagtcatctgcgaatggtggccgccctggcaatgacaggccgtgaaatgacagggacagggttagaaacgcatatcccacaaaaacttttattgttgagctgaactttgagcaaaaattcctatgagcgccatt

SEQ ID NO: 68964 - DNA, 495 bp, Oryza sativa
  unsure (1)..(495): unsure at all n locations
  Clone ID: PAT_MRT4530_69679C.1
atcgatcgcatcagagggtttgtactagtactactacaaacccatcgatcgatcgcatcgacgagggnnggnctgggnntnctggcaaggctntggtagcgagcgccgttcggactttcgtgacgcaggcctcgtggtgggggttgttgcggtgaggagagggaccagcgacatgcatacgaaccactgctcagagcgtggtcagaggccaggcttacagaggactcggacgagcacagtgagcaggtcctgtggacacgttcattggtcataccacggggcagtgagcctgagggacttatggtacctcggtacaggagtactcctggcctggggtacatgatccaagggagaggttctatgggattaactctacccgggtgcccagcgacctaccaacaacaattgcaacaatgcttgcctgaaggccaaagccagagccaaaaatttagggatgagcaccataagatccaccaatttagacaaggagatatc

SEQ ID NO: 68965 - DNA, 471 bp, Oryza sativa
  Clone ID: PAT_MRT4530_6967C.1
cccatgcatctggtgatgattcatatacaatacatgtggctggaccaatgggatttgtatccaggctgttacaactaccatgaaaggcatcccatgtaaccgatgtttttgcataagacgcctttgtcttctacattgcatgtagacaaaaaaatgatcagcacgtcatgcaagacaaccacgtgatgaagtgccatgagctgttcgagcattgttatacaggatcactttacagagggacatgacgctatgatgcatggcagctagaacattgatgaggcaatcctatatggaaaaatagagatgatgtgatcgcatacgtcgtcggaatcgtgacataatatgcaacagagctttctgcatgtttatggtgacacgacattgcttgagctagatccaccatatctaactattaggattctaacagttatgcttaataactgctttatctattacagtgtgagctcatgc

SEQ ID NO: 68966 - DNA, 168 bp, Oryza sativa
  Clone ID: PAT_MRT4530_69680C.1
atggcgtcgagctccgggcgggcgtcgtacgtggacgggatgacggccagatacaatgggttgcatccgggcatgtggggattagctcgtacggcgagcggcagcttccaggaagctaagtacccatccatggtcaagggtgtcaaggaggagaagcggacgagctga

SEQ ID NO: 68967 - DNA, 1087 bp, Oryza sativa
  Clone ID: PAT_MRT4530_69681C.1
tttttttttttttttttttttttttttttttggagaggaaaccaattatacttttgtcagtctggctgtaccgctggggggatttgcaattataacactgctgcagcaaatttcttatttactttacatgttgaggtaccaccacccctggccaggagattatcatacaatccgtgcagaatactggacagattcaagcagtggcacatgaacaaaatgcaagacgatcatcacaaattcacaagtagttcatccgattgggtaggttgatgccagctcgcgctagaaggtcccttgctattttttcagctgaagcaattacctcctcctcattcaaattcacgatcttcttttccctcataatccatcgaccgttgcacattacagattcaatattttctgttctcatgcagtaaactatgttggcaatgcagtcatgcactgggaccatggaccatataagtggattcacaacaaccatgtccgccttcttcccaacctccagcgaacctatttcatcgtcccacagaactgcttttgcaccattaatagtagccatcttcaatacagtctctgcaggaagagcagttgggttcgttgtaccagtgatgtacgcctcacgccctttgttaataagacaggctaggtacatctcatcaacaatgctcatcctgttattgcttggcgctccatctgtaccaagagagacacaaacaccagaatccagcatttctctaattggagcaaaccccaacatcctcatagcagatgcggggcagtgagaaaccttaacatcagcctttaaaaagtgcccaatctcaggcttattcaaccaaacagaatgagcagccagcaaattgctcctcagaaaatcaattttctctaaatatgtcactgtcccatgatcaattcccttagtctgcattaccagctcattttcatagggtatttctgcaatatgcatgtggattccagtattcagtttctgtgcagcatctcttgtcttcaagcagtaaacgatccgttgcattcatgatctgtctcaacccaaaccatatcctgaacgcccatcagcctgcagcccggg

SEQ ID NO: 68968 - DNA, 276 bp, Oryza sativa
  Clone ID: PAT_MRT4530_69682C.1
cgcttctacgctacacaccactactctcacaacaatggcgaggagcgtagccgtggtggtgttgctggcgatcgcggcggtggcggctgaccaagcgccgggtcccgccgcgacgccggcggagagcgccacggggccggcagacgtggcggagagccctgcggaaggtaggccgtacactacgcgagctacgccgatggaggagacacagctggacgcgcgactgtagagccagctggacaaccgcatgatgggggactgatactccgtgttctg

SEQ ID NO: 68969 - DNA, 475 bp, Oryza sativa
  Clone ID: PAT_MRT4530_69683C.1
tcggtcttgcggcctttcggtttggattctgagctaacggaattccctttccggtcgcgggctgtcgtcgcgacgaccgacactacagttatctattccaccggaggagctccgggtcgcacattggttgcggcagcaaagccagaggccggatctatctatctatctaccagccacggcgtgtgctggggaaagtccacggcggaggagtagtagacggctgagctaactgaggccagcgtgaggacggaaccgaatggtcaagcgtgtaacctggtgattttaccgtgagccgtcgctgtgtgtcggcgacgtgcggctgatcgtgtatgggcatgacggcggagcacggggacagcgtcaggcggtgcatactggaggggctgcacatgaacggcgtcggcaaggagttgctgcagtgggcgctcaacgaggcggtgaggagcggcgaccgggtagtcgccgggcacattta

SEQ ID NO: 68970 - DNA, 501 bp, Oryza sativa
  Clone ID: PAT_MRT4530_69684C.1
agaagtgtgaagtatgtataaaaaggatttaccaaatcgaaacataactgagcataagttttgcattgaacatcacaataaactgggaatactacatatgaataagcacccgatgaacttttttggtgctaatcttcaaagagggtaattaacaatcctctaacgtcaacctataaaaacagtttgaaattatccccttttattggttcccaattaatcttgatttcaatcgatccttaagatgaataccaagtcgcggcttcaactagtacacatcagatatatgagcatgtatcaaaaattccccccggccactttctgaaagcaaacttacctatatacgctcttcatttctaccacttgccgttgcagcttcagatgttcatggccagaaatgatgttgatgctattcatttcatacttggcttcatcacaggatatataggacgtgtaacaaacaaaacccagcaatttccttcaattcgctcaaaccgttagcca

SEQ ID NO: 68971 - DNA, 459 bp, Oryza sativa
  Clone ID: PAT_MRT4530_69685C.1
aagcttagtaggctcggaaggttcagttggtccagatggtcagttggttcagatggttcgaaaggctcaaatagttcagtgtcaggattatttgagttgagtagaggttgctgaaggtccataccttcttcaagaggctgtccaaacagtctaggttggttcagattggtcagatggttcagataatcagattcagcagattcagatataagctggaagagccgaagagttggatggatggaataagctggaagagtttgtaagctgtaaggtagctcaaggtgaagttctttaaagatgttaattggttttagggtcaacagctatgtcgaagccttatataatgatttaaagtaaaatatacaagcagtatctatatacttagggtcatattagagaaagaagagcgtaaccttgtatgtgtatgatccaacaacacccaccaaaaaaaaaaagctt

SEQ ID NO: 68972 - DNA, 216 bp, Oryza sativa
  unsure (1)..(216): unsure at all n locations
  Clone ID: PAT_MRT4530_69686C.1
cgcacgcgtccgcgctgccagccccagttcaagcgccactgcgcacgccacggcgcacccgacgaccccctgcaccagcactgctggcaggactgctgccngcacctcgacaggtgctacaacagctggtgcatgagctacatgctcaaacacatgtacagagacctctacagcgagcttgttgccaacgacatggcccacgcgatgcccgactgg

SEQ ID NO: 68973 - DNA, 160 bp, Oryza sativa
  Clone ID: PAT_MRT4530_69687C.1
tttccataatactttgacgagaagcaggggagtgcttttaaaatacaagggcgcttaaaacaacaactggttcagtagtaaggggcgtacccccccaccgcaacctgtctgcttctgggaaaacgaatatccctggtgagaaaacaccgggttcggcgaa

SEQ ID NO: 68974 - DNA, 1224 bp, Oryza sativa
  Clone ID: PAT_MRT4530_69688C.1
atgagtgggactacatcgacgaacactgtctcaaagagatcacgaacttcggaggtttggcaacattttgatgaggtgaccgccttgacaggtcctgacagaaggcaggtcagcggtggcggcaggagaggatgcggcggcggtgtgcgggcggtggcggagcgcggggaggacgcggcggcggcgggcggtgccgagcggatggatgttgattccaggagttggaatgaaaatctgattcgccatgtaatgaagaaggaagatgctgatgagattctaaagattagattatatactcgccaacttgaggatttccctgcttggcacttggaaaaaacaggcctgttcactgttaagagcgcttacagattggcctggaatctgtctaggaatgttgtggaagctacctcaagtagagcaattttaggggaaaggaaactttgtctgtccatatggaaaacaaaggtacaggccaaggtcaagatctttgcctggaaacttgctcttgacaggttaccaacctggaacaacaaatgcagaagaaaaattgaaagacagggcacatgccaaatgtgcggcttaactgatgaggatggttttcatgcaacggtcgaatgcactaaagccaaagcacttaggaaggtgttgagagatgtctggcgactacccctcgaaaataaatttgttaaaactggaccggattggcttttgctgcttctggatgaatcgaacgagatagaaagggcacacacgctatatatgctgtggagagcatggcaccttcgaaatgagatgatgcatggaaataagaagggcaaaagaccgatgtttgaagaacccccagcgagagcagaaatcaatgctgcacaaaaaatgaaatgggaacctccaccagagggagtggcaaagataaatgtagatgctgggttcaataaggagatgggtgaagcgggcgctggaattatcgctagagattgcaggggtttggttctgcttgcagcttgtaagaaactatcaagatgcagttcagctgctcaggctgaagctttggcttgcctggagggtgtccaattggctgccaattgggtacagatgccaataatcttagaatccgacaacgccgacgtcgtagcaggactgaatgcaacacaagactcaagagcagaatggagaggtattattgctgaagtaaaagctgcggtgcaatgtctggtgcaggtgtaa

SEQ ID NO: 68975 - DNA, 295 bp, Oryza sativa
  Clone ID: PAT_MRT4530_69689C.1
acaccatactcaactgccgacctcgcgactgcataccgtgggagagaggaggtgcataccggatttggaggtggagatcgccggagtagaggcagagaggcaacgatctggcaagactgggtggtggtggcggcgggccatcagcgggaggaggagggagatggactcgccgggaggaggagggagatggacccaccggccgcctcccgccgtccgtcccttgcgccgcccgcaccgctcctctgaccgcgctgcccctccgcccagccgttcctccgactgcgctgcccctcca

SEQ ID NO: 68976 - DNA, 5496 bp, Oryza sativa
  Clone ID: PAT_MRT4530_6968C.1
atggccgagaaacaaccaccaccaccatctagcccatgttccgttaaaggcaaggcgctgaagttgggattgactgacatcattgaagaaaacgttatgccgatcgatccagagaaattcacacctgagaaaaaggaagagtttgaagcaacgttgcagcaagcacgggatcagttcttgaactcattcatgcagacccgcaaggggacacttattcagaagtataaaataaaagtggttgctgatagtcccgggaccggttcttctaaagatagagaagtgaaacaagctccaggcggctcggctcagccgagtatcaaaggtgctaccgacggctctctaggcgatcaaggcgacaattctcaaggagttcatggcgttcaaggtgatggtgctcaggggccacaaggaggaaatcttaatcagaatagtgaagtggcacaagattttttcaataacttcccagatcggacaatagccgatggttcaatagctgagcatcaggctgcaggcccagtttatttgcaaggaggtgtcttcccaaattatcgatctttgatcaccgatgttcagccatctattcaagcagttccgtccgttgcacccacaactcagccgacggcgccagcatcgactcccttacctgctacatcagccatggtgccaggccagccgatgaaccctcggttgttaacgagggagcatccacagcatagtgggcatgttgcgaatcggccgactcaagatcaggttgctgctatgtttttgccgcctcaacatgcggttgatccaaaacaacagcagccgattcagcagacacccccaattcagcaggctgtgcaaccaatccagcaacaggctgtgcaaccaatccagcaacaggtcgtgcaaccagttcagcaaacaccaccaaggcagcagcttctgcagccgatccaacagactccgttgaggcagcaaatcgttcagccgattcagcacccggggtcacctccttccccgcaagcccaatatcagccagggggattggctcaacctcagttcgcatctcagtatggtcagtttgagcccatgcagcaacagccacaagcagcagctcagcagcgaccatgggccgatgtgattgccgacgtaatgagggaacagtttgggcttaaaccaaaagagactggaagcttgtatcggcagccttaccctgagtggtttgagagagttcctcttcccaatcggttcaaagtcccggacttctccaaattttcgggacaagatgccgatttggccttccagggtatgattgctccaatcagggagaaattctcgtctgaagactttgatagcttatcgcatctgatacagaaggtaaccttgcatgagcataggtcggcggaagtcaggaaaagctctaagaaggttaatcaagtttttccatacatgtatgggtcggatgatgaggaagatgattctgaaatagctgcagccgaatgggtgaggagtaaaaaggtcataccatgccaatgggtaaaaagtcctggaaaagaggagaagtatgactttgatattaccaaagctgacaagatctttgatctactactccgagagaagcaaattcaacttcctgttggccatacaatcccatcggctgaggaattaagcaaaaagagatattgcaaatggcctaattctggatctcattctactaacgattgcaaggtttttagacagcaaattcaagttgccattgaggggggaaagattaggtttgatgattccaaaaagccgatgaaagtcgatggtaatccttttcctgttaatatggtgcatacggctggtcaaacagccgatagggtccgtgcaaagggttttcaagtaaattcggctaagattatcaacaaatatcagaggaagtatgacaagcagcagaatacgatgatggttttgatcctcattggggttaatcagaagagaagggttcaaagattgaggaacagggagcgcctccaggaggttgaacaagaaattaaccattgtctgaggaaaccaaatccaagacaggagtggtgtgttaagaatcaggttcctgtagccgatgatgttgcagctgatgaggcaaaaaggttggcaaacgggaagagtgttgtagcggcaccaattaacatggtctttacattgccagctgaattcaggatcgatcaagccgatgtcgatgaagtggaagaggaatcggctaaattggttctgtcaccagaacaggcagtattcgagaaatccgaggggacagagaatcggcttcttaaaccattgtatgtaaatggctacgtcaatgggaagccgatgtctaagatgatggtcgatggtggggccgcggtaaatttgatgccttatgctacattcaggaagttgggtaggaacgctgaggatctcatcaagacaaatatggtgctcaaagactatggtggtaatccatcggaaaccaaatgtgtcctaaatgtggagctgacagtcggcagtaagactattcgtactacgttttttgtcatcgatgggaagggttcgtacagcttgttgcttggaagggattggattcacgccaattgttgcattccttcaactatgcatcaatgcttgattcaatggcaaggcgacaagatagagatcgtgccagccgacagccaattgaagatggagaacccaagctattactttgagggcgtcgtggagggttcaaatgtctacaccaaggatacagtagatgatctcgatgacaagcaagttccagttattaaaaagaatggcaaggtcagggtgtgcattgattttcgagatctgaataaagctacaccaaaggacgaatatccaatgccagtagccgatcagctggttgatgctgcatcagggaacaaaattttgagttttatggatgggaacgcaggatataatcagatctttatggctgaagaagatatccataagacagcttttagatgccctggtgcaatcggcttatttgagtgggtcgtcatgactttcggtttgaagagtgctggagcaacatatcaaagggccatgaattatatatatcatgatttaatcggctggttagttgaagtttatattgacgacgtggttgttaagtctagagaagtagaggaccacatagccgatttaaggaaagttttcgagagaaccagaaaatatggcttgaagatgaatccgacaaaatgtgcttttggtgtgtcgaccggccagtttttgggatttcttgttcatgaaagggggatcgaggtaactcaaaggagcgttaatgcgatcaagaagattcagcctccggagaataagacagaactacaagagatgattggcaagataaattttgttagaaggattatttctaatttgtctggaaggttagagccttttacaccgttattgaggttgaaaggcgatcagcagtttacttggggggcagagcagcaaatggctttggataatattaaggagtatcttagctctcctcctgttttgattcctccacagaaaggaataccgtttaggttgtatttatcggctggtgagaagtcaaccggctcagttttgattcaagagttggaagggaaggaacaagttgtattctatctcagtcgactgctcttggatgctgaaactcggtattcccctgtggaaaagttatgcttgtgtctgtatttttcatgtacaaggctgaggcattatctattatctaatgagtgcactgttatatgcaaagccgacgtagtcaggtatatgctatcggctccaatattaaagggaagagatggaaagtggatattctccttaaccgagtttgatcttcggtatgaatcgccgaaggcgattaagggacaagctatagccgattttattgtagagcatcgtgatgattcaataggctcggttgaaatagtgccatggacttttttctttgatggatcggtatgtactcatggttgtggtatcggcctagttataatttcccctagtggggcatgtttcgagtttgcttatactattaaaccatatgcgactaataatcaagctgagtatgaggcggtgctcaaggggttgcaattactcaaggaagttgaagccgataccattgaaatcatgggggattctttgctagtaatcagtcaattggcaggagaatatgaatgcaagaacgatacattgatggtttataatgagaagtgccaggaactaatgaaagagtttcggctggttactttaaagcatgtatctcgagaacaaaatattgaagctaatgatttagcccaaggagcgtcggggtataagccgatgatcaaagatgttaaagttgaaattgcagcgatgacagccgatgattggaggcacgatgctaaggttgcaatcggtgaagttcatgaaggaatctgtggtactcatcaatcggctcataagatgaagtggttgcttctgcgtgcagggtacttttggccgacaatgctggaggattgtttcagatattatagggggtgtcaagattgtcaaaagtttggagcaattcagcgagcgccgacgttggctatgaatcctattattaagccatggccgttcagagactggggaattgatatgatcggtatgataaacccaccgtcgagtaaaggacataagtttatattggtggcaactgattatttcaccaagtgggtagagacaattcctttgaagaaagttgattctagggatgccattcaattcgttcaagagtatataatctaccgatttggtcttcctcaaactattactaccgatcagggttcaatcttcgtgtcctatgagtttgttcagtttgccgatagcgtgggtatcaaattgttgaattcttcaccttattatgcacaagctaatgggcaagccgaggcgtctaataaaagtttgatcaaattgattaagcggaaaatttctgattatcctcggcaatggcatactcggttggccgaagcattgtggtcttataggatggcttgtcatggatcgattcaagttcctccttacaaacttgtttatgggcatgaggctgttttgccatgggaggttagaatcggctctcgacgaacggagttacaaaacgatttaacagccgatgagtattacaaccttatggccgatgagagggaggatctggttcagtcacgattgcgagcccttgcgaaggttaccaaggataaggaacgtgttgctcggcattataataagaaagtggtacctaaagatttttcggaaggagaacttgtatggaagttgattttgccgattggtactcgtgatagtaaattcggcaagtggtcgccgaactgggaaggaccgttccaaatttataaggttatgtctaagggagcatatatgttgcaagggcttgatggtgaagtctatgggcgagcgctcaatggcaaatatttgaagaaatattacccaagcgtttgggttaacgcatga

SEQ ID NO: 68977 - DNA, 422 bp, Oryza sativa
  unsure (1)..(422): unsure at all n locations
  Clone ID: PAT_MRT4530_69690C.1
gaagaaaatttgaaatatatttattangaaggccctcctatggtctcccaaaggctggggccctatttcatgcctttttactcccataattttttttggtttaggcaacttggcaacttttttcctttctttcaggttttttttcccgttgcattaagatggcccccaaaggggtggattccccctttttttttttttcccgccctggaatttttaaaataggttttttaaaccccaggaattagttgggtttgatacccttggggaaccttttttttttagatgcccattttttcccctccttaaattcccttccatttgacctccggcccccaaattttggaggaaaatgccaataaaaaccttgttgaatttttccccaaaacccaacctggtgcctcctccaaatgggttttttttcc

SEQ ID NO: 68978 - DNA, 552 bp, Oryza sativa
  Clone ID: PAT_MRT4530_69691C.1
atgttctacagctccgccatccacgtccacacctcccacagtctccagctcgccacactcgcgctgctctctgagatgctgggtagggggctcctcccaacctcgcacacctgcgccgccgccgctgctccagccctgctcctcgcatacggccaaaggtggaaaaggggagacaaagggagagataatggagagagagggaggaggaagaagggggaggagagagatgatggcatgtggcccgatagggttaatggactcttctgtcagatatggatcatgtttgaggagacgaagattctaaaagctagctggtttgatctaaatatagcattagatgatggagatgaacatgctatacctaacctcaatgaagcagtggctgaagaaacagcagcggctgatcaggaggatgaccaggttggaggtgatctccatggaggtgccaaccgtgagcttcctggaggtgatttccaaggaggtgccaaccatgtgcttccttttgatctcaacttgcatgcatctgaccaaaggagaaatacatctaggtaa

SEQ ID NO: 68979 - DNA, 146 bp, Oryza sativa
  Clone ID: PAT_MRT4530_69692C.1
agaaaaattgtggaaacgaactgaactgcatgcagctatacttgattatgagtggaccagataagcataccattctacggctatgtatgaggaactacagtgaggctctgagcatggtgccttacttagatataggcaccttgaca

SEQ ID NO: 68980 - DNA, 1009 bp, Oryza sativa
  unsure (1)..(1009): unsure at all n locations
  Clone ID: PAT_MRT4530_69693C.1
aaattggtgtcaggattaaaagccggcgaagtagcaagaccggcgggggcttcgcctggccgccatggctcacctaccgcttttgctcctctccttcctcctcctcatcggcgtccatgcctccgtttccgatggctcgcctctcccacacacttacaacacttccatttgctccaaatcatacaagtgcggcggcgtcaatatctcatatcctttctatctttccaacgcaaccggcgaaacctatgattacactcagttttcttgcggctacaccgatttgaatatcacttgcagctgggacgggagtaagcagaccccttttatccaactcaacggagacaactatactatcctggagatcatctacgacagtcgcaccatcgtgctcgtagacaccgatgcgctccgcggcggcagctgccccagagtgcgccacaacatcaccttctcccaggccgatgagtggcttcagtacaccggcccccgtgacaacctcaccttcttcttcggctgcaaccttgtaccactaccaccaatggatccagggctgactcgttttgtagacaagaaccaaatcaactgcaaagacttcagcaactggcctgacggtggagattcattcgtgttcacctccgtcgagcttgaggcaccaatggagtacgaattggccagtcgctgccgccaggtcatcgtcgtgccggtaaatgggagtattcttaattcaagtagccagagtgcgctcccaagtggtgaatacggtcaagtgcttaagaaggggttcgagctggcatggaaatcaaggaaagataaacaatgcaacctgtgcgaacaatcccggggacagtgtgcctacagccagaacaggacattcctaggttgcttgtgcgccgatgggaaggtgagcagcacggattgcacatcaagtaagtctttcgatgccgatccttcatttttttcccctccattctgtaaagccaacaattagtcgatcatctggaaanaaaaa

SEQ ID NO: 68981 - DNA, 156 bp, Oryza sativa
  Clone ID: PAT_MRT4530_69694C.1
atggatgagctcgctggtgaccttgaggccgctgaagccaccatggacaagacgtcgccgaaggtagggaggggtctgggggagccatcgcagctgccccctctactaattctgccatcaccagcctcctgcttctgctgctgcccctcctactag

SEQ ID NO: 68982 - DNA, 307 bp, Oryza sativa
  Clone ID: PAT_MRT4530_69695C.1
tcgttttaccataggtaaaactatgtcaatgtgaggacttacactggacacgagagtgggagccaatgagtgagtgagcaaccagagacatttggttgaggctcaacgaatatcacgacatgcaccacgtgatatggttgtttcatgagctatgtctgcactatgaatattgcgcaaatcagaggcagatattgtgggatcatcaaatactgagtgaggacggtgggatctttggctcaaacgggctgcatcaaaattaggaattgtaggagaacaagcattatgcggtggagggtcattttccagg

SEQ ID NO: 68983 - DNA, 274 bp, Oryza sativa
  Clone ID: PAT_MRT4530_69696C.1
ataatcgtcataatgtatttaattaatttttagggggccttattatttttgagccagaaccccaggccaaaatcatagatgaacccggaaatcccaaccgggcaccggtaggctcaccatatttacatataaggggcctttttaaagctggaagcaatcaaggccaaactccttacctaaggcaaatacagatccgcagaaaattcagatcatgctcctgactggaagttttaagagtaaagaccggcgtgcatacggggggcatgctctaaaa

SEQ ID NO: 68984 - DNA, 388 bp, Oryza sativa
  Clone ID: PAT_MRT4530_69697C.1
cccacgcgtccgcccacgcgtccgttatgtttggtttggtttggtttcagcaaggtgctgacaggcagctgtggttcgcatccaagcagtccctgagctacctggatggcacgtaagttttcatgtggtaaaatttattcatgttgcaataaaagaggcgttaaggcctcatttgaaacgattttcgaagaatttttataggaatcaaccgtaaaattcatgcgtttcaaaaaaaaaaaaaggagcttaattaagatggtaggaactagccgtatccaactgaatttcatagtacagtagtacaatcaaaatgatcaaacttttcataggaaacaataatcaatagacctttcaaataaataaattaataaagaggtaattttcagag

SEQ ID NO: 68985 - DNA, 277 bp, Oryza sativa
  Clone ID: PAT_MRT4530_69698C.1
gtccaggaaaaaatagctcatgttgaggcagaaaaaaattttcttaggtcaactacatctggacccaattgagatacagcagaattcaacttattctttttgctgctcaccattgtaaaagaaagggaaataacagcaaacacatgcttttatccacgcgacttttttaacacgtatgggcaccacttattgaggaacagctggctctatttttggatgatgccgagcgagcgcatgttggaaaagggagtatttttcagacaggcacagcctcaat

SEQ ID NO: 68986 - DNA, 160 bp, Oryza sativa
  Clone ID: PAT_MRT4530_69699C.1
tttggcatacagaatgctgagatgcaacctatgcatcacgcatggacgaaagcaaaagatgtcagaaggagaactgtatcaggaacccacgaagatcattccgacttctgcatctctcatggggctgggagacaactgcaaatttccggattgcccgagg

SEQ ID NO: 68987 - DNA, 3096 bp, Oryza sativa
  Clone ID: PAT_MRT4530_6969C.1
atggctccagcgcggacgacggcgcggaccgctgggacggagcggcgccggcgaggaaagcggggacagagtggacggctgggatggcgcagcgccggcgcggacgacggggaggctcgacgcgcggccctggacagtggcggcgtggagaagtggagggtggaggcgcgcctgtgtatcaaaggtgctactgacggctctctaggaaatcaaggtgacaattctcaaggagtccatggagtacaaggtgacggggtgcatggagttcaagatgatggtgctcaggggccgcagggaggaagtcttaatcagaataatgatgtggcacaggattttttcaataacttccaagatcgggttgattacgccgtgcatcatgctttgatcaatcagtccggcgtattagtcattaccttatcaaacatgatgaagacaatagccgatggttcaatagctgagcatcaggctgcaggcccagtttatttgcaaggaggtgtcttcccaaattatcgatgtgggctcaccgatgttcagccatctattcatgcagttccctccgttgcacccacaactcagccgacggcgccaacatcaactcccctacctgctacatcagctatggcgccaggccagccgatgaaccctcggttgttaacgagggagcatccacagcatagtgggcaggttgcgaatcggccaacccaagatcaggttgctgccatgtttttgccgcctcaacatgcggttgatccagtaccgcagcagccgattcagcagacacccccaattcagcagccaaaccttcataattaccaagggggtaacttgagttatcaatatcagcctccttccccgcaagcccaatatcagccagggggattggctcaacctcagttcacatctcactacggtcagttcgagcccatgcagcaacagtcacaaggggcagctcagcagcgacggtgggccgatgtaattgctgacgtaatgagggaacagtttgggcttaaaccaaaagagactggaagcttgtatcggcagccttaccctgagtggtttgagagagttcctcttcccaatcggttcaaagttccggacttctccaagttttcgggacaagatggtgtgtcaacttatgagcatattagccgattcttggctcagtatggtgaagcatcggctgtagacgctctgaagggtatgattgctccaatcagggagaaattctcgtctgaaaactttgatagcttgtcacatctgatacagaaggtaaccttgcatgagcataggtcagcggaagtcaggaaaagctctaagaaggttaatcatgtttgtccatacatgtatgggtcggatgatgaggaggacgattctgaaatagctgcagccgaatgggtgaggagtaaaaaggtttttagacagcagattcaggtggccattgaggggggcaagattatgttcgatgattccaaaaagccgatgaaggtcgatggtaatccttttcatgttaatatggtgcatacagctggccaaacaaccgatagggtccgtgcaaagggttttcaggtgaattcggctaagattatcaacaaatatcagaggaagtatgacaagcagcaggagaagcattatgaagaatacgatgatggttttgatcctcattggggatgtgagttctttagattctactggaatgaagggatgaggttgccatctatcgaaaactgccctgggtgcagtgatatcgtcgagagctcaagccagtcatataataggggtaatcggctgaggcaggcaagagtttctgttaaacaaagattgggtccggtgaatcaagatcgtggccaagaggacgaggtaatcaggaagaatcaatggtgtccttctggtattttcatgaagaatcagaagagaagggttcaaagattgaagaacagggagcgcctccaggaggttgaacaagaaattaaccatcggctgaggaaagcaaagccaagacaggagtggcgtgttaagaatcaggttcctgtagccgatgatgttgcagccgatgaggcaaagaggttggcaaaagggaagagtgtcgtagtggcaccaattaacatggtctttaccttgctagccgaattcgggatcgatcaagccgatgccgacgaggtggaagaggaattggctaagttggttctgtcaccagaacaggcagtgttcgagaaacccgaggggacagagaatcggcatcttaaaccattgtatataaacggctacgtcaatgggaagccgatgtctaagatgatggtcgatggtagggccgcggtaaatttgatgccttatgccacgttcaggaagttgggtagaaatgccgaggatctcatcaagacaaatatggtgctcaaagactttggtggtaatccatcggaaaccaaaggtgttctaaatgtggagctgacagtcggcagtaagactattcctactacgttttttgtcatcgatgggaagggttcttacagcttgttgcttggaagagattggattcacgccaattgttgcattccttcaactatgcatcaatgtttgattcaatggcaaggcgacaagatagagatcgtgtcagtcgacagccaattgaagatggagaacccaagctattattttaagggcgtcgtggagggttcaaatgtctacaccaaggatacagtagatgatctcgatgacaagcaaggggttagaccacgccagcaacctctgaggagatgtaaagccgacatgcttgaacctgtcaaagctgaaattaaacgattgtatgatgctggttttatccgtccttgccgatatgctgaatgggtttctagtatagttccagttattaaaaagaatggcaaggtcagggtgtgcattgattttcgagatctgaataaagctacaccaaaggacgaatacccaatgccagtagccgatcagctggttgatgctgcatcagggaataaaattttgagtttcatggatgggaacgcaggatataatcagatctttatggctgaagaagatatccataagacagcttttagatgccctggtgcaatcggcttatttgagtgg

SEQ ID NO: 68988 - DNA, 2571 bp, Oryza sativa
  Clone ID: PAT_MRT4530_696C.1
atgccaacgaaaggacagtttagcagagaaaggaatgtaaaggccacattaggtcgtgatggacgtcaaaggggaaattcacaagatcaatctgtacaagtgccaaaagagaagattgcagtagtcggtgggaacattgatggaaaatttgaagatagaatcagagttgtgaaaaatgagaagtttcgaaggcaacgggaacctcggagtgcagatgcgggtggatccttgaaaggctcaaaaccatggcctggtcgaaaggccactacggttgatgagcttgtcaagcatatgtcaaatgttccttcatatttgcagcgtaaagagacatcaggccatcttcaggacaaggcattgaatgttggagttctcgagtggggcctcctagccaggtggtctcaccaacaaaagcatgagttttctagcagccatggtgcctctccatctaatactagtaggtccctgatattctcttctccatcccagtcatctgcaagtcccagcagcaaatctcttgaaagcaatcaatctcctacactcaatgaccatcagcattgttctatggagtttcagcaaagtgatcttgaggataaataccatgggaaggccagatattcacctagcccaaattctgcagtgttgaacttgttgcctgttcatggaaaacactttccagagaacactggcaaatacggtgacttgaatctcagaaacatatctccactctcggaccctcttcttactgccactgggagttccatgcgacatgaaatggttgatgatgaggagactacaaggaatatagaggaggccgtccatcattgttcgcgcaggctttttacagatgatgataacattggccaaagtttcttcacctcacataacaatgattctgcatgtggtgattttcagcagagcagtggcgtgactggtgaggtttttgagactctagtgtctagtgcggtgatggaaatggaaagaaatgccagtttgtcacctgttggtttctcaaaagatattgggcaacaccatgaatttcctcgaattccatactcatgtccacttcctatcatggattcatctgaagagcttggcaccagcagaactgggactcaaggtgattctgttggtgctgctgtaactataggtgaaaatcgcaaccaaaagcaaatttccaggggtgcctctgagagaactcctcggatcagtgcaaagttcagtgatatggatgcgtcaccacatagacatcttgtttctggactgaatcgagtgaaccgctgttcaagcctgaaggatggaccatgtcctcgacaacctgaagcaagcacctctgtggataagataaatggagataagtcatcaggcaacaaaggcagtagacgcagcccattgaggaggatgttagatccaatattaaagccacgtcagtcatccacttctggtccaattcaaccttcatttgttccaaagtgtcatctgcctggccatattgataagcaatctctgagcttgggaggatctgctttgcagaatgttcaacgtaggtcagttgattcagtggtaaattcaaattgccgaacagaaactaatacaaaccagcctcctcaggtcctgaacagtgaaaggtacctccagcaagatatagattcaacaacaacaaggcatgcgcttctgcagctagcgtggaagaatggcctgccttttttcatgctttcttgtggttctgatatcctggtggctaccgtgagaaggaagggcatctccgataacaatgatctggagagcacatacactctgtttggtgttgaagaccctaagaaaagaggtggggcttggatcaaggcagagcagctaccatcttctgaagaatcaggtgattcacatgttagcagagagtttgcggcttttattagtgcggtgtctcagcaagaaccagaaacttctcgtcactcatcctcacagcattccagccgaagcatgtcaacaccaaccgactgttcttgcccattgggaaatttccatcctaatacgagggatgatagttgtgcatcatccagtgttcttgccgtacttcctaatggcttccatggtacatcaacctcaggacagccactacctctgattgagaggtggaaatcaggaggagcgtgtgactgtggtgggtgggatgaaggctgcatgctcagtgtcctcagcgatgacgcccgagaaaacaaaggtgataaatccactcaagcaaaccagacgacggatggaagtcaacggtttgacttgtttgttcagggtcgatcacgagaagacaagcatgctttcagtatggtttcattcagagaagggttatacacagttgaattcagatcatccattgctttacttcaggcttttgctatgtgtatagtgatgcttcacggcaggcgccctaccaggacgcaagcaggtgtgcacgcatcgcaagagcacgcatccctcgctgaccataagctcaacaagatcatggcagctagtcaaggtagagctcaggcaagctatgtgccacaccggccgccgctatctcctgtagggcgagcctag

SEQ ID NO: 68989 - DNA, 843 bp, Oryza sativa
  Clone ID: PAT_MRT4530_69700C.1
atgtcgacggcggcgcccgcatccgctacggcggctgcgagcctcttcctccgccggagtctctcctcctcctcccctcgccacgtcttcctgcctcattgggttgcccccattgtcgtcgcgcgccccgctaggttatctgcggtgccggcgaagcgcggtggaggtggtgttgttgcggctgcatcggcggcggcggggagcgcgcagtttggcgccggggacagtgagaatccatacgagattttggggatcagtccacttgatgggttcgaccaggtgaagatggcctataagcggaggcgaaaggatgccgagagcaacaaagatgccgagcacctgttcaagttagagagggcatacgatatggtcatgatggagcagcttcagaaccggaagaatggggtggcatatggatcaatccaggtgtcaaaggacattaaatatgctgataatcaaccagtggttccttgggggcctagatactcaagatccactgggaaggacctgcgcattaatatggcaatatcagcaacatttatcatgtatatatctaccatgggccatgcagactggaagcccatgcagtttttgtgttttgcctatttctatcgaatacttgacaaactgaaggctaccgagtcagctagcactcctatatacaatgagtatggtgaggttgaaggtcgtggcatacacatggcaaaacgagtactccgtagtttgggtttggtacttggatcaatacttgctgtatccctgggctacactgggctagccaatttttctcagtttcttgggcagtatattccatctgttgtttataacttccaggtgaagtaa

SEQ ID NO: 68990 - DNA, 795 bp, Oryza sativa
  unsure (1)..(795): unsure at all n locations
  Clone ID: PAT_MRT4530_69701C.1
ccggccggggaccccgaacccgacgcaaacctctcccctcttcggcacttcccttccccaccttcctcctctcccaccgctctctctctctctctctctctctctctctcagtctctctcccccccaagaagaaatccattcctctctcacgcgcctccgcgtcgccgcattcggggacgcccaccgccgccggatccggccagccttcccccctcccctcctttccccggccgctcccctcctcggtaagatccggcgccggttccatgtcgagcaccggcgagcagtcgcaggcgaaggcggaggccgaggaggcggtggagctcgtgctgttccaggtcgctgagtgctacgtctacctgatacctcccaggaagacagccgcctcctacagggctgatgaatggaacgtcaacaagtgggcttgggaagggactctcaaggttgtcagcaaaggagaagagtgcatcatcaaactggaagataagaacacaggggagctgtacgctagggcattcctcagagaagatgaaccacatccggtggaacctgttattgatagcagcagatattttgtactccgtgttgaagagatatagatggacgtcagcgccatgcctttattggtttaggcttccgtgaaagaccctcagcatatgatttccaagctgctctgcacgaccatatgaaatatctaaacaagaaaaagactgctgaagagatggtacnacactatgagaaatcatcatcagtggattacagcctcaaagaagggaaactttgggtttgcagct

SEQ ID NO: 68991 - DNA, 615 bp, Oryza sativa
  unsure (1)..(615): unsure at all n locations
  Clone ID: PAT_MRT4530_69702C.1
tatccatctgcctatctatctctcgcaattctggcggcgcgctgcgcgcataaggggggatcgaaatttgatctaattggtgaatggaagcngccngccgcnatagaagcngggcggaaactggcggcncngcacccgcncnggcggatcaagacgcncacnanntgtcatcntcgtcgctgcggaaaaaatccgacnccccnctggtncngnanggtccccntngngccgctccnctcctgctcgccaacctcnannangtcttcctccgccacnngntcgccgtcctctcctcnccgttcccnctctccaacnccnncggnncttcgnntnccaccnggtgtgggtgtncccnctcanntttatttntcttttccctcncncccaaaaaatcaattcnccaatnncctatngctttccacaccngtccccctttgggcngcttctancccactnttcnggaanacaaccgancntattngngnatngttccccttctnnagnnaacatccangtgtttccttnncncctgctggctcccccccccntcttccctccgtnttnnccccccctcttcctcattgggtncccctcntcntccctttattantcgaa

SEQ ID NO: 68992 - DNA, 1059 bp, Oryza sativa
  Clone ID: PAT_MRT4530_69703C.1
atggctcctcgcaagcctactaaagccgggtcaactggcgaagaccctggcggccttggcgaagggtggtcgtgcttccttggcaaatcgcttgtcaaggaggccgacttaggcgagttggtttcctccggtgttctcgtgaagggccaaggatcatgtgggggcaaagccgttgtcccttcgcctagtgatgggcgaacggttgtctttcctgcctacttcgccgctgggcttcgcctcccatgtgacgacttcctgtcgtccgtgctcgcgacgtatgaggttaggcttccccagcttagcccatcagcgttcccgaagctggcggttttcgcttggatgtgtcgaacctgcgggtttgcccctaccgccgagctactcgccacgctatttacagcatgcgcctcgaccaaagtcgtgcagacgccggctggtccgaggaaaaccgtcttcggttgcgtgaacttcatgcttcggccggagcactcagacgcttggccagtgcccgcgtcaatggccaagtgggataggaactggatgcaaaaatggttctacattgccaacccctaccccgccgaggttgtcaaggcgaattggctcctttttgagtgttccgccgtctctatcatcgcgaagccgaacatggagatcgatgggactctcgagtccgggctcatactccttcataaggtcgctcagcggctaagcacccgggacctttgtgaggagttttgcctccttcggatttccgccctcgcccatgtcagggatgtttccgtgaacgagagcgaagaggttcttgggcttccccgccttgttctccctactgggtcgaaacgccaaaccaatggccggatgaaccgggttcatattggcgaactgccaagtcgatcgaacccctccagagccggggatgacgaagtcggcccttcgaagaaacgcaagcgtgcggtcacgaaaggcggccaagttcgaacttgctgcagcgcgaacattgcggtcgaaagtgatggggaggtggaggaagaagaagatggggaggctggtggctggttctaa

SEQ ID NO: 68993 - DNA, 978 bp, Oryza sativa
  Clone ID: PAT_MRT4530_69704C.1
atgcggccgcaagatgtcgttgtggcgaacaccctcctggcgatatccaacacagcagtgaaaccggagatgaccgccaggaggaagaaaaagaaagagaaggttgtgcaagtcgcccgcggcttttcgaaaagcgaagagtccgacgggactcctacttcgccggttttgcggcgcgcaccttctcgtagcaggcgcatgtctccgccacctgctagcgatgctgaagcggcgacgggtgggagtgcttcggcgccggccgctaaggcgattgtttccgaggacgaacgggttgaggcggtcattgcaccgaccgacggccttgggctcttcaccgagctaaacgagttcggcgaaagctgcgcggccgtggaaagcctatttgtgcggggccttgccgcgcacttaagcatgaagaaatctgccttagagaggctagatgggtaccgcctccgccttcggaagtccgaagaagaccttcgccacaaggaagacgaaagacgcattgtggcggagactctaaagaaggcgaatgctgaaaacaaggctctttcgggggacaacaagtctctccatgctgaccttgaagcggcgaacaagcgggatgccgaacgagaccgacaacttgcttcggccgaggagaagattaaatccctcgaagctcgccttgtgtcggccgaagctgccgccgcgacactggtaccggccacagagtctgccaagcaggcctgttacactctccggctgacccttaatgaccttggggcgcgggcggaaggtgctccgggcgaaggtggaaccgcgttcgacttttccgaatggacgcaggaagcggccggctcggtcatcgaagtggcaggcgcctacggggactgctgcgctcgtgtttcgacgggattcgtccttagccttttgcacgcgcacggcagcgaccacatcgggagttttcccctatttcgtgaaagaagaatggcctag

SEQ ID NO: 68994 - DNA, 2073 bp, Oryza sativa
  Clone ID: PAT_MRT4530_69705C.1
atggctcctcgcaagcccactaaagccgggtcaactggtgaagaccctggcagccttggcgaagggtggtcgtgcttccttggcaaatcgcttgtcaaggaggccgacttaggcgagttggtatcctccggtgttctcgtggagggccaaggatcatgtgggggcgaagccattgtccctttgcctagtgatggacgaacggttgtcttcgctgcctacttcgccgccgggcttcgcctcccatgtgacgacttcttgtcgtctgtgctcgcgacgtatgagccgaacatgaagatcgatgggactctcgagtcccggcttatactccttcgtaaggtcgctcggcggctaagcacccaggacctttgtgaggagttttgcctcctttggatttcccctctcgcccgtgtttgggatgtttccatgaacgagggcgaagaggttctcgggcttccccaccttgttctccccactggggtcgaaacacggactttggaagacgccgaaatagaggcgtcgaagatgataggagctctaaccacggccgaattcgcccgcttgctccagcgccagaccgacggccgggtgaattgggttcatattggcgaattgccaagtcgatcgaacccctccagagctgaggatgacaaagttggcacttcgaagaaacgcaagcgtgcggttgtgaaaggtggccaagttcgaactcgccgcagcgcgaaggttgcggtcgaaagtgatggggaggaggaggaagaagaagatggggaggttggttctgaggatgatgggtcccatggctacacccccagtcctactcttgcgaaatcccgggtaggttctcatgtttcgcctacgcggccgcaagatatcgttgtggcgaacaccctcctggcgatttccagtacagcagcgaaaccggtgatgactgctaggaggaagaaaaagaaagggaaggttgtgcaagtcggccgtggctttttggacagtgaagggtccgatgggacgcctacttcgccggttttgcggcgcgcaccttctcgtggtaggcgtatgtctccgccacctgccagcgatgctgaagcggcgacaggtgggagtgccttggcaccagccactaaggcgaatgtttccgaggacgaacgggttgaggcgattccttcgcctgcccgtcaacgagagggaaaagctctggcggtcgaagcggccatttcggacgtgacgctcatcgccccacatttcgtccccgctgattttgccacgcggccggagatcactccgttcgtggacggtgtgtgccaggtcattgcaccgaccgacggccttgggctcttcaccgagctaaacgagttcggtgaaagctgcgtggccgtggaaagcctatttgtgcggggccttgccgcgcacttaagtgcgaagaaatctgccttagagaggctagacgggtaccgccttcgccttcgaaagaccgaagaagaccttcgccacaaggaagatgaaagacgcgtcgtggcggagactctaaagaaggcgaatgctgaaaacaaggttttttcgggggacaacaagtctctccgtgctgaccttgaagcggcgaacaagcgggatgccgaacgagaccaacaacttgctttggccgaagagaagatcaaatccctcgaagctcgtcttgtctcggccgaagctgctgccgcgaccttggaagcagcgggctcggtcgttgaagtggctggtgcctacggggactgctgcgcttgtgtttcggcgggatttgtccttagccttttgcatgcgcacggctgtgaccacatcgggaattttcccgacttcgtgaaagaagaatggcctagcaacacgcagtgttctggggctgccttaagggcctttcgaaaagggttttgggaggatggtggtcgggattgtgtgaaaactcgactccgtgagaaccttgaaaggatcacgagggacgaggaagccgctgctgccaacaccggaggggatcccgggccgtcggaacaggccaccgagcacgagggcgaaggcaacggaggccaagaccaccttgaggtgtga

SEQ ID NO: 68995 - DNA, 483 bp, Oryza sativa
  Clone ID: PAT_MRT4530_69706C.1
gtggatccccgggctgaggaatcggcacgagggagagaactagtctcagtttttttttttttttttttttttttttttgaggcaaaatgtgaacatttgcttgtatagtaaatgaacgaaaaaattacactactgggtttacagatgtcctcaaccaaaccaacaaattcaaacttatgaagtctaggcaagaccattgggcttcatttttcaaagatgtcatatgacagggaagtccctaacagttgccgctgagtgcctgtaaggctaacatttgcctttacttggtaatcctggcagataacatggtcatcactttccaatttccatggcgtcatgcataaggagaaactactgcataaataatctccacacttttttggtcttgaaacctagcaccctttttacttatttaccggacaatgcagctgaatcccttgcacactgcgagccaggcagcgaagaggacgacgaggagcacga

SEQ ID NO: 68996 - DNA, 354 bp, Oryza sativa
  Clone ID: PAT_MRT4530_69707C.1
atggccggctatttatatgggagagaggtggtggtgaaaggcggttgtggaggaggagatcgagaagcacacggcgacgacagtggcgtgcaaggaagggcaacggcggccggctttcgtttccttagcggcgacgtttgcggcggcgtgagcagtgcacggcacgcgcacgggaggaggaggcggctcggctggggtgtgggctggtttgggccggctcggcttagctgggacggcagcccaagatggtggaggaaaatagaagataaaagaaaagggattgggccaaaaaggaagaaagaatggagtttcggcccgatgacagaaagaaagaagtctaatttgaatacctga

SEQ ID NO: 68997 - DNA, 299 bp, Oryza sativa
  unsure (1)..(299): unsure at all n locations
  Clone ID: PAT_MRT4530_69708C.1
gaccacacctgcatcatcaatctgcctacatatcgatcgattgatctcctggttaattagctaactaaatttccccgtacgtacgtacacaagatgttcggccaccacaagancgaggagaagatngcagcancggggngcgccaaaggacgccggcgactatcgnaaggaggagaagcaccacaagcacatngagcagatcgccaagctcggcgncgcncgcccggancatacgccatgcatgagaagaagcaggcgaagaaggacccngagcacgcgcngtcgcacaagatgaagga

SEQ ID NO: 68998 - DNA, 995 bp, Oryza sativa
  Clone ID: PAT_MRT4530_69709C.1
cgaaaaccctagttgctttcctccctcaaatccacacgattcaaacatgggattccaaaattaattagggagaattaatcccctttccttcctcttcaattgcgcctaaggcctcgttcggatagagcccggccttttccctccaatccctagggatattggtccaccacccagaccagtggaaatccaccactcgccgccgcctcgcttctctcgtcgcgtgccgacgcctcctcctctcgtcgcgcgtcgcggcgccgccgccgcctccgtcttctctccccgagcggcgcccacgccgcctctcctctcgtcgcgcaccgcggcgtcggcacctcccctgccgcatcgcatccctcgcgcgcgccgccttccttcctccccagtgtcggcgttgcttccctttcttccccggtgccggcgcctcctcccttcctccccgctgtacatgctggacagagtgaagcagtcttctccaagcccagatccacgacatcagccatcagttgaagcagttcgggggactcaaaggccggagggcttgttcgccaacctagctcactgagctgccaagctcgcttgtattggtaagttaaaaaaaaagggttcaagggctattcgaatgaggaagcgggaggaagaggatgacgatatgattcttttccttttccctgctctgcatcttttctactaaacacaagtactgctcagttttctgatatgtgatgtccacgggccttttgtttgctgcaccaatgatgcaaggaaatgtattatgatgtatgtcggaaagtgttgttactagatagaactattaaggcaatgaagctcaagttatgtcttgttttcccctcaaaaaaaaagttatgtcttgttcgatttaatacttgtaacactgagagatatttgtgtcctaaatctcaacgtgtattggttcttcatgttggttgccttttttttttttgcaatattgtaacaattacgacatggatttt

SEQ ID NO: 68999 - DNA, 4659 bp, Oryza sativa
  Clone ID: PAT_MRT4530_6970C.1
atgaagttgtctgatttgacagcaatcaagcaaagacatgatgagcctgtgcatgaataagtgctacaacttaagttttactaatgctcagttagccgatttggcttttcagggcatgattgctccaatcagggagaaattctcatctgaggacttcgaaagcttgtcgcatcttacacagaaggtgactttgcatgagcagaggtttgctgaagctaggaagaattctagaaaggttaatcatgtatgtccttatatgtatggatcggatgatgaagatgatgattctgaaatagctgcagccgaatgggtaaggagcaaaaaggttataccatgccaatgggtgaagagttctggaaaagaggagaggtatgactttgatatcaccaaggctgacaagatttttgacttgctactccgagagaagcagattcaacttcctgctggtcacacaattccatcggctgaagaatacggcaagaaaaggtattgcaaatggcataattctagatctcatactaccaatgattgcaaagtcttcaggcagcagatccaagcggctatcgaaggagacaaaatcaaatttgatgattctaagaggccgatgaaggttgatggtaatccttttcctgtcaatatggtgcatacagctggccgaacagcctatggaggtcgtgcaagaggttttcaagtaaattcggctaagatcattaataagtaccaaaggaaattttgttggaatgagggtataaggctgccgtctattgaagactgtcctgggtgcggcaatgttgcagaaagttcaagccgatcgtataatagaggcaatcagctagggcagacaagggttcctgttcatcaaagattgggtccagtaaatcaagatcatggtcaggaggacaatgaaaacaggaaaactcaatggtgtcctcctgctgagtttggggtcaagcaatccgatgtcgatgaggttgaagaggaatcggctaagttgtttttgtcgccagaacaagcagtcttcaagaagccggaagggacagagaatcggcatcttaaaccactatatataaatggttatgtcaatgggaagccgatgtccaaaatgatgatcgatggtggggctgcagtgaatttgatgccgtatgctacatttaggaaattgggcagaaatactgaagatctcatcaagacgaacatggtgctcaaggacttcagtggcaatccattagagactaaaggagttttgaatgtggagctgacagtcggcaacaaaaccatccctacatcattctttgtcatcgatgggaagggttcttacagcttgttgcttgaaagggattggattcatgccaattgttgtattccttcaactatgcatcaatgcttaatttagtggcaaggcgacaagattgaaattgtgccagctgacagccagttaaagatggagaacccaagctattattttgagggcgtcgtggagggttcaaacgtctacaccaaggacacagtagatgatctcgatgataagcaaggacagggttttatgtcggctgatgatttggaagaaattgacataggtccaggtgatcgaccaaggccgacgtttattaatagaactattgaaagaattcagagattgcttcgcttgggagtattatgagatgccaggacttagccgatcgattgttgaacatcggctacctatcaaaccaggggttaggccacaccaacagcctccgaggagatgcaaagccgatatgcttgagcctgtcaaggctgagattaaatgattgtatgatgctagttttatttgtcctcgccgatatgctaagtgggtttctagtatagttcctgtgatcaaaaagaacggtaaggtcagggtgtgcattgatttccgaaacttgaataaagctaccctaaaagatgagtatccaatgccagtagccgatcagctggttgatgctgcctcaggacacaggattttgagttttatggacggtaatgcaggatacaatcaaatctttatggccgaagaagatatccacaagacgacttttaggtgtcctggtgcaatcggcttgtttgagtgggttgtaatgactttcggcttaaagagtgctggagctacgtatcaaagagctatgaattatatatatcacgatttgatcggctggttggttgaagtctatattgatgatgtggttgttatgtctaaagaaatagaagaccacatagccgatttgagaaaggtttttgagagaaccaggaaatatggcctaaagatgaacccgacaaagtgtgctttcggtgtatcggctggccagtttttaggatttcttgttcatgagagggggatcgaggtgactcaaaggagtgttaatgcgatcaagaagattcagcctccggagaacaagacagaattacaagaaatgatcggcaagataaattttgttagaagttttatttctaatttatctggcaggttagagccttttacaccattgttaagattgaaagccgatcaacagtttacttggggggcagagcaacagaaggctttggatagtattaaagaatatcttagctctcctccagttttgattcctccacagaaaggaataccttttagattatatctgtcggccagtgagaagccaatcgactcagtcttgattcaggagcttgaaggaaaagaaagagttgtattctatttaagtcgtcggctcttggatgcagaaactagatattctcctgtggagaagttgtgcttgtgcttatatttttcatgtacaaggttgaggcattatctattgtccaatgagtgcactgtcatatgcaaggccgatgtggtcaagtacatgttatcggctccaattttgaaaggaagggttggaaagtggatattttccttaactgaatttgatcttcggtatgagtcgccgaatgcagtcaaagggcaagctatagccatggactttattctttgatgggtcagtgtgcactcatggttgtggcatcggcttggttataatttcccctcggggggcatgttttgagtttgcttatactattaaaccttatgcaaccaacaatcaagctgaatatgaggtagttcttaaaggattgcagttactcaaagaagttgaagccgatgctattgaaattatgggggactctttgctagtaatcagtcaattggcaagggaatatgagtgcaagaatgatactttaatggtttataatgagaagtgccaagaactaatgatggaatttcggctagttactttgaatcatgtatcttgagaacaaaacactgaagccaatgatttggcccaaggggcatcggggtataagccgatgatcaaggatgttgaggttgaggttgcctcgataacagccgatgattggagatatgatgtgcatcaatatctgcagaatccatctcaatcggcttctcggaaattaagatatcaagcgttgaagtatactttgttggatgatgaactctattatcggacgattgatggggtattgcttaagtgtttgagtgccgatcaggctaaggttgcaatcggcgaagttcatgaagggatttgtggtactcatcaatcggctcatatggtgaagtggttgcttcggcgtggagggtatttttggccgacaatgctggaagattgtttcaggtattacaaaggatgtcaagattgtaagaaatttggagcaattcagcgagcaccggcgtcggctatgaatcctatcattaaaccatggccgtttagaggttggggaatcgatatgatcggtatgattaatccaccatcgagtaagggacataagtttatcttggtggcgaccgattatttcaccaagtgcgtagaggcgattcctttgaagaaagttgattctggggatgctatacagtttgttcaatagcatataatctatcgatttggtatccctaaaaccattataaccgatcaaggttcaattttagtgtccgatgagtttgttcagtttgccgatagcatgggaatcaaattgttgaattcttcaccgtattatgcacaagctaatgggcaggccgaggcatctaacaagagcttgatcaaattgattaagagaaagatttctgattatcctcggcaatggcatactcggttagctgaagcattgtggtcttatcggatggcttgtcatggatcgattcaagtccctccttataagctagtctatggtcatgaggctgttttgccatgggaagttagaatcggctcgaggagaacggagttgcaaaataatttaacagccgatgagtattataaccttatggccgatgagagggaagatctggttcaatcacgattgcgagcccttgcaaaggttaccaaggataaggagcgagttgctcggcattataacaagaaagtagtgtccaaagatttttcggaaggtgaacttgtatggaagttgattttgccaattgggactcgggatagcaaatttggcaagtggtcgccaaattgggaaggaccgttccaaattcataaggtggtatctaagggagcttacatgttgcaaggacttgatgaagaagtttatggcagagcgctaaatggcaaatacttgaagaaatattacccaagtgtttgggttaacgca

SEQ ID NO: 69000 - DNA, 746 bp, Oryza sativa
  unsure (1)..(746): unsure at all n locations
  Clone ID: PAT_MRT4530_69710C.1
ccacgccgtccgtaacaacagaagaaggatttattgttgatattccaaagatctgtaccatttctatatgttgatatacattcatatcctgctagagctcattttgtttggcgtttgtcattgtattatttattttcttgtttagttatgtcaatttctcatataactgtttgtaaggtggtttactagtgttgatttgagtagattgaaacattccttttgtcacagaagaaattcttgacttggatattccaattaaaaaaatgtaagcagagaggtatgaagtaatgttctcaagcttattttcataatgtcagtggaatcttctgattttactggagtatgagttcacatgagatatcaacattctattatcttatgttaatggctgtacaacttctatacagtttaacctgcggtatatctaaagcccatgttaatttctacaaacagagtatctcacttctgttatgaaaaaattaccgtctgactcccatcatattattaagtaatttcaacgtgttttctgtcatatgaagatttgcctgtggtttgttgacttttgatctggagtgtaatttgtgtgattattaacaactgggtgactgcaacaaggaatcaaggatatagttggaatgagtttttatttacagattttatttttttttgttttgcgtttatctataccangttgttgcacctatcttcttctgtgttagctccaaaataccgagttgctgctttgc

SEQ ID NO: 69001 - DNA, 630 bp, Oryza sativa
  unsure (1)..(630): unsure at all n locations
  Clone ID: PAT_MRT4530_69711C.1
gagcccactatttcaaacctccctnngnnnccnnnntnnnnnnaaaaaataacagggtttttaaattcattacagacaggctcactacgtgatgtacataactgcaagactccaaaactactactgacaacaccagaatacgttcaaaataacttgcaagtttaaaaccatgcgtgacaatctaaaaaattcggatcaccagaagatcatccatcacttggcaatgtgaaagccagaacaacaatggtgagggcaaagacaatggtggcacttcgaaacaaccgtgcatatttaattccaatctgattcttgctctcttcactgcttaactcaaactctttgagaagctccctcacttcatcaatgtccgagtcttttgaagcttggattagtctgctttgaatcttctcaaacttattcagcctcctattactagatgtagcttcacgtgaccagataaaacctgtcatcttccataagagaatccccacatagatggccacaatgcagtctacagtgtaatgatggcgttctcgtatttctctttgggcactgtgcatcacaagaagccatacaagagcagaactgaatcctccatatgcttccgtccaagccatggctgtgagtacg

SEQ ID NO: 69002 - DNA, 585 bp, Oryza sativa
  Clone ID: PAT_MRT4530_69712C.1
atggccacaaatataaaagagaacatcagcgcagttggcggctggttgcggcgacaactgcggaggtggttgcatcagagatggggccggaagcaccaggacgccggcggtggatgcgaggttggcggcttgtcgcggttgcggcagagttggggacggaagcgccaggacgccggtggtggaggcaagtcggccggccacggcgatggggagcccggcgactggcagcggccgagcgtcgatggggatcccggcgaccggccgccgccgcgcatcgacggggatgctggggaccggccgcgcccgcgcgtcgatggggatcccagcgaccggccgccgccgcgcgtggatggggagccctgcgctcggccacgcgtcgatggggagcccggcgaccggccgccgccgcgcatcgatggagagcccggcgacctgccgccacagcgcgtcgatggggatcactacacttggcggcgcgtagatggggagctaggtggccggcggcgcgtcggggacttgggcggctggccttccatcgagtcgtcgcctcgctgtgggcagatcgatttgggtgtgcagggttag

SEQ ID NO: 69003 - DNA, 174 bp, Oryza sativa
  Clone ID: PAT_MRT4530_69713C.1
atggtggctttggctccccagccggccgccgccctgatcagcatggcacttgatcccctcttcaaccttctccaacgccgtcttcgatatattcgtggcgacaccggtgactggaagccgccatcggcggcattcaaaatgaggcgaggcgaggcgccggtggcagtgcgctga

SEQ ID NO: 69004 - DNA, 1607 bp, Oryza sativa
  Clone ID: PAT_MRT4530_69714C.1
ccagtttacagttccagcaaatacaggaaaccctttttccttggggactggcaacgattccccagtaagcattgattcgtcaacaaaacttgatcctccaaggacatttccatctacagggattgtttctcctggaaggaccaatatgaagtctccaacacgaacatcatcaacaggaacctcaacagtgattgcatctgaattcaaaacaccatctgaggatggatcgtcacttgaggaagtaacgaccaatcttgactgaggtgataagagtgaaacgagctcattcatatcgctagaagccttaagcctggcactttcttcaagagatcgtccaagaagcacaaatccgagaagcatgaccggttcatcaaaaaaggttgaattccattccagttcagggttcagcaaggacactgaactgatagcaaatgccgctgcagatccaaaccctacaagagagttcatgttgggggatccttgcttgaatgctcgaagaccatcaaaaagtatatctggtgttacattgaacacattttgagaaaaggataaaaagcctcttccaggcccaaacaatgccgctattgcaatgccacatttcacatacgaattatgcaacagatccaaaaacgttccatggccgacgtggatgccgagcgagtgtaggaaatgggttgcgtgcgagccgcagcagagcgcaacgagcgtccacgcgaaggcgacgcgcccacggctccgcgtgaggagctccgccttcctggccgccatctccctccacttccgagcgctgtcgctagcccccgaggccgcgccccctcgccgcgccaccgaggggaacccgcactccgtcagcctcgccgccagctccttcccggcggccggctccggcgacctcagccgcacggccgccgactccgcgaggaggttgaccgccgcggtctccacccgctcgtccgcggccaggatggtccgcaccggctccgcgcagagcaggaggcgggcgatggcgacgatgcgccggcggcggacgacgggcgagtgcccgctgtccggcgagcactgcttcgcggcggtgctgggtgactccgtggccggtgtggtggtgtccagcgggaggaacaacttcctcagcctgtacaacaccgtcctcgtcgtgaggctcgtgctcacagtcgaggccttaccacaaccgccacctcgcgcccaaccggagacgccggagcaacagggggttaacgccgcgaaccggagcggtgacatggaggggggaacggctagcggtggcggccatcctcgcgttcctggtcctcaacgccttgtccggcaccgccgccgcgctcccggccgagctcccggacccagcaccgccgacgtctcgcggcgcaacctcgtcaagctccgtgctcaccgcaaaccggaggaaatggatgcggagaatccgcccggtaaaatcgcaggaaggagaggaggaaatgtgatgctctatctaggtgggacttcctttgaaccagtttggacagatggaatcgctgtctcactgacatggtggccatcagactaagagtctgggcatgttcagacgcgaacgatcatcaattaagcaggcg

SEQ ID NO: 69005 - DNA, 1661 bp, Oryza sativa
  Clone ID: PAT_MRT4530_69715C.1
ttatacaaaccccacaagcccagtattattagcttcccctgtctccttgcacacaaattctgaactctcggcgacggcgaggtggtggtggtggtcgccggcgccatggtggtcaccggggccgacgacgtggacggcacggatgagagcaggtcgaacgactcccagctggccgtcgcggtctgtggcgccggcgcggtcgccgtggcgggcgccggcggctggaactgccggcgctgctgctgctgcgccggcggcggccgcggcggcaggtgcggcggccgggccttgggcggcgccgccgccgctttcttggtcttggcacggatggcgtcgagggcctcgacgtacttctgcacccgcttctcctgcactcggcgctgctccttgacctcgccgtcggcggcgatggagtcgagcttgaccagctcattcatcagcgcctcggtgagcgccaccacgtcggcgtcaaccaccctcccgcccttgctcacgatcgcctccagcgccgacaccttggaggcgagcttgtcgacgtcgagggcgacgcgggagacggacttggcggcgcgctcggccttgcaatggcggcgctcctcgaggaggcgcttggcctgggcggtggggtcctcgaggaggagcatcttggagcggtccttgacgccggcgatgtcgaggaacgccttggagtccctctccttgtccctgtacaccaccttctggtcgtcggggtggagccccgtcttctccgacaggagcttcttcagctcgccgaaggacgcctgcgagttgatgtagatctcgtggtacaccccgttgtacttcaccttcacccggatcgtcggcaccggcgcgccgcccggcggtggctccgactccgggctccgcttctgcaccagcatgccgccgggccgcacctcccacacctcctccttcgccaccgccgccgtctccttcttcatcgccggaaatttctgatccttcccgcgcatcatcttcttctcatataggagtactatcctagtagtagttaatcctataatatactcaggagctaaaaaaacttgcttcttcttcttcttctttgatcaaattaagatcacccagctgccagagactagtaatctaactaactaatttagcttagctttcctctgctctatatctgctttgctgccgagagacaaccaaacaaaaaatggaaatttgagctagctgcaagctgcaattgtgacctccaattggagacaggaatgaatcgaagaaggaatgggaggaagagctaagaagaaagggtatgaggaggaagaaaaagacaggcgtacaactaagggacagggcagcagaatatttatactgatacgaactaagcaatgcaagcaaccaagcaacccccaacccaacccaaccccaatggtgtccaccttgcaagtagacaagtgtggggctccttctcctagcttagccctgtttatacaatggccaagaactccaatggcatcatcttcttctactacaagaagaagagaatttctttattttttcttttactgtatttaaccttgtgatggtttggttgcgtcagcaattgtacggatacggtcgggcatcgatcgaactcgtcgactacgcgtcggtttgggttggtgagcgtggctgtg

SEQ ID NO: 69006 - DNA, 287 bp, Oryza sativa
  Clone ID: PAT_MRT4530_69716C.1
atggctggagagacggcggctgcgttggctccacggcggcggcatgacgaggaggaccgccggcggcagcggcggctgcagaggggcgatgacggctggaggaccgtcggcggcggctgcgttggctcaagggcggggggcagctgggctcggcggcggcgccgcacggaggggacaagccggcgcggctgctcatggaaggaggtagcggcggtggcggagggatggcagctgcggggcgccgtggaaggagcggtggcgagcggcagtggagggatggcgccgcg

SEQ ID NO: 69007 - DNA, 967 bp, Oryza sativa
  Clone ID: PAT_MRT4530_69717C.1
gagcctcatcgatcgagctcgcagccgccgtgttccccgccgggggaaggtcgtccttgccgttgggtggtgttcccggcgctggattgacgccatgaggaagaagctggacacccgcttccccgcgcctcggattaagaaaatcatgcaagcagatgaagatgttggcaagattgctttagctgtacctgttctagtgtcaaaagcattggaattatttctgcaagacttgtgtaataggacatatgacattacagtgcaaagaggggtcaagactctgagttcttcccatttgaaacagtgcatacatagttataatgtttacgatttcttgagggatgtcgtcagtaaagttccagacatgggtacatctgatgctggtgttgatgataaacttggcaaaaggaggaaaactgctgaagatgacagtgaagaggaatcaaagcggacaagaaatgaggcagcaagccagacaagcactggtagagggcgtgggaggggtcggggaagaggccgacgtggtgggcgtgtgtctgagagggagattatttccgcttacgaaaaatttgaggagaaccatgagtttcctccaggtcaatttagcaagccttctcagctgaaggtagatgtttcagttgatggtacagatgcaattgaaacaaaggaggctaccccattaagcaacgcaagagcttctctaaggaacattgacttaaacatagagcttactgactatgatgatgagggttcagctccactggaggtccagcctccagctccggcagcaggtgtggttacaacctcttcaggaccacttgtttcggaggtgaacgaagaggcgaagaccaaagactttctaggatggcaattgcctgagctgaccaagatggccatggaccctgttcagtttgccttgtcttcaaaccataggttagaggaggatgaggattatgacaacgaagaatga

SEQ ID NO: 69008 - DNA, 2070 bp, Oryza sativa
  Clone ID: PAT_MRT4530_69718C.1
atggccaccggtagccttggcctctccacctccttcctccccggccacgacaccctcctccgccgccgccggcggcggccgccggcgacgacggcggcgtcgttccgcccggtgacggcggagctcggcggggagctggggcggcagctggtggaggcggtcggggtggggctcccctgcacggtgatggcgtgcggcgacgtcatctaccgcagcacgctcccccgcaacgacgggctcaccatcaccgcccccggcgtggcgctcgccctcgccgccgcgtcctacctctggtccacccccggcgtcgcgccgggcttcttcgacatgttcgtgctcgccttcgccgagcgcgtcttccgccccaccttccgcaaggtgagcgcgggcactcgcgactcctgatctggaacaagcttgggggagggggggtctgatttggtttacaaggcgtcgctggattaccccaaaggcatgcgggagaaggcagggtgcttgtggttgtgaagaaggcaacagagtatggtgcggtagaaatatggatgaacgagcgtgtcaggagggcctgtgctagcagctgtgcagattttatttatggctttcgtgagagcaaagctaaaggtaagggagctgatgaatactggcttatttggcgttatgaaggtgaggatacactattcgatctcatgcaaagcatggagttcccttacaatgtatgaagttgaatacaaactgatcgatatcatccgaagcaaggagttcccttacaatgttgagacattgattctaggagatgttcaagacctgccaaagggaatagcaagagagaataagattattcaaacagtaatgagacaactgttatttgctcttgatggccttcattcgacagggattgttcacagagacgtaaaaccccaaaatgtgatattttcggaaggatctcgtacgttcaaaattattgatcttggagcagcagctgatttgcgagtgggcatcaactatattcctagtgagttccttttagatccaaggtatgctgcaccggagcaatatataatgagcactcaaacaccatctgctccctctgctccagttgcaactgctttatctccagtcctttggcagttgaaccttcctgacagatttgacatatatagcctgggccttatattcttacaaatggcatttccatcattgagaacggacagcagcctcatacaatttaaccgccaactgaagaggtgcaactatgacttagaagcttggaggaatttggtagagccacgagctaccccggagctccggaggggctttgacatcttggatttagatggtggtattggactgcactgtcgcatacagattgcccgggcgagaggctccttgagcctctctgtaatgcaaaacttgagggctgcaactgcttcgtgcaacccagaaggactacagtgaagcagcccgttgggtcgtcggcctcatggcaagatcaggaacagaagcagaaggaggttttacagaggcacaacttcaagagcttagggaaatcaaaccaaagaaaggtagtgcacggaggaacttgcttgcttccgtgctgcgtgtacagagaaaggtcgtgaggacaatcaacgaaagcatggatgagcttagcagccagagcaaaagcatttggtggagccggtggataccaaaggaggagtaggcagacgcagctctgtccctctgtgcatcgcccatttcttctgtagaaacctcgccatgtagcaatggtaatggtacagcctacttacttccctacctctggtgagtacaaatcgtcgttccatcggaaaaagaccacaatagcatataccgatgtccaaataggtgtacatatatttgacatggaaccaaaattttcagagacccttatgataagttcataacagatccactgtacttgattaaaaaaaaaaagattgttgctcggggactgtgttcatcatgtggtagtaccagaaacccctggcaccggtggtcgtaatgattaatgaatcctcataataagtggaaaaaaaaaaaaaaaaaaaa

SEQ ID NO: 69009 - DNA, 518 bp, Oryza sativa
  Clone ID: PAT_MRT4530_69719C.1
cccacgcgtccgcaactatattcctagtgagttccttttagatccaaggtatgctgcaccggagcaatatataatgagcactcaaacaccatctgctccctctgctccagttgcaactgctttatctccagtcctttggcagttgaaccttcctgacagatttgacatatatagcctgggccttatattcttacaaatggcatttccatcattgagaacggacagcagcctcatacaatttaaccgccaactgaagaggtgcaactatgacttagaagcttggaggaatttggtagagccacgagctaccccggagctccggaggggctttgacatcttggatttagatggtggtattggatgggaacttctcacatcgatggtccggtacaaagcacggcaaaggactggtgctaaggctgcactggcgcatccatatttcaaccgcgaggggctccttggcctctctgtaatgcaaaacttgaggctgcaactgcttcgtgcaacccagaaggact

SEQ ID NO: 69010 - DNA, 6011 bp, Oryza sativa
  Clone ID: PAT_MRT4530_6971C.1
ttgcaggatcaaatgaactggcatgctagcatacccaaaggcaagttttggacttgcactggagttaagcagatctcctaggcctcgtgttttatatcaacacgcttttggcacgcccagtgggaccgattagaagtcagaagtcttttctcatggacgacaagccgccgacatcaccgtccttggctagcccaggttctgttaaagtgaagatccagcagttagaccaatacgaggttaatgaaggcaacatcgtgaacattactccagacaagctgacacccgatcaaaagaaagattttgaagcgatgatgcagcaagcacggaaccagttcttaaactcatttatgcagacccgcaaggggacaatggtgcaaaagtacaaggtaagagaagtggctgatgtccccgggaccggttcttccaaggatggaggagtgaaacaagctccagatggctcggctcaaccgagcaacaaaggtgctgagatgattctcatggaaatcaaggtgacaactctcagggagttcaaggagttcaaggtgatggtgcccagggagttcaagatcaggttgactatgctgtacagcatgctttgatcaatcaatctggaatattaaccaatactttagcaaacatggtgaagtcaatggttgatggttcaatggccaagtatcaagctacaggaccagtctacttaccaggaggggtgttcccgaattatcagccactaatcaccgataatcaaccagttgtccagtcggccattaatgcaccatcggctaagccgatggcaccattaccagctcctgcctgctgcaccaccttcggttccaggccaattggttaatcctcgattgttggtgagagaacaatcatagcacagtggacggaatgtgaatcggctaacccaagacaaggttgcatctatgttcttacctcctcaacataccattgatccaacccagcaacagccgattcagcaaacaccgccaaggcagcaggttgtgcagccgagtttgcgatacctggtggtcagcctgtgcaacatagtgcaaatcaagttgtcctggagcacttggttcatcacgtacaaccatatagcacgatgtcatgaaggagcaatttgggcttaggccgaaagatgctggaaatttataccgacagccgtatcctgaatagtttgagagagttcctctccctaaccggtttaaagttccagattttttaaagttcttagggcaagatagcacatcaacttttgagcatgttagccgatttttagctcagtgtggtgaagcatcggctgtggatgccttgagggttaggtagttctggttgtctttgtctggatcggcttttacttggttttcttctttactgtatggatcgattaacagttgggccgatctggagaagcattttcacagctacttctatagtggggtacatgagatgaagttgtccgatttgacagcaatcaagcaaagacatgatgagcctgtgcacgattatatttagatgttcagagagatgaggaataagtgctacagcttaagtttgactgatgctctgttagccgatttggcttttcagggtatgattgctccaatcagggagaaattctcatctgaggactttgaaagcttgtcgcatcttacacaaaaggtaactttgcatgagcagaggtttgctgaagctaggaggaattctagaaaggttaatcatatctgtccttatatgtgtggatcggatgatgaggatgatgattttgaaatagccacagccgaatgggtaaggagcaaaaaggttgtaccatgccaatgggtgaagaattctagaaaagaggagaggtatgactttgacatcaccaaggttgacaagatttttgactttttactacgagagaagcagattcaacttcctgctagtcacacaattccgtcagttgaagaattgggcaagaaaaggtattgcaagtggcataattctgggtttcatactactaatgattgcaaggtcttcaggcaacagatccaagcggctatcgaaggaggcaaaattaaattttgtgattctaagaggccgatgaaggttgatggcactccttttcctgtcaatatagtgcatacagctagccgaacagccgatggaggtcgtacaagaggttttcaagtaaattcgactaagttcatcaataagtaccaaaggaagtatgacaaacagcaggagaagcattatgaggaagatgatgacggtatgaggctgccatctattgaagactgtcctggatgcggcaatactgcaaaaagttcaagccgatcgtataatagaggcaatcggccagggcagacaagggttcctgttcatcaaagattgggtcctgtaaatcaagattacggtcaagaggacaatgaaaacaggaaaactcaatggtgtccttctggtatctttactaagaatcagaagagaaggagaacaaagccaaagcaggagtggcgcgttaagaaacaagctcctatagccgatgaggctgcggccgatgaagcaaagagattggccaaagggaaaaagcgttgtgactgcatcggttaacatggttttcacgttgcctgctaagtttgggggtcaagcaagctgatgtcgatgaggttgaggaggaatcggctaagttgtttttgtcgccagaacaagcagtcttcgagaaaccggaagggacagagaatcggcatcttaaaccactctatataaatggttacgtcaataagaagccgatgtccaagatgatggtcgattgtggggctgcagtgaatttgatgccttaagctacatttaggaaattgggcagaaatactgaagatcgcatcaagacgaacctggtgctcaaggacttcagtggcaatccattagagactaaaggaattctgaatgtggagttgacagtcggcaacaaaaccatccctacatcgttctttgtcatcgatttgaagggttcttacagcttgttgcttggaagggattggattcatgccaattgttgtattccttcaaccatgcatcaatgcttaattcaatggcaaggtgacaagattgaaattgtgccagccgacagccagttgaatatggagaacccaagcaattattttgagggcgtcgtggagggttcaaacgtctacaccaaggacacagtagatgatctcgatgacaagcaagaacagggttttatgtcggctgatgatttggaagaaattgatataggtccatagtttagaaccaagttgatagagttattgaaagaattcagagattgcttcgcttgggagtattatgagatgccaggacttagccgatcgattgttgaacatcggctacctatcaaaccaggggttaggccacaccaacagcctccaaggagatgcaaagccgatatgcttgaacctgtcaaggctgagattaaacgattgtctgatgctggttttattcgtgcttgccgagatgctgagtgggtttctactatagttcctgtgataaaaaagaacgacttgaataaagctaccccgaaagacgaatatccaatgccagtagccgatcagctggttgatgctgcctcgggacacaagattttgagttttatggatggtaatgcaggatacaatcaaatctttatggttgaagaagatatccacaagacggctttaggtatcctggtgcaatcgacttgtttgagtgggttgtaatgactttcggcttaaagagtgctggagctacgtaccaaagagctatgaattatatatatcatgatttgatcggctggttggttgaagtcaatattgatgatgtggttgttaagtctaaagaaataggagaccacagagccgatttgagaaaggtttttgagagaaccaggaaatatggcctaaagatgaacccgacaaagtgtgcttttggtgtatcggctggccagtttttgggatttcttgttcatgagagggggattgaggtaactcagaggagtgttaatgcgatcaagaagattcaacctccggagaacaagacataattgcaagaaacgatcggcaagataaattttgttagaaggtttatttctaatttgtctggcaggttagagccttttacgccattgttaagattgaaagccgatcaacagtttacttggggggcagagcagcaaaaagctttcgatagtattaaggaatatctcggctctcctccagttttgattcttccacagaaaggaataccttttagattatatgtgtcagccggtgagaagttaatcggctcagtcttgattcaggagcttgaaggaaaagaaagagttgtattctatttaagtcgtcggctcttggatgcagagactagatattcccctgtggagaagttgtgcttctgcttatatttttcatataaaaggttgaggcattatctattatccaatgagttcactgtcatatgcaaggccgatgtggtcaagtatatgttattggctccaattttgaaaggaagcgttggaaagtggatattttccttaactgagtttgatcttcggtataagtcaccgaaggcgatcaaagggcaagctgtagccgattttattgtagaacatcgtgatgattcaatcggctcggttgagatagtaccatggactttgttctttgatggatcagtgtgtactcatggttgtggcatcggtttggttataatttcccctcggggggcaggttttgagtttgcttatactattaaaccttatgcgactaataatcaagctgagtatgaggcagttctcaaaggattgcagttactcaaagaagttgaagccgatgctattgaaattatgggggattctttactagtaatcagtcaattggcaggggaatatgagtgcaagaatgatacattgatgatttataatgagaagtgcgagaactaatgaaggaatttcgactggttactttgaagtatgtatctcgggaacaaaacagtgaagctaatgatttggcccaaggggcatcagggtataagccgatgatcaaagatgttgaggttgaggttgcctcgataacagccgatgattggagatatgatgtacatcaatatttgcagaatccatttcaatcggcttctctgaaattgagatatgaagcgttgaagtatactttgttggatgatgaactctattatcggacgattgacagggtcttgcttaggtgtttgagtgccgatcaggctaagattgcaatcagcgaagttcatgaagggatttgtggtactcatcaatcggctcataagataaagtggttgcttcggcgtgcagtgtatttttggccgacaattctggaagattgtttcaggtattacaaaggatgttaagattgtaagaaatttggggcaattcagcgagcaccggcgtcggctatgaatcctatcattaaaccatggccgtttagaggttggggaatcgatatgatcggtatgattaatccaccatcgagtaagggacataagtttatcatggtggcaaccgattatttcaccaagtgggtagaggcgattcctttgaagaaagttgattctggggattctatatagtttgttcatgagcatataatctatcgatttggtatccctcaaatcattacgaccaattaaggttcaattttcgtgtccaatgagtttgttcagtttgccgatagcatgggaatcaaattgttgaattcttcaccgtattatgcacaagctaatgggtaggccgaggcatctaacaagagcttgatcaaattgattaagagaaagatttctgattatcctcggcaatggcatactgtgttagctgaagcattgtcatggatcgattcacatccctccttataagcctgtttatggccatgaggccgttttgccatgggaagttagaatcggctcaaggagaacggagttgcaaaatactttaacagccgatgagtattataaccttatggccgatgaaa

SEQ ID NO: 69011 - DNA, 311 bp, Oryza sativa
  Clone ID: PAT_MRT4530_69720C.1
gcgtttttgtcgcctaatgagtctgcgacatgctgatgaatgaagtgtcagagattgatgcgcgcacacatacattgcagttcagctggcgttcatgagcctaataatgggagggagcctcatttggttgaattcgtttgcagaacacgccttaggcggctttctatgctgcacatgttagctatagcccaaggccgggtggtactagcttggactatgtagaggaggtcccagattgttgcataattctacagtacgactgacactgacgttgatgaggaaacactctgctcagatgagccatgtgggag

SEQ ID NO: 69012 - DNA, 453 bp, Oryza sativa
  Clone ID: PAT_MRT4530_69721C.1
cccacgcgtccgcccacgcgtccgatgcggtgaatgagtgggagtcccaccgggaatggtcaggctcatatgaagatggtatctttagaaataactgaaaataatttattaataaacgtttaactatatttttcatggttttaaaccgatgctgaaaaatatactactgcaacgataaacaaaaacactgaaatcaaacttaaaattaagtttcagaattcaatttttggttgggctaataaactaacaagcaacgagggtagaattgctactaggtattctggaaaaaaagagagagaaagaattgctactagtcatggacaatgttattaaaaaaaatattcatacatttttatatgaaagcaaatggcatccatcataattcttcaaaaggtgtaattctgacatgcatattatgcgtagttctgtagatttgacaattctacatcagct

SEQ ID NO: 69013 - DNA, 637 bp, Oryza sativa
  Clone ID: PAT_MRT4530_69722C.1
ttaagttttctttccatttataagatttttaataggatacttctatcttattatttttctcctagttttattgataaaaattgacatatgtgtaagttcaaagggtataatataagcatttgatatatgcatatggtgagattacaattataagtttaattaacatccatcacattacatttttacaaatttttatgtatgagaacttttaaaatctattcttttagaaacttttaatatgcagtatagtactgctaactataattaccatgctgtatattacatccccagaacatcgctgggagttagtatcttttgaatgtcttcacccaactcttccacctcccaaccaacccctgtctctggcaaccacaaaactgatctctgcttctatgagttttctttttcttctagatgccacacataagataaatcatacagtatttattatcttcatctatctgacttatttcacttaccataatgccaccaaggcccatccgtgctattgcaaatggcaggatttttttttctcttttatgtatgaataatatttattatttatccactcatgttatttataaatcacatattatttatccattcatccaccaatggacacaaaggatgtttccat

SEQ ID NO: 69014 - DNA, 348 bp, Oryza sativa
  Clone ID: PAT_MRT4530_69723C.1
ccacggcccttagtattgttccacagcgattgtgccacagctacaactgcagcccatttagtggtgtctactttgatcagactcacagctcaagccccaactctgttgaccttcaacttgccatccatatgtggtatctacccctaactactattagtgctccccacggagcacttgcccacctgttggtggtgtctggtacctgaatttgtaacccatataatagttcgtattgttataaaataaagtcatacatcatccactgtgtgacctgttgaaacttagggtcatatataattctaaataaaatcatcttacctatttaaataaaaaaaaaaaaaaaaaaaa

SEQ ID NO: 69015 - DNA, 511 bp, Oryza sativa
  Clone ID: PAT_MRT4530_69724C.1
tactccaccaacaagtgctcacgcccatgcagtgagttcgtaagcccacagtatagccatagtgcaacccccttctgccaaccagctacgtttcaattgataaacacaccaagtcatcacaccagtgttgccaacagctcaggctggtagcacaacaatctcactaccagcccattagtattgttcaagcgattgtgcaacagctacaactgcaccaatttagtggtgtctactttgatcagacctcaagctcaagcccaaactctgttgaccttcaacttgccatccatatgtggtatctaccctaactactatagtgctccccaggagcattgccacctgttggtggtgtctggtactgaattgtaacaatataatagttcgtatgttaaaaataaagtcatacatcatcatgtgtgacctgcttgaaacttagggtcatataaatctaaataaaatcctcttacctatttaaaaaaaaaaaataaaataaaaaaaaaaaaaaaaaaaa

SEQ ID NO: 69016 - DNA, 195 bp, Oryza sativa
  Clone ID: PAT_MRT4530_69725C.1
ttttgttgtaaaggcagaagtagagatttttcttctttttttttttcatttcagaatatacaattggccaatggtgggggattcgaagactacccaaaacccattaatttccccctcaatttacaaccctttcaaaaaaatttagtgaaattttaacggttagtaaaagaagcatttcttctggatggccataat

SEQ ID NO: 69017 - DNA, 213 bp, Oryza sativa
  unsure (1)..(213): unsure at all n locations
  Clone ID: PAT_MRT4530_69726C.1
tttgaaaccccctccccgttgagggtgtccaagggctccgtccaagcggttgaaaagacaacgggaaccgggcncancnncaacccccccgggaacgtgccgatcgcgacgaccaccgtggagctcctcgccaagctggtcctcgccgctgcgcttgtcacggtcgttcttaccctcacttccaccgtccttgctgcctcctacgccgactga

SEQ ID NO: 69018 - DNA, 495 bp, Oryza sativa
  Clone ID: PAT_MRT4530_69727C.1
aacaagtgctcagcccaatccagtgagttcgtaagcaacagtatagcatagtgccaaacccccttctgccaaaccaagctacgtttcaaattgataaacaaaccaagtcaatgcaagcaaccatagtgttcccaaacaagcttcaaggcttggtagcacaacaatctcactaccagcccattagtattgttcaagcgattgtgcaacagctacaactgcagcaatttagtggtgtctactttgatcagactcaagctcaagcccaaactctgttgaccttcaacttcccatccatatgtggtatctaccctaatactatagtgctccccaggagccattcccacctgttggtggtttctggtactgaattgtacacaatataatagttcgtatgttaaaaataaagtcatacatcatcatgtgtgactgttgaaacttaggtcatataaatctaaataaaatcatcttacctatttaaataaaaaaaaaaaaaaa

SEQ ID NO: 69019 - DNA, 324 bp, Oryza sativa
  Clone ID: PAT_MRT4530_69728C.1
tgcaccagctgctgtcgatggcggcgagctgccggcagcagcctcgccggacttgtgatccgaatgaggccacataaatatctatatgagtctttcaaaccccatttagttttaaaaggggagattcatgagctagcaattatatatacatttctcaaaatcttacccctcaaaatttcacttgacatgctgatggctttgatcacatgcggacatgcccacatataacttaggtaatgaactcaaaatttgagacagaatacagatgaatgttttgtacatcgcacgggttgtgaaaagagggtgtagagagctataaaattc

SEQ ID NO: 69020 - DNA, 460 bp, Oryza sativa
  Clone ID: PAT_MRT4530_69729C.1
tggagttcgtaaggcaaacaagtatagcatagtggcaaccccccttctgggcaaccagctacgtgttgcaattgataaacaaaccaagtgcatgcaagcagcagtggttgccaacaagctcaggctgggtagcacaaacaaatctgcactgaccaggccattgagtattgttcaagcgattgtgcaacagctacaaactggcagcaaatttagtgggtgtctactttggatcagactcaagctcaagcccaaactctggtgtgaccttcaactgtgccatccatatgtgggtatctgaccctgaactgactgatagtgctcccaggagcattcgccactgttggtggtgtctggtactggaattgtaacaatataatagttcgtatgttaaaaataaagtcatacatcatcatgtgtgactgttgaaacttagggtcatataaatctaaataaaatcatc

SEQ ID NO: 69021 - DNA, 1825 bp, Oryza sativa
  Clone ID: PAT_MRT4530_6972C.1
tagggtatcttagccgagtacaaaaaatttcagaatattttatgtaaatttcttacagattaatgtgggcaaaagtctgtcgtaaagacttgtggtatcttagagtttgttagagataatagtcgtgtccgaagtcagaaagcagttttcctcatggccgagaagccgccaccatcgccgtcttcggctagcccaggttctgttaaagagaagatccagcaattagacctatctgaggttaatgagggcaacgtcatgaccatcactctggacaaattgacacctgatcagaaggagtttgaagcaatgatgcagcaagcacggaaccagttcttgaactcattcatgcagacccgcaagggaacagtggtgcaaaagtatcaggtgcgagtagtggctgatgtccccgggaccggttcttccaaggatggggagatgaaacaagccttaggtggctcggctcaaccgagcaacaaaggtgctacaaatggatcggctcaggagaatcagggtgaccactctcaaggagtacatggagttcaaggtgatggcactcaggggccacgaggaggaagtcttaatcaagatggcagtgcgtcacaggaatttttcaataattttcaagaccgggttgactatgctgtgcacaatgctttcatcaatcaatctggggtattagtcaataccttgtcaaacatgatgaagtcaatagccgatggttcaatagctaaacatcaggctgcaggcccagtttatttgccaggaggtcagctggttaatcctcggcagttgatgagagagaacccacagcatagtgggcaggttgcgaatcggctaacgcaggatcaggttgctaccatgtttctaccacttcaacctactgttgatctagtccagcagcagccgattcaacaaacacccccaatccaacaggtcgtacaaccaattcagcaacaggttgtgcactgggccgatctggagaagcagtttcatagctatttctatagtggggtacatgagatgaagttgtacaatttgacagcaatcaagcaaagacacgacgagcccgtgcatgaatatattcagaggttcagagagatgaggaataagttcattagcttgagcttaactgatgcccagatagccgatttggcttttcagggtatgattgctccgatcagggagaaattctcgtctgaagactttgaaagcttaccgcatcttacacaaaaggtaactttgcacgagcagaggtttgctgaagctaggaggaattctaggaaggttaatcatgtctgttcttatatgtgtggatcggacgatgaggatgatgattctgagatagctgcagccgagtgggtaaggagcaaaaaggttatgccatgccaatgggtgaagaattctggaaaagaagagaggtatgattttgatattaccaaggctgacaagatttttgatctattactctgggaaatgcaaattcagctccctgctggtcatactattccatcggctgaggaattaggcaagaaaaggtattgcaagtggcacaattctggatctcatactaccaatgatggcaaggtctttaggcagcagatccaatcggctatcgaaggaggcaaaatcaaatttgatgattccaagaagccgatgaaggttgatggtaatccttttcccgtaaatatggttcatacagctggccaaacagccgatgggggccgtgcaaggggttttcaaatgaattcggctaagatcatcaataagtaccaaaggaagtataataaacaacaggagaagcattacgaggaaggtgatgatggtt

SEQ ID NO: 69022 - DNA, 364 bp, Oryza sativa
  Clone ID: PAT_MRT4530_69730C.1
cagtatagcatagggcaaacccccgtgtgggcaaccagctacgtttcaattgataaaccagccagagtcaggcagcagcagtgttgtccaacagctcaggctggtagcacaacgatctcactaccaggccacttagtattgttcaagcgattgtgcaacagctacaactgcaccatttatggtgtctactttgatcagactcaagctcaagccccaactctgttgaccttcaactgtgccatccatatgtggtatctaccctaactactatagtgctcccacggagccttgcccctgttggtggtgtctggtactgaattgtaaccatataatagttcgtatgtaaaaataaagtcatacatca

SEQ ID NO: 69023 - DNA, 475 bp, Oryza sativa
  Clone ID: PAT_MRT4530_69731C.1
ttatagccaatatcaactacatcgcatctcctactacagcacaagtgctcagcccatcagtgagttcgtaaggccaccgtatagcatagtgcaacccccttctggcaaccagctacgtttcaattgataaaccaaccacagtcatgcagcacagtgttcccacacagctcagctggtagcaccacaatctcactaccaggcccttagtattgttcaagcgattgtgcaacagcttcaactgcagcaatttagtggtgtctactttgatcagactcaagctcaagccccaactctgttgaccttcaacttgccatgccatatgtgggtatctcccctaactactatagtgctccccggagccttgcccccgttggtggtgtgctggtactgaattgtaacaatataatagttcgtatgttaaaaataaagtcatacatcatcatgtgtgactgttgaaaaaaaaaaaaaaaaaaaa

SEQ ID NO: 69024 - DNA, 4818 bp, Oryza sativa
  Clone ID: PAT_MRT4530_69732C.1
atggacaccggggaggcggcgttcggagtggcgagcctgcggctgcgggggtcgatggcgtcggcgtcgtcgaggcgggcgccgtcgtaccgggactacgacgtcttctcgatcgcgtcgtcgtcgcgcgccgaggccgaggacgacgaggaggcgctcaagtgggcggcgctcgagaagctgcccacccacgcccgcgtccgcaagggcatcgtcgccgccgctgacgacggccagggctcgggcgccgccggcgaggtcgtcgacgtcgccggcctcgggttccaggagcggaagcacctgctcgagcgcctcgtccgcgtcgccgaggaggaccacgagagcttcctcctcaagctcaagcagcgcatcgacagggttgggctcgatttcccgacgatcgaggtgcgctacgaacacctgagcatcgacgcgttggcgcacgtcggcagcagaggcctcccgacgttcctcaacacaactctcaactctttggaggtgaaaaatttggacccccaaaaccctctcatttctgatgatttctgggcaaattttagtctgaaccttttgttctttgatccccacttggatgtgcagtctctggccaatttgcttcatgtggttcccaacaagaagaggcctctgaacatcctccacgatgtccatggagtgatcaagccaaggaggatgacattactcttagggccaccagggtcagggaaaaccacactgcttcttgccttggcagggaaactaggatctgatctaaaggtttcaggaaaagtgacatacaatggatacggaatggatgagtttgtggcccaaagatcagctgcttatatatcccaacatgatctccacatccctgagatgacggtgcgcgaaaccctggcattctcagccagatgccagggagttggtactagatatgacatgcttactgaactagctagaagggaaaaggcggcgaatattaaacctgacccagatcttgatgtttacatgaaggcaatatcagtgggtggtcaggagacaaatatcatcactgattacgtcctcaagattctaggacttgacatttgcgctgacaccattgttggaaatgaaatgctgagaggaatctcagggggacaacgcaagcgtgtcacaacaggtgagatgattgttggaccagcaagagcaatgttcatggatgaaatctccactgggttggacagctctacaacatttcagatagtgaaatctcttggacagatcaccagtatcctcggtggcacaactgtcatctccttgctgcaacccgcaccagaaacatataatctgtttgatgatataatcctcctgtcagatgggcacattgtgtatcaagggccacgtgaacacgtgcttgagttctttgaatcgatgggcttcaaatgtcccgatcggaaaggcgttgcagactttttgcaagaagtgacatcaagaaaggatcagcagcagtactgggcaaggactcaccagccttaccgctacatcccagttcaggagttcgcttgtgcattccagtcatttcacgtcggccaaactctatcggacgagttgtctcaccctttcgacaagagcacttcccaccctgcatcgctcaccacctcaacctatggcgccagcaagctagagcttcttcgcacatgtatagcaagggaattgctgctcatgaaacgcaacatgtttgtctaccgttttcgcgctttccagcttctggttatcacaatcattgtgatgacactgttcctgcgcacaaacatgcaccacgaaacaaggactgatggcattgtttacctgggtgcgctcttctttgcaatggttgcgcacatgttcaatggtttctctgagcttgctatggccaccataaaattgcctgtgttcttcaagcaaagggactacctcttcttcccttcatgggcttacacaataccaacctggattctcaagataccgatatcttgctttgaggttgccatcacagtattcttgagttactatgtcatcggattcgatccaaatgtcggaaggttgttcaagcagtacctgctgctattgctggtgaaccagatggccgcagcattgttcagatttattgcagcattgggcaggaccatggttgtcgcgaatacattggcgtcatttgctctactagtgctccttgtgctcagtggatttatcctatcacaccatgatgtgaaaaaatggtggatctggggctactggatctcacctctccagtatgcgatgaacgccatcgcagtgaatgagttccttggacacaagtggaaccgccttgtccaagggaccaatacaactttaggaattgaagtgctcaagtccagggggatgttcactgaggcaaaatggtactggattggcgtcggtgcactcttcggatacgtcattgtgttcaacatcctattcaccatcgctctaggctaccttaaaccatcgggaaaagctcagcaaattctttcagaggaagcactgaaggaaaagcacgccaatatcaccggagaaacgatcaatgatccaagaaactctgcatcttcaggacaaactaccaacacaaggagaaatgctgcaccaggtgaggcaagcgagaacaggagaggaatggtgctccctttcgcgccgcttgctgttgccttcaacaacatcagatactctgtcgacatgcctccggaaatgaaagcacagggtgtggatcaagacaggctgcttctgctgaagggagtcagtggcagcttcaggcctggggtcctcactgcactgatgggagtcagtggtgctggcaagacaacactgatggatgtgttggccggcaggaagacgggaggctacatcgaaggtgacatctcgatctctggctacccgaagaagcaggaaaccttcgctcgggtctctggttactgtgaacagaatgacatccactcgccaaatgtgactgtttatgagtccctggcttactctgcttggctcaggctgccctctgatgttgattcagaaacaagaaagatgtttatagagcaagtgatggagctggtagagctgaatccactgagggatgcgcttgttgggctacctggagtaaatggcctgtcaaccgagcaaagaaagaggctgacgatcgctgttgagctcgtcgcaaatccttcgataatattcatggatgagcctacatctggccttgatgcaagggcggcagcaattgtcatgaggacggtgaggaacaccgttgacacaggcaggactgttgtctgcaccatccaccagcctagcattgacatttttgaggccttcgatgagctgttcctgatgaaaagaggtggagaggagatatacgtgggtcctctaggacaccattcttgtgaccttattgaatactttgagggagtcgaaggggtcagcaagatcaaaccaggctacaacccggcaacatggatgctggaagtaaccacactggcacaggaagacgtactggggatcagctttacagatgtctacaagaactcagatctctaccaacacgaagttctgacaaaaagcttggattcatatggcattgttgcccattgcaggagaaaccagagcttgatcaagggcatcagcaggccaccacaggggtccaaggacctcttcttcccaacacaattctcccagagcttctccacccagtgcatggcctgcctctggaagcagaacctctcctactggaggaaccctccctacaccgtcgtccgcttcttcttctccctcatcgtcgccctcatgttcggcaccattttctggcgcctcggcagcaaaagatcgaggcagcaagacctgttcaatgccatggggtcgatgtacgcggcggtgctgttcatggggatctcctactcgtcgtcggtgcagccggtcgtcgccgtcgagcggacggtgttctaccgggagagggccgccgggatgtactctgcattgccatacgccttcggacaggtggtggtggagctgccgtacgtgctggtgcagtcggcggtgtacggggtgatcgtgtacgccatgatcggcttcgagtgggaggccaagaagttcttctggtacctctacttcatgtacttcacgctgctctacttcaccttctacggcatgctcgccgtcggcctcaccccgagctacaacatcgcctccatcgtctcctccttcttctacggcatctggaacctcttctccggcttcgtcatcccccgcccgagcatgccggtgtggtggaggtggtactcgtgggcgtgcccggtgtcgtggacgctgtacgggctggtggcgtcgcagttcggcgacctgaaggagccgctccgcgacaccggcgtccccattgacgtcttccttagggagtacttcggcttcaagcacgacttcctcggtgtcgtcgccgttgctgttgcggggttcgccacgctcttcgccgtctccttctcgctctccatcaagatgcttaacttccagaggaggtgatgatcgatttttgctaactcagacctgatcgattacccacttcccatgtaaccgttttttttttttttcctttttttcaactctattttggttttgtaaccaaatacgtagtatagtccagtcagaaatgaagccaacacggagtatatatacacaagctgatagtgcagataatttgttttacatgcatgaaatctgttaattttgattctattttgtacatgtagtattaattgaaaagaaatgaaagtcagccggattttgtctttcttttaaaaaaaaaaaaaaaaaaaa

SEQ ID NO: 69025 - DNA, 436 bp, Oryza sativa
  Clone ID: PAT_MRT4530_69733C.1
gttcgtaaggcaacagtatagcatagtggcaacccccttctggcaaccagctacgtttcatttgataaacaaccaagtcatgcagcagcagttttgccaacagctcaggctggtagcacaacattctcactaccaggccattagtattgttcaagcgattgtgcaacagctacaactgcagcattttagtggtgtctactttgatcagactcaagctcaagcccaaacttttttgaccttcaactttcccatccatatgtggtatctaccccaacaacaaaagtgcccccagaagcattgccactgttggtggtgtctggcactgaattgtaacaaaaaaaaagttcgtatgttaaaaaaaaagtcaaacaccaccatgtgtgactgttgaaactaagggtcaaaaaaatctaaaaaaaatcatcttccccttttt

SEQ ID NO: 69026 - DNA, 1077 bp, Oryza sativa
  Clone ID: PAT_MRT4530_69734C.1
ccttctcctgtcgcctctccctctccactgccaagcaacccccccgccccgtgtgatttcgtaagccaccagtataccataccactatcccctactattcgcatcctccatgtttacaccaacaagtgctcagcccatccagtgagttcgtaagccaacagctatagcatagtgccaacccccttctgccaaccagctacgtttcaattgataaacgatacccaagtcatgcagccaacagtgttgccaacagctcaggcttggtagcgcaacaactctcactaccagcccattagtagcgttcaggcgattgtgcagcaactacaagctgcagcaggtcggtgttgtctactttgatcagactcaagctcaagctcaagctttgctggccttaaacttgccagtccatatgttggtatctatcctaactactacattgctccgaggagcattcccaccgttggtggtagtctggtactgaattgtaatagtataatggttcaaatgttaaaaataaagtcatgcatcatcatgcgtgacagctgcaactctaccgtgcacgtttgccttatctcttattttgccttatggtgtttagcaacaaattatgagacaaacccatacaaccatccatcgagcacgagtatgactcgatgtataatgtcgtatattatccttacgtcaaaagaaccactttttacgtggcaaatattatttttaatgaaaataatacctcacagtacacagattaataaccctcccgtgcatcctagattttccttttctttcaccctacccatttttttggaagcatttcacctaaactggtcaaaaaagggttgaaattcttgtaaagtggtaggcccgtgacccctcaaggctccaattcccaaaagtctcaaccaaaaaaaaaagagaaaagaaaaaagaaaaaaaaaatctggtgccgtggtctcaatcaccacgtgctcttccatcctccataaatactctctcctctcctcgcgagtttcctcatcaaaatcgccttcgcttaataatctcctcctccgtattaaactcggtttttttagatat

SEQ ID NO: 69027 - DNA, 610 bp, Oryza sativa
  Clone ID: PAT_MRT4530_69735C.1
ctcgaggccggccccgggatccttcaccacaattcaaatattatagttgaagcatagtagtagaatccaacaacaatgaagatcattttcgtatttgctctccttgctattgttgcatgcaatgcctctgcgcggtttgatcctcttagtcaaagttataggcaatatcaactacagtcgcatctcctactacagcaacaagtgctcagcccatgcagtgagttcgtaaggcaacagtatagcatagtggcaacccccttctggcaaccagctacgtttcaattgataaacaaccaagtcatgcagcaacagtgttgccaacagctcaggctggtagcgcaacaatctcactaccaggccattagtagcgttcaggcgattgtgcagcaactacagctgcagcaggtcggtgttgtctactttgatcagactcaagcacaagctcaagctttgctgcccttaaacttgccatccatatgtggtatctatcctaactactacattgctccgaggagcattcccaccgttggtggtgtctggtactgaattgtaatagtataatggttcgtatgttaaaaataaagtcatacatcatcatgtgtgactgttg

SEQ ID NO: 69028 - DNA, 467 bp, Oryza sativa
  Clone ID: PAT_MRT4530_69736C.1
attgtcattgtcgaatcccgatcgataaacctggggtgccacagggtgaaaattgctttccgtgcttctgtgtgttggaaattaaactatggcttgccaagggattatatataagatctttcagaataaatttctctttgataactctactgacatcgattttctgctttatttcttctcttcatcagtggagtcgagacctggtgatcgagaagagactcgatctcttacaagtatggatggactagcttttgcaagctttggacactcttcgtccttcccaatcccaatcgagctaacattgtatgatctatggtgatcagcataccaataaatactatcagcatatgttcctggaccatttttcgtccggtctttgctggtgtagtgatgcctgtggctgttggaataaatgtacttttaagaataattcctgtcacgtggagggagtaaaaaaaaaaaaaaaa

SEQ ID NO: 69029 - DNA, 467 bp, Oryza sativa
  unsure (1)..(467): unsure at all n locations
  Clone ID: PAT_MRT4530_69737C.1
cgtncgacgagcggacaggcaggcggactgcttccaaccgcgggcgccgggagcggcaagatctcttgcatgccggccatgtcggcgtcgtcggtgccggcgtacccggtggtgtccacctcgggcaccccgccgccgtacgcgacggcgtacgccacgccgagcttctcgccggcgcantgtccgagcccatccaacatcgggagggcactgctggtcgaccggcggtncaacgacggccgagcgttcgacggcagcatggagttcatggggatggcggtcagcaacgccgtgttcgacctaccgggcctgtgaatcgatcgatcacagggcccgtgtctaattgctttacttaccctcgcctgtgtgcagtagttggttgtggtggcgggcgcgttcgctgcccgcggtggccgctcgcgtggcgcctcagttatatgtgttgaatcttttaatncatgtgaaaa

SEQ ID NO: 69030 - DNA, 279 bp, Oryza sativa
  Clone ID: PAT_MRT4530_69738C.1
atgcctggggataggggtgatgttctcacagaatataaaagcgtccagcataagtcacttttcattctagagatgaaatggatagatgcatttctggtagtgatccacaaggggttattatctgaagctaccactgcagttgatcatattgttgctatgtttgaacttcagctcttagagaagaaggtatatgcacaatttatcatgcaattacaactccatgaggccattcaggatgacttaagtgcctacaagaagaggaacattgcagaccgctaa

SEQ ID NO: 69031 - DNA, 335 bp, Oryza sativa
  Clone ID: PAT_MRT4530_69739C.1
ctgcaggaattcggcacgaggaatacaatgtagtctattgaatcctcgtgtcggcatacttggcaatagcatcgaaaccaagaaaactgcaagaaagaaaatgatatctatatgattaacctattgaggtcgataacaatgaatttggccgattgcattgtcagcttgcatgttctgatttccagtttagtgaccatgtatattttttttttaatccatgaagcaaggaacaagcaaaattagtattttattaaatgggtaggcatgctctgctttgatgaaatactctaagttgagaacttaacagaaacaaataaaatcagaaccatccaagt

SEQ ID NO: 69032 - DNA, 1932 bp, Oryza sativa
  Clone ID: PAT_MRT4530_6973C.1
atgaatccgacaaaatgtgcttttggtgtatcggctggccagtttttgggatttcttgttcacgaaagagggatcgaggtaactcagcggagcattaacgcaatccagaggattaaacccccggaaaataaaaccgagttaaaggagatgattggcaacataaattttgttagaaggtttatttccaatttatccggaaagttggaacctttcatgcctttattgaggttgagagccgatcagcaatttacttggggggtagagcagcaaaaagctttggataatatcaaggattatcttagctctcctcctgttttgattcctccacagaggggaataccgttccgattgtatttatcggctggtgagaagtcaatcggctcggttctggttcaagagcttgaagggaaggagcgagttgtgttttatcttagtcgacggctcttggatgctgagactcggtattctcctgtagagagttatgcttgtgcctttatttttcgtgtacaagctgaatatgaggcagtgctcaagaggttgcagttactcaaggaagttgaagccgatactattgaaatcatgggggattctttgctagtaatcagccagttggtgggcgaatatgaatgcaagaatgatacattgctggtttataatgagaagtgcttagagttaatgaaagagtttcggctggttactttgaagcatgtatctcgagatcaaaatcttgacgctaacgatttgactcaaggggcatcggggtataagccgatgatcaaggatgtgaaggttgagattgcagcaatatcagccaatgattggaggtatgatgtgcatcagtatttgagcaatccttcccaatcggcttctagaaaattacgatataaggcattgaagtatacattgctggatgatgagctctattatcggacaattgatggggtattacttaagtgtttgagtgccgatcaggctaaggttgcaatcggtgaagttcatgaggggatctgtggtactcatcaatcggctcacaagatgaagtggttgattcgacgtgcaggatatttttggccgacgatgttggaggattgtttccggtattataagggttgtcaggattgtcagaagtttggagcaattcaacgagcaccagcgtcggctatgaatcctataattaaaccatggccgttcagaggttggggaattgacatgatcggcatgataaacccaccatcaagcaagggacataaatttatattgatggcaaccgattatttcaccaaatgggtagaagcaattcccttgaagaaagttgattcgggagatgccattcagtttgttcaagagcatataatctatcgatttggtcttcctcaaactattactacagatcagggttccatattcgtgtccgatgagtttgttcagtttgctgatagcgtgggtatcaagttgttgaatttttcaccttattatgcacaagctaatgggcaagccgaggcgtctaataagagcttgatcaaattgatcaagcggaagatttctgattatcctcggcagtggcatactcgtttggccgaagcattatggtcttataggatggcttgtcatggattgatccaagttcctccttacaaactcgtctatggacatgaggctattctgccttgggaagttagaatcggttctcgtcgaacggagttgcaaaatgatttgacagccaatgagtattacaatcttatggccgatgagagggaggatttggttcagtcatgtttgcgagcccttgcgaaggttactaaggacaagcaacgcgtcgctcggcattataataagaaagttgtgcctaaggatttttcagagggcgagcttgtatggaagttgatattgccgattgatactcgtgatagtaaattcgacaagtggtcataa

SEQ ID NO: 69033 - DNA, 295 bp, Oryza sativa
  Clone ID: PAT_MRT4530_69740C.1
gtttttctatctgactacacagataactgcatggggggatcttgcacagtatcgggcggacaaccaccatgtagcttctgaccagcggccagctcgccacctttgccaccgatcttctgcatgatgccacagttctgcgccgtcgtagatgttccaggactgctcccacggcctcaagctccgcaagcccaacatcagctgcccgacgttggtcaagaccacgaccaatgcgagcgcaactaccaaacagactggtccggaacagcgtgtgaaccctacggtcccctccatcacc

SEQ ID NO: 69034 - DNA, 972 bp, Oryza sativa
  Clone ID: PAT_MRT4530_69741C.1
atggagaaggtgccagcaaccaagagagaggcgaaactgtgcgtggtacttgccgcgttgctgctgctgctgggcgcccccggcgtagcaacggcagatgctgtagccacatcggggagtggccgtggcggctgcacgcggagcagcggcaacatcagcatcgagtacccgttcggcatggagcccggctgctactacgtggtcggcttcaacctcacctgcgacactcgtaccacccacccaggctgttcctcgattcacgggatggatcaattggggatggatctgcttgcggatatctacatggtcgaccaaggattcaactatactaccgatacattctattctaattccaccgagtatcctcctcgagcattgccagccttgctgaagtgggtaatcattactctgacaaccacatcaaggagtggccgtggcggctgcatgaggagttgcggcaacatcagcatcgagtacccgttcggcgtggagcccggctgctaccatgcagtcggtttcaacctgacctgcaaccactcgtaccagctgcccaggctgttcctcgacgatggcacggtgcaggtgctcaacatctccatccccaatggaaccgtgcgaatcaacagcggccgaatcaatctcgaggacaatggccttggaagcacaaacgggacatgggggcggtggccccccaattggcgggccgttctttctgtcggagtcggagagcagactggtgttgatgggctgcaactcctaggtcgttgtctgggagctaagaggaaactaattggttgcctcttgcagtgtcatctgcccatcattgccctcacaaggacgcttcttaggaattttcaggacaagtgcgtgctcgggcattgcttgttgtcaaacaaacatcattttaggcaaaaatacacttgggtcatttcattgtcaatgtcaagatggagcaaatggggatccctttaa

SEQ ID NO: 69035 - DNA, 657 bp, Oryza sativa
  Clone ID: PAT_MRT4530_69742C.1
atggcggattgccgcagcctgatcgagttcctccgcgcgttcgagcaccaccgcagggcggcggactccgccgccgcggcggggtgctcctcctcctcctcccgatccaggcggggcgggtcgtcgctcacggcgctctgcgaccactcgccgatggccgcggtcgacgcggtcgtgctcctcgccgtggtcgccgcgctgggcttcctcgtggtgccctacgcgaagatggcgctcctcgagatgggcgcgctgctccacccggccgcgtcgtgcctctcggccgccgccttcgccggggccgcggtggccgtcgcggcggcggtgctcgcgtgggagctggtggggcaccacgcccgcaagtgcggcaagccgcggtgcaggggcctgaagaaggccgtcgagttcgacatccagctcgagacggaggagtgcgtgcgcggccacccggctcccgcggcgcgatcggctctgctcgcggccgcgggggcgcaccccgtggagctcggggacgcgcaccgcgagctcgaggccgagctccgcaagatggcgccgcccaacggccgcaccgtgctcatcttccgctcgccctgcgggtgccccaagggtcgcatggaggtctggggcgccaagaaggtgcgccggatcaagaaatag

SEQ ID NO: 69036 - DNA, 466 bp, Oryza sativa
  Clone ID: PAT_MRT4530_69743C.1
gcacgaggagcagaactcgtgtcttgttgcagtctcccccagccctcccttctccaacccagctcgtgggagatccgatggcggggcagctgaagtccaagatcgtcgccgtggcggtggccgccgtggtcgtcgtcgcctcgtcgctggtcggcacggcctccgcggccgatgcgcccgccccggcgcccacgtcgggcgccaccgccaccgccggcgcagcgccagctttcgccgccgtgtcggtcgccgccgcggctttgggaggttacctattctgttaggctggttgtgatgcagagagagcatatgcgtcgacacatatcacgtatgctttgagatttgttgttgagatgcgtgggtgcaatttgtttcttgatcctggggttgtaattgctcatgtactctcatgtgtataccgaaacgtgattgattaattacatatgcattgattatttttgggtcg

SEQ ID NO: 69037 - DNA, 342 bp, Oryza sativa
  Clone ID: PAT_MRT4530_69744C.1
atggtcaccgatgcagcaatgttgttgaaagacatcattatattgtcgacgggcgcctgcacggccatcagtgttgtatgcggtttctccgacaaggaattcatccacgggctacacaaatgggagctcgatcataggagcatagtattgcctttctccatggctatcctgacctgcagcgaccatcaagagcatggtgatgtggttacgcatagtaggtggcagagggacttggtaggagaagggtctgagataccacttggaagcatccagctagacaccaccggagagttgctgccccatcgccagagcctgcgctgccactggcagcaacatcattga

SEQ ID NO: 69038 - DNA, 252 bp, Oryza sativa
  Clone ID: PAT_MRT4530_69745C.1
atgacgtgggagaagggagggcgttccgcacgtgcgagctcggggttggagaggcctagagacgagagaagaaggagggcgtcgacgtcggcggcgacgcaggagaaggggactaggggagggcatcgccacgcgggcgagctcgaggacggagaccccagcggcggcgaggtgagcgacctccatgacatcgtgcaaacatatgtcatcttcgaaaagaaatcgaagaggcaacgagaactccgtggctaa

SEQ ID NO: 69039 - DNA, 428 bp, Oryza sativa
  Clone ID: PAT_MRT4530_69746C.1
gataacttggccatgagggccccaccgtcagttcctccagttccctgtcggagttgcctgccgccgcgtgttgcctgtagccaccacctgtagcctgcctgccaccactgggctgccacctgtagccacctgccaccacatgtagcctgccttcactggctgctggcctgtagccaccgcctgcctgcaccaccaccgtatgccgcctgccaccgtagcctcctgcctccgccgctgctggccgtagccacctgcgctcctgcctccggcagcggctgcgactgggcctcgttaacggtgatgttgctggcgtcgagctccttgccgtaggtggagaaggggttcgagcggacgctgtgggtctgaccggggaaattccggacggtacctgcaggcgtaccagtttcccattatagtgagtcgtatta

SEQ ID NO: 69040 - DNA, 2061 bp, Oryza sativa
  Clone ID: PAT_MRT4530_69747C.1
atgtccggcggtattctcctcctcctcctcctcctcctcctcctcctagctgccgcctgcgtcgaagccggcgagctgccgccgattagccggagaagcttccccaaggggttcatcttcgggacgtcctccgcgtcctatcaggttaggcttcccttccgcatcattcttcctacaagagatcaagaacaatttgataagactgccgccttaactgaattcttgcaagaacatcggttggaacagactgttcttttcaaaaggaagaaagaaaaaaagctggaacagactatacacaaaaaaacctccgcgtcgctctcgcacgggcggctcgggggcgaaaaccctagctgcccgcgccgccactccgcctcctccacctcgccgcccccggagctcgccggcgggaaagctgccagcgagcagggaaggcggcggcgaggcacatcaactcgacggcctccacctcggcgcgacgaggacaggggaacgacgaagctctccgccgcggtcagaggcggagacggtggggctgcttggagaggcggtggatccggcttctttgaggccggatttggccctccgacgcctggatctggccggagcagctgctccggcgtggcggcgcgaggcagctggccggcctgggcatgttggcggcgtgaggtggctcggcggcgtgcggcctgcctgggcgtgaatacggcgcgagctgcggcggcggctcggcagcggctcggcagttgggaacggcggcggcgtagcctgcccgggcgcggagacggtgcgagcggcggcggctcggcggctaggaacggcggcggcgtggccggcccggagctacgggctgggagcgggcggcagcatggcgctggtgcggctgcccgggcgcagcggcggcgtgccgcggctcggctgtgcggccgcgagcagccccatggcgcggccagtcctcggctgccggggtgccgccgcgatgccctgcggccgggtgggtggcgtggcgtggccaggtggggcgcggcggccgggcaacaggggcgccggagccggaggggtagtagcttcaccggcgtcggcgtaggcctagaaggcagtgcaaagggagctggcagtggtggatcgtcttcctcgttaccggtcggcaccctcgccctttctggagctcctccccttctttgcggggagtttctgggttggattgaggcggcagcttgtcagcgggggaagcttaggttgccgaaactatggcacccagtcccgggttctccttctgccagatctagcaaggaggctggcgggtggtggaacagaggggtcctgggccagctctcagggatggtgtgcgagggtggagcagcagaggggggcagaggaccaagcatctgggacaccttcacatatcagcatccaggcatgtttaactataaaatcgctgacaaaagcaacggggatgtggctgacaacacctaccatctctacaaggaagatgtgcacatgatgaaggagatgggaatggatgcatacaggttttccatctcatggtcaagaattcttccaagggtccaatcatttgttacccttttccattatgacacacctcaggcactggaagataaatacaacggatttcttagccctaatatcataaatgactataaggactatgctgaaatctgcttcaaagagtttggtgaccgagtgaaacattggatcaccttcaatgagccttggatcttctgctctaaggcctatgcatctggcacctatgccccgggccggtgttcaccctgggagatgggaaaatgcagcgttggagattcaggaagggagccttacactgcatgccatcaccaactacttgcccacgcagaaactgttcggttgtacagagagaaatatcagttcactgaagaagttgtcaggcagtcgcagttcatccatgataatgatttacatcgaagatccgcaaagttaagtttcataatccaaaattacttattgcttggcattcactttcagccaggtcctggtggtagagtttgccagtacagacattaa

SEQ ID NO: 69041 - DNA, 246 bp, Oryza sativa
  Clone ID: PAT_MRT4530_69748C.1
actccaggagtcattatcttcatctttgcttcggaacagacattctacttcaacaacttcaaatatttcggtttgaacgagttggacaacaacatcaactctcctccaagtgaagcatctacaacagctctgcttcatcgaccctgacatctctgctgttgctaatggatgattatgttttcgccgacttattatttcaccttcacggttgacctgtctgccgccgactggtttcttcgcctccat

SEQ ID NO: 69042 - DNA, 1488 bp, Oryza sativa
  Clone ID: PAT_MRT4530_69749C.1
tcgaacaatttgatcaatgagctattattgaaaggcattcatgtctaatcttcactgtttagtttcaagttcagtggctagatgcaacttgtggaaaccattagctccatcccttggcactggaagataaatacaacggatttcttagccctaatatcataaatgactataaggactatgctgaaatctgcttcaaagagtttggtgaccgagtgaaacattggatcaccttcaatgagccttggatcttctgctctaaggcctatgcatctggcacctatgccccgggccggtgttcaccctgggagatgggaaaatgcagcgttggagattcaggaagggagccttacactgcatgccatcaccaactacttgcccacgcagaaactgttcggttgtacagagagaaatatcagttcactgaagaagttgtcaggcagtcgcagttcatccatgataatgatttacatcgaagatccgcaaaggccttacaaaaggggaagattggaataattgtgaactcacagtggtatgttcccttctccccatccaaaaccaacaaggatgcagcaagacgtgttctagatttcgtgcttggatggcttatggatcctctcattagaggggactaccccctaaacatgagagaattggttggaaatcgcttgccaaagttcaccaaagagcaatctgaaatggtcaagggtgcatttgatttcattggacttaattactactcttcaagctatgctgagaatgttcttccatcgtatggtcttaagaacagctacaatactgatttccacgctaggattaccggtagtcgaaacggtactctcattggtcctcaggctgcttcatcttggcttcatatataccctcaagggctccgtgaattgttgctttatatcaaggaaaactacggcaatcctaccatctttattactgaaaatggtgttgatgaagtcaataacaagaccatgccactcaaggaggccctgaatgataatacgaggatagaatattatcacaagcaccttctcgccctgcgaaatgctatgagggatggagcaaacgtgaaggggtactttgcatggtctctgcttgacaactttgagtgggcggatggctacacactccggtttgggctaaactttgtggattacgatgatgggatgaagagacaccccaagaattcagcccattggttcaagaagttcctccgagaaatgaaacagggatgaaaagagtcgcacgcattgccttcttttttttcattgaacatcgaaattgagtgtcacagatgaaatgagtttgagatgtgcttctttgtttaggctatacaagagtaaacttcacaaaactacacgttttgttgtccaagttacaataaaaccacacaaattattagaagcaacagatgacaagtgattcacattttctctaagaaaaagaaaaagggaattacgccagaaaaaaaaaaaaaaa

SEQ ID NO: 69043 - DNA, 3366 bp, Oryza sativa
  unsure (1)..(3366): unsure at all n locations
  Clone ID: PAT_MRT4530_6974C.1
atgttgcagcaagcccaggatcaggtcttgaactcattcatgcagccccgcaagggaacattggttcagaagtataaagtaaaggaagtcaaggtgacaactctcaaggggtgcatggagttcaagacccgcaagggaacattggttcagaagtataaagtaaaggtagttgccgatgaccctgggaccagttcttccaaaggtgaagacgggaaacaagctccaaatggcttggctcaactgagtgacaaagctgctaccgacggttctctaggaagtcaagctgacaactctcaaggggtgcatggagttcaaggtgatggtgctcaggggttgcaacgtggaaatcttaatcagaatagtgatgcggcacaagattttttcaataatttccaagaccgggtcgactatgttgtgcaccatgctttgatcaatcagtctggggtgttagtcaataccttatcaaacatgacgaagtcaatagccgatggatcaatagctgagcatcaggctgcaggcccagtttatttgcaaggagcattagccgattcaacagacactcccgagtcagcaggttgtacaaccaatccagcaacaagttgtgtaaccagtccagcaaacgccaccaaggcaacagcctccgcggccgattcagcgaacgccattaagatagcaaatcattcagccgattcagcaccaaggctcaatgagcgcatcggccagggagcagctcagcaacgaccgtgggccgatgtgattgctgatgtaatgagggaacagtttgggcttaaaccaaaagagactggaagcttgtatcggctgccttaccctgagtggtttgagagagttcctctcaacattcagttcaaagttccggacttctccaaatttttgggacaagatggtgtgtcaacttatgagcacattagccgatttttagctcagtgcggtaaagcatcggttgtggacgctctgagggttaggttgttccagttatctttgtttggatcggcttttacttggttttcttctttgccatatgggttcatcaatagttgggccgatttggagaagcaattccacagctatttctacagtggggttcatgagatgaagttatccgacttaacggcgattaagcagcggcatgatgactctgagatagctgcagccgaatgggtgaggagtaaaaaggtcataccgtgccaatgggtgaatagttctagaaaggaagagaagtatgattttgatattactaaagctgacaagatttttgatctgctactccgagagaagcaaattcaactccctgctggtcaaacgattccatcggttgaggaattaagtaaaaagagatatggcaaatggtataattctgggtctcattctactatcgattgcaaggtgtttaggcaacagattcaggtgcccattgaaggaggcaagattaagtttgatgattccaaaaagccgatgagggtcgatggtaacccatttcccgttaacatggtacacacagctagcggaccanttgatacggggcgcatgaggggttatcaagaaaagcttcatgaagaagataatggtagctctgatcctcattggggctgtgagttcttcaggttctgttggaatgaagatgatgaaaataagaagactgaatggtgtcctcttagtatttttacgaagaatcagaaaagaagggttcaaagattgaggagtagggaatgcttccagcaggtcgaacaagaaattaatcatcggctgaagaaagcaaaatcgaggcaggagtggtgtgttaagaatcaggctcctgtagccgatgatgttgcagctgatgaggcaaagaggttggcaaaaggaaagagtgttgtgacggcaccagttaacatggtttttaccttgccagccgaattcgggatcgatcaagccgatgtcgacgaggtggaagaggaatcggctaagttggttctatcaccagaacaggcggtgttcgagaagcctgaggggacagagaatcgacatcttaaaccattgaagttgggtagaaatgccgaggatcttatcaagacaaatatagtgctcaaggactttggtggcaatccatcggaaaccaaaggtgttctaaatgtggagctgacagtcggcatcgacaaaatagagatcgtactagccgacagccagttgaagttggagaacccaagctattattttgagggcgttgtggagggttcaagtgtctacactaaggatacggtagatgatctcgatgacaagcaaggtgaaggttttatgtcagccgatgatttggaagaaatagatataggtccaggtgatcggccaaggccgacatttattagtaagaatttgtctctagaatttagaaccaagctgatagagctcttaaaagagtttagagattgcttcgcttgggagtattatgagatgcctggactcagccaatcaattgtagaacatcggctacctatcaaaccaggggttaggccgcaccagcagcctccgaggagatgtaaagccaatatgcttgaacctatcaaagctgagattaagagtttatatgatgctggttttattcgtccttgccaatatgctgagtgggtttctagcatagttcctgtcatcaagaagaacggcaaggtgagggtatgcattgattttagagatctgaataaagctacaccgaaagatgaatatccaatgccagtagccgatcagctggttgatgccgtgttagggaacaaaattttgagttttatggatggaaacgcagggtataatcaaatttttatggctgaagaagatatccataagacagcttttagatgttctggtgcaatcggcttatttgaatgggttgttttgactttcggcttgaagagtgctggagctacatatcaacgggccatgaattatatttatcatgatctaatcgactggctggttgaggtctatattgatgatgtggttgttaaatctaaggaaataaaagagcacatagccgatttaagaaaagttttcgagaggcccaggaaatatggcttgaagatgaatccgacaaagtgtgcttttggtgtatcggatgggcagttcttgggatttcttgtccacgagaggggaattgagataactcagagaagtatcaatgcgatcaaaaagattaagcccccggaaaacaagaccgaattggaagaaatgatcggcaagattaattttgttcgaaggtttatttctaatttgtccggaaaattaaaaccttttacaccattgttaagattgaaggccgatcagcattttacttgggggcagagcagcaaaaggctttggataatattaaaggatacctga

SEQ ID NO: 69044 - DNA, 1498 bp, Oryza sativa
  Clone ID: PAT_MRT4530_69750C.1
ctccttgctgtcgtcgcttccggcgcctacaatggcgccggcgagccgccggtcagccggagaagcttccccaaggggttcatcttcgggacagcctcgtcgtcgtatcagttctctcatgaacaaaaaggaaaaggagcaaaactacaaacagatttgtgcaacttttctccaccgagaatacgttggtacagattcacacagaaaggcaatgctactgggtaatgctcaaattggcaccaagtacgagggtggcgcagcggagggcggcagaggaccaagcatctgggacaccttcacacatcagcacccagagaaaatcgccgacagaagcaacggggatgtggcttcggattcctaccatctctacaaggaagatgtgcgcctcatgaaggatatgggaatggatgcatacaggttctccatctcatggacaagaatccttccaaatggaagtctgaggggtggagtcaacaaagaaggcataaagtactacaataatttgatcaatgagctatatcgaaaggggtgcaaccgtttattacccttttccactgggactcacctcaggcgttggaagataatataatggatttcttaccctaatatcataaatgactataaggagtacgctgaaatctgcttcaaagagtttggtgacagagtgaaacattggatcaccttcaatgagcctttgagcttctgtgttgcgggatatgcatcaggtggcatgtttgcaccaggccgctgttcgccttgggagggaaattgcagtgctggcgattcaggaagggagccttacaccgcatgccatcatcaactacttgctcatgcggaaactgttcggttgtacaaagagaaatatcaggtcttacaaaaggggaagattggaattactttggtctcgaactggtttgttcccttctcccgctccaaatccaacatcgatgctgcaaggcgtgctttagacttcatgcttggatggtttatggatcccctaattagaggcgagtaccccctaaacatgagagaattggttggaaatcgcttgccaaagttcaccaaagagcaatctgaaatggtcaagggtgcatttgatttcattggacttaattactactcttcaagctatgctgagaatgttcttccatcgtatggtcttaagaacagctacaatactgatttccacgctaggattaccgtcgaaacggtactctcattggtcctcaggtgacctacagctttgttacccacaaaacaaattattagtaaaagtgcaaaacaatgatcaggtgacatgattgaactctataaacaatatgtgtgtaggctgcttcatcttggcttcatatataccctcaagggctccgtgaattgttgccttatatccagggaaactacggcaatcctaccatctttattactgaaaatggtgttgatggaagtcaataacaagaccatgccactcaaggaggccctgaatgataatacgaggata

SEQ ID NO: 69045 - DNA, 434 bp, Oryza sativa
  Clone ID: PAT_MRT4530_69751C.1
aatccggtaccaattggaaatttggtttttacagggaattgaacaaaggaaggaaagggggggaaaccccgcaagcgttcgaaaggaggcccaaaaaaaaaagaaaaagggcccagggaaaccccccaaaaaaggaaccgggcttaaaaaaaaaatcccaaaagggtcatccgggggggcggaaaaaaaaaaacaaccaaacctggtccccccggggaacagccaaaccaggggccaaagggaaaaggggggagccaaaacttgggcaaggtaaagaagcccggaaattgggcccccggacaggggaaaaaccacaaaaaccaacctaagaccgggacctgaaaacaacggcaagggccttggccaagaggataaacccaaggggagaaaatttggaacctggaggggaaaaaacaccccaagggggaaaaatt

SEQ ID NO: 69046 - DNA, 2075 bp, Oryza sativa
  Clone ID: PAT_MRT4530_69752C.1
agggccatatgtctctctttcagcctctgggtcacacacacatactccccatggcagctgcaggggaagtggtgatgcttggtggcattctcctccctctcctcctggttgtcgccgtctccggtgagccgccgccgatcagccggaggagcttccccgaggggttcatcttcgggacggcctcgtcgtcgtatcagtatgagggtggcgccagagaggggggcagaggaccaagcatctgggacacattcacacaccagcacccagataagattgctgacaaaagcaatggggacgtggctgcagactcctaccatctatacaaggaagatgtgcgcatcatgaaggatatgggagtggatgcatataggttctccatctcatggacaagaattcttccaaatggaagtctgagcggtggaatcaacagagaaggcatcagctactacaacaatttgatcaatgaactattactgaaaggggtgcaaccatttgttacccttttccactgggactcgccacaggcattagaagataaatataatggatttcttagccctaatatcataaatgactataaggagtacgctgaaacctgcttcaaagagtttggtgacagagtgaaacattggatcaccttcaatgagcctttgagcttctgtgttgcgggatatgcatcaggtggcatgtttgcaccaggccgctgttcgccttgggagggaaattgcagtgctggcgattcaggaagggagccttacaccgcatgccatcatcaactacttgctcatgcggaaactgttcggttgtacaaagagaaatatcaggtcttacaaaaggggaagattggaataactttggtctcgaactggtttgttcccttctcccgctccaaatccaacatcgatgctgcaaggcgtgctttagacttcatgcttggatggcagaaggcacaaactatgaattccctttgtaggtttatggatcccctaattagaggcgagtaccccctaagcatgagagaattggttcggaatcgcttgcctcagttcactaaagaacaatctgagttgatcaagggttcattcgattttattggacttaattactacacttcaaattatgctggtagccttcctccatcaaatggcctcaataacagctatagtactgatgctcgagctaatcttactgctgttcgaaacggcattcccataggtcctcaggctgcttcgccttggctttacatctatcctcaagggttccgtgaattggtgctttatgttaaggaaaactatggcaatcctaccatctacatcaccgaaaatggtgttgatgaattcaacaataagaccttaccactccaggaagccttgaaggatgacactagaatagattactaccacaagcacctcctttcactgctaagtgcaataagggacggagcaaatgtgaagggatactttgcatggtcgctgcttgataacttcgagtggtcgaacggctatactgttcgctttgggataaactttgtggattacaatgacggagcgaagagataccccaaaatgtctgcccattggttcaaggagttcctccagaaatgatgaaaataaaagcgtgtgaagagttgcacacattgctcttcccattttgaacagcaaagagcatatatgttacaacagatggaggtattgcaagtttgcaactaaataaatctctgtcttcactctctgcgtatagctagctaagcgatggatagagagttacatcttctcttacgcatatttcaaaaaatttaagaggttgtagtaacttcttcatcatattttggagatgcgatcatagccagcacagtggcagaggttgctggcatgcaccgtccacgcagtgttcgattctccttgagcacggctcaccaagaatattttgtcttctcttcttaaaatcgttccttggtatccacttcttccgacactattataagtttgtagaaaaaaatcgtaacattttcgacctaagataaatttattatgaaaatatatttaattattgatttgatgaaaaaaaaaaaaaaa

SEQ ID NO: 69047 - DNA, 240 bp, Oryza sativa
  Clone ID: PAT_MRT4530_69753C.1
atggtggcatcgccgcgctctcacacgccgcctctgctccgctccgccggccgccgctcagccccgctcgccgctgtccgttgctactcccccgcggcaaagagaatgaaacgaagaagagagaaaagaaaggggaaagacgtccgcgtcaccggccgccggacctcctctcccgccacgccccgtcagtctgctctagggctatcaacgagccgagctcgagcgagctcgtctgcctag

SEQ ID NO: 69048 - DNA, 462 bp, Oryza sativa
  Clone ID: PAT_MRT4530_69754C.1
ggaccctagctttaacatatatttgggccaacccatcggaaagcaaaactgggaaaactattttggctatcccaagggggggggatttttttcctatacaagaataggcaggcgggtaaaacgcccttggggacgggcttaaaagttttccttggggaaggggaatctagggggggggggcgggctgaatttttttgaaaaacccttgagttgtttcgggggggggggggacccacaatagaaaacacctatgcgggagttttggggggcattccccaagtcaaaaaacacctttctccagttaggcctcgcaaaaggggggcgaatcctgggggcggaaacaaaatccacaccatttttggcatgttgaagggactgaaccatggcaataaaagctgaccttggggggccttttttatacccgctgggcagggaatggggcctctttataaaattatgggg

SEQ ID NO: 69049 - DNA, 213 bp, Oryza sativa
  Clone ID: PAT_MRT4530_69755C.1
ctcttggaaacctcaagatccacctcttttccttaaaacatggggactggttgccaggcccttcccctttccctccccttatttcccctccatttttgaaggcccatgcaaattttaattggattccgaccccctttgcccataagactttaatgaattccacaacaccaccggccccctttaataattaccacttccccggcccggggaaaa

SEQ ID NO: 69050 - DNA, 620 bp, Oryza sativa
  unsure (1)..(620): unsure at all n locations
  Clone ID: PAT_MRT4530_69756C.1
tttttttttttttttttttttttttttttttttttttttttttttggtggagcgcaaccattgctgcttttctgtttacttccttaaaaaaagcaactcaaaaactggaaatacaaccaccaggaccgattctgccgccgtgatctagctgcgtccatccccacagccacacgacgtgtctttgaattcggcgcacgacgcggacagcgagctagcctcggatgccctcacaactgactcctcgcgatggctatccacatagatcgtgggctcacgcatacagactcaaaatgaaacacatgcagattaagtagcttagcacacaagtttattgttaacatgaataacagaagccaaaagcatattcaatacaagtatacatgcagatggattgccacattggctagaaagttaaccattaaggtctagatgggagcaggcctcacgaagagagactctataatctccctaagaagtgtggcaaatgtgtaggnatcattcctgtcatcgtagaagagtaccatagaaacggtgaaagttcacaactcgctgcaccatggggcagcaagtgtaccatgctcaaggcgggtntggttcgtgggttctccattcatcttcga

SEQ ID NO: 69051 - DNA, 2158 bp, Oryza sativa
  unsure (1)..(2158): unsure at all n locations
  Clone ID: PAT_MRT4530_69757C.1
gnnnnnnnnnnngaattgtaatacgactcactatagggcgaattgggttccgggcttgcagaaaaaaatttttttaaccgaaaattgtaaatattcatatggctcaaaatgatcattaagaaaagtagagtacatgcggacgatgcagaacacaatacgatactaccacagcgcgcaacctatatagcatctacgaatctgagcagcacaagagcaaatggtagctactcaaacttctaggccagcttcaaagggattgtgctattgtctcaagctatacaaagtgcgggcgcgaaaaacaaagtaccaaaagttaagttcacacaaacagatagctcatcaaatagcacaagcaagcaaacccatggcgtaaatgttaatcaaaaaccgatcgacagaaaatgtagagcctactggaagtgcttgtcgccaaggccctagcacaataaactccatagtcttcaaaagcatcatcaatagtcagaaggcgagataacatcatcgatcttgagaatcatcttcaccacctgggttgccagtaagatctgctgctgcttgcctatcagtgtttcaaaaacattttgttccttcatgtggtttgtcccaacatcgttgcagtcaatgccacagtgaggattgctctcctttacttgttgagattttactgctgtcagtgtatcaataggagacaaaccactgttttcggccaaggctagtggaatagcatccaacgcatcagcaaatgacctgattgcatactgttcaactcctgggtaccgatctgcagcagcttcaacagcaactgagcaagatatttctgctgaaccaccaccatacacaattgaattattacggataagattccttgcaacacaaagagcatcatgaagacttcgcttggtctcctcaatcatcattttgttgccaccacgtatgaagatagttacagctctggagttggcacactgttcaatgtaaagcatgcgatcttttgttgttccaaatgatttctctctgactattccagccttcccaagcttttcaggactcaactcttggaacctcggaacaatccgccctcctgtagcaatggcaatcaattctaattcaacaccaccaacccatctgacagctggcaaatttctatgcatcagcagatgattggcttcatcatcaaagccccattggcaaataactagggttgctccaacatccttgcatttctgaaccatttcatcaaagtatttttgctcttgctcacgcagcatctggaacttctctacagtatcaatgtcaaccttatgctttgtcttaggcttcgggggctcaaatgggcaggtcaggatggcaatcttagcatcctcaatcctctttggcatttgagggtggctcatatctttgtcgacaatgattccatatactagctcagtatcctctagtttcccgcctaccttaccttccactttgatcaagtccaagtttacatccttcctttccaaatcagccacagcaaggaccgctttcacagcaatctcagcaagagtcctcttacaacggttaacaattttcgatgacagggttgtcatgcaggtctgcaccagaggctctatattggtagcactaaactcaaacttgtgggagatgtgctcaaggtgatcaaaagctatccttgaggccaactcataaccttcggcgatccttatggggtgaatgccgcgttccagcagtttctcggcttgctccaggagagagccagccatgaccacaacaccagtggtaccatccccaatctcgtagtcttgactgcaggacagctccaccatcagcttcgcgatttggttgtccacatccatttgctccaggatcgttgcgccatcatttgtgatggtgacgtcgccgtcgggggactggagcatcttgtccatgcccttggggccgagcgaggtgcggaggatgcgggcgacggccttgccggcggcgatgttggccttctgggcgtcgaggccgcgcagccgcgacttcttctcctgctcacgcaggatgatgaaggggcggccgaactcgtcgaaggccagcgccatggctgacgcctcctcctccttactccgccgtactccgaggagacaccatggcttggctccgccgcggtggcggcgcc

SEQ ID NO: 69052 - DNA, 549 bp, Oryza sativa
  Clone ID: PAT_MRT4530_69758C.1
atgaaaaatgtaacccattctttcgtttttttagctcactggccatccgctgggagtttcgggcttaataccgatattttagcaacaaatctaataaatctaactgtagtggttggtgtattgatttattttggaaagggagcgtgagcggatttattagataatcgaaaacagaggatcttgagtactattcgaaattcggaagaattgcgtagaggaaccattgagcagctcgaaaaagctcgaattcgattacagaaagtcgaactagaagcggatgagtatcgaatgaatggatactctgagatagaacgagaaaaagcaaatttgattaatgccacttctattagtttggaacaattagaaaagtctaaaaacgaaaccctttattttgaaaaacaaagggcgatgaatcaggtccgacaacgggttttccaacaagccgtacaaggagctctaggaactctgaatagttgtttgaataccgagttacatttccgtacgattcgtgctaatattagcattctcggggccatggaatggaagagt

SEQ ID NO: 69053 - DNA, 178 bp, Oryza sativa
  Clone ID: PAT_MRT4530_69759C.1
tttctctaaaatgagaaaagaagaagcacaaggaggtttagtttaaatggacctgcccggcatttcgaggaatgcaaccacatttaattctctcatcgacggtatgagcaaggacaacaagactgatgatgatccagagcccactaaccaaaagacatgcgaagggatgcaacctaac

SEQ ID NO: 69054 - DNA, 280 bp, Oryza sativa
  Clone ID: PAT_MRT4530_6975C.1
aaaaaaaaaaaaaaaaaaaaaaaaaaaaaaaaaaaaaaaaaaaaaaaaaaaaaaataaaagagaagcaaacttacacacacttgcatcgcgcacccataactcttctttagtgtcacctaattttaattttattggccttccttttccttctctttcacttgtaaaaccctgtctgttcctcccttatccaccttgctgcacatcctttttttcccttctggcctttttttcctgaggcccactccaatccctcttttcaacaattgctcatccttattt

SEQ ID NO: 69055 - DNA, 311 bp, Oryza sativa
  Clone ID: PAT_MRT4530_69760C.1
tgttcagatactatgcgaggaatcgagaggagacagccgagcttcaggtacattctgaatcctccaatcttaccatacttttcttaccaatattcattgtatattgattatttgattgaatggttgggagcagggtcagtttgcaagacggtggcatgcgcgaaggggatccgtatgccggcgaaggggttatcggtgttcaggtgcgacattgtagcatacgcacgtcggtgacgtcgatagctgactgcgctgagtcatcccgaagcgtaaggtttcatataccgctccttctcaaatggattgaaata

SEQ ID NO: 69056 - DNA, 243 bp, Oryza sativa
  Clone ID: PAT_MRT4530_69761C.1
atgggccatggatgctcccctagtagcatatgttgttttttccaccaactgcctcttgtaaatcaagatgctcccctctccacatttgctgcagacttcctccccgtggatctgagacgaactccggcgaccggcggcgtctacgagccagcgttcaccaatttctcagatggcaactacacgtcgaatgatgtatgcgaagacatggggaattctgatgctgattccactgaagaaagctaa

SEQ ID NO: 69057 - DNA, 649 bp, Oryza sativa
  Clone ID: PAT_MRT4530_69762C.1
ccacgcgtccgcaagccgtaaccgtgggttcctctttgttgagtatataaccacgcttgtgcagactatgccaggcagaaattgtcagcaccaaactttaaggttgatggtagccaattgaccgtcagctgggctgaacctaagggttcatcagattcttcttctgcagctgcccaggtatctttactatatgaaaagaaaacctattggtgaatctaccatccattagtacccttatctctactactataaaaagcagagtttgctctgcccttccgccccaaccatcacatgtccttcccattgtgcacggcgtgcaatgtcgtgctgtggccttattctgtcatcatgaacaaaatcaagcaccagcacatcatctccaaaccatctgcccccacgtcccgcagaaactgtttccccatctccactcgtgatcatatcccacacctgacgtatgccattaatccattatcttcctctcgcacacatttatcctgcctcacgcattgcgccttcagtacaggtcgacaccctaccgatatcgatgctctatggatggaatgcttgcgtgcttggcgcctcccaagccgtgccgatactgaccatatgttccccatgcccccaactggtgcatgcaccacgccccact

SEQ ID NO: 69058 - DNA, 3525 bp, Oryza sativa
  Clone ID: PAT_MRT4530_69763C.1
atgtcgcagcattacacgaagacgatttgcattgccgtcgtcttggtggccgtgctgttctcgttgtcgtcggcggcggcggccggctccggtgcggcggtgtccgtgcagctcgaggcgctgctggagttcaagaacggcgtcgccgacgacccgctcggcgtgctggccggctggagggtggggaagtccggtgatggcgccgtccgcggcggcgcgctgccgcggcattgcaactggacgggcgtcgcctgcgacggcgccggccaggtgacgtccatccagctgccggagtcgaagctccggggcgcgctctccccgttcctcggcaacatctcgacgctccaggtcatcgacctgacgtcgaacgccttcgccggcggcatcccgccgcagctcggccgcctcggcgagctcgagcagctagtcgtttcttcgaactacttcgccggcggcatcccgagcagcctctgcaactgctcggcgatgtgggctctcgccctgaacgtcaacaacctcaccggcgcaatcccttcttgcatcggggatctgtccaatctcgagatcttcgaagcctacctgaacaatcttgacggggagttgccgccgtccatggcgaagctcaaaggcatcatggtcgttgacctcagctgcaaccagctgtctggctcgatcccgccggagatcggcgacctgtcgaacctgcagattcttcagctgtacgagaaccggttctccggccacatcccgcgggagctcggccggtgcaagaacctcaccttgctcaacatattcagcaacgggttcaccggcgagatccccggcgagctcggcgagctcacgaacctggaggtcatgcgcctgtacaagaacgcgctcacgtcggagatcccccggtcgctccggcgttgcgtgtcgctgctgaatctcgacctgtcgatgaaccagctcgccgggcccatcccgccggagctcggcgagctcccgtcgctccagagattgtcgctccatgccaaccggctcgccgggacggttccggcgtcgctgacgaatctcgtcaacctgaccatcctggagctgagcgagaaccacctgtccgggccgcttccggcgagcatcgggtcactgcggaatctccggcggctcatcgtccagaacaactcgctctccggccaaattccggcgagcatcagcaactgcacgcagctggccaacgcgagcatgagcttcaacttgttctccgggccattgccggcggggctcggccggctacagagcctcatgttcttgtcgctcggccaaaactcgttggccggcgacatacccgatgacctgttcgactgcggccaactccagaagctcgacctgtcagagaacagcttcaccggcggcctgagccgccttgtcggccagctcggtaacctcacagtgctgcagctgcaggggaacgctctgtcaggtgagataccggaggagatcggcaacatgacgaagctcatcagcctgaaactcggcaggaaccggttcgccggacatgtcccggcgagcatctcgaacatgtcctccctccagttgctcgatctggggcacaatcgcctcgacggcgtgttcccggctgaggtgttcgagctgcggcagctcaccatcctcggcgccgggtcgaacaggttcgccggccccatccccgacgccgtcgccaacctccggtcgctctcgttcctggacctgtcgagcaacatgctcaacggcacggtgcccgcggcgctgggcaggctcgaccagctcctcacgctggacctctcgcacaaccgcctcgccggcgccatccccggcgcggtgatcgcgagcatgagcaacgtgcagatgtacctcaacctgtcgaacaacgcgttcacgggcgcgatcccggcggagatcggcggcctcgtgatggtccagaccatcgacctgtcgaacaaccagctgtccggcggcgtcccggcgacgctcgccgggtgcaagaacctctactcgctcgacctctccggcaacagcctcaccggcgaactcccggccaacctcttcccccagctcgaccttctgacgaccctgaacatctccggcaacgacctcgacggagagatccccgccgacatcgccgcgctgaagcacatacagacgctcgacgtgtcgaggaacgcgttcgccggggccataccgccggcgctggcgaacctgacggcgctccggtctctcaacctttcgtcgaacaccttcgagggccccgtccccgacggcggcgtgttccggaacctgaccatgtcgagcctgcaggggaacgccggcctctgcggcgggaagctcctcgcgccatgccacggccacgccgccgggaagaagcgggtgttctcgcggacggggctcgtgatcctcgtcgtgctcatcgcgctgtcgacgctgctcctcctcatggtcgcgacgatcctgctcgtcagctaccgccggtacaggaggaagagacgtgccgccgacatcgccggcgactcgccggaggccgccgtcgtggtgccggagctgaggaggttcagttacggccagctggcggccgccaccaactcgttcgaccaaggcaacgtcatcgggagcagcaacctgagcacggtgtacaagggcgtgctcgccggcgacgccgacggcggcatggtcgtcgccgtgaagcggctgaacctggagcagttcccgtccaagtccgacaagtgcttcctcaccgagctcgccacgctgagccggctgcggcacaagaacctggcgcgtgtggtcgggtacgcgtgggaggccggcaagatcaaggccctggtcctcgactacatggtcaacggcgacctggacggcgcgatacacggcggcgccgccgcgccgccgccggcgccgtcgcggtggacggtcagggagcggctgcgggtgtgcgtgtcggtggcgcacgggctggtgtacctccactccgggtacgacttccccgtcgtgcactgcgacgtcaagccgtccaacgtcctgctcgacggcgactgggaggcgcgcgtcagcgacttcggcaccgcgcgcatgctgggcgtccacctgcccgccgccgccaacgccgcggcgcagtcgacggccacctcgtcggcgttccggggcaccgtgggttacatggctccagagttcgcgtacatgaggacggtgtcgacgaaggtggacgtgttcagcttcggggtgctggcgatggagctcttcaccgggcggcggccgacggggacgatcgaggaggacggcgtgccgctgacgctgcagcagctcgtcgacaacgcggtctcgagggggctcgacggcgtccacgccgtcctggacccccgcatgaaggtcgccaccgaggccgacctgtccacggcggcggacgtgctcgccgttgccctgtcctgcgccgcgttcgagccggccgaccggcccgacatgggcgccgtgctctcgtccttgctcaagatgagcaagctcgtcggagaagactga

SEQ ID NO: 69059 - DNA, 914 bp, Oryza sativa
  Clone ID: PAT_MRT4530_69764C.1
cagtgtgatcatctctctctacaattaatcaagcggaccatccctcgacaaagggcatcattccctataaaatacctcaacttataccactagccatcacaagactatacaacgcggccttcaacccctttttgataaaccagttggatgtatagcctactggtacggaagaaacatgggaatagcgaaacgaacaacgttggtcggattggtcctaacgttgcagcctgtctacctccttatggcgttaaaagtctccaaggaatttctggaggttcctgacaatgtgggaaagaaaaatggctgctacgggtgggatcgggagaactcacgggtggaaaatacaagaccaactgggaaagaaaaacaagcatgccaatggcacatagtgagctaggagtgctcaacctggaaacgtttgcaagggtgttgtgggtgagatgactttgtcatgaatagaaggtgctagagaagatatgggtagggatagaaacccatgcgaaaatatagataaattcctacttttggcaactacgacaataacaataggcaaaggggagacaatacacttgtgtgactcaatttggatacacggaagacaccttaaggatgtaacaccacaaatttacgcaatctccaaaaagaaaaataagactctcagccaatccatcgaaagtaacacatagatacaagacctcaatttctcacctgatgcgagcatcattggtcgaactcctaggccaactagtgaccctatagaatacaatataggggtgcatctcactgccaataaaggaaatgaaattacttgaaagcacacaagccatggagtatacacgtgaagtgctagagccaaaaattggtaaagactaggatctaacaacacaaattatgagatgatgatttggaatcct

SEQ ID NO: 69060 - DNA, 466 bp, Oryza sativa
  Clone ID: PAT_MRT4530_69765C.1
acgacccgtggggcgaagatttcctcggcggcggcggaggggatcgacggaggtgggggatggcgacctcgtcggtggcgggggacatcgagctggaccggccgaacctggaggactacctcccatacgactcgctgccgcaggagttccccaggaatctccatctgcgcgatctgctggacatctcgccggtgctcactgaagcggcgggcgccatcgtcgatgattcattcacacgttgctttaagtcaaattctccagagccatggaattggaacatttatttattcccattgtggtgcttgggagtagtgataagatacggagtactattcccgttgaggggcctaactcttctagttggatggttagcattctttgctgccttttttcctgtacatttcttattgaaaggtcaaaagatgagaagtaaaatagagagaaagctggttgaaatgatgtgcag

SEQ ID NO: 69061 - DNA, 345 bp, Oryza sativa
  Clone ID: PAT_MRT4530_69766C.1
atggagctcaagaacgccctctcgacctcttcagaggcatctctgctaagcaagcacatgacgtactccatcaccgacgcatcgcacggcaacgtgatcctgccgtcgtcgccggcgaagccgaactcctcccgggacatggtcaggagctcgccgaagagcggcgtgcctaggtacggcaatggcacctcgaaccgcgcgccgtcggcggtgtacaccgcgcagtggcccttgccggcgagggatagagacgccgtgctgcagcaatcatcggcggcgaccaccgccttctgtcggctaccaccggctgatgccatcctcatctgcaacttcttggccaactga

SEQ ID NO: 69062 - DNA, 518 bp, Oryza sativa
  Clone ID: PAT_MRT4530_69767C.1
cccctcggggggactaagaggagggcgaacgcatcaccaaattgcctttaaggctgtcggagaatgaactcctccaccagggaaccgtgaagcccccctttgtgagttcggccgggggcagtgggtgagattcgagggcatttaatgggtgaagacttctgggctcctattacaccgggaaacgggagtacatcttgggtcccatcagtcattcgaccggtcacagaccggttgagtgcattgcacaccgcattaaatgcggcgtggcgtgaccgctcgggtcgccataaatgcgggtaggtgggcacctggaggcggacacctaatccaccgtacgtggtgacctcgggcctgactcccctcgggggagggccacgtggcatcggggggcagcctcctccctctaaacctgatacccccgggcccatatcaccgacaagagacttaactttagtctatgtatttagacactaatttagagtattaaatatagagcctgtttggggagctttagatac

SEQ ID NO: 69063 - DNA, 252 bp, Oryza sativa
  Clone ID: PAT_MRT4530_69768C.1
atggggaagacgttcaccatgacccggtcgccaccccccgccgcctctatgatcgccatgcagatctggagggactcggaggggtcggcgccatcgtcgtacttctcggtgagacttctgggctcctattacaccgggaaacgggagccttactttgaccagagcgggaggaccgactccggctgggataagaggatgagaacctttcatcatcattatttgatgggatatgtcgggctgcacgtcgcgtga

SEQ ID NO: 69064 - DNA, 408 bp, Oryza sativa
  Clone ID: PAT_MRT4530_69769C.1
atggacgcagcaagccggcgggaggcgagcagcagtgggcggtacaccgagaagcatacaggaggcgacactggcgagaatggcatagataagacactgataggagatgtcatgctacaacaccgtgaggaggcagcaaacgaaactctaggtcaccagcagatgaatagaaaggaaaagaagatgggaatttgtcttgatggagggagagccggagaggagatcgaggtgtcgagaggagccgagggcggatttcgggtcatccacaggtcattttctatccatggcctcggcaccggaaattgtcagggccccgacccgcccaccccgcggggccttataccgatgggagtcaacaccgaggaaagaatgagaacccctttgaatcgcaggattgagaaaacgtag

SEQ ID NO: 69065 - DNA, 4446 bp, Oryza sativa
  Clone ID: PAT_MRT4530_6976C.1
atgaccatcactccagacaagttgacacctgatcaacagaaagattttgacgcaatgatgcagcaagcacggaaccagttcttaaactcattcatgcagacccgcaaggggacagtggtgcagaagtataaggtgaaggtagttgctgatgttcctgggaccggttcttctaaggatggagaagtgaaacaagctccagatggttcggctcaaccgagtaataaaggtgctgcagatggctttcaaggaaatcagggtgatagctctcaaggagtgcagggtgttcaaggtgatggtgctcagggagttcaaggtgaaggccctaatcaagacggcaatgcggcacagttgcagttcaacaacttccaggatcaagttgactatgccgtgcaccatgctttgatcaatcaatctggaatattagtcaacactttgtcaaacatggtgaaaacaatggttgatggttcaatggctaagtatcaggctacaggaccgccgatggcgccagtatcagctcctgcacctgctgcaccatcatcggctccaggccaattagttaatcctcggttgctggttgcatctatgttcttacctcctcaacatactgttgatccaacccagcagcagccgattcagcaaacgccaccaaggcagcagattgtgcagccgattcaacaaacacccccaatccaacaggtcgtgcagccaattcagcagatgtcaccaagacggcaggttctacaaccaattcagcagacaccattaaggcaacaggtcattcaaccgattcaacagcaaggtttgatgaatgcatcggctggatttacaacacctggcagtcagcctgggcagcatgctacgagtcaagttgtcccagagcacttggttcatcatgtacagccagatcaaacggtgatacctcaagttgttcctgaacatttgccttatcccgaatggtttgagagagttcctttacctaatcggtttaaggttccagacttttcaaaattctcagggcaggatagtacatcgacttatgaacacatcagccgatttttggcccagtgcggtgaagcatcgattctggatgccttaagggttaggttgttccgattgtctttgtctggatcggcctttacttggttttcttctttaccatatggatcaattaacagttgggccgatttggagaagcattttcacagctatttctacagtggggtgcatgaaatgaaactgtccgatttaacagcaatcaagcaaaggcatgatgagcccgtgcatgagtatattcagatattcagagatatgaggaataagtgctacagcttgagtttaactgatgcccagttagccgatttggtttttcagggtatgattgctccgattagggagaaattctcaaatgaagactttgatagcttgttgcatcttacaaagaaggtaaccttgcatgaacagaggtttgcagaggctaggaagaactctagaaaggttaatcatgtttgtccttacatatatggatcggatgatgaagatgaagatgactccgaaatagcagcagccgaatgggttagaagcaagaaagttataccatgccaatgggtaaagagttctggaaaggaggagaggtatgactttgatattactaaggctgataagatttttgatttgctacttcgggagaaacagattcaacttcctgctggtcacatgatcctatcggctgaagaattgggcaagaagaggtattgcaagtggcataattctgggtctcatactactaatgattgcaaagtcttcaggcaacagatccaagcagctattgagggaggcaaaatcaagtttgatgattctaagaggccgatgaaggttgatggtaatctttttcctatcaatatagtgcatacaactggtcgaacagccgatggagggtgtgcaagaggttttcagaagagaagggttcagagattgaggaaccgggaacgttttcaggaggtcgaacaggaaatcagtcatcggctaaagaaaacaaagccgaggcaggagtggcgtgttaagaatcaagttcctgcagccgatgaagccacggccgatgaagcaaagagattggccaaaggaaaaagcgttgtgactgcatcggttaatatggtcttcacgttgcctgctgaatttggggtcaagcaagccgatgtcgacaaagttgaagaagaatcagctaaattaattttgtcaccagaacaagcgatctttgagaagtcagagggtacagagaatcggcatcttaaaccattgtatataaatgactatgtcaatgggaagccgatgtccaagatgatggtcgatgttggggctgcggtgaatttgatgccttatgctacatttaagaaattgggcagaaacactaaagatctcatcaagacaaacatggtgctcaaggactttggtggtaatccatcagaaaccaaaggagttttgaacgtggaactgacagtcggcaacaaaactatccctacaacgttctttgtcatcgatgggaagggttcctacagcttgttgcttggaagggattggatccatgccaattgttgtattccttcaaccatgcatcaatgcttgattcagtggcaaggcgacaagattgaaattgtgccagccgacaggtcagtcaatgttgccagtgccaatttagctctttgggagatggatggtcttgactgtttatctggaaaagtttgggatggagattttctaaaaatggagaacccaagcaattattttgagggcgtcgtgaagggttcaaatgtctacaccaaggacacagtagatgatctcgatgacaagcaaggacatggtttcatgtcggccgatgatttggaagaaattgacataggtccaggtgatcgaccaaggccaacatttattagtaagaatttatcttcggaatttagaaccaagttgatagagctgttgaaagaattcagagattgcttcgcttgggaatattatgagatgcctggactcagccaatcgattgttgaacatcggctacctatcaaaccaggggttaggccacaccagcaacctccgagaagatgcaaagccgatatgcttgaacctgtcaaggctgagattaaacggttatatgatgctggatacaatcagatctttatggccgaagaagatatccataggatagcttttaggtgtcctggtgcaatcggcttgtttgagtgggttgtaatgactttcggcttaaagagtgctggagctacataccaaagagccatgaattatatatatcatgatctaattgactggttggttgaggtctacattaatgatgtggttgttaaatctaaagagatagaagaccacatagccgatttgaggaaggtttttgagagaaccaagaaatatggcctgaagatgaacccgacaaaatgtgcttttggcgtatcggctgaccagtttttgggatttcttgttcatgagagggggatcgaggtgactcaaaggagtgttaatgcgatcaagaagattcagcctccggagaacaagacagaattgcaagagatgatcggcaagataaattttgttagaaggtttatttctaatttgtctggcagattaaggcattatctattgtccaatgaatacactgtcatatgcaaagccgatgtcgtcaaatacatgttatcggctccaattttgaaaggaagggttggaaagtggatattttctttaacaaaatttgatcttcggtatgattcaccgaaggcggtcaaaggacaagctatagccgattttattttggaacatcgtgatgattcaatcggctcggttgagattgtgccatggactttattctttgatgggtcagtgtgcactcatggttgtggcatcggcttggttattatttcccctcggtgggcaagttttgagtttgcttatactatcaaaccttatgcaaccaataaccaagctgagtatgagacagttcttaaagggttgcagttactcaaggaagttgaagccgatgcgattgaaattatgggggattctttgatggtaatcagtcaattggcaggagaatatgagtgcaagagtgatacattgatgatttataatgagaagtgccaagaactaatgaaggaatttcggctggttactttgaagcatgtatctcgagaacaaaacactgaagctaatgatttggcccaaggggcatcggggtataagccgatgatcaaagatgttgaggttgaagttgcctcgataacagccgatgattggagatatgatgtgcatcaatatctgcagaatccatctcaatcggcttctcggaaattgagatataaagcgttgaagtatactttgttggatgatgaactctattatcggatgattgatggggtgttgcttaagtgtttgagtgctaattag

SEQ ID NO: 69066 - DNA, 2662 bp, Oryza sativa
  Clone ID: PAT_MRT4530_69770C.1
atgacacagtcgaacaagtttgaggacctgaaaggtcgatttgcgagtttagggaccgggatgacacaacggtacaagtttagggaccggttctcgctgatggttcgctgtttcagccactccgtcacaacgtgcgctacagttgagtaccccaacttcgccgctcgtgtgacgtcgccggtggccatctccagctcagacatacttctgggctcctattacaccgagaaacgggagccttactttgaccagagcgggaggaccgactccggctgggataagacaatgagaaactctcaccatcattatttgatgggacatgttaggctgcacgccgcctgacacacgtgcagcgcataggcacactagccagtcccatcggtcattcgaccggtcacagaccggttgagtacactgcagggtaggtgggcacctgtaggcggacacctaacccaccgtacgtcgtgacctagagagggggtccccgggtccatatcaccgacagtagcccccggcgttagccctaaccaaaacctttcctaggtggtcagggttgacgccactctcctagtctgatgatatgtgggtccaatctcttcttctttcttagctggaactaaggcccatgcgcctttttcgccctagcctgagggcaactcactagcccgtaccttaggctatgaacttattttgagcctgcgtccccacactacacattttgttcgctctttcctttcggtgacctccttccaatctcttttgctcccacatggacgattacttccgcacgagtgtgagagccgaaaaactccagagccagcaatccccgtccacagttgagccgggccaggcaccatggccagccggtaggaccaaagccagctgttgaaacttgaaaggacgattagttgagccgggccaggcaccgtagccagccggcgggaccaaagctagccgcgaggcaggtggcaggttcatgagcgatccccgcgcttggccctagagggccatggggaagaaattcgccttcacccggtcgtcaccccatgccgcctctatgatcgtcgtgtggatctggagggactcggagtggttgacactaccgtggtacctttcggtgaggccggtgaagatgcagggagactagccccctgcctggggtggcgcggctctcctgaggaggctgcgccttcccccgcattggcggtgcgacgcacgtcacgccggcgctcgaaagaacctcaaaaatcacgaacgcgtcccctacctggcgcgccagatgtcggagaaagaactccaccaaggaaccgtgaggcccctctttgtaagttcggccgggggcagcgggtgagattcgagggcatttaaggggtgaagacttctgggctcctattacaccgggaaacgggagccttgctttgaccagagcgggaggaccgactccggctgggataagaggatgagaacctctcaccatcattatttgatgggatatgtcgggctgcacgtcgcctgacacacgcgatggtgcgcctgacatcttgggtcccatcattcattcgatcggtcacagaccggttgagtgcactgcatacccccgggcccatatcaccgacagtagcccccggcgttagccctgaccaaaacttttcctaggtggtcagggttgacgccactctgttagtcaaatgacatgtgggcccgatctcttattctttctttgctggcactaggacccatgcgcctttttcgccctagcctgagggcgattcgctagcccgtaccttaggctgtgaacttattttgagcctgtgtccccacgctacacattctgtttgctctttcctttcggtggcctgcttccaatctcttttccttctacatggacgattactttcgcatgagtgtgagagccgaaaactctagagccagcaatccccatccacagttgagccaggccgggtactgtagctagccggcgggaccaaagccagccgttgaagcttgaaaggacgatcagttgagccaggccggacaccgtagccagccggcaggaccaaagcagtgaaccgaggcggcagcaggttcatgggccaaccccgcacttggcccctgagggccatggggaagacgttcgccatgacccggtcgccacccctcgccgcctctatgatcgccatgcagatctggagggacttggaggggtcggcgccatcatcgtacttctcggtgaggtagggctggagctttgggggccctcggacattccgaagactcgccacaaagacctggtagccaagcttacccggtggggatgtggggggccttgccccctgcctggggtggcgcgacactccagaggatgctgcgccttcccccgtagcggcggtgtgacactcaccacgccggcgctcgaaaaaacctcaaaaatcacgaacgcgccccctacctggcgcgccagatgtcggagaatgaactcctccaccagggaaccgtgaggcccccctttgtgagttcggccgggggcagcgggtgagattcgagggcatttaatgggtgaagacttctgggctcctattacaccgggaaacaggagccttgctttgaccaaagcgggaggaccgactccggctgggataagaggatgagaacctctcaccat

SEQ ID NO: 69067 - DNA, 615 bp, Oryza sativa
  Clone ID: PAT_MRT4530_69771C.1
atggcgaacgtcttccccacggccctcaggggcgaagcgcggggttggcccatgaacctgctgccgcctcggttcactcctgggaggactcttgcagttttaagctccggcattggggcgcaggctcattggagcttgaccttgtttgctaagtggtcgcaggcttccctaaagggttcgaagcccagggtggggagccctcttcgagccaaaggtttgaaaggtcgcgacgtcctcccgctagagagggtcacccctcgacagctggcgcgccaggtagggggcgcgttcgtaatttttgaggttcttttgagcgccggcgtggtgagtgtcgcgccgccgctacggcggaaggcacagcatcctcaggagtgtcgcgccaccccaggctgggggcaaggtcccccacatccccaccagccctgcctcaccgagaagtacgacgatggcgctgacccctccgagtccctccagatctgcacggcgatcatagaggcggcgggaagtggttaccgggtcatggcgaacgtcttccccatggccctcaggggccaagcgcgggcggctggctttagtcctgccggctggctacagtgcccgggctggctcaactga

SEQ ID NO: 69068 - DNA, 1255 bp, Oryza sativa
  Clone ID: PAT_MRT4530_69772C.1
tcaggaaagccaacttacgtgccaatgtgttttcctgatttcccttttgcgcgtgcatcgcactactacaacccacgcgatcgtgtatggggtatggccatgtgcatcgcacacgccagggcgagggtacacagtcgccgtctcatcggtcattcgaccggtcacagaccggtcagaagcgcagcacgcccccgggcacatatctccgatagtagtccccggcgttagtcctggccggagccttccgcaggtggccagggttggcgccactctagtctgatgacgtgtgggcccggtctttggatttcgaggcgccgttggctcaggagctgtgcgcctttttcgccctagcttgaaggcgactcgccaaccgtaccttaggctgtgaacttatttcgagcctgtgtccccacgctacacattctgtttgctcattcctttcggtggcctccttccaatatctctcccttctacatggacgactactttcgcacgagtgtgagagccgaaaaacactagagccagcgatccccgtccacagttgagccaggccgggcaccgtatccagccggcaggacgaaaactagccattgaagcttgaaaggacgattagctgagccgggccgggcaccgtagccagccggcaggaccaaagctagccgcgaggcaggtggcaggttcatgagcgatccccgcgcttggccctggagagccttggggaagaaattcgccttgacccgatcgtcaccccacgccgcctctatgatcgtcgcgtggatctggagggactcggaggggttgacactaccgtggtaccttcggtgaggctgggccgaaactttgggggtcatcggtcattccgaagactcgccataaagacctagccgctagccttatccgatgaagatgcggggggcctagccccctacctggggtggcgcggcactcctaaggaagttgcgccttcccgtgcattggcggcgcgacgcttatcacaccggtgctcgaaagaacctcaaaaatcacgaacggccccctacctggcgcgccagctgtcgagcagtgatcctctctagcgggaggtcgtgagatccccctttgtgagttcaaccgggggcagcgggtgatatccgaggttctttaatggttgaggacttccgggttcccgttcacaccaggaaacaagtacccgggtcagctcagagtggttggaccagctctgaccgggataagaggctgtgaagctcctcattat

SEQ ID NO: 69069 - DNA, 298 bp, Oryza sativa
  Clone ID: PAT_MRT4530_69773C.1
ctcgccatcgccgaggactcaggatagggccggccctgactttttggtggcccggtgtggaataaaaaatgaaggccccctgttttgaagataaagcctgtcggaggatgaactcctccatcagagaaccgtgaggcccccctttgtgagttcggccgggggcagcgggtgagattcgagggcatttaatgggtgaagacttctgggctcctattataccgggaaacgggagcctagctttgaccagagcgggaggaccgactccggctgggataagatgatgagaacctctcaccat

SEQ ID NO: 69070 - DNA, 2527 bp, Oryza sativa
  Clone ID: PAT_MRT4530_69774C.1
ggcggccgcaaggggttcgcgttggccgattcattaatgcagctggcacgacaggtttcccgatcatccataaacaccaacacaaacttcctgataaatggtgcaaggactgagttcataaggcactgaaaggtggagggtgcattcgtttctcaccatcattatttgatgggacatgtcaggctgcacgccgcctgacacaaaagcagcgcacaggcgcactagccagtcccatcggttattcgaccggtcacagaccggttgagtacactgcacgcccccgggctcatatcaccgacagtagcccccggcgttagccctggccaaaacctttcccaggtgatcagggttgacaccaatctgctagtcagttgacatgcgggcccgatcttctgtcctatcattctgggaggatcaagccaagctgggcgctgtagccagccgacggggccaaaaccagccggcaaacgaggttaggttcccacaagcctgtgtccccacgctacacattctgtttgatctttcctttcggtggcctcctttcaatatctcttccttctacacggacgactactttcgcccgtgtgtgagagccgaaaaactctagagccagcgatccccgtccacagttgagccaggccgggcaccgtagccaaccggtgggaccaaagctagccgttgaagcttgaaaggacgattagttgagccgggccgagcaccgtagccagccggcgggaccaaaactagccgcgaggcaggtggcaggttcatgagcgatccccgcgcttggccatgaagggccatggggaagaaactcgccttgacccggtcgtcaccccacgccgcctctatgatcgtcgtgtggatctggagggactcggaggggttgatgctaccgtggtacctttcggtgaggctgggccgaaactttgggggtcatcggtcattccgaagactcgccataaagacctggccgccagccttatccggtgaagatgaggggggcctggccccctgcctggggtggtgcggcactcctgaggaagctgcgccttcccccgcattggcggcgcaacacttatcgcgccggcgctcgaaagaacctcaaaaatcacgaacgcgccccctacctggcgcgccagatgtcggagaatgaactcctccatcagggaaccgtgaggcccccctttgtgagttcggccgggggcagcgggtgagattcgagggcatttaatgggtgaagacttctgggctcctattacatcggggaacgggagcctagctttgaccagagcgggaggaccgactccggctgggataagaggatgagaacctttcatcatcattatttgatgggatatgtcgggctgcacgtcgcgtgacacacgcgatggtgcgcctgacatcttgggtcccatcagtcattcgactggtcatagaccggttgagtgcactgatacccccgggcccatatcaccgacagtagcccccggcgttagccctgaccaaaaccttccccaggtggtcagggttgacgccactttcctagtctgatgatatgtgtggcccgatctcttattctttctttgctggcactaggacccatgcgcctttttcgccccagcctgagggcgactcgctagcccataccttaggctgtgaacttattttgagcccgtgtccccacgctacacattctgtttgctctttcctttcggtggcctccttccaatctcttttccttctacatggacgattactttcgcatgactgtgagagccgaaaactctagagccagcaatccccgtctacagttgagccaggccgggtaccgtagccagccggcgggaccaaagccagccgttgaagcttaaaaggacgatcagttgagccgggccgggcaccgtagtcagctggtgggaccaaagccagctgcaagagtcctcccaggctcatgggccaaccccgcgcttggcccttgagggccatgagaagacgttcgccatgacccggtcgccatcccccgccgcctctatgatcgctgtgcagaactagagggacttggaggggtcggcgccatcgtcgtacttctcggtgaggcagggctggagctttggggggcccttggacattccgaagactcgccacaaagacctagtagccaagcttacctggtggggatgtggagggccttgccccctgcctagggtggcgcgacactcctgaggatgctgcaccttcccccgtagcggcggcgcgacactcaccacgccggcgctcgaaagaacctcaaaaatcacgaacgcgccccctacctggcgcgccagatgtcaaagaatgaactcctccaccagggaaccgtgaggccccctttgtgagttcggccgggggcaacgggtgatattcgagggcatttaatgggtgaagacttctgggctcctattacaccgggaaacgggagccttactttgaccagagcaggaggaccgactccggctgggataagaggatgagaacctctcaccat

SEQ ID NO: 69071 - DNA, 1728 bp, Oryza sativa
  Clone ID: PAT_MRT4530_69775C.1
atggtgaacggcgagcctctctggcacggcgtccgccatggcggcggcggcggcgacgctaggaagcagcaccaccaccaccaccagctcagtcacggcttcggcgccaaggatgcctctgcgtcctcgccgtggtcgtcgtccgacggcctgtggaccgacggcctcgtctgcgccttcgagttcgtgcgcggcggcggcggcgcccatggcttcgttaccccggccaacttgtgccggagcaagtgctgctccttgctgcagtccaaggacctcgccgtccaggaccgcaggagatcactcgcggccaagatcggagacaacggcgacgaaccgaggccgccgacagtggcgccggcggagagcttgtgggcgccgatcgggtggaggaggatcacgcagctggtggggatggtgggaggggacgccgcggcgtggcacgacgacgggcagagcatgagcctcatggagcacgacggcggcggcgacgagcagtgcgacgacatcaccgtcgccgacgtcgccgcgccgtactggcagagggcggcggggcccacctggtggtgccacgtggcggcggggcacccggcggtggacgcgtggctggccgccgcgcggtggctccacccggcgatctgcgtggcgctcagggacgagagcgtgctcatcagtgagaagatgaagcatctgctctacgaggtccctgtaagagttgcaggaggcttgctatttgaactgttggggcagtcggttggtgatccagctcgtgacgaagaagacattccaattgtgctccgtgcttggcaagctcaaaattttctgataactgcacttcacgtgaagggatctgcaccaaacgttaacgtcattggagttactgaagttcaggagcttctttctgcctgtggaagtacaggtacagctcctaaaaatattcaggaagttatagcacatttggcttcacggcttgcccgatgggatgacagattgtggcgtaaatatgtcttcggtgccgctgatgaaatagaacttaaatttgtaaacagcgttttcaggcgaaagcaagaagatttgaaactgttgtgcatgatatttaaccaagacattagaagattggccactcaggttatcagagtgaaatggtcactgcatgctagggaggagataatttttgagctgctgaagtatctaggaggcagcaccacaaaatcattacttgaagcgataaagaaagacgcaagacaaatgattgaagagcaggaggcagttcgtggccggctcttcaccatccaagatgtgatgcagagcaccctccgtgcttggtcacaggagaagagccttcgcattacgcataacctgacaattttcggtgggtgtggcttggttctgtccatcatcgccggattgttcggaatcaatgttgatgggataccaggagctgagaacactccctacgctttcgcgctattctccgcgctgcttttcttggtaggactcctgctgatcatcgtggggatagtctatttcggactgcagaagccgatcagcgatgagcaggtccaggtgaggaagttagagctccaggaactggtctcgatgttccagcacgaagccgagacacacgccagggtgaaagaaggggtcttgaggactgacttgcctcccagagctgccgatctcatatgtgatgataatggtgattcacgtctccttgtttgtgactgttga

SEQ ID NO: 69072 - DNA, 435 bp, Oryza sativa
  Clone ID: PAT_MRT4530_69776C.1
atggctgcgaatatccgagttggcgcattgaagccacagcccacatgggaaggcgcagcatcctcaggagtgtcgcgccaccccaggcagggggcaaggctccccgcatctccaccaggtaagcttggctaccaagtctttgtggcgagtcttcgaaatgtccgagggcccccaaagctccagccctgcctcaccgagaagtacgacgatggcgccgacccctccgagtccctccagatctgcacggcgatcatagaggccgcggggggtgacgaccgggtcatggcgaacgtcttccccatggccctcaggggccaagcgtggggttggcccatgaacctgctgccgcctcgattcactcctgggaggactcttgcaattttgagctccgggtgccgtcgaagcccgggaccccctgtgctggctcttctgtag

SEQ ID NO: 69073 - DNA, 992 bp, Oryza sativa
  Clone ID: PAT_MRT4530_69777C.1
gaagaattctgcatctatatcgggcacagttttgaatcagagtttgcatgaaggaagccaaactgtaaattgtcagccatcatttcagccagtgccatcctccacacctatgtcttcctccacacctggaaagcatcgtttctggccaacggatcactggagcgccgcggacacaaggcactgtttactcccaatccgtcccccctataaagctagcctcaatcccactacttcgatgttgccctgtagaccattatgcaaattttccaaacagtgttagaaaggtcacattgatggattccaaaggtgagaaactccatgttcaaagaaccagtcctgcatgatgccattaagattggtgtgaactttaggaaccaagagctactgcaaccggcagaacaaaataatgctccaagaaaaccagaagtggtgatagttgaagataatgaagtggtgattgagccattgccaaaaaagaagtgcactggcaacaagggataaactatccctctaggagttgaagtcattgtgcgagagaaacatggcaagcagtggcgccgggagagacgagaggtggatcctcgccggcgccaccgcgctagtcaccggccgcagcaaaggcatcggccgcgccatcgtggaggagctcgttgggttcggctcgacggtgcacacctgcgcccgtagcgaggcggagctgagcagatgccaggaggaattgacggccaagggcctcgccgtctccttctctgtctgcgacgtgtcggtgcgcactgacagggaggagctcgtcagcagggtgcgcgagctcttcggcggcaaactcaatatccttgtaagtctcataatctcttgccaccatgatttccagcgatccaacggtatatgtaaaataaggggggctgttcacattgcacccacctaacaagttcaaacaagttcatgtacctctgatgtaatttactctaaaataaatcttatcagattttcac

SEQ ID NO: 69074 - DNA, 1506 bp, Oryza sativa
  Clone ID: PAT_MRT4530_69778C.1
atttgtcggcgatatgggcccgggggtatcagatttaaagggaggaggccgccccccgatgccacgtggccctcccccgaggggagtcagccccgaggtcaccacgtacggtgggttagatgtccgcctccgggtgcccacctacccacatttatggcgtcccgagcggtggcgccacgccgcatttaatgtggtgtgcagtgcactcaaccggtctgtgaccggtcgaatgactgatgggacccaagatgtcaggcgcaccatcgcgtgtgtcaggcgacgtgcagcccgacatatcccatcaaataatgatggtgagaggttctcatcctcttatcccagccggagtcggtcctcccgctctggtcaaagcaaggctcccgtttcccggtgtaataggagcccagaagtcttcacccattaaatgccctcgaatctcacccgctgcccccggccgaactcacaaaggggggcctcacggttccctggtggaggagttcattctccgacatctggcgcgccaggtaggggacacgttcgtgatttttgaggttctttcgagcgccggcgtggtgagtgtcgcgccgccgctactggggaaggcgcagtatcctcaggagtgtcgcgccaccccaggcagggggcaaggccccccacatccccaccaggtaagcttggctaccaggtctttgtggcgagtcttcggaatgtccgagggcccccaaagctccagccctgcctcaccgagaaatacgacgatggcaccgaccccttcgagtccctccagatctgcacgacgatcatagaggcggcgtggggtgacgaccgggtcaaggcgagtttcttccccattccctccagggccaagcgcggggatcgctcatgaacctgccacttgcctcgcggctagctttggtcccgctggctggctacggtgcccggcccggctcaactaatcgtcctttcaagcttcaacggttggctttggtctcgccggctggctacgatacccggcctggctcaactgtggacggggattgctggctctagagttttcggctctcacactcatgcgaaagtaattgtccatatagaaggaaaagagattggaaggaggccaccgaaagaaaagagcaaacagaatgtgtagcgtggggacataggctcaaaataagttcacaacctaaggtacgggctagcgagtcgccctcaggctgggatgaaaaaggcacatgggtcctagtgccagcaaagaaagaataagagatcgggcccacatatcatcagactagaaaagtggcgtcaaccctgaccacctggggaaggttttggtcagggctaacgccgggggctactgtcgatgatatgggcccaggggcgtgcagtgcactcaaccggtctgtgaccggtcaaatgaccgatgggactggctagtgcgcctgtgcgctgctcgtgtgtcaggcgacgtgcagcctgacatgtcccatcaaatagtgatggtgagag

SEQ ID NO: 69075 - DNA, 390 bp, Oryza sativa
  Clone ID: PAT_MRT4530_69779C.1
atggcttcacaagaatttgttgacacggacatcatgccgtttcctcgccgcaacaggaagccaaccatggacaagcagttcagccgatttactgagagtgttaagccacgagtcgttccttcgcagagaactctaccgacaaagaaaccagccatcccagcgccaccgagcttcaagactatggccgagaagatcctccgcgagttcgctgccccctcagctgacaacgtgcccgttgggccacaagtcaacttaggagacacaaacttcgatctaaagtcgagcctcatcaccatggcgcaaactaacccgttctgcggcaagccaaacgaagatgccagtgagcacctgcaacagttcctagagatttgcagcacgtacacggattaa

SEQ ID NO: 69076 - DNA, 367 bp, Oryza sativa
  Clone ID: PAT_MRT4530_6977C.1
acgaaattctatataatctagggtttgtagattttgaccaatatctcaagaacatagaaaaccaagaaaaagatagcagaaaatgcaaatagcactgaaaatgaaagcattttaaaacaaatttaaagaaaaaagtaatagaagtcttcgataatttaaaagacacaagaaggcttagtcaacctcgacaaactgtttctattcgtgttagctgttgtcaacctatacgaatactatttgtattccagttacaaaagacttataaacaagagttagaaaaagaaaagaaagaattagataataaaaaggaaataataataataatgaaacaaaattgaaaaatttagagaagaaaaaaaaaaaaaaa

SEQ ID NO: 69077 - DNA, 1510 bp, Oryza sativa
  Clone ID: PAT_MRT4530_69780C.1
ttaggcttcaacattttgacccaactgcaaccccaggactttctgcacgagcctggcgaaagtggcccctgcatttctcaggccgaagggcattctgagatggcagaaagtgtcgaagggtgtgatgaacgctgtcttggggatgtctgtcgggttcatatgaatatgatgatatccggaatatgcatccaaaaagctcatgaactcacatccgtcggtcgaatccactagctggtcgattcggggcaatgggaaatcatccttcgcacacaccttgttgaggtctgtgaagtcaacacatattcgccacttggcgttcgactttctgaccaataccggatttgctaaccagtctgggtggtcgatctcttgaatcacccctgctttcagcagcttgttcacttctgctttcgctgcctcttggcgatctgatgacattttccttagctttggctttgcttcaggtttgactgcgaggcgatgcattatgagatctggcgaaacgccccccacatcgtctggtccccaggcgaaaatgtcaatgttctttttcaacacggctaggatgccttcaacttcttgctcgcttagatcactaccaagtgaaatgaccttggctaggtcagaactgtctagctgtcgctggacgacattgccatgcggggtcggctttggaactggttttgtcttctcttgttcttcgacttctacagtgtgaacctctctgccgaaacgtgtaactgtgacggccgaaggctgagaacccttcacaactatgacaccgaccgggccgggcatcttgagcttgaggtaattgtgatgagaagctgcttcgaacttggtcaacgagcctctgccaaaaatggcgttgtagttgtaagggatgtcaacaatgtcgaagagtatctgtggacccccgtttttataacaggaatcaatcgtgtaaacagtaccatttccctggatcaagtagtctggtacacatgaattcttagtgagcgccatcgtcttgatcaccctcctggtaataggcatagggatcctccgaagcttcatctccagcctttgccttgctcaaagtcttgcgggtcttggccttcactcggatccacaactccctcgggctgtgcggcgacggtgacggcgacggcgcggcagcagtggcgcgcagctcggggcgggatgcgacggcgacggcgacagcgcggcagcggcggcacggggcgcaaggcgacgcgacgggcggcagcggcgacgcgacgggcgagcggcgacggaacggccgatggcgacggcgcagcagcggcgacgcgacgggcggatggccgacggcgacggcgacgcggggctcggggtggccgggcgtgcgcggcagaggagggttagagctagggacctcgtcgagcacccactcaccccacccatccacgacgacccattcccccatctccgcgggaaacaaaccggagctcgccttggcctcgccgccggcctcctcctcctcctccat

SEQ ID NO: 69078 - DNA, 589 bp, Oryza sativa
  Clone ID: PAT_MRT4530_69781C.1
atccccgggctgcaggaattcggcacgaggcacaaactgagcaggtattcttttcaggctcttttgaagaggttaggtgtgtgatgtgatctctgcaaattattgattctataatgaggttgcgtaaatatgaagtatgatattatctagattccaattacattgtgggacatagtaattctcattgctattgtaggccatagtgtattgattcctgtgcatgggcttctttctggagttcagttaccacgttggtgcttcatatgcaacagcatggaccaatttactatgccatgtcctaagaaggtttgtgcatgacaagaaggtatctaagataacactctttcgttaatgccaactgttaaacatagaaatcaaagtaatttattttgctaccatttcctttaggtggcactcacatattgttcaattgtactggggacattaggctttattactgttattgggatcaatcagatatgcgttttctgctggttttgctcatggctatgtacacaagaaattttagattataaaataaatatgatggaccaatgtttccagctactacttccggtgtacatccttt

SEQ ID NO: 69079 - DNA, 570 bp, Oryza sativa
  Clone ID: PAT_MRT4530_69782C.1
atggggactagagttcatggaacaggctattatggattacttatcgatgatattgagattgacagctttgagaccggggatgacggtgtcggcgcggtggacgacggaggcggcgccggcgtggtgaaggcggagacggcgcgagggaggcggagggcgggcagaggtggaggcgacgccgacgcggtgggccgagggcggacggaggcggcgccggcggcgacgcagtgggccagggcgaacggaggcggcgccggccgccggcgcggtggagacggaggcggcgcaggcgcggtggaggcaggcggcgcggtgctagagcccggaggcgcggcgcgagagggaggagtggggagtgcggctgtgaggagcacggccggggacggcggagccggaggcgtgggaggtgtggggaccgccggaggatgcaggagcatgccacaagggagaggatcgccggccgcggcgcccacgcggggagggttcacctgtcacggcgtcgatctgctcggccggcaacacatcctcctgttgtctatccgcgccgccaacctccagcaaaatacataa

SEQ ID NO: 69080 - DNA, 658 bp, Oryza sativa
  Clone ID: PAT_MRT4530_69783C.1
atggcggccgttaggacagcggcggcgaggcttcttctccctcggcggcgttggatggctggggaccaagccgcgtcccggaggtggagtcgtcgccgcgccgcccagatccgggcctccatggctggatccggacggggagaggctagcgagcgccggtggaggcgctggcgaggcggtaggcagcgggggaggcgaggacctgacggcggcggtggaagtggagaaggaaaggcgacgaggagaacacggtggtggggtcgtcgcggcggctgccggcggatctggcgactggcgtcctactggccagatccggcgccctcttctggcgagggaggccatctccccgtgtgccagcgagaagaggagctccggctcggcatgcgatgaaggggcaggcggcggaggtggccctcggcgacggcgtcaggcatagggagtccagcctgtgaggctcgcgtctacggcagtgagtggcaccggaggcagtgagaaggaggatgtgtggaggtgcagcggtgctcgaggtgtagggggaggcgctcggccctgccgtcgtcccgctgccatgccgcgcccggcgcccgacgccgtcgccgcttggctcgccgccgctccgcccggctgccccgccgccgcttgggccgctcggcgtcat

SEQ ID NO: 69081 - DNA, 255 bp, Oryza sativa
  Clone ID: PAT_MRT4530_69784C.1
atggcgatcgatgccgtggagctcccgcggccgcccaccccaacctctcgtctcttctctatctatcgccacgcatcccgacctcgccgggtgggtggagctgtggaggtgatgctggaccggcaggtcgccaacgacatattctcctatgatgcagaggtgcaccccgcatgcctttctccgctcaccaccttcttgtcggccacctccccctttttcctcccgcttgctgctctcccatcggctgccgcttaa

SEQ ID NO: 69082 - DNA, 384 bp, Oryza sativa
  Clone ID: PAT_MRT4530_69785C.1
atgaaagaacaatcccccgaaaaaaggaaccaccaaagatcccgcggggagcccgaccaagtcgaggcgctgaatcggtggtctcccgagccgaggccgaccaattgggcggacgccggcgccgaatccccgcgggacacaggggattcgatgaggcgaggcgcgggggagggagggagggaggaagagcggggggtgtccgtacctcgtcgagcaggaggatgcagaggggaattaggaagcggagaggagaggagaggggagggaagagaggggggctatcgttataggcgtgagtcgcgtcgtggcggtgttggaattggctttggcacgtccagtccaggtcaaacccaaggtggggaggcgagacaggaggcggtgtga

SEQ ID NO: 69083 - DNA, 833 bp, Oryza sativa
  Clone ID: PAT_MRT4530_69786C.1
tcagttcagctgatcaggagatgcagcagcatcagcaaattcagtaatgcatccaagcatggatgaagcgagagcacgacgcaatggacagcgacatggcgtgtgatgtgatgtgatcctggtgtgctgatacgcagcacatgccggcgccaaagttgcaggcttcttgcagccgcatgcaggttgtttaattttcttcccccccttgcttttcagtgggctaacccacttcccattctcgagggctcgtgtcttgtccgagtcgccggcggcggcggcggcggcggcgatgttgcggtcggcgctgcgccggggaggggcggccgtgaggcacgccgcgtcgtcgtcgtcggcggcggaggcggcagcggacggatctccgggtgcccttctccggcggaaagtggcggagcgggagcgcgcgcggaggcggccacgggacccgtcccgcgacgagttcttcgtggcgacgccggagtcgctcgcgtggctcgactcggcctccctccccatggtgctcacggcggccgccatcgcgctcttcaccaagctgctcatgatggaacatgatgcagcagatcaagaaagaggagaacgcaagataaagaatagccaccctgatcaaggaaaagtaaggatgcttacgcgtgaagaatgggatgagatccaagaagtcaggccaaggaccccttttgaatcgaagttagctcgtccgcatgcccgtataagaactggggaaccagtacggctggaggatgtcaaggattgggctaccgatatgatcatggatgcttttactagagcagaagaaagtgctaagaaaaaatgattca

SEQ ID NO: 69084 - DNA, 414 bp, Oryza sativa
  Clone ID: PAT_MRT4530_69787C.1
atggctatggtgcgcccgcgccgtcgcgatcacgggacgggacgcgaggggccacgccgcgcgctgctccgcccccacgccgcgacaggtggcccatgggccgtcctcctcttttcagccccaccccccgcgtgcggcgggctccgcctcgaccgctctctctcccgccgttttgtcgccgagcgaaggcgggacccactcgttcgttcgtgcgcggtgtgggtgaggccgacggggcgacgtttccaggcccgagtgggcccagcgctctcacgtgaggaggcctgcctgggctgggccaggccaggccaggccggctctgacaaccctgccgcgctgcctcctccagtccaggacaagccctacccaatggtgccagttctggagatgctactgttccttgtccttccgtga

SEQ ID NO: 69085 - DNA, 413 bp, Oryza sativa
  Clone ID: PAT_MRT4530_69788C.1
aaaaacccttgaagattcatttgattcgggaagagaaacaattttcaaattcccaccggaacccaactttttttttccagaggccctcgctttttttggtttttgggcaacccagggaaaccattttaccggcacaccccccaccatatatgccccccaaaaaaaaatcaagaacccaaacaattcccctttaaataattcccggttaattaaaaaacccccgccttaataataaaggaataaattaactaagggctggttctttccagacattttgccttacctggggaggatggccgggctacaatacgggccgttgagccagcccgaagagatctgcttggaagctgcctcggggggggggatgcccccccaactaaaaagccaccccgggttggagcccccttatgccc

SEQ ID NO: 69086 - DNA, 5432 bp, Oryza sativa
  Clone ID: PAT_MRT4530_69789C.1
tttttttttttttttttttgttgttctctttttctttttgatcttgcagcaggaaattctatattagcatcatgtatcatggcataattcacataaacaacaaacgaaaattgatcagatcaacccctactgaaatttctatgagaagaaaatctactgtaagttacaggaaccaaaatcacctcatgagcgcatcgtcaaaaaaaaagggatgaaccaaaaactactcatgagcggcataattaagctcggttgccattgcaacaaatctaagacgacagctctttgtgagcaacaaaagtatgtacaacggtgccgtcatacgctgttcctaaatcttccacgttctggatctcacccatcattatacggttgctgactacattgaatcctaaaactgctgcactcaccttcttccccttcttccctttcttctttcctccgtccagctccgtctcggtgctggaggctcctttggctgcagaggcatggtttgcacgccctgcaccgtccccacggacagcacgggcaggtagctggaaggccatctcgatcacatcagttgacaggaaggccttgtagttgaggaacttatcgatgaactcgccattgcggtcaaaagagccaaggttctcccggaggagcatttctgcctcaacagttggttgcttgatgcaaaactcgaggaagcttgtatcatttgttccagtgagtctggcccactcactctcgcaccaatccctgaagtccattgcctctgtttgcctgtttgctgcctctgctttccctttaccagcgtggttggcagtaggagcagtagaaaggggcagtctgctggcctgggatttttgacggttcattggggactggtctttaatactggagcttctagtctgacttgaaagagttgggaattctgactgtttcttatcttgtttagcatgctcagaagggccccaaaacaaatcatcttcagcattggatttggaacgactggaagcattagagctcatctggacaggagcaacagcctttgatggagatgagccagaagcttgccaggaaggaacatttgcatgattcctttggttgatagatacctttgctggggttggcgagggtggttgctgctgggcaacagcagatcttctttcttgctctctttggatatctctcaaagacagaggcctttgcacctttgctgactcactagaccatgctggagcaggtactgcacttgcctgatcactcttccagggaacaaaatctccaaaagacggaccacttggtggagccggtagtatttctttctcttgatgtgattgctttgaaggctttcccttttcagtaggtacagatacagtcgatgaatcaaaggaaacaacaggtgctggggctttgactgcagatccttttgcttttgtcgcctttttcttgctcttcttagagtccttggcctcaatgaagtcagtatcatcaaaagcaggagcatcaggagccatcaactgctggtccgaagtggtcagcatgccattccaaggaattgatggcactgaagctgcagaaacagctggcttagcattctccattgctaatcccctctgtgctctaagctgttcctcagcttgaatttccagaagtgatttaggtctaggtccctgagtaggtttccacccacgctggtttactgcggcagcattaggttcccattcacctttgttagtatcataatcctcggaaaaacttttcgcaggtagaaccagagatgattccaatcctagcggtgggtcagcagatttagaagaactttccacttggatgggggaaccccaaaatagctcctctgcatcatcttgcaagtcatgcttagctccaccctgatctgaaccaactagagtttcctgccttggctgttgagaagtaaccgtctttgtagctcctttggctacatccgcacctgcctgtttcttcttctgcttctttttcttttctgatttttttgtgtcctgtgtatcagaggctttaacttcagttgccacagttggttcactaccaccgaggatattttctgaagatattttcaaatcttgcacctgattggaaatatgagatgacaatgtttcaggttttggatcaaacggtgcctcaggaaactccttaggtgcacttggagctgcccctatgacctcagaagatccagagcccaaaatattttcagacatgattcctgtttttcctattccaatgcccctttcatgagatctaacctcctgttgatcagaatcatcttcacgcctatttgcaacttctgttagcatcgggttcactatactggcttttaattgtgtattgacattgaccttatcttccaacttctgggggtgagagtagcgatcttttgaaggtacaccaccaaaaatttcatggggcaataaagaaggtacagagctttgagatggacctacaccctccatacccttcttattcataatacttggatcactaggttgctgcccctcctgtgtaccatgggcagtcaaaacgcggtctgcctcaagaacctctttcattttctgaaggccaagattcgaagaatcaccagttggcaatgaagtacgttgtgacccataaagatcatcaggttgctgactggaatgcccatgaggtataacttgagaaagcaggtgctgttgctgcaacaacagctgctgctgctgctgctgctcaagttgcagcagttgcaatcgttgcttctgttgttgttgcatttgttgttgcatttgttgttgctgttgcatctgttgttgcatttgctgctgctgctgctgtttgagcaacatcatcttgtccaacatagagagttgaggttgaggttgaggctgaggcgtcacaggtagctgtggttgcaattgtagctgtgacagtagatactggtgctgcaacctagttaaaagctgtgggtcttgggatatttcagcacgtaacttctcaggtcccaaatgagctatttgtgacatgttcagtggcatgaagttttgctgttgaatagcagtagtggcttgttgggaactctgcacacttgcaccatgcatgttaagtgacccttgagtgagatccacaccatgcccacgaggatcaagattcttagcttcagggtagtttgaccatgctggcaatccagaattagaagcaggtgcttgaggtttctctgcagaatgcagcatcgcaagcaaatcaacattctgagattgcaaagcttggcgaggtggatcagccatgggagggtgcaatttagtgtgtagagcagatgcttctatatctttgttttgcacttgtgcagctggaatactgtctcctgaccaaaatgaaccaggattttgcaaagatttttgcctctccaacaatcttttctgtaccaaaaggtaagtcatgctgttcccagtctctcctccagacacagtaatgttaccaatgccactgctgccatattcagtcatacctgcagtcatagcaagcatttcagctgaaggatcacgaacactattagacataagcgactccaaaaagcgattttgagcttcaactgcaccatctttcctgcttagcccactgtcaaatgctccaacactggctgatcctgcatgtgtgttactcgagctgacaaaattcccagttgatagagtttctggcattagcatgtcactgggttttgttgcagcgaaccctggaggtggtcttgcctttgctcgtagatgaggcataacatccccaagcaataagaaaggcgcatcagggggtgcatttgcaacacgaactaacaaatcgataccaaagtaaccagcctcgaaccagccaatgatgtcagctccagaaaaagggccttgaacctgaccttgtggatctttgtaatataaagataagctttctggattaggataagttggagtggcaaatccatcaacacctgtaataacagcgactttactttcctgatctaatgcaaagggcatttgctgtatatagtcagcagttggtccaggcctatgttctccaatgagcctagatctttgtggaacaacataagcagatgtttctggccgcaaggaatccgctctggccggcaaatcagtattaccaggaaaacctattataaaccaacagtggcaacctttagcatgggaaaatgatttaacagacaccctgagacttgcagctgtttctcccttgacatcttccatgcctccttgttgatcttctctaccattttttccaaccgggccatctttggaagcctgatggacgccactgtttatgatatcccctttatcaattgcttttaagatggccgcttcatcagtagtaggagcagacaatgctaaaggttccaaagtttcttcttgcataaatgcagagagttcctcacagccaccaaggggcatcttgaagtcagtaacatgagaagttctgtatatgtcaagcagtttcattctactatatctaaatgctgtgcgatctcctgatgtaccaccaggcctgtcagaaagtaggccaagatggaatggacgtgatgatcctgaactggctgtgtttgtacttccagatgtaaattttccacgagaacctggaaaacttgcaatttcattgtctggcttccctctaccatatccatatgttgcagatgatttttgtgtattctgtgagggatgatgagatgaatctccccgtccacggcccacaggataactagatttccatgatctagaaatattatcatctctttcagcatccttctcatgactgttgccgtcttttccatgagctatgtagtgagagaaacctttttcacgggcagcatcaccatctttgcctgaatcaccccatctgtcacgccaattctcagactccttatcattagggcccctacgagcactccatttgttatcacggcgttgatcatagtttccctccttgttaccggagtcactccaacgttcctgtggaggacgacgaccatccacagagtacttggaggagtcatctgaccacctttccagtttgcgtgtatcaccatgttccttgtctgtctccctccagcgattccaccgaggggctgaatttggttctctttcatcatcacgccagcgttcacgacacccagtttcaccatcaagcacagaggccctgaaaacatcctttcttttcacactgaagcttgtgtcctcatcatttcctggtatctttgaaccatctgaacgaacacccagtaaactgggttccttgttttctcccaccttcataagccattgaggagaaagaggcatctcagtatccagtccttgcttgtctttggcgatctgcggcggtggtggaggggcgtcgacggcgaggcggcggcggaggtcggcattggcgcggtccggagtggcggccat

SEQ ID NO: 69087 - DNA, 413 bp, Oryza sativa
  Clone ID: PAT_MRT4530_6978C.1
aataaaaaccctgccttacattgtcgaatgcttgctctaattaatattcggaaataacgttcacgttgggacattatctacttaaataactagactaacctgctcatggttactagtaagcctctccctttatttacttttgcatgatgttgcctatttacaaatttatactagccagcgtaatacgtctatggttggaggtagtatatctaacttcaactccactctacgcaaagataagattacatatcgagcaaatgctacgatcgatcgacttttagcctaacctatacaaacctgcaaactcattgcgggattgaaacaaaatgtgcaggtctgtggcgcagtattcctaatttgctactacaccctcccggcaaaaaaataaatgtaacactcgatgtgacgtattc

SEQ ID NO: 69088 - DNA, 546 bp, Oryza sativa
  Clone ID: PAT_MRT4530_69790C.1
atgttggtctgctggagatcaccggagaaggcgccgtcttctgccggcggattggtcgccggcgtgctcgacggcgaatgcatcgtcgccgctcccgcctcgtcattggcgcctcccgccagcctcccgtgccggatccgtggcggggggagggcgaccgggcgccggatccgtgcagggacggccgcgggccgcccgtcgtcgctcactcgcccgttggttccgccgcctgcgtgctcccgttgccgccagggaggggaggggaggggagagggatgggaggagccgctgccgcccgtcgtcgcccgcctgcccgctagatccgccgcccgcgcgctcccgttgctgccggggaggggaggggagggcaggcggttctcgcgccggatccgtggcgggggagggcggccggccgccggatccatgcggggacggccgccgcccgccggatccatgcggggactgccgccgcccgccggatcccgcgcctccaccgttgcgccgccgtcgccgtggggcactgctgccgccgagaggcataagtga

SEQ ID NO: 69089 - DNA, 330 bp, Oryza sativa
  Clone ID: PAT_MRT4530_69791C.1
cggggggcaggagggggcgctttggctgtggtcttttcaggaatccggccgtcaaacgagaacactctacattgcgcggtcataaaccctagtttcagtaaaacaatagcattgacgccccgggggctgtctgacctttattgactttaaggcctgcctgatttcattctttcttctcaaacactataggcgcgccttgggaatcgaccatctaactgaatctactattgaccccccccaaatcgaagcctatgccctggaccatcattttttctgtttgtaagactgggccgaacaccaaccccgtgccccattctagcgttctcatcc

SEQ ID NO: 69090 - DNA, 804 bp, Oryza sativa
  Clone ID: PAT_MRT4530_69792C.1
atgaggcggcgagcggcggcggggtgcggcggcggcggcgaggcaaggcggcggtgggagctcgcgctgctcgagcgaggcaaggcggcggcggaggaggcgaggcggcggagaggggacgagggtggagagcttcatagagcacaggatgcgtgtaactctggacgggtgcgcggcgaggtcatgcccgtggtgacgacgctgccggtcatccgtcccgcggcgctgcggcatcatcatcatcatccgccaccgccgcctgagctgcagctcctcccggcgtccaccacggcgccgttggccgccgcattctcgtccaactccacgaccaccggctcctcctcccatgagcaacacgcgacgacgatgacgacgacgaagctgcagctcttcatcggccccgctgtcgtcgtcgtcgcagcgtccgacggcggcgccacggccgcggcagcaggaggggaggagaaggagcagcgggaagaggtgaggcgcgcgctggagaaggtggacgcggcgcgggagcgggcgcgcgaggaagccgcggcggcggagcgcgcgctggaggatgccagccgccgcctcgcttcgctcgagcagcgcgagctccccctcctttgccgcaccccgctgccgctcgccgcctcatcccccgacgctcgccgccgtcctccccgccgctcgcctcctccgccgcaccccgccgccgctcgcctcctccgccgccgccgcctcgcctcgctcgagcagcgcgagctcccgccgccgccgccgctcgccgccccccgcctgccgctgtgcgcgtga

SEQ ID NO: 69091 - DNA, 214 bp, Oryza sativa
  Clone ID: PAT_MRT4530_69793C.1
aagctttttttttttgccgaatgatttgaaattggcagtaaacttgaaaactgattcaagtcgtgaaatatttttcaagacatacggttatcataaatactggacatcttatattatataactgtcgagacattatttaaagtactcattatattatatacataatctctctcatgtcatatttattagttttttccttggttacccgaagctt

SEQ ID NO: 69092 - DNA, 288 bp, Oryza sativa
  unsure (1)..(288): unsure at all n locations
  Clone ID: PAT_MRT4530_69794C.1
cggacgcgtgggcggacgcgtgggcggacgcgtggggcttgaagcagccaagttatttagcaagcctctggatcttaggagccttgtcactcccctgactcttcaaggaagagggcgagaatcgcccagaagaagcaagaattgcaagaagaagtcgagctgccgataccagaagctgttgccagagctcaagacagaggaacgcagagtggagctggaaagagangtcaagctttgtgcaccacgataaacctatagacttaaacatataatgagagtgttgcgtgg

SEQ ID NO: 69093 - DNA, 153 bp, Oryza sativa
  Clone ID: PAT_MRT4530_69795C.1
atggaggatgagacaatcttctccttcttccctgatggcctctgtctcatgattctagatgacgacatgaaggatttgtttggaataaggaacttttgtggttctttcaacttctttgataccatcttgtttctaaatgttttggtcgcttga

SEQ ID NO: 69094 - DNA, 186 bp, Oryza sativa
  Clone ID: PAT_MRT4530_69796C.1
atggcctcgtccacgcttcctcgtccccgacggtggcccgacatggagcagaagggggatgagggggatcgaagattcgtccgattgagcccattacaccagacgaggaaaaggccagctctctcgagcctccgccctccagtcctccacgatccagccgccgtcgccgccgcgcgccatggctag

SEQ ID NO: 69095 - DNA, 1538 bp, Oryza sativa
  Clone ID: PAT_MRT4530_69797C.1
atgcgccccaccgccgcggccgccaccgccgccttcgcctcaccggtcgtcgcggttcccagtcgcgcggccccgctcgccgcccgccgccgcctccgccgcgcgaggcgcttcgctgtccgctccgtcgcctcccctccaacggtccccaagcccgcggctcccccctccaagactgggaaatggcagtggacatttgaggataagccaataaacatttactatgaggaacatgagcatgagactgctgagaacgtgaagaacattcttatgattcctacaatttctgatgttagcacagtggaggaatggagggtggtagccaaagatattgtggcacgaaaaggagaattaggttaccgtgctacaattgttgattggcctggtctgggttattcagacaggccatcactgaactacaatgctgatgtgatggagaattttctggttcagttaattaattcaccaaatagtcctgtggcaaatacagatggtgaagtggtagtagttggaggaggtcatgcagcaacaattgcagtccgtgcggctgggaagggccttataaggccatctggcattgctgcagttgcacctacttgggctggaccccttcccattgtatttggccgaggttctgatatggagacaaggtatgggcttctacgagggaccctcagggccccggctattggctggatgatgtacaatgttctggtgagcaacgagaagtccatccagtcccagtacaagtctcacgtttatgccaaccctgagaacgtgactccaaatatcgtggaaagtcgctacgagttaaccaaaaggaaaggtgcacggtttgtcccggctgcattcttgacaggccttcttgaccctgtccaaacaagggaagaattccttcagctgtttgccaagttggacggtgacgctccagttctggttgcatcgaccgtgaatgccccgaagaggtcgaaggctgagatggaagctctcagaggcgccaaaggcgtgacaaaattcgtggaggttccaggtgcccttctgccgcaggaggaattcccatcaccagtcgcggaggaactctacagctttctgaaggaatcattctcgtcagtagcagttcccaccatcctctctcttgtttttcacgcgaaagtttttgaaattgctaaacgtcgtcctgctgctccttgcatggttgtcgttggcgagggcactaccctgagttgcttcgtcatccctaaagcagtggtgctagcaaacgagcctgatgctagatctagcgagctcgacaggacaatgatgacagcttggggagagatgcaggtccctcatacccatgtcctgcattgtgagtgccctaaggctattcacaacacgtctcacagtcgctcagctcttcgttcgatttgccactgccgagttcatcctcatcgcctaatccactccactgggagctcatcggtgcaccccacttcattctgtgctgccgagagcttgttggctcgcctcgtctccgtttgcgtcaccaagaagggtga

SEQ ID NO: 69096 - DNA, 978 bp, Oryza sativa
  Clone ID: PAT_MRT4530_69799C.1
ccggccgggccggtccaagtccaacacgcacccccctcaccctttgctgcggtctctctctctctctctcggcttcttcctccttgcgcgcagcctcgattctcgacttttcttgctgtggggagaagaatcgcgattgcgcgaggggatttcttgctgctcggagatgccgcggattccgctgatcaagttccccaagaggaatctcaagatcccatccccacccccaccagcggcgcaacctgcagatcagcacgcgtccctcttgtcccgattgggagttaaatcagaggcaccatcttcttccggggagattaaaaattaccgctttagatcagatgtgccttccccaccttcttatacggctgttggagggccagcttcactccttcctaaacgcaagccactgtcagaggaagaaattgaggctatcatgcaaggtggtatctactgatattgcatccgatgaataagataccaaaccttttaaatggggtcactagagccatgtcgatatggaccttttcgttgtactccctttttggtgtcaggaagcagctgccctgatactcctttttttgagtattgccaaaatgaccaattcgtgaaaactgaacatgcaatgcatcggttgtttgccaaaatacattgatcatggagttatgccatgcaactcaactaattgtcttattccattgctccaaatgttctgagacatttgtgctcatccatgctgcttcagcaattaatgctttcatcaaaatatcgtgtatctgccagttggacgaaatgatgctcctatattaacgatagataatttataagcacacaaaatagtcattaattagacaggctttgatgtgcttctctttttcgctggtgggggccttcgctgtcccagtgccgtgtaagtaagtaatcccatgtgatggacatatgaatagctctcattaatagttctgataattctttgtttgc

SEQ ID NO: 69097 - DNA, 840 bp, Oryza sativa
  Clone ID: PAT_MRT4530_6979C.1
atgggcttcaccgacgggtaccttgccaccgaaaaggttcacgttggcggagcctcgttccccggcgtcggggtcgggtgcagcacggagaacggggtcggcaactcgtcgtcgggcatcgtgggggtcggccgcagcccgctgtccctcgtttcgcaggtcggggtcggccggttttcgtactgcccccgctccgacgccgacgccggggacagcccgatactggtcgggtccctcgccaaggtcaccggcgggaacgtccagtccacgccactcctcgagaaccccgagatgccaagctcctcgtactactacgtcaacctcaccggcatcaccgtcggcgcgacggacctcccggtgacgagcaccacgttcggcttcacgcgcggcgccggcgccggcctcgtcggcggcacgatcgtggactccggcacgacgctcacgtacctcgtcaaggagggctacgcgatggtgaagcgggcgttcctgtcgcagatggcgacggccaacctgacgacgacggtgaacggcacgcgcttcggcttcgacctgtgcttcgacgccaccgccgccggcggcggcagcggcgtgcccgtgccgacgctggtgctgcggttcgcgggtggagctgagtacgccgtgcggcggcggagctacgtcggcgtggtggcggtggactcgcagggccgcgcggcggtggagtgcttgctcgtgctcccggcgagcgagaaactgtcgatctccatcattggcaacgtcatgcagatggacttgcacgtgctctacgacctcgacggcgggatgttctctttcgcgccggcggattgcgccaatgtgtga

SEQ ID NO: 69098 - DNA, 227 bp, Oryza sativa
  Clone ID: PAT_MRT4530_697C.1
ggaggagagggagcctttgggctgggcttggacgtgacaaaatccaaactacacgagatcggcacaagttatctcctctatgggaagggtcatttataatctctgaagtcacccggccaggttcctaccgactcaagcgtgaagatggtacacttgttgacaattcttggaatatcgaacatcttcgtcgtttctacgcttaagtttctctatgtatttccctatct

SEQ ID NO: 69099 - DNA, 277 bp, Oryza sativa
  unsure (1)..(277): unsure at all n locations
  Clone ID: PAT_MRT4530_69800C.1
gggggggggggggttttattttttttttggttcgcgtgggggtggttcctcgggtaatttccggtaccggttaccttgctgggcgccccggggcccccccgggaagcccggcccgggcccggcgggcgcaccggcatacccgaaagccggccgataaanaggggcggggggaaatgcccacaacatacccccgggggaaaaaaagtgccacgcccggggcccccaacgagagaacccgcgcccaaaaagggcaaagcccgggagcggcccaaggggg

SEQ ID NO: 69100 - DNA, 1140 bp, Oryza sativa
  Clone ID: PAT_MRT4530_69801C.1
atggctggagcctcgccgtcggcgcgcgccgaggtggtcgtcccgccggaatgggcggcggctaccgccaccgccgccgccgcctcctccgagcccgcgccaccggtcgtcgtcgtctgcgggcccaagaacgccggcaagtccaccttctcccgcctcctcctcaactcgctgctccccaggtatgggagggtggggtatctggacacggatgtcgggcagccggagttctcgccgccgggatgcctctcgttccacgtcgtcgacgaagctctcacagatttgctcaacccaactctgcgtgagtgtgaaaggtgttgcttcttcggtgatatttcttcaaagcgagatccagaaacatatctgaattgtctatttcatttgtatgactattttgttgaaaaatatcgatctggtgccagtgaacctctacctttaattgtcaacactcctggatgggtgaaaggtgctggttttgatatgctggtagagatgctaaggtatatctgccccacaattgttgttcagatacgcatctctgcgcagagcaagaatctccctgatggaatgttttggttagattgtgggcaaacaggaccaaacatgatcaatattgatgctccatttcatgatgctttgaatagatcgttgttaatccagaaagattcttatggaatgcgtgagcgccggcttatagagtacttcaagcaatgttttccaagtgacatatcactgacaacaaataaggagcttgcctatggcctaacttcacttccaccctatgaagtatcaatttcagatgttatggttatacatcttcattgccaggtacctcctagtgaggtatggcatagtctaaatgctaccatagttggtttggccattagctgtggcacgatcgaggcaggccgttcaatcccttggtgtgctggtcttggtattatcagaggcatcgatgtgcaaagaggcattttatatgtaataactcctgttcctctagagcatcttcaaagagttgatcttttgcttcagggactcattgagatcccaaagtctcttctgcaggtccgaggatgcgtctcaccatacatgccaacgaatgtgctgcacaggatttcggagagggacataaacacctga

SEQ ID NO: 69101 - DNA, 533 bp, Oryza sativa
  Clone ID: PAT_MRT4530_69802C.1
tgtctagaggaaaaaaagattttcttttcgtcttcccccgtagcagcagcgagccgagcatccatccaaattcccaaaagaggaaactacgctgcgccaccgactctctcgccgccgcaccctcctccctccctccctcgctcgcctccgccgccgcctccgctgcctctccggtgggggccatggcgagcgcggcgccgctgccccccacgccgccgccatcgcagcagcagcagccgcagccgcagggcaaggagcagcagcagcagatggcggtggcgatgaacgcgcgccgcctggtgatgatcggggaccgcctcaggacccacttccgcggcggcggcgggaccgtcctcgagccgcccgacctcgcgcacctcgtctacgccttcgccagagggatcgatttcgctctttctagcggcgatgttcctaccgtggccagtgaaatacccagcattttgaagaaggtgtatctggtagggaaagatcaatttctgcaatcttctggtatggtgctaatgatatcatgc

SEQ ID NO: 69102 - DNA, 994 bp, Oryza sativa
  Clone ID: PAT_MRT4530_69803C.1
gcaggttaacacttccagtttcgactgaaatggcatgcatagattctttcaagcagaacagattaacagttaagtattagagagtacatgtgccgatcaatgatcccaacagtttaacaccagcccaaaagttcaggtgttaccagtggacatcagtctgaatgtccagccccttgtaaacatatgacagaaacaaagatgaattagaagactacaactacatgccattgtcactagtttccaagtgcattatggaaatgaaaagaaaaggatatcaaacaccttggcaaatttaatcatcatcgatcaaccaaaaggaacccatccattctacagtggcgctctgttcatctggcaacagccatctaaaacactttcagcagtgaagacaagcaagacatccacagtttcagcttaagcagtgactggcgtttctactttgggggtatcttgtaacttcttctgcgattcttttatatacttccacccacgcttgtttaccccactgatttttgttggcgcttcagcagcttgaacaccggccttgtagcgaatcccccacgccttcccatgacgaccatccttgtagaggttgatcttggtgatctggtaggagacgtcgcgccaggtggtcttggcgaccttgtagcccacgccccacgacggcaggaactgcaccacgtcgaacaggttcttcttcttcttcctccccttcgactccttcgccacctccgccgccgccgccgccgccgctcccccctccgcggacgccgcggggctggtgctgctcagggctctctgcgtggacaggggcccgagcccgagggatcgccggagcaggcccaatcccctctgcgccatagccatcgggagccgaagaagatcgaaccaacgcgttactgagagaagattaggaggaggaggcgagctccggcgagcggaggggagaggcggcggcgggctagggtttttgggtggagtgcaccccggccgg

SEQ ID NO: 69103 - DNA, 544 bp, Oryza sativa
  Clone ID: PAT_MRT4530_69804C.1
gggggcggcgtcgggccgcggggatcccccgcctggggaagccgcaccagggtcgtcggcgcggcggggagaggcggtgggggatcggcgtgcagagttgcaagtaagttcagtattaatttgatcttgttttgtagctagatccatgctgaatttatgtctgatcgatttatcacacgtgcatggctagatagatcttggatgaattaattaatttggcttcggtgtgtacatgcatctacctacgtagtttttaatgcatcgatcggtacaaattaattaactttacgggtctgaatacgaagattccgtgtgtgtatataccgcgtgtgaagtgttaacgtcggaatttagggtttgttccctcccttcttttcacaataatttgttgaaaccgatcttttcacaataattaacaatatatatatgaattaatgattaactgacgagactagcgatcgatgattaacaaatgattcacgagacagtagcaatcatgcaccgggtgatatatatgcgcaagaagcccatatctcaactgaga

SEQ ID NO: 69104 - DNA, 211 bp, Oryza sativa
  Clone ID: PAT_MRT4530_69805C.1
tgttgattttgtggactatggaggctacaaacaggcccggcttaatagatccggccgggcttaagacagggcgaagagatcaggagagctacagtacactgtctgaggagcagtgtaggagccaaattgtaagagctaggctgacgaagaacattgaggcgatggatgaaggcttgcacgctcggggcaggtacacacgaggcttcagggg

SEQ ID NO: 69105 - DNA, 452 bp, Oryza sativa
  Clone ID: PAT_MRT4530_69806C.1
cctcccaatccgggatgatccctccggacccgccgattccctcgccgccgcccgtgtcctcccgccgccgggatcgatctccgcggattcgacgtgcttcatcgaggttaagtcagcatagctaataactccgtctactgttgtgacctctgtggtttgctttgtgtgttttggcttcccaatcatctgcataaaccaggaagtgggtttgctttggaaatatttggggtcaaactagtagttggcacattgtgatctgatcatgtttatgcacagtttgtactgctaagcacaattggagttctgactatacagatgctgtgcgcatgcttgctggcaatatgaacaacgataactatattgacttgagttcagacagtgatatagattttgacttcgactcagatgattcagttggtggtttggaccaggagctagcttcatcttcttct

SEQ ID NO: 69106 - DNA, 354 bp, Oryza sativa
  Clone ID: PAT_MRT4530_69807C.1
acctctcgttcggtagcggccaaccttgttcttttatacaagtatgttgcaaatgtttcattggaccgtttctgtagcgacttactaatctcggtgagaacactagcacggtcgttcatcttgcttgactgtgcactctggccaaaggaatgaccattcaattcgaggactatccgttgtgaatgctgctgctcctatcttgggctgcaaatacaaagaatttttagatatgtgtgtgggctatagacctagaagagcttataacctgcttggcggatgtttcactcgacatccgtgtatgatttacttggatcaaattgattctaacgttgatagtggaaattgcaactgatt

SEQ ID NO: 69107 - DNA, 794 bp, Oryza sativa
  Clone ID: PAT_MRT4530_69808C.1
ccttttgtctgcttgtctttccactcgactcctccccatgccctctcttttttttttttttttttttttcgcaagtgtgtcacaagcaaacatccataaatcattagtcattacaatagtgcttggagtgactagggagaaaactgaactgccatgctacagatgtatcttaaggattacacaacagtcacaaagataggacacatggcacatcgcatgtataggtttaatgttctcgcagacatagttgaaaaacacaaaattctagcaaataagacaccatcaccagtccaagcctctgaaaaactgtgtcgctctgaggcccatcacactgaaaggtcttggtaaatcaaatgaggagcttctcgatagcatccttgagattctgtatcggtgtcttcagctgactgccctcgttgctggtcactgaacaagcaatgacaggtctagtaacgccacatgcgcggccaagggcttgcttcgaagggacaaaaacatatggaacgttcttatcctccgcgagcagggggaggtggagaaggatctcgagcggctccgtgtcggccgccatcaccacgaactctgatatacccctgttcagggtcttcgtcgcttcgttggcccccttcttgagctgcttgtaattggaggcctgctggacgaggtcgaggatggtcatcgtcagctgcgcgtccgccagcgggtaggccttagggttcacgacctcctggctcattttcgcgaggtgggttggctcggcttggaggagctcgcgcgaggaggaggaggaggag

SEQ ID NO: 69108 - DNA, 176 bp, Oryza sativa
  Clone ID: PAT_MRT4530_69809C.1
aattacaatcctaattgtatggggaaggcatatgaaaaaacagcgatgagagtacttcatttatgtatgcaactctaacagtgctgagacaggcaaatttttgtaattgaagctatgaacacctctgatctgagcataattcaggcaccctgtatctagtaaaaaaaaaaaaaaaa

SEQ ID NO: 69109 - DNA, 260 bp, Oryza sativa
  Clone ID: PAT_MRT4530_6980C.1
atgccgtgccggcccatgggctgcaccaccggcccaagcacggcccaccagcagtcgggctatgccagggccggcatgggcccgacccccgtcgggccgggccatgcttgggtcgggccaaaatatcgtgccatggaccgggccgtcgggcttcgagccttatggctatctatagtggcgacggtcgcatggcgcggcgcggcagagggtggcggccagatctgggacatggatagggttcctagtgtatgtgacctaag

SEQ ID NO: 69110 - DNA, 471 bp, Oryza sativa
  Clone ID: PAT_MRT4530_69810C.1
atggatcagataagagagcatcaaaaagatgacccagaaatacagatttttaaggaacggaaggtgcgaggaaaggctgcagatattaccgaagacctagaaggaatattatggtacggaaatagaattgtcgtaccacaatcaggaaatctaagagaggtaatactaaaagaagcacatgactcagcctactctttacacccaagcaatacaaagatgtatcatgatttaaaagatctatactggtggccaaacatgaaacaacatattgcagaatatgttgcattatgccatgtctgccaacaagttaaagcagaataccaaaagcctacaggattattacagcctttacaaatacctgaatggaaatgggatgaaacagaaatggattttatcactggactacccaaaacttcttctcgatatgactctatatgggtaatcattgatagacttacaaagactgcatga

SEQ ID NO: 69111 - DNA, 309 bp, Oryza sativa
  Clone ID: PAT_MRT4530_69811C.1
atggcgccaggtcccagctcggatccccatcgcgcccgtccgctccagccgtcaccaactatatctggcagcggttcctttacgaaatttataaatgcatcttacaaatctgaatgcttggagttatatgagatgatggatgagtattgcaggattggacggaggcatataacctcttcaaagaaccaaggtatcaaggatcttcctgtcaatatttgtgaatatgctttctcctatatctatgagactgtgcaaacgcatcctgaagatttagcagacaatgtgtttcactgctggtcaaagtcttaa

SEQ ID NO: 69112 - DNA, 195 bp, Oryza sativa
  Clone ID: PAT_MRT4530_69812C.1
ccggaattcccggctcgaccacgcgtccggaagaattttgtaaggcataaacgatagagaggcccgcagacacacacacgcgacatgactagaccacgagaaaggaaggaagctcgggactcagatcgagccgcaccgaggcacccggcctggccggcgcaggaggaaacggccgcgccgacaacgcaggggaga

SEQ ID NO: 69113 - DNA, 124 bp, Oryza sativa
  Clone ID: PAT_MRT4530_69813C.1
ctcctgctcgtcttcttcgcacacacggcagttgtacaggctctgcctcttccggcgcccgacgccagatgcagccacagctgaagcacgaatcggagacagcatcagcagatacgacgacgac

SEQ ID NO: 69114 - DNA, 614 bp, Oryza sativa
  unsure (1)..(614): unsure at all n locations
  Clone ID: PAT_MRT4530_69814C.1
gaattgtaatacgantcactatagggngaattgggttccgggncccccctcnantttttttttttttttttttacnaacaaccacttgctttgctggtccattcnttatcctttaatttttttggantcctgttaggaatngaactaactcggattactctcactcactcactcacttcctcnctatgccacagttcnaacaactnaacaagggtgganctnagaaattgaaacgaaacttcnccncnctaatcggnanattacacgcnaattatcccgganaatctcttgcgcccgccattgatggatnntccnnaaaatntanctntnaacgcnannancgncaggtncatgttncgggganngggctggaaancannttgtggtcnctggaacanannaaggggncgaaccgttcntnccgganggnatccccggcgccgcnaactcancgtgtttctctgcttctcgccnganttngtgaanttcncgtccangggcnanggaaaccgtgacngnttttgctgcngngggctggtgtccctttttttccggntggcanttggtncgtgcggttnntccctncccgtcccgaaatncaaaaaagtntaacn

SEQ ID NO: 69115 - DNA, 704 bp, Oryza sativa
  Clone ID: PAT_MRT4530_69815C.1
cggggtggcgtgacggctgtactggctgatggtggaggaggccaaacgtcgttgccgggagaaggcagtggtaggcccgcgccgtgaggaggcgcggccggtggcagcgaaggccggcacagaaggggggcaaagccagcggaggcgaaggtagacgaggtgtggcggccggtagcggaggccggcactgcgcgatgagggtggtggcacgtggagactggccggcgaggggcgccggtgtagctgtgcccgcgagccgatggaggttagacggcggtggagcgatggtgcatcagcttaaaggttgggttttgggagatctcgattgtagttctgttaacaaccaaatttgataatctaagtatcggagataaagactagatcgaagcggaatccaagttcgatatcgtatcggaaacagagcaagaatcggctggactccaaatcggctacgaccagatcggctgagtccgagtcagaaagggaaagccgatacagccgattccgacaatatgattcgtacgggcaaaaatctgctgcaaagacttatggtatcttagagtttgttagagataagagtcgtgtctgacaaggacatattttgatcaaatcaactgtcacgccctcaaacctaaaggcaagatattttggacctgcactggagttaagcagatctcccaagcctcgtgtttttacatcaacaa

SEQ ID NO: 69116 - DNA, 242 bp, Oryza sativa
  Clone ID: PAT_MRT4530_69816C.1
agggaaagcaagaaatgctagtagcttcaaaaagagagagttttacacagcaaataagttacagaggttatgggagaaattaaaaacccatggtacaatgaaagaatccagaaattaataataccagtaaactgcctccctgtagttcactcagtgagtgatctcaatatcctcattttgttctcatccttgtctttgagcttggctatttgactttatttgcccaatgaccatgcagggtg

SEQ ID NO: 69117 - DNA, 184 bp, Oryza sativa
  Clone ID: PAT_MRT4530_69817C.1
gggggagatgtagtaaaaatctgtgcatcctcaggtatacctttcctttaaagaggaaaccctatttcattacactctgatttcttagctagggtactgaaagtcctggaccgtgtggactctgtggttaatgagcttgtttaccatgttacaatcggtaattaactgaacatgtgtaaagaga

SEQ ID NO: 69118 - DNA, 1221 bp, Oryza sativa
  Clone ID: PAT_MRT4530_69818C.1
atgggcagagctcatgcaaccgcggtgtgcttcgcttctccacgccacgccacgcgcgcgcctctcgccgcctctgccgcgggtgcttcctctccagctagggtttccacgacgatcatcaccggcgacgaaggccgcgggggaagctgtcgcgacgcgttccgggaccggttcaaggttcttaagaaccacgccatgcaggaggacataaatccatgttttttctatgctgtaactggttacttcgattatcgtgcagagaacagaccccgtcataaagaaagtgcagcaagttcaatcctaggagagattccaaaaccattgagatacacacatcttgtaggggggcaacaagatagagattctttgaagagacagacagcagattgtagcatgagtcttggtgaatcatctagtattccaaagatagcaagatcaatcctaggagagattccaaaaccattgcgatacacacatcagtataactgggctgacttggcagtagtgtatgaggaagcaatcttttttgtgcttcaggcatataatgaggaggttatccatctgtccatgaggtatgacatgttatggacctgttctgctggcaatcatgctcttgacgatgcatttcgacttgcccaccagatatgtgcccaaaagaattgcaaatgcccaattatactctttttgaaaattatgattctaaaattaggatttacaggttcattgactgttcctaatgtgcttgttggaatgcaaactctaccagtggagaagaaggctggttcaagctgctctcctgctatgaattcaaaaggagaggaagattcttcaaagttggaggaaccaaaagcatccaagactcctgagtacagaataggttcattgattgttcctaatgtgctgaatgaaacacaaactctaccagtggagaagaaggctggttcaagctgctctcatgcgctgaactcaaaaggaaaggaagaatcctcaggacgtttgggaaaagagccacaagcatcaagggctaataatccggtgctgctatcaacaccaaagagtagaagccaaggaattaaacacaaacctcaaacaggggagaaggcggccagttcaagatgctctactgctttcaactcaaagcgaggggaagattcgtccggatgctcgtctgtgtctgtgcccattggggcgatgatgataaatgtaaacctattagactag

SEQ ID NO: 69119 - DNA, 222 bp, Oryza sativa
  Clone ID: PAT_MRT4530_69819C.1
atggcctctgcagagagaagaataaggatgtggtggcgcacagctagaaggcctaagcatctatggggtcgccggagcatgctctacatgggccacagccgcatctacacggaccactactacgaccccatcgagctccagggcagccgccgccactgctggcgcctctttgtgatggctggcgacgaggggttagcgctggccggatttgggatgggctga

SEQ ID NO: 69120 - DNA, 2828 bp, Oryza sativa
  Clone ID: PAT_MRT4530_6981C.1
atggcggagctcggggagctcgaggggaagctgagggacgtcggggagaagctccagtctccccccgacgacgtcgatgccttgctcaagctcatccacgaggccgaaatatatatattgaaagtggaacaagcaccttctgaaagcatgattagtgctataactccagcaatgaaagctttgatcaagaaagagctgttggataattctagctatgaggtgaaactttctgtggtgtcctgtatttctgagataactaggatcactgcacctgacactccatatgacgatgatgtcatgaaggacgtgttttccataatggtggggtcttttgagaaattggatgatatggagaaccccttgtttcgaaggatagttgcaatccttgaaactgtggcaaaggtccggctatgcgtggtgatgttggatcttgagtgtgaagatctgatactgcaaatgtttcacaacttcttcacaactgtgaaaccaaatcacccagaaaatgttacaaactgtatgactacaataatgattttggtaattgaagaggatgatgaagttgagatacccattgcagaatgtctgctcaagcatgctaagtccgaactgaaggaaacttctgctgcatcttttgaacttgcagagaaggtgataggtgcatgctctgaaaaactgaaaccggtctttctgcagttacttaaaggcacttccttgaatgaatatgacaatattatcgcaacaatttgtgaagacagttcagatgtcaaggaagacatggatgctgatccttctggaaaagatgtggtggatgatggcaaactttctgaaaggactatttctgatgagctacctcaggaacctgcaaagttggagcaagatgttactcagactactgctattggcagtggtgcaactccagttgataatggcacagaatctgcagctgctaatcccaaggaattatccaatcccgattcagagaaaaaggatggtgttaagcagtcagcaaaggttgccaatggagcttctgctgaaacatcagaacgtgttgatggctcaccagctatggtcaaatcaaaaagaggtcgacctcctggactaaagtcattggagaagaaggctgctggaaagaaagttctaggtctgaaaaaggttgaggagactactgattcaacagggaagttatcgaagcagtcatctaaggatgattccaagtcatctacaagaaaggcaagtggagcagggtcatcaaaaaagcaacaaaagatcagtttgaaacagaaggatgaaactgactccaaggaagatactgctaaggatctgagcctaaaggaaatggtctctccaaagtccgtgtccaaggggtcagctaagaccaagggcagccaaggccaggacaataatggctccaagaggaaaaggtcacaagaggatgaacaagagactcctcgttctaggaagaataaaggccttgatgctagccttgttggtgcaaggatccaagtatggtggcctgacgacaagaagttttacaagggcattgttgactcatttgatacagcttcaaaaaggcacaagattgcatatgatgatggagatgtagaggtgcttctccttagggatgaaaagtgggaattcgtcagtgaggaacaagacaaaacccctgatgtggcttccgagatttccccgaagccacggggtaggggcagaaaaggaagagggagctcagtgcaattgaaggaaggaaatgcagaaacacctaaaagtggtggaggcgatcttcccaaaaaaaggggtcgtccgaaaggttccagcaatggtacacccaaaagtaacatctcggcaacttcaagcaaatcaaaggggaaagctgcaaggaaggatgacaatgagacacctaaggttggcagtgaccttaagaaggaagctgaagaaggatccgaagacaaagccactaagtcaactgagaagacaaaggatgatttgcctgaggatggtagcaacaagagtgccagtaaaccaaaggaggctagcagcggaggcaaggatttgaagggtgagagcaaaccaagtgaaggaagagccaagccaggtcgaaagccaaaggttgccggtgctgcggtggctggtgaggaatctaaggccaatgtctcagctgagaaagagaagcagaaggaagcagaaggcgaggcagcagctgaagtggagcaggggggatctgctggtggcgcttctactggaggaaagaagcgcagaaggaaggcttgaagttagggatccgctggtggcgcttctactggagaaaagaagcgcagaaggaaggcttgaagttacccgctaatttctcttgtacatggattcgctctctagactcaaaaggttcgcttagtctcaaaaggtgttaaaacattgcaccctgtgtggttgtaactcttcggtcgggtgacctattggaatgccaactgattgggcatgtagcggttttaactaggggttgtagacaagataaaaatgctgtagttgtgatgttaggcgcaagtgcgcaacttttaatggttggttgaaccccatgcttgccaagaggccaatgacatcatagttgtgtcggatgatgttgtagctagcctgttgatgtcttatttatttaggccatatgagcaaatgagttttgtagctaatgtgccggtctgtcagccctgcctggcaccattaagaaatcctgtttttcagagctcatattcctctgcgagtagagtaatatgagctcttaccccggatgatccaaatatatgacataatttattactgaaaaaaaaaaaaaaaaaaaa

SEQ ID NO: 69121 - DNA, 336 bp, Oryza sativa
  Clone ID: PAT_MRT4530_69820C.1
tcaaattttagggctgttacagaagatgtccctctgcgagcctgatccaaccactatgtttatgattatcacctttcctccagcatctctagtaggtattgcatctttgcaccgtcgaagtatcttgacacaatcgtcatcaccaaaacaatgcaagacatactcatcgttatcattgactactacactgctattgactggatcaacgacaccgtcatcttcatcaaaccatgcctcttcggctatgcctactctgctttgattggtgtcattgtctttaccaccaccaacatcttcgtcagctttgatgggtgatatcattttcatgttggtcat

SEQ ID NO: 69122 - DNA, 1749 bp, Oryza sativa
  Clone ID: PAT_MRT4530_69821C.1
atggcggttcgctacgagaagaaggcgatgtgcgcgctgctgctctcgctgatcatggtggcgctctcggtggccgccgccggcgacggcgacgcgccgccgtccacgccggtgtcgccgacgacggcttgcaacgacacgacggaccccagcttctgccggaccgtgctgccgccgcgcgggtccagcgacctctacacctacggccgcttctcggtggcccggtcgctggactccgcccggaggttcgccggcctcgtcggccgctacctcgcccgccaccgcggcctgtcgccggcggccgtcggcgcgctgcgcgactgccagctcatgtcggagctcaacgtcgacttcctctccgccgccggcgccacgctgaggagcgccgccgacgcgctgcccgacccgcaggccgacgacgtgcacacgctgctgtcggcgatcctcaccaaccagcagacctgcctcgacggcctccaggccgcgtcgtcgtcgtggtcggagcgcggcggcggcggcctcgccgcgcccatcgccaacggcaccaagctctacagcctctcgctctccctcttcaccagggcgtgggtgcccacggcgaaggggtccaagcaccacggcggcggcaagaagcctcaccaaggccacggcaagaagcagccgccggcggcggcggcgagcatgaggagggggctgttcgacgcggccgacggcgagatggcgcggcgggtggcgatggaggggccggaggcgacggtggcggtgaacggggtggtgacggtggaccagggcggcggcgggaactacacgacggtgggtgacgcggtggcggcggcgccgagcaacctggacggcagcacggggcactacgtgatctacgtggcgggcggcgtgtacgaggagaacgtggtggtgcccaagcacaagaggtacatcatgatggtcggcgacggcgtcggccagacggtcatcaccggcaaccggagcgtcgtcgatggctggaccacttttaactccgccaccttcgctgtggtggggcaagggttcgtggcgatgaacatgacgttccggaacacggcggggccgtcgaagcaccaggcggtggcgctccggtccggcgccgacctgtcggcgttctacgggtgcagcttcgaggcgtaccaggacaccctctacgcccactccctccgccagttctaccgccgctgcgacgtctacggcaccgtcgactacgtcttcggcaacgccgctgtcgtcttccagtcctgcgccttcctctcccgcctcccgctccccggccagtgcaacaccgtcacggcgcagggccgatccgaccccaaccagaacaccggcacctccatccagggctgctccctcctcgccgccccggacctcgccgccgccggcgacggcggccggacgctcacctacctcggccggccgtggaagaacttctccaggacggtggtcatggagtcctacgtcggcggcctcgtcgacccggccgggtggatgccgtggtccggcgacttcgcgctcgacacgctcttctacgccgagtacaacaactccggccccggcgccgacaccagccgccgcgtcgcctggccgggctaccacgtcctcggcgccggcgccgacgccggcaacttcaccgtcaccagcatggtgctcggcgacaactggctgccccagaccggcgtccccttcaccagcggcttcctcacttccgatccacctattagctaa

SEQ ID NO: 69123 - DNA, 232 bp, Oryza sativa
  Clone ID: PAT_MRT4530_69822C.1
cgcgtggttccacggaggaggcgacccgtcgtccccgggatgatctcgcagcaccgccccgggtgtcaacgccgtcgacgttcgccgggatgtcgagcgcgtctgtacggtactacgcccggtcaacactcgcagcacacctggtttctttgctcccccaatgtttggggtggccatggattaactgtccttagtaattaataattagccctttgcttaattaagtattaaa

SEQ ID NO: 69124 - DNA, 301 bp, Oryza sativa
  Clone ID: PAT_MRT4530_69823C.1
cgccctttattttttctacaatatttttttttttttccttatctactagaaaaccaccaagggggggtggtttaaacccacaaagacaccagcactaaccggataaatacacacgggcgcggattaaacaccacaaggacacgcggcgggggaaaacaaccaccggcaaatggggcacaatatggggcccccctccttgtacctggcgcaccgaacaaagaacgcggtggcggccaaagacccccggaagaaaccaccttgcaactgccgctgagggcccaccacggaaaaaaaagggcgc

SEQ ID NO: 69125 - DNA, 1827 bp, Oryza sativa
  Clone ID: PAT_MRT4530_69824C.1
atggcgcggcggcggcgggagaggcggcagctcgctcgcctctgcgacctcgtcgcctgcgcactcctcccccacctcgtaagtaaggcgattcgaggatgggaagaggaagaggaggaagaggaggaggaggacgacgacgaagggtgcgaattggatcaggagattatttcatgttccgcggaagttcacagttgcagtttaccagctaaccagcattttgatgatggatttagctgcctggccaatattatctccatattggttggcttctttggtttctgtagcagttatgttaaacactcagctgggaatatcctgattgtcatctctgactctctaatgaagtttgaggttgtttggattcaatttgttgagctggtctggatagctatacatacagtatcaacatgcgctcatagtgctttaccttctttaattgactccatcagcagtttcagaaaagactcgatttgctattgctctgttatggaaagtctaagtcacgacattattatttcaagcaccaatatcacaagcttcgtggaattacttcagctacggtgtcttgatatcaatgggcatatggtggccagtctctttcgagtactgcacactattttaaagttccttaaacacactgataatgaactgaaagaggacttcatttgtatatctgctcatcatattcttatggttgattgggatttgtattatcaactcaatgttggagaacctctaaaccttgtcaaggatagcacatttagcttgagtgatgatttgaaacagttaggatttctttcaagcagtctcctccaactattgtgctctttacttgagcaaagtgacctggaagacaacaatggacaagatatctatgctaagcttgtaggtgtaattcctaagttagtggctatattaccagagcatcaggatgcccccaaaagtctctctcagtacttaaagcacaaatttctgatgataatgatgcggctaaagccttacatccagaaggattgctcatatattgtttgctgcctgaaattacttcgacaacatttccaggatcttcttcatgaacctataatgcaacatattgctaaaccagaaaactgtttggaaggatccccatttttgttgagcactgtaggtctggaaatttcagactggtttcagagatgtttcttagataagatttttggcttcaaatcatctacagacaatgctctgtgctttctgcagttatatatggaggaggatgacatgctgttcaacgttctcttacaacttcttgatgctccactcatttcctcgaaaatagatagcatggagaatagatgggcttctgaactgattggtggcaaactgttctcgagcatttttgacccagttcatgttttccatctcttgcttttattgctgcactatgatcacttggtgcttgttgattatctgatatctaaagatgtaggtgtgcattgcgcacagtatctgttaaggtgcttacgcctggtaacccaatgttggcattctttcactgatgattcaatttatgaggcaaaaatagagaaacttaactttaaaaggcagaagaccttcaatgatgcaaatagtagcagtggtagctcaattgaaggccctaagttaggttctgcatgtcataagaaaagcaagaacaaacacaagctttttctaaatgctaaagcatgcctcctttcattgaagagaacactggaagatcttcataggaagggtctgttcccttacaatccaaagcctctcctcaagagcttggccaggtttgaggagctttgtgagcaggattga

SEQ ID NO: 69126 - DNA, 2175 bp, Oryza sativa
  Clone ID: PAT_MRT4530_69825C.1
cacggttcctgctccctcacccatcggaagcggcggcggcggcggtggtgggcatgggcgccttggcggcggcgacgtcgtcggcgatctggctcgtcgaggacgacatcctcctcaagaacgccgtcgagactggtgcctcattggaggccttggcaaaaggagccgtatgtttctcccgtaaattcactcttaaagaaatacaggatcgttggaattctctgctatatgacccagagatctcaacacaagcttctgctcgtatggttgagtatgagaatgatctttccacttccaatcctctgaaggctaaagttatcaacgcaaagcaaaaggatttgtcattccagaaacggaaaatagatagtgtgaagaatcaatattatgcgatgagaaagagagtccgcaatgaaccatgtagtactgtcgaccttggttttcttattgacccttgttcatgtacaatgaatggcgggcagtgtgtatgtggaggcctagataaacattcacaaggtcaccatgtggttcataatacagaaccaggggtaagtacaatgaactgctttgggcaacaggatggaagttacaatggtggacaaactatgtttgttggaatgaatggacattctttccctgcaaagcatgctgagactgatagcatggttaaaggtggagatattgctaatagtgtcccgtatggctattctgatgtaagtcaaatatatgagcaagatgcatacacgcgaaaggaccctgatactaatgaagggaacaatgtttctttaaagggtataacagattttcagggttccatgcagttccagaatctgggctctagcaatcaatgtggcagcaaagtaacagaatcaaagacaatagtgattgctgatcactgtggagttgaacatgtccatttccctgtgaacagcagttcaagaatgcaagaacctggctcactccaggtgattggccaaccagagggttctcaaacaccagttggttcaatctggactgaggttgacgaaagaggcacatttactcttgacgatgataagaaaataaagacagacaacagtgaccctctagcattgcaaccaaatttagatggtgggatttgtgcagctggtttagatcatgcagccataacagaaggtgatttcatggattttccctatttcagcaacagtgaagatttagatctcctgaatggtgaaaactttttgaatattccacatgagacaaatcaggaggatttagatgatcctgatcatgtgaaaaatctgttgcatcctgatgaggccaacatttgctatgatcagacagatcctgatcatgtgaagcataatgtagatgtttctgggataatctcggttcctacttcattggaagtgccttatcctggtcggtttgttgaatgtgtgttgaacacagaagatcctgaaattccttgcaatgacgatgttatttttcctggcgagtctcctctacaatgctctgctactgattttggccagaactctgagcacaatacctgtttggtttcccctgcaactagccctgcatcaaatgtcgaacattccaatgtgagtgacaaagccctaataaagagggaagatatgacaaatactgaaccttcttcacaaccaatgaatctcagcccacccacctcagaacaaaaagaaggttcaacagcacctagtaaaggctgtgtcccactaggagctgaaccatcagaaggtccttcaactgctggtacactcgtgcattgtcacgttgacactaatgatgcaaactcatgtgcgtcaaatttaccctctatcagtgctgctgtatttgctgaaggatcaccttgccatttagaacagcagaataactttgatgactcactgagttttcctttgcccaattcagttgaagtgcccgatcacatgaattacaactcacatgataatcaaccagaattagaagatggggctcctctacagaactgcattccaccacatgaattgccagatttgggtcttcaagaccccattacaactgttcctgtatcaaatcaagtagaagaatgctctgacaatgaaaatgatgttccaaactactatgatctagaagctttgatacttgatcaagatttaatcccatgggttcaggactctgagcagcatccaggag

SEQ ID NO: 69127 - DNA, 375 bp, Oryza sativa
  Clone ID: PAT_MRT4530_69826C.1
atgaccgtcggcggagtggagctgcgagggcagcggctgctgcggccgcgtggcgcggctgcgagggttgcggctgcggcggcggcgtggagctgctgcgagggcggctgcactgccagggttgcggaggcggtcgtcggcgaaagcctttgcacgcagtcgccgacgaggagagcagcaacggcggagaggcagaccttgagctcgggctcgccggcggtctgcgtggaagggaaggctggggatgtgcttgagcttcgtcgccgcaacgagtcccctgctccaccgccaccgatctcttgctctacgagctcaagaatgccaccgccgcttctctcctgctctgagaggaagaaggatagagagagaaagtga

SEQ ID NO: 69128 - DNA, 965 bp, Oryza sativa
  unsure (1)..(965): unsure at all n locations
  Clone ID: PAT_MRT4530_69827C.1
gatacgctggctagttggttagctgattttggctttaatattgatattattgaagtagcaggtagccgtaataaatataatttacttgccacacttggtgaagggcaaggcggtttattactagccgggcacacggatacggtcccttttgaccaaggaaagtggcaatctgatccttttgttttgacagaaaaagcgggtaaatnnnnnnnnnnnnnnnnnnnnnnnnnnnnnnnnnnnnnnnnnnnnnntgtagaggtattggctagcctcgatctcaaaaaattaaacaaacctctgcgaattttagccactgccgatgaagagacaaccatgttaggtgcaagaacttttgccaagcatacacatattnnnnnnnnnnnnnnnnnnnnnnnnnnnnnnnnnnnnnnnnnnnnnnnnnnnnnnnnnnnnnnacaccttggacaagcggtcagaattaccggcaaaagtggacattctagcgatcccgctaaaggcattaatgcaattgacttaatgcaccaagcaacgggttatttaataaatatgcgtaatcaattacgcgatcgatatcataatgatttattccaagtcccttatccaaccatgaactttggcaacatccacggtggagatgccattaatcgcatctgtgcttgttgcgaattacaatttgatctacgaccgctgcctaatttagtgattgcagatctctatgcaatggtcaatcaaaacctacaaccactgttagaacaatatggcgatttaattgaaatccgccatctacacgacgcgattcccggctacgaatgcccaccatcatctcaagtggtgcaaatcgttgaaaaactgctaggcgaaaaatgcgatgccgtcaattactgtacagaagcccctttcattcaacatttatgtgcctaatcaatctcacaggggccattatccccattaaccacatttgcacg

SEQ ID NO: 69129 - DNA, 774 bp, Oryza sativa
  Clone ID: PAT_MRT4530_69828C.1
atggaagcatcaatggtggagtccgttgagctgcataagcagaaggcattcatggcgaggtttaaggcgaaggttgatgaattgagcgctgctgtggatcacatcctcaacaaggcttctgttggtgctgtttcaagcctaggagcaaccacctacactgacgctcaacaagtgttcgatgaaatgccaagtaacaaagagccaaccataacaactgttcttcacttcacggtgagcgatgtgctctatctggtaaccacagagctatgctccagtgaacagaaggtagcaattcccaccaagtgttcgacgtccacacttgccacctcagccatgcccttgacagaccttgtagaggcagcagatcaagtgtttcaagaaatatcatgtatgcttgtggatagcaaagcacataaacttgatgaaatggatatgaaagttttttattccagtgaggagttcatcactataattcccataactcacattatagatggaattgcaggcaaggtgcaaaatccaactgcagaaatgaaagtgtgcaatgtgtttacaagaaggatcaacaggcagaattccatcaaagcaggctctgtttcttgctttccaaatggtccacaagactgctgtaacccccaccatgatcaacttcccattccctttgccaaatttcaaaacccacgagctaaacatttcccccacattcctgccaggcttcacattgagagcgcattcaagaacactccaactgaagtctctcctgaatttgattga

SEQ ID NO: 69130 - DNA, 477 bp, Oryza sativa
  Clone ID: PAT_MRT4530_69829C.1
atgctcggcgtcgcgatcgcgggccgggtcgtccccgccgccggcggttggttggctgcctcgtcggcgtcggcgtcgtgggggaagtgggtagtggaggggtggtgcgactacgacatccttctcccccgcaagcgggcagcggcgccctgccctcctgcaagtggcggtggtggatttggctcctccctctccctctcggcatccagcgtaacgatggattggcagcttcttagcggcgcgatggcacagcggatccccggcgcagtgaggggcggcgacgccctcccctccactagatcggggggaggggaggtgcggcggcggtggtggcggacgtcatggagggggcgggtcagacggcgtggaggcggtcggccgggcctcgcctccgccagatccagcggcgtggaggcggctgcggcccggcgggggcaggaggggcggcgggccggaccttgcctccgccagatctag

SEQ ID NO: 69131 - DNA, 474 bp, Oryza sativa
  unsure (1)..(474): unsure at all n locations
  Clone ID: PAT_MRT4530_6982C.1
tgaacccccaactcgattacacgccccatcaggcttctatattatcgactctcactctcattaggggagaagcctcgggttacacgccctcgccagcgggtaccccgcgctctccggaatttcccgcggtcgaccccacacgccgctctccggtgtttcttttcactgaatctttcttctccacaagcacacctttccacatgtctcacgtggtggtcaccacggaatctccggggatcttctcctggtggtggtaattcttgccttgccacgtgctatatgccctagatagaatagtacccacacacttataatggcacatatttaggaataccactaccacatattggtttgggtgtggtcctttgttgtgctcatatttgaaagtgaaaccaatcttgtatagatgcccncttgatgaggcctataatgataagtgatgattctttctgctaaaaaaaaaaaaaaaaaaaa

SEQ ID NO: 69132 - DNA, 639 bp, Oryza sativa
  Clone ID: PAT_MRT4530_69830C.1
ctagcgccggcgcggggataaggcgagatgcacagtgggtggctggcgtgatgtggtcgtggcattgagcatgatgcggtgcatgcggccgagcggcgcgtgtgagtcgagcaacggcacaacgagcaggagagagggtgcgctcgaggcggaggatgagatgaggaggaaagaagaaggcgaaggcatggcagaggcagaggtggaggtagcgaaccggaggctatctagttgtgtcgtcgacttggcggcatgaaacaccaacacgtagtcgacgacggggtagtcttcctcctcgaatacatactcggtgagatcaaagatagcgctagatccctcttgttggcagaagttgacgcacatgggataatgagacgaccaccacactgggcaaagaccagatgtgtagttgttctcaacaaatcgcagaggtagtgggtgaatctctacgccgctggttgaagaccagttgtagtcgtacctctgttgacggctgttaaatgctaattctatgccgccaatactctcaggctcaacgctaccaccgatgtcattcatgctctcgctgaagacctcttcatggcgcccacatacatctacactatcaccaccatcacaatcatgcatggcagaacatga

SEQ ID NO: 69133 - DNA, 171 bp, Oryza sativa
  Clone ID: PAT_MRT4530_69831C.1
atggcgccgccggagttggaggcgccgaggcagccggagcaggagtggtcgcggtcggagccgacggcaagaggggcgcacgaagggcagggcggcatccactatcatccgggggcatgcctttacccggataatagccatcaccctcggaaagcgtcaccgcatccttaa

SEQ ID NO: 69134 - DNA, 507 bp, Oryza sativa
  Clone ID: PAT_MRT4530_69832C.1
aataaagcgtaagaaaaataaaaggagaaaaaggaatagagaaattggggaagagagctacctcgaatcgaagctgcgatctccacctggtgaaataggagaattgatgaattgctgagatttggtgattagagggacctttgctgctgaggcattgtggtacacttaaagcaagggtgtgtaaatggcttctttcatttgatatcatttacttattttggtatgttcctgatacctatgtttggggttaatttctctcttttttgtcttctttcttttttctttattcttcttttattactttttttattcatctcttttacttttgtttttatttcttttattattcttttatctttttctattctctattaattattttattatcttatcttattttctttcttttcttttcttttttttttcttttaatttttttattttttttttttttttctttcttatttttttatttatttttttttcttattcttttttttatttttt

SEQ ID NO: 69135 - DNA, 210 bp, Oryza sativa
  Clone ID: PAT_MRT4530_69833C.1
cttaaatgtaaacgtcctaaaactcaaatataaggtcaacacttagcacccccgcccataagtcctccatcaggccagggcaccatctcccaagaagaccaaggcccgggatcacggtgaaggggctgaccccacaccaaaaaaaaggcggggccatcgaccgcagaaaaaaggcgccggagcaccacccaaggcccacaccatggggga

SEQ ID NO: 69136 - DNA, 519 bp, Oryza sativa
  Clone ID: PAT_MRT4530_69834C.1
gctatcacccctgctcgctcccaatccccaccggccaccacccctatgtggctatgttccccacaccgcgaaccctaacgaaacaaaggaggaggcggccatcacttggccctgcaccggcgcggcggcggcggtgacgacggactcctcccctcctctcttcctgttcccgcggtgggattcctgcgcatctgatcggcgtgcatttggcccacgctctagccgctagcattgcgactccgccacgcccgcgaaggcacggccctgttgttgacgtcctctcttccgacggtatcaccacttcaccactctgacggtggtcctgccttgtgccaccattgcaaggggctctcacaatcagagaggaaattgagctgatgatggagcagagaaaagaatccaagagatgaactggcaacgacaagattgtggtggtctaatctgtagagattcacactgatcatctaaaaacctcaacaaccaattcacagcgttagaatgctgaacagggacaccact

SEQ ID NO: 69137 - DNA, 829 bp, Oryza sativa
  Clone ID: PAT_MRT4530_69835C.1
caccagtcatattagtattatcggtagtaagggacttgcctcttaagttggtgagcacgttcttccatttttttttaaaaggcttataatgcatcagctgttgatgtgcatatataccaagaaattatttattattaagatcattacatgctttattgttcacggacgtcgatcccagagtcacaaacatcgatgaaatgtactgcggcagcgacatagcatgcagttcaacacgactgtgtacgagtgagtggtcgtctacttggccgcggcgtcgagggtgaggaacgggcgctcgccgttgaagttgcccggggggtcgtagttgcaggtgatgaacacgccgcggttcgccgcgcacacgacgcgggcgcagccgatgcgcaccgacttgcgccacaccacctgggtgtagtggccgcacaccttgcccgggtcgcacgtgttggtgtcgtagtggtagttcttcttctcgcccacccacgacgccaccgcgtcggcggcgctccaggcgcgccccgccgagccccagaagatgttctcgccgtacggcccgccggagtgctgcagccggcagtcgccggcgcgcttggccgcgtagctctgcgcgaagctggcgaccttggggtcccagctcaccgggccgacgccgtccgcgcgccgcgcgctgttgtgcaggttgacgtagtcctgcggcgtgttctgcgccgaggtggtggtggtggccgccatggccagcgagatggccacggcgagcacggcggcgaggctgaccttggaaggtgccattttctgtctcgtcgggcggacgggtgggcggtcgcgtggg

SEQ ID NO: 69138 - DNA, 580 bp, Oryza sativa
  Clone ID: PAT_MRT4530_69836C.1
tgtcatttgtaatgtccctgcttggtggttattccatttcaataaatgattacagaaaaaatatatattgataaagtatataccatttgttgatcccattttattgtatagctttagaacgaggtggctgaaccgaccttctgattacttcctacagatgaagacggttttacggagttgctcctctcccagtctcccaccttcatcactatcatgttcataccaatcctttccctgatatacaatctcatttgtctgccatttcccctgtgatctagggcttcctgatttgaattttcaaggaaagcattgacattaggtggttaatactgtccatcttaaaccctctaatgtgtcacgcagagtctgcatttagagtgtgttcggttgctgccctgagaatcgcgcctgactcaggcatcaatctcaggcgttcgattttggtcgcctgcggttggatcgacctgcctaagtgagagcgctcaagcgagggcagcaaccaaacagcctcttagaaaattatgcttcatatgttcttagttcaatctatgtttttactttgtcttgcatttttacaaaa

SEQ ID NO: 69139 - DNA, 228 bp, Oryza sativa
  Clone ID: PAT_MRT4530_69837C.1
atggccccttcttcacgtttgccttgtcgcagcacggcggccgccccatctctccctctccccctctcagctcctaccacggaggcaagcgaagcgaagccatgcgacggaggcgtgagtccagtaacaacaatcaccgtcagcgtccccgtacaggcgcagctccctggtgtcctcgtctccgaggtcatccctggctccgccgtcaccggccagccgcgtcgctga

SEQ ID NO: 69140 - DNA, 249 bp, Oryza sativa
  Clone ID: PAT_MRT4530_69838C.1
atgtccccaaactccagtagagctcacccgcacctcgcggctggagagactcgcggcgagaagcggcagcctccggcggggagctgctccccaaatcgcgcggcggccggcggcgagagatggagggagtgtgttttgcgtgtgaaaagcttctggcggaagctatacgatggttgggccttagtgcggggccgaattagtaggccggaacgggactccggcccacgtgcagcgtgcggcccgttctag

SEQ ID NO: 69141 - DNA, 600 bp, Oryza sativa
  Clone ID: PAT_MRT4530_69839C.1
agttagcagctgcattgattcattactggggtcacgtcagtggctgtggattcaaatcagcaataacagcttacggttctggattgccagctactcagctactccctccgtttcatattactttgcattagccatattcatatagatgttaatgaatctagacacatatgtatgcctagattcattagcatctatatgaatgtagccaatgctacaaagtcttatattgtgaaacggatgaagtatttcataccttaaggtccataacaacctgcaagatggaatcatgaaacttacaggcaaaggatattctgcagaccagtcttgctatccatcattactgattaagatagttggaaagcacctcccaacaacctggttagccccttcaaggcctcccggaggatgcgttcgtccccgggaggattgaagcaagctcgcacggtccccgcggctcccctcctactccgcccctcgaacccaacaacgaagcccctcctcggaaccggagccctcctccgcgacagcgcggcgggagctcgcgagtttgggaggaggagtacagcggaggaagcagcggcggccatggataacgcctcg

SEQ ID NO: 69142 - DNA, 834 bp, Oryza sativa
  Clone ID: PAT_MRT4530_6983C.1
atgacaaaactattgttgtggtcggaaggagtgccgccaccgtcatgttggagatccaacaaagcggctggtcctactggcatcgtccatggtgatggacctccacatggaaggcgaggccatccgatggccaacacaacacatgcgcttcacgtcatagccgtcgcgcaggtcggcagagcaaatagagagaaaaatagccgcggaagtacgattttgcggctcgcatatagctccgacatcgcggtggccacaacatttccggcaccggtgtggtcctcatgttgcagcaacgacaagcatgggaacgatgcggagccacaggcccagtgtttgagagggagacgatcagacaaagatagagatagagatgtcgagaccgagatagaaacgacgagttgggtaaatgatgaggacatcccagctacacttgacgtaaacaagggtgatggtttacgtcataagtcacatgaagaaaatgaagatgacgtaaaccaagttgatggattacgtctcagcaagaacgatccagcatatcatggtcaattacgtgcaaccgtgctaggaagatataacaagagttttacgcccgaggacatcatcactatgccaagaaggatgggttacgttgaggacgacaagggttacgtcaaggaggaatcagcccatgcccaacgagcagccgtctacgccaacaagaagatgatttacactgcaaaggctcaatttccaaggcttgtgcgacccatccagtcatgggatggctgcatggcatacatggtcagagtccaggaggcttcggatcgttatgaatttggaaattccaaagattga

SEQ ID NO: 69143 - DNA, 156 bp, Oryza sativa
  unsure (1)..(156): unsure at all n locations
  Clone ID: PAT_MRT4530_69840C.1
attntgctgtcaatcaatatctacatattaaggtttgaagttgaagctcaactccaccaaaggtcatgcattgaaaaaaattaactctttcgtttgcatttcttcatgtgcacactttatcttttctctaattcttatctcctttttctccaacaa

SEQ ID NO: 69144 - DNA, 515 bp, Oryza sativa
  Clone ID: PAT_MRT4530_69841C.1
gccgctgcttcctccgctgtactcctcctcccaaactcgcgagctcccgccgcgctgtcgcggaggagggctccggttccgaggaggggcttcgttgttgggttcgaggggcggagtaggaggggagccgcggggaccgtgcgagcttgcttcaatcctcccggggacgaacgcatcctccgggaggccttgaagttgcattcatgggtggtgtgtttgctggcctattgaggcttgacctgaatgaggatcctctcaaggaatggatcactaggacggtagaggcttctggagttgctgaggatagccgaaccgatgaatcaagtgagggatctcaaaatgatgcgccccaacaaattgagattgagtgaggtgcattagttgactttgccatcttttacggtcttgtaatttataccgaatatttgtaatatttatgtaataaaaatgcttctcccagttttgaattttctttgtctttgtgtttgaacttgaagtaaaaaaaatcggtctgt

SEQ ID NO: 69145 - DNA, 336 bp, Oryza sativa
  Clone ID: PAT_MRT4530_69842C.1
ttgatggcttccggctcgtatgttgtggtggaattgtgaccggataacaatttcacaccaggaaacagctatgaccatggattacgccaagctctaatacgactcactatagggaaagctggtacgcctgcaggtaccggtccggaattcccgggtcgacccacgcgtgccggtttataatgcggcagaatcctcttaggtgcggcttgcggataaagaataactgaaatgaaataaatgtgcaaccacattgttttgctggctatgtactgtccagtctttcgactaatgatgataaaccctctctttatcccttaaaaaaaaaaaaaaaaaaaa

SEQ ID NO: 69146 - DNA, 952 bp, Oryza sativa
  Clone ID: PAT_MRT4530_69843C.1
gttgttcttcaacacacctttgttacagatgctaatagtattgcggagtcacactatggcttctctgtggttgatgctaattcattggagtttcttttcaataatgcgcctgaggcagcaaaatggctgaaggataactcactattatcttttgaagaaaagtatcactccgacagaagttcatggttggcactatatcctgtcaatttcttgttctctgggagcttaaagtttccttcagaaaatgaagagattagaaaacattaccagcatttcccccagatggttattcagaagacctcgagtaataatgggcaccggaggatgcatcttgagctttcacttggttcattatcggagatttggacctctgtgcttaatattactggaccactatccaattggtccttttctgatatgacactttcagatcctcaaagttttagtggcgggccaccatcatatatatgcagacttagtggagaaagccacgagaattggtctttctggttggaggcgaactcttctgaacctttgagaatcgatgtagctgtacttgaccagtatctccttgatcgtacaaggaaactgaagagtctcttcccaagttgggcagacattacagccttcacaacatttttctcaacttatcacttataaacttttgtactgcgatgtggaaagattgtaaatatgtttatttaggaaaaacaaaaattaaaactgccattttatattgagttatgtggttcttttctaccccaattggcgtgtttgtaatatatttgtaacaatatatgctttaagcctgtagaggtggcttctgttcatttagattttgcaacacggtcgtccgacatcaaattgtaaatttcttccagatatatgcattaccaaaacagtaaaatttactatcgcaaaaaaaaaaaaaaaaaaaaaaaaaattattaaa

SEQ ID NO: 69147 - DNA, 618 bp, Oryza sativa
  Clone ID: PAT_MRT4530_69844C.1
ttttttttttttttttgagttcacatgataattccatttttcagtgaaaggttatggaggtgaattccccacatttcgtcagcattcaaagacaaaactttttccaacaaggggaagtcatcatcaagtagttagcagctgcattgattcattacttgttgtcacgtcagtggctttggattcaaatcagcaataacagcttacggttctggattgccagctactcagctactccctccgtttcatattactttgcattagccatattcatatagatgttaatgaatctagacacatatgtatgcctagattcattagcatctatatgaatgtagccaatgctacaaagtcttatattgtgaaacggatgaagtatttcataccttaaggtccataacaacctgcaagatggaatcatgaaacttacaggcaaaggatattctgcagaccagtcttgctatccatcattactgattaagatagttggaaagcacctcccaacaacctgcttagcccctcactcaatctcaatttgttggggcgcatcattttgagatccctcacttgattcatcggttcggccggacgcgtgggcggacgcgtgggcggacgcgtggg

SEQ ID NO: 69148 - DNA, 829 bp, Oryza sativa
  Clone ID: PAT_MRT4530_69845C.1
ataagggctaagactttcttttgcacttgaattaacattttccatagtaacctattagtggtgcttttacccactaaggaaaatacagcttaaaaaaatcaatgacagaccgattttttttacttcaagtttcaacacaaagacaaagaaaattcaaaactgggagaagcatttttattacataaatattacaaatattcggtataaattacaagaccgtaaaagatggcaaagtcaactaatgtgaaacggatgaagtatttcataccttaaggtccataactacctgctagatggaatcatgaaacttacaggcaaaggatattctgcagaccagtcttgctatacatatttactgattaagatagttggaaagcacctcccaacaacctgcttagcacctcactcaatctcaatttgttggggcgcatcattttgagatccctcacttgattcatcggttcggctatcctcagcaactccagaagcctctaccgtcctagtgatccattccttgagaggatcctcattcaggtcaagcctcaataggccagcaaacacaccacccatgaatgcaactggctccttcaaggcctcccggaggatgcgttcgtccccgggaggattgaagcaagctcgcacggtccccgcggctcccctcctactccgcccctcgaacccaacaacgaagcccctcctcggaaccggagccctcctccgcgacagcgcggcgggagctcgcgagtttgggaggaggagtacagcggaggaagcagcggcggccatgcgtgccgcctcgtgccgtattcctgctagcccgggggatcca

SEQ ID NO: 69149 - DNA, 401 bp, Oryza sativa
  Clone ID: PAT_MRT4530_69846C.1
tttaaacgcaaaagaagcttcataatatctcaacaagttgcatagcacataaagcaatgctgggaacaaaattattttgctcctgtggtcaaaatcctaaggaaaagtattcactatatcgaccaaaacaacaattgactggtcgaataagatgcaagtactgatcaccgtatgaatatattgtttacataaatgacctagtaagcaagctaatgatcaagcattaccattctttttttctcttgtgagcaactgagcaataggacttcaacattgatctaggatgaacccttctcaggcttgcatcagcacaagctggggaagatccaaactgatggtctgatgagtgaactgtttgttcaggggtggtgagcctggatagtcagcattgcagacatcac

SEQ ID NO: 69150 - DNA, 1070 bp, Oryza sativa
  Clone ID: PAT_MRT4530_69847C.1
acacacagctcactgaccagcagctcagcctcatcactcacgagcaatcagctagctagcttagcttgatcactacacctccatagatcttagcttaattagcttagattatacaagtggtcaagtcaagaactgtaccaatggcatcatcaatggcgcctgcagcagcaatggcgatcctcctcctggcgcttctcatgcccgccacgctgtgctcccgctcagggccgccctcgtccaagcacggccacggcggccacgccaagcgcgcgccgccgccggcgtcgcccgtggtgccggtggcgcctcaggccgcggcgctggtgcgcgccacctgcaactccaccgcctactacgacgtgtgcgtgtcggcgctcgccgccgacccgtcgagcaccacggccgacgtgcgcgggctctccgccatcgccgtgtccgtggccgcggcgaacgcgtccggcgcggcgcaggcggcggcggcgctggccaacggcacggcgcccctcgccgccgctgccgccggcgacggcaccgtgcaggcgctgctccgcgcgtgcgccggcaagtacggcgacgcgcgcgacgcgctggcggcggcgaaggagtcgatggggcagcaggactacgacctggcgacggtgcacgtgagcgccggcgccgaatacccgcaggtgtgcaaggcgctgttccggcggcagaggcccggggcgtacccggcggagctggcggcgagggaggaggcgctcaacaagctctgctccgtcgcgctcgacatcatcgccctcctcacctcctctcctgcatccaacaacaacaacagctagagctagatacgtataaatacggtataatactactagtactgcatgcgtacgtgctaaatacgtgtaatgacatgtatttggtagtaactagttaatcctgtgtggtgctgagtgaggatatatatgttcttcttgtattactaagtatagatgagttaattactgccgtgctgaagcttagcatgctgcatcttgtacttcactttggctccagtataattagtcactattcatttttgttgaatt

SEQ ID NO: 69151 - DNA, 577 bp, Oryza sativa
  Clone ID: PAT_MRT4530_69848C.1
tcaggagacgaggccggcgccgttttctttttccctacgcagccgtcgccgtgccttcctcgtcctccaccggcgaaccgaccttcatgaaccgacgtccaccgcctataaatagccggcaaacccctgctcttttccccatccgagccttgagctcttcttcttctctctctcctaagtccggccgacgccgccatcggtcgatctcctcctctatagttcccctagctaaatccttgcaccactgactccccctccctccggcgaacccatttttcccgtttttcccttctcccccaccccatagcaaccaccacaaccacctcctttgcagccgaagagaagctcttctacttgccgttccggccaactcctcatctccctctgccggaaaccatcctccccagatgcgcgtcgtccgggaacacaagttgccgccgacgtcgctgatccccggccactggagccccagcgccccttctctctctctgttgttacacgggaagaaggagaggaggaagatgacgggaggaagaagaagaagaaagaagagaaaaagaaaaagaaagactgacat

SEQ ID NO: 69152 - DNA, 377 bp, Oryza sativa
  Clone ID: PAT_MRT4530_69849C.1
gtctactgcagcaactaataaacgatggatcgggcgaaccttgccgagcccgtggtggggctactggcggcggtggccgcaacgctgccggcgccgtcatggcatggtcttcgacctatatcatgcccggcgaccccaaccaccgatactgcggcggatgagatgaccaagaggtgctgatgaaccacgaggagtacctcgagaagaaatctctgtacgccatcaatgccgactgcgacatcggaggtaagaccatcgacgcaagcctttacacggccaacgaggccaatgtgacgtctactgttgaccacaatgggactctcaacgacaccaccttcaccaccatcgaggctgcgctcgagaaggtccccctaggg

SEQ ID NO: 69153 - DNA, 537 bp, Oryza sativa
  Clone ID: PAT_MRT4530_6984C.1
atggaccgcttttactactaccaccgcctgcaaaggcttttcccatcccatttgtcccgagttaaaaagttactcgtctgggtgcgcgacggctattccatttggaaagctcgcgccgctcttcaccattacaatgccaatcatccgggagcggagtatgatctcgtcaagcctttgatggccgcctgcgtcattttcagaggtaaactgtggcatcatgtcagcttcttggctcacaggagggatcagctggttgcaccacccgttgaatacttcttcgcagagctacgcgatggctgctccgacgacgactccatcgtcgaagcttgcaccatgatcgaaaatccacagagctgctccggaaacaagtgttcgttttgccctgaacaatatcaaattgcgcacccgagcgagcaggagcttttatgtggaaaagaagaacatgccaaggactttatcagactgatgaatatgtccccgatgcccttcacatgctccaccgaaacgcctgagattggaattgtgattgaacaatag

SEQ ID NO: 69154 - DNA, 400 bp, Oryza sativa
  Clone ID: PAT_MRT4530_69850C.1
cggacgcgtgggcggacgcgtgggcggacgcgtgggcggacgcgtgggcggacgcgtgggcaaatgccactgtgcatactgttttaagccttctcaggtgaagcttctgggctgccaaaaaaaaaaaatataaataaaaaaaaaaaaaatataataataaaataaataaattaaaataaataaatttatataaaaattataatttatataataaaataataataatatatattaagggggtggcctctctaaagatcccaagttatcatccccttgcattcaaataatatatttttttatagggtcaccaaaattaaatttactggcccggttttaaaaacattgttactgaaaaacccctgttttttccaaattaaatcacttttaataaattcctttt

SEQ ID NO: 69155 - DNA, 542 bp, Oryza sativa
  Clone ID: PAT_MRT4530_69851C.1
ctagaatatgacggtggtttaattgattattgccgtatctcagcaccccgatcctagggttgaccgccccgacaaacagatcgggcgcaagaccattcaaggtactaaccttgacataattctattgtataggtaactcatgacttgctgtccatcttcaagccattctctatagtgctaccttctctgactcgacggaatactctggggcctaggtaattggatccttacatggaccttccatgacgtgtactaacatctggagagccatactcttcatccctgtgcgggcctctccaaccaagagaaaggagatcatcttcaatcttaggccaagtagtcccacactctgtcctaaaaaaagatcacgttacgccggttctaacaccacagatgcgtcaaaagcacgaatcagtcagcagtgcggtcaacactgaatgcacccttgatggtatgcttcacagagagctcttgccggaataacacagcagctagttacacactctttatatccagctgacacacagggcgggcaacacagc

SEQ ID NO: 69156 - DNA, 1452 bp, Oryza sativa
  Clone ID: PAT_MRT4530_69852C.1
atggcggcgagcgggtggtggtgcgggctgtcgctgtgcgccaagccgaagcaggtggcgagcgagagcgtccacggcgcgcagctcgcgctgcagcggctcaccgcggccaggcgctgcggcggcggcggggacgccgcttgcgtcgacgtcgaggccggcaagccgtgcaagtgcggcgaggaacatacggaggccgcggctgccgggagggtcgcggctgtggaggccgttcaccatggcaagccgaccagctccttcgcccactccgtcatcaacatggtcggaatgctcataggacttgggcagctgtcgactccgtacgcgctggagaacggcgggtgggcgtccgtgttcctcctcgtcggcctcggcgtgatgtgcgcgtacacggcgcacctcatcggcaagtgccttgacgacgacccggcctccaagacgtaccaggacatcggcgagcgcgcgttcggcggcaagggccgcgtggtcgcctccgccttcatctacctcgagatcttcttcgcgctcgtctcctacaccatctccctcagcgacaacctcccgctcgtcttcgccggcgccgcctcccacctccacctgccgtgggtgcgcctcaccgccacgcagctgctcaccgtcgccgccgtgctggtggcgctccccagcctgtggctcagggacctgtcgaccatctccttcctgtccttcgccggcatcgtcatgtcgctgctcatcttcggcaccgtcgtctgcgcggcggcgttcggcggcgtcggcctcggggggtacatcccggcgctgcggctggagcggatcccggcggtgtccgggctgtacatgttcagctacgcggggcacatcgtgttccccaacatccacgccgccatgaaggacccctcggcgttcaccagggtgtccgtcgcgagcttcgccgtggtcaccgcgctgtacacggcgctggcgttcgtcggcgcgagcatgttcggcccgagcgtcagctcccagatcacgctcagcatgccgccggggctcgccgtcaccaggatcgcgctctgggcgaccgtgctcacgccggtcaccaagtacgcgctcgagttcgcgcccttcgccatccagctcgagcgccacctgccggcggccatgtcgccgcgcgcgcgcacgctcgtccgcggcggcgtcggctcggcggcgctgctgctcatcctggcgctggcgctctccgtgccgtacttccagtacgtgctcagcctcaccgggtcgctcgtcagcgtggccatctcgatcatcttcccctgcgcgttctacctcaagatccggtgggggcgggtgtcgcggcccgccgtcgcgctcaacgcggcgatgatcgccgccggcgtcgtcctcgccgtggtcgggacggcctcgtcggcgacgtcgttggtgcagagcatacagaaggggcatgcagcgtaa

SEQ ID NO: 69157 - DNA, 400 bp, Oryza sativa
  unsure (1)..(400): unsure at all n locations
  Clone ID: PAT_MRT4530_69853C.1
ntntnttnnnnanannnctgncacttnnnnttnnnncnangtntctnnntttncnnnnacttnctgtnnnccnnagnctccatacancacnnnccgatgnnnnnnngacggnnngnncnactttnaggtagcccantgngtcngncanngagtccaggtcncttcttantnccnttcntnnntgttcntnntcngngnaatncacatacgactttgngtntncantgganaantngatancaaccngcgacgagngtnncnngtttntccnnanncnaanttntnganatttttantnngcanntntncngntntctacantgntngnnnntnatgtttncattggctggtntcannatgtntngnttntgantnntatttnggntgnacntngattnnn

SEQ ID NO: 69158 - DNA, 1509 bp, Oryza sativa
  Clone ID: PAT_MRT4530_69854C.1
atggcggccttgactccttaccatgcatcaccgcagccatcatgtgatagattgaggactgctggatccgactgcccctaccaccacgacgctggatttgctgacttggccaccaggctgaaggggttgcgacagcctcctttcgatgtggccgaggccatgcccaatggcaacgggatgagaaggcattgtggagaggcgggccgttttccatcgcttgctagctcgaagaggaggggagacagcgaatcattagagagtacggatggtctggatgcaacaacggcgaacctgggttcgcctttcatcacaaacgatactgacccctcggatgacatcgccaaccgcttcggcgcggaggtgcccaacctcagcgccaagaaggaagaattgattgaggaagacgtggaggggggcgagggagtaaatgatatggcggatgtggaggtcagggaagagaatgacccggtaagggaggaagtacatgtagaggagaatgtgccgttaagggaagaagtacatgcagaggacaatgtgccgttaagggaggaagtcaatgtggaggagaatgtgccggtaagagaggaaggagatgttgaggatggtcgggaggtaggagatgatgtggagttgcctgaggaagaagcgaatgctaagaatgtaagtatgggcctaagggagttggctaggctgaaattctatacccgagaggagtgtgaggaggctatgatacgcagtggattgaacccaggctggttggagtatgatacagaggatgaattggatgagtccgcttccgactccgatgatgatcgtccagtgcgtaagatgtcagagcatgaaaggactgtgtttgcgaaactggtgggtagaaacccggaaataactcaattcgaggatcttaccaggatggagcactttccggggttggaggatttctacgaggagaagcaccgggccccacagattgccagcggagagcgcttgaagacccttcgagtcagaggtcacacggcgcacatactgttcgacgaccggtacgtcccgtacctacggcgggcgaagctcttggcgttcgtgaccatggcgcagcgaccggtgcctctgtacaacgccgctgctctgacggccctagtggaccggtggcgtccagagacacacaccttccacctaccgtgcggggagctgacggtcactctggaggacgtcgccatgatcctgggtcttcctatccggggtgtgacggagctcgtggctcctcaccgggagaccgcgcaggcccccctttgccggttcggccgggggcttagggaggagggcggacacctcaccctcgggcccgacgtccccgaaggtgccaggccacgtgggcgattgcgtctgcctcaagcctctggtcatgatactcccggtcccatatcaccgacagtagcccccggcgttatgccagagcaatttcccttccccagggaagcggtcaggtgtgacgccacccctaaagcctggtga

SEQ ID NO: 69159 - DNA, 2087 bp, Oryza sativa
  unsure (1)..(2087): unsure at all n locations
  Clone ID: PAT_MRT4530_69855C.1
atggcggatgtggaggtcagggaggaagttaatgtggaggagaatgtgccggtaagagaggaaggagatgttgaggatggtcgggaggtaggagatgatgtggagttgcctgaggaagaagcgaatgctaagaatgtaagtatgggcctaagggagttggctaggctgaaattctatacccgagaggagtgtgaggaggctatgatacgcagtggattgaaccccggctggttggagtatgatacagaggatgaattggatgagtccgcttccgactccgatgatgatcgtgccagtgcaaacccggaaataacacaattcgaggatcttaccagatctgggctagcaattgctgatggggatccacaatatgacggtgccttcgaaccaatgtgtgatgaaccaaggaaggggttggagtttcgatcgatggatgatctgaaaatatggctacagagttattctatccgtgtccaccggccgtatcatgtgaaggaatctaacgcgtcagtaaagtatactgtggcttgtctcgatcgccattgcaaatggcagattaatgcaaggaagagtggaggagataggtggcgggtgactagggtgggcgaagaccacacatgctgtagtgcggaagtaaccggcaagcatttgcaacttacttcaaggtttattggaaacaggttacaggcatttgtgcgagctgaaccaactttatctccagcagcgattgtcgaggcagttgagcaaatatggcactatcggcctacgtatggcaaagcatggcgtgctaagcaagttgctatgaaggtcatttggggagattgggacgaggcgtatgttcgcttgcctacactgatgcgtgccatcaaagcaaagaaccctaccatgcatttccgtgttgaagctcatcccgagaagtccaggatggtggatagagtacagaggcgagtatttggacgtgcatattggatatttggccagtccatagaagcattcaagcacttgaggccggtgctagcaattgatggcactttcttaaccggtaaataccaaggtacattgctcacggcaataggggtcgacgccgggttacatcttgttcccttggcgtttgctctggtagagaaggagaatacatccaactgggagtggttcatcaacatgttgagaaacaagttgatcggtcctaatagagaagtgtgtataatttctgatagacaccctggcattttgaactccatcatccacatcatgcctcatcacctaaccattcaccacaggtggtgcatgaggcacttctgtgctaacttctacacagctggagctacgactgatcagatgaaagatcttgagcgcatatgtcaaataaatgagaaagcattgttcctagatgagataaaacgcctcatgggtgtggtcggagagaggccaaagaagtggctagaagaccatatgccacttaaggtcaaatgggcaagagcatttgataccaacgggcgtcgtcatagcatcatgactagtaatatggccgagagtttcaataatgtattgagaggcattcggaaactgccggttacagctattgtggcatacacattttcgaagtgcaatagttggtttgtcgatagacacaaagaggcaactgtagatatcctgtgtggaaagaagtggcccacaaaagttaaggacatgttggaggagcagcaaagacgaaccttggaaagagatgaaactacgagactacggcagcgatgtcggaagttggcagcaaggctcggctacaggtcgactgatgtggtcgaacatgctcatgcccaccaagagggggatgaagaaggggaggtgggtgacgaggagggcgagcaagacaaagaggcggaggaaggagatgaggaggaagaaggggatgaggacagagaagaggaggcggatgagctcggtccctcgcagctagaggacgcaccanagtcgtcacagccggatatctcacagcccggcccgtctcgaccacgacgccggcgggctccttcgcgggactggaggtacacccccgacgtgcctcgtcctcgcactagaggtaggaggag

SEQ ID NO: 69160 - DNA, 523 bp, Oryza sativa
  Clone ID: PAT_MRT4530_69856C.1
cactcccaacaagtccccaaaggaagcaacacccgctaacgaccacaaccggccctccgaaaggatggactctagaaccactgagaccaaagagagcgcagagtcaaacaccctatagttatgttccttccatagctgccaagagaccaggaggaccagggagtcaaagctggcacagagatgaccaggtaaacaagccttagaagatggccaccggtactggagctagctaccattgggggagggcagtccagctaggaggtgatagcacccataactaaacctgatgagtgaacacgcagtaaaggaggatgtggttcatcgtcttaagctcttgagcgcaaaaggggcaggccgagtggctatcgatgccacacttctggaggagatcagccgtccaacagcgctgctgaaatgcaaaccaaagaaagaatttgcatttagtagggcccttcgcgtgccagagaagatcggcaccagcaaagaagtgctagccaaggaagaacgcctgatacggagttaa

SEQ ID NO: 69161 - DNA, 3426 bp, Oryza sativa
  unsure (1)..(3426): unsure at all n locations
  Clone ID: PAT_MRT4530_69857C.1
atgacagttagacaattagtgttttttgcgaagcctacctttgaggagttaatgtctcgcatcaagcatgaattggattggaatgatgagtcggttggtatgcaagggagatacgatgtgggcggcggtgtcatgtcacataaatttatgttagacttgaatggagagatcgaatggcaaacatatatagatatagtattggggtcacatttcaaatctcttgaggtgtttgcatggaagaaagatggtaggatagggaagaaagaacttatagaatcacccattagctgtcacgaactgtcggagaggtgtagtaggaaggaagaattgattgaggaagacgtggaggggggcgagggagtaaatgatatggcggatgtggaggtcagggaagagaatgacccggtaagggaggaagtacatgcagaggagaatgtgccgttaagggaagaagtacatgcagaggacaatgtgccgttaagggaggaagttaatgtggaggagaatgtgccggtaagagaggaaggagatgttgaggatggtcgggaggtaggagatgatgtggagttgcctgaggaagaagcgaatggtaagaatgtaagtatgggcctaagggagttggctaggctgaaattctatacccgagaggagtgtgaggaggctatgatacgcagtggattgaacccaggctggttggagtatgatacagaggatgaattggatgagtccgcttccgactccgatgatgatcgtccagtgcgtaagatgtcagagcatgaaaggactgtgtttgcgaaactggtgggtagaaaccccgaaataacacaattcgaggatcttaccagatctgggctagcaattgctgatggggatccacaatatgacggngcctttcgaccaatgtgtgatgaaccaaagaaggggttggagtttcgatcgatggatgatctgaaaatatggctacagagttattctatccgtgtccaccggccgtaccatgtgaaggaatctaatgcgtcaattaatgcaaggaagagtggaggagataggtggcgggtgactagggtgggcgaagaccacacatgctgtagtgcggaagtaaccggcaagcatttgcaacttacttcaaggtttattggaaacaggttacaggcatttgtgcgagctgaaccaactttatctccagcagcgattgtcgaggcagttgagcaaatatggcactatcggcctacgtatggcaaagcatggcgtgctaagcaagttgctatgaaggtcatttggggagattgggacgaggcgtatgttcgcttgcctacactgatgcgtgccatcaaagcaaagaaccctaccatgcatttccgtgttgaggctcatcccgagaagtccaggatggtggatggagtacagaggcgagtatttggacgtgcatattggatatttggccagtccatagaagcattcaagcacttgaggccggtgctagcaattgatggcactttcttaaccggtaaataccaaggtacattgctcacggcaataggggtcgacgccgggttacatcttgttcccttagcgtttgctctggtagagaaggagaatacatccaactgggagtggatggagcactttccggggttggaggatttctacgaggagaagcaccgggccccacagattgccagcggagagcgcttgaagacccttcgagtcagaggtcacacggcgcacatactgttcgacgactggtacgtcccgtacctacggcgggcgaagctcttggcgttcgtgaccatggcgcagcgaccggtgcctctgtacaacgccgctgctctgacggccctagtggaccggtggcgtccagagacacacaccttccacctaccgtgcggggagctgacggtcactctggaggacgtcaccatgatcctgggtcttcctatccggggtcaggcggtcacaggtgacacagcgtcggggaactggagggagagggtcgaggagtaccttggtctggagcctccagtggcacctgatggtcagaggcagacgaagacatcaggggttcctttgagttggttgcgagccaacttcggtcagtgtcccgctgaggcagacgaggctacagtacagcgatactgcagggcgtacgtgctgtacatcttcggcagtattctgttccctgactctggtggagacatggcttcttggatgtggctgccgttgctcgcggactgggatgaggcgggtaccttcagctgggggtcggctgccctagcctggttgtatcggcaactctgtgatgcttgccgaaggcaaggcggggacgcgaacctagcaggctgtgtttggttgctacaggtttggatgtggatgaggcttccagttggtcggcccatgtggaggacccatcaggcttggccgcaccaggatgcagaccgacgtcccactgtagctcacctgtgggaatcggtcccatctccagtagtaggccgcaggaatttggcgtactaccactacacaaacgagatggactacctacagccagaacatgtggtgtggatgccatatcaggcacaggaagtgctcgagctagaactaaatcccatgtgccatatagaggatgcgttgaagaccctacggtgcccactgatctgcttctatgcagtggagttccagatgtgccaccgcgtgatgcggcaattcgggaggcttcaaacaatcccgcaccgtttctccacgagtatcgacctacacaaggtggaccgtcggaagaacaagaaggtgactgattgggcttactaccatcaggatcatatcacgcaatgggagaagttcgaggagaatggagtaccagaccagggtcagcacaacgggacggagttcgacttgtacttggcgtggctccacaggacctaccgtcttgtcctacgtccggcttggacactagccgacatagcggatgaccccgaggatgttgaggagcagaacgagtacgatactcgtacccgtctaggtaccacggtcgagacgggacctgttcgcgacagagtggctcgagagctcttgcggaccgtcaacgacgcgggagtggcgctaggcacggctcctggctccgaaggagagggcggcaccctccgcaacgccctacagagactacggcagcaatgtcggaagttggcagcaaggctcggctgcaggtcgactgatgtggtcgaacatgctcatgcccaccaagagggggatgaagaaggggaggtgggtgacgaggagggcgagcaagacaaagaggcggaggaaggagatgaggaggaagaaggggatgaggacagagaagaggaggcggatgagctcggtccctcgcagctagaggacgcaccagagtcgtcacagccggatatctcgcagcccggcccgtctcgaccatga

SEQ ID NO: 69162 - DNA, 704 bp, Oryza sativa
  Clone ID: PAT_MRT4530_69858C.1
atggcagcgacctttatctccatggccgacggtgcggtggagataaccagcacatcggcttggtgcgacgaccaccttccgcctcggcacggcggctctccagccaagcgccgtcgcctcagcgccaaacacattggcgctgacgttggccgtgtcagcgccaacgggactggcgctgacattgtgccaccgtggcggccgggccgatccccagctgacgtggcagctacctcagcgccaaccggactggcgctgaggtgggacttggccgcaacccccaaggcccagaccagcaaggcttctggatggcttgcgggcttggacctcagcgccagccataatggcgctgaccgtgggacactcagcgccagcccacctggcgctgagggtgggacttggccgcaacccccaaggcccagaccagcaagcctgctggatggcttgcgggctgggacctcagcgccagccataatggcgctgaccgtgggacactcagcgccagtccacctggcgctgaggtgggccttggccgtttcgagccttctggatggcttgcgggctgggacctcagcgccatccataatggcgctgactgtgggaaactcagcgccggctcacctggcgctgaggttggacttggccgtttcggccgtggcccagcccaacaagccttctggatggctgggctgggacctcagcgccag

SEQ ID NO: 69163 - DNA, 807 bp, Oryza sativa
  Clone ID: PAT_MRT4530_69859C.1
ccccgcctgcttgccccctcggagtccccctccctttcctagtttcctcccaatcgtgaccaaattccgccagatcgccggtggtctccttcgccggccgcctacaggaaccgctcaaccgcgggcaccagctaccgccgcccgccttcttcctccctcggagtccccaataccacaacccttgccgcagagaaaggcgctgtagttggtggtggtagagctggctgtggaggcgagggagcgaggatagggaggggatgactagcctgtcaattacggtgatgacgctcaacctacacgagggggagcaaccgagcgagagccccaacagctgggagaggcgccgcgacatctgcgtcagcgtcatcaccagctactcccccaccatcctctgcacccagcaaggattgaggtggcagctggactacctacagcagtgcctgcctggttatgagcaatttgggatttcaagaaaaggctcagaggataacactgatgaatattgtacaatattctatgaaaaagaaaaggtggagcttacagaaggtggtaccttttggttgtcagaatctccttcagtgcctggaagcgtttcatggggggcaactgcaccctgcattgctacatgggcaatatcctttggtgcaatgcttttgtcggcattttattctatcatactttaagtctttattggaataaagtaaagtagttgccttaacatgatgtacacacatttcaactcaaacaagtagaaccacctgggttcagcttccagattgtaaatacaaaccttgatgaagatagccc

SEQ ID NO: 69164 - DNA, 1689 bp, Oryza sativa
  Clone ID: PAT_MRT4530_6985C.1
atgtcatggcagagggttggtgccctgctgctaggggctcagtctcgcctgcctgtcccgggggttccggccgtaggcgggattaggtcggtactcttgtctatggctaggatgggttggaaactatgtcacgtcttccgtctgtataccgtggtgatgtttaacagagaaaaaggaaagaatgtcagcaggcatgcctccagtaactcaagttttcaactccatccaccactagcctcaagagagttaacaagggtacacccttggtccattccaagcatgctgcttggttcacagctaccattggttggaagtcaagaccaaaatcagtatgtgtttgatcgagcatttgccacccaggtcaatgagcttccaatgccagaagaggatgtccccttttgtcaggattgtagagagcaaggacactatgccctgaattgtccatgggtatataccaaagaagctccttcctttggtttagcagggcaggcatcgctaaaccagcctcctcgcaccaagtcaagcttgcagcctagtgtgcaaagcagagagcccaatgaagagaatccattgaatcccgggaattgctttcctcctagcctttcgtaccacgtggggtcacgtactaagcacgccaaaggcaagaagagtaagaatcagaagagaaaagcgccgatgcgaactgaagaagaagtacgtaagatgactattaccagcaccgaatggcctccagcagggataactattcctagacgtcaaagaggaaataccttccgaggtgcacggcagttgacccagcacctcctaagccatggtggcagagtatctgatagtgaagggtcagatcaagtctcctcggattatgaatatgagtccccccgacgtctcggcgaggaagagatggaattaaaagcatgcacccgttgcggagaaattggacacattgctagcatgtgtctcacactctgccctcattgtgaagaagaccatccaccaggggagtgtcccacccgcaaggtcacatgttttctatgcgaaggtacaaaccatgtgcccaaggattgccaactcagtgtgttgttgaccaagaccgcagaaatccaacgaacaaccctacgattgtctcatcagctagtcagctccaacagcaacctcgacgatatcatccacagcaccaatgctcctcctgctgcacctgactctgcaataaatcatagcaataataccttcagcaccaaccattctctgcactgacagcctcagcaatgaattgtcgtcgatggaagaagttgtttctctccccgacgtgaagtgggtaacttgtatgaggttgactccaaagatatgaactatgcaaagttctggaactgaagccccatcttcaagtgccgcaacccagtcgaagtcagctaaaggttcaaccagggacaagtcaggtgaagagaagattccatctatcttcttgctagcctcctcgaatctcggggacgagattcttctccctccttctctggggctcccctttccctcggcccactccctcctccctctctctcccgggctgcctttcccccccctcttccctcccggcctgctcggcccaggccgctgtcacgtcctgataaattcatcccgaaaataaaaatcatcttctaaaaggaataatagaattaattaaaattcgaaaag

SEQ ID NO: 69165 - DNA, 3627 bp, Oryza sativa
  Clone ID: PAT_MRT4530_69860C.1
atgatggatagattggtccggcttcattatggtggttgtgtggtagatgaaagtacacatggaagccaatttgagggaatgacagttagacaattagtgttttttgcgaagcctacctttgaggagttaatgtctcgcatcaagcatgaattggattggaatgatgagtcggttggtatgcaagggagatacgatgtgggcggcggtgtcatgtcacataaatttatgttagacttgaatggagagatcgaatggcaaacatatatagatatagtattggggtcacatttcaaatctcttgaggtgtttgcatggaagaaatatggtaggatagggaagaaagaacttatagaccttaatgaaagtccactcatagaatcacccattagctgtcacgaactgtcggagaggtgtagtaggaaggaagaattgattgaggaagacgtggaggggggcgagggagtaaatgatatggcggatgtggaggtcagggaagagaatgacccggtaagggaggaagtacatgcagaggagaatgtgccgttaagggaagaagtacatgcagaggacaatgtgccgttaagggaggaagttaatgtggaggagaatgtgccggtaagagaggaaggagatgttgaggatggtcgggaggtaggagatgatgtggagttgcctgaggaagaagcgaatgctaagaatgtaagtatgggcctaagggagttggctaggctgaaattctatacccgagaggagtgtgaggaggctatgatacgcagtggattgaacccaggctggttggagtatgatacagaggatgaattggatgagtccgcttccgactccgatgatgatcgtccagtgcgtaagatgtcagagcatgaaaggactgtgtttgcgaaactggtgggtagaaacccggaaataacacaattcgaggatcttaccagatctgggctagcaattgctgatggggatccacaatatgacggtgccttcgaaccaatgtgtgatgaaccaaggaaggggttggagtttcgatcgatggatgatctaaaaatatggctacagagttattctatccgtgtccaccggccgtaccatgtgaaggaatctaacgcgtcagtaaagtatactgtggcttgtctcgatcgccattgcaaatggcagattaatgcaaggaagagtggaggagataggtggcgggtgactagggtgggcgaagaccacacatgctgtagtgcggaagtaaccggcaagcatttgcaacttacttcaaggtttattggaaacaggttacaggcatttgtgcgagctgaaccaactttatctccagcagcgattgtcgaggcagttgagcaaatatggcactatcggcctacgtatggcaaagcatggcgtgctaagcaagttgctatgaaggtcatttggggagattgggacgaggcgtatgttcgcttgcctacactgatgcgtgccatcaaagcaaagaaccctaccatgcatttccgtgttgaggctcatcccgagaagtccaggatggtggatggagtacagaggcgagtatttggacgtgcatattggatatttggccagtccatagaagcattcaagcacttgaggccgcgcttgaagacccttcgagtcagaggtcacacggcgcacatactgttcgacgaccggtacgtcccgtacctacggcgggcgaagctcttggcgttcgtgaccatggcgcagcgaccggtgcctctgtacaacgccgctgctctgacggccctagtggaccggtggcgtccagagacacacaccttccacctaccgtgcggggagctgacggtcactctggaggacgtcgccatgatcctgggtcttcctatccggggtcaggcggtcacaggtgacacagcgtcggggaactggagggagagggtcgaggagtaccttggtctggagcctccagtggcacctgatggtcagaggcagacgaagacatcaggggttcctttgagttggttgcgagccaacttcggtcagtgtcccgctgaggcagacgaggctacagtacagcgatactgcagggcgtacgtgctgtacatcttcggcagtattctgttccctgactctggtggagacatggcttcttggatgtggctgccgttgctcgcggactgggacgaggcgggtaccttcagctgggggtcggctgccctagcctggttgtaccggcaactctgtgatgcttgccgaaggcaaggcggggacgcgaacctagcaggctgtgtttggttgctacaggtttggatgtggatgatgcttccagttggtcggcccatgtggaggacccatcaggcttggccgcaccaggatgcagaccgacgtcccactgtagctcacctgtgggaatcggtcccatctccagtagtaggccgcaggaatttggcgtactaccactacacaaacgagatggactacctacagccagaacatgtggtgtggatgccatatcaggcacaggaagtgctcgagctagaactgaatcccatgtgccatatagaggatgcgttgaagaccctacggtgcccactgatctgcttctatgcagtggagttccagatgtgccaccgcgtgatgcggcaattcgggaggcttcaaacaatcccgcaccgtttctccacgagtatcgacctacacaaggtggaccgtcggaagaacaagaaggtgactgattgggcttactaccatcaggatcatatcacgcaatgggagaagttcgaggagaatggagtaccagaccagggtcagcacaacgggacggagttcgacttgtacttggcgtggctccacaggacctaccgtcttgtcctacgtccggcttggacactagccgacatagcggatgaccccgaggatgttgaggagcagaacgagtacgatactcgtacccgtctaggtaccacggtcgagacgggacctgttcgcgacagagtggctcgagagctcttgcggaccgtcaacgacgcgggagtggcgctaggcacggctcctggctccgaaggagagggcggcaccctccgcaaacgccctacagagactacggcagcgatgtcggaagttggcagcaaggctcggctgcagggggatgaagaaggggaggtgggtgacgaggagggcgagcaagacaaagaggcggaggaaggagatgaggaggaagaaggggatgaggacagagaagaggaggcggatgagctcggtccctcgcagctagaggacgcaccagagtcgtcacagccggatatctcgcagcccggcccgtctcgaccacgacgccggcgggctccttcgcaggactggaggtacacccccgacgtgcctcgtcctcgcactagagcgccagtgcacctggcgctgaggtcccagcccaaccatccagaaggcttgctgggctgggccacggccgaaacggccaagtccaacctcagcgccaggtgggctggcgctgagtttcccacagtcagcgccattatggctggcgctgaggtcccagcccgcaagccatccagcaggcttgctggtctgggccttgggggttgcggccaagtcccacctcagcgccaggtgggctggcgctga

SEQ ID NO: 69166 - DNA, 283 bp, Oryza sativa
  unsure (1)..(283): unsure at all n locations
  Clone ID: PAT_MRT4530_69861C.1
ggacgttgngttngngtgcgtggtcctcttctccatccagagacaatccagttcagttcagtttcctctctccctcctgtcctcacctcacgcttgacaagagagagagagagagagagagagagagagagagagagagagagagagagagagagagaaagtctgaactgagctgagctgntcgagctagtgtgcgagacgncatgnaccgatacggcgagaagcagcagcagcagcagatgtttgcctcctacgtggaccgtctccctcctagcanccagcg

SEQ ID NO: 69167 - DNA, 1947 bp, Oryza sativa
  Clone ID: PAT_MRT4530_69862C.1
atgatggatagattggtccagcttcattatggtggttgtgtggtagatgaaagtacacatggaagccaatttgagggaatgacagttagacaattagtgttttttgcgaagcctacctttgaggagttaatgtctcgcatcaagcatgaattggattggaatgatgagtcggttggtatgcaagggagatacgatgtgggcggcggtgtcatgtcacataaatttatgttagacttgaatggagagatcgaatggcaaacatatatagatatagtattggggtcacatttcaaatctcttgaggtgtttgcatggaagaaagatggtaggatagggaagaaagaacttatagaatcacccattagctgtcacgaactgtcggagaggtgtagtaggaaggaagaattgattgaggaagacgtggaggggggcgagggagtaaatgatatggcggatgtggaggtcagggaagagaatgacccggtaagggaggaagtacatgcagaggagaatgtgccgttaagggaagaagtacatgcagaggacaatgtgccgttaagggaggaagttaatgtggaggagaatgtgccggtaagagaggaaggagatgttgaggatggtcgggaggtaggagatgatgtggagttgcctgaggaagaagcgaatgctaagaatgtaagtatgggcctaagggagttggctaggctgaaattctatacccgagaggagtgtgaggaggctatgatacgcagtggattgaacccaggctggttggagtatgatacagaggatgaattggatgagtccgcttccgactccgatgatgatcgtccagtgcgtaagatgtcagagcatgaaaggactgtgtttgcgaaactggtgggtagaaacccggaaataacacaattcgaggatcttaccagatctgggctagcaattgctgatggggatccacaatatgacggtgccttcgaaccaatgtgtgatgaaccaaggaaggggttggagtttcgatcgatggatgatctgaaaatatggctacagagttattctatccgtgtccaccggccgtaccatgtgaaggaatctaacgcgtcagtaaagtacttggcgtggctccacaggacctaccgtcttgtcctacgtccggcttggacactagccgacatagcggatgaccccgaggatgttgaggagcagaacgagtacgatactcgtacccgtctaggtaccacggtcgagacgggacctgttcgcgacagagtggctcgagagctcttgcagaccgtcaacgacgcgggagtggcgctaggcacggctcctggctccgaaggagagggcggcaccctccgcaacgccctacagagactacggcagcgatgtcggaagttggcagcaaggctcggctgcaggtcgactgatgtggtcgaacatgctcatgcccaccaagagggggatgaagaaggggaggtgggtgacgaggagggcgagcaagacaaagaggcggaggaaggagatgaggaggaagaaggggatgaggacagagaagaggaggcggatgagctcggtccctcgcagctagaggacgcaccagagtcgtcacagccggatatctcgcagcccggcccgtctcgaccacgacgccggcgggctccttcgcaggactggaggtacacccccgacgtgcctcgtcctcgcactagagcgccagtgcacctggcgctgaggtcccagcccagccatccagaaggcttgctgggctgggccacggccgaaacggccaagtcccacctcagcgccaggtgggctggcgctgagtttccaacagtcagcgccattatggctggcgctgaggtcccagcccgcaagccatccatcaggcttgctggtctgggccttgggggttgcggccaagtcccacctcagcgccaggtgggctggcgctga

SEQ ID NO: 69168 - DNA, 1842 bp, Oryza sativa
  Clone ID: PAT_MRT4530_69863C.1
atgggactggcgctgacattgtgccaccgtggcggccaggccgatcccctagctgacgtggcagctacctcagcgccaaccgcttcggcgctgaggtgcccaacctcagcgccaacctactttgaggagttaatgtctcgcatcaagcatgaattggattggaatgatgagtcggttggtatgcaagggagatacgatgtgggcggcggtgtcatgtcacataaatttatgttagacttgaatggagagatcgaatggcaaacatatatagatatagtattggggtcacatttcaaatctcttgaggtgtttgcatggaagaaagatggtaggatagggaagaaagaacttatagagcttaatgaaagtccactcatagaatcacccattagttgtcacgaactgtcggagaggtgtagtaggaaggaagaattgattgaggaagacgtggaggggggcgagggagtaaatgatatggcggatgtggaggtcagggaagagaatgacccggtaagggaggaagtacatgcagaggagaatgtgccgttaagggaagaagtacatgcagaggacaatgtgccgttaagggaggaagttaatgtggaggagaatgtgccggtaaaaaaggaaggagatgttgaggatggtcgggaggtaggagatgatgtggagttgcctgaggaagaagcgaatgctaagaatgtaagtatgggcctaagggagttggctaggctgaaattctatacccgagaggagtgtgaggaggctatgatacgcagtggattgaacccaggctggttggagtatgatacaaaggatgaattggatgagtccgcttccgactccgatgatgatcgtccagtgcgtaagatgtcagagcatgaaaggactgtgtttgcgaaactggtgggtagaaacccggaaataacacaattcgaggatcttaccagatctgggctagcaattgctgatggggatccacaatatgacggtgccttcgaaccaatgtgtgatgaaccaaggaaggggttggagtttcgatcgatggatgatctgaaaatatggctacagagttattctatccgtgtcccccggccgtaccatgtgaaggaatctaacgcgtcagtaaagatggagcactttccggggttggaggatttctacgaggagaagcaccgggccccacagattgccagcggagagcgcttgaagacccttcgagtcaaaggtcacacggcgcacatactgttcgacgaccggtacgtcccgtacctacggcgggcgaagctcttggcgttcgtgaccatggcgcagcgaccggtgcctctgtacaacgccgctgctctgacggccctattggaccggtggcgtccagagacacacaccttccacctaccgtgcggggagctgacggtcactctggaggacgtcgccatgatcctgggtcttcctatccggggtcaggcgagggagagggtcgaggagtaccttggtctggagcctccagtggcacctgatggtcagaggcagacgaagacatcaggggttcctttgagttggttgcgagccaacttcggtcagtgtcccgctgaggcagacgaggctacagtacagcgatactgcagggcgtacgtgctgtacatcttcggcagtattctgttccctgactctggtggagacatggcttcttggatgtggctgccgttgctcgcggactgggacgaggcgggtaccttcagatgggggtcggctgccctagcctggttgtaccggcaactctgtgatgcttgccgaaggcaaggcggggacgcgaacctagcaggctgtgtttggttgctacag

SEQ ID NO: 69169 - DNA, 459 bp, Oryza sativa
  Clone ID: PAT_MRT4530_69864C.1
atggcgactggcctgcacgtacgccacggtgatcatgccgctgcagggagttcagacgcggcggaggcagcgagcgcgggcaacatcgaggtgaggcgaggcggcagccgccggggggctgcgtgccgcgaccacgtcgacctcgggggcctcccggtggatgacagcggcgcgcggggcccggcggtgggcaagcggcggtgtgagacgagtgggcgggcgctagacggcggaggcatcggtggatggcggcggcgtgagacaagggagcggcggacaggtggaccgcggcgttgggggcaaggcggttggcaacgggccagagacgagccggcggcgcgagacgagggggcgggcgcgggcggtcggcggagcgcggtggcggagcccgacctgggacacaagagccggcaggcgcgtggaatcaggaggcggcggcgacgtgggacactgttatag

SEQ ID NO: 69170 - DNA, 819 bp, Oryza sativa
  Clone ID: PAT_MRT4530_69865C.1
gccgtcgcttcagcgccaaacacattggcgctgacgttggccgtgtcagcgccaacgggactggcgctgacattgtgccaccgtggcggccgggccgatccccagctgacgtggcagctacctcagcgccaaccggactggcgctgaggtgggacttggccgcaacccccaaggcccagaccagcaagccttctggatggcttgcgggctgggacctctgcgccagccataatggcgctgaccgtgggacactcagcgccagcccacctggcgctgaggtgggacttggccgcaacccccaaggcccagaccagcaagcctgctggatggcttgcgggctgggacctcagcgccagccataatggcgctgactgttggaaactcagcgccagcccacctggcgctgaggtgggacttggccgtttcggccgtggcccagcccagcaagccttctggatggctgggctgggacctcagcgccaggtgcactggcgctctagtgcgaggacgaggcacgtcgggggtgtacctccagtcctgcgaaggagcccgccggcgtcgtggtcgagacgggccgggctgcgagatatccggctgtgacgactctggtgcgtcctctagctgcgagggaccgagctcatccgcctcctcttctctgtcctcatccccttcttcctcctcatctccttcctccgcctctttgtcttgctcgccctcctcgtcacccacctccccttcttcatccccctcttggtgggcatgagcatgttcgaccacatcagtcgacctgcagccgagccttgctgccaactccgacat

SEQ ID NO: 69171 - DNA, 399 bp, Oryza sativa
  Clone ID: PAT_MRT4530_69866C.1
ttttggtttttttttttttttttttttttttttttttttttttttttttttttttttttttaaaaaagaacagggcaagcccgcccttgtaattttccttgccaaagtttatggccaaaaaaaaggggggctttgggccaccgaaaaagggcttttcccctttgatcttgcgaagggcttgctgaaaaggggaaggcacaaaaacttttggcgcccccaacagggagaagaaattccgtttgaacccccggggggtgaacccgggggggtttggggggggaagagggcaaagggggcgggggggcccccgaccatcgagaggcccaacgcgtttaccccaaagcccacgttgtagaggaggcttttcaggtaactccccctccgagccaggggggcctt

SEQ ID NO: 69172 - DNA, 441 bp, Oryza sativa
  Clone ID: PAT_MRT4530_69867C.1
atgttctccattgatgaaactgacaaagtcaaactgccagatgaagctgatgagggtttcgatgacctgtaccgccgcgctggccgtcgcctcagcgccaaacacattggcgctgacgttggccgtgtcagcgccaacgggactggcgctgacattgtgccaccgtggcggccgggccgatccccagctgacgtggcagctacctcagcgccaaccggactggcgctgaggtgggacttggccgcaacccccaaggcccagacaagcaaggcttctggatggcttgcgggcttggacctcagcgccagccataatggcgctgaccgtgcgacactcagcgccagcccacctggcgctgaggttggacttggccgtttcggccgtggcccagcccagcaagccttctggatggctgggctgggacctctgcactggcgttga

SEQ ID NO: 69173 - DNA, 453 bp, Oryza sativa
  Clone ID: PAT_MRT4530_69868C.1
atggcctccgcaactggaacattccggactccggactccggagtagatttcgccgtcgcctcagcgccaaacacattggcgctgacgttggccgtgtcagcgccaacgggactggcgctgacattgtgccaccgtggcggccgggccgatcccctagctgacgtggcagctacctcagcgccaaccgcttcggcgcggagcaacctcagtgccaaccgcactggcgctgaggttggacttggccgcaacccccaggcccagaccagcaagccttctggatggcttgcgggctgggacctcagcgccagccataatggcgctgactgtgggaaactcggcgccaggttggctggcgctgaggtgggacttggccgtttcggccgtggtccagcccagcaagccttctggatggcttgcgggctgggacctcagcgccagccaaaatggcgctga

SEQ ID NO: 69174 - DNA, 308 bp, Oryza sativa
  Clone ID: PAT_MRT4530_69869C.1
gattaaaaaaagtgcctataggtgagtatggttggacagaacgcccatgtgtgaattgccattctaacacttgtttactatgcagtaccttgctggggatagatgaaaccgactggtacataccagctctcaaactgatcagtggttggtgatgtaagggagtctgacgtaatgacctatatgcatattgggtaacgagtgattgatcggctagcaatgtatatgatctttgaaaccggctctttcaaagagactggagagtctatccatgtaatcttaccaaccatgaatgtataaggtggaaactg

SEQ ID NO: 69175 - DNA, 486 bp, Oryza sativa
  unsure (1)..(486): unsure at all n locations
  Clone ID: PAT_MRT4530_6986C.1
atctggtcgaccgcccataaccgccggcacggctattcgaatagctttactctgatcagaggtgtacaactgtacccacaagacacagccccacgacacgtttccgtgtgccgacatgccaccacgacatactggaaagaggccgtgacaggacccttcgcataaccccctctagccaagcacaccacacctcaggtttcacccccgtccccagcgggcaacgggcagtcccctctcgtacctaggtgaatccggaagcgacagaagccgtcgcagggcccgccccgctccatcacgcccacccttgccgggtccacgcgggtggtccactgccggtccacggaaccgacggcccagatcaccctcggggtcgatcggacgggcggcggcgacctggctcggctcaaggccggccaagcggccacggcgacggcgacggcacgcgcgaacgcgttgccggcgacggcaaccggcggcgnagacgag

SEQ ID NO: 69176 - DNA, 619 bp, Oryza sativa
  Clone ID: PAT_MRT4530_69870C.1
gaggaccacatgccagaaagttgcccgcccaccgctcacccagtatacccctagacaggcccttgattcccaacacggctcccgaatgtggacacaaagcacccgaggaccagggcaaatgctgagcttgacgatgatgtgcaaaggtaggcagcgccacaagggcagcaatggcaccaccgagggaggtggccagtgaacactactgccttgcctctgatctggttcaccagcacctggaattcaggggatccgcacagcctcaagaacccctgcagcgccagcgcctgcacggcgaccggctccccgccggcgtcctccggctcggcggcgaccagcggcgcgaacagccgcccggcggcgtccccgcggagcccgaccggcttgaagatctcggcgcccccgccgccgccgcccgccgccgccgacagcgccgcctgcaccccggagaacgccacgcacaccggctccccttcccctcccccgccgcccccgtgcacgaaccccagcgacgacgcgccgccgtcggccgcggccgctctagaggatccaagcttacggaacgcgtgcaatgcgacgtcatagctcttctatagtgtcacctaatcgttcactgccc

SEQ ID NO: 69177 - DNA, 339 bp, Oryza sativa
  Clone ID: PAT_MRT4530_69871C.1
atggcgttctggtcaaggcgcaacctccatcatccacactaccccgatcgccgcagccgtctcatgcgcctctcctccggacgactacagcgccaattcagtccctctctacaagacgccgatgccttctcgtacctgatctttgtccccagacttcagcttgcaaaggagcagaacaaaatgagcttactgagatcccccgaattctgttatgattgctgcattagtgcgaaaacgatgtgtgcggccggaccaaagcccatcgtcggcgtggctgccggagtggtcgccaccgccgcaatcggcaccaagcagagggcgcttgtggacctcgcatga

SEQ ID NO: 69178 - DNA, 312 bp, Oryza sativa
  Clone ID: PAT_MRT4530_69872C.1
atgccgccgcctagggccgacgcgccgctgcttgggagccacgcgccgctgcctgggggccccgcgccgccacgccgcggcctagagcgccgcattgccgccaggggccgccgtgccgtcgcctgggagccgcgcgccgccgtcgggagccctcgcgccaccacggcgcggcctggagcgccgcatcgccgcggcctaggagtgtcgcgccgccaccaggggtcgccctgccaccgcctgggagccgcgccgccgccgggggcccccacgccgcctcctataggtccgccgcatcgtccccgtcgcccatag

SEQ ID NO: 69179 - DNA, 282 bp, Oryza sativa
  Clone ID: PAT_MRT4530_69873C.1
gacgattgagccgcttgtaaacatgactgtaaacctgtgagctcatgcacacgatttcatacagcatggtacaaaggtgcggccaatgatgttggttcaaaacatgaagatcaagctgatcgtgctgggcatcatcatcgctctcatactgatcattattcagtccgtgtgccatggctttaagcgcaagtgagggtgttggctttccagtcctccacattcaccttgttctccataataccgtctattcctggcgaaataaaaagaccatatgcttttttt

SEQ ID NO: 69180 - DNA, 213 bp, Oryza sativa
  unsure (1)..(213): unsure at all n locations
  Clone ID: PAT_MRT4530_69874C.1
aatcagccatgcctactctcgacgctcgcctncgcctccctctngccggactatcgccggcnacgacctccttcccggnatccacccccaagccgggcagcctctcgttcgccctcaggccgccctccgcctccctgtnatcctccgccagtnccccgnnggcggcggcgcccnatnngtcgtcgtgggctccgcaacgccgacatctacgtc

SEQ ID NO: 69181 - DNA, 450 bp, Oryza sativa
  Clone ID: PAT_MRT4530_69875C.1
ccagcacccgcccccgccctcctcgcccccgccgagaacgcctgcggggaagccgccttcgccgtgccgccggcaggcgatcgcggcggtggtggaggcgaacggcaactcggagaagaagaagaagaggaagacggatgaaggggaagggtgcaagtcgtgcagctgcaagaaatccaagtgccttaagctttattgtgtgtgttttgcatctggatcacattgctctgaatcatgtggatgtgatccatgttacaacaaatctattcatggtgttccacggagtacaccagccttgcctttgaaagctgttcaaacattagagactggtcaagattcagtggaacaacttataagatcccctatggactttggtagaagaaaatgcactggcagaaagtcaggctgacttaagaaatactgtgactgctaccagggaggagcaggatg

SEQ ID NO: 69182 - DNA, 500 bp, Oryza sativa
  unsure (1)..(500): unsure at all n locations
  Clone ID: PAT_MRT4530_69876C.1
gaggattcggcacgagataattcaagtgtggaatatgcaagacaacctccaccagaaatttgttgggacgggatgctttcttgtctccaatggatcaaactgtaatcctgctgattttaaagcttactgcccatcaaaagtgtcgnctaaagttctcaatgtcatcaagancatgcctagtataatagagttggatatattgcctcgaatggatgaatggccaaaatcttttgagataaatccaccagtttatgaagacattggcctgttcttcttctccactgaacttgaccggaatggaaagaatcaatctcntgtcatggagacganctgcaattttgttntgagggcatatatcaacaatataaagttgctgatatattcctcagaagtgcttccacctgattcccantggattgatggagagagctacttatggggtgtctttgtggatcccaanaagaagcataagtctatgccatttggttccatttctgcat

SEQ ID NO: 69183 - DNA, 1402 bp, Oryza sativa
  Clone ID: PAT_MRT4530_69877C.1
cagctgaagcctgaagatcatatgaatttattgttgctggctgcaatatagcctgtgccaagttaggactagatacatcggttcagaactcttgaaaactagatatatctacagtacaccacatgcttgacaggttttatgcggatgaaaaattttcatggtatctctacacaaggctcttcatcttacgcttcagccacatggttcgaatatctacagtcagtgaaagaaaaatctcccgattgcttggatccaagaagacgtccggtgcgagcgacttctcgatcggcgagaggtctgccatggcgttcatcacctcgatgcaccgcggaatgctgtacctatcaacatggttttccagctgtttattgtctctctgaaacttggggtcagcatgtccttccataacatcggatgttccatcctcactgggcctcctcaagtagtgccatgcctctcctcgcacttcctcagtaggcctcctagtgagctgccatgattccggccgcacttgggtaagcggttttgggtatagatgcccattcatagtctggacttcgacgccaactaaagtctcctgttggaatgaagactctctggatactggagatggggagacaggcgagagtggtcggttcatataataatcatcttcttcatcgtcacttgagtcagcttctgttccattcctttcatttggtgttggtccagcaagaatatttttaccatccaaaataacaccaacttttctcccatatgggttcttgcaatcatcacatttacagttgatggagcatcctgctcctccctggtagcagtcacagtatttcttaaggcagcctgactttttgcaagtgcattttcttctaccaaagtccataggggatcttataagttgttccactgaatcttgaccagtctctaatgtttgaacagctttcaaaggcaaggctggtgtactccgtggaacaccatgaatagatttgttgtaacatggatcacatccacatgattcagaacaatgtgatccagatgcaaaacacacacaataaagcttaaggcacttggatttcttgcagctgcacgacttgcacccttccccttcatccgtcttcctccaaaaacaggaaatcgaagaccaaaaaacgaacgccaccgacttcttcttcttctccgagttgccgttcgcctccaccaccgccgcgatcgccgccggcggcacggcgaaggcggcttccgcggaggcgttctcggcgggggcgaggagggcgggggcgggtgctggtggtggtggtggtggtggcgggggggggggaggggcaatgacgagcgcgtcggggtgggtcgtggtcgtgggggctcggtgggggggtggggggggttggggtatttggggcgacat

SEQ ID NO: 69184 - DNA, 672 bp, Oryza sativa
  Clone ID: PAT_MRT4530_69878C.1
attttaatttcacttataaaaaagagacgacttatagaatgacttaagtgaaacgtcttaaaacaatggttttgttgtagtgaacatcgagacgaacccgatggtactcaccacaacgtctatcgacgaacggtgatggccggcgacgaggaggaaggcggtggcggagctccggtggtcggcggcgaaggaggacgggcggccgagcttcctcacctccgtgcgcacctaacggcgacaacggcaagcggcggagacggcggacgcggcggcgcgacacggccgaaagatggccggcggcggcggcggctaaatgcacgtggcggcggtgctacggtgcacgggagaggacgagagagggggcaaatggaagaggacgacgaggggaagctttataaagcattggattgaagagatcgaactccaaacgagaggaatcgactcgggaaaaatccaaactcggttttagggataaaatcaaaacgaactcgattcggatgaaatcctcaacgattcgctccgattcttgggggaaaaggaagaggagaacgagaggaacaaaacccctcaaaaacccggaggaatcggagtcggattgaggcggatttgagaggagaaaggcggcggcaaagcggcggctcgggcggctcggccggaggtaggggatggatc

SEQ ID NO: 69185 - DNA, 417 bp, Oryza sativa
  Clone ID: PAT_MRT4530_69879C.1
atgataggcccagctccgtctccggcagcggccgccgccgcagccgtgtcgccgtcgtgttacgcgtcgccggcggcttcgtccgtgcgaagacgcggcgtcgtcggcgtcgtccggtgcgcgccggatagcgggcgaggtggagacggcggcggcggcggcgggaaaggcaagctcagggtcgggtctcccatcgtcatcgtggaggcaccggtgatgctcaagaccgccgcgtcggtgccgtcgctcaggcacaacgccggccaggtcaaggccggcgacgtcgggagggtgatggcgcggaagccgaaggacgtctgggccgtgcggctcgccatcggaacctacctgttggacggcaagtatttcaagacactggacgtcgacgacgacgatactgcatcaccagatgagtga

SEQ ID NO: 69186 - DNA, 2855 bp, Oryza sativa
  Clone ID: PAT_MRT4530_6987C.1
acttttccccctttgttccaatcttgatgaaatagactggtgatgacaattgtcacgtcctgataaattcatcccgaaataaaattcattttctatctctccccgccgccctcctctctctcccacgctgccggccgcctccagccgcctgtgccgcctcgaccgtgcgccggccggccgcgccgtcgcctcctccagcgtcgccgctaccccctccaccccggcctgccctccgtttcccgcggagacccccggagctacgtttccgccgtcgtccagtggcgtcgcccaccacttctccgtctccggccggctgctgttcgtcgccggtacgccgaccgacgtcgccgtctcctccgttgacgtcgcagcgtcgccctccaccccggcctgccctcggtttcaccggaacgtcgccgcgaacatctccgtccgcctcgccggagttgtttggccgcccgtccctcctcgcccgtgcaccggtcggccacccctccgcggtccatcatcgtcgtctccgatcgttctcgtcgtcgacgtcccatcggtcgcccggctcgtcgtctcgcggcgccgcctccgtcgtcggcaccgcagcggcgtggtcctcgccgtcctcgtccccgtgcagccgctgccggctgtcctcgtcgcctcctcgccggtcccggtcgtcgtcgtcgtcgtcgtcctctcgtcgttcccggtcgtcgtggcgttcgtccctccgtcgagccgttctcgtccgtcgtccgcgttcgtcaagcgagccgccgcagccccatcatcgtcttcgtcctcggctccgcgtcgtcaagtctcgtgccggccgtgtctcgcccgtgtatcggtgtcggcagtcgttcgcttgtgcgtgtggtgaccgtgttagtgtgtccgctcggtagccgcgtggtttccacgtgtgcaacccgtgtggtgtctagtggagtccgtttgtcggccactcgcctcggttgacacacggggtccgcttccgtcgacccgtggaccgtctctgtgtacccggttttctttttatgtattgttattgcttctttataggcttgtagctttgcttgtgtgcttcgcgtagctttcgtcgttccggaggttcccgaagcgtggtttgcggtcgtcgccgaaggttcggaaggccgttctctctctcttcctctttcaaaacccctaaaacctgttttcggtggggtttgggtgcatgccagttgtgggaagtagcaccccggccactataaggattaagctcgggcctctgttgcaaagcactaccgtacttccacatgtctagtgggtaaggcttagtttgtggctcagtctggttataaacaaaagtacacggattggagatggatgaagtcgggggtcgatggacattctctaggacaaatgaaggctacacgagctgcggcccggtagtcgagatgtcatggcacagggttggtgccctgctgctgggggctcagtcctgcctgcctgtcccggaggttccggccgtaggtgggattgggtcggtactcttgtctatggctaggatgggttggaaactatgtcacgtcttccgtctgtataccgtggtgatgtttaacagagaaaaaggaaagaatgtcagcgggcatgcctccagtaactcaagttttcaactcaatccaccactggcctcaagagagttaacaagggcacacccttggtccattccaagcatgctgcttagttcacagctaccattggttggaagtcaagaccaaaatcaatatgtgtttgatcgagcatttgccacccaggtcaatgagcttccaatgccagaagagcatgtccccttttgtcatgattgtagagaacaaggacactatgccttgaattgtccatgggtatatgtcaaagaagccccttcctttggtttagcagggcagacatcgctaaaccagcctcctcgcaccaagtcaagcttgcagcctagtgtgcaaagtgaagagcccaatgaagacaatccattgaatcctagaaaatgctttcctcctagcctttcgcaccacgtggggtcacgtactaagcaagccaaaggcaagaagagtaagaatcagaagagaaaagcaccgatgcgaactgaagaagaagtacgtaagatgactattaccagcaccgaatggcctccagcagggataactattcctagacgtcaaagaggaaataccttccgaggtgcacgacagttgacccagcacctcctaagccatggtggcagagtatctgatagtgaagggtcagatcaagtctcctcggatgttgaagatgagtctccccgacatctcggcgaggaagagatggaatcaaaggcatgcacccgttgtggagaaattggacacgttgctagcaggtgtctcacactctgccctcattgtgaagaagaccatccaccaggtgaatgtcccacccgcaaggtcacatgttttctgtgcgaaggtaccaaccatgtgcccaaggattgccaactcagtgtgttgttgaccaagaccgcagaaatccaacgaacaaccctacgattgtctcatcagctagtcagctccaacagcaacctcgacgatatcatccacagcaccaatgctcctcctgctgcacctgactctgcaataaatcatagcaataataccttcagcaccaaccattctctacaccgacagcctcagcaaagaattgtcatcgatagaagaagttgtgtctctccccgacctactccaggccgagcaaagggcaatcaacctcaggagggcgataccaagcagaagaccgttatccgcttcaaccagcaatcagaaggaagcttcccctgtgaatga

SEQ ID NO: 69187 - DNA, 354 bp, Oryza sativa
  Clone ID: PAT_MRT4530_69880C.1
atggagactgattgcatgcccaatttcccacacctcaaggagctcaccctatccaacatcaacatcgtcgatggggagaggggaggggcagctcgcggtgggaggagcggcgttgccggtggggagtgcgggaggggcagcacgcggtgggaggagcagtgttgccggtggggagagaggaggggcaccaccggatcccccagccgacagcaacatgggccccgaacggcggcgcgggttgttgacggcgcggaggaagcgctcggccttgggggtgaggtgagcccgcaggagtggctggaccggcccgtctgggctatggaggcgccggagcgcctgcacgtgttctgctag

SEQ ID NO: 69188 - DNA, 207 bp, Oryza sativa
  Clone ID: PAT_MRT4530_69881C.1
atggggatggggcggacttcctcgtccaacgagcgcagccatgttgtacaggggacgattaattccaggcggagcgacgcaccggggccgagcgccgacacgtgctacgcgtcgccgggtaggggtctcaccgggcgcgacggtctccacggacatactgggggcgcgggaggctatggggcgtccctagagaatgcgagccactag

SEQ ID NO: 69189 - DNA, 591 bp, Oryza sativa
  unsure (1)..(591): unsure at all n locations
  Clone ID: PAT_MRT4530_69882C.1
ccacgcgtccgcttggagtttagtagccctttctatagtttcatgttattatgtcctgtactttaacagttcttccctcctgtagttgacagttcttaattgcatcgtgcaaagctgactcatacaaggtgatactctcatctgcatccataaaaagatgaatttgacataattaccactaccccatctagataacctaactgtagtggtatcgtatgatttcaccaggtgagaagggcaccaaaacgtgcctataccagtgtaggttatatcaaggtatttgattgcctacatttgctttaccctgtgattcttaaacaaactctatgctaacttggaactcgatggtcatgccatgtaaatccacacatgcttgtagagcaacaatataaatgtttggttagtttgtacctcctagtgatgcacttgagtgcttgaggtcaaggaacataaaaaacatggctttgtttttttttggtgnggattgacactctgtaacacaaatatttagtcaaatgaattttatatgattgattaataaaaccgngttaagttgacaatgttatcttgaggcatgatcactggcaatca

SEQ ID NO: 69190 - DNA, 700 bp, Oryza sativa
  unsure (1)..(700): unsure at all n locations
  Clone ID: PAT_MRT4530_69883C.1
aaaaataattcgaattttcagtacaaaattatagtagaaaaaagtatatgataaataataaaacaagcaaaaaactacacttcacaatttatttgaaatcccatgatgacttttatgatccaaactagctagaaaaaaatgaatgtttatactaaaaattctttcagaactatttgccgggcgaatcacatgttaatgactagatttagctaaaccagatcaatcacagttatagccgtgttgcccacaggatggaggagaggaagctgattctctacccaaaaagaatgcaggtgctgctggtggttgaagcttcatatttcccctggtccacatgaaaataatagatgacatgtgttggcctgtcttccgggtctgggctgggaaacaaattntcccatgtggaagcacctaatgcnngnttccaattcccccttgacgacngggggatccttttgtgcctcccctttgtcccccattcccacntccctacaaattttgattgtcnaaagccgtcctcnccccctggaaattcnnagaacncccccccaccnaattttanttnggngaaacttccccctttgnttcccgnggccanaccanttccccancnttttnttaanatttactcccancccggatccatcnantggtccnncccccnaanttttntttattccgggaaacccccccaaccccn

SEQ ID NO: 69191 - DNA, 3576 bp, Oryza sativa
  Clone ID: PAT_MRT4530_69884C.1
atgtccagccctggaaggagtgggttctcccctgggttggcgcagttgttatcatctagagatgaagcgaaggttagttcccagaagtcgcacttggtatcgtaccatgacgagattgggcaccaggatattgagaggacgctagagcatatatttgatctccctcacaagtcggtggtccggcctccgggtccgattgatgtgggatttgtgcgctcggtattgcggaatcaggcaaggaagtttgatcttggcgggaaagatagccgtaaatacgatgatggtgttctgattgtggataaaggtgctgggcaaactaaggttgttcttgatgattcgagcatttgtggcaagttcaagagcatttggggacctttgcttgttgagagctcggcatcattcagcagcgctagggctaacacctgcgtgtggaatggcaagtggatgtatgaggttaccctggagacgtccggagtgcagcagcttggatgggctactctctcgtgccccttcactgatcagaaaggagttggtgattctgatgattcatatgcatttgatggccggcgggtgaccaaatggaacaatgatccagaacaatatgggcagatgtgggcagtaggagatgtgattggttgctgcatcaacttggatgctggggagatcagtttctacaggaatgggaattttcttggtgttgcctttgatgggattcgcaaagtgggacctaggaaaggctactatcctgcaatttctctctcagaaggtgagcgttgccatctgaacttcggctcacatccattcaggtatcctgtagatgggttcaatccaatcaaggattttggaattcttcaccagagagattcctcatgcattcctgatgtgttccgtctactagaagttcaaaatctggaaaaatctgaatctgcatacttcgagaaactaaggagggtcaagaaatttgcacctttacgtgaactatttcgaccaatttcggaagggatatgtgcagaatttttcggtgccgctgaaggaagccaagggtgttctgaatatatcacctggggatctttcatcacccttcttacagatgttttcagggtacgggagccgcatgatttcttatgccttgaccaggttcttgaactttttctacagttcccggggtgcagttcattactgcaggagctcattgtggctctttcttgtatgtgcaaagctgctccacttgtgttgacagaatgcccattttctggaccatatccatttttagcgctggcttgccacattcttaggcataaagatgtaatgcatctatggtggaagtcagaagattttgcattctcatttgaaggatttcttacgatgaagattccaaacaagcaggacttgcagtaccttgtaccttctgtttggtggcctgggtcttctgaagatgaggttagcatgacattatcgatgacaacactctccgatgcaattaagatcattcacctttggcaccgtaaacccgaagagaagaaagatggatcatgccgactgtcttatccatttttgctcgatttggaggcgcagacagctcggagcctcggagttcttcccttctgctttcctggaagactgcatcgccatggtggtgaagtcagaaaggttaatcttttcccttgtgtaaagatcaggtaatagttaaaacaaaaaaagattcaataacaggattgcagaaggaggcttctgcacaaggtgggaagccagtaccacccaaagaaggattcacagaatcgtgaaatttttgtaggttgtagggaaaaattccattgtaaatacgagatatgaaacagaaaggaggtgtcagatctacatcaaccttttgtaattatgtagttaaaataaagaaatactagatggtttatattggagggacctctagtttttttccctcgtatatcattgaataagagcctcactatttttcttaaaaaaaaaaaaaaaatcactgttggcctgagatttaaagaaaatgccaagtacataccatcaacttcgaaaggcccatgcaagtccatgcatgaaaaatctgcacatattgcctctgaatgcagtgcattctattttgtgtcccagcaatcacaatccatttctttactagaagaaactgataggcagataagagaaaaatcatgcatggagcaagtaagacgcttgaaggaagcccgcaatagttatcatgaggagttggtggattgtgtcaggcattgtgtttggtatcgtgccactgttttttcttcatggaagcaaaggggaatgtatgcaacttgcatgtgggttgtggagcttcttttggtgctcagtgattcttcttccattttccactatattcctgaattctatgtggaatcattggtagactgtttccatgccctgcggcggagtgatcctccttttgtctctcctgcagtatttcttaagcatgggctagcttcatttgtcactcttgttgtcaaacactttgatgatccaaggatatataaagaattcatgtttgtatttgagaacaatcgggaggctataaacagaatgccaagatcacttctgtcagcttttggtaatagatcatggatacctgttaccaacatacctttccaactctgcaaaggttttggctttgcttcatccaagaatgctgaaccttcatcatctgcaactttccagaatgtcctactcagggagacatgtattcatgaagaagaactgtttttatcctttctcaatcgacttttcaacacattaagttggactatgaccgagtcctccatgtccatccgtgagatgcaagagaagcgccgggttgccgatttgcagcaaagaaagtgcagtgttatttttgacatatcatgtagtcttgcaaggatcttggagttctgcgccagagagatccctcatgcgttcctcatggggccagatatgaatctgcggaggttggctgaattagttgtctttattctgaaccacatcatattagcagccgatgcagagttctttgacatgactctaagacggccagggcaacatcaagaaaaaacaaattgcactatgatcttggctcctcttgttggcattatcctcaatcttatggaaagcagcagtacttcaggccatagggagttaaatgatgtgattacagtgttcacaagcatggattgccctgccacaatccattttgggttgcagtacctactgagctacaattggagcaatgttctccgaggtgacgcttcccttgcaaagctagctcagcttgaagaattctcccattactttatgcacatcactatgtcagcggatggcaatgaagagcaaggtttcagcactgccagtaatgaagaggacaactgctgcatatgctacaattccgattcggataccacattcgagccatgccatcacaggtcctgctacggctgcataaccaggcacctcctcaacagccaaaggtgcttcttctgcaatgcagtggtgacttcagttaccaggatagctgattcgcgcatcgaatctcggtcacctttggcaccgtaa

SEQ ID NO: 69192 - DNA, 344 bp, Oryza sativa
  Clone ID: PAT_MRT4530_69885C.1
acacccggataccctaggactatccgggaaaaacaaacgtgaatacgaaggtatgagccgactcaaaaacgtgagcatctagagggattcgattgtaccatgcggctgccgataacaatttggtagctgggtcaaacttctacaaagtaacactgatcgatctgtacgtatatggtgcaggtgacactgatgctatactaggctcttaggctgtttacaccgaccgggacctaggctcgactaacatataatgcacgatgagagattggcggcgttagttactcagctggcgtgaccatcgagcttcgctaggtgatgatccaaagtgaccaacacatatgggg

SEQ ID NO: 69193 - DNA, 331 bp, Oryza sativa
  Clone ID: PAT_MRT4530_69886C.1
gaaacatgtttaatttcttggtttacttaacacacgttcacaaaaaattaattttttttttcaggggaaatcgatggatccccctttttctttaacttgtttttaattttcatgtccaatcaaaaaaacacacccccccacacacatgcgtgcactgaatttttttgagaaacaaactcgattgatttgattttgattccctggggattaaaaaaaaacttaaataaaaatttcaacaatctttccacctttaaggagcttgttttctttttaaaaaattttttggcgcctttaaaccaccttttgttgccggccttccctttgaaaattt

SEQ ID NO: 69194 - DNA, 568 bp, Oryza sativa
  Clone ID: PAT_MRT4530_69887C.1
ctgcaggttttttttttttttttttttggctgagaaagggtaaaaaacatatattcaaaaaatcttagatgttgcctcctcgtttttttttccaggaaacctaatttcacataccaaaagaaactgagggcaaatatagtttactttatgttcataaaaaactgataatggacctggcagcggatacgatgatttcagcaaccacacttcatgtgaagctaaacaggaccaagtagcaagagactggcatatgataccaatatcagtacaacacattaccaggttaaataagcaagcaaacagccacacgccgatttccattcatctgttttgtatgccaagcttaaactgaggacaatgagcagccctgaactggaggggatcatcgcatcgatcttcaacaccgccagaagcaaggacaaagcttgaggaggctgtgaattatggagcagtgacttgttggtgagatctgtaaacgggaggtgccgggctatcaatttagcttgctaacgttaacttcctgcttaccaaaatcattcaacattgtcgttagcctgaattaactgta

SEQ ID NO: 69195 - DNA, 746 bp, Oryza sativa
  unsure (1)..(746): unsure at all n locations
  Clone ID: PAT_MRT4530_69888C.1
ccggccgggacactagaacttagcctaagatcaaagcttcctattataatttgcaatgaaaggaggagagtcggtgccttcatgggtagaactactgctctcgacgcagttttttactacttgcagtagccatctcatctctcctcgtaacgaatgcaacttcttttgcatcgattgccagacaccacaagcatccttttgctattactgtcgtttaagtcatcattcctctcatcatgtaatccagatcagacggtcgtcataccatgatgtggtgaaagtttctgagttggaggatatccttgacataagtgatgtacaaacttatgtgatcaacagctcaagggttgtgtatttgactgagcgtcctcaactacggagttgtggtgtttcaaatacaaagttatcaccatcacaaacttataaatgtgagatttgcagccgtactcttcttgatgatttccggttctgctctcttggttgcaatttcgcagccataaaaagagacaatgagaagaatgtggctcaaaatggtattgcctccaatgcaaatgaagttaagattggcaccaacaatggcagcacaaatgctggaagtgccaatgagatatctagtgatgctaataactaccgcaatgaaataccttcatcaacaagagttattcgtcaccgtcggaaagggattcctcgccgtgcnacatttttctgaagaaaagggctcattgacgttgccgaagaatcataaa

SEQ ID NO: 69196 - DNA, 226 bp, Oryza sativa
  Clone ID: PAT_MRT4530_69889C.1
ccgggacccctgtgttgggatgtgtgtgctctgtgtgggtgtgttgctgaaaggtgcggccatgtgaggatggcatggtgaacaagctatgcgtgatgtgatgcaatgcccaatgcatgacgtgccaaaaacacaacaacaaatggatgaagtgacactgttttgtcgagttcagaggaagcaaaagtttcgctgttacagctctgaaaaaaaaaaaaaaaaaaaa

SEQ ID NO: 69197 - DNA, 244 bp, Oryza sativa
  Clone ID: PAT_MRT4530_6988C.1
atggcgacggtgagcgatcggagggcgacgacgatgggcggacaagctctgggaccacctaggggacaaaatggagggagaggggtggtccacggcgagcggaaaccatggccgaaggcggcgaaagtggtggtgctcaccggcgcgcgaggagaagcatgctccggcggcgggattgaccggggaaacgacggacggggtagcgcacaagcttgcgaacccggcggcgacaacgactctagcg

SEQ ID NO: 69198 - DNA, 1083 bp, Oryza sativa
  Clone ID: PAT_MRT4530_69890C.1
acggtacgaaattctagtgatagagtagaaaaaaattataatattacatcctgtaggtcgtaaccagaaaaaacaaaaaaatgtactgccgcccacacaccgacaacgccaaaccacaagtcctggagaagagtagcaccggactggccgctgctaaactaacaacagaaacaaccgagatcgcccaaaaccctacccttacaaacaacacaaaatgccctccgccgtggccaacttgtagtatttaggacgccgccacgagaggaagaaatttagagcgtgcttgcgccaaaagtttgggtggttttggtaaggggatgcctagatgacgtctccaaggagagaagcgatggaaacaccgccgccgccgtccgtcaaggtctcaagagagccgagactgggctttcgcctggcaacaaccgttgaggggtgagacggcacgacaacaccctcaggaggggaatgacacttgaacgccatcgattgtcggtccggccgaggccgggctgggttttcacccgccgtccaccacctgccaatctacccatggctgccggccgcaacttcttcggtgagctggcgccacctccaccgtcacggagtcgaacctcgcccgccgccgtgccaccgggcaccgccgtcgatcgccagcagtagaccccgccaccggtcacttccgccgccgccacccccgccaaatgccaccgccccacggcactaccccgccgccaacttccttcctaccagatccggccggaacgcacaaatctgggcggttccaccgttccaaatgccgagcagccccctacccctgcgtggtgagagaagcgaagccccgccgcccccatccttgcggtcacgcagctttgccgacggccactcaggcggcggcgaggcagaggaggagggaaggagaggtcggcgatggcagccaagtcgcctcccgtgtcgcccgagggggatggcgacgcgagggccgttcgctcctcaaatttaacggagatccatgggtggatgtccactcaaccaaatatctatgagaaaactttaaaaaaattgtatgtaaattcaaattcaacttct

SEQ ID NO: 69199 - DNA, 836 bp, Oryza sativa
  unsure (1)..(836): unsure at all n locations
  Clone ID: PAT_MRT4530_69891C.1
cctcaacacattgcacttttatttagtataaaaaccgatagcaaacaacatcagaaacatatgctgtatggtatggcaatgataataataatgcttattcctaagcctactacgcatcaagacgtgaagtcgtgcttcttggtgctcctcaggttcgcccccgtcgtcgggtgcatcgctatggcccctcccctgaccggccgggcctggccacaccatgttctgcgtcgtcgagttccccggcagcgccaccgtcgcgtatgtttgtgtacgtcaccggccgagtactcggcggcggagcggttacggcacgttaaacctgagggtcccgttcctcagactggggcttaagctctccagcaccgtcgtacgtcgggacaccccgccggcgccggcgccggtggcgttgatctgcaaggcgatgaacacggctgctgccgaccatgccggcgccctgggtgttgatgccccacgccacccacccgccgccgctgctttgcggcgcgcggaacgcgacgtccgcggtgccgttcgccgggtggtacgtccagtgcaggctggcgccgagcaccggcagggtgtcgcaccgccggtacgtccggcccgcctggaacgtcgcgttcgcgcagtccggctgcgccgccgccgcgtacagtagcaaggccgccgcgaggagccacgccgagcgtcctagccgcgccatggtggtggacgagtagctagcacgcggtagggaggcgaaggcctcgtgccgaattcctgcagaaatgagaataccnctaaatctagagcggccgccnccgtggcgcaacccaaacntcgagcttcagtgtcaa

SEQ ID NO: 69200 - DNA, 7567 bp, Oryza sativa
  Clone ID: PAT_MRT4530_69892C.1
atgaacgggaagcacacaaatgtagtgcacgttgataactacctgacgaagctccaacaagggaactggcatcatgaaggccccttcctatgccaagagcagggtgaccacaccttgagacgtcggctgggcctcgctgccgtggtggccggagccaaccggtccagcaccctggcggcgcaggtgcttgaaggcggagtaggagttgtccgcgaccacgcgcctgaaccgggcctgcggcttctcctcctcctcgcaggctcggcgcgggcggcgccctcgccgtcccccgaggaggccgggcgaggctggtgcgcgagcgcgaccccgtctgcgccggcggtggaggagagccgccaccgcgagggccgcgaggcatgcggcggcggccgcggccgcggcggcgcgcgacctgaggttggcggtcggcatgacgtcacgggtgggacggctgacgtcaggcaacggaggcccaatccccggatccgcccgcgccggatgctcctccgccgcgccgtcgccgccgtagcggagcgctcctcccgattatcgcactcgcgacccctcctccggcgcgcgggctctgcctgctctagcctcaccaccaccaccacctcccaacatcgtcacggccgccgtcgcgcgccgccggctgagagcaacgccctcacaaccaccgccgcgccacgcccgttcccggactactccccgccccgcccggactcgccggccgacgacgacctcgcgcgccgcctcgccgccgccgtcctctcctcccctaacccgggctctctccctcccctccccttcctccctctcctccgcccacttcacctcctcctcgcgctccccctgctcgcctcgcacccgcacctccccaccatcctcctgccgctcctcctcctcttcccctccgggcctcgcccgcaccctcacctgctccagtccttcgcggtcgctgcccacctcgccgccgttcgcgatcccggcgccgcgcgggccatcctcgttcgcgcccttcgcttcccgtcccctcatcggcatttcgtcgagcagttcatctccacctacaaggccttctcctccgaccctgtctcattcgacctcctcctcctgtgcctcccctccgcgcctctcctcctccgcctccgccagtacggcatctctccctccccggagtcctgtaacgcggtgctctgccgcctcccgcttgatgaagccgttcagttgtttcaggaactcccggagaagaacacctgctcgtacaatatactactcaaggcgctgtgcaccgctggccgcatcaaggatgcgcaccaactgtttgatgaaatggcatcgccgccagatgttgtaacatatggcattatggtgcatgggtattgtactcttagtgagctggagactgcgattaagctgttaagtgaaatggcagcaagggggttggaactcaacccagtagcctatactagtgttattgcattgttgtgcgacgaagggcaggtttcagatgctgtgagggtggtagaggatatggtgatgcatggagtggtgttggatgcagcggtgttcacaacggtaatgagtgggttctgtaggaaaggtgatttggcagctgcaaggaattggtttgatgagatgcagaagagagggttggcagctgatggagtgacgtatactgcgctgatcaatggcctttgtcgggctggagagttgaaagaggcagagagagtgcttcaggagatggaggacaagggattggatgttgatgcggtcacatatacagttctcattgatgggtactgcaaggttgggaagatgacggaggcctttctggtgcataacaaaatggtgcagaaacgagtgacaccaaatgtagtgacatacacggctctgtcagatggactctgcaagcagggggatgtgtgtgctgctaatgaactattgcatgagatgtgcagcaaggggttagagctgaatattttcacatacaactccctgatcaatggcttgtgcaaggctggcaatttggagcaagctatgaggaccatgatagacatggatgaagcaggtcttaaaccagacgtttacacatatacaactattattggtgctctttgccagtccaaagagcttgacagggctcacagccttttgcaagagatgttagataaaggaattaagcctactattgtgacttataatgttctaatgaatggcttttgcatgtcaggtagggtagaaggaggtaagaggctgcttgaatggatgctggagaagaacatccacccaaataccacaacatacaattctcttatgaagcagtattgcattgaaaagaacatgaaatcaaccaccgagatctacaagggaatgctttcacaggaggtgatacgtatgggattgctcatcatggttattatgcaatttgcaagcgccaaccggactggcgctgaggtgggacttggccgcaaccccaaggcccagaccagcaagccttctggatggcttgcgggctgggacctcaacgccagccaaaatggcgctgatcttgggactggcgctgaggtgggacttggccgtttcggccttggcccagcgaagcaagccttctggatggcttgcgggctgggacctcagcgctagccaaaatggcgctgactgtgggaaactcagcgccagccaacctggcgctgaggtgggacttggccgtttcggccttggcccagccaagcaagccttctggatggcttgcgggctgggacctcagcgccagccaaaatggcgctgactgtgggaaactcagcgccagccaacctggcgctgaggtgggacttggccgtttcggccttggcccagccaggtgcactggcgctgagtttggacatgtcagcgccattttgcatggcgctgacgtcccagccctgctaaactttagcaaaactctagtgcgaggacgaggcacgtcgggggtgtacctccagtcctgcgaaggagcccgccggcgtcgtggtcgagacgggccgggctgcaagatatccggctgtgacgactctggtgcgtcctctagctgcgagggaccgagctcatccgcctcctcttctctgtcctcatccccttcttcctcctcatctccttcctccgcctctttgtcttgctcgccctcctcgtcacccacctccccttcttcatccccctcttggtgggcatgagcatgttcgaccacatcagtcgacctgcagccgagccttgctgccaacttccgacatcgctgccgtagtctctgtagggcgttgcggagggtgccgccctctccttcggagccaggagccgtgcctagcgccactcccgcgtcgttgacggtccgcaagagctctcgagccactctgtcgcgaacaggtcccgtctcgaccgtggtacctagacgggtacgagtatcgtactcgttctgctcctcaacatcctcggggtcatccgctatgtcggctagtgtccaagccggacgtaggacaagacggtaggtcctgtggagccacgccaagtacaagtcgaactccgtcccgttgtgctgaccctggtctggtactccattctcctcgaacttctcccattgcgtgatatgatcctgatggtagtaagcccaatcagtcaccttcttgttcttccgacggtccaccttgtgtaggtcgatactcgtggagaaacggtgtgggattgtttgaagcctcccgaattgccgcatcacgcggtggcacatctggaactccactgcatagaagcagatcagtgggcaccgtagggtcttcaacgcatcctctatatggcacatgggattcagttctagctcgagcacttcctgtgcctgatatggcatccacaccacatgttctggctgtaggtagtccatctcgtttgtgtagtggtagtacgccaaattcctgcggcctactactggagatgggaccgattcccacaggtgagctacagtgggacgtcggtctgcatcctggtgcggccaagcctgatgggtcctccacatgggccgaccaactggaagcctcatccacatccaaacctgtagcaaccaaacacagcctgctaggttcgcgtccccgccttgccttcggcaagcatcacagagttgccggtacaaccaggctagggcagccgacccccagctgaaggtacccgcctcgtcccagtccgcgagcaacggcagccacatccaagaagccatgtctccaccagagtcagggaacagaatactgccgaagatgtacagcacgtacgccctgcagtatcgctgtactgtagcctcgtctgcctcagcgggacactgaccgaagttggctcgcaaccaactcaaaggaacccctgatgtcttcgtctgcctctgaccatcaggtgccactggaggctccagaccaaggtactcctcgaccctctccctccagttccccgacgctgtgtcacctgtgaccgcctgaccccggataggaagacccaggatcatggcgacgtcctccagagtgaccgtcagctccccgcacggtaggtggaaggtgtgtgtctctggacgccaccggtccactagggccgtcagagcagcggcgttgtacagaggcaccggtcgctgcgccatggtcacgaacgccaagagcttcgcccgccgtaggtacgggacgtaccggtcgtcgaacagtatgtgcgccgtgtgacctctgactcgaagggtcttcaagcgctctccgctggcaatctgtggggcccggtgcttctcctcgtagaaatcctccaaccccggaaagtgctccatccttcttgtccttcttcttcctcgtgtgttgttctttaacgacaagtcgggcacgaagaactctccatcataacttggccactgcgatggatctaggtaaggttcaaacctaggggagtacgagtcctgcacagccttattggaagcttcataacacattcggggggccacctccacatccaaacctcgcaacatacaaacggttatcatgtgggagcatggcaagtgatggagctgagggaactgacaactacatgtgttatctctcgcaaccacgacgtagtgacgtccaccccattgaaccccagccgccgtgactccgccttgctcgctgacctcatacttcatcgaagggaaatcaaaacatgctgctctttgccccaaggttcgtctttgctgctcctccaacatgtccttaacttttgtgggccacttctttccacacaggatatctacagttgcctctttgtgtctatcgacaaaccaactattgcacttcgaaaatgtgtatgccacaatagctgtaaccggcagtttccgaatgcctctcaatacattattgaaactctcggccatattactagtcatgatgctatgacgacgcccgttggtatcaaatgctcttgcccatttgaccttaagtggcatatggtcttctagccacttctttggcctctctccgaccacacccatgaggcgttttatctcatctaggaacaatgctttctcatttatttgacatatgcgctcaagatctttcatctgatcagtcgtagctccagctgtgtagaagttagcacagaagtgcctcatgcaccacctgtggtgaatggttaggtgatgaggcatgatgtggatgatggagttcaaaatgccagggtgtctatcagaaattatacacacttctctattaggaccgatcaacttgtttctcaacatgttgatgaaccactcccagttggatgtattctccttctctaccagagcaaacgccaagggaacaagatgtaacccggcgtcgacccctattgccgtgagcaatgtaccttggtatttaccggttaagaaagtgccatcaattgctagcaccggcctcaagtgcttgaatgcttctatggactggccaaatatccaatatgcacgtccaaatactcgcctctgtactccatccaccatcctggacttctcgggatgagcctcaacacggaaatgcatggagggttctttggcctcgtcccaatctccccaaataaccttcatagcaacttgcttagcacgccatgctttgccatacgtaggccgatagtgccatatttgctcaactgcctcgacaatcgctgctggagataaagttggttcagctcgcacaaatgcctgtaacctgtttccaataaaccttgaagtaagttgcaaatgcttgccggttacttccgcactacagcatgtgtggtcttcgcccaccctagtcacccgccacctatctcctccactcttccttacattaatctgccatttgcaatggcgatcgagacaagccacagtatactttactgacgcgttagattccttcacatggtacggccggtggacacggatagaataactctgtagccatattttcagatcatccatcgatcgaaactccaaccccttccttggttcatcacacattggttcgaaggcaccgtcatattgtggatccccatcagcaattgctagcccagatctggtaagatcctcgaattgtgttatttccgggtttctacccaccagtttcgcaaacacagtcctttcatgctctgacatcttacgcactgaacgatcatcatcggagtcggaagcggactcatccaattcatcctctgtatcatactccaaccagcctgggttcaatccagtgcgtatcatagcctcctcacactcattcttagcattcgcttcttcctcaggcaactccacatcatctcctacctcccgaccatcctcaacatctccttcctctcttaccggcacattctcctccacattaacttcctcccttaacggcacattgtcctctgcatgtacttcttcccttaacggcacattctcctctgcatgtacttcctcccttaccgggtcattctcttccctgacctccacatccgccatatcatttactccctcgcccccctccacgtcttcctcaatcaattcttccttcctactacacctctccgacagttcatgacaactaatgggtgattctatgagtggactttcattaaggtctataagttctttcttccctatcctaccatctttcttccatgcaaacacctcaagagatttgaaatgtgaccccaatactatatctatatatgtttgccattcgatctctccattcaagtctaacataaacttatgtgacatgacaccgccgcccacatcgtatctcccttgcataccaaccgactcatcattccaatccaattcatgcttgatgcgagacattaactcctcaaaggtaggcttcgcaaaaaacactaattgtctaactgtcattccctcaaattggcttccatgtgtactttcatctaccacacaaccaccataatgaagccggaccaatctatccatctcagcgccaatgcgcttggcgctgagccgacagcctagttttggttgaagtttttggcaggggttagtttcgaaataagtttttgaaaagggtcaatttgtcaaaaaaacggatgtagacatgcatggcat

SEQ ID NO: 69201 - DNA, 10310 bp, Oryza sativa
  Clone ID: PAT_MRT4530_69893C.1
ccagatgtagaaacaaggtagtacatgaatataggggggcacagtacaggtacaaggttcaggtttaatgaaatggaagtaacttcgaatgtaaactagaacctcagggtacaacagcagcagcagctaaagtctcggattgatctgcagcaggaggtttctttgatggcttgtagacactgaaatcgccaaaatcccgccgtccactgtgctttatattccagcccgaaggcaaataacgagggtgaagagaagctacgaagacctgcctccaccgttggctgaactggttaatggcctcctcgccaccgttggaaagcaaaagctccacgacctgtttaccgtgatgcccatgacctaacagggagatcttcttgtcaccgttttggggaatggcttggttagaattgttactgccgcatggatccctgtcaagatcaccgtttgcaggattaccacctaagcttgcttgctgcacggtgtctgcctcaatgctagagtcagaaatgggattagccatacggggtggatagattgtgctttctttgctcagagttggaccatgtatcttattacccccagagcctggctgactggtatgttcatcaatacctagctgattgttattctcatcaatgtctggatgactgttattctcaactccatttttagaaaattgctcagcatatccattttctggatcatgttcattattctcaacaatgccgttgctgttgctttttctaataacattttgagcctgggatcggtaagaaaaaccatttttctttgaatgtcgccttcgctcattgggactcatgccaacaagtaatgccatctcaagatcttcaggagtcacatccctaccaccatagtatgacttcacaatctgcattagctcttcatatctcttcaaaggcatattggatccatgtcttaaaagggccattgcagcagtcctcagctgcaaaggagacacacctgttccatttgatttatcttcagataatgatgcaccagctattaaacttatatcacctgagtttaatatcttctgtacaaaaagcggcaccccaaattctttggctatttgcctcttgtacttctcagctgctgaatgagcaatttcatggcagtctacgcaaagaagtacaatatcatgtgaacgatggctcttcagatgctctggaaaatgcatcctgtagcacgatggtataattctatatctgatatagtggctcttttctccacatccgacacaaatatttttcttgctctgaatatagaagtcattatcctcatcctctgggcgacccttaggttcaaacaagagcacaattgctggaggattatcttctattaattttgctaaattacgttgaatataccattccaactttttacggtcacagtagcaaagcagtcttccatcactggcgtagatcctgcaattgtgatatactggggacttgcatgaaaactttttaatgaataattcccgggaagcctttttgttagttggtgccatcaacaacttctccccacttgatgcaaaggagaacatatttttttgcttcaaactcagctgtgatacaaggttataattaaaaactgatagtcgacataatctacttggatctttgtacttctcaagcaaatttttaaagatggcatccatgctgacagtgatgtcctcaatcagatagcgaagttcttcagcgtgagcaacaacaataggtgaaggtggcggcaaggaaggatacacagttgaattgcttgtttcagtttctaatatggcagaacacacctcagttggacctcttggaacactaacagcaagggaagctatagcttggtctgacaggacataccgtaagctctcatcatgcatgcgagccattaaatccctccatgcacaaattttccaaacaagatccatatttgagcgatggctggcctcgaagaaaaaattgattttgtcattgggagagtctgaagcatcgtaagtttttgcatgaagctctgatgccaaacaatttgcaatgtacaacagataatgcgcatcacaacgggcatactgaatcatttctggtgttagtgggcgtaatctccaatcctcacgctgcattgtcttgtctgtggtcactccacaatataattcaagcaaatatgctaatgacttctgtggttttgatagaacctcacatgccttggcagtatcaaacatattcacaacataaatatgaaagtctctctgaagccaaagaacatcattgtcagctccatggaagatcatgtaaatcatccatgctgttagggccccatgttccagaaattcaaatttacaagaagatttaagggctttaggtttgttggattgatttgttaggccaaataccaaactcagcattcgttcatttagagtgttcggggcccagcttctatagaaattacatgtcttattaggattggctgaaaaaatttttgacttattgtccttcaaacttccatattttggttgtttgtgtatagtggttcctggccagattgaaggattggcaaaaactggtcgtagaatgctcatcacgtcatgcagcgctattgtgtctattaaataatctgccttctgggtagagatctgcattagtgcagtgtatcccaagaatgaccgaaggctatgttgctctgtatcaacagcaaaagctttttcatcatccaacaacctagccaggtcctccaactgagcatctgtttcgacccaattgtatgaagtgctcatttctgggcatcgatcaccaggcataaaattctgaaaatcaggtgggttgttcagcaaggaagtgatttcctcctcaaatggatgcaccttttgtgatgactcttgagacgtcggctgggcctcgctgccgtggtggccggagccaaccggtccagcaccctggcggcgcaggtgcttgaaggcggagtaggagttgtccgcgaccacgcgcctgaaccgggcctgcggcttctcctcctcctcgcaggctcggcgcgggcggcgccctcgccgtcccccgaggaggccgggcgaggctggtgcgcgagcgcgaccccgtctgcgccggcggtggaggagagccgccaccgcgagggccgcgaggcatgcggcggcggccgcggccgcggcggcgcgcgacctgaggttggcggtcggcatgacgtcacggctgacgtcaggcaacgtgacattcaatatgctatcgcgtcccgaaagtttttcatttttctttgccaaccgatctgcccgtctcccgccgccgccgccgccgtcgccgcctccggcaggaggcccaatccccggatccgcccgcgccggatgctcctccgccgcgccgtcgccgccgtagcggagcgctcctcccgattatcgcactcgcgacccctcctccggcgcgcgggctctgcctgctctagcctcaccaccaccaccacctcccaacatcgtcacggccgccgtcgcgcgccgccggctgagagcaacgccctcacaaccaccgccgcgccacgcccgttcccggactactccccgccccgcccggactcgccggccgacgacgacctcgcgcgccgcctcgccgccgccgtcctctcctcccctaacccgggctctctccctcccctccccttcctccctctcctccgcccacttcacctcctcctcgcgctccccctgctcgcctcgcacccgcacctccccaccatcctcctgccgctcctcctcctcttcccctccgggcctcgcccgcaccctcacctgctccagtccttcgcggtcgctgcccacctcgccgccgttcgcgatcccggcgccgcgcgggccatcctcgttcgcgcccttcgcttcccgtcccctcatcggcatttcgtcgagcagttcatctccacctacaaggccttctcctccgaccctgtctcattcgacctcctcctcctgtgcctcccctccgcgcctctcctcctccgcctccgccagtacggcatctctccctccccggagtcctgtaacgcggtgctctgccgcctcccgcttgatgaagccgttcagttgtttcaggaactcccggagaagaacacctgctcgtacaatatactactcaaggcgctgtgcaccgctggccgcatcaaggatgcgcaccaactgtttgatgaaatggcatcgccgccagatgttgtaacatatggcattatggtgcatgggtattgtactcttagtgagctggagactgcgattaagctgttaagtgaaatggcagcaagggggttggaactcaacccagtagcctatactagtgttattgcattgttgtgcgacgaagggcaggtttcagatgctgtgagggtggtagaggatatggtgatgcatggagtggtgttggatgcagcggtgttcacaacggtaatgagtgggttctgtaggaaaggtgatttggcagctgcaaggaattggtttgatgagatgcagaagagagggttggcagctgatggagtgacgtatactgcgctgatcaatggcctttgtcgggctggagagttgaaagaggcagagagagtgcttcaggagatggaggacaagggattggatgttgatgcggtcacatatacagttctcattgatgggtactgcaaggttgggaagatgacggaggcctttctggtgcataacaaaatggtgcagaaacgagtgacaccaaatgtagtgacatacacggctctgtcagatggactctgcaagcagggggatgtgtgtgctgctaatgaactattgcatgagatgtgcagcaaggggttagagctgaatattttcacatacaactccctgatcaatggcttgtgcaaggctggcaatttggagcaagctatgaggaccatgatagacatggatgaagcaggtcttaaaccagacgtttacacatatacaactattattggtgctctttgccagtccaaagagcttgacagggctcacagccttttgcaagagatgttagataaaggaattaagcctactattgtgacttataatgttctaatgaatggcttttgcatgtcaggtagggtagaaggaggtaagaggctgcttgaatggatgctggagaagaacatccacccaaataccacaacatacaattctcttatgaagcagtattgcattgaaaagaacatgaaatcaaccaccgagatctacaagggaatgctttcacaggaggtgatacgtatgggattgctcatcatggttattatgcaatttgcaagcgccaaccggactggcgctgaggtgggacttggccgcaaccccaaggcccagaccagcaagccttctggatggcttgcgggctgggacctcaacgccagccaaaatggcgctgatcttgggactggcgctgaggtgggacttggccgtttcggccttggcccagcgaagcaagccttctggatggcttgcgggctgggacctcagcgctagccaaaatggcgctgactgtgggaaactcagcgccagccaacctggcgctgaggtgggacttggccgtttcggccttggcccagccaagcaagccttctggatggcttgcgggctgggacctcagcgccagccaaaatggcgctgactgtgggaaactcagcgccagccaacctggcgctgaggtgggacttggccgtttcggccttggcccagccaggtgcactggcgctgagtttggacatgtcagcgccattttgcatggcgctgacgtcccagccctgctaaactttagcaaaactctagtgcgaggacgaggcacgtcgggggtgtacctccagtcctgcgaaggagcccgccggcgtcgtggtcgagacgggccgggctgcaagatatccggctgtgacgactctggtgcgtcctctagctgcgagggaccgagctcatccgcctcctcttctctgtcctcatccccttcttcctcctcatctccttcctccgcctctttgtcttgctcgccctcctcgtcacccacctccccttcttcatccccctcttggtgggcatgagcatgttcgaccacatcagtcgacctgcagccgagccttgctgccaacttccgacatcgctgccgtagtctctgtagggcgttgcggagggtgccgccctctccttcggagccaggagccgtgcctagcgccactcccgcgtcgttgacggtccgcaagagctctcgagccactctgtcgcgaacaggtcccgtctcgaccgtggtacctagacgggtacgagtatcgtactcgttctgctcctcaacatcctcggggtcatccgctatgtcggctagtgtccaagccggacgtaggacaagacggtaggtcctgtggagccacgccaagtacaagtcgaactccgtcccgttgtgctgaccctggtctggtactccattctcctcgaacttctcccattgcgtgatatgatcctgatggtagtaagcccaatcagtcaccttcttgttcttccgacggtccaccttgtgtaggtcgatactcgtggagaaacggtgtgggattgtttgaagcctcccgaattgccgcatcacgcggtggcacatctggaactccactgcatagaagcagatcagtgggcaccgtagggtcttcaacgcatcctctatatggcacatgggattcagttctagctcgagcacttcctgtgcctgatatggcatccacaccacatgttctggctgtaggtagtccatctcgtttgtgtagtggtagtacgccaaattcctgcggcctactactggagatgggaccgattcccacaggtgagctacagtgggacgtcggtctgcatcctggtgcggccaagcctgatgggtcctccacatgggccgaccaactggaagcctcatccacatccaaacctgtagcaaccaaacacagcctgctaggttcgcgtccccgccttgccttcggcaagcatcacagagttgccggtacaaccaggctagggcagccgacccccagctgaaggtacccgcctcgtcccagtccgcgagcaacggcagccacatccaagaagccatgtctccaccagagtcagggaacagaatactgccgaagatgtacagcacgtacgccctgcagtatcgctgtactgtagcctcgtctgcctcagcgggacactgaccgaagttggctcgcaaccaactcaaaggaacccctgatgtcttcgtctgcctctgaccatcaggtgccactggaggctccagaccaaggtactcctcgaccctctccctccagttccccgacgctgtgtcacctgtgaccgcctgaccccggataggaagacccaggatcatggcgacgtcctccagagtgaccgtcagctccccgcacggtaggtggaaggtgtgtgtctctggacgccaccggtccactagggccgtcagagcagcggcgttgtacagaggcaccggtcgctgcgccatggtcacgaacgccaagagcttcgcccgccgtaggtacgggacgtaccggtcgtcgaacagtatgtgcgccgtgtgacctctgactcgaagggtcttcaagcgctctccgctggcaatctgtggggcccggtgcttctcctcgtagaaatcctccaaccccggaaagtgctccatccttcttgtccttcttcttcctcgtgtgttgttctttaacgacaagtcgggcacgaagaactctccatcataacttggccactgcgatggatctaggtaaggttcaaacctaggggagtacgagtcctgcacagccttattggaagcttcataacacattcggggggccacctccacatccaaacctcgcaacatacaaacggttatcatgtgggagcatggcaagtgatggagctgagggaactgacaactacatgtgttatctctcgcaaccacgacgtagtgacgtccaccccattgaaccccagccgccgtgactccgccttgctcgctgacctcatacttcatcgaagggaaatcaaaacatgctgctctttgccccaaggttcgtctttgctgctcctccaacatgtccttaacttttgtgggccacttctttccacacaggatatctacagttgcctctttgtgtctatcgacaaaccaactattgcacttcgaaaatgtgtatgccacaatagctgtaaccggcagtttccgaatgcctctcaatacattattgaaactctcggccatattactagtcatgatgctatgacgacgcccgttggtatcaaatgctcttgcccatttgaccttaagtggcatatggtcttctagccacttctttggcctctctccgaccacacccatgaggcgttttatctcatctaggaacaatgctttctcatttatttgacatatgcgctcaagatctttcatctgatcagtcgtagctccagctgtgtagaagttagcacagaagtgcctcatgcaccacctgtggtgaatggttaggtgatgaggcatgatgtggatgatggagttcaaaatgccagggtgtctatcagaaattatacacacttctctattaggaccgatcaacttgtttctcaacatgttgatgaaccactcccagttggatgtattctccttctctaccagagcaaacgccaagggaacaagatgtaacccggcgtcgacccctattgccgtgagcaatgtaccttggtatttaccggttaagaaagtgccatcaattgctagcaccggcctcaagtgcttgaatgcttctatggactggccaaatatccaatatgcacgtccaaatactcgcctctgtactccatccaccatcctggacttctcgggatgagcctcaacacggaaatgcatggtagggttctttgctttgatggcacgcatcagtgtaggcaagcgaacatacgcctcgtcccaatctccccaaataaccttcatagcaacttgcttagcacgccatgctttgccatacgtaggccgatagtgccatatttgctcaactgcctcgacaatcgctgctggagataaagttggttcagctcgcacaaatgcctgtaacctgtttccaataaaccttgaagtaagttgcaaatgcttgccggttacttccgcactacagcatgtgtggtcttcgcccaccctagtcacccgccacctatctcctccactcttccttacattaatctgccatttgcaatggcgatcgagacaagccacagtatactttactgacgcgttagattccttcacatggtacggccggtggacacggatagaataactctgtagccatattttcagatcatccatcgatcgaaactccaaccccttccttggttcatcacacattggttcgaaggcaccgtcatattgtggatccccatcagcaattgctagcccagatctggtaagatcctcgaattgtgttatttccgggtttctacccaccagtttcgcaaacacagtcctttcatgctctgacatcttacgcactggacgatcatcatcggagtcggaagcggactcatccaattcatcctctgtatcatactccaaccagcctgggttcaatccactgcgtatcatagcctcctcacactcctctcgggtatagaatttcagcctagccaactcccttaggcccatacttacattcttagcattcgcttcttcctcaggcaactccacatcatctcctacctcccgaccatcctcaacatctccttcctctcttaccggcacattctcctccacattaacttcctcccttaacggcacattgtcctctgcatgtacttcttcccttaacggcacattctcctctgcatgtacttcctcccttaccgggtcattctcttccctgacctccacatccgccatatcatttactccctcgcccccctccacgtcttcctcaatcaattcttccttcctactacacctctccgacagttcatgacaactaatgggtgattctatgagtggactttcattaaggtctataagttctttcttccctatcctaccatctttcttccatgcaaacacctcaagagatttgaaatgtgaccccaatactatatctatatatgtttgccattcgatctctccattcaagtctaacataaacttatgtgacatgacaccgccgcccacatcgtatctcccttgcataccaaccgactcatcattccaatccaattcatgcttgatgcgagacattaactcctcaaaggtaggcttcgcaaaaaacactaattgtctaactgtcat

SEQ ID NO: 69202 - DNA, 2512 bp, Oryza sativa
  Clone ID: PAT_MRT4530_69894C.1
atgtcgccggccgccgcctcaccggatgatcgcatccggagctacgaggatttcgcgagggtgcacgcgtacctgctggccgcatccgggatcccgccgtcgctgcaccagcggctttaccgcaagctcgccgacgaggtgttcgacggcggggaggccttctcggtagagccctgcgagggagggaggcagcggaggctcgttctcgccgctgagtggactctagggagggagtccgatgtcttcgtcgtcgaccacgcctggtccttccgcctctccgatgcgctgaagcagttgagggaagtacgaggactggctgagagaatggcggcgctgatgtttgtggatctggacgagagaactgaacttgaaggagcagatgaacaggacaatggggatggagggagtttggcgagttcctaggaggaagtcgagaaagaagggaatctaatggagtagaagggaagtggctttgcaacttggttcgaacttgtgggggttggaatagtgtcggcatgccaatagggttggctctaacttcaaaaatgctgaagttggtagccctgaacctatgaggaaccatgcatctgtatctacagtgtttggctgcctctttatggacgagcttaaagatgtatcgccgctgtaatcaccacaacaaggttgctgtaacaccgaagttcaacacaatacacgcacatgtacctgatgttcaaatatacaaatcaccttttccgatgaaagctggagagtgggctttaagtttctgtgtggttattcctgcagcagactatcactgttcctaagcggaaagcataccattggagaatattgcgtctctcgatctctcagataggtgtatccacaaactaccagtggtgttctctcctagaaaactttcctccctgttgagcttgaacatccgtggtaatcctttggatcaaatgtccagtgacgatctcttgaagttaattagtggatttacccagttacaagagttggaggttgatattcctggctctcttggaaacagtgctatttccattcttgagtgtcttcctaatctatctttgctaaatggtatcaatgtggcaagtataatagagagtggtaagcatataattgattctgcacttaaaccacgtctgcctgaatggtcaccacaagaatcccttcctgaaagagttattggtgcaatgtggttatatcttatgacataccggcttgctgatgaagaaaagatcgatgaaacacctgtttggtatgtcatggatgagctgggttcagctatgcgccacagtgacgatgcaaacttcagaatagcacctttcctgttcatgcccgatggtaaactagcttctgccataagttacacaattttgtggcctgttcatgatgttcatactggagaagagtgcactcgtgatttcttgtttggtgttggcgaggacaaacaacgctcggctaggcttacagcctggttccacacaccagagaattattttatccaggcaagaaacttagtctgtaaacttgtggaattcagaaagtacaaggaacaacttcaatcaagcagtatctgtccttcaagaaaagtaacaccggtgaccaaaagtatccgtccaagtgatggccatgcacttcgagtatttaccgacataccccaagtagaggagtttctaacacgtccagaatttgttctcacatctgatccaaaggaagctgacatcatttgggcatggggttcacctgaatggcttcaacctacgtataacctggagacacatttatctccactcattggagattactgtgtgagaaagagagatggtatggataacttatggattatgaagccttggaatatggcaagaacaattgacactactgttactggtgatttatctgctatcattagactcatggagacaggtcccaaaatatgccaaaaatatatcgaatgccctgcacttttccaaggaaggaagtttgatctgcggtatattgttttcgtccgcagtatatgccctttagagatatttctttctgatgtgttttgggttaggttacaaacaatcagtacactctggagaaaacaagcttttttgaatatgaaacccatttcaccgtgatgaattatattggaaggatgaaccatatgaacacaccagagtttgtcaaggagtttgagaaggagcaccaagttaaatggctggagatccatggacgcatacgggatatgatacgatgtgtctttgagtcagccacagctgttcatcctgagatgcagaacccgttctctagggctatctatggggttgatgtcatgcttgataataaattcaatccgaagattttggaggtgacatattgtccggactgcacgagggcatgcaaatatgacactcaagctctcgtgggaagccagggtgtcatcaggggcactgaatttttcaatacagtgtttggctgcctctttctggacgagcttaaagatgtatcgccgctgtaa

SEQ ID NO: 69203 - DNA, 5950 bp, Oryza sativa
  Clone ID: PAT_MRT4530_69895C.1
atggagcagaggtgcggcgcgcagccacggctcagctgcggggagggcgagcagcggcgcaccgccggggactcaccactggcgacccgaaggaaccacgcggtggcgacgggcggcattggtggatgccaaagaggagctagagaggagatggggaggaggaatgtgtggggcccacgcgccaaacacattggcgctgacgttggccgtgtcagcgccaacgggactggcgctgacattgtgccaccgtggcggccgggccgatccccagctgacgtggcagctacctcagcgccaaccggactggcactgaggtgggacttggccgcaaccccccaggcccagaccagcaagccttctggatggcttgcgggctgggacctcagcgccagccataatggcgctgaccgtgggacactcagcgccagcccacctggcactgaggtgggacttggccgcaacccccaaggcccagaccagcaagcctgctggatggcttgcgggctgggacctcagcgccagccataatggcgctgaccgtgggacactcagcgccagcacacctggcgctgaggtgggacttggccgcaacccccaaggcccagaccagcaagcctgctggatggcttgcgggctgggacctcagcgccagccataatggcgctgaccgtgggacactcagcgccagcccacctggcgctgaggtgggacttggccgccgtttcggccgtggcccagcccagcaagccttctggatggctgggctgggacctctagtgcgaggacgaggcacgtcgggggtgtacctccagtcctgcgaaggagcccgccggcgtcgtggtcgagacgggccgggctgcgagatatccggctgtgacgactctggtgcgtcctctagctgcgagggaccgagctcatccgcctcctcttctctgtcctcatccccttcttcctcctcatctccttcctccgcctctttgtcttgctcgccctcctcgtcacccacctccccttcttcatccccctcttggtgggcatgagcatgttcgaccacatcagtcgacctgcagccgagccttgctgccaacttccgacatcgctgccgtagtctctgtagggcgttgcggagggtgccgccctctccttcggagccaggagccgtgcctagcgccactcccgcgtcgttgacggtccgcaagagctctcgagccactctgtcgcgaacaggtcccgtctcgaccgtggtacctagacgggtacgagtatcgtactcgttctgctcctcaacatcctcggggtcatccgctatgtcggctagtgtccaagccggacgtaggacaagacggtaggtcctgtggagccacgccaagtacaagtcgaactccgtcccgttgtgctgaccctggtctggtactccattctcctcgaacttctcccattgcgtgatatgatcctgatggtagtaagcccaatcagtcaccttcttgttcttccgacggtccaccttgtgtaggtcgatactcgtggagaaacggtgcgggattgtttgaagcctcccgaattgccgcatcacgcggtgccacatctggaactccactgcatagaagcagatcagtgggcaccgtaaggtcttcaacgcatcctctatatggcacatgggattcagttctagctcgagcacttcctgtgcctgatatggcatccacaccacatgttctggctgtaggtagtccatctcgtttgtgtagtggtagtacgccaaattcctgcggcctactactggagatgggaccgattcccacaggtgagctacagtgggacgtcggtctgcatcctggtgcggccaagcctgatgggtcctccacatgggccgaccaactggaagcctcatccacatccaaacctgtagcaaccaaacacagcctgctaggttcgcgtccccgccttgccttcggcaagcatcacagagttgccggtacaaccaggctagggcagccgacccccagctgaaggtacccgcctcgtcccagtccgcgagcaacggcagccacatccaagaagccatgtttccaccagagtcagggaacagaatacttccgaagatgtacagcacgtacgccctgcagtatcgctgtactatagcctcgtctgcctcagcgggacactgaccgaagttggctcgcaaccaactcaaaggaacccctgatgtcttcgtctgcctctgaccatcaggtgccactggaggctccagaccaaggtactcctcgaccctctccctccagttccccgacgctgtgtcacctgtgaccgcctgaccccggataggaagacccaggatcatggcgacgtcctccagagtgaccgtcagctccccgcacggtaggtggaaggtgtgtgtctctggacgccaccggtccactagggccgtcagagcagcggcgttgtacagaggcaccggtcgctgcgccatggtcacgaacgccaagagcttcgcccgccgtaggtacgggacgtaccggtcgtcgaacagtatgtgcgccgtgtgacctctgactcgaagggtcttcaagcgctctccgctggcaatctgtggggcccggtgcttctcctcgtagaaatcctccaaccccggaaagtgctccatccgtcggttggctgagcctttgtatgctttgtccatatcgttcttgaaccttcttgtccttcttcttcctcgtgtgttgttctttaacgacaagtcgggcacgaagaactctccatcataacttggccactgcgatggatctaggtaaggttcaaacctaggggagtacgagtcctgcacagccttattggaagcttcataacacattcggggggccacctccacatccaaacctcgcaacttacaaacggttatcatgtgggagcatggcaagtgatggagctgagggaactgacaactacatgtgttatctctcgcaaccacgacgtagtgacgtccaccccattgaaccccagccgccgtgactccgccttgctcgctgacctcatacttcatcgaagggaaatcaaaacatgctgctctttgccccaaggttcgtctttgctgctcctccaaaatgtccttaacttttgtgggccacttctttccacacaggatatctacagttgcctctttgtgtctatcgacaaaccaactattgcacttcgaaaatgtgtatgccacaatagctgtaaccggcagtttccgaatgcctctcaatacattattgaaactctcgtccatattactagtcatgatgctatgacgacgcccgttggtatcaaatgctcttgcccatttgaccttaagtggcatatggtcttctagccacttctttggcctctctccgaccacacccatgaggcgttttatctcatctaggaacaatgctttctcatttatttgacatatgcgctcaagatctttcatctgatcagtcgtagctccagctgtgtagaagttagcacagaagtgcctcatgcaccacctgtggtgaatggttaggtgatgaggcatgatgtggatgatggagttcaaaatgccagggtgtctatcagaaattatacacacttctctattaggaccgatcaacttgtttctcaacatgttgatgaaccactcccagttggatgtattctccttctctaccagagcaaacgctaagggaacaagatgtaacccggcgtcgacccctattgccgtgagcaatgtaccttggtatttaccggttaagaaagtgccatcaattgctagcaccggcctcaagtgcttgaatgcttctatggactggccaaatatccaatatgcacgtccaaatactcgcctctgtactccatccaccatcctggacttctcgggatgagcctcaacacggaaatgcatggtagggttctttgctttgatggcacgcatcagtgtaggcaagcgaacatacgcctcgtcccaatctccccaaatgaccttcatagcaacttgcttagcacgccatgctttgccatacgtaggccgatagtgccatatttgctcaactgcctcgacaatcgctgttggagataaagttggttcagctcgcacaaatgcctgtaacctgtttccaataaaccttgaagtaagttgcaaatgcttgccggttacttccgcactacagcatgtgtggtcttcgcccaccctagtcacccgccacctatctcctccactcttccttgcattaatctgccatttgcaatggcgatcgagacaagccacagtatactttactgacgcgttagattccttcacatggtacggccggtggacacggatagaataactctgtagccatattttcagatcatccatcgatcgaaactccaaccccttccttggttcatcacacattggttcgaaggcaccgtcatattgtggatccccatcagcaattgctagcccagatctggtaagatcctcgaattgtgttatttccgggtttctacccaccagtttcgcaaacacagtcctttcatgctctgacatcttacgcactggacgatcatcatcggagtcggaagcggactcatccaattcatcctctgtatcatactccaaccagcctgggttcaatccactgcgtatcatagcctcctcacactcctctcgggtatagaatttcagcctagccaactcccttaggcccatacttacattcttagcattcgcttcttcctcaggcaactccacatcatctcctacctcccgaccatcctcaacatctccttcctctcttaccggcacattctcctccacattaacttcctcccttaacggcacattgtcctctgcatgtacttcttcccttaacggcacattctcctctgcatgtacttcctcccttaccgggtcattctcttccctgacctccacatccgccatatcatttactccctcgcccccctccacgtcttcctcaatcaattcttccttcctactacacctctccgacagttcgtgacagctaatgggtgattctatgagtggactttcattaagctctataagttctttcttccctatcctaccatctttcttccatgcaaacacctcaagagatttgaaatgtgaccccaatactatatctatatatgtttgccattcgatctctccattcaagtctaacataaatttatgtgacatgacaccgccgcccacatcgtatctcccttgcataccaaccgactcatcattccaatccaattcatgcttgatgcgagacattaactcctcaaaggtaggcttcgcaaaaaacactaattgtctaactgtcattccctcaaattggcttccatgtgtactttcatctaccacacaaccaccataatgaagccggaccaatctatccatcatcctcttcctcatctcctccggtgtcctccagtttatccagcccctcatatcgatgagctcgtcgtcgtcgtggtggtcatggtcatcggaggtggtgatggggtccatctggagctcgacggggccgttggtgaggcggtgttgcttgaggatgttggcggagaattctacatccttctcgacaggagcgaggtgcctggggtcgacgaaggggcagttcatggacttgaggtgaaggatcgggcatagcaacgcgcccgtcatgtaggcgacgagctcgcccaccagatagtggtcgatgagatccagctccatcgtcaccgtcgtctccgtcccaggcggatgggtggcagcctcctcgtacttggatccggcggcgtccgccgccaccacgacctcgtcgtcgacgtcgtgcagcttcgccttcttcttcttcgatcccttccccttcctcttccaacccttgtcaggcatcggcttggcgcgcttcttcttcttccagacggaagacctcgccatcgcctgcccctcgatctctaacggcat

SEQ ID NO: 69204 - DNA, 473 bp, Oryza sativa
  Clone ID: PAT_MRT4530_69896C.1
cacatcggcttggtgcgacgaccaccttccgcctcggcacggcggctctccagccaagcgtgagcgcgaccgcgagcgtggccaggggcggtggagtcgactgtggaggcgtggccaggggcggccgtcgcctcagcgccaaacacattggcgctgacgttggccgtgtcagcgccaacgggactggcgctgacattgtgccaccgtggcggccgggccgatccccagctgacgtggcagctacctcagcgccaaccggactggcgctgaggtgggacttggccgcaacccccaaggcccagaccagcaaggcttctggatggcttgcgggcttggacctcagcgccagccataatggcgctgaccgtgggacactcagcgccagcccacctggcgctgagggccgtggcgcagcgcaacaagccttctggatggctgggctgggacctcagcgccaggtgcactggcgctga

SEQ ID NO: 69205 - DNA, 2387 bp, Oryza sativa
  Clone ID: PAT_MRT4530_69897C.1
ttttttttttttttttttctctctctcccccccggccctcttctctcgcaatcgcatcgcaccccctcccccccgagcttgactccggaaaccctaggcagcccagccatctcagctctcggcgacggcgaggcggcgctcgctgggggtgcggccgcggcggctgagcttttgccagatccggaccaccgcccccagttccggcgccgcggcggcggcggaggcggaggcggaggtgtgggagtcgttggcgattcggccccgggggtgggtgggagagggcgccgctctgatcggtgctccgactccgagtggttctaagctaggaaggatgatcatgttacgttttgctcaagattttgcttcacactgataagatctcagcatttggatgattaacgcatattgaattctttctcaataaacatgggagctaattgctgtatagctgcaaaagagaggcctcagccatgtgttactccaattgaagtgtcagcattcaggaacgtaagacactctccatcatggagcttccggtgggataaccgcacacacatagaagacataatggaaatgcccgcattgttttccaaccatagtagtggaagcattcggcctgaaacaaagagtggctcaattgcgccaactgatggcttttctaacggaggcagcccttctgatatgttcaacaagctcaagtgccataaatctgacaggaagagggagtcatctaagattgcgagatctgaccttcgagcaggtagatccaccacaagcaattcttcccctgaggcaaagctttccagaaaatcgctagacacagtaagtgtggcttcagattcgaagatgtcaatctctgttccttcaacgccgcctgctatatccagagcagatccttcatcatcctccagggggcattctctaccaacagatgcagattcaatgaggaaagcacgtcgatcaccagggtatcaactgtatagacaggtctccgacagcaagattccatctctcaggtctctcaacgagggcgcctctcctgaaggaaggccatcctcctccatgctctcagtctgcagcaacgatttatctgcagtaggatcacatggcgagtcatctgatggttggtcaatgcgaacattttctgaaatggtcgcatcatctcagagagagagatggtcagttgatagtgagctcttaggttctgtttcgagtaaaatgacaagatcaaatgcttctaataatcctactacacattcacctgaccaagaggtgtgcaagctatgtttaaagctattaaaggaacggtccacatggaatgctcaggaactggctgttgttgctgttttattgtgcggccatgtttaccatgctgactgtttggatagcttaactgcagaagctgacaaatatgatcccccttgtcctgtatgcacccatggtgagaaatgtacagtgaagctatttgggaagttggaatcaaagacaaagaacaagatacctaaaaatgtgatagttgatgttaatctagatgggagctctaagcatcagaaggaaagtaggagagagcccagattaggcacaagttctagcttgaagggctcgtttagtcgcccgtttttgagaaggcatttctctattggctctcggccatcccagtcaatttcagagagcgagtctgccagaaagaagggcttctgggcaaggcactggagggaatagcataactgccagtcatcatcgagaaatccctcttgaagaggagctgtactcccaagcgagagcaagcatgcgggagctgaagtcaagccgaatcggtgcaaatgatatgacatggctgttgaacgacctccgcattgaaggtttctcctagccatagtcatattcggccgcaagcacttgtcgtgctggaaagggtctcgatagtagaataacagttgatatagtatactatgcaactgaggtttatttcagagcccagtcgcagtttagtagcgagtaatctaacagaaaaaggggatgatggccttcagagttgagaccgaaggtccattgctgtgttgcaaggttatatataatccagcgtcccagcaatctagttactatgttttgtggttttgtattattggttatgtgccccctttattttatggttgcaaattcatatagtttgggaacttgcgtacatatttggaatcttaactcgggagatgctatttattcatgacaacgcatcacagaaggcatgtaacggttatgtaatgttgtttgtcatcttcgcagacgtggtaatatgatggtcatgcatgtttttaacaaaaaaaaaaaaaaaaaaaactgagactagttctctctccctcgtgccgattcctcagcccgggatccac

SEQ ID NO: 69206 - DNA, 477 bp, Oryza sativa
  Clone ID: PAT_MRT4530_69898C.1
tagcgcggctaaacctcgggcgtgttcttttagcggaagccagcttcaatccaagccccccgctacccaattggccaaactgtctcgagaactgaacacactgatatcagaaatcagtttgtcgaacgactcaaacgctcatcagtgatgcagacgtagctggtgatccgtttgtgagcaacggtcgatatttccacaatgcgcgacaagctaacgggagcatctaggttttccggacgagcagcacgacgtggactcgcacatcgttgatactccgtctacagagtagattccgctttttcgcactcaacactccgaaggagcaaacccgtcagaggtccaaggaaagcctaccgtcgactttgcatcgagccgtatggggcagggttaccgcagagtgccacctgtcacgctccggaagactcgagtgttgatcgatgtccacgaggaagatcacagggagaccttgatgcgatc

SEQ ID NO: 69207 - DNA, 1310 bp, Oryza sativa
  Clone ID: PAT_MRT4530_69899C.1
atattttttgtaataaccaagttactattaaactaatggttcttaacattttctcttagtaactaaattacaccaatgattctcaacataacatattggtcttgtcacagagtttctcgtagtaaccaagttagaattacaccgatggttgtcggaggcgatggcggcgtggtggataggtatggagtgaaagagggcaacgggtcggccatggagggctggccggtggtcctcttgtatctggccatccgcggacagccgccgggagcacgcgcgccttgtgctgacccggcgtgcttgaggggatgcgggtgcgaacgacctcctcgctatcggtggtgtcccaccttagccgaatcatctctccagggcttgacttagtccctgtgcacagatggaaataatcaccgctgaggacgcagaaatcaagtggatgagtacctctcgtcaagtgcatcaagctgtacaatctgccatgctttcccttgatgaggaatacaatcaatcagcttcaatgtcgctggccacaagtaaaattaagaatattaggcctgaaaaagtatgttctgtcaaaacattccgataaaccgtagcatgttgactgggaccatatgtagtccggtagttcagaaatacaatccaatccatcttggttatcaaatctattatgtgctcaatatgctttgttaaccgtggctcgtgagtagggggaggcactgaagatcagacatatcaagaatggctgatgcccggccagttcctctacgggaagaggagggcagcaactgctcgccatacatcccaccaggagccattgttagctctctgtgtggcagcggtggtgacagcacaggaggcggcgccataactggcacatgaacctcctcctccagctgctgccgcttcggcggtggtttacggtccttcaaccgccggtggcagaaccacatctgcagctgcttgtctgtgagccctaactgtgtaagtcctcttgagaacctccaactgatagggcgtcttcatgatgcgcttcaccttcccgctggatccagaggcgctacaccaccaacagcggcggcgggagtgggagagggagcagaagcctgagccgacgccggggcagggctctcctcctccatcctagcgtcgcccgttcttgtccgctcgcctctgcccggctccgatctccggcgactgcagcggcgacccacgagcgctacctctccagccgattccacctgtcgctggccgatttcgcccgtcgcccgccgcccgccgctggagacaccgccctgcagcccggggatcca

SEQ ID NO: 69208 - DNA, 255 bp, Oryza sativa
  Clone ID: PAT_MRT4530_6989C.1
atggccacagagaagaaaagaactggcgatccttgctggatcgctcctgccactgtaccacagtcggccaggaacaggttgcgggcgacaagcgacggcggacggaaggcggacggtgggcaacaggaagagctcatcgaacaatgccattgcctccctttctccagcctccgtgtgccgcttccgtccatcttacttgataccgttgagtccagcaccatcgtcattgaggtgaatggctacgggggaagatag

SEQ ID NO: 69209 - DNA, 3120 bp, Oryza sativa
  Clone ID: PAT_MRT4530_698C.1
atgccaacgaaaggacagtttagcagagaaaggaatgtaaaggccacattaggtcgtgatggacgtcaaaggggaaattcacaagatcaatctgtacaagtgccaaaagagaagattgcagtagtcggtgggaacattgatggaaaatttgaagatagaatcagagttgtgaaaaatgagaagtttcgaaggcaacgggaacctcggagtgcagatgcgggtggatccttgaaaggctcaaaaccatggcctggtcgaaaggccactacggttgatgagcttgtcaagcatatgtcaaatgttccttcatatttgcagcgtaaagagacatcaggccatcttcaggacaaggcattgaatgttggagttctcgagtggggcctcctagccaggtggtctcaccaacaaaagcatgagttttctagcagccatggtgcctctccatctaatactagtaggtccctgatattctcttctccatcccagtcatctgcaagtcccagcagcaaatctcttgaaagcaatcaatctcctacactcaatgaccatcagcattgttctatggagtttcagcaaagtgatcttgaggataaataccatgggaaggccagatattcacctagcccaaattctgcagtgttgaacttgttgcctgttcatggaaaacactttccagagaacactggcaaatacggtgacttgaatctcagaaacatatctccactctcggaccctcttcttactgccactgggagttccatgcgacatgaaatggttgatgatgaggagactacaaggaatatagaggaggccgtccatcattgttcgcgcaggctttttacagatgatgataacattggccaaagtttcttcacctcacataacaatgattctgcatgtggtgattttcagcagagcagtggcgtgactggtgaggtttttgagactctagtgtctagtgcggtgatggaaatggaaagaaatgccagtttgtcacctgttggtttctcaaaagatattgggcaacaccatgaatttcctcgaattccatactcatgtccacttcctatcatggattcatctgaagagcttggcaccagcagaactgggactcaaggtgattctgttggtgctgctgtaactataggtgaaaatcgcaaccaaaagcaaatttccaggggtgcctctgagagaactcctcggatcagtgcaaagttcagtgatatggatgcgtcaccacatagacatcttgtttctggactgaatcgagtgaaccgctgttcaagcctgaaggatggaccatgtcctcgacaacctgaagcaagcacctctgtggataagataaatggagataagtcatcaggcaacaaaggcagtagacgcagcccattgaggaggatgttagatccaatattaaagccacgtcagtcatccacttctggtccaattcaaccttcatttgttccaaagtgtcatctgcctggccatattgataagcaatctctgagcttgggaggatctgctttgcagaatgttcaacgtaggtcagttgattcagtggtaaattcaaattgccgaacagaaactaatacaaaccagcctcctcaggtcctgaacagtgaaaggtacctccagcaagatatagattcaacaacaacaaggcatgcgcttctgcagctagcgtggaagaatggcctgccttttttcatgctttcttgtggttctgatatcctggtggctaccgtgagaaggaagggcatctccgataacaatgatctggagagcacatacactctgtttggtgttgaagaacctaagaaaagaggtggggcttggatcaaggcaggtaataagaacaagaaagatcagcttgtttataatattgttggggaaatgagggtttcacatcgaaaatcaagatgctaccaggcagaaaaaaaccatttgcatagagaatttgttctggttggctcagagcagctaccatcttctgaagaatcaggtgattcacatgttagcagagagtttgcggcttttattagtgcggtgtctcagcaagaaccagaaacttctcgtcactcatcctcacagcattccagccgaagcatgtcaacaccaaccgactgttcttgcccattgggaaatttccatcctaatacgagggatgatagttgtgcatcatccagtgttcttgccgtacttcctaatggcttccatggtacatcaacctcaggacagccactacctctgattgagaggtggaaatcaggaggagcgtgtgactgtggtgggtgggatgaaggctgcatgctcagtgtcctcagcgatgacgcccgagaaaacaaaggtgataaatccactcaagcaaaccagacgacggatggaagtcaacggtttgacttgtttgttcagggtcgatcacgagaagacaagcatgctttcagtatggtttcattcagagaagggttatacacagttgaattcagatcatccattgctttacttcaggcttttgctatgtgtatagtgatgcttcacggcaggcgccctaccaggacgcaagcaggtgtgcacgcatcgcaagagcacgcatccctcgctgaccataagctcaacaagatcatggcagctagtcaaggtagagctcaggcaagctatgtgccacaccggccgccgctatctcctgtagggcgagcctagcttcctgtgataaaaatgtatgtttttcatttgtttcttttcagttttcttctgtaactcgagttgcgtcagtggaatcttatgccatgatccatatgcgactcacatcgaaatgtgatgaatcttatggaatcggctttagcggggtagctaactgtacatgtaaaatgactaggtgtgttgctgcaaggctcatctcagtgcttagctacccatttttatatgcaagcaaagcagatcctcgcaaagcttctgtcactcaaccccttcagaaatggcaccgatgttgtgatacgtttgtccactctctgtacatttctgggggctgaaagcctggaactgcatttttaatctgagactgagcttaaagttttactcttgaaacactgcacaattatgtgcgttaaaaaaaaaaaaaaa

SEQ ID NO: 69210 - DNA, 3706 bp, Oryza sativa
  Clone ID: PAT_MRT4530_69900C.1
atggcgctgaccatgggacactcagtgccagcccacctggcgctgaggtgggacttggccgcaacccccaaggcccagaccagcaagcctgctggatggcttgcgggctgggacctcagcgccagccataatggcgctgatagtgggacactcagcgccagcccacctggcgctgaggtgggacttggccgcaacccccaaggcctagaccagcaagcctgctggatggcttgcgggctgggacctcagcgccagccataatggcgctgactattggaaactcagcgccagcccacctggcgctgaggtgggacttggccgtttcggccgtggcccagcccagcaagccttctggatggctgggctgggacctcagcgccaggtgagccctgctaaactttagcaaaactctagtgcgaggacgaggcacgtcgggggtgtacctccagtcctgcgaaggagcccgccggcgtcgtggtcgagacgggccgggctgcgagatatctggctgtgacgactctggtgcgtcctctagctgcgagggaccgagctcatccgcctcctcttctctgtcctcatccccttcttcctcctcatctccttcctccgcctctttgtcttgctcgccctcctcgtcacccacctccccttcttcatccccctcttggtgggcatgagcatgttcgaccacatcagtcgacctgcagccgagccttgctgccaacttccgacatcgctgccgtagtctctgtagggcgttgcggagggtgccgccctctccttcggagccaggagccgtgcctagcgccactcccgcgtcgttgacggtccgcaagagctctcgagccactctgtcgcgaacaggtcccgtctcgaccgtggtacctagacgggtacgagtatcgtactcgttctgctcctcaacatcctcggggtcatccgctatgtcggctagtgtccaagccggacgtaggacaagacggtaggtcctgtggagccacgccaagtacaagtcgaactccgtcccgttgtgctgaccctggtctggtaccccattctcctcgaacttctcccattgcgtgatatgatcctgatggtagtaagcccaatcagtcaccttcttgttcttccgacggtccaccttgtgtaggtcgatactcgtggagaaacggtgcgggattgtttgaagcctcccgaattgccgcatcacgcggtggcacatctggaactccactgcatagaagcagatcagtgggcaccgtagggtcttcaacgcatcctctatatggcacatgggattcagttctagctcgagcacttcctgtgcctgatatggcatccacaccacatgttctggctgtaggtagtccatctcgtttgtgtagtggtagtacgccaaattcctgcggcctactactggagatgggaccgattcccacaggtgagctacagtgggacgtcggtctgcatcctggtgcggccaagcctgatgggtcctccacatgggccgaccaactggaagcctcatccacatccaaacctgtagcaaccaaacacagcctgctaggttcgcgtccccgccttgccttcggcaagcatcacagagttgccggtacaaccaggctagggcagccgacccccagctgaaggtacccgcctcgtcccagtccgcgagcaacggcagccacatccaagaagccatgtctccaccagagtcagggaacagaatactgccgaagatgtacagcacgtacgccctgcagtatcgctgtactgtagcctcgtctgcctcagcgggacactgaccgaagttggctcgcaaccaactcaaaggaacccctgatgtcttcgtctgcctctgaccatcaggtgccactggaggctccagaccaaggtactcctcgaccctctccctccagttccccgacgctgtgtcacctgtgaccgcctgaccccggataggaagacccaggatcatggcgacgtcctccagagtgaccgtcagctccccgcacggtaggtggaaggtgtgtgtctctggacgccaccggtccactagggccgtcagagcagcggcgttgtacagaggcaccggtcgctgcgccatggtcacgaacgccaagagcttcgcccgccgtaggtacgggacgtaccggtcgtcgaacagtatgtgcgccgtgtgacctctgactcgaagggtcttcaagcgctctccgctggcaatctgtggggcccggtgcttctcctcgtagaaatcctccaaccccggaaagtgctccatccgtcggttggctgagcctttgtatgctttgtccatatcgttcttgaaccttcttgtccttcttcttcctcgtgtgttgttctttaacgacaagtcgggcacgaagaactctccatcataacttggccactgcgatggatctaggtaaggttcaaacctaggggagtacgagtcctgcacagccttattggaagcttcataacacattcggggggccacctccacatccaaacctcgcaacttacaaacggttatcatgtgggagcatggcaagtgatggagctgagggaactgacaactacatgtgttatctctcgcaaccacgacgtagtgacgtccaccccattgaaccccagccgccgtgactccgccttgctcgctgacctcatacttcatcgaagggaaatcaaaacatgctgctctttgccccaaggttcgtctttgctgctcctccaacatgtccttaacttttgtgggccacttctttccacacaggatatctacagttgcctctttgtgtctatcgacaaaccaactattgcacttcgaaaatgtgtatgccacaatagctgtaaccggcagtttccgaatgcctctcaatacattattgaaactctcggccatattactagtcatgatgctatgacgacgcccgttggtatcaaatgctcttgcccatttgaccttaagtggcatatggtcttctagccacttctttggcctctctccgaccacacccatgaggcgttttatctcatctaggaacaatgctttctcatttatttgacatatgcgctcaagatctttcatctgatcagtcgtagctccagctgtgtagaagttagcacagaagtgcctcatgcaccacctgtggtgaatggttaggtgatgaggcatgatgtggatgatggagttcaaaatgccagggtgtctatcagaaattatacacacttctctattaggaccgatcaacttgtttctcaacatgttgatgaaccactcccagttggatgtattctccttctctaccagagcaaacgctaagggaacaagatgtaacccggcgtcgacccctattgccgtgagcaatgtaccttggtatttaccggttaagaaagtgccatcaattgctagcaccggcctcaagtgcttgaatgcttctatggactggccaaatatccaatatgcacgtccaaatactcgcctctgtactccatccaccatcctggacttctcgggatgagcctcaacacggaaatgcatggtagggttctttgctttgatggcacgcatcagtgtaggcaagcgaacatacgcctcgtcccaatctccccaaatgaccttcatagcaacttgcttagcacgccatgctttgccatacgtaggccgatagtgccatatttgcccaattccaatccaattcat

SEQ ID NO: 69211 - DNA, 2573 bp, Oryza sativa
  Clone ID: PAT_MRT4530_69901C.1
atggcggcgaaggcgatcgactgcccgccagcgccgaggccgacgccggcgtcgacgcccagcaccgggttgtcgtcgtgcccacgcgacgcgctgaagctgcgtgtgtgcgccaacgtgcttggcctcgtcaaggccaaggtcggcgcggtggcgccgtacgagccctgctgctcgctgctcgacggcctcgtcgacctcgacgccgtcgtctgcctctgcacccggccctgcctcctcctccgcgcccagcaccgcggcgcccgcccgcgctgggccgcttcgccgccggcggcgactcagcgccgtcgacgccattcgagaccggccgccgccctcgccttctcccgcgtcacagccgccgccgccgccgcctcctcctctcccgcctcgccccgacagcctcttcccagccgccagccggctttgcccagagaagataagagaagagaagacgccaaacacattggcgctgacgttggccgtgtcagcgccaacgggactggcgctgacattgtgccaccgtggcggccgggccgatccccagctgacgtggcagctacctcagcgccaaccggactggcgctgaggtgggacttggccgcaacccccaaggcccagaccagcaagcctgctggttcgcttgcgggctgggacctcagcgccagccataatggcgctgaccgtgggacactcagcgccaaccggactggcgctgaggtgggacttggccgcaacccccaaggcccagaccagcaagccttctggatggcttgcgggctgggacctcagcgccagccataatggcgctgaccgtgggacactcagcgccagcccacctggcgctgaggtgggacttggccgcaacccccaaggcccagaccagcaagcctgctggatggcttgcgggctgggacctcagcgccagccataatggcgctgaccgtgggacactcagcgccagcccacctggcgctgaggacctcagcgctagccataatggcgctaactgtgggaaactcagcgccagtccacctggcgctgaggtgggccttggccgtttcgagccttctggatggcttgcgggctgggacctcagcgccatccataatggcgctgactgtgggaaactcagcgccagcccacctggcgctgaggttgggcacctcagcgccgaagcggttggcgctgagacccgcattcctctgcttcatccgccatctgcgcatcgcctcccctcccctccacctattgtgcgcggcgcctcgccgcccatccctgcgactcggtgcgccgccgcgccacccctccaccttcgcgcaaccgcgctggccctcacctttgcgcgacccgttgccgcccctccacctccgcgcggtcgcggcgcccctcccctttcgcgcgagcgcgacctggtgttcggcgcgtcggcgatcccgtcgtggcggacgttggggttcgtggagtacatcccgtcagggaagaagcaggggggcatggtgctggttgtccccgaggggagctacgcggtgcggctcgggaacgaggcgtcgatccggcagcgcctcgccggcgcggcgcgcggcgcgcggtacgcgctcacgttcagcgcggcgcggacgtgcgcgcaggcggagcggctgaacgtgtcggcgtcggggcagtgggcggtgctccccatgcagaccatgtacagcagcaacggctgggactcgtacgcctggacgtgggacgccgctgccaacgtgttcgacgtcgtcatccacaaccccggcgtcaccgaggaccccgcctgcggctccctcatcgactccgtcgccatccgcaccctcaaccctcctcgccgcaccaacagtgttcgtccgggtgtcgcagagaacctggtgaagaacggggacttcgaggagggcccgtacatcatcccggggactaggtggggggtgctgatcccgtccatggtggtggacgagcactcgccgctgccggggtggatggtggagtcgctcaaggcggtgaagtacatcgacagcgaccacttcgcggtgccgcgcgggcggcgcgctgtcgagctgctggcggggcgggagagcgcgatcgcgcaggtgatccgcaccgtccccgggaggcagtacgcgctgtcgttcaccgtcggcgacgccagcaacggctgcgaggggtcgctggtggtggaggcgtacgccgggagggagtccaccagggtggcgcacgagtcggctggccgcggcggcgccgccaagcgcgccgtgctgccgttccgcgccgccgcggcgcgcacccgcgtcgtgttcttcagctcgttctacagcaccaggagcgacgacatgagctcgctctgcgggccggtgatcgacgacgtcgccgtcgtcagcgtgcgcgcgcggcggccggcggcgaagcgcggctagggtctagctagcgccattgccgcgatgtcgtactactatttagttgttgattgtttcgtttgtatgtaagaccaagaaattggtcgatcgagaatatatataattattattattttgtcggttcctggtaaaaaaaaaaaaaaaaaa

SEQ ID NO: 69212 - DNA, 413 bp, Oryza sativa
  unsure (1)..(413): unsure at all n locations
  Clone ID: PAT_MRT4530_69902C.1
cccacgcgtccgaaggctagctacttagtttatgtttatgtttcatggcacaacaaagtacttttggagttcgaatcanaacaaaaaaaaaaaaaaaaaaaaaaaaaaaaaaaaaacaaccaaaataaaaaaatccaaactcacaaacacaaacatgcaacggcatacctcttctatcgccccaccaaaatccaattcactgcccccccatttacaacctaaagactgacaaaaccctacctaacccaacttaattgccttgcaccaaatccccctttccccagcaaacctaatattaaccaagctcagacaaatcgcctttcccaaccgttgcccaccctgaatagaaaatgacacgccccctttcgaaacgcattcaccacgttaccaccaactgtaacccacattgaaac

SEQ ID NO: 69213 - DNA, 3110 bp, Oryza sativa
  Clone ID: PAT_MRT4530_69903C.1
ccggcttggcgcaagaggcgcggccgatgaagggaggccggattggcgcgaaagacgcgtccggtggaagaggccggcttggcgcgagaggcgcggccggcggtggaagaagcgacctaggtgtgaggaagaactgccggtgggtgtggcgcgattttcggcgctcgaaggctagccggcgggggacaccggtgcaggggtcccacagcgccaagcgcattggcgctgaggttggccgtgtcagcgccaacgggactggcgctgacattgtgcaccgtggcggccgggccgatcccctagctgacgtggcagctacctcagcgccaaccgcttcggcgctgaggtgcccaacctcagcgccaaccggactggcgctgaggtgggacttggccgcaacccccaggcccagaccagcaagcctcctggatggcttgcgggctgggatctcagcgccagccataatggcgctgactgtgggaaactcagcgccagtccacctggcgctgaggtgggacttggccgtttcggccgtggcccagcccagcaagccttctggatggcttgcgggctaggacctcagcgccagccataatggcgctctagtgcgaggacgaggcacgtcgggggtgtacctccagtcctgcgaaggagcccgccggcgtcgtggtcgagacgggccgggctgcgagatatccggctgtgacgactctggtgcgtcctctagctgcgagggaccgagctcatccgcctcctcttctctgtcctcatccccttcttcctcctcatctccttcctccgcctctttgtcttgctcgccctcctcgtcacccacctccccttcttcatccccctcttggtgggcatgagcatgttcgaccacatcagtcgacctgcagccgagccttgctgccaacttccgacatcgctgccgtagtctctgtagggcgttgcggagggtgccgccctctccttcggagccaggagccgtgcctagcgccactcccgcgtcgttgacggtccgcaagagctctcgagccactctgtcgcgaacaggtcccgtctcgaccgtggtacctagacgggtacgagtatcgtactcgttctgctcctcaacatcctcggggtcatccgctatgtcggctagtgtccaagccggacgtaggacaagacgatagttcctatggagccacgccaagtatgcatcgaacttcgtcctgttgtgctgaccttggtccggtactccgttctcatcgaatttctcccattgcgtgatatgatcttgatggtagtaagtccaatcagtcaccttcttgttcttccgacgatcgaccttgtggaggtcgatactagtggagaaacggtgcgggattgtttgaagcctcccgaactgccgcattatgcggttgcatagctggaactccactgcatagaagcaaatcagtgggcaccgcaaggtttgcaacgtatcctctatgtggcacatagggttgatgtctagctcgactacttcttgtgcctcatatggcctccacaccacatgttctggctgaaggtagtccatctcgtttgtgtagtggtagtaggcgcgcagggcgcgcgcgtgcagcctggtgagcgtgtgtcggaacctggagaggtcgagggtgacgttctggccgccgaggtagacgcgggcgacgaagccccaccccttgtcgcgcttggcggcctccgggtcggacaccaccacgtcgcggaggccgtacttgcggctcagcgagctctcgtgcccctccgcgtcgtactgctcgtagtgcagccccatccgcgcggacgcctccgcgtagcacccgcgcgcgatcggcgccacgcccagcggcgcgatctgcaccagcgccgcgccggggcgcaggaacaggagcttggtcaggtcggcgccgtgcacccccaccagcacgtcgcacgcgctcaccgacgcgtacgacgccgggagcggcagcccgttcgccgtctccaggatgtccacgtcgaaccccaccgacctcgcgagccgcgccaccgccgcctggttctcgatcacccgcgtccccctgcgcgacacgatcccgagccgtggccgccgtggcgccggctgagtaacgtcgtcgacgacgacggtgtctcctgcggtctcgtacacgccggcgaggagatcgtggaagtcgacgatggtcttgttgtcgcggagcctcgccgggtcgacggagaggatgccgtggaagcgtgtgccgacgatggcgccggggaagcagtgcgtccgcttgtcgtggaggaggtcgacgacgtggtagtccgagaggccggagatgatctcgccgtacgtgcccgcccaccacgggttgtacgagaggacgccgagcacgacgcggcggcggaggtgttgcaccgtcagccacgccggcacgaacccgtcgctgaacgcgtggaagaggttgccggtgtagccccccgccgtcatgacgaggagcggcgcgtcgtgccggacgtcgcaccggtggccgggctcctcctccggcggggccatccggagccgcacctcctctaccctgctcatgatgagcgcctcccacttgcgcgtgtacggacgtatcctctcctccacggtggcgttcgccgccggcggctgcttcgggaacagcaggagcgacagggacgacgggtccgtccgcacgtcgccggccatgaagcagacgtcggtgttgaaatccgagcggtcgcagcagatggtgtcgccggcgagcgacgagcacggcgagcgcagctggttgtcaagaaccaccacttcgccagcattatgatctcccacgacgcgggcgggcgaggtggtgacgttgggcggcggctgggggaagaagtcgaggccataggtgggcgtgagcacgatgaaccgcggggcgtagaggagcacgcagaggacgacggagaggacgaagaagaactggacgaaccccggccacttcttgccgccgccgtcctccacgccgccgccgccgaggtcggggagtttggaggccatctctcgcgttggcgagatggacggacttggcgtgtgggggaaaaatggaaaggaatcgccctcgtgccgaattcct

SEQ ID NO: 69214 - DNA, 279 bp, Oryza sativa
  Clone ID: PAT_MRT4530_69904C.1
ggtcacaaatttctctcaattatagacatctgaaaggaagttaccgagatgggcttgaagtaaagtagccaatccaaaagaacacaagcacactcgcaggggataaaagagagagagagagagagagagagagagatctatctaaaactcaaccaactgatcaccaaaactgaactaccactactaacactaacacaccaaggaaccaactaaagaacatctcgtgtcaaaagagtctcaactacttatgtacaattttgctcgtgagccgcgggaagc

SEQ ID NO: 69215 - DNA, 5361 bp, Oryza sativa
  Clone ID: PAT_MRT4530_69905C.1
ctattcctgacaagcagccatgcaaacagctttacctttagaggcgccccctgccaaaaacttcaaccaaaaataggccgtcgcctcagcgccaaacacattggcgctgacgttggccgtgtcaccgccaacgggactggcgctgacattgtgccaccgtggcggccgggccgatcccctagctgacgtggcagctacctcagcgccaaccgcttcggcgcggaggtgcccaacatcagcgccaaccggactggcgctgaggtgggacttggccgcaacccccaggcccagaccagcaagccttctggatggcttgcgggctgggacgtcagcgccagccaaaatggcgctgaccgtgggaaactcagcgccagtccacctggcgctgaggtgggacttggccgtttcggccttggcccagcccagcaagccttctggatggcttgcgggcgtgggaaactcagcgccagtccacctggcgctgaggtgggacttggccgtttcggccttggcccagcccagcaagccttctggatggcttgcggccaacctggcgctgaggtgggacttggccgtttcggccgtggcccagcccagcaagccttctggatggctgggctgggacctcagcgccaggtgcactggcgctctagtgcgaggacgaggcacgtcgggggtgtacctccagtcctgcgaaggagcccgccggcgtcgtggtcgagacgggccgggctgcgagatatccggctgtgacgactctggtgcgtcctctagctgcgagggaccgagctcatccgcctcctcttctctgtcctcatccccttcttcctcctcatctccttcctccgcctctttgtcttgctcgccctcctcgtcacccacctccccttcttcatccccctcttggtgggcatgagcatgttcgaccacatcagtcgacctgcagccgagccttgctgccaacttccgacatcgctgccgtagtctctgtagggcgttgcggagggtgccgccctctccttcggagccaggagccgtgcctagcgccactcccgcgtcgttgacggtccgcaagagctctcgagccactctgtcgcaaacaggtcccgtctcgaccgtggtacctagacgggtacgagtatcgtactcgttatgctcctcaacatcctcggggtcatccgctatgtcggctagtgtccaagccggacgtaggacaagacggtaggtcctgtggagccaggccaagtacaagtcgaactccgtcccgttgtgctgaccctggtctggtactccattctcctcgaacttctcccattgcgtgatatgatcctgatggtagtaagcccaatcagtcaccttcttgttcttccgacggtccaccttgtgtaggtcgatactcgtggagaaacggtgcgggattgtttgaagcctcccgaattgccgcatcacgcggtggcacatctggaactccactgcatagaagcagatcagtgggcaccgtagggtcttcaacgcatcctctatatggcacatgggattcagttctagctcgagcacttcctgtgcctgatatggcatccacaccacatgttctggctgtaggtagtccatctcgtttgtgtagtggtagtacgccaaattcctgcggcctactactggagatgggaccgattcccacaggtgagctacagtgggacgtcggtctgcatcctggtgcggccaagcctgatgggtcctccacatgggccgaccaactggaagcctcatccacatccaaacctgtagcaaccaaacacagcctgctaggttcgcgtccccgccttgccttcggcaagcatcacagagttgccggtacaaccaagctagggcagccgacccccagctgaaggtacccgcctcgtcccagtccgcgagcaacggcagccacatccaagaagccatgtctccaccagagtcagggaacagaatactgccgaagatgtacagcacgtacgccctgcagtatcgctgtactgtagcctcgtctgcctcagcgggacactgaccgaagttggctcgcaaccaactcaaaggaacccctgacgctgtgtcacctgtactcctcgaccctctccctccagttccccgacgctgtgtcacctgtgactgcctgaccccgataggaagacccaggatcatggcgacgtcctccagagtgaccgtcagctccccgcacggtaggtggaaggtgtgtgtctctggacgccaccggtccactagggccgtcagagcagcggcgttgtacagaggcaccggtcgctgcgccatggtcacgaacgccaagagcttcgcccgccgtaggtacgggacgtaccggtcgtcgaacagtatgtgcgccgtgtgacctctgactcgaagggtcttcaagcgctctccgctggcaatctgtggggcccggtgcttctcctcgtagaaatcctccaaccccggaaagtgctccatccaacttagcaaatgaatgtcatccaatcccacctgtgtgctaccctcaccacctccccccgtcctacggcgctttttcggtcgatccttagacttgtctcgcttcgggcacctagttttcttatggcctagttcgtggcatagcgagcatctattttgcatgaccggctctgaatttgtattgttcggcttttgtgaccgtcggttggctgagcttttgtatgctttgtccatatcgttcttgaaccttcttgtccttcttcttcctcgtgtgttgttctttaacgacaagtcgggcacgaataactctccatcataacttggccactgcgatggatctaggtaaggttcaaacctaggggagtacgagtcctgcacagccttattggaagcttcataacacattcggggggccacctccacatccaaacctcgcaacttacaaacggttatcatgtgggagcatggcaagtgatggagctgagggaactgacaactacatgtgttatctctcgcaaccacgacgtagtgacgtccaccccattgaaccccagccgccgtgactccgccttgctcgctgacctcatacttcatcgaagggaaatcaaaacatgctgctctttgccccaaggttcgtctttgctgctcctccaacatgtccttaacttttgtgggccacttctttccacacaggatatctacagttgcctctttgtgtctatcgacaaaccaactattgcacttcgaaaatgtgtatgccacaatagctgtaaccggcagtttccgaatgcctctcaatacattattgaaactctcggccatattactagtcatgatgctatgacgacgcccgttggtatcaaatgctcttgcccatttgaccttaagtggcatatggtcttctagccacttctttggcctctctccgaccacacccatgaggcgttttatctcatctaggaacaatgctttctcatttatttgacatatgcgctcaagatctttcatctgatcagtcgtagctccagctgtgtagaagttagcacagaagtgcctcatgcaccacctgtggtgaatggttaggtgatgaggcatgatgtggatgatggagttcaaaatgccagggtgtctatcagaaattatacacacttctctattaggaccgatcaacttgtttctcaacatgttgatgaaccactcccagttggatgtattctccttctctaccagagcaaaagccaagggaacaagatgtaacccggcgtcgacccctattgccgtgagcaatgtaccttggtatttaccggttaagaaagtgccatcaattgctagcaccggcctcaagtgcttgaatgcttctatggactggccaaatatccaatatgcacgtccaaatactcgcctctgtactccatccaccatcctggacttctcgggatgagcctcaacacggaaatgcatggtagggttctttgctttgatggcacgcatcagtgtaggcaagcgaacatacgcctcgtcccaatctccccaaatgaccttcatagcaacttgcttagcacgccatgctttgccatacgtaggccgatagtgccatatttgctcaactgcctcgacaatcgctgctggagataaagttggttcagctcgcacaaatgcctgtaacctgtttccaataaaccttgaagtaagttgcaaatgcttgccggttacttccgcactacagcatgtgtggtcttcgcccaccctagtcacccgccacctatctcctccacttttccttgcattaatctgccatttgcaatggcgatcgagacaagccacagtatactttactgacgcgttagattccttcacatggtacggccggtggacacggatagaataactctgtagccatattttcagatcatccatcgatcgaaactccaaccccttccttggttcatcacacattggttcgaaggcaccgtcatattgtggatccccatcagcaattgctagcccagatctggtaagatcctcgaattgagttatttccgggtttctacccaccagtttcgcaaacacagtcctttcatgctctgacatcttacgcactggacgatcatcatcggagtcggaagcggactcatccaattcatcctctgtatcatactccaaccagcctgggttcaatccactgcgtatcataccctcctcacactcctctcgggtatagaatttcagcctagccaactcccttaggcccatacttacattcttagcattcgcttcttccttaggcaactccacatcatctcctacctcccgaccatcctcaacatctccttcctctcttaccggcacattctcctccacattgacttcctcccttaacggcacattgtcctctgcatgtacttcttcccttaacggcacattctcctctgcatgtacttcctcccttaccgggtcattctcttccctgacctccacatccgccatatcatttactccctcgcccccctccacgtcttcctcaatcaattcttccttcctactacacctctccgacagttcgtgacagctaatgggtgattctatgagtggactttcattagggtctataagttctttcttccctatcctaccatctttcttccatgcaaacacctcaagagatttgaaatgtgaccccaatactatatctatatatgtttgccattcgatctctccattcaagtctaacataaatttatgtgacatgacaccgccgcccacatcgtatctcccttgcataccaaccgactcatcattccaatccaattcatgcttgatgcgagacattaactcctcaaaggtaggcttcgcaaaaaacactaattgtctaactgtcat

SEQ ID NO: 69216 - DNA, 4806 bp, Oryza sativa
  Clone ID: PAT_MRT4530_69906C.1
tcaggggtagaagcgacgaaggtgttcgatgttccacgggtttggcagctcagtgccgtcgcccgtggccagccgtacggagcccggccgggggacaccgatcactcgatacggaccctcccacattggtgagagcttgctcagtccagcacgcgtttggacgcggcgtaggacgaggtcgtcgacgcagagtgatcgggcccggacgtggcgctgatggtagcgccgcaggctctgctggtagcgcgcggctcggagggccgcgcgccgccttcgctcttccaagtagtcgaggtcatctctacgaagctgatcttgatcagcctcgcagtacatggtggcccgaggagacctcagggtgagctcggatgggagaaccgcttctgcgcagtagacgaggaagaaaggcgtttccccggtcgctcggcttggtgtggttcggtttgcccagagcaccgctggcaactcctcgatccatgaatcgccgtgcttcttgagaatattgaaggtcttggttttaaggcctttgaggatttctgcattggcgcgctccacttggccattgcttctggggtgggcaggtgaggcgaagcagagcttgatgcccatgtcttcgcagtagtcgccgaagagttcactagtgaattgggtgccattatccgtaataatacggttaggcactccaaaacgggccgtgatgcccttaatgaatttaagagcagagtgcttatcgatcttgacaaccggataagcctcgggccacttagtgaacttgtcgatcgcaacatacagatactcaaacccgcccggggcccgtttgaacggtcccaggatatcaagcccccagacagcaaatggccatgacagtggtatgatctgcagggcctgggccggctgatggatttgcttggcgtggaactgacacgctctgcatcgccggaccagatcgactgcatcattgagagctgtcggccaataaaatccttgacgaaaggccttgccaaccagggtgcgcgaggcggaatgggctccgcactcgccctcatggatgtcagcaagaagctcaacgccttgttcctgaggaatgcacttcaggaggattccgttagccgcgcgccgatagagggtcccttctaccagcacgtagcgtttggaaatgcgttgtacgcgttcactcccttcgcggtcctcaggtagagtcttatctctagtgcgaggacgaggcacgtcgggggtgtacctccagtcctgcgaaggagcccgccggcgtcgtggtcgagacgggccgggctgcgagatatccggctgtgacgactctggtgcgtcctctagctgcgagggaccgagctcatccgcctcctcttctctgtcctcatccccttcttcctcctcatctccttcctccgcctctttgtcttgctcgccctcctcgtcacccacctccccttcttcatccccctcttggtgggcatgagcatgttcgaccacatcagtcgacctgcagccgagccttgctgccaacttccgacatcgctgccgtagtctctgtagggcgttgcggagggtgccgccctctccttcggagccaggagccgtgcctagcgccactcccgcgtcgttgacggtccgcaagagctctcgagccactctgtcgcgaacaggtcccgtctcgaccgtggtacctagacgggtacgagtatcgtacttgttctgctcctcaacatcctcggggtcatccgctatgtcggctagtgtccaagccggacgtaggacaagacggtaggtcctgtggagccacgccaagtacaagtcgaactccgtcctgttgtgctgaccctggtctggtactccattctcctcgaacttctcccattgcgtgatatgatcctgatggtagtaagcccaatcagtcaccttcttgttcttccgacggtccacctcgtggagaaacggtgcgggattgtttgaagcctcccgaattgccgcatccgccctgcagtatcgctgtactgtagcctcgtctgcctcagcgggacactgaccgaagttggctcgcaaccaactcaaaggaacccctgatgtcttcgtctgcctctgaccatcaggtgccactggaggctccagaccaaggtactcctcgaccctctccctccagttccccgacgctgtgtcacctgtgaccgcctgaccccggataggaagacccaggatcatggcgacgtcctccagagtgaccgtcagctccccgcacggtaggtggaaggtgtgtgtctctggacgccaccggtccactagggccgtcagagcagcggcgttgtacagaggcaccggtcgctgcgccatggtcacgaacgccaagagcttcgcccgccgtaggtacgggacgtaccgatcgtcgaacagtatgtgcgccgtgtgacctctgactcgaagggtcttcaagtgctctccgctggcaatctgtggggcccggtgcttctcctcgtagaaatcctctaaccccggaaagtgctccatccgtcggttggctgagcctttgtatgctttgtccatatcgttcttgaaccttcttgtccttcttcttcctcgtgtgttgttctttaacgacaagtcgggcacgaagaactctccatcataacttggccactgcgatggatctaggtaaggttcaaacctaggggagtacgagtcctgcacagccttattggaagcttcataacacattcggggggccacctccacatccaaacctcgcaacttacaaacggttatcatgtgggagcatggcaagtgatggagctgagggaactgacaactacatgtgttatctctcgcaaccacgacgtagtgacgtccaccccattgaaccccagccgccgtgactccgccttgctcgctgacctcatacttcatcgaagggaaatcaaaacatgctgctctttgccccaaggttcgtctttgctgctcctccaaaatgtccttaacttttgtgggccacttctttccacacaggatatctacagttgcctctttgtgtctatcgacaaaccaactattgcactttgaaaatgtgtatgccacaatagctgtaaccggcagtttccgaatgcctctcaatacattattgaaactctcggccatattactagtcatgatgctatgacgacgcccgttggtatcaaatgctcttgcccatttgactttaagtggcatatggtcttctagccacttctttggcctctctccgaccacacccatgaggcgttttatctcatctaggaacaatgctttctcatttatttgacatatgcgctcaagatctttcatctgatcagtcgtagctccagctgtgtagaagttagcacagaagtgcctcatgcaccacctgtggtgaatggttaggtgatgaggcatgatgtggatgatggagttcaaaatgccagggtgtctatcagaaattatacacacttctctattaggaccgatcaacttgtttctcaacatgttgatgaaccactcccagttggatgtattctccttctctaccagagcaaacgccaagggaacaagatgtaacccggcgtcgacccctattgccgtgagcaatgtaccttggtatttaccggttaagaaagtgccatcaattgctagcaccggcctcaagtgcttgaatgcttctatggactggccaaatatccaatatgcacgtccaaatactcgcctctgtactccatccaccatcctggacttctcgggatgagcctcaatacggaaatgcatggtagggttctttgctttgatggcacgcatcagtgtaggcaagcgaacatacgcctcgtcccaatctccccaaatgaccttcatagcaacttgcttagcacgccatgctttgccatacgtaggccgatagtgccatatttgctcaactgcctcgacaatcgctgctggagataaagttggttcagctcgcacaaatgcctgtaacctgtttccaataaaccttgaagtaagttgcaaatgcttgccggttacttccgcactacagcatgtgtggtcttcgcccaccctagtcacccgccacctatctcctccactcttccttgcattaatctgccatttgcaatggcgatcgagacaagccacagtatactttactgacgcgttagattccttcacatggtacggccggtggacacggatagaataactctgtagccatattttcagatcatccatcgatcgaaactccaaccccttccttggttcatcacacattggttcgaaggcaccgtcatattgtgtatccccatcagcaattgctagcccagatctggtaagatcctcgaattgtgttatttccgggtttctacccaccagtttcgcaaacacagtcctttcatgctctgacatcttacgcactggacgatcatcatcggagtcggaagcggactcatccaattcatcctctgtatcatactccaaccaggctgggttcaatccactgcgtatcatagcctcctcacactcctctcgggtatagaatttcagcctagccaactcccttaggcccatacttacattcttagcattcgcttcttcctcaggtaactccacatcatctcctacctcccgaccatcctcaacatctccttcctctcttaccggcacattctcctccacattagcttcctcccttaacggcacattgtcctctgcatgtacttcttcccttaacggcacattctcctctgcatgtacttcctcccttaccgggtcattctcttccctgacctccacatccgccat

SEQ ID NO: 69217 - DNA, 435 bp, Oryza sativa
  unsure (1)..(435): unsure at all n locations
  Clone ID: PAT_MRT4530_69907C.1
aaaaaaaaaaaaaaaaaaaaaaaagaaaagaaaggaaaaaaaaaaaaaaaaaaaaaaaaaaaaaaaaaaaaaaaaaaaaaaaaaaaaaaaaaaaaaaaacaaaaaaaaaaaaaaaaaaaaaaaaaaaaaaaaaaaaaacagccaaaagggcaacacaaaataaaaaaaacagacacaactaaatacaagggtcgtaggggggaaaaaaccctnnccctaaccaaaaataaaaacnccttccaaaaaaaaaaccccttnccccagctaaacccaatacccaaaaaggacccaaaccgatcgcccgtaccaaacagttcgcccaccccgaaatggcaaagggaacgccccctgaaacggcccataaaccccagcgggtgaagaaggcaacgccaaaggtgaccgttacactggccagcccccaaacccccggtcctt

SEQ ID NO: 69218 - DNA, 358 bp, Oryza sativa
  Clone ID: PAT_MRT4530_69908C.1
atggtatacctgcgcgtatacagatgtttcctgtacacgttaaggaaattcatagcataacagaaacggagtccacagatgcaaggagtcctactcggacagaaccgggtgttactgtatcgtgtggggtccgatgtctccgagttctatttggagaccaattgacccgcggtataaaagggacccccgggaggacctaaggcatcgaatctcaccgccaacacaaccaccacagcttacgaagtcggagcctacagaagccaagtcgccgggtgatctagtcgaaccaactcgactacggtctcatccgtaccagcgtatcccaataccctctatatccggtctacggatatccccc

SEQ ID NO: 69219 - DNA, 796 bp, Oryza sativa
  Clone ID: PAT_MRT4530_69909C.1
ccggccgggattccgtctcttgctctcaagcggcgtgcaaccatggcggccacggcctcctccttcctcgcccgccgcctcctcctcacccgccgcgtcctttcctcccccctccgccccttctccaccactgactcctcctcatcctcctcctcctcctcttcctccgacgactcccgtgcgggatctgatgcgggacccgaccccgagcagcagcaaccgccaccagcgggccaggatcagcaggccgccgcccggccgcgcgccggcgacacccgtcccctcgagaacggccttgaccccggaatctacaaggcgataatggtggggaaggtggggcaggagccgatacagaagcggctgaggagcgggagaacggtcgtgctgttctcgctcggcagtcggcaccggcggcatccgcaacaaccgccgcccgctggaccgcgaggagccgcaccagtacgctgaacgatgctccgtgcagtggcaccgcgtctgcatctacccggaacggctcggcaggccggcagcctcgcgctcaagcacgtcaagaccggttctgttctttatctggaagggaatcttgagacgaaagtgttttctgatcctataactggactggttcggcgcataagagaaatagctgtgcgctcaaatggccgtctcttgtttcttgggaatgattgtaatgcgcccaagttaggtgaagccaagggcgttggctacttctgaaactgaggtcactcgacatcaaggtatatcaggtgataaaatgatttaaattagagtatctcac

SEQ ID NO: 69220 - DNA, 476 bp, Oryza sativa
  Clone ID: PAT_MRT4530_6990C.1
ggagcaattatatagccccaaaagggggaaaacgcggccggaaagaaagaaaacgagcccggggatctcgggctccatagatgtcgccggcaaggattacgggatgaatccggacggatccgaggaagagagagaggggaaattgggggaaacgggagagggaatcacggggaatgattcccctctctttaatgcgcgcgggaacggcgggatgcggcgcaatccgcggcggcggcggcgctagggcacgggcgcgacgacgggcgcggcgggagaaggaaaatgacaggtgggtcccacccgtcagcgagagcggcgggcgggcccgcctgtcagcggcgcgcgcgcgcgcggggagccgatgggccggggggggaaagagagagagagagggagggaatgggccgagccggcccaaaaagggaggaggagggggaaaagacttcttttagggttttctttttataaaacctttt

SEQ ID NO: 69221 - DNA, 4422 bp, Oryza sativa
  Clone ID: PAT_MRT4530_69910C.1
atgtcggacggcaagcaaggctccgaacccccgtcaaccaagcaagcacccggtcaaccgtctgaggttgacactgggaacatcatcccagtcactctagacaagctgacaccggaacaaaggcaggaacttgagcaggtgatgagcaatgtgaagaacaagtacctagattcattcaaccaaacctgctcaagagcagttattcagaagtacaaactgaaggtagtttctaccgatgagccggaaacaagctcatctaaggatggcaaagccaaaggagccaaaggtgataaaggtgatggaggtgatgcaggagacaaaggtgaagggcctaaggaagatgaaactaaggaacaaaagaccttggagttcaataacttccaggatcgggttgactatgctgttcatcaagcactaatcaaccaatcaggggttcttgtcaacactttgacaaacatgatcaaatctgtggttgatggcacaattgctgagcatcaagataaaggaccagtctttctgccagagggtatattcacaccatacaggaatttggtgactggcaaccagcagcatgcttctaatgtacctccaggccatccgacggcatcggcttcagctccaggaccaggtgcatcatcatcggcacaaaggcagatggttaatctttatttgttgaccagagaacaacctcggcatgctgggcaaaacattaattggctgactcaggaacagattgcagcaatgtttgggccacatcaaccggttattgagccgattcagccaacaccgatcaggcagcaaatgcaaggagtgcctcagcagaagccctgggctgacatgattgtagatgtgatgaaggagcaattagggtttaagccgaaggatactggaaacttgtattggcacccctaccctgagtgctttgagagagttccactgtcaggccgatacaaggtcccagatttttcaaagttctcaggacaagacaatgtgtcaacttatgagcatgcgtcggctgttgatgcattgagggttagattgtttcctttgtccttgtctggatcagcattcatgtggttttcttcactgccttacaactctattcatagttgggccgatctggagaaacagtttcatagttatttctacagtggtaatcatgagatgaagctatctgatttagcagcagttagacagaggcatgatgaaattgtacaagattatattcagaggttcaaagatatgaggaataggtgctacaacttggccttaaccgattctcagttggccgatcttacttttcagggtttgatagctccaataaaggagaagttttcatctcaagatttcgaaagcttgtctcaccttgcacagaaggctgaggagctagggaaaaggaaatattgtaaatggcataacttcgggtctcatgctactaatgattgcaaagctttcaggcatcagatccaattggctattgagggaggaaaaataaaatttgatgactcaaagaagccgatgaaggttgatggccatccttttcctattaacatggtgcatacatatggaaggacagccgatgagggaaaacatcagagttcacagctgaattcagccaggattattaacaagtatcaaagaaggcatgacaacaagcaggaaaagtattttgaagaaaatgatggagaatcagaagagaagggtccagaggatgaggaacaaggaacgtttttaggaggtacaacaagagatcaaccattggctgaagaaaacaagatggagagcccaaattattacgttgagggcgttgtggagggttcaaatttctacaccaaggacacagtagatgatcttgatggcaagttaggacaagatttcatgtcggccgatgatctggaagaagttgacataggtccaagggataggccaaggccgacatttatcagtaagaatctatctgcagaatttagaaccaagttaatagagctattgaaaaaatatggagattgctttgcttgggaatattatgagatgtcaggactcagccgatcgattgttgaaccatggcttcctattaagccaggatataaaccacttcaacaacctccaaggagatgtaaagccgatatgtatgacgctatcaaggctgaaattactcgactatacgatgttggttttattcagccatgccgatatgctgagtgggtttccaacatagttccagtcatcaagaaaaacggcaagctcagggtgtgcattgactttcgagacttaaacaaagctacccctaaggatgaatacccaatgctaattgctgatcaattggttgatgctgcttccgagcacagtattataagttttatggatggcaatgctggttacaatcagatttttatggcagaagaagatattcataagactgctttcaggtgccctggtgcgatcggcttgaatgagtgggttgtgatgactttcggcttgaaaagcgctggagttatatatcagtgggccatgaattatatattccatgatctgatcggcttgttggttgaagtctatattgatgatgtggttgttaaatcaaaagaagtggaggaccacatagccgatttgaggaaaatttttgagagaaacaaaaaatatggcttgaagatgaatcccacgaattgtgcttttggtgtatcggctgggcaattcttgggttttcttgttcatgagagggggattgaggtaactcagaggagcactaatgcaaccaagaagattcaacctccggaggacaagacacagctacagtcgttgatccgcaagttgaggcattatttgttatccaacgaatgcaccatagtatgtaaagccgatgtgatcaaatacatgctatcggctccggttttaaaagaaagagttggaaagtggatatatgctttgacggagtttgatcttcgctatgaatcacccaaggtagtcaaggggcaagctatagccgattttattgtggagcatcgtgatgattcaattggctcggttgagatcgggccttggaccttattctttgatgggtcggtttgcactcatggttgtggtatcagcttggtcataatttcaccttggggggcaagttttgaatttgcttatactatcaaaacctatgcaactagcaatcaggctgagtatgaagcggttttcaaggggttgcagttgctcaaggaggttgaagccgatgctgtggagatcatggggggatctttgttggttatcagtcagctggcaggagaatatggatgcaagaatgatgcgttgatgatctacaacgaaaagtgccaggaattgatgaataatttttggttgaacgttgaggctaacgatttggctcaagggacatcaggatataagccgatgaggaaggatattgaagtagaggtcgctacaattgcagctgatgattggaggtatgatgtttatcagtatttacaaaatccgtctcaatcggcttcacgaaaattgcgctataaggctttaagatataccttattggatgatgagctatattatcgtacgattgatggtgtattgcttaagtgtttgagtgccgatcaagctaaggttgtgatgggtgaagtacatgaagattgtcagaaatttagagcaattcagagagcaccagcatcggctatgaatcctatcatcaagccatggccattcagaggatggggaattgatatgattggtcagattaatccaccttcaagcaagggacataagtttatattagtggaaaccgattattttaccaagtgggtggaggcagttccattgaaaaaagttgattctggggatgcaatacagttcgtaaaggaatatatcatctatcgatttgggattcctcagactatcacaaccgatcagggatcaatttttgtatctgatgaatttgtccagtttgcctatagcatgggtatcaaattgttgaattcttcaccatattacgcgcaagctaatgggcaagccgaggcatctaacaagagcttaattaaattgatcaagagaaagatttctgattttcctcggcaatggcatacaagattggacgaagcattatggtcttatcggatggcctgtcatggatcgattcaagttcctccttacaagcttgtttatgggcctgaggcagttctgccatggaaaactacaatcggctcaaggaaaatagatttacaagataaattaacagccgatgagtattacaatattatggtagatgaaacagaagatttggttcaatccagattgcgtgctttggagaaagtggctagggataaggaacatgttgctcgtcattataacaaaaaggtagtgcccaagtccttttctgaaaggagagctagtttggaaattgatcttgccgataggaactcgagataa

SEQ ID NO: 69222 - DNA, 1455 bp, Oryza sativa
  Clone ID: PAT_MRT4530_69911C.1
gctgcagtatccctttgtattttgttatactgccaatctcaatctgtacctcgttacacggatctactcgttgcatcacctcatattggctcaaaaatagttaacagttctgtagtattgctactggaaacgagcataattgctagcctccagttttaatcattcatccctaccccattacacaaaaatttaaagactatttcctcccactgaaattaccatgtcagcattgcagttcaagctagcaaacatgctggctaactgtaaacttggtgaaacttgccccacattcgagtcgttggttctgaccatttgaatcaactggaaataaaatgttgccacatagcttcactccgataaaagttggtgcaatgcacaaattactctcgatcgcaatcactaggtcactggaactgcctgcaaagtgaattctttaagcaatttctcaccaggaagttcaacggctaagttagcttgagcatcagcatccgtgttaaattccctcaaaacctggttgtttagaaatgtatgagatcttcccttaatttccttaacccttttgcacaagtctggcatagtgtcatgccgaacaggtcatgcatccgagaccagtttacaaacaagattagaatctctttgagcccgtatatatacaaagccctttttggaagaatatctcagccttagaatcaattcacagtattccgctgcattctagcttgcatgacccataccctccagtagttgaacaatcaccgttccatcgagtcgccttattactgctccagcaccagctttcacaggatttcttttagaaacaccatcaaatacaagaattcatgaaagagaactattaggtaatgtctcttgttcggagacttagggatttttctttgtcggtccagtctccatcactagtggcctttttaaagtagaagtcccagttccatcaggttgctggaaagggcatggaactaggtcatcaaataattcatctcttgcatctgctgcattaatggagtaaagaggatttcttaaaccgcgcgcagcgaggtattcttctgtctctttacgcaaagaatagcctttgtacaccgtcacagaaggatcacataccgagttgctgacttgagcctggcaatcgctgaggctcttgtagatgccgatgacgtcacccttgcggacgacatagaacggctcacctccgtccatcgacggcggcggcggtggctggctgctctgcttcgcggcggcggcggatctcttggcggagcgccgggatgaagcggagaagaagcgctcgagggcaaggccaatgggcggcggcgcgggtggcctgagcaccaggtgacgctgctggtggtggtggtgctggctcagagctcctccggccaccgcgtgcctcctccaagccactctagaaattccacagagagaagaagcgcaactcctcat

SEQ ID NO: 69223 - DNA, 598 bp, Oryza sativa
  Clone ID: PAT_MRT4530_69912C.1
gacattactagaaatataaattcccagcacggaatagccctgatatatttatggttacagaagcaattcgcaagcgcacggatatactattgtagcatttcacccagaaatattccaaggtatcgtatttatttaatcccaagggaagatttataacagagaaatatgctaataagttatataccttacttgtatgtatcaaagtctgcgtagggtgtcagggttacggataaggcatacatcctatcctacgacttatggaatatgcggatatggcataccttcacgtatgcagattgttcccattggaatccgttacaaattatggaaaatatctctacaagttaagtaaattccaaagtcttactcggaatcttacttgggaattaagatgatccacggtataaaagggacccctagggaggggtgcaaggtattgaatctcatcgccaacacacccactatagtttatgaagctggagtactcggaaccaagtcgctgggagatctcgtagagtacctcgactacgatctcatcctcgttccaacgtaccccaaaacccaaatcatccggtctatgagtatcactcgtcgatag

SEQ ID NO: 69224 - DNA, 269 bp, Oryza sativa
  Clone ID: PAT_MRT4530_69913C.1
gttattggtgattttttataaacttttacacaaatacacactaccaatacaaatctcaccctatctccaatactctcacaaacatccacgcaaaacacacgaatacttacatctatactctccacttacttacatttactacacctgtttcacacacacacactcttctgcaaaaacccgcatcgtcttaaacctacctatcttatctaaacgcaaaccatcaccatgtcaaaactaaagacccatctctcactttccctgaactaaat

SEQ ID NO: 69225 - DNA, 390 bp, Oryza sativa
  Clone ID: PAT_MRT4530_69914C.1
tttggttttttaattttttttggttttctctttttttattcctatcatttttattttttttttttttttttctacctctttttaaaggccaaaatccaaacatacaaaccccccccaaatttggcccaacccaaccagcgacaaccccaggggcaacggcataacccccacccccaaaaaaccctcgacctaacccaaaaaaggggccattcccccaaaaccggtcccaaccccaaaaatttcccaaccttttgtccccaaaccggcaaacctccaaccctttttaacccccttaatctaaccatggccccccacacaaaaaaaaccccccccccaaacccccatttaaaaaaaccccgttccatttccccccccccccccaagtcccag

SEQ ID NO: 69226 - DNA, 1299 bp, Oryza sativa
  Clone ID: PAT_MRT4530_69915C.1
atggccgcctacgaaaatgacatctgtgggggtggacctcttaagagctccgtctgtgaaaatatatttttgcagtcggagcttttaagaggtggcggctaccagcgggaggcggagggtacatgggtgggcgacgtctcccctcaatcctcccagatccggtggaggcgacggcggaaggcggcggcggtgcagaggtggcggctaccagcgggaggcagaggtgttgtaccatacagctgcacagctggagacaaacccctcccgcagcagcaatggcggccgaccaagttcggtgatcagccaccgcagccctccctagggtggagccccaacctcaaccttccctacccgctcccgcccacgcagccgaccgtggtgtcgctgccggccccgcgctcgggaggacccgcgcttccactactaccgcaccatcaccacgttagatctaaggtggccttccgcttcccgaatgaccagggcttcgagggcggcacgaacggtggtgtattcgtagaacaggctcaccaccctagtgctagcgcggtactcggggcgctcgagaggcacacgacactgttgctctactccaatcggctcgttggctcgctcccgccatcgctgggcgggctggctgctctccggatgctccacatcagcgacacctcggtaatgtcgagccctagccttgtcgtgcttagcaggctcgcaaacctcaccgtgttcgagctcgcgtcctgcaacctcaacaacacgatcctgaggagcctcgggaggctcaccaaggaaaggggagggcgtggggattggaaggacgaccgccgccaccgccgtgaccaatggcttcgccaacaatgtcctagagacgcaccctcctcgccaactgctgcatttgaaatgagcgaaataattcaggctcgacctgggcaggcggcgacccgtggagcagatagttgcaatggaggagcccatcgtgcccccaatagcaagagaaattatggggaaggggccaaggtaacgatggtgccagtggccaaagcgaaggaggtgacaacgatgacactgatcggaggtgatggagtggcatggcaagcagctcgaaaggaggggacgatggcagggagactctcggaggaagaggtgatgggacagatgtggcgcggcatggtggcctgcccactcgtccatgaaggtggcggttggaggtggaggaagaagccgagctcgagctcccctcatggaggctggtggaggttgcggccagtgaccgagctcgagctcactcatgaagggaagtag

SEQ ID NO: 69227 - DNA, 1578 bp, Oryza sativa
  Clone ID: PAT_MRT4530_69916C.1
cgggctgctcgccgcctggggccccttcgaagaggctaccagaaggtccaggtgctatttgttactgactgcttcccgtagtcctaatctcttcccgtgcaagaaccttgtgaaacatgaaggcaatgcttggttgtatagccctgacttaaaggctttaagagaaaagctcaggcttccagttggatcctgcgagcttgctgttccgctcaaagcaaaagtaagactctactcagtggatcgaagaagagaagcatatgctactatcctgcactcagcaagtgaatatgtctgtggtgctatctcagcagctcaaagcattcgccaagcagggtcaactagggatctggttatccttgtcgatgatacgataagtgatcaccaccgaaaaggattggaggctgcaggctggaaggtgagggttatcccaagaatcaggaatccaaaagctgagcgcgatgcttacaatgagtggaactacagcaagttcaggttgtggcagctgaccgactatgacaagatcatattcatagatgctgatctccttatcctgaggaacgtcgacttcctgttcgcgatgccagagatcaccgcaactggcaacaatgcgacactcttcaactccggtgtgatggtcatcgagccgtcaaactgcacattccagctactgatggatcacatcaatgagataacatcgtacaacggcggtgaccaaggatatctgaatgagatattcacatggtggcaccgcatccccaagcacatgaacttcttgaagcatttctgggagggggacgacgattctgcaaaggcgaagaagactgagctgtttggcgcagacccgcctatcctctatgtcctccactacctgggcatgaagccatggctgtgcttcagagactatgactgcaactggaacatccccctgatgcgcgaattcgcaagcgatgtcgcgcacgcccggtggtggaaggtgcatgacaatatgcccgagaagcttcagtcctattgcttgctgagatcaaagctgaaggctgggctggaatgggaacggaggcaggctgagaaggcaaacctggaagatggacattggcggcgaaatatcaccgatccaagactgactatctgctacgagaagttctgctactgggagagcatgctgctgcattggggtgagaagaacccaacgaacaacaaccctgtgccagcgacaatatcaagctcatgatctgtagatagctcaagatattattagtacacaaaaatccatcctatatagcactatacatgcatagaaacagcttgtgtaggttgccatgcttaggcctttccaacacacaaaagaaaaaaaaaacaccctccattgctgtcatggctgcagctgtgtctcgctgcgttgttgacagctaacaattctttcgggttggtttagctaattagttatggcaaatgtaaattccttgatgaaaaacctgagtactgcgggaaagagatgctgcacagagaggctgtcctttgttggttataatggaagtaaagcttttcttgtgctaaaaaaaaaaaaaaaaaaaaaaaaaa

SEQ ID NO: 69228 - DNA, 507 bp, Oryza sativa
  Clone ID: PAT_MRT4530_69917C.1
ctctgcagaggttattaaattgttcgaacagccgtgcccacggtcatgggcggacgtgaggtgattcctagtaaaagtttctttattatccaataaggactagtatctacccatggatataaatatgtacacatggagtcattgtaaactatctcacagatcaatacaactactctcggcgcatcgccaccctctttttcaaggtttttacttatcaaccggcgaaacttgtcacctgatgcaaggctgcatcggttcagttcgatctccggtgaaggggcaagtcctacatttcgccggccctagagattgtatcagctacattgatgttgttcaaggttacatcacttcgccctcttggatcactctggatcggttgatatatttacctacctatttatcatatatcttagttaatctagattagcatcttaatttgatcatatcggctgagattcattttagggtttatactggtatcggttaaattatcttgctagattagat

SEQ ID NO: 69229 - DNA, 2209 bp, Oryza sativa
  Clone ID: PAT_MRT4530_69918C.1
atccccgggctgcaggaatcggcacgaggctcaccaacccatacccccacactccctctcacactccactctagctagctaagctaccttcttactccatttgagcaaaccaaagctcatctagagagagagagagagatctagagagagaaaccagcaaccactcttcctccatctccatgagcaagagaccagatcgttcgttctagattgttctagctagatagcttcatcgtcaaccttggcaacgccaagaaaattaaccagcaagaacacaagaagcggcggcggcggcgatggaggtggcgacgatgctgacgctgacgctgctggcgtactcggcggcgatgctggcgcggctgctggtggcgcggtcccggcggcggcggtgctacctcctcgactacgtgtgctacaaggcgaccgacgaccggaagctccccaccgacctgtgcggcgagatcatccagcggaacaagctgctggggctggaggagtacaagttcctcctcaaggtcatcgtcaactccggcatcggcgaggagacctacgggccccggaacatcatcggcggcggcgacgcccgccccgaccgcctcgccgaggggatggaggagatggacgagacgttccacgccgtgctcgacgagctgttcgcgcgctcgtccgcggcgggcggcggcggcgtccgccccgccgacgtcgacctcctcgtcgtcaacgtgtccatgttctcgccggcgccgtcgctctccgcccgcgtcgtgcgccgctacaacctccgggaggacgtgaaggtgtacaacctcaccggcatgggatgcagcgccaccctcatcgccctcgacctcgtcaacaacttcctcaggacgcacgcgaacaaggtggcgctggtgatgacgtcggagtcgatcgccccaaactggtacgccgggaacaagcgcagcttcatgctgggcaactgcctcttccgctccggcggctgcgcctacttcctcaccaacgacccccgccaccgccgccacgccaagctccgcctccgccacctcgtccgcacccacaccggcgcctccgacgacgcctactcctgcgccctccagatggaggacgacgccggccgcccgggattccacctcggcaaggacctcccccgcgccgccgtccacgccttcgtcaagaacctccgcctcctcgccccccgcgtcctccccctccccgagctcctccgcctcgccttcgccaccttcctctcctccggccgccgcagcggcggcaagaagacctcgccgtcgcagcagccgctcaccatccgcatgaaggccggcgtcgaccacttctgcgtgcacaccggcggcgccgcggtgatcgacggcgtcggcaaggggctcaccctgacggagcacgacctcgagccgtcgcggatgacgctgcacaggttcgggaacacgtcggcgagcagcgtctggtacgtgctcggctacatggaggccaagcgccgcctccgccccggcgaccgcgtcctcatgctcaccttcggcgccggcttcaagtgcaacagctgcgtctggaccgtcgagaagcccgtctccgacgccggcgtctggaaggactgcatcgaccactaccctcccaaggagctcgccaaccccttcatggagaagtacggcttcgtcaaggacatgatgaacttgtgatcgatccatcaaattccccaattaattcctcgatcgatctctcaagaaccaatataatcaatcgatattgcatgtgcttgcttgcgtgcatggattaattaagcgatcggttagttaattaattttatcgccatttgctgcagctctgttgatgattaggatgaacattatatttacagggagggggaagaagaagtaagaacaatcaatgagttgaacaaaaaaaaaactaaggattcaattcataggtacatatagcagcttgtgattccataattttcttttcagcatggtggtagtatatggattttatttatttatcttattttttttgttgttgtttgtaactctctgtatgttgctagctacgagtgtcgtcctagctggtggcaggtgttgtgtctttcattaattgttcatggtgatggactatttctattcaaggatcaaattaaattatttttttttgaaaaaaaaaaaaaaaaaaaaaaaaaaaaaaaaaaaaaaaaaaaaaa

SEQ ID NO: 69230 - DNA, 681 bp, Oryza sativa
  Clone ID: PAT_MRT4530_69919C.1
atggtctcagtaggccacaggagtcacggggaagcggcggcgggcggagtgacagcgggcggtgggcggagagagcgtcgggcggagcagaggggcggcgggtggaagcggagcgtcggcggggcggcgggcggagcgacggcgggcggtgggcgccgagtgaagcagaggggcggcgggaggaagcggagcatcggtggggcggcgggcggagcgacggcgggcggtgggcgccgagcgaagcagaggggcggcgggtggagccgaaggcggagcggtaacctcgtgcaccacctgctgctcctccacctctaccgcacgcctccgcacccactgcggcacctgcttcggatccggcaggacttcattcctaggcctacctcgtcgtcgtccgggcagcgggtggtggaatcaggcgttgatgtcagtgacgggttttcgctaaatccacctccatcgtccgccactgacaagctcgggcagcgactcgtcgccatattttcttttccctccttccggcgcgcgggcgaggagtcgtggcggcggctggagcgagaggagcggcgcacggcggcgggagagaggagcgccgcgcggtcagcctccctgtctctccctctttcatccgcgacgaagagatgggggtggaaaaggtggggtcccactatttttttgtttgac

SEQ ID NO: 69231 - DNA, 723 bp, Oryza sativa
  Clone ID: PAT_MRT4530_6991C.1
ggcttctcttcttgcagttgcaggtcccttcgaaccctcacgatctgctgcagcatgcgcttaagcaatccactgaggtcctttctggagtcgaacgcctgagacaccgacaccattgcctggcatgggaactcctcctccaggttccggcaaacctccatggcaagcgtcgtcttcccgagaccaccgaaccccacgatggagaacaccttgagactaacgtcgggctcattgttgtcactcgtcagcctattcgatttcaccagatcggacaaacgctgcacctggtcgccgatgcccaagaacttgctagggtattcagtgcctggcccgtcgacttcgtaacgcacgcgccgctcgctgatggcgagggcacgggcgtgaaggttctggatgtcgacggcgaggcgttgccgcgggccaatcgtgacgagccgccgccaggcgaggccgagcgcaccggcgcgcggcggggcgaagctgatgcggagcaagaagaggtcgatgcagtcctcggcgtcgtaggcgagctcgcgcacctgcttcatccactcccggacgaagtggacgacggtaccctcgtccgcctcggagagcatgcggaggagggcattcatgatggccacatcgtccctgaggtacacgatctcaccgcggacgccgctgagtagccggaactcgtcactcaccagctgcccaatcttccccacaatggctttcccc

SEQ ID NO: 69232 - DNA, 2226 bp, Oryza sativa
  Clone ID: PAT_MRT4530_69920C.1
atggattcgagggccgggggcgacgtctcgcccgggcccgcgctaggagacaactggcggcagagggggccggtgacgctggcgagcatagcagtgtattgcagcttccaccaccaccctccccctccactccggtcaccggcgccgcgccgacctcgtcgtcctcggcgtcctccccagcagcgcaccaacatcgccacgtccgccatcaccgatcttcttcgtccccgtcgtcctcctcggcaactagcacaacttcctcgccaccttcgttcccatcttcctcctcggccgccttcaccgaccccttcatcccgtcaatggcaagctatgggaaccacgtcgttcgtgttcttcaccatcatcctcgtcgttcgtgttcttcaccatcatcctcctctccaccggcttgttcttcgcagcggatgcatacccaccgggaggcccagttccaggaacaacaagtttggaccttttggcttcggcttcatccaacgtcaaaagctcggaacatggaactcgccattccagggtgccgtcggtgataccatgaagaagttaagtcagaattatgcagttggggaaccgctagatctagcaaggagtccggatttagcgtctccgctcttcatcgggtcaactcttgtctccctgagtccctgcaagcccgacactagcgacctcaatggcatctataacaatagtgtgcatgacgagaggggaggagaaaaaaaagggtggctcatggagggtaacaagagtgtggttgcgcatgcaaaggcggagagggggaacgatggtggctcatggagaagagcagtggtggtggtgcgtagagtgatggttagtggttgttggtgtaggagtagtacttatattatatctccgactccgagtatcttccccttcccttcccttggcggcgtaaatgaaagaagggaaatctcccgtctctttgtctcctgccaagacgagtcgcggctgaacaggggaggggccgcgatctccatctggcgggcagagcaggggacgggaggggatcctgcgtttgagagcaaccaagggctctggaatagtggatattattcccagctgtttgggattggaggagttatggtcactgtcgccattctttggttatcgacaggctactttggaggaattggtgctccttttgccccatatttttggccatatctaggacaacttccaaagaagaaggaacggaaaaggcctgtgagagtgtacatggatggatgctttgacctcatgcactatggccatgcaaatgcattacggcaggccaagttgttgggagatcaacttgtagtgggagttgttagtgatgaggagattgtggcgaacaagggtccacctgtgctttcaatggaagagaggttgacacttgttagtggattgaagtgggtggacgaggtcattcccaacgcgccctatgagatcacggaagaatttatgaataccctcttcaataaatataacattgattacattatacatggagatgatccttgtcttctacctgatggaacggatgcttatgcgttggcaaagaaggttggacgctacaagcaaatcaaacgcactgaaggtgtctcaagcactgatatagtcgtctattgtgatcttaatgtgggaactgtattctttttccacccagggaggatactactgacattcaagcagaaagaggctggcagtatggaaactaccacagatgcaaatcagaacactggagcaacatgtgataaagtgaaaagtcagctatccaattttcttccaacatctcgccggataatgcagttttcaaatggacaggctccttcgccaggtgctcgcgttgtgtatatagatggtgcttttgacctttttcatgccggccatgttgagatcctcagaagtgctaggcaacttggtgacttccttcttgttggtgtccatgatgaccaggcaatcagggatagaagagggtatcgtcctatcatgcacctccatgagcgtactctcagtgtacttgcatgtcgctatgttgatgaagttataataggtgccccatgggaggtttcaagggatatggtcggtattgattcatacgctgttccaaagagcatgggtatcttccaaacaatcacaagcaccaaacctataacaacagtttcagtggctaccagaataatcgataaccatgaagcttacaaggtacatttt

SEQ ID NO: 69233 - DNA, 801 bp, Oryza sativa
  Clone ID: PAT_MRT4530_69921C.1
atgaaaaaacatcccatccctaaaataacgccgtccgcgctcatcgctctccatcgcgtcgccattgtccccttcgtcagcctccccctcgccatccatccgccccccaggaaattttgtggaatgctaatgaccaccgcaatcagcaaggaggcaatcgcccagttttcaactgatcaatacaagaaccttaattcaccttcgccacacacaaccgtcgttcaagcaagcgtcgtcatcgtcttagagcgagcaagtgaacggtgggttcagggtcatcgctcagtgggttcagggtcagtgccgagacggctcgtgctgaccaacggtgtcgccgctgccgtcatcatcaccatcaccgacctcttctctcaggtggggttcctgtaccttctcactcgagacataagaaatgtgtttataaatatagcgccgaggcggctcatgctaaccaacggcgtcgccgccgctgccatcatcaccgtgactgacctctcctctcagacaaatagaaatgcacaaattgaagacaaatacaaatacgcggtcaccggcaacggcaaccaacagcgcgggaggtggcggcggacggcgcgaaaggcggcggcgtcggccgaaggcgacgacgcacgtgcggagggcagcagcgctcacgggagagagggaaggaaggaggagaggggatcctcaccggcgagtatggcggccggaccggaggatgaaggcggcggcgatggcctggcaatgcgaaggggcggacgagcggcttcgacacctaaggagagagctgagaggggttag

SEQ ID NO: 69234 - DNA, 219 bp, Oryza sativa
  unsure (1)..(219): unsure at all n locations
  Clone ID: PAT_MRT4530_69922C.1
gntcgatttatgtgttggagacttcagtgcacaagcgtgttggttttcaggaganataatacgtgttccagagcgctctatatatgtntgtcgtgtctctatttatttgcatatatatgtnattcggtaatgtaatttatatatttataagatatggaaaattgttcctattgccaaaaaaaaaaaaaaaaaaaaaaaaaaaaaaaaaaaaaaaaaaaa

SEQ ID NO: 69235 - DNA, 1988 bp, Oryza sativa
  Clone ID: PAT_MRT4530_69923C.1
gcgagggggcggcctgcaggaaagaagggaaatctcccgtctctttgtctcctgccaagacgagtcgcggctgaacaggggaggggccgcgatctccatctggcgggcagagcaggggacgggaggggatcctgatataataccaagataatacacctgcttgtcaaatgatgatgggtttgctagcgtttgagagcaaccaagggctctggaatagtggatattattcccagctgtttgggattggaggagttatggtcactgtcgccattctttggttatcgacaggctactttggaggaattggtgctccttttgccccatatttttggccatatctaggacaacttccaaagaagaaggaacggaaaaggcctgtgagagtgtacatggatggatgctttgacctcatgcactatggccatgcaaatgcattacggcaggccaagttgttgggagatcaacttgtagtgggagttgttagtgatgaggagattgtggcgaacaagggtccacctgtgctttcaatggaagagaggttgacacttgttagtggattgaagtgggtggacgaggtcattcccaacgcgccctatgagatcacggaagaatttatgaataccctcttcaataaatataacattgattacattatacatggagatgatccttgtcttctacctgatggaacggatgcttatgcgttggcaaagaaggttggacgctacaagcaaatcaaacgcactgaaggtgtctcaagcactgatatagtcgggaggatactactgacattcaagcagaaagaagctgggcagaaggaaagctaccacagatgcaaatcagaacactggagcaacatgatacatattaaaatgaaagctcagctatctatttcttcccattcgccggataatgcagttttcacctgcaaatggacagctccaggctgtttgccaggtgcttgcgcgttgtgtatacctctttcatgccggccatgttgagatcctcagaagtctaggcaaatagatggtgcttttgacctttttcatgccggccatgttgagatcctcagaagtgctaggcaacttggtgacttccttcttgttggtgtccatgatgaccaggcaatcagggatagaagagggtatcgtcctatcatgcacctccacgagcgtactcttagtgtacttgcatgtcgctatgttgatgaagttataataggcgccccatgggaggtttcaagggatatgatcactacatttaacatttcattggttgtgcatgggacagtaaccgagggtagttctgtggtcggtattgatccatacgccgttccaaagagcatgggtatcttccaaacaatcacaagccccaaacctataacaacagtttcagttgctaccagaataattgataaccatgaagcttacaagaaaaggaacttgaaaaagaaggcaagcgaagatagatactacacacaaaagaaatttgtctctggagattaatcaaatatgcgctattacaaaggggggacggcatgctgccacatttattcaagataattctacaacagagatttcaacagttactcggctatagaaaggtcatagtcagttataattgatggccattcagcatgggaaccagctcaaggaactaaattaaaaatctgccgtcgcccttttggcaggaaaatccacttaacagccagaattcacatacatgattctttttttctttttacttttgttgtccctggaggggacaatattcatagctgaacaggtgctcagcaaaccattgttgtatacttgtatgttattacttaacagtgtgtggagtgattagagttgcatactccctaattgtaccaaacgacacttatgagacaatgagctgtgcgatgaccgtggtctatttcatttaaaaaaaaaaaaaaaactgagaattttatgttcactttgtttaatccaaaaaaaaaaaaaaaa

SEQ ID NO: 69236 - DNA, 1190 bp, Oryza sativa
  Clone ID: PAT_MRT4530_69924C.1
gtggaagaccgctgctacatcaggacgtcgtcgcttctgcgggggaggcaaatgcataagcgaaagaagccattgccgccgcatcaagatgccgtccctgctgagactgccaacaagcagcctgagtcttttgtgccgatagaacacaatgatcaaatgcctgaggaaaatcttgaggaggataacattatagctactcgaaagagtaagagacaaatgactgcaaagtcttttggtgatgactatatcgtataccttgtgaatgaaacttcaagaactatagaagaggcatattcatctcctgacgctgactattggatggaagcggtacacaacaagatggactttattatgcctaatgtacttgggaaatcgtcgagcatccacaggtgcaaacctgtaggatgcaagtgggttttcaagaaaaggtttacgcctgatggtagagttgaaaagtacaaggcaaggcttgtggccaagggttatatccaaaaggaaggcgatgattttttcgacacttattcactagttgtttacttgaccacgattcgagtactacttgctctggtagcctctcatggtcttctcattcatgagatggacgttaagacaattttccttaatggagagttggaggaggagatttatatggatcaaccagacgggtatgtactggaaggtaaagagagaatgatgtgtaaactattgaagtcctcgtatgaccttaaccaagaacctaagcagtggcatgagaagtttcacagaacactgacatctgttggctttgttgtgaatgaagctaacaaatgcatgtactgtcactatggtaggggagagggagtgatcctgtgtttatatgtcgatgacatattgatctttgggcctcaatgtaattgaggaggtcaaggacttttctgtccaaaagttttgaaatgaaagatttgggggtggttgatgttattcttaacattaagctactaacagatgatggtggggttacactcgtgtaatcccactatatggacaatgtcttaagtcgctttggttgcagtgattgcaagccagctcctactccctatgatcccaatgtgttattaaggcaaaacaagctattaggtaactgggaggagagacccttaactgggctcatttgtttgatgtacttctatcctcaagactgacctgggaag

SEQ ID NO: 69237 - DNA, 284 bp, Oryza sativa
  unsure (1)..(284): unsure at all n locations
  Clone ID: PAT_MRT4530_69925C.1
cccacgcgnncgctcactgggctgctctnnttctcncatccatggccgtcgccgngcatgcgccctgtccgaccncaagnacggcgacgacgacgnnacgccacgcacgncnggngagggtanagcnactttcttgaaggannagttgggggctntcctnggactgatgtcnaantagnagnagtacgttgacggncnactntatgnnccnttntccatgacgtagaactangctggctgctaatcatgacatnctcggcttngcttgaagtcaggtnttcaac

SEQ ID NO: 69238 - DNA, 466 bp, Oryza sativa
  Clone ID: PAT_MRT4530_69926C.1
attattcattatttgtttgatcactattcgtgcatgcaacacacacgggtgatcctactacttgaggcaagccagctaagcctatctggccgggggaagatgctgactgctggggctcaacccggccatcgacgcagctggccggtctgctcccctggcacctacgcggtcatcccgctgtgtgtgtcgcctatagccctctcgacaccctgcctagtaccctgctcgacacaccctcccgcgtatactcgacacacacacagcttgctcgggctcggatgcttctctagtctcacctcgcggatgggggcagggactccggtcacgtctgactgctggcagactgcatcgagccgacgccccggcggcgaactcggtgaaccttcccggcgggagctgcggtcgaccctgccggacgcgtcacggctgtctgcactcccgtggcctgctgtcctgaactatcttc

SEQ ID NO: 69239 - DNA, 185 bp, Oryza sativa
  Clone ID: PAT_MRT4530_69927C.1
gcacgagggtcaaaatgaaaggatatcttgcattattattagtgattagtttaatcgctaatgttgggatctaatgaagatatttatccatctttaagacatggaggtggttggggaggtcatggacattggggaggtggttggggctacggtcaccatggaccacacggtcaccatggctgggg

SEQ ID NO: 69240 - DNA, 300 bp, Oryza sativa
  unsure (1)..(300): unsure at all n locations
  Clone ID: PAT_MRT4530_69928C.1
caccaaantaaaagctatnacctcacatgcgcgcgtacttaaactctcttcctctatatccctcccccttttttttttttttttacaaactaacccatgcgaccgtgcttataaataacattcaccccaaattttcatcttatatccacaccctaacccccttcattattatacacctcatatacttactctcctacatacccctttttatttcactcaccatctattcaacaaaatcgattacattcctacatacacacatatacacattcccacctccatacctacataattaaaaac

SEQ ID NO: 69241 - DNA, 267 bp, Oryza sativa
  Clone ID: PAT_MRT4530_69929C.1
atggggaggcatgaagcacgctttttgactgcaagtcggttacatcttcattccgtcttccccccggccgtccagagtgggagctgcagctaccactgccacaaacctttccgcctcactgaattattggctcacgtaatgggttctcctgaggccttccactactggaagctgcaaagcactgagaatccaagcccaaataggtctcaggcgaacggcgaccagcccaacaggcctataattggcatccaaactaagcccaaatag

SEQ ID NO: 69242 - DNA, 4065 bp, Oryza sativa
  Clone ID: PAT_MRT4530_6992C.1
tgtaacctctccttcatctccaactcgggacagaaacaaatggaaactcgaaaaataccttcacaagcaagaaaactcgagcctagaacccaaactattcatgttctcgattgccttgatcttctcgggatttgcctctattcctctgccagagacgaggaaaccgagtagcttgcccgacggtactccaaacgtgcacttctctggattgagcatgaggcgatatcgtcggtggttgtcgaacgtttcccgcagatcgtcaatcaatgagtcgtttgtcttggtcttgacaacgatgtcgtcgacgtatgcctcgacattgttgccgagctggtcgctaagtgcgccctggaccgtgcgctggaaagtatattccctgcggttatcagtccgaatggcatcttaacatagcaaaataccccgaatggcgtgatgaatgctgtcttctcttcgtcttctttcgccatgctgatttggtggtagccagagtaagcgtcgaggaaactcaaaagctcacagccggctgttgagtccaccagttggtctattcgaggaagagggaagtgatccttgggacatgccttgttgaggtcggtgaaatcgacgcacattctccatttcccgttggccttccgcaccatgactgggttggctagccactctggatgaagtacctctctgataaagccagctttgagaagtttgttgagctcttctcgtatggcttattttcggtctggtgcaaatctccgcagtttttgctttactggcttggcatcgggtcgcaccatgagtttatgctcaatcacctccctggggacccccggcatgtcggacggctgccaagcgaacaagtcagcattgtcgcggaggaaggtgatgagcgcgagttcggtcttgtcggggttggcactagagagtggaacgatcttgatcacgccgtccggttttggcgtcttgtttgtcttgctcactttcttgggtggctcagttgtggcgggtaggctgggcgtttgctcgaccatgtcgaggctccgcttgtcgcattgtaccaaaagttttgcattcccttgaatagtgattgttcccttcggtcccggcatcttgagcacttgatacgcgtagtgagatacggccatgaacttcgcaagtgcagttctcccgatgatggcgttaacgctgtatcgaattcagcgacatcaaaggtgatctgctccgttcagaagttgtttgcttggccgaaagtcacaggcaacgtaattttgcccaatggtttggacaaggactggggagtaattccatggaagggttgatcggtgggtgtcaactcgcttcgtggaattctcatcgcgtccaaagcgctagcgaagagaaggttgattgagctgccaccgtcgatgagaacccgcgcgaccttgatgttccgaatagtgggttcgaccacgatcggatagcgtcgctgtggagcctccgaaaatgtgtgaaacgtggaggtcagagtctggatatgctgagtccaattcctgagcagccgcctctgcatccttctcgaccacgcgtactcgcttgcctttttcaaatgccatgtgcttctcgagcgactttttgaaaacaaggcagtcttccaaagaatgtctatccatcttgtgtatggggcaccatgctttcttcgcgtcgctaccttgtgggtctgggcgcttgggagggttcgcgtattctgctgcgagaacttccgcttgagctttacttttcccacttttgcgatttttcttcttgcttgactcaggtgcgtccttggctggtttcttgtctcctccagtcttcggtttgtcgttcttgcgtctcagtgcgtcatccgcatgagcgcatcgatcgacaatttcgaataacctccgagtagtcgtgatgcgcctcgttgccaactcctgagtagtgtagcgatctctgacaccggatttgaaagcgtgaattacagaagcatcggtgatctcggggattgtgtttctgcactcattgaagcgtcgaacataatccctcaaggattcgcccgggttctgtgtcaacgcatgtaggtcgtcttcgatcgcgtggcgcttgtaagttccttggaaattggctacgaattgctgccacagatctgcccacgaagagatcgagtaggggggagatgcatcagccatgaacgtgcagagcctttcaatgcggttggcaagtaatttgccaacgtcttgttgtccgctccggcggcgtagagtaccgtggagtaaacctgaaggaattcttccgggtcggtgctcccatcgtatttctctattgctccaggtcggaatctttcaggccatcagacatcccgaagtgaacgaacgaaagctctacacccagcgctgggggcggtgggttgtcggcgatcatacgtccttcgtggatgtctatctgatgaagatcacgaggatgatgacgatgacgatgggtcgcttggttccggcgcacaagtacgaggacgtcggccgggttctcgagaatcctgtcgccgtctcccgctgttgtctcggcgccgatctccaccatcgtcgtcattatggcgacgtcctcgaccagtatcgcccggcgcccgctgttcacgatcgtcgtgatcgtggttggatggcggtcgttcttcattattgtgacgccgtgaagagacgcgatgtcgggaacggttctcgttatctcgtgtgcgtcgcgcctctcggcagccatttaggtgatcgcggagatcaccggtgccgcgaggtgggggggtggctcgatgaggcgattcccgctgttcagggttttcaccattagcatcaccagttggtggttgttccggacgcgctgcagcagcggcctcttcgaatgcgttaccgaggttggccactgattcccgtagtcgttctatccaacgtgcgagatcgtcgttcagaacgggatcgtagggggtttccctcagtattgcgttgacggctctgatgtgttgggccggagtggtcacttgattctccgcttccgcattggtgcgtgctgacgtgccgacatcgtcgatagccaatacctcccgcggcgcgctcgttgtcgatgatccatagtcttcgaggaggtgcaagaatgatggttcgtggggattaatgtcgattaccccaacaaatcgatctgaaattggcgtcgctccttgttccttgtctttatccctgatggggatgtgtgactgctggaccttaggagatggcgtcttcatagcgctgagaaagaccttgcagcttgagaggtcgtgattctttgtcttgtgaataggacaatagacatcacgagttggagaaatgcgctgaattccacgctctttgcaggcgcgaatttcggcgcggatgttgagaaaaacccagcaggcttgtaaagtgtgtttcctggttttgtgaataggacatcaggaccttgtcgcttcggaagtcatcctcgtcggctcgtggtccttgtcggaacgacaaggtttggccgcattagaatccttctcgagctcggatgtcgtcgatgttccattctccgcttcggcgggaggatccttcgacatggagtcgtcctgggttgtaaccactgcgttctcgtttccggtcattgatgaaccggctgagatcggcatcgtggtgtaaaccgggaagacgatttcgccgacttgagtccacaccagcattgtcgaagcaggaaatccctggttgaggttggtgttgacgttgttgtcgacgaagctggatgacatagtagtagaaccttgagcaccaagtccccctacctggcgcgccactgtcgacgtttgatgtcgcaattctggtatttgcatggtatggggatcatcggtgctagggtatacgcgagaatggtgggtgtccccctgtcctcttaggggggcttgtatttatacccataggtgtccccttgtccaagcagaactagggaaaccaatatggatacaatccgagtagtccttgtcgtttccatgtagaactctggttgtctttccttatccggaactccctcgaggtcagtttccgt

SEQ ID NO: 69243 - DNA, 336 bp, Oryza sativa
  Clone ID: PAT_MRT4530_69930C.1
cgctttgcatcgcacttgtagctctcgaccccctcgtctaatgcatactctcgctggggtcaaaccaaaatcgcaactggcgaagattaagctcgggatcaatgggttcgggaggctcgtgaggctcgatgccagggtggccctgcagagcgaccaccatcagctcgctacctgcaaccacccctctatcaccaccgactacatgacatacatgttcaagtatggcactgtgcactgccagtggcagcaccatgagggtatggtgaaggacttcaagacccttctcttaccccagaaagaggtcaccgcgttccgctgtatgaaccctgtggcgat

SEQ ID NO: 69244 - DNA, 479 bp, Oryza sativa
  Clone ID: PAT_MRT4530_69931C.1
cctccacctctccctccgctcctaccgcccgcccttccccggcggcggccgccgcctcccccgggaccccgggcgtccccgtcctcggcgcgctgccgctcgtcggcctggccccgcacgccgaccaggcgtcgctagtgcgcaagtacgggcctgtcatgtgtacctcaagatgggcgcctgcggcgtcgtggtggtgtcgtcgccgtgcgtggcgagggcgttcttgtcgggcggaggcgtcagccgccggccgtcccgtcgtcatcccgccgccgccgaccattccagccgaccacacaaactagggagaaagggatgagggagagagagggaggaggaagatctggccccgctgccgaccactccctcgaccgccgccgccctagtgtcacttgcctgccgccgccgcttgtccgccgccgccgcttgtctagctctcgcccctgcagaccggtgaaaagaagagaaagagagag

SEQ ID NO: 69245 - DNA, 512 bp, Oryza sativa
  unsure (1)..(512): unsure at all n locations
  Clone ID: PAT_MRT4530_69932C.1
aaaggngngtcacnngnggcgccgtttagaatatgancccgggcgcaggattcggcaggagtgaantgatttggtggagaggagcaattcaattgaaattgantgggagtgatcatgaatgtgaaagcacaaccagcctatcattttgaacttaagggggaagntcaagaaacccactgtctaaactggatgaagccattgaagaagaggaagatgacattgaggaggaagaaagcaatgcagaaaagttaggttaccctaaagctatcaacaagtggcttcctaacatttccaagctatcaacctcactgaatggagtgcgtctcggcgacaaaatccagtgtcagctccccgctgctccaaagataatggatcctgtgaaatttttcgagggcaacagcaaccacagtggctcccaggttggcaactggaggagtgcaaatgagcaacttccgacaagtgcgagcttcgtcaagctggccgacatgggatcggagacatgggcgctattc

SEQ ID NO: 69246 - DNA, 377 bp, Oryza sativa
  Clone ID: PAT_MRT4530_69933C.1
ctgagtaccgactttactttatatttatcttgatataattgtgtagctagcttaccaaagatatgtaatggtgtggatataatgttcatgcaaatgattgctctatgtcatgctagtagatatagagtagtatttgataatgtaagcatggtgcttagattattaaatatcattatttggggttatatgctgcgggacaatagagttgggccactgatggtgacagctcagtacgggtattcatccacgttagtatatagtcctaagttaattggtattcctccgtattcatttccggttggacggccatgacgggttgtcgtaagaaactcggcaatcaggggtggtctcttgaaataccaggaaggcatagaggg

SEQ ID NO: 69247 - DNA, 409 bp, Oryza sativa
  Clone ID: PAT_MRT4530_69934C.1
ctccccatggcgccgttgccgccccgcctcgtcgtgctctccgccgccttcctctgcctcctcctccacctctccctccgctcctaccgcccgcccttccccggcggcggccgccgcctcccccgggacccccaggcgtccccgtcctcggcgcgctgccgctcgtcggcctggccccgcacgccgacctggcgtcgctagcgcgcaagtacgggcccgtcatgtgtacctcaagatgggcgcctgcggcgtcgtggtggtgtcgtcgccgtgcgcggcgagggcgttcctgccggtgcgccgcgacgaggctggccggctgctgcgcggcatggcggaggcgtcagccgccggccgccccgtcgtcatcccgccgccgccgaccattccagccgaccacacaaactag

SEQ ID NO: 69248 - DNA, 321 bp, Oryza sativa
  Clone ID: PAT_MRT4530_69935C.1
gtgctccaaacaattgcatagcctgctcattctgagcatcatcatatcaaaaacacaatataagtatcattgctctagttcattcagacagagcttccatgttattcatgaaccacagtacacatatgctccacacgaccacatctatttcgtatatacaagaattctatcaacactttgcgcaaaagaaccacttgattcagactgggtcgtgtgtggaggcaaggtaatgcacaacatcagaaagcaactcgggaaatcattcctcttattacaagcacagcaatatgatggcacaatcctagaatgtgatgaggcttg

SEQ ID NO: 69249 - DNA, 3243 bp, Oryza sativa
  Clone ID: PAT_MRT4530_69936C.1
atggcggccggtgcgcccccgccggagtctgggccgccgccgccggggccgccgggggcgatgcgggtggcgcggaggctggcggtggaggtggtggacgcgcgggacctggtgcccaaggacgggctcggcacgtcgagtgccttcgccgtcgtggacttcgacgggcagcggaagcggacgcgcaccgtgccgcgcgacctcagcccgcagtggcacgagcggctcgagttcgccgtgcacgacccggccgccatgcacgccgaggcgctcgacgtctcgctctaccacgaccgccgcttcaacccttccggcggcggcggcggcggtggcgggaagaaccacttcctcggccgcgtgcgcatctacgggtcgcagttctcgcggcgaggggaggaggggatcgtgtacttcccgctcgagaagcggagcttgctcagctggatccgcggcgaggttggcctcaagatttactactacgacgaggcgccgccgccgccggaggataggccgccggagggtggtggtggtgacaacgcgccgccgcctgaggtcccgcctgaggcgcccagggacctcccggacatccccgcgccgaccgaggccgccgtcgaggtgcagcagccgccggtgcatccccctgtcatcatcgtggaagaggcgccgccgccgatgcatcacccgatgatgccgccgatgcacggcccgcacggcccgatgatgccgccggcggtgcacgggccgcacgggccaatggcgccgccgatgcatcagcatcagcatccgcagccgcagccggagccggagcctgaaccggagccggacggcggcgaggcggggtacccgcccgaggtgcgcaagacgcggatggccacggagcgcgtccgcatcgcgcgccacctgagcggcgggttggggccggagtactacgccacctcgccgcgcgtcatctccgggcggttcgtgtccaccggcgacgccgtcgagccggtgcagtcgtcgtacgacctggtggagccgatgcgctacctgttcgtccgcgtcgtgaaggtgcgcggcatccgcgcctgcgaggggccgtacgtgaagatccaggccggcccgcacacgctccggtcgcgccccggccgcgacgtctccggcaccggcaacccggagtggaaccaggtgttcgccatcaaccacgccaagccggagccgacgctggagatatccgtctgggacggcggcgcgccgtccccgatcgaggccttcctcggtggcgtctgcttcgacctctccgacgtgccggtccgcgaccagccggacggcccgctggcgccgcagtggtaccggctcgagggcggcgagcccggcatggtgaccggcgacatcatggtggcggtgtggatcggcacgcaggccgacgaggcgttcccggaggcgtggaacaccgacgcgccgtacgccgcgtacacgcgctccaaggtgtaccagtcgcccaagctctggtacctgcgcgcgtcggtgatcgaggcgcaggacctgcgcgtgccggcgccgccgccggggctgccgttcgacgtgcgcgtcaagatccaggtcgggttccagtcggcgaggacgcggcggtcggtggcgagcaggagcagcggctcggcgttcgcgtgggaggaggacctcatgttcgtcgtgtccgagccgctcgacgagagcctcgtcgtcctcgtcgaggaccgctccatgatcaaggagccggcgctgctcggacacgccaccatccccgtcaactccgtcgagcagcgtctccacgagcggcaactcgtcgcgtcgaggtggttcagcctcgagggtggcacctccgacatcggcattggtcccggcggcggcccgccggggttctactccggccggcttcacctccgtctgtgcctggaaggagggtaccacgtgctcgacgaggcggcgcacgtgtgcagcgactaccggccgacggcgaagcagctgtggaggccgccggtgggcgtgctggagctgggcatcatcggggcgtgcgggctgctgccgatgaagacgaagggcggcgccaaggggtcgacggacgcctactgcgtggccaagtacggcaagaagtgggtgcggacgcgcaccgtcacggacagcctcaacccgcggtggaacgagcagtacacgtggcaggtgtacgacccgtgcacggtgctcacggtggcggtgttcgacaactggcggatgttcgccttcgccggcgccggggacgagcagcggcaggactaccggatcgggaaggtgcgggtgcgcgtgtccacgctggagagcaaccgggcgtacacggcgtcgtacccgctgctcgtgctgctccggtcggggctcaagaagatgggggaggtgcagctcgccgtgcggttcacgtcgccggcgcacctgccggacacctgggccacctacacctcgccgctgctgccgcggatgcactacctccgcccgatcggcgtcgcgcagcaggaggcgctgcgcgccgccgccgtgcgcgtcgtcgccgcgtggctggagcggtccgagccgccgctggggcgggaggtggtgcgccacatgctcgacgtggacgcgcacacgtggagcgtgcggcgcgccaaggcgaactggttccgcatcatgggggtgctcgcctgggccgtcgggctcgcgcggtggctcgacagcgtgcagcggtggcgcagcccgcccaccaccgtgctcgttcacgtcctctacctcgtcctcgtctggtacccggagctggccgtgcccacggcgtcgctctacgtcttcctcatcggcgtctggtactaccggttccggccgcgcggccccgccggcatggacgcgcggctgtcgcaggccgacacggtggaggccgacgacctggaggaggagttcgacgccgtgccgccgccggaggtgctccgggcgcgctacgagaggctgcggacgctggcggggcgggtgcagcgcgtcatgggcgacgtcgcggcgcagggggagagggtgcaggcgctggtgagctggagggacccgcgcgccagccggatcttcgtcggcgtctgcctcgccgtcgccgtcgcgctgtacgccatgccgtccaagatggtggccgtcgccggcgggttctactacctccgccacccgatgttccgggaccccatgccgccggcggccgtcaacttcttccggcggctgcccagcctctccgacaggatgctctga

SEQ ID NO: 69250 - DNA, 2517 bp, Oryza sativa
  Clone ID: PAT_MRT4530_69937C.1
atggcgccgccccctccttctccgccgcccccgtctccccccccggcgccggcgccgccatcttcacggtgggacacgccggtgccgcagtgggtgatactgtggagggtcccacgagtatatccggccgacgtgccctccaagggatcggagttctccctcgctctcgcggctccgccacggatcagctccctctccctcgcggcgccacctcatctatccagtgcctacctcacggcggcgccaccgcagatctccgcccatggacgcttcctctccggcgacctcggcccgttcgcccccttcgtcctagcggcggacgcttctggggtcatcctcgtgcacgcctactccgcccgtgtcctgttcgaccacagcggcagcggcagcaacagcggcagcggcagcggcagcgggggcccgttcgtcgccggcgacaagggtggttcccgcataggtccctgcctctacgtgattgacacgttctctgcggcggcggatttcctgcccgaccgcaacaccaaccccgggctgaccaacttcgctcttgtcgtgcacaatcacgaaggggtcgtcgcgcgtagttactcagtcatggaactggttctcgaggctgacagtaataaggcacagctttgggaattcagttctgcttccggagtatgtgctgagggagaagaagagctcagtatgacgctacttccagatggcttgcatgcagaggaggttgaaactctttctagtgtttgcgtcagcgagggcaagatcacatacgtggctgtatctggacatcctgggggattaccttctgagggcaatgttctcgtctggatttgtacagtgactcctatgtcagtcatttgggacacgatatgccatgctcttggtctgcagaggggagctccaccagtgatcagtgtgcttgaccggcaagatgccagcgtgctctacttctttatgcagcaacacctagtgggattccacctcacaagaagactgtgtactagcgtcattctctgcaactgcaactgcaataggactcgggaagaagataaggaacagcatattgtatatgctgggattacaacagcggccgaagcagccctggagctgtttgaggctcgaatggattcgatccaagatggaccaccggctcatgttgtggttccaccggttcatgttgtgacgcggtgcgcgccgtctccgttcgggacaaacgccgacgctatggagtgtggaagtacctgcacactactgcgcaatgcgcaccgtggaagctggcaatgcattaaggttcgtaatccatttcataatattgtttcgtacgatgatcgtgttgttcttgctgagaaatcgagatggatgaagctgacatgggccattcttggtggcgtgcagatgccggcgttcatgggatgcgagagcgtcgagatcgaggtcggcttctcgacagcgccggcggagaactacggcggcggcggcggcggcttgcaggcgagcgtggagcaggcgacatcagaggcgtggaacctgcgcgcgtcggtgatcgaggcgcatgacctgcgggtgccggcgccgtcgcctgggctgccgttcgatgtgcgtgtcaagataaagatcgggttccagtcggcgaggacgcagcggtcggtggcgagcacgagcagcggctcggcgttcgcctgggagtgggaggaggacctcatgttcgtcgtgtccgagccgctcgacgagagcctaatcgtgctcgtcaaggaccgcaccatgatcaaggagccagctcgtcggggggcacgtccgacatcggcattgctcccggcgaaggaggcggcgcacgtgtgcagcgagtaccggccgacggcgaagcagcagtggaagccgccggtgggcgtgctggagctcggcatcatcggggcgtgtgggctgctgtcgacgaagacgaagggcggcgccaaatactcgacggacgcctactgcgtggccaagtacggcaagaagtgggtgcggaagcgcaccgtcaccgacagtccgacagcctcaacccgcggtggaacgagcagtgcacgtggcaggtgtacgacccgtgcacggtgctcacggtggcgggtgttcgccgacgacggagatgagcggcaggactaccgcatccggaagatgcactacctccgcccgatcggcgtcgcgcagcaggagacgctccgggccgccaccgtgcgcctcgtcgccgcgaggctggagcgctccgagacgccgctggggcgggaggtggtgcgccacatgctagacgtcgacgctcacacgtggagcgtgcgccgcgccaaggggaattggttccgcatcttgggggtgctcacctgggccgtcgggcttgcccggtggcgcagctcgtccaccaccgtgctcgtacacgtcctctaccagtctacctcgtcctcgtctgcgctggcagcggccaagaaactcctcagcggcagggtctccatcgaggagctgtgcggtggcgatgacgaggagtga

SEQ ID NO: 69251 - DNA, 134 bp, Oryza sativa
  Clone ID: PAT_MRT4530_69938C.1
cagaatgaacaggtttttaaattcatctcccaacgggacgataatttacacgtacatttaacacattatttcacccttcttaaactccttctttattattcccgggtaagattaaaattaatttgaggtcagcc

SEQ ID NO: 69252 - DNA, 693 bp, Oryza sativa
  Clone ID: PAT_MRT4530_69939C.1
atgacggcggcggaccggagctcggcggcgacggcggagagagagagcgacgtcgcgagctcgaatccggcgaggaggaagggcggcgagaggcggaaatggacggaggaggggtacaaggcttgcactcactgtatggatgaaacagaaagtgcgtatcttaagcactatcggaaggttgtgtacatgggtcatcgtcaattccttgcagcaaaccacccagtacggaagaaaggcaagcactatgaacatacgatggaccaccgtacgaagccaaaacattgcagcggtaaaacagtgtttgcttatgtggcaggagaagtgaagaggcaactcaagcctcagagtcctgaaaagaagatacctattgacccgagcgtgaagaacttcttcaagggaatgtccacaacaaacaaggaggccttaaagatatcggactatgaccgaacacttcagaaagcctatcacaagaagtccaaaccagtccctcagcttggagaacaaccaaaccaagaggtcgagccgttggtgaccgacgaagattttggcataacggatttcatttcagacaccggtctaactgtggatcagctgattggagccgcaccaatcccgaaggcagaagtggcatacaactttgaactcggtaaactgcttgtcacgcctgaggagctgcagtccctaccgacatag

SEQ ID NO: 69253 - DNA, 969 bp, Oryza sativa
  unsure (1)..(969): unsure at all n locations
  Clone ID: PAT_MRT4530_6993C.1
atggagagcgcggtggcgagctacgcggagggcgtggggaaagccattgtggggaagattgggcagctggtgagtgacgagttccggctactcagcggcgtccgcggtgagatcgtgtacctcagggacgatgtggccatcatgaatgccctcctccgcatgctctccgaggcggacgagggtaccgtcgtccacttcgtccgggagtggatgaagcaggtgcgcgagctcgcctacgacgccgaggactgcatcgacctcttcttgctccgcatcagcttcgccccgccgcgcgccggtgcgctcggcctcgcctggcggcggctcgtcacgattggcccgcggcaacgcctcgccgtcgacatccagaaccttcacgcccgtgccctcgccatcagcgagcggcgcgtgcgttacgaagtcgacgggccaggcactgcgccccctccgtgtggttcgtccctgccgccaccgcgggngacgatgtcctccgccgcgcacacgctccgcctccaccccgcgaacgaataccctagcaagttcttgggcatcggcgaccaggtgcagcgtttgtccgatctggtgaaatcgaataggctgacgagtgacaacaatgagcccgacgttagtctcaaggtgttctccatcgtggggttcggtggtctcgggaagacgacgcttgccatggaggtttgccggaacctggaggaggagttcccatgccaggcaatggtgtcggtgtctcaggcgttcgactccagaaaggacctcagtggattgcttaagcgcatgctgcagcagatcgtgagggttcgaagggacctgcaactgcaagaagagaagccattggctaacatcgacgacggcgatgccgactggctagcgatgaagctcagagagcatctcgcagacaggaggtatggacgtactcttgcgctgttaatatgccctgctactctcgtgtggtaa

SEQ ID NO: 69254 - DNA, 1026 bp, Oryza sativa
  Clone ID: PAT_MRT4530_69940C.1
atggctgatcgcgatgaggaacagatactatacgatacaatcgcagagggaagcagccagtactggaacgaagaaaaggggaacgaggatccaaaccagtacttgaacgaggaggggaacgtggagagggatgcggaggggaacgaggaggggaacgatgaggaggaggctagtggaagtcatccctccgctggacagaagagggcacgcggacaacgaagtgccgcgaagaagatagagggtcggcacatcataactgaggtggacgaagacggccgacctagtgccctggcagaagcagccaagaattttagcttcaagggagatctctacaagaaatacatcctgaagggacaaacaccgaacttcgacacattcccaaagctaagggatcattgggacgagttcgttgcttacaagacagggcaacaaggggaagcgatgatggccagaaacaaagaaaatgccgccaagaagaagtaccatcaccacttggggttaggcggatatagcgtcgcaatgccgaagtgggaggagatggaggcaagtttgattgagaggggtatcgaaccggccaccgctaaatggccggatcgatcgaagttctggtactatgctcacggtggaacgcttaacccagttgatggctcccttgtcttcaacgatcagatacgcgaggctgccagtcgactaacggacgcagtggtagtctcttctcagggcacattccgacccgatagagagaaggatgagctgtcactcgccctacaaactcccgagcatccaggacgaacacgagggaaaggcgtgattccctggaagattggatttaaggaggacatccacacaaatggagattcaaaggacccgatgacgagggtctacgatactgggttcatcgaccctcggaaaatcaacaccgaaatgatcgacaagtacgagaaagacacagaggacaatctcgtccatctcctaacgcagcagcatttcaggacgtacatactactgccgtacaacacagagtga

SEQ ID NO: 69255 - DNA, 3933 bp, Oryza sativa
  Clone ID: PAT_MRT4530_69941C.1
atggatcggcaatggatgtatgctgaccgtcggtccaaagagtttattgatggtgtgcattattttttgagagtggctgaagctaacaggcaaaagggttttatttgttgtccatgcaataagtgtaagaatcggaaggagtattctgcatccaggactattcatttccacttgtttgagtcggggttcatgccaagctataattgttggacatcccacggagagcaaggtgttgaaatggaagaagatgaagtggaagacgacaatattccggactttgctcagtacgctggatttgaaggaaataaaacgggtgaggaggaaagggatgctgatggttgcgagcaggggcacaaaaagttggataccactctggagttcttgcaatggaaggcaaaaaatggtgttagtgacaaggcatttggcgatttattgaaactcgtcaagaacattcttccggaggtaaacaaattgcccgagacaacgtacgaggctaagaagatagtctgccctctaggactggaagttcagaagattcacgcatgtccgaatgattgtatcctgtatcgcggtgaggagtacgagaacctagaagcatgccccatttgcaaagcactacgatacaagattagacgagatgatccaggagaagttgacgggcagctaacgaagaaaagaattcctgttaagaggaagtacataatgatgccgattataattcaaggccccaagcaacctggtaacgacatcgatgtgtacctaagaccactggtcgaagatcttaaactgttgtggaagaaggaaggtgtccccgtgtgggatgaggacaaacagaaggagtttaacctacgagcgctgctgttcgtaaccatcaacgattggtctcaccaactgggactaaagatccgggggtatatattcccgatggctgatcgcgatgaggaacagatactatacgatacaatcgcagagagaagcagccagtactggaacgaagaagaggggaacgaggatccaaaccagtacttgaacgaggaggggaacgtggagagggatgcggaggggagcgaggaggggaacgatgaggaggaggctagtggaagtcatccctccgctggacagaagagggcactcggacaacgaggtgccgcgaagaagatagagggtcggcacatcataactgaggtggacgaagacggccgacctagtgcctcggcagaagcagccaagaattttgtacgccacagcggttgggttgtgagggacaacgtgcctgtcagcacggtgtactggcacagaacaagggcacgcagggataatgacagctttgtcccggactcagagaaagagatgctgtggaccacaatgcttgagacgttcacgctacccgcgggtacggagaacatagtgaaacagtggactctgaagaaaatggcggaacagttccagagcttcaagggagatctctacaagaaatacatcctgaagggactaacaccgaacttcgacgtattcccaaagctaagggatcattgggatgagtttgttgcttacaagacagggcgacaagggcaagcgatgatggccagaaacaaagaaaatgccgccaagaagaagtaccatcaccacttggggtcaggcggatatagcgtcgcaatgccgaagtgggaggagatggaggcaagtttgattgagaggggtatcgaaccggccaccactaaatggccggatcgatcgaagttctggtactatgctcacggtggaacgcttaatctagttgatggctcccttgtctttagcgatcagatacacgaggccgccagtcgactaacggacgcagtggtagcctcttgtcagggcacattccgaccagacagagagaaggatgagctgttactcgccctacagactcccgagcatccaggacgaacacgagggaaatgtgtgattccctggaagattggatttaaggaggacatccacacgtacaggagtcggatgaggagcaagagagataccgaggcgaagattgcagatcttgagtacagggtatcgagctacgagctcagcatgcaagaggaggtggcaaggaaggtggatgaacgtatggccgcacatcggtcccaggatccccagccgtacattcatcctgcaatggtcagcccatcaggcaatcgtagcagctgcgtctcaacggggcaggtcggatcacagagcatggacgccatgcaaacccaggacgaaaccacctgccccgttgatgagatcacgcagcggacaccatgtgagctgcatattcccttcaagaacttatcaatcaaggtggcgtcaggaatggccatcccaacggacccttccgggacttaccactacaggccgattctagcaggatactcgagtgtcgaagttgagttggtggaagccgcgtacgaggacctcgagttggactacccaggaggagacggtgagacgcatctacgagacacaagccacgccatcatactatggcgcaagcagtacatcatccttcctgggcgacaagcggcgtctcgtgcaccatctcctccggctcctccgccacctcctgctgcaccatctcctccggctcctctagctcctccgcctccaccgtgttcgcctgcacctcccaagacaaggtctcgccaagctccactgcttgcccgcacaagggcaacaaagaaggcgaaagttgacgccaccaaagacaaggagccaccgtacgattgcagtcaagaggagcttgatgcttatgtggcaggagaggtgaagaggcaactcaagccttggagtcctgaaaagaagatacctattgacccgagcgtgaagaacttcttcaagggaatgtccacaacaaacaaggaggcgttacagatatcggactatgaccgaacacttcagagagcctatcacaagaagtccaaaccagtccctcagcttggagaacaaccaaaccaagaggtcgagccgttggtgaccggcgaagattttggcataacggaattcatttcagacaccggtctaactgtggatcagttggttggaggagcaccaatcccgaaggcggaagtggcatacaagtttgaactcggtaaaccgcttgtcaaacctaaacagctgcagtccctaccgacacagatgtacaaattccatgaatggtacatggaaatgagtgccaagggtagagagatgttcggagcgaggatcagaaaccccgacttcttgcaaggagaagatgttctctggatccatttcaaggatctcttcgatctgtaccagttggacgccctcgacgtctctcttctgagcgcatggattttaatggagattcaaagggcccgacggcggagggtctacgatactgggttcatcgaccctcggaaaatcaacaccgaaatgatcgacaagtacgagaaagacacagaggacaatctcgtccatctcctaacgcagcaacatttcaagacgtacatactactgccgtacaacacagaagtcactgtgtacgactcaatgaataaagaggagaagatttttgataaggtcttcaaactgatagacagggcttgggatcggttccgtcaattggtccgcgggacttggaaagaaaaacttggacggaggtttgattttccatgtgcaaagcaggaccagggaactaacttatgcggctactacgtatgcgagtatgcccactgcctatcaaaccaaatatgcacaacacgagagctcgatcgtattcacatgagggataatctcccacacaaggattttatcacggctgttcaagaacaactgatgggattcatcaacgaagaagtccttaatctcgacggtgaattctactacgacggatcgacaattcataacgtcggtccttcctcttctgacataacaccggcgtcaaagtcgtag

SEQ ID NO: 69256 - DNA, 146 bp, Oryza sativa
  Clone ID: PAT_MRT4530_69942C.1
attactactattgataagtttttttattttttcaagggaacaccaataatctttctaaagctcggaataagaagggcaaaaaactagaaaaggactaatggtcaccacacatgggttgaaacggaaattagaagtaacaagttcta

SEQ ID NO: 69257 - DNA, 3369 bp, Oryza sativa
  Clone ID: PAT_MRT4530_69943C.1
atggatctgctaccagttgtaataaggggtatcctcccagacaatgtccgggcaacaataacaaagctatgtgctttcatgaaggcaatttcgcagaaggtcatcaatccggatatattagaagccctgcagaatgatgtggtgcaatgtcttgtcagctttgagttgatatttccaccttcatttttcaatataatgacgcatctgctttgtcaccttgtcaaagagatcggtattctcggtcctgtgtacctacacaacatgtttcctttcgataggtacatgggcgttctgaagaagtatgttcgtaaccgtgctcgtccagaggcaagcatcgccaaggggtatggaacagaggaggtcattgaattctgcgtagaatttatcgacgaccttcgcccaatcagggtacctgagtcacgccatgaagggagactacggggaaaggggactctcggaaggaaagcaataatgacggtagacaacaatttattatgtaaagcccgtttcacggttctgcaacaatcttcattggtggctccctacatcgaggagcacttggctctagttcgcgccagaaacatcgacatgaagagcacgaaccagaacagtgttgttcgtatcgatgccatgggacacgatggtacaactggcacgtattacggtaccatcgaggacatatgggaacttgacgatggacctctcaaggtccctctgttccggtgccaatgggttaggttgactggtggaggcgtaacgattgatgacagtgggatgacaacggttgaccttaacaaggttaaggaaggaaaaaagggcaaagggcctgacgagccgaagcgccacgtggttctcccaggaaaaagaaaaatcgtcggagtagaggacaagactgacgaggattacgatcagtttgatgggcaacagcctttcatagtgacgattgaccctagcatcctcctatcaaatgaagacaccccttactcacgtagcgatcacaaggaaggaacaatagtgaggagaaaatggctgatcgcgatactatacgatacaatcgcagagggaagcagccagtactgtaacgaagaagaggggaatgaggatccaaaccagtacttgaacgaggaggggaacgtggagagggatgcggaggggaacgaggaggggaacgaggaggaggaggctagtggaagtcatctctccgctggacagaagagggcacgcggacaacgaggtgccgcgaagaagatagagggtcggcacatcataactgaggtggacgaagacagccgacctagtgccccggcagaagcagccaagaattttgtacgccacagcggttgggttgtgagggacaacgtgcctgtcagcacggtgtactggtgcagaacaagggcacgcggggataatgacagctttgtcccagactcagagaaagagatgctgtggaccacaatgctcgagacgttcacgctacccgcggaacagttccagagcttcaagggagatctctataagaaatacatcctgaagggactaacaccgaactttgacgtattcccaaagctaagggatcattgggacgagttcgttgcttataagacagggcaacaagggcaagcgatgatggccagaaaaaaagaaaatgccgccaagaagaagtaccatcaccacttagggagtcggatgaggagcaagagagataccgaggcgaagattgcagatcttgagtacagggtatcgagctacgagctcagcatgcaagaggaggtggcaaggaaggtggatgaacgtatggacacacatcggtcccaggatccccagccgtacattcctcctgcaatggtggcgtcgggaatggccatcccaacggaccctttcaggacttaccactgcaggccgattccagcaggatactcgagggtcgaagttgagctggtggaagccgcgtacgaggacctcgagttggactacccaggaggagacggtgagacgcatctacgagacacaacccacgccattatactatggcgcaagcggtacatcatcctccctgggcgacaagcggcgtctcgtgcaccatctcctccggctccgccatctcctcctgcaccatctcctccggttcctccgccacgtcctcctgcaccatctcctccggcttctcagccacctcctcctgcaccatctcctccggctcctccacctcctccgcctcctccacctccaccgtgtccgcctgcacctcccaagacaaggtctcgccaagctctaccgcctgcccgcacaagggcaacgaagaaggcgaaagttgatgtcactaaaaacaaggagccaccgtacgattgcagtcaagaggagcttgatgcttatgtggcaggagaagtgaagaggcaactcaagcctcggagtcctgaaaagaagatacctattgacccgagcgtgaagaacttctgcaagggaatgtccgcaacaaacaaggaggcgttacagatatcggactatgaccgaacacttcagagagcctatcacaagaagtccaaaccagtccctcagcttggagaacaaccaaaccaagaggtcgagccgttggtgaccggcgaagattttggcataacggaattcatttcagacaccggtctaactgtggatcagctgattcgaggcgcaccaatcccgaaggcggaagtggcatacaagtttgaactcggtaaaccgcttgtcaaacctgaacagctgcagtccctaccgacacagatgtacaaattccatgaacggtacatggaaatgagcgccaagggtagagagatgttcggagcgaggatcagaaaccttgacttcttgcaaggagaagatattctctggatccatttcaaggatctcttcgatctgtaccagctggacgccctcgacgtctctcttctgagcgcatggattttaatggagattcaaagggcccgacggcggagggtctacgatactgggttcatcgaccctcggaaaatcaacaccgaaatgatcgacaagtatgagaaagacacagaggacaatcttgtccatctcctaatgcagcagcatttcaagacgtacatactaccgccgtacaacacagaagtcactgtgtacgactcaatgaataaagaggagaagatttttgacaaggtcttcaaactgatagacagggcttgggatcagttccgccaattggtccgcgggacttggaaagaaaaacttggacggaggtttcattttccatgtgcaaagcaggaccagggaactaacttatgcggctactacgtatgcgagtttgcccactgcctatcaaaccaaatatgcacaacacgagagctcgatgacttctctaattaa

SEQ ID NO: 69258 - DNA, 5823 bp, Oryza sativa
  Clone ID: PAT_MRT4530_69944C.1
atggaggaggatgacgacaccgtggcggttgatggcggcggccggcatcgcttgaggcaaaggcactgcttcaggccttgctgccgcaacatctgcttcagatcgatgctgaagagacgtctggcccatggcgaacgaggtggacgtcatggggacgtttatgacagtgaggcggtgacaacaggaacggcgacctccatctttggctccgtcgccggatacggctcctaccgaggtcgcagcgatttgatggatcggcaatggatgtacgctgactggcggtacaaagagtttattgacggcgtgcattattttttgagagtggccgaagctaacaggcataagggttttatttgttgtccatgcaataagtgtaagaatcagaaggagtattctgcatccagaactattcatttccacttgtttgagtcggggttcatgccaagctataattgttggacatcccacggagagcaaggtgttgaaatggaagaagatgaagtggaagacgacaatatttcagactttactcagtacgctggatttgaaggaaatcaaacgggcgagaggaaagggatgctgatggacgccaaggaggactgcggaagtgaaaagggggcccataaattggacaagatgttagaggaccacagaacgtcgttgtacccatgttgcgagcaagggcacaaaaagttggataccactctggagttcttgcaatggaaggcaaaaaatggtattagtgacaaggcatttggcgatttattgaaactcgtcaagaacattcttccggagggaaacaaattgcccgagacaacgtacgaggctaagaagatagtgtgccctttaagactggaagttcagaagattcacgcatgtccgaatgattgtatcctatatcgtgatgaggagtacgagaacgtagaagcatgccctgtttgtaaagcactacgatacaggattagacgagatgatccaggagaagttgacgggcagctaacgaagaagagaattcctgctaagctaaggcgtttgttcaggaataaggggaatgctagaatgatgcgttggcacgctgaagagcgtcaacaggatgggatgctgagacaccctaccgacggttcgcagtggcgaaacatcgacagaaaatttaaagactttggaaaggacgcacgaaacatacgatttggtttaagtacggatggcttgaatccttttggagagatgagcagcggccccaagcaacctggtaacgacatcgatgtgtacctaagaccactggtcgaagatcttaaactgttgtggaaaaaggaaggtgtccccgtgtgggatgaggacaaacaggaggagtttaacctacgagcgctgttgttcgtaaccatcaacgattggcctgcacttagcaacctttccgggcagtccaacaaggggtacaaggcttgcactcactgtatggatgaaacagaaagtacgtatcttaagcactgtaggaaggttgtgtacatgggtcatcgtcgattccttgctgcaaaccacccggtatggaagaaaggcaagcactttgaacatacggcggaccaccgtacgaagcctaaacatcgcagcgggaaaacagtgtttgctatggttaaagatcttaaagtagtgtttggaaaggggcctggaagccagcctatagagagcgaagatggtcacgcggcgatgtggaaaaagaactctatattttgggagttaccctattgggaattcttggacgtccgccatgcaatcgacgtgatgcacctcactaagaacctttgcgtaaaccttcttggcttcttaggtgtatatggaaagtcgaaagatacactggaagcacatatcggtattctcgaccttgtgtacctacacaacatgtttcctttcgagaggtacatgggcgttctgaagaaatatgttcgtaaccgtgctcgtccagaggcaagcatcgctatggggtatggaacagagaaggtcattcaattctgcgtagaatttattgaagtccttcgcccaatcggggtacctgaatcacgccataaagggagactacggggaaaggggactctcggaaggaaagcaataatgacggtagacaacaatttattccgtaaagcctatttcacggttctgcaacaatcttcattggtggctccttacatcgaggagcacttggctctagttcgtgccagaaacatcggtaagtccgatgcatggattacacggcatcacattgatactttctccgcgtggctgcgacatctcatgggtaacgagacgattaaccaacaactggccttcctggcgaggggaccatctggctcgatcgcgacattccagggatatgaaatcaatgggtacacattctacacgagagcccaagacatgaagagcacgaaccagaacaatgatgttcgtatcgatgccatgggacatgatggtacaactagcacgtttacggtgccatcgaggacatatgggaacttgactatggacctctcaagtgggatgacaatggttgattttaacaaggttggatactcggacgaaccttttgtccttgccaatgatgtaacgcaagtttttaacgtcaaggacatgtctagcaaagcaaaaaagggcaaagggcctgacgagccaaagcgccacgtggttctcccaggaaaaagaaaaatcgtcggagtagaggacaagactgacgaggattacgatcagtttgatggacaacccccttttacggtgacgattgaccctagcatcctcctatcaaatgaagacaccccttactcacgtagcgatcacaaggaaggaacaatagtgaggagaaaagaagacgtcgtcgtcgtccctcaagtcgaagtgatggctgatcgcgatgaggaacagatactatacgatacaatcgcagagggaagcagccagtactggaacgaagaagaggggaacgaggatccaaaccagtacttgaacgagaaggggaacgtggagagggatgtggaggggaacgaggaggaggaggctagtggaagtcatccctccgctggacagaagagggcacgcggacaacgaggtgacgcgaagaagatagagggtcggcacatcataactgaggtggacgaagacggccgacctagtgccccggcagaagcagccaagaattttgtacgccacagcggttgggttgtgagggataacgtgcctgtcagcacggtgtactggcggagaacaagggcacgcagggataatgacagctttgtcccagaatcagagaaagagatgatgtggaccacaatgctcgagacgttcacgctccctgcgggtatggagaacatagtgaaacagtggactcttaagaaaatggcagaacagttccagagcttcaagggagatttctacaagaaatacatcctgaagggactaacaccgaacttcgacgtattcccaaagctaagggatcattgggacgagttcgttgcttacaagacagggcaacaagggcaagcgatgatggtcagaaacaaagaaaataccgccaagaagaagtaccatcaccacttggggtcaagcggctatagcgttgcaatgccgaagtgggaggagatggaggcaagattgattgagaggggtatcgaaccggccaccgctaaatggccggatcgatcgaagttctggtactatgctcacggcggaacgcttaacccagttgatggctcccttgtcttcagcgatcagatacgcgaggctgccagtcgactaacggacgcagtggaagcctcttctcagggcacattccgactcgacagagagaaggacgagctgagtcggatgtggagcaagagagataccgagacgaagattgcagatcttgagtttagggtatcgagctacgagctcagcatgcaagaggaggtagcaaggaaggtggatgaacgcatggcagcacatcggtcccaggatccccagcggtacattcctcctacaatggtcagcccatcaggcaatcgtagcagctgcgcctcaacggggcaggtaggatcacagagcatggacgccatgcaaacccaggacgaaaccacctgccccgttgatgagatcacgcaacggacacaatgtgagcttcatattcccttcaagaacttatcaatcaaggtggcgtcgggaatggtcatcccaacggacattttagggacttaccactgcaggccgattccagcaggatactcgagggtcgaagttgagctggtggaagcagcgtacgaggacctcgagttggactacccaggaggagacggtgagatgcatctacgagacacaagccacgccattatactatggtgcaagcagtacatcatcctccctaggcgacaagaggcgtctcgtgcaccatctcctccggctccgccatctcctcctacaccatctcctccggttcctccaccacgtcctcctgcaccatctcctccgccacctcctcctgcaccatgtcctccggcttctccggctcctctacctccaccatgtccacctgcacctcccaagacaaggtcttgccaagctccaccgcctgcccgcacaagggcaacgaagaaggcgaaagttgacgccaccaaaaacaaggagccgccgtacgattgcagtcaagaggagcttgatacttatgtggcaggagaagtgaagaggaaattcaagcctcggagtcctgaaaagaagatacctattgacccgagcgtgaagaacttcttcaagggaatgtccacaacaaacaaggaggccttaaagatatcggactatgaccgaacacttcaaaaagcctatcacaagaagtccaaaccagtccctcagcttggagaacaaccaaaccaagaggtcgagccgttgatgaccagcgaagattttggcataacggatttcatttcagacaccggtctaactgtggatcagctgattggaggcgcaccaatccctaaggcggaagtggcatacaaatttgaactcggtaaaccgcttgtcacgcctgagcagctgcagtccctaccgacacagatgtacaaattccatgaacggtacatggaaatgagcgccaagggtagagagatgttcggagcgaggatcagaaaccccgacttcttgcaaagagaagatgttctctggatccatttcaaggatgtcttcgatctgtaccatctggacgccctcgacgtctctcttctgagcgcatggattttaatggagattcaaagggtccgacggcggggggtttacgatactgggttcatcgaccctcggaaaatcaacaccgaaatgatcgacaagtacgagaaagacacagaggacaatctcgtccatctcctaacgcagcagcaattcaagacgtacatactactgccgtacaacacagaattccactgggtcatgttattcttcgacttggacgcatgcaaagttactgtgtacgactcaatgaataaagagaagaagatttttgacaaggtcttccaactgatagacagggcttgggatcggttccgtcaattggtccgcgggacttggaaagaaaaacttggatggaggtttcattttccatgtgcaaagcaggaccagggaactgacttatgcggctactacgtatgcgagtatgcccactgcctatcaaaccaaatatacaccacacgagagctcgatcatatttacatgagggataatctcccacacaaggattttatcacggttgttcaagaacaactgatgggattcatcaacgaagaagtccttaatcccgatggtgaattctactacgacggatag

SEQ ID NO: 69259 - DNA, 4674 bp, Oryza sativa
  Clone ID: PAT_MRT4530_69945C.1
atggatgggcaatgaatgtacgctgaccggcggtctaaagagtttattgtcggcatgcattattttttgagagtggccgaagctaacaagcataagggttttatttgttatccatgcaataagtgtaagaaccagaaggagtattctgcattcaggactattcatttccacttgtttaagtcggagttaatgccaagcgataattgttggacatctcacggagagcaaggggttgaaatgaaagaaaatgaagtggaagacgacaataatccggactttgcttagtacgctggatttgaaggaaatcaaacgggcgaggaggacagggatgctaatgataacgatgttgcggatgatcttggtcagatgttgcaggacgccaaggaggactgcgaaagtgaaaaggggccccataaattagacaagatgttaaaggaccacataacgtcgttgtacctaggttgcgagcaggggcacaaaaagttggataccactgtggagttcttgcaatgaaagaaaaaaaatggtgttagtgacaaggcatttggcgatttattgaaactcgtcaagaacattcttccggagggaaacaaattgcctgagacaacgtacgaggctaagaagatagtctgccctctaggactagaagttcagaagattcacgcatgtccgaatgattgtatcctatatcgcggtgaggagtacgagaacctagaagcatgccctgtttgccaagcactacgatataagattagacaagatgatctaggagaagttgacgggcagctaacgaagaagagaattcctgctaaggacgggatactgagacaccccgccgatggttcgcagtggcgaaacatcgacagaaaatttaaagattttggaaaggacgcacgaaacatacggtttggtttaagtacggatagcatgaatccttttggagagatgagcagcggccatagcacttggcctgttacaatctgtatctacaacctccccccgtggttatgcatgaagaggaagtacataatgatgccgattataattcaaagccccaagcaacctggtaacgacatcgatgtgtacctaagaccactggtcgaagatcttaaactgttgtggaagaaggaaggtgtccccgtgtgggacgaggacaaacaggaggagtttaacctacgagcgctgctgttcgtaaccatcaacgattggcctgcacttagcaacctatccgggcagtccaacaagaggtacaacgcttgcactcactgtatggatgaaacagaaataaggcttgtgtacatgggtcatcatcgattccttgcagcaaaccacccggtacggaagaaaggcaagcactttgaacataaggcggaccaccgtacgaagcctaaacatcgcagcgggaaaacagtgtttgctatggttaaagatcttaaagtagtgtttggaaaggggcctggaagcccgcctatagagagcgaagatggtgtatatggaaagtcgaaagatacactggaagcacgtaatgatctgaagcatatggaacaacgcggtgaccttcacccggaaccaaaggagaaaggaagccattacttgagtccagccagctacactcttagcaaggcagagaaggaaagtatgtttgaatgcttggagagtataaagatggctgatcgcgatgaggaacagatactatacaatacaatcgcagagggaagcagccaatactggaacgaaaaagaggggaacgaggatccaaaccagtacttgaacgaggaggggaacgtggagagggatgcagaggggaacgatgaggaggaggctagtggatgtcatccctccgctggacagaagagggcacgcggacaacgaggtgccgcgaagaacatagagggtcggcacatcataactgaggtggacgaagacggccgacctagtgccccggcagaagcagtcaagaattttgtacgccacagcggttgggttgtgagggacaacgtgcctgtcagtacggtgtactggcacagaacaagggcacgcagggataatgacagctttgtcccggactcagagaaagagatgctgtggaccacaatgctcgagacgttcacgctacctacggaacagttccagagcttcaagggagatctctacaagaaatacatcctgaagggactaacaccgaacttcgacgtattcccaaagctaagggatcattgggacgagttcgttgcttataagacagggcaacaagggcaagcaatgatggccaaaaacaaagaaaatgccgccaagaagaagtaccatcaccacttggggtcaggcggatatagcgtcgcaataccgaagtgggaggagatggaggcaagtttgattgagaggggtatcgaaccggccaccgctaaatggccggatcgatcgaagttttggtactatactcacggtggaacgcttaacccagttgatggctcccttgtcttcagcgatcagatacacaaggctgtcagtcgactaacggatgcagtggtagcctcttctcagggcacattccgactcgacagagagaaggatgagctgtcactcgccctacagactcccgagcatccaggacgaacacgagggaaaggcgtgattccctggaagattggatttaaggaggacatccacacgtacaggagtcaaatgaggagcaagggggataccgaggcgaagattgcagatcttgagtacagggtatcaagctacgagctcagcatgcaagaggaggtggcaaggaaggtggatgaacgtatggctgcacatcggtcccaggatccccagccgtacattcatcctggaatggtcagcccatcaggcaatcgtagcagttgcgcctcaatggggcaggtcggatcacagagcatggacatcatgcaaacccaggacgaaaccacctgccccgttgatgagatcacgcagcggacaccatgtgagctgcatattcccttcaagaacttatcaatcaaggtggcgtcgggaatggccatcccaacggacccttccgggacttaccacttcaggccgattccagcaggatactcgagggtcgaagttgagctggtggaagccgtgtacgaggacctcgagttggactacccaggaggagatggtgagacacatctacgagacacaagccacgccattatactatggcgcaagcggtacatcatcctccctaggcgacaagtggcatctcgtgcaccatctcctccggctccgccatctcctccggttcctctgccacgtcctcctgcaccatctcctccggctcctccgccacctcctcctgcaccatctcctccggctcctctggctcctccgctcctccacctccaccgtgtctacctgcacctcccaagacaaggtctcgccaagctccaccgcctgcccgcacaagggcaacgaagaagtcaagaggagcttgatgcttatgtggcaggagaagtgaagaggcaactcaagcctcggagtcctgaaaagaagatacctattgacccgaacgtgaagaacttcttcaagggaatgtccacaacaaacaaggaggcgttacagatatcggactatgatcgaacacttcagagagcctatcacaagaagtccaaaccaatccctcggcttggagaacaaccaaaccaagaggtcgagccgttggtgaacggcgaagattttggcataatggaattcatttcagacaccagtctaactgtggatcagctgattcgaggcgcaccaatcctgaaggcggaagtgccatacaagtttgaactcggtaaaccgcttgtcaaacctgaacagctgcagtccctaccgacacagatgtacaaattccatgaatggtacatggaaatgagcgccaagggtagagagatgttcgaagcgaggatcagaaaccccgacttcttgcaaggagaagatgttctctggatccatttcaaggatctcttcgatctgtaccagctggacgcccaagatgtctctcttttgagcgcatggattttaatggagattcaaagggcccgacggcggagggtctacgatactgggttcatcgaccctcagaaaatcaacaccgaaatgatcgacaagtacgagaaagacacagaggacaatctcgtccatctcctagcgcagcagcatttcaagacgtacatactactgccgtacaacacagaagtcactgtgtacgactcaatgaataaagaggagaagatttttgacaagctcttcaaactgatagacagggcttgggatcggttccgtcaattggtccgcgggacttggaaagaaaaacttggacggaggtttcattttccatgtacaaagcaggaccagggaactaacttatgcggctactacgtatgcgagtatgcccactgcctatcaaaccaaatatgcacaacacgagagctcgatgaggaatggcaccccgccctgcactggatagcctgcaatggtgacaatctgtgctttcccggtgacccggcgacgtcgcagccggccttgacgctgtgctcaacagacacccacccaaaaacgttctttgcccatcccttgatgagcagaaagcaggagttgagggacaacaggcccgtcaactacacgcgatggagaagctccgccgatggtggtgactga

SEQ ID NO: 69260 - DNA, 5277 bp, Oryza sativa
  Clone ID: PAT_MRT4530_69946C.1
atggaagaagatggagtggaagacgacaatattccggactttgctcagtacgctggatttgaaggaaatcaaacgggtgaggaggacagggatactgatgataacgacgttgcggatgatcttggtcaaatgttgcaggacgccaaggaggactgcgaaagtgaaaagggagcccataaattggacaagatgttagaggaccatagaacattgttgtacccaggttgcgagcaggggcacaaaaagttggataccactctggagttcttgcaatggaaggcaaaaaatggtgttagtgacaaggcatttggcgatttattgaaactcgtcaagaacattcttctggagggaaacaaattgcccgagacaacgtatgaggctaagaagatagtctgccctctagaattggaagttcagaagattcacgcatgtccgaatgattgtatcctatatcgcggtgaggagtacgagaagctagaagcatgccctgtttgtaaagtactacgatacaagattagacgagatgatctagctgaagttgacgggcagctaacgaagaagagaattctcgctaaggtgatgtggtatttccctataataccatggctaaggcgtttgttcaggaacaagggggatgctagaatgatgcgttggcacactgaagaacgtcaacaggacgggatgctgagacaccccgccgatggttcgcagtggcgaaacatcgatagaaaatttaaagactttggaaaggacgcacaaaacatacggtttggtttaagtacagatggcatgaatccttttggagagatgagcatcggccatagcacttggcccgttacgatgtgtatctacaacctccccccttggctatgcatgaagaagaagtacataacgatgctgattattattcaaggccccaagcaacctggtaacgacatcgatgtgtatctaagaccactggtcgaagatcttaaactgttgtggaaaaaggaagaaagtgcgtatcttaagcactgtaggaaggttgtgtacatgggtcatcgtcgattccttgctgcaaaccacccagtatggaagaaaggcaagcactttgaacataaggcggaccaccgtacgaaggctaaacgtcgcagcgggaaaacagtgtttgctatggtgaaagatcttaaagtagtgtttggaaaggggcctggcagccagcctatagagagcgaagatggtgtatatggaaagtcgaaagatacactggaagcacgtaacgatctgaagcatatggaacaacgcggcgaccttcacccggaaccaaaaaagaaaggaagccattacttgagtccagccagctatactcttagcaaggcagagaaggaaagtatgtttgaatgcttggagagcatcaaggtattgtccggatactccatgaatataaagcgaataataagcacgaaggagaagaagttcacaaacctaaagtctcatgactgtcacgtgttgatgacacaactgctaccagttataataaggggtatcctcccagacaatgtccgagcaacaataacaaagctatgtgctttcatgaacgcaatttcgcagaaggtcatcgattcggatagattagaagcccttcagaatgatgtggtgcaatgtcttgtcagctttgagttgatatttccactttcatttttcaatataatgacgcatctgctttgtcaccttgtcaaaggaatcgatattctcggacctgtgtacctacacaacatgtttcctttcgagaggtacatgggcgtcctgaagaagtatgttcgtaaccgtgctcgtccagaggcaagcatcaccaaggggtatggaacagaggaggtcattgaattttgcgtagaatttattgaagaccttcacccaatcggggtacctgaaccacgccatgaagggagactacggggaaaggggactctcggaaggaaagcaataatgacggtagacaacaatttattccgtaaagcccactttacggttctgcaacaatcttcattggtggctccttacatcgaggagcacttggctctagttcgcgctagaaacatcggtaagtccgatgcatggattacacggcatcacattgatactttccccgcgtggctgcgacaacatctcatgggtaacgagacgattaaccaacaactggctttcctaggatatgaaatcaatgggtacacattctacacgagagcccaagacatgaagagcacgaaccagaatagtgttgttcgtatcgatgccatgggacacgatggtacaactggcacatattacggtgccatcgaggacatatgggaacttgactatggacctctcaaggtccctctgttccggtgccaatgggttaggttgactggtggaggcgtaacgattggtgacagtgggatgacaacggttgaccttaacaaggttggatactcggacgaagcttttgtccttgccaatgatgtaacgcatgttttttacgtgacggatatgtctagcaaaggaaagaagggcaaagggcatgacgagccgaagcgccacgtggttctcccaggcaaaagaaaaatcgtcggagtagaggacaagaccgacgaggattacgatcagtttgatgggcaaccccctttcacggtgacgattgaacctagcatcctcctatcaaatgaagacaccccttactcacgtagcgatcacaaggaaggaacaatagtgaggagaaaaaaagacatcgtcgtagtcgtccctcaagccgaagtgatactgtactatacaatcgcagagggaagcagccagtactggaacgaagaagaggggaacgaggatccaaaccagtacttgaacgatccggggaacgtggagagggatgcggaggggaacgaggaggggaacgtggagagggatgcggaggggaacgacgaggggatcgaagaggaggctagtggaaatcatctctccgctgcacagaagagggcacgcggacaacgaggtgccgcgaaggagatagaggatcggcacatcataagtgaggtggacgaagacggccgacctagtgccccggcagaagcagacaagaattttatacgccacagcgattgggttgtgagggataacgtgcctgtcagcaaggtgtactggcgcagaacaagggcacgcggggataatgacagctttgtcccagaatcagagaaagagatgctgtggaccacaatgctcgagacgttcacgctccctgcgggtacggagaacatagtgaaacagtggactcttaagaaaatggcagaacagttccagagcttcaagggagatctctacaagaaatacatcctgaagggactaacaccgaacttcaacgtattcccaaagctaagggatcattgggacgagtttgttgcttacaagacagggcaacaagggcaagcgatgatggtcaaaaacaaggaaaacgccgccaagaagaagtaccatcaccacttggggtcaggcggctatagcgtcgcaatgccgaagtgggaggagatggaggcaagattgattgagaggggtatcgaaccggccaccgctaaatggccggatatatcgaagttctggtattatgctcacggtagaacgcttaacccagttgatggctccctggtcttcagcgatcagatacgcgaggctgccagacgactaacggacgcagtggaagcctcttctcagggcacgttccgacccgacagagagaaggatgagctgtcactcgccctacagattcccgagcatccaggacgaacacgagggaaaggcatgattccctggaagattggattcaaggaggacatccacacgtacaggagtcggatgaggagcaaaagagataccgaggcgaagattacagatcttgagtacagggtatcgagctacgagctcagtatgcaagaggaggtggcaaggaaggtggatgaacgcatggcagcacatcggtcccaggatccccagccgtacatacctcctgcaatggtcagcccatcaggcaatcgtagcagctacacctcaacggggcaggtaggatcacagagcatggacgccatgcaaacccaggatgaaaccacctgccccgttgatgagatcacgcagcggacaccatgtgagctgcatattcccttcaagaacttatcaatcaaggtggcgtccgaaatggccatcccaacggacatttcagggacttaccactgcaggccgattccagcaggatactcgagggtcaaagttgagctggtggaagctgcgtacgaggacctcgagttggactacctaggaggatctatgagacacaagccatgccattatactatggcgcaagcgacaaggtctcgccaagctccacctcctgcccgcacaagggcaacgaagaaggcgaaagttgacgccaccaaaaacaaggagccgttgtacgattgcagtcaagaggagcttgacgctaatgtggcaggagaagtgaagaggcaactcaagcctcggagtcctgaaaagaagatacctattgacccgagcgtgaagaagttcttcaagggaatgtccaccacaaacaaggaggccttaaagctatcggactatgaccgaacacttaggaaagcctattataagaagtccaaaccagtccctcagcttggagaacaaccaaaccaagaggtcaagccgttggtgaccggcgaagaatttggcataacggatttcatttcggacaccggtctaactgtggatcagttgattggagacgcaccaatcccgaaggcggaagtggcatacaagtttgaactcggtaaaccgcttgtcacgcctgagcagctgcagtccctaccgacacagatgtacaaattccatgaacggtacatggaaatgagcgccaacggtagagagatgttcggagcgagaatcagaaaccccaacttcttgcaaggagaatatgttctctggatccatttcaaggatgtcttcgatctgtaccatctggacgccctcgacgtctctcttctgagctcatggattttagtcactgtgtacgactcaatgaataaagaggagaagatttttgacaaggtcttccagctgatagacagggcttgggatcggttccgtcaattggtccgtgggacttggaaagaaaaacttggacggaggtttcattttccatgtgcaaagcaggaccagggaactaacttatgcggctactacatatgcgagtatgtccactgccttgaacgtgctgatgaagcctag

SEQ ID NO: 69261 - DNA, 584 bp, Oryza sativa
  unsure (1)..(584): unsure at all n locations
  Clone ID: PAT_MRT4530_69947C.1
nagtcggcacgccctctttcctcccctcccctccctgtccttccctttcaaaccttttacttttcttatttttttgtttttttacttaaaaattgattgggcctgatatataaggcaacaaatattttactgcactaaaaaaccggtataaaggttttttgtttttacaattgatcgggccattatcgttacaaacacacatatacacttggtcccaaaaaaattagtttaaagggcttttccttccaccaaaacagggcataaattgtggggggctccccctgggttgacatttcgggataacccctgccctttttgttggccccccgcgacaaacgtttataaaggggttgacattttttgattacccctgcccttttgtgttggccccccgcgacaaactttttttaaagacattttgaggataattaccaagatggcatttcaggggccccccccccactgggttaaacttttcatgttcttttttagtttcagggccatcttcagccgagcaatttccaaccccccttccctcaaaatgtgcctccacctgccaaaaggcacattgtaaatgctgatgc

SEQ ID NO: 69262 - DNA, 576 bp, Oryza sativa
  Clone ID: PAT_MRT4530_69948C.1
atggacgagattgtcctctgtgtctttctcgaggtggagcttggcgagaccttgtcttgggaggtgcaggcggacacggtggaggtggaggtggaggaggcggaggagccggaggagatggtgcatgaggaggcggaggaggcggaggagccggaggagatggtgcaggaggtggtggcggaggagctggaggagatggtgcaggaggagacggtggagccggaggagatgatgcgtctcaccgtctcctcctgggtagtccaactcgaggtcctcgtacacggcttccaccagctcaacttcgaccctcgagtatcctgctggaatcggcctgcagtgggaatatgcagctcacatggtgtccgttgcgtgatctcatcaacggggcaggtggtgtcgtcatgggtttgcatggcgtccatgctatgtgatactacctgccccgttgaggcgcagctactacgattgcctgatgggctgaccattggaggaggccatttagcggtggacggttcgatacccctctcaagcaagcttgcctccatctcctcccacttcggcatcgcgacgctatag

SEQ ID NO: 69263 - DNA, 815 bp, Oryza sativa
  unsure (1)..(815): unsure at all n locations
  Clone ID: PAT_MRT4530_69949C.1
gcacgagggattgaccctaggtgtgctctcgtctcgcacgcggcagcggcggcgacttcaggcgacgcggcaccgtgctccaccgtcggtgtgcactctacctgcaggcggcggagcagtgaccgacgaggtgctctacccgtggcagcggtggatggaggcaccagtgggcggcggctatctgcttgatggccaaccggcggagcagtgaccggcgaggtgttccggaggacactccaccggcagcaacgatgagggctccggaggacacccagccacatcgccaccttcgtccagctgggtttctctcgcccgtgagcaccgaacctgggcctagaggattcaatggattgtggaagcttatggatgtccaaatgaaggatctggttattgatgattccatgaacttggacgagtcaatgaaacgaatggacctttgaaatactctgttctgtaatcatcattgcatagaagatattttctagcttcgttaattnttagtctgtcacttggatgccctggatatttgtgatgtttaacttcatattttgtggatgatatttgatcctttgaggttgcacttttagtgttgatttgttttacacaacagaaatttctatagtgatatttgattctgtaagactgcatttttagtattggtgatttgctttggacaacagaanatttgaaatttctgttnnnnnnnnnnnnnnnnnnnaaacttgagggggggggcccgtaaccccaattgggccctataggggagtcggattaacgcgccgcttactgggccgtcgttttttacaacggtcggt

SEQ ID NO: 69264 - DNA, 948 bp, Oryza sativa
  Clone ID: PAT_MRT4530_6994C.1
gtttccgtccttctccgaccgccctctctcgccccggccctatttaaaccctccccgcgcctccctcgcccgtttccgccccttgccgcaccgtctctccgccggaatcgagctcgcgacgtcgctctctctctccgccgtcgccgccgagctccggtccgccgccgtcgtcgccccggacagcctcccacctcggcgccgcctcctccggcatcgccgcaccgccgtcgaccccgtccaccccctcgccgggtccgccgaccgccggaacgccgtcgaccccgtcgacccgagccgcgccgccgccttcctccgctccggctgcctagggtgagccgtcgctccgccgtgcctatggccgctctctctcggcctcccgtgcctatttcccccttcccttcccctctctcggccgccgctccgccgtgcctatggccgtcgccggagaccataggggcgcgggcaccgcctcccgccggccgcgccgagtggccgccttcgtgcgcaccgagtggccgccgcgtggggcccggccgtcagccgcccgcgccctcgggtgcggctgacgcgtggggcccacggcgccggccggtgcgagcccgggtgcgcccggtccaccgtggacccacctcggccatataaggaccggtcttcgggcctctgttgcaaagcactaccgtacttccacatgtctagtggggcaaatgaaggctacacgagctgcgtctcggtagtcgaaatgtcatggcacaggaccggtgtcctgctgctaggggctcagtcctgcctacctgtcccgggggttccggccgtaggtggggttgggtcgatgtacacctctgatcagagtataacctattcgaatagctgcgccctcggttatgggcaagccgagcaatgtacccaagttagtggggaaatcactccccgtgattccctccctctttt

SEQ ID NO: 69265 - DNA, 4057 bp, Oryza sativa
  Clone ID: PAT_MRT4530_69950C.1
atgagcagcggccatagcacttggcctgttacgatgtgtatctacaacctccacccttggctatgcatgaagaggaagtacataatgatgctgattattattcaaggccccaagcaacctggtaacgacatcaatgtgtatctaagaccactggtcgaagatctgaaactgttgtggaagaaagaaggtgtccccgtgtgggacgaagacaaacaggaggagtttaacctacgatcgctgctgttcgtaaccatcaattattggcctgcacttagcaacctatccgggcaatctaacaagggcgggaaaacagtgtttgctatggtgaaagatcttaaagtagtgtttggaaaggggcctggcagccagcctatagagagcgaagatggtcatgcggcgatgtggaaaaagaactctatattttgggacttaacctattgggaattcttggatgtctgccatgcaatcgacgtgatgctcctcactaagaacctttgcgtaaacctgcttgtctttctgggtgtatatggaaagtcgaaagatacactggaagcacgtaatgatctgaagcatatggaacaatgcggcgaccttcacccggaaccaaaggataaaggaagccattactttagtccagccagctacactcttagcaaggcagagaaggaaaacaatgtccgggcaacaataacaaagctatgtgctttcatgaacgcaatttcgcagaaggtcatcgatctggatagattagaagcccttcaaaatgatgtggtgcaatgtcttgtcagctttgagttgatatttccaccttcatttttcaatataatgacgcatctgctttgtcaccttgtcaaagagattggtattctcaggcctgtgtacctacacaacatgtttcctttcgagaggtacatgggcgttctgaagaagtatgttcgtaaccgtgctcgtctagaggcaatcatcgccaaggggaaatcaataatgacggtggacaacaatttattccgtaaagcccatttcatggttctgcaacaatcttcattggtggctccttacgtcgaggagcacttggctctagttcgcgccagaaacatcgatgccataggacacgatggtacaactggcatgtattacggtgccatcgaggacatatgggaacttgactatcgacctctcaaggacatgtctagcaaaggaaagaagggcaaagggcctgacgagccaaagccccacgtggttctcccaggcaaaagaaaaatcgtcgaagtagaggacaagactgacgaggattacgatcagtttgatgggcaaccccctttcacggtgacaattgaccctagcatcctcctatcaaatgaagacaccccttactcacctagtgatcacaaggaagaaacaatagtgaggagaaactacgtgtggtcaaccgtcaccgccaatggcatcccttgctccgacgccgcagtcatctcgctgtcgtcgtcgtcgccgtcgacgccgccgccgcattgggagggaagcagccagtactggaacgaagaagaggggaacgaggatccaaaccagtacctgaacgaggaggggaacgtggagagtgatgcagaggggactgaggaggggaacaaggaggcggaggctagtggaagtcaatcctccgctggacagaagagggcacgcggacaacgaggtgccgcgaagaagatagagggtcggcacatcataactgaggtggacgaagacgatcgacctagtgccccggctgaagcagccaagaattttgtacgacacagcggttgggttgtgaaggataacgtgcctgtcagcaaggtgtactggcgcagaacaagggcacgcggggattatgacagctttgtcccggaatcagagaaagatacgatgtggatcacaatgctcgagacgttcacgctccctgcgggtacggagaacatagtgaaacagtggactcttaagaaaatggtagaacaattccagagcttcaagggagatctctacaagaaatacatcctgaaggggctgacaccgaacttcgacgtattcccgaagctaagggatcattgggacgagttcgtcgcttacaagacagggcaacaagggcaagcgatgatggacagaaacaaagaaaatgccgccaagaagtaccatcacctcttggggtcagatggctatagcgtcacaatgctgaagtgggaggagatggaggccggcttgattgagaggggtgtcgaaccggccaccgctaaatggctggatcgatcgaagttctggtactatgctcacggtggaacgcttaaccctgttgacggctccctgactcccgagcatcctggacgaacacgagggaaaggcgtggttccttggaagattggattcaaggaggacatccacacgtacaagagtcggatgaggagcaagagagataccgaggcgaagattgcagatcttgagtacagggtatcgagctacgagctcagcatgcaagaggaggtggcaaggaaggtggatgaacgcatggccgcacatcggtgccatgatgcccagccatacattcctcctgtaatggtcagcccctcaggcaatcgtagcagctgcgcctcaacggggcaggtaggatcacagagcatggacgccgtgcaaactcaggacgaaaccacttgccccattgatgagatcacgcagcggacaccatgtgagctgcatattcccttcaagaacttatcaatcaaggttacgtcgggaatgaccatcccaacggacccttcagggacttaccactgcaggctgattccagcaggatactcgagggtcgaagttgaactggtggaagccgcgtacgaggaactcgagttggactaccctggaggagacggctcctgcaccgtctcctcctcaggctcctgcatcgacttctcctcaggctcctctgccatgtcctccggcaccttccaagtcaagaactcaccaagctccaccgcttgcccgcacaagggcaacgaagaaggcgaaagttgatgccgctaagaacaaggagccaccgtacgattgcacgcaagaggagcttgacgcttacgtggcagcagaagtgaagaggcaattgaagcctcggagtccagaaaagaagattcctgtggacccgagtgccaagaagttcttcaggagtatgtcggcaccagtcaaggaggccataaagctaacggactatgagcgaacacttaagaaagcatattatggaaagtacaaacaagtccctcagcttggagagcaaccaaaccaggaggtcgagctattggtgatcgggcaagaaattggaataaaagaattcatttctgacaccgggctaactagggctcagttgattaaaggcacaccaatcccaaaggcagaagtgagacaccactacgaactcggtaaaccacttgtcaagcctgagcagctgcagtccctactgacacagatgtacaaattccatcaatggtacatggagatgagcgccagtggtagggagattatcggagcgaggatcaagatctccgacttcttacaaggggaagatgttctctggatcaatttcaaggatatctacgaactataccagctggacgccctcgacgtatctattctgagcgcatggattttaatggagattcaaagggcccgacggcggggagttttcgatactagattcatcgaccctcggaaagtaaacatcgaaatggtcaccaagtatccgcaagccacagaggacaatctcgtctatctcctgaaggagcaacatttcaagacgttcatactattgccgtacaacacagcgttagtttttactgtcttccgaaaaaagttcgttcccatacatatagatgttattcacatgagggataacctcacacacaaggaatttatcgcggcggttcaagaacaactcataggattcatcaacgaacaagtccttgatcccgagggtgaattctactacaacggaaatacaattgataagtcgttagcttctgagataacgactactacgtcgaagtcgtag

SEQ ID NO: 69266 - DNA, 1784 bp, Oryza sativa
  Clone ID: PAT_MRT4530_69951C.1
gagctgtggggttcccatggccactgtatcttttttccctctcataggatggcgagctgagctgagctgtgctgggctttactaaccccatgcgcgggcagaatttagcttcttgttttaattttcgctcttctcctttccggttaactgtgggtgagagggagctcaagctggaggaagacaagaaccagttgtccaagggcttagacccttggacgagcaaccctaccgccagcgcgagcaccttgcactacctgctccaggagaaggagagggcgcagcaagcgcatgagcagcttcagatctaccagcagcagcagggattcggcagcttcctgcaacaccggatcaggcagccggcgagccgggggccgggaggtggaggcggcggcggcgatggcggcggcagcagcggcgagtcgacgcccgtcgaagcgctggccactgcattcggggcaggccgcatcgtgcggtccgcggccgggcgcaaggaccggcacagcaaggtgtgcacggcgcgcgggctgcgggaccggcgcgtccgcctcgccgcgcacaccgccatccggttctacgacgtgcaggaccgcctcggctacgaccggcccagcaaggccgtcgactggctcatgcgcaacgccaaggccgccatcgacgagctccccgaccgcgccgaggccccgccgccgcccgccgcggcgtcgacggagcagcccgaggccaccgagcaggcgacctcgacgtcctacgggttcggcaacactaccggcggcaccatgaccagcgccgcgtcggccgctgctggctccttccttccacattcgctgggggcagatcgagtctccgacagcgtcaagtccctgttcccctcctcgtccacagccagcggcgccgcctccgccggacacgacgagtacaggggatccccgccggacctcctgtcgcgcacgacaagcaaccagcagccgcaggagctgtgcctcaccctacagtcgaaccagcaccagatcttcagccatgtctcgtcgaaccaccacggtatgatctcgagtgcaggcgttccaggttggcccgaccacagccagagaatgcaggcatggcatgccccggagaacagcacaggagacggccgcggcggcggcaatggcgacggctacatgttcgccatgccgtcgcggcaagggctggaccagagccagctcttctcgcatggggaaccccttcagtccagcggtcgcgggtgggcgtcagcccgcgcatggctagaccccctcgcagtcgcagccatccaccaccagccgtcgacaatggctgccggacaggtcggcttcggccatctcgttggcggcgccggtggcggcggcgggtttatggggtttctcgcgccggcggcgcagcggcttgagggcgaggaggagcacggaagtgaggtgatcaggtgatgagaagagactgaagaattgatgcatggcgcgcatgcaggaggtgtgtgctttctattaattaacacacttcactgatctgcttaagggtacgtgtatgtcatttcatgtaggattttggctgatgaaatttccctcattattatctgctgtcttcatgcatgtgtaaccaaggcttaattaattattaagagtacgttcccttggaactaggcagctgttgctgttgcattagttgctattgctgttttcccctttattctcggcatggacaagatgtgatgatgaagagatgatatggtctatgatcttgaaaaattaaaaaaaaaaaaaaaaaaaaaa

SEQ ID NO: 69267 - DNA, 372 bp, Oryza sativa
  Clone ID: PAT_MRT4530_69952C.1
atggtgcagcaggaggtggcagaggagccggaggagatggtgcaggaggacgtggcggaggaaccggaggagatggtgcaggaggagatggcggagccggaggagatgatgcgtctcaccgtcttctcctgggtagtccaactcgaggtcctcgtacgcggcttccaccagctcaacttcgaccctcgagtatcctgctggaatcggcctgcagtgggaatatgcagctcacatggtgtccgctgcgtgatctcatcaacggggcaggtggtttcgtcatgggtttgcatggcgtccatgctctgtgatccgacctgccccgttgaggcgcagctgctacgattgtctgatgggctgaccattgcaggatga

SEQ ID NO: 69268 - DNA, 315 bp, Oryza sativa
  Clone ID: PAT_MRT4530_69953C.1
atcgctgaggccggtttgatcagccgacatggtgctttgcgctcaagctcgcgtggaacagctacccgattcggtgaatcggattaccgtacattttcgacgttttggtgcaagatgagcctggagtgatttcgtgcatgcaccgacaagttgcatatgttccactcaggagctatgctgaagacccaaagttgcttcaagcacaggaattgtgaatgttgactgtacaagagctttttttttttccttttctgtttgttactttgaaattttttattatcaatgttcaattggtcatgaaaatgcacaatatac

SEQ ID NO: 69269 - DNA, 1500 bp, Oryza sativa
  Clone ID: PAT_MRT4530_69954C.1
atggaggaggccggcgacgaggagggagagcaggggcttcgcctcgggggagtgggggacggcgccgacggcgaggaggaggtggctcgaggagtggtggcgccgcaggtgctcgagctgagctcgtccagctcgggcgaggaggggggctcttgggaggaggaggagagccagggatctgtcgaggtgacgagaggcgggggtggagatcgcgaggctagggtttccgagagccgggacagcgcggaggtgaacggcggcgaggcggagagccagtcccttcccggctgccccatttgcatgaacgcgtggaccgcggatggcgcgcatcgcgtaagttgcattccttgtgggcatgtctatggcagatcttgcttagagagatggttactgcagtgtcggaagaaacctgcgacatgtccccaatgtggtaggaggtttaaactaaataacattatcaacctctatgcaccagagatttctgttccaaataatgatcttgaaaagcaagtattgtcattgagggagaaaaatgaatctcttgagaagcaaaatcaagaattggtccaggagataaatgagcacaagaggcagattatactgcagcaaaatttcataaatgaatcaagcttaaagagaaagaacgagtttttccttgatggagctcgagtcatgggcatagatgcatcgagccagattatactcacttctggcagggcacctggaattggtgctgaacatgtcctcacaaaggctcctggctggtcctgttcaggcgatcaaaatagtccgaatcacatatatgctggactacagaatggcatgctgttgacctttgatattcgccaaactgttgcaccgttgcattccatgatgggtctatctacacaccctgttcatacgatccactctgttgtagatggcggtggttccaggaaggtcatttctgcatcttccataggaccctgcatctgggatgttgacgggagcagaaacaggccagatttgctaaatggaatggaaaaccacggagtctgcatctctcttgcgtgcaatcctccatcaagtgatctcctagtggcttccttccggccaaaagttgagctgtccgacgacggcacatctcaagccggcaaatcacagtcaccgacaccctctgcatcagggaagctaggctgccatgcactcataaggaggacgagcaacacgtccttcgccagagaccaaatctgcagaggcaatgtgagtggattgcgaatgtccaaatccgcaatcatacccttcaccggaagaagcaatcagcaacatctcttcgcctatggcgacgagtcgctgcgcggagtccggacatggcggctgccttcactccagacgtttgctgatctcaggccacaccggcaaccgatccttgatctgaggtttgcagagagctcgtcgacaggggaaaggtaccttggatgcttgagcgaggacaggctgcaggttttcagagtaaggtag

SEQ ID NO: 69270 - DNA, 216 bp, Oryza sativa
  Clone ID: PAT_MRT4530_69955C.1
taacctgtgccaaagtgaaatccgatgacgcttacacacaccctccaagtcccgaaccataaactgaaaagcctgaggcgccgtttgagtgagataaatcacactaactgtaatgcacttactgacacctcccccgttagaaaacctgaacctctagcgccatctacgaatatgactccgcccccccacaggcagatgccgtatcagacgctggcg

SEQ ID NO: 69271 - DNA, 462 bp, Oryza sativa
  Clone ID: PAT_MRT4530_69956C.1
tctttttgtggcatcgtcttcggatgtgctcgacaccaccagcgggagccggggaggtagtgcgccacccgggagcagacagcttggaaatggatcgtctccaccgccggcgtatcgtcggctgaaaggagaagctcgaggtgcgttcagtttggaaacctctctgaagatccatgccatcagtttgcatcctggtgcttccattgaacaccaacttagttatgttttcgccaattgtggatgtaattccattttcaattaaagagttgcgagccagagtttctgatatcttcttgaacttgtctttaaaagctatcgacatatcgggcgtttcgatggtggtcattgatggactgaaatgtttcatggaccttaaatttccattacagacgacattcttagcggaagttcctctttgccaatccttgactggggttcttaaaatctgtggtcagtttagta

SEQ ID NO: 69272 - DNA, 739 bp, Oryza sativa
  Clone ID: PAT_MRT4530_69957C.1
tttttttttttttttaatatcttgcaaactgaagaagtgaaaactatatatattggtcgttaaaatccattctcagatattaaatgtaagtgatacaatcagctgcctcagtaccaaagagtccaatgatcaaatttactcaccaccatcgaaacgcccgatatgtcgatagcttttaaagacaagttcaagaagatatcagaaactctggctcgcaactctttactgtgaaagagcaatcaatagaaaatgaattacttaaactataaatttgacatacctaccctatcaagcatatagctaactcactgacattgaaaatggaattacatccacaattggcgaaaacataactaagttggtgttcaatggaagcaccaggatgcaaactgatggcatggatcttcagagaggtttccaaactgaacgcacctgcacgatcatcatcacaaattgatcactaaattactctgttcaatcctccaagtaccaggaacggatcctcgagcttctcctttcagccgacgatgtcgccggcggtggagacgatccatttccaagctgtctgctcccgggtggcgcactacctccccggctcccgctggtggtgtcgagcacatccgaaggcgatgccaccgagcagcaattccagacgcgagccgagacggcgttctcgctgcagcgccgccgcgatgcgaacgacggccgccgccgccgccgcgaaaacctagcccacgaa

SEQ ID NO: 69273 - DNA, 143 bp, Oryza sativa
  Clone ID: PAT_MRT4530_69958C.1
acaagaaaacaatagccattatagaactggggggtgaccggaaaattgaatgggataattgaaaacaggaacctggaatacaccgggtcattggaaacacaggtagggatggaaatatcagatactataccaccggtgctata

SEQ ID NO: 69274 - DNA, 450 bp, Oryza sativa
  Clone ID: PAT_MRT4530_69959C.1
atggatgttctcagctcactagttgattgggtggcccaagaaggatggttgcaacctcttgcttttcggcaaacgcagcagcgatgctccttttttgctgataatgtggtcttgttctctaggccaacagctgacgatctctcagttatcacacaggttcttgatatttttggtcatgcttcaggacttgtgactaacatgcagaaaagctcgataactcccattaggtgcaatgaggatgagttgaaagtgatttctaacatgctgccatgtgaggtcaaggattttccttgttcatatttgggcttgccgctgaacattaagaagccttctaaagccaagttgcaagctcctgttgataaggtagcagattacctcccaatgtggaaggcctccctcatgaacaaggccggtcgactcatcttggtgcgggtggtcctctccgcctga

SEQ ID NO: 69275 - DNA, 425 bp, Oryza sativa
  Clone ID: PAT_MRT4530_6995C.1
gatgggagactcctctggggcctttttaattacccaacaccaggtggtcttaaaagagcacaagggaagaagctcatataatgcatggaaaaccaacccggacccatggtttaccacatgccagaaagaatcccttctcccgcacttccgacgatgttgtagcacaagcatatcgtatctcaagagaagaactaggaggctcaaccacacaggggagatgattaggttgttcactcctagtcatgcctcgagctaccagacatatctgtgagtccatacccgaaattcatcatagccttggattgctaaggatggtttcaataaatcataacataaaagagtccatgttgtccacgctatgtaatagtggatggttggaagaataataataaatttgtgtcccctttaaggtaaccgtgtaaaaa

SEQ ID NO: 69276 - DNA, 293 bp, Oryza sativa
  Clone ID: PAT_MRT4530_69960C.1
gcgaccactcttgcgcccactcatccgtattgatggaaatagtattggggcgattaaccactactgctacggcaagatatggtgtgatcaatgtactgatctaccgcctgtctctgtctgatcagtacaaggataaagtgcggccatatatggtggtattatatatcatcagctctgaatagatgatcaattattatccagttcgtctgtgtgtgtatgtggttgttcattccttccatatggaacgagcagtgtttgtcctggggataatgaatgaaccaacggattttatc

SEQ ID NO: 69277 - DNA, 285 bp, Oryza sativa
  Clone ID: PAT_MRT4530_69961C.1
ggggggcgaaacaaaaagggccttgttaattccattcatcccacattttggggggataaaaaggggccattccgtttttttttttccgaaaaacgcttgttttaacgaagggtcctttggtcgaagtttgtttgtacaaattttggaaaaaaattggttgttttatattttgggccccgtccgtttattttttttttgggggggcaaaacaccatgcaacttgatcggtttaactaaagctaaaaggggtttttaccggagggaaccctgggggtttcttttttc

SEQ ID NO: 69278 - DNA, 724 bp, Oryza sativa
  Clone ID: PAT_MRT4530_69962C.1
tttttttttttgagagaagttttttttttttttttttctttttttttttttttttttttgtcaataaatatcttccacaccagcttataattcaaacagtttgcccctgagactatcaaccaccaatttagttcatcgaacaatctcaaataaacccaactaattagacctccaagatgacaatgttcagaagtagctcgggatacataacataacacttgcaaaatagatatttctgtgctaactagagcaaaactcgaagactacatccttggaggtggaacacttgcttggcacaaaaacatcgtcttctgaatgaacgactcactctagtcgcccttccggcggaaggagcagccctcggtgagcctggccttccctcctgtgggctggcagagcaccgtttggcagcctgggcacacaacaacagtctgggagtggctgaacacggttgttatgttgaagcatccctggcacttgacatccatgaagaatgagttgggggactgcacgaggcgcttcttcttgtgcttgtgcttctcgagctccgcgggagggttgaggaggtcgatgtcgttggatagcaccatctcgtcggcggcggcggcggcggcggcgctcggaggaggggaagaagaagaagccctaggaggaggaggaggaggaggaggaggcggcgcggcgtgggcaagaatgagccggagcggcgtcccggccgggtacc

SEQ ID NO: 69279 - DNA, 712 bp, Oryza sativa
  unsure (1)..(712): unsure at all n locations
  Clone ID: PAT_MRT4530_69963C.1
ttaggtgacactatagaatactcaagcttgcatgcctgcaggtcgactctagaggatccccaatactcattatatccgcgccggtcgttttttaacggatcaaacgattcctttattattcatttcttgttgttggtggctaatcgcatttggcttagtgatcagttatccaaaatcagctagcctttggtctaaatctattacagcaaaatttatttttggcttctgcacgttaatcccattttttattgcaatacttgcattacgattcaacaactacgccttcaatcaatttcaaggcgcgtatttattactttatgtatgcctattagtatggtgtgctgattctggtgcttatttcttcggcagagcatttggaaagcgaaaattagccgctaaagtatcacccagtaagtcttgggagggcgcattgggaggcttaatcacttcttgcgtgatggctttattattcataaaactaacgccaaataatatttttggtcgcgaatttgaaacactcccctttattatagtctcggttgctacagtcgccgtttcaagtttaggtgatttagcagaaagtatgttcaaacggcaagctaacataaaagacantaataatttaattcccagcccatgccgtattttagatcacatttatagtttaactgccaccattccattttttgctaccttattcttttttgtatta

SEQ ID NO: 69280 - DNA, 379 bp, Oryza sativa
  Clone ID: PAT_MRT4530_69964C.1
gttactattttattaatcagaactatataatattattatgttttatattacaactaaatgccattgatagccaattttttattaaaaaaaaaaaaaaaaaaaaaaaaaaaaaaaaaaaaaaaaaaaaaaaaaaaaaaaaaaaaaaaaaaaaaaaaaaaaaaaggggggccgtttaaaaggatcacaagattaaaaacggttgcatgttaaagaaaaacaattttttataaggccacccaaaattaaaataaattggccgtttatataaacaacttaatgtaatggaaaaatgcctggcggttaaccaaatttaaatcctctggaaaaaccatcccctttcaaaaagttaggcgaaataagcaaaaaaggcccttaactg

SEQ ID NO: 69281 - DNA, 1791 bp, Oryza sativa
  Clone ID: PAT_MRT4530_69965C.1
gtcgccgcctccctccgccgctttcttcccctttaaaaccctcccaaaattcaaacgcgaccaagccgccggcgaggtgaacgaaacccaaccatggcaggcggcggaggtggcgaggggaaggtggcgtgcgcggcgtggatccggcgccgggaggagaaggagaaggcgacgcgcgtcttcgcggcgtacgggcgggcggggtcgccgccggccgtggaggtgctcgggttcgactccaaggagtgctccctctccgaacccctggcgagggcggagctcggggaggagccgggcgacgcgccgcgtggcatcacggtgcaccccagcggcgacgagctcgtctgcgccacggccaaggggtgcaggctattcaagctgatttttgaagagttcactgttcgacttatttcaagagacgctccaccacttgaatccgttggaccgcagaagtgtcttgcttttagcactgatggatctaaatttgccattggtggtgaggatgggcatctcagaatatttcattggccgagcatgaatgtgctcttagatgaacccaaggctcataagtccttccgggacatggatatcagcttagattcagaatttttagtttccacatccactgatggttctgcaagaatatggaagatagatgagggggtaccattggtcaatttgactcgatctgcggatgagaagattgaatgttgccgcttttctagggatggcatgaaaccattcctgttttgcaccgttgcaaaaggtaacaaagttgtaactgttgtctggaacataagtgactggagtcgaattggatacaagagacttctgggaaaacctatctccacactttcagttagcatggatgggaagtatctggctttggggagccatgatggtgatttctgtgctgtggatgtaaagaagatggatgtttctcactggagcaagaaggtccatcttggttctccggtttcctcaattgaattttgtcctactgaaagggccgtaatctccacatcgcatcaatggggagcagagctgacaaagctgaatgtccctgctgactggaaagaatggcaagtctggctcatactcttatctcttttcctagtgtcagccatcctgttctatatgttctacgagcgctccgattccttctggaactttccaatggggcagcatcagccagccaagccatggagtgtcatgaaggagtctcctccagttcctgaggaccagaacccctggtgaattatctttcaagcaatcaagcatttgggtgttgttttatttcataatgaaagggttttttccaagcctaattcatgttgtaccattttacttgttcgccgatctgaccacgtcagtatttatctaggtaaatcagtaaaatgccactgtaattggtggtctgatggtagttatgaaaatgccatcgacttccaatgagactttcagtggcatttttaagtctattgtaccttgcagtgggatttatccacgtgcttatttacccccttctctttggtagtcaataactgaatttatcagtgtgttctacttctgtatatgtgggttgggatgtgagtacaagtacatgtgaactcagctttaattaagccgctggcagttgttaattgcaggatgtttttttaaaaaaaaaaaaaaaatacaatagatactatggtgcacgcagtaccattaccacccttgccggcgtcttgaaatgagctctgacaggttccttggtatgaacgaaaaaaataatctcagatatcaacatat

SEQ ID NO: 69282 - DNA, 213 bp, Oryza sativa
  Clone ID: PAT_MRT4530_69966C.1
atgagtactcttttgtcactcctctcatttattcttgtgatggtggtcggagttggcgaggggaggaagttgttgagcgcaaagaagatgacgatgatggtgccagaccgcacggctgacgtgatggcatactggaagacagttcatcccaattctccaataccatcagccatactcaacctcttgacacaaccatctggtggatgggaatga

SEQ ID NO: 69283 - DNA, 636 bp, Oryza sativa
  Clone ID: PAT_MRT4530_69967C.1
atggccgccgccccgagcggcaccgccgccgcccgccacggccgccgccgggcacggcaccgccgcccgccatggccgctgccccgcgcggcaccgccgccgccggccaccggatcggatgggaagggaggaggggacgagaaggggcggatgggtagtgaggaggggaggaggaaggagagaaggggaggaggagttagatctgtgaagaggaagtggaacggatctgtgaagtgtttggggagcacatcatgcaactgctcgcttgtgcctgagtatgactatattgactacttcctctttatcatggttggtggtgatcagaacaggaacaacaatggtccttctttgaatggaatatatcaaagcttagagaggaatttttctgctggtggtaacaggaaaggaaagaggtcaagagtggataaggaggatgaggaaattgagtttgaggaaagtgaagatggagaggaagaggttgaattcgatgatgcctcatctggtgctgaagatgataatggtcatgatgttagtattgatggactaaatgctaataatgatgacaatggtgacgagcttatgggaacctcaaccagggttgaagaagacatagaagcttcaggtagatctggttga

SEQ ID NO: 69284 - DNA, 722 bp, Oryza sativa
  Clone ID: PAT_MRT4530_69968C.1
tctcgcttaaggaggcaagcttgctttgccatacttgttggggttcattgcttgctgcctgcttgccttggtaataaatgctgaacatttgttgcaaagggagcaattacacctgacccatgttgcggcaaatgtgcaagatgaccatatgttgctgcaaacatgttggggtgcacaaatgaacaatgctgtgctgcgcactttgattgcaacctctgtttatcttctcggagaagtgttgctaaggacaaattgcgcgtacaaaggtgatcacatagcgtaatacgttgggagtaacaaccctttgggcagacaccatgttgtgtctgtgagatggtatgacccttgcacacgttctttgtataagtactggattgtgtggggatgcgcaggctgcaggaccacgcggtgtcactcggtgatgttctgcttgtcagtcagagcagggacagttggatggtcaggcagcagcacagaacacgcagcttccccactcgaggtcgccagccaggtgaggtccccgacagctcttcttcgccatggtggcgacaggcgcagcagtcccagcgcagcaggacgacagacagccgcactgcacaggcaccgcgacagcgacgtggtcagccagccgcagggtccagcgccagcttagaggatcacaagcttacgtagcgtgcatgcgacgtcatagctcttctataattacggtagtaagtagcttg

SEQ ID NO: 69285 - DNA, 1956 bp, Oryza sativa
  Clone ID: PAT_MRT4530_69969C.1
ttggctgatcgcgatgaggaacagatattgtacgatacaatcgtagagggaagcagccagtactggaatgaagaagaggggaacgaggatccaaaccagtacttgaacgaggaggggaacatggagagggatgcggaggggaacgtggagagggatgcggaggggaacgaggaggaggctagtggaagtcatccctccgctggacagaagagggcacgcggacaacgagaagcagccaagaattttgtacgccacagcggttgggttgtgagggataacgtgcctgtcagcaaggtgtactggcacagaacaagggcacgcggggataatgacagctttgtcccggaatcaaagaaagagatgctgtggaccacaatgctcgagacattcacgctccctgcgggtacggagaacgtagtgaaaccctggactcgtaagaaaatggccaaacagttccagagcttcaagggagatctgtacaagaaatacatcctgaagggactaacaccgaacttcgacgtattcccaaagctaagggatcattgggacgagttcgttgcttacaagacagggcaacaagggcaagcgatgatggtcaaaaacaaggaaaacgccgccaagaagaagtaccatcaccacttagggtcaagtgttgatggctccctggtcttcagcgatcagatacgcgaagctgccagtcgactaatggacgcagtggaagcctcttctcagggcacgttccgacccgacagagagaaggacgagctgtcactcgccctacagactcccgagcatccaggacgaacacgagggaaatgcatgattccctggaagattggattcaaggaggacatccacacgtacaggagttggatgaggagcaagagagataccgaggcgaagattgcaaatcttgagtacagggtatcgagctacgagctcagcatgcaagaggaggtggcaaggaaggtggatgaatgcatggcagcacatcggtcccaggatccccagccgtacatacctcctccaatggtcagcccatcaggcaatcgtagcagctgcgcctcaacggggcaggtggcgtcgggaatggccatcccaacggacattttagggacttaccactgcaggccaattctagcaggatactcgagggtcgaagttgagctggtggaagccgcgtacgaggacctcgagttggactacccaggaggagacggagaagtgaagaggcaactcaagcctcggagtcctgaaaagaagatacctattgacccgagcatgaagaagttcttcaagggaatgttcaccacaaacaaggaggccttaaagctatcggactatgaccgaacacttaggaaagcctattacaagaagtccaaaccagttcctcaacttggagaacaaccaaaccaagaggtcaagccattggtgaccggcgaagactttggcataacggatttcatttcggacaccggtctaactgtggttcagttggttggaggcgcaccaatcccgaaggcggaagtggcatacaagtttgaactcggtaaaccgcttgtcaggcctgagcagctgcagtccctaccgacacaaatgtacaaattccgtgaacggcacatggaaatgagcgccaagggtagagagatgttcggagcgaggatcagaaaccccgacttcttgcaaggagaagatgttctatggatccatttcaaggatgtcttcgatctgtaccatctggatgccctcgatgtctctcttctgagcacatggattttaatggagattcaaagggcccgacggcggggggtttacgatactgggttcatcgaccctcggaaaatcaacaccgaaatgatcgacaagtacgagaaagacacaaaggacaatctcgtccatctcctaacgcagcagcatttcaagacgttcatactactgccgtgcaacacagagtga

SEQ ID NO: 69286 - DNA, 1130 bp, Oryza sativa
  Clone ID: PAT_MRT4530_6996C.1
atgagtagagtgtccactagttggggttttgtttattctagggtgaacaagccgaggggagggggcgcgcggaccgggtccacgggagtggggcccacgcagcagcctcacggtccacggtggaccgggtgcacccgggctcacaccggccggcgccgtgggtcccacgcgtcagccgcacctaagggcgcgagcggctgacggccgggccccacgcggcagccactcggcgcgcccgaggacggccaagccggcgcagccggcgggaggcggcgcccgcgcccctatggtcgccggcggcggccataggcacggtggctgagagagggaaagggaagggggaaaagaggcggcggtccacggctcaccctaggtcgacggcgacgacgaaaaaggcggccggagcgaaggaaggcggcggcgcggctcgggtcgacggggtcgacggcgttccggcggtcggcgaccgaaacggaggggtggacgaggtcggcgaggatgcggcgaagccgaaggaggcggcgccgaggtgggaggtggtccggggcgacgacggcggcggaccggagctcgacggcgacggcgaagagagagagcgacggcgcgagctcgattccggcgaggaggaaaggcggcgagaggcggaaacggacggaggaggtgcagggagggtttaaatagagccgggtcgagagagggtggccggggaagggaggaaaccggcgcgggaggtccggccgccatcaatggcgccggcgagatttgcgggggcaaatccgcccgtttgaacgcgagagagagagggaaaatggggggaaaagggagaggggatcacggggagtgatttccctctctttattgcacgcggagacggcgggaggcggcgggattcgcggcggaagcggcgctagggcgcggacgaggcggcgggagcggcgggaggaaggggatgacaggtgggccccacccgtcagcgagggtggcgggcgggcccgcccgtcagcggcgcgcgcgcggggagaggccggatgggccgcggggagagggggagggagatgggacaagccggcccaagagggagagggagggaaaggggactttttagagtttttctttttataaaatcattt

SEQ ID NO: 69287 - DNA, 1326 bp, Oryza sativa
  Clone ID: PAT_MRT4530_69970C.1
ccacgcgtccgccaagaatctaaaggcgagagtgagagagatggtggagatcccggcgatcgacctgcggctggccggcggcggcggcggcgcggaggagacggcgaggctgcgcgacgcgtgcgcgcggctgggctgcttccgggtgtcggggcacggcgtgccgccggggctccaggccgagatgaaggccgcggtgcgcgcgctcttcgacctccccgacgacgccaagcgccgcaacgccgacatcatcccgggcagcggctacgtcccgcccggcacagccaacccgctctacgaggccttcggcctctgcgacgccgccgcccccgccgacgtcgacgccttctgcgcccgcctcgacgcgccgccccacgtcagggagaccgtgaaggcgtacgccgagaggatgcactcgctgatcgtggacgtcgccggcaaggtcgccgcgagcctggggctgcacggcgcctcgttccaggactggccgtgccagttccgcatgaacaggtacaactacacgcaggactccgtgggctcccccggcgtgcaggtccacacggactccggcttcctcaccgtgctccaggaggacgagtgcgttggcgggctcgaggtgctcgaccccgccgccggcgagttcgtccccgtcgaccccctccccggctcgttcgtcgtcaacgtcggcgacgtcggccaggcgtggagcaacgggaggctgcacaacgtgaagcacagggtgcagtgcgtggcggcggtgccgcgcgtgtcgatcgccatgttcctgctggcgcccaaggacgacacggtgagcgcgccgggggagctggtggacggcgagcacccgcgccggtacagggagttcaagtacgacgactaccggaggctccggctgtccaccggcgagcgcgccggcgaggcgctcgcgcgtctggcggcctgacacctggccacggtccattgtcgcgaccgtttattacgcggagtgctcactgctgactagaatgtccattaggcctccctgtatggccgtgtcgattctgaacaataaaatcttcgacgtacgacagtgaaaaaaatttgtaaaggatgctgaggggatgggaattttaggggttaataagtcttttgtttggctggaggagatgatgagttgtaggaataactggaaggtggagtttgtgagtaaattcccacctttttaatatagaggactataattgggaggaaagtccctttctgagctctctaattttagttagttgaatcttacacgtccaccatcacgtaaaatctaatttccatcaccataaaaaaaaaaaaaaa

SEQ ID NO: 69288 - DNA, 402 bp, Oryza sativa
  Clone ID: PAT_MRT4530_69971C.1
atgtcccacagtgcgggtgtcagcggccgtgggagctctatgtcccacggtgctacggggtatgggggcttcggtggaggaggatgggatgctgggacgtcctctgccccaaccgcagctgccgaagaggaggacaacgacgttgaggacgatgacgaagacgacaacgatggcggtgtaggcactgagatcgtggacgggcatgaatcggacgtggatggagatggggacggtgaggatgacggggaaggggaggaggaggaggagaggaggtggtgcatgagcgggtgcacagcagtgaaggcggaggcggcggaagcatcgatggaagacgagttgcagcggcgcaagcggatggacgagacgaagagtggggacggcaggaagggaaggcggtcttga

SEQ ID NO: 69289 - DNA, 506 bp, Oryza sativa
  Clone ID: PAT_MRT4530_69972C.1
atggctgatcgcgatgaggaacagatactgtacgatacaatcgcagagggaagcagccagtactggaacgaagaagaggggaacgaggatccaaaccagtacttgaacgaggaggggaacgtggagagggatgcagaggggaacgaggaggggaacgtggagaggaatgcggaggggaacgaggaggaggctagtggaagtcatccctccgctggacagaagagggcacgcagacaacgaggtgccgcgaagaagatagagggtcggcacatcataactgaggtggacgcagacggccgacctagtgccccggcagaagcaaccaagaatttttagaaagagatgttgtggaccacaatgctcaagacgttcacgctccctgcgggtacggagaacataggactaacaccgaacttcgacgtattcccaaagctaagggatcattgggacgagttcgttgcttacaagacagggcaacaagggcaagcaatgatggtcaaaaacaa

SEQ ID NO: 69290 - DNA, 2915 bp, Oryza sativa
  Clone ID: PAT_MRT4530_69973C.1
tttcgtaaagcccatttcacggttctgcaacaatcttcattggtggctccttacattgaggagcacttggctctagttcgtgccagaaacatcggtaagtccgatgcatggattacacggcatcacattgatactttctccgcttggctgcgacaacatctcatgggtaacgagacgattaaccaacaaccagccttcctagcgaggggaccatctggctcgatcacgacaatccaaggatatgaaatcaatgggtacacattctacacgagagcctaagacctgaagagcacgaaccagaacagtcctgttcgtattgatgccatgggacacgatggtacaactggcacgtattatagtaccatcgaggacatatgggaacttgactatggacctctcaaggttggatactcggacgaaccttttgtccttgccaatgatgtaacgcaagttttttacgtcaaggacatgtctagcaaaggaaaaaggggcaaagggcctgacgagccgaagcaccacatggttctcccaagaaaaagaaaaatcgtcggagtagaggacaagactgacgaggattacgatcagtttgatgggcaaccccctttcacggtgacgattgaccctagcatcctcctatcaaatgacgacattccttactcacgtagcgatcacaagaaagaaacaatagtgaggagaaaaaacacatatgtaatgaaattcgaaattcagtgctattatctttagtcccagttcttaaccctaaccggatggctgatcgcgatgaggaacatatactgtacgatacaatcgcagagggaagcagccagtattggaacgaagaagaggggaacgaggatccaaaccagtacttgaacgaggagaggaacatggagagggatgcggaggggaactaggaggggaacgaggaggaggaggctagtggaagtcatccctccgctggacagaagagggcacgcggacaacgaggtgccatgaagaagatagaggaagcagccaagaattttgtatgccacagcggttgggttgtgagggataacgtgcctgtcagcatggtgtactggcgcagaacaagggcacgagggggtaatgacagctttgtctcggaatcagagaaagagatgctgtggaccacaatgctcgagacgttcacgctccctgcgggtacggagaacatagtgaaacagtggactcttaagaaaatggctaaacagttccagagcttcaagggagatctctacaagaaatacatcctgaagggactaataccgaacttcgacgtattcccaaagctaagagattattgggacgagtttgttgcttagaagacagggcaacaagggcaagcgatgatggttagaaacaaagaaaatgccaccaagaagaagtaccatcaccacttggggtgaggcggctatagcatcgcaatgccgaagtgggaggagatggaggcaagattgattgagaggggtatcgaaccggccaccgctaaatggccggatcgatcgaagttctggtactatactcacggtggaacgcttaacccagttgatggctcccttgtcttcagcgatcagatacgagggaaaggcgtgattccctggaagattggattcaaggaggacatccacacgtacaggagtcggatgaggagcaagagagataccgaggtgaagattgcaaatcttcagaacagggtatcgagttacgagctcagcatgcaagaggaggtggcaaggaagatggatgaatgcatggccgcacatcggtcccaggatccccagccgtacattcctcctgcaatggtggcgtcgggaatggccatcccaacgaacatttcagggacttaccactgcaggccgattccagcaggatactcgagggtcgaagttgaactggtggaagccgcgtacaaggacctcgagttggactacctaggaggagacggtgagacgcatctatgaaacacaagccatgccattatactatggcgcaagcggtacatcatcctccttgggcgacaagcgacgtctcgtgcaccatctcctctggctccgccatctcctcctgcaccatctcctccggttcctccgccaagtcctcctgcaaaatctcctccggctcatccgccacctcctcctgcaccatctcctccggctcctccgcctcctccacctccaccgtgtcctcgattacagttaagaggagcttgatgcttatgtggcaggagaagtgaagaggcaactcaagcctcggagtcctgaaaagatgatacctattgacccgagcgtgaagaacttcttcaagggaatgtccgcaacaaacaaggaggccttacagatatcagactatgaccgaacacttcagagagcctatcacaagaagtctaaactagtccctcagcttggagaacaaccaaaccaagaggtcgagccgttggtgaccggcgaagattttggcataacggaattcatttcagacactggtctaactgtggatcagctgattcgaggcgcaccaatcccgaaggcggaagtggcatacaagtttgaactcggtaaaccgcttgttaggcctgagcagctgcagtccctaccgacacagatgtacaaattccataaacggtacatggaaatgagtgccaagggtagagagatgttcggagcgaggatcagaaaccccgacttcttgcaaggagaagatgttctctggatccatttcaaggatctcttcgatctataccatctggacgccctcgacatctctcttcggagcgcatggattttattccactgtgtcctgttattcttcgacttggacgcatacagagtcactgtgtacgactcaatgaataaagaggagaagatttttgacaaggtcttccaagtgatagacag

SEQ ID NO: 69291 - DNA, 3027 bp, Oryza sativa
  Clone ID: PAT_MRT4530_69974C.1
atggctgatcgcgatgaggaacagatactgtacgatacaatcgcatcgggaagcagccagtactggaacgaagaagaggggaacgaggatccaaaccagtacttgaacgaggaggggaacgcggagagggatgcagaggggaacgaggaggggaacgtggagagggatgcggaggggaacgaggagaaggctagtggaagtcatccctccgctggacagaagagggcacgcggacaacgaggtgccgcgaagaagatagagggtcggcacatcataactgaggtggacgcagacggccgacctagtgccccggcacaagcagccaagaatttcgtacgccacagcggttgggttgtgagggataacgtgcctgtcagcaaggtgtactggcacagaacaagggcacgcgggggtgatgacagctttgtcccggaatcagagaaagagatgctgtggaccacaatgctcgagacgttcacgctccctgcgggtacagagaacatagtgaaacagtggactcttaagaaaatggcagaacagttccagaccttcaagggagatctgtaccggaaatacatcttgaaggggcagacaccgaactttgacgtattcccgaagctaagggatcacttggacgagttcgttgcttacaagacaggtcaacaaggcgtcgcgatgccgaagtgggaggagatggaggcaagcttgcttgagaggggtatcgaaccggccaccgctaaatggcctgatcgatcgaagttctggtactatgctcacggtggaacgctcaacccagttgatggctccttggtcttcagcgatcagatacgcgaggctgcgaatcgactaacggacgcagtggaagcctcttctcagggcacgttccgacccgacagagagaaggacgagctgtcactcgccctacaaactcccgagcatccaggacgaacacgagggaaaggcgtgattccctggaagattggattcaaggaggacatccacacgtacaggagtcggatgaggagcaagagagataccgaggcgaagattgcagatcttgagtacagggtatcgagctacgagctcagcatgcaagagaaggtggcccggaaggtggatgaacgcatggcagtacatcggtcacatgatccccagccgtacatacctcctccaatggtcaacccatcaggcaatcgtagcagctgcgcctcaacggggcaggtagtatcacatagcatggacgccatgcaaacccaggacgaaaccacctgccccgttgatgagatcacgcattggacaccatgtgagctgcatattcccttgaagaacttatcaatcaaggtggcgtcgggaatggccatcccaacagacatttcagggacttaccactgcaggccgattccagcaagatactcgagggtcgaagttgagctggtgaaagccgtgtacgaggacctcgagttggactacccaggaggagacggtgagacgcatctacgagacacaagccacgccattatactatggcgcaagcggtacatcatcctccctgggcgacaagcggcgtctcgtgcaccatctcctccggctccgccgtctcctcctgcaccaactcctccggctcctccgccacctcctcctgcaccatctcctctggctcctctgccacctcctcctgcaccatctcctccgcctcctccgcctcctccgcctcctcctccaccgtgtccgcctgcacctcccaagacaaggtctcgccaagctccacctcctgccagcaaaagggcaacgaagaaggccaaagttgacaccaccaaaaacaaggagccgctgtacggttgcagtcaagaggagcttgacgcttatgtggcaggagaagtgaagaggcaactcaagcctcggagtcctgaaaagaagatacctattgacctgagcgtgaagaatttcttcaagggaatgtccaccgcaaacaaggaggccttaaagctatcggattgtgaccgaacacttaggaaagcctattacaagaagtccaaaccagttcctcagcttggagaacaaccacaccaagtggtcgagccgttggtgaccagcgaagactttggcataacggatttcatttcggacaccggtctaaccatggctcagttggttggagccgcaccaatcccgaaggcggaagtggcatacaagtttgaactcggtaaaccgcttgtcagacctgagcagctgcagtccctactgacacaaatgtacaaattccatgaacggtacatggaaatgagcgccaatggtagagagatgttcggagcgaggatcagaaaccctgacttcttgcaaggagaagatgttctatggatccatttcaaggatgtcttcgatctgtaccatcgggatgccctcgacgtctctcttctgagcgcatggattttaatggagattcaaagggcccgacggcggggggtttacgatactgggttcatcgaccctcggaaaatcaacaccgaaatgctcgacaagtacgagaaagacacagaggacaatctcgtccatctcctaacgcagcagcatttcaagacgttcatactattgccgtacaacacagaagtcactgtgtatgactcaatgaataaagaggagaaggttttttacaaggtcttccaactgatagacagggcttgggatcggttccgtcaattggtccgcgggacttggaaagaaaaacttggacagaggtttcattttccatgcgcaaagcaggacatgggaactaacttatgcggctactacgtatgcgagtatgcccactgcctatcaaaccaaagatacaccacacgagagctcgatcgtattcacatgagggaaaaactcccacacaaggattttatcacggctgttcaagaacaactgatggggttcatcaatgaagaagtccttaatcccgatggtgaattccactacgacggatcgacaattcgtaacgtcggtccttcctcttctgacgtaacgcaggtgtcgaagtcgtaa

SEQ ID NO: 69292 - DNA, 464 bp, Oryza sativa
  Clone ID: PAT_MRT4530_69975C.1
ttttgtttttttaattttttggggttttatttttttttttttttcttttttttattttttgacttcatttttttttactcttgctttttgtggcccccccccctttccacctggaggaccaaaaggggaatggataaaaggccaaggttaaaaacctagaaaaaaacaaacacttaaatgcccccttacaaaaaccccgggggccccaaacaaaaaaccaccatttttcaaccccaaaaattataaatggaaggggatgaaaaaaaacccaagaagcggcaccagaaaaaccccttaaatttttaaacactcccaaaaaaaaaaaaaaggggagcccttttgggggcaaaccaaagttaagttaaaagtcctttcctcgaggggggggattatataaaaaccggaaaacgccccggacggggtttggggaacccaccttggccgggacaaggtttattgggggg

SEQ ID NO: 69293 - DNA, 2553 bp, Oryza sativa
  Clone ID: PAT_MRT4530_69976C.1
atggatatctctgaggcaaatgaaggctacgcgagctgcggctcggtaatcgagatgtctaggcaaatgaagactacacggcaactaaaatgtggaatggttggcctgggttggcttgggacgagctggaacccaggtcgggttgccagttcggtccaaatcatcgtaggccttgggtcaaggcaggcaattttcccggtcgcgacacagaccttcaagggagatctatacaagaaatacatcctgaagggactaacaccgaacttcgacgtattcccaaagctaagggatcattgggacgagttcgttgcttacaagacagggcaacaagggcaagcgatgatggtcaaaaacaaggaaaacgctgccaagaagaagtaccatcatcacttggggtcaggcggctatagcgtcgcaatgccgaagtgggaggagatggaggcaggcttgattgagaggggtatcgaaccggccaccgctaaatggccggatcgatcgaagttctggtactatgctcacggtagaacgcttaacccagttgatggctccctggtcttcagcgatcagatacgcgaggctgccagtcgactaacagacgcagtggaagcctcttctcagggcacgttccgacccgacagagagaaggacgagctgtcactcgccctacagactcccgagcatccaggacgaacacgagggaaaggcgtgattccctggaagatgggattcaaggaggacatccacacgtataggagtcggatgaggagcaagagagataccgaggcgaagattgcagatcttgagtacagggtatcgagctacgagctcagcttgcaagaggaggtggcccggaaggtggatgaacgcatggcagcacatcgttcacacgatccccagccgtacatacatcctccaatggtcagcccatcaggcaatcgtagcagctgcgcctcaacggggcaggtggcgtcgggaatggccatcccaacagacatttcagggacttaccactgcaggccgattccagcaagatactcgagggtcgaagttgagctggtgaaagccgtgtacgaggacctcgagttggactacccaggaggagacggtgagacgcatctacgagacacaagccacgccattatactatggcgcaagcggtacatcatcctccctgggcgacaagcggcgtctcgtgcaccatctcctccggctccgccgtctcctcctgcaccaactcctccggctcctccgccacctcctcctgcaccatctcctctggctcctctgccacctcctcctgcaccatctcctccgcctcctccgcctcctccgcctcctcctccaccgtgtccgcctgcacctcccaagacaaggtctcgccaagctccacctcctgccagcaaaagggcaacgaagaaggccaaagttgacaccaccaaaaacaaggagccgctgtacggttgcagtcaagaggagcttgacgcttatgtggcaggagaagtgaagaggcaactcaagcctcggagtcctgaaaagaagatacctattgacctgagcgtgaagaatttcttcaagggaatgtccaccgcaaacaaggaggccttaaagctatcggattgtgaccgaacacttaggaaagcctattacaagaagtccaaaccagttcctcagcttggagaacaaccacaccaagtggtcgagccgttggtgaccagcgaagactttggcataacggatttcatttcggacaccggtctaaccatggctcagttggttggagccgcaccaatcccgaaggcggaagtggcatacaagtttgaactcggagaagatgttctatggatccatttcaaggatgtcttcgatctgtaccatcgggacaccctcgacgtctctcttctaagcgcatggattttaatggagattcaaagggcccgacggcggggagtttacgatactgggttcatcgaccctcggaaaatcaacaccgaaatgctcgacaagtacgagaaagacacagaggacaatctcgtccatctcctaacgcagcagcatttcaaaacgttcatactattgccgtacaacacagaattccactgggtcctgttctttttcaacttggacgcatacagagtcactgtgtacgactcaatcaataaggaggagaaggttttttacaaggtcttccaactgatagacagggcttgggatcggttccgtcaattggtccgcgggacttggaaagaaaaacttggacggaggtttcattttccatgtgcaaagcaggacaagggaactaatttatgcggctactacgtatgcgagtatgcccactgcctatcaaaccaaatatacaccacacgagagctcgatcgtattcacatgagggaaaaactcccacacaaggattttatcacggctgttcaagaacaactgatggggttcatcaacgaagaagtccttaatcccgatggtgaattctactacgacggatcgacaattcgtaacgtcggtccttcctcttctgacgtaacgcaggcatcgaagtcgtag

SEQ ID NO: 69294 - DNA, 147 bp, Oryza sativa
  Clone ID: PAT_MRT4530_69977C.1
atgaccaatgaggtggccggcaacgaggagcgtgaggacgaggcggacaacgaggggccggtcgtagggatgaggcggcgaatgacgagccggcgtggagatgaggcagcggatgatgagggggcgcagcaacgaggcagacaatga

SEQ ID NO: 69295 - DNA, 569 bp, Oryza sativa
  Clone ID: PAT_MRT4530_69978C.1
ttcttttttttttttttttttttttttttttttttttttttttttttttttttttttttttggaggggcccattttttatttgggatggggctgaaaaaaccaaaaaagcccccccttgacttttacatgaaggccccacccaaaaaaaaacgggcgaccaaaaaaaagtctccaaaattcactagcttgggggaacgtcctagttaaacattttccccttttcattagggagggggtttttgatgattgattgattgcccctgctggaagcatttttggggacaatttaccctgggttttggatgccggcagaaatgcccttaattgtaaggatgagggggtcctccaggccaggggcgtactctttcgcagggttaaattggaccaccttggcgggttggttgttttcaacaaactcttttaaaagggccggttgggacatcacctgaaagttgggggcccttatccgtttaagggggggggcttggcaaacgttcaagggggggatgtacaattcacccagccgcaaaccctgtttaaggaaaggacccccttccaaaatttcctt

SEQ ID NO: 69296 - DNA, 2853 bp, Oryza sativa
  Clone ID: PAT_MRT4530_69979C.1
atggctgatcgcgatgaggaacagatactatacgatacaatcgcagagggaagcagccagtactggaacgaagaagaggggaacgaggatccaaaccagtacttgaacgaggaggggaacgtggagagggatgcggaggggagcgaggaggggaacgatgaggaggctagtggaagtcatccctcctacggacagaagagggcacgcggacaacgaggtgccgcgaagaagatagagggtcggcacatcataactgaggtgaacgaagacggccgacctagtgccccggcagaagcagccaagaattttgtacgccacagcggttgggttgtgagggacaacgtgcctgtcagcacgctttgtcccggactcagagaaagagatgctgtagaccacaatgctcgagacgttcacgctacccgcgggtacggagaacatagtgaaacagtggactctgaagaaaatggcagacagttccagagcttcaagggagatctctacaagaaatacatcctgaaggggcagacaccgaacttcgacacattcccaaagctaagggatcactgggacgagttcattgcatataagacaggtcaacaagggcaggcgatgatggagagaaacaaagaaaatgctgccaagaagaagtaccatcaccacttggggtcaggcggctatagcgtcgcaatgccaaagtgggaggagatggaggcaagtttgattgagaggggtatcaaaccagccaccgctaaatggccggatcgatcgaagttctggtactatgctcacggtggaacgcttaactcagttgatggctcccttgtcttcagcgatcagatacgcgaggctgccagtcgactaacggacgcagtggtagcctcttctcagggcacatttcgacccgacagagagaaggatgagctgtcactcgccctacagactccagagcatccaggacaaacacgagggaaaggcgtgattcccaggaagattggatttaaggaggacatccacacgtacaggagttggatgaggagcaagagagataccgaggcgaatattgcagatcttgagtacagggtatcgagctacgagctcagcatgcaagaggaggtggcaaggaaggtggcgtcgggaatggccatcccaacggacccttccgggacttaccactgcaggccgattccagcaggatactctagggtcgaagttgagctggtggaagccgcgtacgaggacctcaagttggactacccaggaggagacggtgagacacatctacgagacacaagccacgccattatactatggcgcaagtggtacatcatcctccctgggcgacaagcggcgtctcgtgtaccatctcctccggctccgccgtctcctccgtctcctcctgcaccatctccttcggttcctccgccacgtcctcctgcaccatctcctccggctcctccgccacctcctcctgcaccatctcctccggctcctccgcctcctccacctccacctctaccgtgtccgcctgcacctcccaagacaaggtctcgccaagctccacctcctgcccgcacaagggcaacgaagaaggtgaaagttgacgccaccaaaaataaggagccgccgtacgattgcagtcaagaggagcttgacacttatgtggcaggagaagtgaaaaggcaactcaagcctcggagtcctaaaaagaagatacctattgacctgagcgtgaagaagttcttccagggaatgtccaccgcaaacaaggatgccttaaagctatcggactatgaccgaacacttaggaaagcctattacaagaagtccaaaccagttcctcagcttggagaacagccaaaccaagaggtcaagtcgttggtgaccggcgaagactttggcataacggattttatttcggacaccggtctaacggtggatcagttggttggagccgcaccaatcccgaaggcggaagtggcatacaagtttgaactcggtaaaccgcttgtcaggcctgagcagctgcagtccctaccgacacaaatgtacaaattccatgaacggtacatggaaatgagcgccaatggtagagaggtgttcggagcgaggattagaaactccaacttcttgcaaggagaaaatgttctatggatccatttcaaggatgtcttcgatctgtaccatctggacgccctcgacgtctctcttctgagcgcatggattttaatggagattcaaagggcccgacggcggggggtttacgatactgggttcatcgaccctcggaaaatcaacaccgaaatgatcgacaattacgagaaagacacagaggacaatctcgtccatctcctaacgcagcagcatttcaagacgttcatactactgccgtacaacacagaagtcactgtgtacgactcaatgaataaagaggagaaggtttttgaccaggtcttccaactgatagacagggcttgggatcggttccgtcaattgtgtgcaaagcaggaccagggaactaacttatgcggctactacgtatgcgagtatgcccactgcctatcaaaccaaatatacaccacacgagaactcgatcgtattcacatgagggaaaatctcccacacaaggattttatcacggctgttcaagaacaactgatggggttcatcaacgaagaagtccttaatcccgatgtagcagtagcagtagcaggtgtccttcggattgggatgcttccttcagggcacctaccgcttcgatgccatgcctgctccgcgaatttgaacgagttgtttcttcccaacaccatcatcttctcaactatcttgggacgatccacgcttggtttcaactga

SEQ ID NO: 69297 - DNA, 1660 bp, Oryza sativa
  Clone ID: PAT_MRT4530_6997C.1
gctgcaagtattcagctcccgggggcagccgtgatctttgcgagcattctttctgccacttagctgccgtgggtcggtcccacgaggaggtcctcccgctcgaacgggcggcggacgcggcggaagggcctcgtggaggccatcggaaacacgcctctcatccgcttcaacagcctctccgacgccacagggtgcgaggttgggttgcagatcctggggaaggccgagttcttgaatcccggaggcagcgtgtctggaagttcgtgagttaagataatcgttgaggctcaggaaactggtgatcttctttgtggaggatcagtagcagacccgagtgcttgaagaatagcgattagcttggccatagttgctctcacttatggatgcaactgcctgcttcttattactggtaaagctgcctttgagaaggtagtaagtcacttatcattcaaaattgttataaaatataatctgaagtaatcgcggcgctcggggccacagttagacgagtgtgccctgcttctagtacacatagggaccatttggtcaaatttggtagaagatgggctttagatgtaaacacatcggaagcggcccagagagagtcaaggtacaaagaaactaatggttcagcgcatgtcaatactagaataatgcacagcaagataacagcaagcaaaggggagtcaaacaaggcactaactggaggtttctttgctgaccaatttgagaatatggcaaactaccgagcccattatgaatggactggtcctgagatatggcaacaaagtaaagggacactgcatgcctttgttgctgcagctggcactggtggcacaattgctggagtctcacggtatcttaaggaaaagaacacaaacatcaaatgcttcttaatggacccacctggatctggtctgttcaataaggttactagaggggtgatgtacacaaaagaggaagctgagggcaaaaggctgaagaatccttttgacactattactgaaggaattggaatcaacagggttacaaaaaattttatgatggcggaactggatggagcttaccggggaacagatagggaagctgttgagatgtcaaggttcttgttgaaaaatgatgggctgttcgttgggagttcttcagccatgaattgtgttggtgctgtaagagttgctcaagatttaggtccaggacatacaattgtgacaattctctgtgacagtgggatgaggcatctaagtaagttcttcaatgaccaatatttggctaaccatggcctgacaccaacagctaccggtctggaatttcttgattgatgagaaaatttcatggggaatatacagtctcagcaagtttttcatgatgtgatgtctgccctgatagctggtgaatactgacgagctggaacatagcagatctcatccagcaagagaactgcttgcatctctggattggtacaaaaattttgtcgtacggctttaagttatcctcaaaatacattgtgatgtattttaattagctggcatccccattgataggggctggtatagccaaacctgcatttcttgtagttttggcatatttcattaggatgtattcagtaaactgtaaaaggatgtttttttcccactgaatcttatattagtgttttttggct

SEQ ID NO: 69298 - DNA, 2607 bp, Oryza sativa
  Clone ID: PAT_MRT4530_69980C.1
atggctgatcgcgatgaggaacagatactatacgatacaatcgcagagggaagcagccagtactggaacgaagaagaggggaacgaggatccaaaccagtacttgaacgacgaggggaacgtgcagagggatgcggaggggaacgaggaggaggctagtggaagtcagccctctactggacagaagagggcacgcggacaacgaggtgccgcgaagaagatagagggtcggcacatcattactgaggtggacgaagacggccgacctagtgcaccggcagaagcagccaagaattttgtacgccacagcggttgggttgtgagggacaatgtgcctgtcagcacggtgtactggcgcagaacaagggcacgcggggatgatgacagctttgtcccggactcagagaaagagatgctgtggaccacaatgctcgagacgttcacgctacccgcgggtacggaaaacttagtgaaacagtggactctgaagaaaatggcagaacagttccagagcttcaagggagatctctacaagaaatacatcctgaagggactaacaccgaacttcgacgtattcccaaagctaaggaatcattgggacgagttcgttgcttacaagacagggcaacaagggcaagcgatgatggctagaaacacagaaaatgccgccaagaagaagtaccatcaccacttggggtcaggcggatatagcgtcgcgaagctgaagtgggagaagatggaggctagcttgcttgagaggggtatcgaaccggccaccgctaattggccggatcgatcgaagttctggagtcggatgaggagcaagagagataccgaggtgaagattgcagatctggagtacagggtatcgagctacgagcttagcatgcaagaggaggtggcaaggaaggtggatgaacgtatggccgcacatcggtcccaggatccccagccgtacattcatcctgcaatggttagcccatcaggcaatcgtagcagctgcgcctcaacggggcaggtcggatcacagagcatggacgccatgcaaacccaggacgaaacctcctgccccgttgatgagagcacgcagcggacaccatgtgagctgcatattctcttcaagaacttatcaatcaaggtatgctcgccgattccaacaggatactcgagggtcgaagttgagctggtggaagccgcgtacgaggacctcgagttggactacccaggaggggacggtgagacgcatctacgagacacaagccacgccatcatactatggcgcaagcggtacatcatcctttctgggcgacaagcggcatttcgtgcaccatctactccggctcctccgccacctcctcctgcaccatctcctccggctcctccgccacctcctgctgcaccatctccttcggctcctccgccacctcctgctgcaccatctcctccggctcctccgtctcctctgcctccaccgtgtccgcctgcacctcccaagacaaagtctcgccaagctccaccgcctgcccgcacaagggcaacaaagaaggcgaaagttgacgacatcaaaaacaaagagctaccgtacgattgcagtcaagaggagctcgatgcttatgtggcaggagaggtgaagaggcaactcaagcctcggagtcctgaaaagaagatacctattgacccgagcgtgaagaacttcttcaaggcaatgtccaaaacaaacaaggaggcgttacagatatcggactatgaccgaacacttcagagagcctatcacaagaagtccaaaccagtccctcagcttggagaacaaccaaaccaagaggtcgagccgttggtgaccggcgaagattttgacataacggatttcattgcagacaccggtctatctgtggatcagttggttggagccgcaccaatcccgaaggcggaagtggcatacaagtttgaactcggtaaaccgcttgtcaaacctgaacagctggagtccctaccgacacagatgtacaaattccatgaacggtacatggaaatgagcgccaacggtagagagatgttcggggcgaggatcagaaaccccgacttcttgcaaggagacgatattctctggatccatttcaaggatctcttcgatctgtaccagttggacgccctcgacgtctctctcctgagcgcatggattttagtcactgtgtacgactcaatgaataaagaggagaagatttttgacaacgtcttcaaactgatagacagggcttgggatcggttccatcaattggtccgcgggacttggaaagaaaaacttggacggaggtttcattttccatgtgcaaagcaggaacagggaactaacttatgcggctactacgtatgcgagtatgcccactgcctatcaaaccaaatatgcacaacacgagagctcgatcgtattcacatgagggataatctcccacacaaggattttatcacggctgttcaagaacaactgatgggattcatcaacaaagaaatccttaatcccgacggtgaattctactacgacggatcaataatacataacgtcggtccttcctcttctgacataacgccggcgtcgaagtcgaagtcgtag

SEQ ID NO: 69299 - DNA, 381 bp, Oryza sativa
  Clone ID: PAT_MRT4530_69981C.1
atggagattcaaagggcccgacgatggggggtttacgatactgggttcatcgaccctcggaaaatcaacaccgaaatgctcgacaaagtcactgtgtatgactcaatgaataacgaggagaaggttcttgacaaggtcttccaactgatagacagggcttgggatcgattccgtcaattggtccgcgggacttggaaagaaaaacttggacagaggtttcattttccatgtgcaaagcaggacaagggaactaacttatgcggctactacgtatgcgagtatgcccactgcctatcaaaccaaatatacaccaaacgagagctcgatcatattcacatgagggaaaaactcccacacaaggattttatcacggctgtttaa

SEQ ID NO: 69300 - DNA, 377 bp, Oryza sativa
  Clone ID: PAT_MRT4530_69982C.1
gtttgtgtgtgtgtttgtgctgatttgggcattggtgttggtggtggaggaggatggggaactgcgtggcgaggagcgggacggcggtggatgcggctggtgatggaggggaggatggcaagaggccgaggaggaggtgaaattcaccgacaggcaatgccatcgggaggtgcaggacaccccgctggacgcctgccgccaggtgctcgaccggcagctcaccgcccgggagaggctccagccgatgttccgccgccccgtcccgctctgcctgcggatgcgctgctaccaccacctgccgctcttcttcctttagtgccgccgcgccgccctccgtcacatggtgaggcgctacgaccagagcatgcctgatcccc

SEQ ID NO: 69301 - DNA, 3100 bp, Oryza sativa
  Clone ID: PAT_MRT4530_69983C.1
ttataggttgcaataccctacccgcaccacaaccaacaccccaaagccatcgtccacgacatcgtcgtcctcgccgccgccaccatcatcgacatgcaccacctcgtcgtcctcctcttcctctctgcactcgtttttgtcgtcgatgtcgaccacctccccatcgtcttcgtcgtcatcatatacctcaacctcttctctgtcgtcgttgtgcacatggttaaggcggccaacatcatcggggtcaaggagaagggattgtccctcctcgtcttcttcggcgatctattttttttttttcctttttttttttagcatgtcaagagtagtatctttattgagaagcaaaagcaagcggcaaaaccattacacactgcttgctgggcaccgtcccatggccgaacgtgaaaaacatagcccaagagagtagtacaatttacagcagcagtagcatatctccctcaattatacactcaccactcatcgtcacagcacaagcactaggtttttggtcatgctaaggaatgaaatttctccagagctagcacctaaaacctttttccgtttcggaggaaatcagctcaggttttctgacgtggcatggttacaacaaggtttcttgcttgtttctgcaagagaaaccagtcatggtcctcatggagttcaccaaatttacaatgacaggcttggaggcgacgagaagatgtcggtgaaggcttttttttactggatgatcattgttcacagttcatggcgcggattgctgatgcgaagagatcaatcttccatcttctctttgctcaagcagtgtttgattctgcaagcttcaatggcccgaggtgcaatggcggctgctcacatgaaaccatcgtcggcattgtccaagcagtgttcaagcaccatgcgtactctaagcttgcaatccaagcagggatcatttatcatgccttttacttgtgaaattaccccagcattttggagtctgacaactcgaacagaagaggcctcacattttggataaatcaagttcagaacacaccacaaggttgcaactctcaattgtttgtccttgctcagcagaaagttaactataaaagattgtttgacacgatctgctcgacgaggtacaagaatattcatcacagcctccttgtttaattcgcccccagctgcaacatttgcaagcacaaacataccctgtatgcatactcctggggcaggtgcattattcagttgtcttgaaatagcatttaaaatcatgccatcttcaccaatgacataattaaaagagttcacatatccatcaacaagattgtgcaccagtgccaaagtttgttcctggacaaaatgttcagaatcacatatgaggcttgaaagagtagataaagttagttccttgagaataaagtctttatcctttggattcaaaaggaacataatattcctaagagcccacacagcttttaatctcaatgttggatccatagacttggacaaatgaacaagctgggagacagccccagattgaagaagaatcgatttcctgggtgttaaattcacagcaatattgcaaatagcaccaagggcagcaacctgaactgacatagacgagtcatacaaaagctggactagtggggcaataaatgtatcacaggataatttcccagcactaagtaccttggatgacctagagatattcttaagacatgaacatgctgcaacacggatatcaacagaagcatgcttcagtgcatcaaggattaaggtagatgcctgaactgacataagttgagatcttgattcttccaattttgagcaaagttcagctaaagcaagcaatatggtcactgcacgccttgactccaacgaatttgctataagatggttgcttaacttctgaactgcgtttgttgagagtgcttgcttctgcagttccacactgtctttgatcaaggttgtcaatgccaatggagcatcatctcctacatgaccaggttcctcgatgagctcaagtaagaccaggatcaacttggttttaatttgtctgtcttgaaagtgacagggagaagcatggctaagcgcaatcaagcacaaacaagcaagtagtcttgtgcgtgggctccgatcatgtattaatgcaactattgagcgcaaagcttttccatggtccagcagtgcaaatcttgaagcaacttcccagttatttcttatgattgcagtcaaagaatctaagcaagcatcccgtagattcatggagcctccaaaatggttaacaagtctctgcggaactccagcagcacatagtgctaattgttctgtagtgctatcacaagagtgagatataatattggcagcaagctctgtgacattttcattctcgctgttcaaaagggtaagaagaaattccatgtttttctcattattgttgacatcaaactttggagctagtttcgattgataaatcattctcagagcacgtgcactagcatcaacaaccttctcgtcggggtgggcgaggagccgcgtcaggtgggccacggccccggcggcgagcacggcccgcacgccgtcgtcgacgccgcacgcgaagctcccaacggcggcggcggcctgcacgagcgcggcgggggaggccccgggccccgcgagcgccgccacgacggcgggcacggcgccgaggcggaggtactggagcttcttggtccggttcccgatgatctggttcttgatctcccgcagcgtgcgcacccgctcgtgctccccctcctcctcccctcctccgccgcctccgccgcggccgcggccgcccccaccgacgggtcgccccccggcggcggcggccagcctcgccgtcagctcctccggcctcgtgcccatgcagtaggacgcggtcggcgacggcggcgaggccgaggccgccgcctcctccggccgcgcaccgccgctcgccgtggccggcatctggtgggggagggtgggcgaaaggtgtttgatttatttctcctcttttttttttgtattttccgagcgattttttcctatgtggttttaaactcttaatcttcatgctcccattgtctgtatctgcagtcactgtcat

SEQ ID NO: 69302 - DNA, 2160 bp, Oryza sativa
  Clone ID: PAT_MRT4530_69984C.1
atgacctatgaacttagcaaatatttcttctatgaacagatggctgatcgcgatgaggaacagatattgtacgatacaatcgcagagggaagcagccagtactggaacgaagaagaggggaacgaggatccaaaccaatacttgaacgaggaggggaacgtggagagggatgcggaggggaacgaggaggggaacgtggagaggcatgtggaggggaatgaggaggaggctagtggaagtcatccctccgctggacagaagagggcacgcggacaacgaggtgtcgcgaaaaagatagagggtcggcacatcattactgaggtggacgaagacggccgacctagtgccccggcggaagcagccaagaattatgtacgccacagcggttgggttagaaagagatgctgtggaccacaatgctcgagaagtcacgctccctgcgggtacggagaacatagtgaaacagtggactctaaagaaaatggcagaacagttccagagcttcaaggagatctctacaagaaatacatcttgaagggactaacaccgaacttcaacgtattcccaaagctaagggatcattgggacgagttcgttgcttacaaggcaggccaacaagggcaagcgatgatggtcaaaaacaaggaaaacgccgccaagaagaagtaccatcaccacttggggtcaggcggctatagcgtcgcaatgctgaagtgggaggagatggaggcaagattgattgagaggggtatcgaaccggccaccgctaaatggccggatcgatcgaagttctggtactatgctcacggtggaacgcttaacccagttgatggctcccttgtcttcagcaatcagatacgcgaggctgccagtcgactaacggatgcagtggaagcctcttctcagggcacgttccgacccgacagagagaaggacgagctgtcacttgccctacagactcccgagcatccaggacgaacacgagggaaaggcgtgattccctggaagattggattcaaggaggacatccacacgtacaggagtcggatgaggagcaagagagataccgaggcgaagattgcagatcttgagtacagggtatcgagctacgagctcaacatgcaagaggaggtggcaaggaaggtggcgtctggaatggccatcccaatggacatttcagggacttaccactgcaggccgattccagcaggatactcgagggtcgaagttgagctggtggaagccgcatacgaggaccctgagttggactacccaggaggagacggtgagacgtatctacgagacacaagccacgccattatactatggcgcaagcggtacatcatcctccctgggcgacaagcggcgtctcgtgcaccatctcctcggctccaccgtctcctcctgcaccatctcctccggttcctccgccatgtcctcctacaccatctcctccggctcctccgactcctccgcctcctccacctccacctccaccgtgtccgcctgcacctcccaagacaaggtctcgccaagctccacctcttgcccgcacaagggcaacgaagaaggcgaaagttgacgccaccaaaaacaaggagccgccgagaagtgaagaggcaactcaagccttggagtcctaaaaagaagatacctattgacccgagcgtgaagaagttcttcaagggaatgtccaccacaaacaaggaggtcttaaagctatcggactatgaccgaacacttaggaaagcctattacaagaagtccaaaccagttcctcagcttggagaacagccaaaccaagaggtcgagccgttggtgactggcgaagactttggcataacggatttcatttcggacaccagtctaactgtggatcagttggttggaagcgcaccaatcccgaaggcggaagtggcatataagtttgaactcggtaaaccgcttgtcaggcctgagcagctgcagtccccactgacacaaatgtacaaattccatgaacggtacatggaaatgagcgccaagggtagagagatgttcggagcgaggattagaaaccccgactttctgcaaggagaagatgttctatggatccatttcaaggatgtcttcgatctgtaccatctggacgccctcgacgtctctcttctgagcgcatag

SEQ ID NO: 69303 - DNA, 309 bp, Oryza sativa
  Clone ID: PAT_MRT4530_69985C.1
tgttttggaaaagccaataacagcagaggagatgactttacgacaacagatagtactgcaagctcagcagatgggtacgcgaacgattgaggatgccaaaacctcaccatctttggccagatgatctctgtccttgaaggagtcatatagaaggcaggagcaaagaactgacactaccaactcaaacacctggtggatgtgttacactgaggggcaacagctgcaaaaggtggaagtagagctataagtgaaggatgtctagggcacgccacatgacacgttagcatccaagaagtggatttagaattc

SEQ ID NO: 69304 - DNA, 1577 bp, Oryza sativa
  Clone ID: PAT_MRT4530_69986C.1
caaaattccacaagagccatgcgaggtagaggaacaggagaagacgcatacacacacgacacatagagagagaggacaaacacaatagcttggatcgatagacttgtccatgtggtgcaagctaaagctactactaccacaagcaaggctacttcgttcatgaattataattttggtggcaacgtgttcgaccaggaggttggagttggaggcgaaggaggaggaggaggagaggggagcggctgcccatgggcgcggccgtgcgacgggtgccgcgcggcgccgagcgtggtgtactgccgcgcggacgcggcgtacctgtgcgcgtcgtgcgacgcgcgggtgcacgcggccaaccgcgtggcgtcccgccacgagcgcgtgcgggtgtgcgaggcctgcgagcgcgccccggccgcgctcgcgtgccgcgccgacgccgccgcgctgtgcgtggcgtgcgacgtgcaggtgcactccgcgaacccgctcccggccatcaccatcccggccacctccgtcctcgctgaggcggtggtggccaccgccaccgtcctcggcgacaaggacgaggaggtggactcttggcttctcctctccaaagattccgacaacaacaacaacaataacaacaacaacgacaacgacaataacgacaacaacaacagcaacagcagcaacaacggcatgtattttggtgaagtcgatgagtactttgatcttgtcgggtacaattcgtactacgacaaccgcatcgaaaacaaccaagatcggcagtatgggatgcatgaacagcaagagcagcagcagcagcagcaggagatgcaaaaggagtttgcagagaaggaagggagcgagtgtgtggtaccttcacagatcacaatgctgagtgagcagcagcatagtggttatggagttgtgggagcagaccaggccgcctccatgaccgccggcgtcagtgcttacacagattccatcagcaacagcatatctttctcatcaatggaggcgggtatagtaccagacagcacggtgatagatatgccaaattccagaatcctgacacctgctggagcaatcaatctcttctcaggtccctcgcttcagatgtcccttcacttcagctccatggacagggaggccagggtgctcaggtacagggagaagaagaaggccaggaagtttgagaagacaatacgttatgaaacaagaaaggcgtatgcagaggcacgaccccggatcaagggccgtttcgccaagagatcagatgtgcagatcgaagtggaccagatgttctccactgcagctctatctgacggtagctatggtactgttccatggttctgatgggactcatgagacgctatcttataggcatatatatggggacttactgagtagcaataacatcgatccagtgggagtagttctagacaatctgtgttatgaataatagtgtgttgtttgcgacttaaaattgatcaagtaccttagctttttaaagttttgctttgtaatttccggatagcagatatatattgttggtacttgctcagtaaaaaaaaaaaaaaaaaaaa

SEQ ID NO: 69305 - DNA, 2043 bp, Oryza sativa
  Clone ID: PAT_MRT4530_69987C.1
atggcagaacagttccagaccttcaagggagatctgtaccagaaatacatcctgaaggggcagacaccgaacttcgacgtattcctgaagctatgggatcactgggacgagttcgttgcttacaagacaggtcaacaagggcaggcgatgatggaaagaaacaaagaaaatgccgctaagaagaagtaccatcaccacttggtgtcaggcggctatagcgtcgcgatgccgaagtgggaggagatggaggcaagcttgcttgagaagggtatcgaaccggccaccgctaaagggcctgatcgatcgaagttctggtactatgctcacgagaaggacgagctgtcactcgccctacagactcccgagcatctaggacgaacacgagggaaaggcgtgattccctggaagatgggattcaaggaggacatccacacgtacaagagtcggatgaggagcaagagagataccgaggcgaagattgcagatcttgagtacagggtatcgagctacgagctcagcatgcaagaggaggtggcccggaaggtggatgaacgcatggcagcacatcggtcacacgatccccagccgtacatacctcctccaatggtcagcccatcaggcaatcatagcagctgcgcctcaatggggcaggtggcgttgggaatggccatcccaacggacatttcagggacttaccactgcaggccgattccagcaggatactcgagggttaaagttgagctggtggaagccgtgtacgaggacctcgagttggactacccaggaggagacggtgagacgcatctacgagacacaagccacaccattatactatggcgcaagcggtctcgccaagctccacctcctgccagcacaagggcaacgaagaaggccaaagttgacaccaccaaaaacaaggagccaccgtacggttgcagtcaagaggagcttgacgcttatgtggcaggagaagtgaagaggcaactcaagtctcggagtcttgaaaagaagatacatattgacccgagcatgaagaatttcttcaagggaatgtccaccacaaacaaggaggccttaaagctatcagactatgaccgaacacttaggaaagcctattacaagaagtccaaaccagttcctcagcttggagaacaaccacaccaagtggttggaggcgcaccaatcccgaaggcggaagtggcatacaagtttgaactcagtaaaccgcttgtcaggcctgagcagctgcagtccctaccgacacaaatgtacaaattccatgcacggtacatggaaatgagcgccaatggtagagagatgttcggagcgaggatcagaaaccccgacttcttgcaaggagaagatgttctatggatccatttcaaggatgtcttcgatctgtaccatcgggacgccctcgacgtctctcttcttagcgcatggattttaatggagattcaaagggcccgacagcgggggttttatgatactgggttcatcgtccctcggaaaatcaacaccgaaatgctcgacaagtacgagaaagacacagaggacaatctcgtccatctcctaacgcagcagcatttcaagacgttcatactattgccgtacaacacagaagtcactgtgtacgactcaatgaataaaaaggagaaggtttttgacaaggtcttccaactgatagacagggcttgggatcggttccgtcaattggtccgcgggacttggaaagaaaaacttggacgaaggtttcattttctatgtgcaaagcaggacaagggaactaacttatgcggctactacgtatgcgagtatgcccactgcctatcaaaccaaatatacaccacacgagagctcgatcgtattcacatgagggaaaaactcccacacaaggattttatcatggctgttcaagaacaactgatggggttcatcaacgaagaagtccttaatcccgatgatgaattctactatgacggatcgataattcgtaacgtctgtccttcctcttctaacgtaacgcaagcgtcgaagtcgtag

SEQ ID NO: 69306 - DNA, 426 bp, Oryza sativa
  Clone ID: PAT_MRT4530_69988C.1
atgattcctaccaggtatgttatgtaacatggtatattggtgctacgtcaaattggcaggtgggagtctggtttttctgtttggtgcatgcagcatgtagtaaaatacataatcccagtcaaataaatgcgatttgcctgttgtctacttcatattaatgatgtgtgtacatgatttattataaaccgatgtttgtgataatgtgttagtgttttcttgaagccctttgcatatgcgcattaaatatttgtctgtttctctgggaccaattttttcatgctataactacgctcagcaacatgttgtttggtgtggggacttggtgttaagtttgcatttatttatttctggtccattgatgtgctggggtcttcgttcatttttagtttggggttttgcttttgcagaaaacgaactagaagaaag

SEQ ID NO: 69307 - DNA, 873 bp, Oryza sativa
  unsure (1)..(873): unsure at all n locations
  Clone ID: PAT_MRT4530_69989C.1
cccacgcgtccggcgctatcgtttgcacaagaagacgaagtcgtcgacggcgacgacacgatcgaatcgaattcgaagcaagcaaccggaggaggaggaggaggatcggagcagcagctgagcagacacagccgacgaggaggggatggggcagtgcgcgtgcttcggcggcggcggggcggagcgggagcggcgggcggaggccgagctcgccgagtcgaaggaggcgcgcgccaaggccgccgaggccgcgcagcggagacaggaggagtttgatagatcagccgctggaagagcagcaaaagcacagatgaaagctatgaaggaagctaagacatcatcaaaccaaggagaaccagttcttaagtggcagatgggatcgtaaattcttcgttggtgttgaccctgcatccttggcatgctgataatggtagacaagagcttgacagctcttgatttcagggaggattcagctgagtcattttctgatgtgtagttttgttgaagtgtgaattcccttgtcatgtgctgcacacacgttattcagatatatttgtccagctggggtgtttgttggaacagatcatgtacatttctgtagtagttttatatagtaattttttctctccttttgggaacatcgccctggatttcggagctggatttattttctccccccatgcaaaccatcagttcatagagaagtagaagaatagcaacactactggtactgaattctacagaaatttgtcaaatcatatcttgtataaagcacctcctgcagattcatgcagacattggtgaagctataagcctataagtctctgtaaaatagtttcagtttcttttctgcacaaaananaaaaanaaaaa

SEQ ID NO: 69308 - DNA, 265 bp, Oryza sativa
  unsure (1)..(265): unsure at all n locations
  Clone ID: PAT_MRT4530_6998C.1
aactttgattcatcataaagccaatctcttctagaataaatttcatactattatactttaatacatgatatggtctggttaaattaatttcctaataacattgaagtattaatcacaatatacccacaactttattatccagttagtaatttataaaaaagatgttcccttgccctttttgtctccaccaatcttnaaatgctttcacctctttatggggtgcttggattaatgctttcagcttttgcattcaccttcatcacaa

SEQ ID NO: 69309 - DNA, 229 bp, Oryza sativa
  Clone ID: PAT_MRT4530_69990C.1
gcggagcggaaggcgaggacaaagcgtgtggattccccgcgcatttgcgccgccgcggggggagggctgggaaatgctccggattccaccgtacggcccacaccgcagtgacgaggagggaaaggaaaacggcgagattgctaccttcccacgggtttgggccgtgtggagagcacacctggcctcgtcgcggtgtgggcctgatcctacagtatctttggttgcgtga

SEQ ID NO: 69310 - DNA, 650 bp, Oryza sativa
  Clone ID: PAT_MRT4530_69991C.1
tagtggatccccgggctgcaggtgtttttcaatgttctgaatattttattcagctgacacatggtttgctatttaacttatgatggaatcgatcctcccctttacttttgatggaatgatggctaaccatttgataattgtgttgtgaaaggtacttgagacaggtgatgacttaggagaggtaacagaaactgttgattactttgttcaagcaagcaccattgctgctggcaacttgtttgggaggtatacaactgctaatatttctgtaatttatatcaattatgtaaatagtagtttggcattatctgctgtggaacagatagattttgcatctgtcttatagttatgacaactatctcatgtggattgagcaacctgggtttcagggtatgtctaatttgtcatgacattactccaactatctcttctcatgtgtgcgtctaatgaatgtgtatgtttagtgctcttccataatttgttttcctacatttcacatcatctgacggctttcataaaacatgaatgaagatttgaagatgttaaaaatctaaaggttcactggtacgccagccaactgccttacctgtatgtgatacatacataatgatgcagcaagccagcaatacagtgtattgccaaagtgttgg

SEQ ID NO: 69311 - DNA, 522 bp, Oryza sativa
  Clone ID: PAT_MRT4530_69992C.1
atgctgaggcgcggcgcggtggtggtggacagagacggtgaggtggtcgtcgcgaccaagatccggaagcggtgcgcgctgtcgtcgtccggcgcgtcggacccgctgaggaagctgaggctgaagaagcgaggggtggtggtgctcggccggagaggcgtgggcggcggcggcggcgtcgtgttgtcgccgtggtcgagcaggaagatgtcggagtcgtcgtggaacggcaggcgctgccacggtggcgccgccgccgccgccgcggacgacggcacgcgctcggcggcgtcggccaggaagctcgtcggcgcgctccggcagctgagctcgcccgacgacgaagatgccgctcgccggagctcggctcaccggcgatgcgtgtcggtggagttctcaaagagatcaagaacaaggagcaaggcatcggaggctgatggacagagaagctggcacaacggccatggccactggtttccagacatgctcagcaatggcagcacaatggagaactctatttag

SEQ ID NO: 69312 - DNA, 287 bp, Oryza sativa
  Clone ID: PAT_MRT4530_69993C.1
atacatacgaacagacgaagactattccaaactttattacatgacacacactaggaagagagacgctgtatttatccaactatatctatatgaaggtgcacactacccagaaccggaatgaccagtaagagctttgcatggagtgctgcaaggcctatggtagactccacacatcgtgggcacatggagagccacctgctcctggacctgatgttggggctcaccaacaaagccagcattaaactgtacttgctgcatgatatactgttccatggagcacattgtct

SEQ ID NO: 69313 - DNA, 255 bp, Oryza sativa
  Clone ID: PAT_MRT4530_69994C.1
atagaggacacgtcggtagtggcggcggcggcagctcagatcgaggaccgcgcggtggcgcagactgaggacaaccccggcggtggggagtggaaaaaggttttgacgacaacggcggaagcgccggggtggtggcttgaggaagaggcgcccacgaaggcgatgtgtttgggcaccgcaatgcccaagccgcacgacgacacagcactagctgctgcagcaaagcaaaaccacacccacgacgacgcggcggcg

SEQ ID NO: 69314 - DNA, 465 bp, Oryza sativa
  Clone ID: PAT_MRT4530_69995C.1
aagaataataggctgcactatacattggtgggatcacattgaccacagacatactgaccaggacccaagctattagataaatatgtactacggacacatacttggagcctgcacaagaaccaaaaacaatgcgaagcggtatcacggctatatactatgagaggagaactaagacatgggataaactagaacgcacatgacggcactgatggagccatgacacgtagtggacctcgctcatggagcgcttagcgatgactttctatgctggtgatcaggctgaggatatactggaacgactcgaggatgtcaaggctaaagctcaacctaggccctgatgtggatcctgtagccgaaggggtttatcaacttctctgtgacgccgatgatgaaacctgagaaaactaaaagtacaaggccaccaaacattgcagccgggccatagccgaacgggaagaacacctg

SEQ ID NO: 69315 - DNA, 798 bp, Oryza sativa
  Clone ID: PAT_MRT4530_69996C.1
atgccgatcatcagtgatgaggagtccaggatggtgaaggactccatccatagattgtgttggcatcaaccactacacctctttctacatgaaggatcccgggccatggaacctgacgccgatgaacgaaatggcgtgcccattggagctcaagaaaactcctactggctttacattgtgccatggggaatcaacaaggctgtgacctatgtaaaggaaacatatggaaaccctatgatgatcctttctgaaaatgttactaattcggcaattctattagaattatccctgtttctcctaataataatcttgttgacaatgaaaagtagtattaaacaagggttactttatgatcaatgttatgctcttgcaggaatggaccaacctggcaacttcaatatcacccagggtgagcatgatactgcaagaatcagatattacagagattacataactgagctcaagaaggtgatagacgatggtgccaaagtgattggatactttgcttggtcactgctcgacaacttcgagtggaggctcgggtacacatcccgtttcggtatcgtctatgtggagttgtggactatagtctataagacgttaaagagttacccccaaggactcaagcgttctggttcaagaacatgctctccagaaagaagaggaactaaagtatgcagactaattatcaaagcctcaaaggcttccagccttccactgtcagaattcagaacaaagctcactctagcgtatgctcatcttagcacgttagtagctataattaaatgtgaaaaataa

SEQ ID NO: 69316 - DNA, 2103 bp, Oryza sativa
  Clone ID: PAT_MRT4530_69997C.1
atggctgatcacgatgaggaacatatactgtacgatacaatcgcatcgggaagcagccagtgctggaacgaagaagacgggaacgaggatccaaaccagtacttgaacaaggagggaaacgcagagagggatgcagaggggaacgaggaggggaatggggagagggatgcagaggggaacgaggaggaggctagtggaagtcatccctccgctagacagaagagggcacgcgaacaacgagatgccgcgaagaagatagagggtcggcacatcataactgaggtggacgcagacggccgacctagtgccccggcacaagcagccaagaattttgtacgccacagcggtacagagaacatagtgaaacagtggactcttaagaaaatggcagaacggttccagaccttcaagggagatctgtaccggaaatacatcctgaaggggcagacaccgaacttcgacgtattcccgaagctaagggatcactgggacaagttcgttgcttacaagacaggtcaacaagggcaggcgatgatggaaagaaacaaagaaaatgctgccaagaagaagtaccatcaccacttggggtcaagcggctatagcgtcgcgatgccgaagtgggaggagatggaggcaagcttgcttgagaggggtatcgaaccggccaccgctaaatggcctgatcgatcgaagttctggtactatgctcacggtggaacgctcaacccagttgatggctccttggtcttcagcgatcagatacgcgaggctgtgaatcgactaacggacatagtggaagcctattctcagggcacgagtcggatgaggagcaagagagataccgaggcgaagattgcagatcttgagtacagggtatcgagctacgagctcagcatgcaagaggaggtggcccggaaggtggatgaacgcatggcagcacatcggtcacacgatccccagccgtacatacctcctccaatggtcagcccatcaggcaatcgtagcagctgcgcctcaacggggcaggtagtatcacatagcatggacgccatgcaaacccaggacgaaaccacctgccccgttgatgagatcacgcaacggacaccatgtgagctgcatattcccttcaagaacttatcaatcaaggtagcgtcgggaatggccatcccaacagacatttcagggacttaccactgcaggccgattccagcaggatactcgagggtcgaagttgagctggtggaagccgtgtacgaggacctcgagttggactacccaggaggagacggagaagtgaagaggcaactcaagcctcggagtcctgaaaagaagatacctattgacccgagcgtgaagaatttcttcaagggaatgtccactgtaaacaaggaggccttaaagctatcggactatgaccgaacacttaggaaagcctattacaagatgtccaaaccagttcctcagcttggagaacaaccacaccaagtggtcgagccgttggtgtccggcaaagactttggcataacggatttcatttcggacaccggtcaaaccatggctcagttggttggaggcgcaccaatcccgaaggcggaagtggcatacaagtttgaactcggtaaaccgcttgccaggcctgagcaactgcagtccctaccgacacaaatgtacaaactccatgaacggtacatggaaatgagagccaatggtagagagatgttcggcgcgaggatcagaaaccccgacttcttgcaaggagaagatgttctatggatccatttcaaggatgtctgcgatctgtaccatcgggacgccctcgacgtctctcttctgagcgcatggattttaatggagattcaaagggcccgacggcagggggtttacgatactgggttcatcgaccctcggaaaatcaacaccgaaatgctcgacaagtacgagaaagacatagaggacaatctcgtccatctcctaatgcaacagcatttcaagacgttcatactattgccgtacaacacagaagtcactatgtatgactcaatgaataaagaggagaaggtttttgacaaggtcttccaactgatagacagcgtattcacatga

SEQ ID NO: 69317 - DNA, 2139 bp, Oryza sativa
  Clone ID: PAT_MRT4530_69998C.1
atggaggcaagtttgattgagaggggtatcgaaccggccatcgctaaatggccggatcgatcgaagttttggtactatgctcacggtggaacgcttaacccagttgatggctcccttgtctttagcgatcagatacgcgaggctgccagtcgactaatggacgtagtggtagcctcttctcagggcacattccaacccgacatagagaaggatgagctgtcactcgccctacagactcccgagcatccaggacgaacacgagggacatgcgtgattccgtggaagattggatttaaggaggacatccacacgtacaggagtcggatgaggagcaagagagataccgaggcgaagattgcagatcttgagtacagggtatcgagctacgagctcagcatgcaagaggaggtggcaaggaaggtggatgaacgtatggccgcacatcggtcccaggattcccatccgtacattcatcctgcaatggtcagcccattaggcaatcgtagcagctgcgcgtcaacggggcaggtcggatcacagagcatggatgccatgcaaacccaggacgaaaccacctgccccgttgatgagatcacgcagcggacaccatgtgagttgcatattcccttcaagaacttatcaatcaaggtggcgtcgggaatggccatcccaacggacccttccgggacttaccactgcaggccgattccagcaggatactcgagggtcgaagttgagctggtggaagccgcgtacgaggacctcaagttggactacccaggaggagacggtgagacgcatctacgagacacaagccatgccatcatactatggcgcaagcggtacatcatccttcctgggcgacaagcggcgtctcgtgcaccatctcctccggctccgccatctcctcctacaccatctcctccggttcctccgccacgtcatcctgcaccatctcctccggctcctccgccacttcctgctgcaccatctcctccggctcctccacctccaccatgtccgcctgcacctcccaagacaaggtctcgccaagctccaccgcctgcctgcacaagggcaacgaagaaggcgaaagttgacgccaccaaaaacaaggagccatcgtacgattgcagtcaagaggagcttgattcttatgtggtaggagaggtgaagaggcaactcaaggctcagagtcctaaaaagaagatacctattgacccgagcgtgaagaacttcttcaagggaatgtccacaacaaacaaggaggcgttacagatatcggactatgaccgaacacttcagagagcctatcacaagaagtccaaaccagtccctcagcttggagaacaaccaaaccaagaggtcgagccgttggtgaccggcgaagattttggcataacggaattcatttcagacaccggtctaactgtggatcagttggttggaggcgcaccaatcccgaaggcagaagtggcatacaagtttgaactcggtaaaccgcttgtcaaacctgaacagctgcagtccctaccgacacagatgtacaaattccatgaacggtacatggaaatgagcgccaagggtagagagatgttcggagcgaggatcagaaaccccgacttcttgcaaggagaatatgttctctggatccatttcaaggatctcttcgatccataccagttggacgccctcgacgtctctcttctgagcgcatggattttaatggagattcaaagggcccgatggtggagggtctacgatattgggttcatcgaccctcggaaaatcaacaccgaaatgatcgacaagtacgagaaagacacagacgataatctcgtccatctcctaatgcagcagcatttcaagacgtacatactactgccgtacaacacagaagtcactgtgtacgactcaatgaataaagaggagaagatttttgacaaggtcttcaaactgatagtcagggcttgggatcggttccgtcaattggtccgcgggacttggaaagaaaaacttggacggaggtttcattttccatgtgcaaatcaggaccagggaactaacttatgcggctactacgtatgcgagtatgcccactgcctatcaaaccaaatatgcacaacacgagagctcgat

SEQ ID NO: 69318 - DNA, 1263 bp, Oryza sativa
  Clone ID: PAT_MRT4530_69999C.1
caacttggaagcaattcaaattcttaagaaaactggagggtctctaaaggactcctttttggatgaagggttcattctagacaagaaaatcggtcttggccaaccgaagaggattgaaaacgccaagattttggttgcaaatactgctatggacaccgacaaagttaagatatatggagcacgtgtacgggttgattcaatggctaaggttgctgaaattgaagctgctgaaaagcaaaaaatgagagaaaaagtgcaaaagatcataggtcatggaatcaactgtttcgttaacaggcagttgatctacaacttccctgaggaactctttgcagatgctggcatactggcaatcgagcatgctgattttgagggcattgagcggcttgctcttgtcactggtggtgacatcgcctccacttttgataacccggagtctgtcaaacttggtcattgcaaggtcattgaagagattatgattggggaggacaggctgattcatttctctggggttgaaatggggcaagcctgtactattgtcctcagaggagcaagtgagcatgtgcttgatgaaccagagaggtccctgcacgatgccttatgtgtgctttcacaaaccgtgaacgacacccgtgtgttatatggtggtggatggcctgagatggttatggccaaagaagtagatggactggcgagaaagacacctgggaagaagtcccatgctatcgaagccttctcgcgcgctcttcagtccattccaaccatcatcgctgacaatgctggtctggatagcgctgatctgatctctcagctcagagcagagcatcacaaagagcagagcactgctggaattgatgtcatttctggcggcgttggagacatggaaaagctggggatatcagagtcgtttaaggcgaagcaagctgttcttatgtctgctaccgaggcagcggagatgattctcagggtcgatgagatcgtcacttgtgctccacggagaagggaggacaggatgtgatgtgtctgatatttgtgttctaatctgaggatgtttgtttttttgaagtgttttgtatcagttcgtcttgtagacacatatgggacggccgggtctgtattatcatgaaagctttgtcctaacagcggaacactttgaatgggattcttatttgcagctttactcatgtgcgcttggctcaaaatatgttgggtttcggtcttgagtatacattctattgtaccaaaaaaaaaaaaaaaaaaaaa

SEQ ID NO: 69319 - DNA, 1401 bp, Oryza sativa
  Clone ID: PAT_MRT4530_6999C.1
atggagatggatgaagtcgggggtcgatggacattctctaggacaaatgaaggctacacgagctgcggcccggtagtcgagatgtcatggcacagggttggtgccctgctgctaggggctcagtcctgcctgcctgtcccgaaggttccggccgtaggtgggattgggtcggtactcttgtctatggctaggatgggttggaaactatgtcacgtcttccatccgtataccgtggtgatgtttaacagagaaaaaggaaagaatgtcagcgggtatgcctcaagtaactcaagttttcaactcaatctaccactggcctcaagagagttaaccagggcacacccttggtccattccaagcatgctgcttagttcacagctaccattagttggaagtcaagaccaaaatcagtatgtgtttgatcgagcatttgccacccaggtcaatgagcttccaatgccagaagaggatgtccccttttgtcacgattgcagagagcaaggacactatgccctgaattgtccatgggtatatgtcaaagaagccccttcccttggtttagcagggcagacatcgctaaaccagcctcctcacaccaagtcaagcttgcagcctagtgtgcaaagtagagagctcaacggagagaatccattgaatcccgggaaatgctttcctcctagcctctcgtaccacgtggggtcacatactaagcaagccaaaggcaagaagagtaagaatcagaagagaaaagcaccgatgcgaactgaagaagaagtacgtaagatgactattaccagcaccgaatggcctccagcagggataactattcctagacgtcaaagaggaaatactttccgaggtgcacgacagttgacccagcacctcctaagccatggtggcagagtatctgatagtgaagggtcagatcaagtctcctcggatgatgaagatgagtctccccgacatctcggcgaggaagagatggaatcaaaggcatgcacccgttgcggggaaattggacacgttgctagcatgtgtctcacactctgcactcattgtgaagaagaccatccaccaggggagtgtcccacccgcaaggtcacatgttttctgtgcgaagcaccaaccattctctgcaccgacagcctcagcaaagaattgtcatcgatagaagaagttgtgtctctccccgacctactcccggccgagcaaagggcaatcaacctcaggagggcgataccaagcagaagaccgttatccgcttcaaccagcaatcagaaggaagcttcccctgtgaatgatagcaatatgcagtcctatcacatcatcacagaaccaatcaaggatgatgcagtcaccagaacaatgccagctatatctctccagaatcagaataagtag

SEQ ID NO: 69320 - DNA, 1329 bp, Oryza sativa
  Clone ID: PAT_MRT4530_699C.1
atgttcgccggcctcgcctccgacggcgggagcaaggtgcggatgctgctcacctgcgtcgacgcgctccccgacggtagttcacatgacatgaccaggagcgaggaaggcatcagttatgccattgatcttggaggaacaagctttagagtcctgaaagtagaacttggcgcagggtctacaatcatcaatcgaaaagttgaacatcagcctatccccgaaaatttgactaagggtacaagcgatgatttgttcaatttcattgcctcggcactgaagaattttattgaaagagagggtggggaggttgaggggagggcacttggttttacattttctttccctgtgagacagacttccatttcctcggggacattaattcgatggactaaagaattttcaattgaagaggctgtcgggaaagatgttgctcagtgcctaaatgaagcccttgctaggaatggactcaatatgaaggtcaatgtattggtgaacaatactgtggggacattagctctcgggcattattatgatgatgacacagtagctgctgtgattattggagctggcaccaatgcttgctatattgaacgcaacgatgcaattattaaatctttgggtcgcgttaccaattctgaacgaacggtagtaaatgtggaatggggtagttttcggcctccacaaatagaattgactccttatgatatatgcttcaacaacgaaacatggaattattatgaccagggttttgagaaaatgatctctggtgtgtatcttggggaaattgcaagattggtgttccaaaaaatggctgaagagtcagatatatttggtactgctgttgatggtctatcgacccctttcgtcttaagtacaccaaacttagctgctatccgcgaggatgattccccggacttgagagaagtcggcaagatacttgaggaacatcttaagctaccagatgttcccctcaagacccggaagcttgttgccagagtctccgacatcatcacccggagagctgcccgcctagcagcggctgcgattgtcgcgatactgcaaaagatcggctgcgatggaaccctttgtggttcaactcaggttcgaacaatgcgaggcgtgcgaagaagaacggtggtcgcgatcgagggcggcctcttcgaaggctactcggtcttcagagagtatctgaatgaagctctagttgagatccttggagaggagattgcagccactgttagtcttagggtgatggaggagggatctgggactggtgctgccctccttgcagctgcatattcatcggctaggcagaagaactccgagtag

SEQ ID NO: 69321 - DNA, 288 bp, Oryza sativa
  Clone ID: PAT_MRT4530_69C.1
atggcggctgcgttggggcggttgctggcagcggctgcgttggcggtggcggcgaggcatggcggcctcggacggctagccgagggcgtgggagacgactacatctggccggcgcgacatcgtttggtggaggggtcggagaccggcttggcgcagagaagcgcagccgatggcaacggaggccggctcggcgcgagagacgcgggcggcagagatggaggccggcttggcgcgggaggcgcggccgatggagggaggccggattggcgcgagagacgcgtccggtag

SEQ ID NO: 69322 - DNA, 4448 bp, Oryza sativa
  Clone ID: PAT_MRT4530_6C.1
ccgggctgcaggaatcggcacgagggagagagagaactagtctcgagtttttttttttttttttttttttttttttttttggggaaatgagttttcatccaaatgtgcatagtacagtgccaaggtgaaacatcgaactatagcaaaagggttttcagttgacctctgattcaccccatccctaactatgccatcggttggtcacaggacatcaaaggcaggtgatgggaattgagtcttcacccaaataaatagcaaaagaaaggtttcacctgacttcagattcacccctcctagctatgccatcgtccaaccggaagagaagtcatgtggctacaacactaatgcccataatagaatctccaagggacaacgaggatatatatacatggtgagtcgatagtagatgtggagttctagcagacttccgtctcaaatctaaggcagatccccatgctgaatagctcttgatagagcagctttgcgccgtagggcacattgatccttactatgttttcagaagagcggcagaacccacagtatggcccccggatcttctttcctcctgggacaggcctcatgataacattcgccacacgttcgcacgtctggcagacgtgcatctgcgagaagtcactaagcatgaagagccgctcatggaggttggctgctgcaccatgggcgaggaggcagtcacgctccatttctccaaacttcactcccccaaacctcttcctgtcagcaacaggttgccgtgttagggggtgcactggccccgtgttcctgaacttgaccttatcttctgccatgtgtatcagcctctggtaaaaagtaggacccatgaaaatcaatgagtgcatcctttcaccagtccggccattgagaacactttcagctccccatctcgaaaatccagccttgtgtaattggtctgtgatcacatcaaacgatgctgttgtgaatggtgtagcatatctcattgtaccaccgagggcaattcctttccccaaagcagcttcaagaagctggcctggagtttgacgggtaggaaatgcatgtggatttatcacaatatctggtactattccttggtaagtaaatgggaaattctcctgagattctagaaaaccaacgacacctttctggccatgcatgctggaaaatttatctccaaggcaaggtgatcgaacctgtcttagagtaacaactgcaaagttcttcccctcatcattagctgaaagtaataccctctgcaccatacccttttcagtatgcttcagcttaatactatgatcttcaccagattctgagacctttccaatgacaatgtcaccactctgaagacttgcaccgacatatggtaatccatcatcgtcaagattgtcaacacgtcctctcttgctttgcattttaccgaagtcaatcttatccttcatttttagtcgtttgttgccacctggcccacctttgttctctacttcagccttatagttcctgaagtgctcagtcctaaacataccccgctcaagagaagccctattcataaccacggaatcttcttgattaaacccctgatgaacattcactgccactattgcattttggccattgaaatactctggtctggcaaagtcatcctttctcccaaaagtatattctgatctaccaatgcagtcagctatcactgttttgaaaaggggtctctgaggatagtaaagttgatgggaaagggtatcaactctgatgtgcggatttgttgtagagtatccaatagcttgctgtgaatgtttttcagattggtaaagaaccctccgagcaaaattgtggttcgcaaaagggataataccacaacttaatcctagcagaaaagaaagatccagctcacagtgcgtataacccgaaacctcccctccgatcttcctcttaacattgaagacatcctctgctttattcatttttaccatgggagcctcttcttcactctcaaataggttcctgatgccccaggcacttcgtatatcttcctcttcttcaacgccaataaactcaattatttcttgttgcattaaccactgaaaagaatatgaactgcccttcggtctcctaattttattgagattttcaaccacaagaagcggtctgaggattcgacctgcatcagaaaacacccgaacttccctttggtgcttgtcccgttttatctcaacctgtggatctatcagaccactgcgtctcatgcaccttaaacgcaagacaaatgaagccgggtcactacaggaccccacccaatccccattcaggaagattttgtccattctaggaacctcctctgtaggaatctcatgcagcttattcattccacaagaaatgaacctgtcaatcaatggcggtgctactctggagctaacagtagctgtaacagctagatttttcacaagtccacagttttcaccatcaggagtggacataaaacacaattttccccagtaggatggatttggatatcttgcatcaccggctttcccagcataagcaactcgttggcgagttttcctcaagtccgagatcatctgaagcggatttgttctccttagtgtcgcaacaattcctgcgcatctttcatttcttttgtaaggatggcaccaagaaccagtagagaaggcacggtttagaccattggtaataattgaagcatccagataatgatcaaattcttgtaactcacgctcactatttaaatctctctgcaaggccttaaccatgagtctctctgcatgcctaatatgcgcacggagttctcttccaagcaattcaccagctaggtccaacctcttgttccggaaatcatccttgttgtcacatttgcgcttcccagtgaaagccattaaaaggcatttgaccatgtaacctaagaaaagtgctttgttccggttcccacttatgctggggaagaggtatttagcaatataatcatcaaatggctctgcaggaggaaattttgaattcttaatcaattcgtcaacatactgccgggctttatctgatttacggaagccttcacacaattcatctgattctttaatagttgcggtaattgtgttgataacacaagcatcacagtcttccatatttataacatcaaagatatccttatctgatgatatgcctagtgcaaaaaacatcaaccatattggcatatttgcatacaaaaaggagatggaaatgatcttccccccactggcatcttcattatttgcagaatcaattagttttatatatatgcgccttcttctgattggagacaagaaagagaccatccagcaaggacggtcctcaacccaaatcctggtcagacatttttgctcttgcgcaatgaatactttttgagtaggagtttccaactttccatttaggcagaggtttctactatataatttccccccacaaccttgcagttcatccttctccattcccttgatcaaaaagtatccaccagaatcaaattggcaatcactttccttgagtttgtggagccaacataaatttgacataaccataactggaaggcggccaatatttatataatatgtttcattaataatgtttcgcttgtaaccaaatttatcattccctgttttagccttgtcactcttctccatagagtaaacctggaaatgaacttccactttcattttggaagaatatgtcatattctgtaggcgagcatgccttggcttcagtttgagcgattgttcatcaatatcacatccatgagaccaaaatactggttcttctagttgcactcttccaaacttgatgatagcatgtctccagccacctggtcctctatttgaaggatcataactaggctccacagtcacttcccccagagaatcaaaaagttcctggagcccatgtgagacaaactcgttataagaatttatctgatggctgatcagaccaatctcatcaaagaaggaccttgatgcttctttgcagaacttttctaggcttggaatactcatgtcgactggaatttgggcatatgagtcgcgctttcctttaccatcatcacccagagatgatctcgtggtgtccatagaatggcatcctctgtcaacatccatagaagaatgcccatttgcatcatccaatgtatgggatactccctctctagcatcatccagcatcataggttccagctcaggatcaacaacacaggatgattgcccattgtcctttgatggctcttccataacttcgagggaatagcctagcaaacagtgcagtaccatcacaaaaaccatccgaacacccatgatcattggcatgttcacccctgaagcactagaaatagaaatccttgaactttgtggccatcccctttttccactgaaaattctacagagtcctttgattgccattgatgtctcatggctcactgacat

SEQ ID NO: 69323 - DNA, 3789 bp, Oryza sativa
  Clone ID: PAT_MRT4530_70000C.1
atggctgatcgcgatgaggaacagatactgtacgatacaatcgcatcgggaagtagccagtactggaacgaagaagaggggaatgaggatccaaacctgtacttgaacgaggaggggaacgcggagagggatgcagaggggaacgaggaggggaacaagagggcacgcggacaacgaggtgccgcgaagaagatagagggtcggcacatcataactgaggtggacacagacggccgacctagtgccccggtacaagcagccaagaattttgtacgccacaacggttgggttgtgagggataacgtgcctgtcagcaaggtgtgctggtgcagaacaagggcatgcgggggtgatgacagctttgtcccggaatcagagaaagagatgctgtggaccacaatgctcgagacgttcacgctccctgtgagtacagagaacatagtgaaacagtggactcttaagaaaatggcagaacagttccagaccttcaagggagatctataccggaaatacatcctgaaggggcagacaccgaacttcgacgtattcccgaagctaagggatcactgggacgagttcgttgcttacaagataggtcaacaagggcaggcgatgatggaaagaaacaaagaaaatgccgccaagaagaagtaccatcactacttgggcgatcggatacgcgaggctgcgaatcgactaacggacgcagtggaagcctcttctcagggcacgttccgacccgacaaagagaaggacgagctgtcactcgccctacagactcccgagcatccaggacgaacacgagggaaaggcgtgattccctggaagatgggattcaaggaggacatccacacgtacaggagtcggatgaggagcaagagagataccgaggcgaagattgcagatcttgagtacagggtattgagctacgagctcagcatgcaagaggaggtggcccggaaggtggatgaacgcatggcagcacatcggtcacacgatccccagccgtacatacctcctccaatggtcagcccatcaggcaatcgtagcagctgcgcctcaacggggcaggtagtatcacatagcatggacgccatgcaaacccaggacgaaaccacctgccccgttgatgagatcacgcaacggacaccatgtgagctgcatatacccttcaagaacttatcaatcaaggtggcgtcgggaatggtcatcccaacggacatttcagggacttaccactgcaggccgattccagcaggatactcgagggtcgaagttgagctggtggaagccgtgtacgaggacctcgagttggactacctaggaggagacggtgagacgcatctacgagacacaagccacgccattatactatggcgcaagcggtacatcatcctccctgggcaacaagcggcgtctcgtgcaccatctcctccggctccgccgtccgccacctcctcctgcaccatctcctccggctcctccgcctcctcctgcaccatctcctccggttcctccgccacctcctcctgcaccatctcctccggctcctccgcctcctccgcctcctcctccaccgtgtccgcctgcacctcccaagacaagttggttggaggcgcaccaatcccgaaggcggaagtggcatacaagtttgaactcggtaaaccgcttgtcaggcctgagcagctgcagtcccaaccgatacaaatgtacaaattccatgaatggtacatgaaaatgagcgccaatggtagagagatgttcggagcgaggatcagaaaccccgacttcttgcaaggagaagatgttctatggatccattttaaggatgtcttcgatctgtaccatcgggacgccctcgacgtctctcttctgagcgcatggattttaatggtgattcaaagggcccgacggcggggggtttacaatactgggttcatcgaccctaggaaaatcaacaccgaaatgctcgacaagtacgagaaagacacagaggacaatctcgtccatctcctaacgcagcagcatttcaagacgttcatactattgccgtacaacacagaagtcactgtgtacgactcaatgaataaagaggagaaggtttttgacaaggtcttgctcttcttctccgccatcttccggaaacgctgccgctcccgtgtgctcagcgtgctgctctggctcgcctacctatcggcggactccgtggcggtctacctcctcggccgcctcacgctcttggtgggtgacgccccgggtcaccagctagtgctcttctgggcgccattcctgctgctccaccttggcgggcaggagaccatcactgccttctctatggaggaatgcgcgctgtggaagcggcaccttctaaacctcgccgtccaggtgtcgctagccatctacgtcgtcggcaagcaatggcgaggtgacaagcagctggtggctcccactgtactaatgttcatcaccgggacgaccaaagtggagtggtcaggacagctgcaacagtttaacatgatcgacatgggcatccaggaaacaacacgaggacggctggaacggatgatgcgttgtgtggacatcatcatcgatggaggctgcagtaccgagcctgcagtgaaggtctctgcagaggtaaagaagctactcgttgataagatactagcccagctgatatcggacactgatccggagtcggagctggacttgaccagattccatggccagtgggcacagcggtgggtcgaaaaaagagtacaagtccatgatttctctgaaagtaatccagctcatcgagcacttgtgaagagtaagatccaagattcaagttttttgacaagtgccagcctttggcaccttgtgacagacatatgcctagatcagggctacactagcgtggatgaggcgactgcaaggacctgccgggagttatcaaattatgtcatgcaccttatcgtcaattacgaaggcctcggcacagtggacgagcgtcagattttcgttctcacagcaagccgaatggtggaattttttgtggatggacccaaagacaccagaaaccggccggggttcttccagaaggtcgctggtcgctgggagctgatcgcgacggtgtgggtggagatgctttgctacatcaccatgaattgtggcgcctgcagcctccacgccaagcagctctgcgatgcggcacaaggtggccggtctaccgtggaccgggaccacacgagtggtccaccgccggtccacgggatcgacggtccggatcggcctcaaagacgatcggacggcgcggggaaggcggctaggcacggctcggtttcaaagccgaccggcagccatggcggccggtggcgacacgcgcggtcaccggcggggcggcagcgcgtgtgggacagagggaaggagggaggagaggagctcctcaccgtgagcacggcggccggcgcgaagaatgaacacggaagcgatgaccgacgatgcggaggcacggacgggcggcggcgacaccctaggagaagatggagaggcgttaggagaggagacgacgaccacggcggcttgaattgccggccggagatggaggggagggaaaaactcaccggctcgcgaggggagaggcgctccggtgggattccggcgacgcgaggcggcggccgggaaagctcttgcggcggtgaagctaacggcggcggcggtttggcgcggcggcgactccagcagtggcggcgcgcggccgaagacggcgacaagcggcggagctcgggtgtgacggcgcgggcgcggtag

SEQ ID NO: 69324 - DNA, 324 bp, Oryza sativa
  Clone ID: PAT_MRT4530_70001C.1
atgccgccacgcaccagctgcatcgggggttcgatagcaaaggtacagaggcgctgcatggctggaggagttgagcaagggatggagagggagataggggatggagggtggccaggccatcatcagaagcccaacagagttggttcgcatggatacggcaactggcgctggaggtctcggagccaactcaagggctccggagctctcaccagggctccaaagccaaagcctaggatgaatcccaaaaaggagcatggggtgccgttaaagcgcactactcacccgccaaccaccgctgacgtcatgacacggttggcgatgtga

SEQ ID NO: 69325 - DNA, 1947 bp, Oryza sativa
  Clone ID: PAT_MRT4530_70002C.1
atgccgcagcaccaggagcttccccgcggcgggcaggcgccctccttctccactcccatcccctccggcctcctcccgtatctcccggtgtcgccgcagtccgccgcccaatctgaggagcttttcctcatctcaagcttcttgctcgcttgctctctactatcggtccttttgactcgtggccaagctgcagaggaaacccaaaattccaagaaaagcaacaggtcaagaaagagggaaagcttaggtgagaggagaggggaggaatgaaggaaagaaagatggtgatgatggcgataagtcggcccatgattcgcgccatcattccgtctcgaccgaggccagttcgctgctaaaagggcctcgccgtccgtccgtccggccggccgcgcggcgcgcgggggggaggttggttggagggtgcggtgggccgacttcgacggcgggggcgccgagcaggtcctcaagtacagcggctttgccgtggcgaagaggaaaacgctagcggcgcagcccgctgttgctgcgatcttgggggtggcggggctctcggggccgcagcggtccgtgacggagggcatctgcggggggagcggtggtagatgctggacggccttgtctcgccgcctgacgccacatgggtcgaggacacagcggcatagcccatatgtctggaaaaaatcgaaccaatccgacgccaaggccgcattgatgcagccggcgaaggtgtcgctcttggtggacatgctcaatgagggtgcggtggacaccaagatcaactgcgtccgcctcatccgcatactcatggaggagaaaggcttccggccggacacagtagccagcctgagcctgctagttggagtcatgcgcctcgttcgagacaagcggcatccggacggcgtcgctgcggggcttgagctgctcaattcgatatgcgcagtgcacaagcctgcaagaagtttgattgttagcatcggtgcggttccgcaactagtagaattgctgccagagctgccaacggagtgtgtagagccagccttggatatcttggatgcgcttgccgcagtcccggagggtcggatagcgctgaaggattgccccaggacgataaccaatgctgtgagattgttgatgagggtttcagaagcatgcacacggcgagctttgtcaatgctgtgggtggtgtgtaggatggcgcctgaagaatgcgcgccggctgctctagatgccgggcttggggccaagcttctcttggtcatacagagtgggtgcggaccagagctgaaacagcaagcgtccgaactgctcaagctgtgcaccatgaattgcacatcgacggtattcatctccaagtgcaagcttacgaagacaatccacattcaaaatgcagcatacacacagctaattcagtggcaagcaggtgggatgtacatgcaaattgatgaggattttggtcagctcaataagcactcgaggctgggaggtgcggccatttactccgggtctccggccgtccggcgatggcattggttggtgtacactcctaccctggtggtagggctggtagcagcagcgggtcatctttcagtcactgtgcggtgggccctgcacgacagaggggacgaggtgggggcgagtggctggttgcccccaagcggcagcggcagcggcagcggggcatggggtggtttcattgacctccagagtggcaatcgatcgaacgagacgagtgaagcttttgctgccagtttggcgtccggatcacggccagtatgcgtccgtcccaagtggcctcacctgaccggcaaaactgatcacatcacgcgacgtaggcatgcaagcatatcccctcagcttttttcagctctcgtgtccaggactccggacgcccgctgtttcagccaaaacagcaccaacgcgtttaattttaccctgttcatggtttga

SEQ ID NO: 69326 - DNA, 2940 bp, Oryza sativa
  Clone ID: PAT_MRT4530_70003C.1
atgccgccgccgtggcccgccgccgccgcgcccccacgccgccgggcccccacgccgccggacccccatgccgccgccgtggcccgccgccggacccccatgccgccggacccccatgccgccgcctcagcgcccatggctgatcgcgatgaggaacagatactgtacgatacaatcgcatcgggaagcagccagtactggaacgaagaagaggagaacgaggatccaaaccagtacttgaacgaggaggggaacgcggagagggatgcagaggggaatgaggaggggaacgtggagagggatgcggaggggaacgaggaggaggctagtggaagtcatccctccgctggacagaagagggcacgcggacaacgaggtgccgcgaagaagatagagggtcggcacatcataactgaggtggacgcagacggccgacctagtgccccggcacaaacagccaagaattttgtacgccacagcggttgggttgtgagggataacgtgcctgtcagcaaggtgtactggcgcagaacaagtgcacgcggggatgatgacagctttgtcccggaatcagagaaagagatgctgtggaccacaatgctcgagacgttcacgctcccttcgggtatagagaacatagtgaaacagtggactcttaagaaaatggcagaacagttccagaccttcaagggagatctgtaccggaaatacatcctgaaggggcagacaccgaacttcgacgtattcccgaagctaagggatcactgggacgagtttgttgcttacaagacaggtcaacaagggcaggcgatgatggaaagaaacaaagaaaatgccgccaagaagaagtaccatcaccacttggggtcaggcggctatagcgtcgcgatgccgaagtggaaggagatggaggcaagcttgcttgagaggggtatcgaaccggccaccgctaagtggcctgatcgatcgaagttctggtactatgctcacggtggaacgctcagcccagttgatggctccttggtcttcagcgatcagatacgcgaggctgcgaatcgactaacggacgcagtggaagcctcttctcagggcacgttccgacccgacagagagaaggacgagctgtcactcgccctacagactcccgagcatccaggacgaacacgagggaaaggcgtaattccctggaagatgggattcaaggaggacatccacacgtataggagtcggatgaggagcaagagagataccgaggcgaagattgcagatcttgagtacagggtatcgagctacgagctcagcatgcaagaggaggtggcccgaaaggtggatgaacgcatggcagcacatcggtcacacgatccccagccgtacatacctcctccaatggtcagcccatcaggcaatcgtagcagctgcgcctcaacggggcaggtagtatcacatagcatggacgccatgcaaacccaggacgaaaccacctgccccgttgatgagatcacgcatcggacaccatgtgagctgcatattcccttcaagaacttattaatcaaggtggcgtcgggaatggccatcccaacggacatttcagggacttaccactgcaggccgattccagcaggatactcgagggtcgaagttgagctggtggaagccgtgtacgaggacctcgagttggactatccaggaggagacggtgagacgcatctacgagacacaagccacgccattatactatggcgcaagcggtctcgccaagctccacctcctgccagcacaagggcaacgaagaaggccaaagttgagaccaccaaaaacaaggagccgccgtacggttgcagtcaagaggagcttgacacttatgtggcaggagaagtgaagaggcaactcaagcctcggagtcctgaaaagaagatacctattgacccgagcgtgaagaatttcttcaagggaatgtccatcgcaaacaaggaggccttaaagctatcggactatgaccgaacacttaggaaagcctattacaagaagtccaaactagttcctcagcttggagaacaaccacaccaagtgaccggcgaagactttggcataacggatttcatttcggacaccggtctaaccatggctcagttggttggaggcgcaccaatcccgaaggcggaagtggcatacaagtttgaactcggtaaaccgcttgtcaggcctgagcagctgcagtccctaccgacacaaatgtacaaattccatgaacggtacatggaaatgagcgccaatggtagagagatatttggagcgaggatcagaaaccccgacttcttgcaaggagaagatgttctatggatccatttcaacgatgtcttcgatctgtaccatcgggacgccctcgacgtctctcttctgagcgcatggattttaatggagattcaaagggcccgacggcggagggtttacaatactgggttcatcgaccctcggaaaatcaacaccgaaatgctcgacaagtacgagaaagacacagaggacaatctcgtccatctcctaacgcagcagcattacaagacgttcatactattgccgtacaacacagaggcttgggatcggttccgtcaattggtccgcgggacttggaaagaaaaacttggacggaggtttcattttccatgtgcaaagcaggacaagggaactaacttatgcggctactacgtatgcgagtttgcccactgcctatcaaaccaaatatacaccacacgagagctcgatcatattcacatgagggaaaaactcccacacaaggattttatcatggctgttcaagaacaactgatggggttcatcaacgaagaagtccttaatcccgatggtgaattctactacgacggatcgacaattcgtaacgtcggtccttcctcttctgacgtaacgcaggcgtcgaagtcgtag

SEQ ID NO: 69327 - DNA, 1463 bp, Oryza sativa
  unsure (1)..(1463): unsure at all n locations
  Clone ID: PAT_MRT4530_70004C.1
tagcacttgcaccntcccacaagtcgcaccacgatgaacttagtcggcacattgcaaaatgtgacgccaggaggctctatgatgcgaagaacagcggcatgggatcggtcgacgaggctgtcattcttgagatgttcagcaagaggagcatcccacagctcaagctaccattctgccagttacaagcacatatatgggcatgactacaccaaggcactgaagaaaaatggcttcggtgagtttgaacaatctttgagggttttgtgaagtgcatctacaatccttccatgtatttctccaagctgctgcatagaagtctgcaatgctcagcgaccaataaaaggttggttacaagggctattttgggcagtgacgatgtcgatatggacaagatcaagtcaggtgttcaaaagtagttatggaaaggaccttgaggatttcatccttgaaagcttgcctgagaatgattacagagactttcttttaggtgcggccaaggggtcaagggcctcatgaagtctgtggagagagatccttgaattatctagggaaagtaaagggtgcatatactgctttgcatgtaagagcaattgaccatcaaaaacagcagttttatgttatctgagaataggatttaggtgagaacatcatgctcattttgtttattttgggtgaaaaaagttatcagttcaactaaaaaaaaaaaaaaagaaagctggttgcaagagggttgcattcggtcctttgctccgaacagttgtgccaaatttccaccacgcgtgcgccggcgtcggacggtggctgaggcactgacaggtcgccaatggatcaaagacatccgaggagcacttgggatccaacctattctagaatatctaaagctttgggccaatacagctcaaaatctgcctataaggccttgtttttttggtcgtctcgccttcctttccaccccaatttggaagtcactcgctccgcctcgatgccgcttcttcttgtggttggtcgcaatgaacagatgctggaccgctgaccgtctgcgcagtcgagggttgccacacccggatcgctgtgttctttgcgatcagcaggtggaaaccattgctcacatctcggtagcatgccctgaatcgagacaattatggtggtggacgcttcaggcgataaggagtccgaactgcttacctgtcaacgagccatccttccacaattggctctgtgagagccgaatgaagattggggagcggcatcgtcgaggcttcgacactgtcgtgacactggtggcttggacaatttggaaggaacggaacaaccgaatcttcaatcaacaacaaaggtcttggaccgaagtggcgaaagcaatggcggaggaggccatgctttggaagtcggctaatcacgggatccccgctgtttggcctttacgaggtcgtgaaaacttctttttcatcaaatggattatg

SEQ ID NO: 69328 - DNA, 2835 bp, Oryza sativa
  Clone ID: PAT_MRT4530_70005C.1
atggctgatcgcgatgaggaacatatactatacgatacaatcgcagagggaagcagccagtactggaatgaagaagaggggaacgaggatccaaaccagtacttgaacgaggaggggaacgtggagagggatgcggaggggaatgatgcggaggaggctagtggaagtcagccctctgctggacagaagagggcacgcgaacaacgaggtgccgcgaagaagatagagggtcggcacatcataactgaggtggacgaagacggccgacctagtgcaccggcagaagcagccaagaattttgtacgccacagcggttgggttgtgagggacaatgtgcctgtcagcacggtgtactggcgcagaacaagggcacgcggggatgatgacagctttgtcccggactcagagaaagagatgttgtggaccacaatgctcgagacgttcacgctacccgcgggtacggataacttagtgaaacagtggactctgaagaaaatggcggaacagttccagagcttcaagggagatctctacaagaaatacatcctgaagggactaacaccgaacttcgacgtattcccaaagctaagggatcattgggacgagttcattgcttacaagacagggcaacaagggcaagcgatgatggccagaaacaaagaaaatgccgccaagaagaagtaccatcaccacttggggtcaggcggatatagcgtcgcgaagccgaagtggaaggagatggaggctagcttgcttgagagggtggtagcctcttctcagggcacattccgacctgacagagagaaggatgagctgtcactcgccctacagactcccgagcatccaggacgaacacgagggaaaggcgtgattccctggaagattggatttaaggaggacatccacacgtacaggagtcggatgaggagcaagagagataccgaggcgaagattgcagatcttgagtacagggtatcgagctacgagctcagcatgcaagaggaggtggcaaggaaggtggatgaacgtatggccgtacatcggtcccaggatccccagccgtacattcatcctgcaatggtcagcccattaggcaatcgtagcagctgcgcctcaacggggcaggtcggatcacagagcatggacaccatgcaaacccaggacgaaacctcctgccccgttgatgagatcacgcagcggataccatgtgagctgcatattcccttcaagaacttatcaatcaaggtggcgtcggaaatggccgtcccaacggacccttccgggacttaccactgcaggccgattccagcaggatactcgagggtcgaagttgagctggtggaagccttgtacgaggacctcgagttggactacccaggaggggacgatgagacgcatctacgagacacaagccacgccatcatactatggcgcaagcggtacatcatccttcctgggcgacaagcggcatttcgtgcaccatctcctccggctccgccatctcctcctgcaccatctcctccgccacctcctgctgcaccatctccttcggctcctccgccacctcctgctgcaccatctcctccgtctcctccgcctcctccggctccaccgtgtccgtctgcacctcccaagacaaggtctcgccaagctccaccgcctgcccgcacaagggcaaggaagaaggcgaaagttgacaccaccaaaaacaaggagccaccatacgattgcagtcaagaggagcttgatgcttatgtggcaggagaggtgaagaggcaactcaagcctcggagtcctgaaaagaagatacctattgacccgagcgtgaagaaattcttcaagggaatgtccaaaacaaacaaggaggcgttacagatatcggactatgaccgaacacttcagagagcctatcacaagaagtccaaaccagttcctcagcttggagaacaaccaaacaaagaggtcgagccgttggtgaccggcgaagattttggcataacggatttcattgcagacaccggtctatctgtggatcagttggttggagccgcactaatcccgaaggcggaagtggcatacaagtttgaactcggtaaaccgcttgtcaaacctgaacagctggagtcccaaccgacacagatgtacaaattccacgaacggtacatggaaatgagcgccaacggtagagagatgttcggggcgaggatcagaaaccctgacttcttgcaaggagacgatgttctctggatccatttcaaggatctcttcgatctgtaccagttggatgccctcgacgtctctctcctgagcgcatggattttaatggagattcaaagggcccgacggcggagggtctacaatactgggttcatcgaccctcagaaaatcaactccgaaatgatcaacaaagtcactgtgtacgactcaatgaataaagaggagaagatttttgacaaggtcttcaaactgatagacagggcttgggatcggttccgtcaattggtccgcgggacttggaaagaaaaacttggacggaggtttcattttccatgtggaaagcaggaacagggaactaacttatgcggctactacgtatgcgagtatgcccactgcctatcaaaccaaatatgcacaacacgagagcttgatcgtattcacatgagggataatctcccacacaaggattttatcacggctgttcaagaacaactgatgggattcatcaacgaagaagtccttaatcccgacggtgaattctactacgacggatcaacaattcataacgtcggtccttcctcttctgacataacgccggcgtcgaagtcgaagtcgtag

SEQ ID NO: 69329 - DNA, 2787 bp, Oryza sativa
  Clone ID: PAT_MRT4530_70007C.1
atggctgatcgcgatgaggaacagatactatacgatacaatcgcagagagaagcagccagtactggaacgaagaagaggggaacgaggatccaaaccagtacttgaacgaggaggggaacgtggagagggatgcggaggggagcgaggaggggaacgatgaggaggaggctagtggaagtcatccctccgctggacagaagagggcactcggacaacgaggtgccgcgaagaagatagagggtcggcacatcataactgaggtggacgaagacggccgacctagtgcctcggcagaagcagccaagaattttgtacgccacagcggttgggttgtgagggacaacgtgcctgtcagcacgtttgcccggactcaagaaagagatgctgggaccacaatgcttgagacgttcacgctacccgcgggtacggagaacatagtgaaacagtggactctgaagaaaatggcggaacagttccagagcttcaagggagatctctacaagaaatacatcctgaagggactaacaccgaacttcgacgtattcccaaagctaagggatcattgggatgagtttgttgcttacaagacagggcgacaagggcaagcgatgatggccagaaacaaagaaaatgccgccaagaagaagtaccatcaccacttggggtcaggcggatatagcgtcgcaatgccgaagtgggaggagatggaggcaagtttgattgagaggggtatcgaaccggccaccactaaatggccggatcgatcgaagttctggtactatgctcacggtggaacgcttaatctagttgatggctcccttgtctttagcgatcagatacacgaggccgccagtcgactaacggacgcagtggtagcctcttgtcagggcacattccgaccagacagagagaaggatgagctgttactcgccctacagactcccgagcatccaggacgaacacgagggaaatgtgtgattccctggaagattggatttaaggaggacatccacacgtacaggagtcggatgaggagcaagagagataccgaggcgaagattgcagatcttgagtacagggtatcgagctacgagctcagcatgcaagagaaggtggcaaggaaggtggatgaacgtatggccgcacatcggtcccaggatccccagccgtacattcatcctgcaatggtcagcccatcaggcaatcgtagcagctgcgtctcaacggggcaggtcggatcacagagcatggacgccatgcaaacccaggacgaaaccacctgccccgttgatgagatcacgcagcggacaccatgtgagctgcatattcccttcaagaacttatcaatcaaggtggcgtcaggaatggccatcccaacggacccttccgggacttaccactacaggccgattctagcaggatactcgagtgtcgaagttgagttggtggaagccgcgtacgaggacctcgagttggactacccaggaggagacgctcctccgcctccaccgtgttcgcctgcacctcccaagacaaggtctcgccaagctccactgcttgcccgcacaagggcaacaaagaaggcgaaagttgacgccaccaaagacaaggagccaccgtacgattgcagtcaagaggagcttgatgcttatgtggcaggagaggtgaagaggcaactcaagccttggagtcctgaaaagaagatacctattgacccgagcgtgaagaacttcttcaagggaatgtccacaacaaacaaggaggcgttacagatatcggactatgaccgaacacttcagagagcctatcacaagaagtccaaaccagtccctcagcttggagaacaaccaaaccaagaggtcgagccgttggtgaccggcgaagattttggcataacggaattcatttcagacaccggtctaactgtggatcagttggttggaggagcaccaatcccgaaggcggaagtggcatacaagtttgaactcggtaaaccgcttgtcaaaactaaacagctgcagtccctaccgacacagatgtacaaattccatgaatggtacatggaaatgagtgccaagggtagagagatgttcggagcgaggatcagaaaccccgacttcttgcaaggagaagatgttctctggatccatttcaaggatctcttcgatctgtaccagttggacgccctcgacaatggagattcaaagggcccgacggcgggggtctacgatactgggttcatcgaccctcggaaaatcaacaccgaaatgatcgacaagtacgagaaagacacagaggacaatctcgtccatctcctaacgcagcaacatttcaagacgtacatactactgccgtacaacacagaagtcactgtgtacgactcaatgaataaagaggagaagatttttgataaggtcttcaaactgatagacagggcttgggatcggttccgtcaattggtccgcgggacttggaaagaaaaacttggacggaggtttgattttccatgtgcaaagcaggaccagggaactaacttatgcggctactacgtatgcgagtatgcccactgcctatcaaaccaaatatgcacaacacgagagctcgatcgtattcacatgagggataatctcccacacaaggattttatcacggctgttcaagaacaactgatgggattcatcaacgaagaagtccttaatctcgacggtgaattctactacgacggatcgacaattcataacgtcggtccttcctcttctgacataacaccggcgtcaaagtcgtag

SEQ ID NO: 69330 - DNA, 714 bp, Oryza sativa
  Clone ID: PAT_MRT4530_70008C.1
catgctactcgctgtgccgcggatcgcgacggcggtatgacgacgcgcgctgaatcaacctcgataaatcattccggggtcgcaaaaggaaacgaacttcgttgcagcctctaccgtctgttaattaagagacggacaaactattctcttctgggaagatagctggttgcaagagggttgcattcggtccattgctccgaacatctatgataaaattccaccacgcgtgcgctggcgtcgaacggtggttgaggcactaacagtcgcaattaacagatgctggaccgctgaccgtctgcgcagtcgagggttgccacacccggatcgctgtgttctttgcgatcagtacgaggaaagcattgatcacatcttggtagcatgccctgaatcgagacaattatggtggtggacgcttcaggcaataaggagtccgaactgcttacttgtcaatgagccatccttccacaattggctttgtgagagccgaatgaagattggggagcggcatcgtcgaggcttcgacaccgtcgtgacactgatggcttggacaatttggaaagaacggaacaaccaaatcttcaatcaacaacaaaggtcttggaccgaagtggcgaaagcaatggcggaggaggccatgctttggaagtcggctaatcacgggatccccgctgtttggcctttacgaggtcgtggtagccaaatttagtgcgagat

SEQ ID NO: 69331 - DNA, 2250 bp, Oryza sativa
  Clone ID: PAT_MRT4530_70009C.1
atggctgatcgcgatgaggaacagatactgtatgatacaatcgcagagggaagcagccaatactggaacgaagaagaggggaacgaggatccaaaccagtacttgaacgaggagcggaacgtggagagggatgcagaggggaacgaggaggggaacaaggaggggaacgtggagagggatgcggaggggaacgaggaggaggccagtggaagtcatccctccgctggacagaagagggcacgcggacaacgaggtgccacgaagaagataaagggtcggcacatcataactgaggtggacgaagacggccgacctagtgccccggcagaagcagccaagaattttgtacaccacatcggttgggttgtgagggataacgtgcctgtcagcaaggtgtactggcgcaaaacaagggcacgcggggatgatgacagctttgtcccggaatcagagaaagagatgctgtggactacaatgctcgagacgttcacgctccctgcgggtacggagaacatagtgaaacagtggactcttaagaaaatggcagaacagttccagagcttcaagggagatctctacaagaaatacatcctgaaggggctgacactgaacttcgacgtattcccaaagctaagggatcattgggacgagttcattgcttacaagacagggcaacaagggcaagcgatgatggacagaaacaaagaaaataccgccaagaagaagtaccatcaccacctggggtcaggcggctatagcgtcgcaatgccgaagtgggaggagatggaagcaagcattattgagaggggtatcgaacaggccaccgctaaatggccgtatcgatcgaagttctggtactatgctcacgagaaggacgagctgtcactcgccctgcagactcccgagcatccaggacaaacacgagggaaaggcgtggttccttggaagattggattcaaggaggacatccacacatacaggagtcggatgaggagcaagagagataccgaggcgaagattgcagatcttgagtacagggtatcgagctacgaggcaagaggaggtggcaaggaaggcaatcgtagcagctgcgcctcaacggggcaggtaggatcacagagcatggacgccatgcaaactcaggatgaaaccacctgccccgttgatgagatcacgcagcggacaccatgtgagctgcatattcccttcaagaacttatcaatcaaggtggcgttggaaatggccatcccaacggacccttcagggacttaccactgtaggccggttccagcaggatactcaagggtcgaagttgagctggtggaagccgcgtacgaggacctcgagttggactaccctggaggagacggtgagacgcatctacgagacacaagccacgccattatactatggcgcaagcggtacatcatcctccctaggcgacaagcggcgtctcgtgcaccatctcctccggctccgccatctcctccgccacctcctcctgcaccatctccttcggctcctccggctcctccacctccactgtgtccacctgcacctctcaagacaaggtctcgccaagctccaccgcctgcccgcacaagggcaacgaagaaggcgaaagttgacgccaccaaaaacaaggagtcgccgtacgattgcagtcaagaggagcttaatgcttatgtggcaggagaagtgaagaggcaactcaagcctcggagtcctgaaaagaagatacctgttgacccgagcgtgaagaacttattcaagaaaatgtccacaacaaacaaggagatgtacaaattccatgaacggtacatggaaatgagtgccaagggtagagagatgttcggagcgaggatcagaaactccgacttcttgcaaggagaagatgttctatggatccatttcaaggatgtcttcgaactataccctctggacaccctcgacgtctctcttctaagcgcattgattttaatggagattaaaagggctcgacggtggggggtttacgatactgggttcatcgaccctcggaaaatcaacgccgaaatgatcgacaagtacgagaaagacatagaggacaatctcgtccatctcctgacgcagcagcatttcaagacgttcatactactgccgtacaacacagaattccactgggtcctgttacttttcgacttggacgcatgcagagtcaatgtctataactcaatgaataaagaggagaagactttcgacaaggactag

SEQ ID NO: 69332 - DNA, 641 bp, Oryza sativa
  Clone ID: PAT_MRT4530_7000C.1
tacatactcctggtgtagtatggtgtgatgtgctacttgagttatccatttttttcatggctagctgaactaaactatgctagatgcttctgttaagattgttccaaagtacaaacagtatttcaacatcagaaagcctgtaattgcttatgctcctgtatgtttagttttactagggcgcggggacagtctcaaataatcgaggcgctcggggctacagttgaacgagtgcgccctgtttcaattacacatagggaccattttgtcaatattgctagaagaagggctttagaagcaaacaaatcagcagcggcccagagagagtcaaggtacaaagaaactaatggttcagcgcatgtcaatactagaataatgcacagcaagataacagcaagcaaaggggagtcaaacaaggcactaactaactgttcagccaattctgaaatacaatataacgggaagtgtgatcatgactctgattcaaagggaggtttctttgctgaccaatttgagaatatggcaaactaccgagcccattatgaatggactggtcctgagatatggcaacaaagtaaagggacactgcatgcctttgttgctgcagctggcactggtggcacaattgctggagtctcacggta

SEQ ID NO: 69333 - DNA, 237 bp, Oryza sativa
  Clone ID: PAT_MRT4530_70010C.1
atgggctccaccagctccgctaaaatgttccgggatgggcgtaatcagggccgtccaaagcggccgatcgacgcggaggggaaggtagtggccgccgcgtgggtccgactaacatgcattgggaacgttaggaagcgtgacacgcaccgtcactaccttcccgtctctcgtatccgagttgggtcgcttttgacatccgtggaactcctagcccaaagggacgaaaatgacagatga

SEQ ID NO: 69334 - DNA, 858 bp, Oryza sativa
  Clone ID: PAT_MRT4530_70011C.1
atgaccaccgaagcatccaccaatctgcacttctgcagtgcagaaagtgccattcaccttgcctttggagaaagactgccactgaacgacaccctcgaccactgctcgtggttgaccgtaaagtggcaccaacagcagctggatcacaagccatctgaacagctggggcaccttccatggtggacatggttgcaatggacctcctcaagcaaaccttggcaggggctagccattccggggtcgcaaaaggaaaggaacttcgttgcagcctctaccgtctatcaattaagagacggacaaactatcctcttctgggaagatagctggttgcaagagggttgcattcggtcctttgctccgaacatctatgataaaattccaccatgcgtgcgccggcgtcggacggtggctgaggcactaacaggtcgccaatggatcaaagacatccgaggagcacttgggatccaacctattctagaatatctaaagctttggtcgcttgtccaaatggtggatcttgatcctactactcctgattcaatcatctggaaatgggagagttcgggccaatacagctcaaaatctgcctataaggccttgtttttgggtcgtgtcaccttcctttccaccccaatttggaagtcactcgctccgcctcgatgccgcttcttcttgtggttggtcacaatgaatagatgctggaccgttgaccgtctgcgcagtcgagggttgccacacccggatcgctgtgttctttgcgatcagcaggaggaaagcattgatcacatcttggtagcatgccctgaatcgagacaattatggtggtggacgcttcaggcgataaggagtctgaactga

SEQ ID NO: 69335 - DNA, 4031 bp, Oryza sativa
  Clone ID: PAT_MRT4530_70012C.1
ctgctaccagttgtaataaggggtatcctcccagacaatgtccgggcaacaataacaaagctatgtgctttcatgaacgcaatttcgcagaaggtcatcgatcctgatagattaaaagccctgcagaatgatgtggtgcaatgtcttgtcagctttgagttgatatttccaccttcatttttcaatataatgacgcatctgctttgtcaccttgtcaaagagatcggtattctcggtcctttgtacctacacaacatgtttcctttcgagaggtacatgggcgttctgaagaagtatgttcgtaaccgtgctagtccagaggcaagcatcgctaaggggtatggaacagaggaggtcattgaattctgcgtagaatttattgaagaccttcgcccaatcggggtacctgaatcacgccatgaagggagactacggggaaaggggactctcggaaggaaagcaataatgacggtagacaacaatttattccgtaaagcccatttcacggttctgcaacaatcttcattggtggctccttacatcgaggagcacttggctctagttcgcgcaagaaacatcggtaagtctgatgcatggattactaggcatcacattgatactttctccacgtggctgcgacaacatctcatgggtaacgagacgattaaccaacaactgccttcctggcgaggagaccatttggctcgatcgcgacattccagggatatgaaatcaatgggtacacattctacacgagggcccaagacatgaagagcacgaaccagaacagtgctgttcgtatcgatgccatgggacacgatggtacaactggcacgtattacagtgccatcgaggatatatgggaacttgactatggacctctcaaggttggatactcggacgaaccttttgtccttgccaatgatgtaacccaagttttttacgtcaaggacatgtctagcaaaggaaaaaagggcaaagggcctgacgagccgaagcgccacgtggttctcccaggaaaaagaaaaatcgtcggagtagaggacaagactgacgaggattacgatcagtttgatgggtaaccccctttcacggtgacgattgaccctagcatcctcctatcaaatgaagacaccccttactcatgtagcgatcacaaggaaggaacaatagtgaggagaaaaaacacatatgcaatgaaattcaagacacagctgctattatctttagtcccggttcctaactctaaccggatggctgatcgcgatgaggaacagatactatacgatacaatcgtagagggaagcagccagtactggaacgaaggagaggggaacgaggatccaaaccagtacttgaacgaggaggggaacgtggagagggatgcggaggggaacgaggaggggaacgatgaggaggaggctagtggaagtcatccctctgctggacagaagagggcacgcggacaacgaggtgccgcgaagaagatagaggaagcagctaagaattttgtacgccacagcggttgggttgtgagggacaacgtgcctgtcagcatggtgtactggcgcagaacaagggcacgcggggataatgacagctttgtctaggactcagagaaagagatgttgtgaaccacaatgctcgagacgttcacgctacccgcaggtacggagaacataatgaaacagtggactctgaagaaaatggcaaaacagttccagagcttcaagggagatctctacaagaaatacatcctgaagggattaacaccgagcttcgacgtattcccaaagctaagggatcattgggacgagttcgttgcttacaagacagggcaacaagggcaagtgatgatggccagaaacaaagaaaatgccgccaagaagaagtaccatcaccacttggggtcaggcggatatagcgtcgcgatgccgaagtgggaggagatggaggctagcttgcttgagaggggtatcgaaccggccaccgctaattggctggaacgatcgaagttctggtactatgctcacggtggaacgcttaacccagttgatggctcccttgtcttcagcgatcagatacgcgaggctgccagtcgactaacggacgcagtggtagcctcttctcagggaacattccgacccgacagagagagattccgacccgacagagagaaggatgagctgtcactcgccctatagactcccgagcatccaagacgaacacgagggaaaggcgtgattccctggaagattggatttaaggaggacatccacacatacaggagtcggatgaggagcaagagagataccgaggcgaagattgcagatcttgagtacagggtatcgagctacgagctcagcatgcaagaggaggtggcaaggaaggtggatgaacgtatggccgcacatcggtcctaggatccccagccgtacattcatcacgtgaaggtggcgtcgggaatggccatcccaacggacccttccgggacttaccactgcaggccgattccagcaggatactcgagggtcgaagttgagctggtggaagccgcgtacgaggacctcgagttgaactacccaggaggagacggtgagacgcatctacgagacacaagccacgccatcatactatggcgcaagcggtacatcatccttcctgggtgacaagcggcgtctcgtgcaccatctcctccggctccgccatctcctcctgcaccatctcttccggttcctccgccacgtcctcctgaaccatctcatccggctcctccgccacctcctgctgcaccatttcctccgactcctccgcctcctccgcctccaccatgtcggcttgcacctcccaagacaaggtctcgccaagctccaccgcctgcccacacaagggcaacgaagaaggcgaaagttgacgccaccaaaaacaaggagccaccgtacgattgcagtcaagaggagcttgatgcttatgtggcaggagaggtgaagaggcaactcaagcctcggagtcctgaaaagaagatacctattgacccgagcgtgaagaacttcttcaagggaatgtccacaacaaacaaggaggcgttacagatatcggactatgaccgaacacttcagagagcctatcacaagaagtccaaaccagtccctcagcttggagaacaaccaaaccaagaggtcgagccattggtgaccggtgaagattttggcataacagaattcattgcagacaccggtctaactgtggatcagttggttcgaggcgcaccaatcccgaaggcggaagtggcatacaagtttgaactcggtaaaccgcttgtcaaacctgaacagctgcagtccctaccgacacagatgtacaaattccatgaacggtacatggaaatgagcgccaagggtagagagatgttcggagcgaggatcagaaaccccgacttcttgcaaggagaagatgttctctggatccatttcaaggatctcttcgatctgtaccagttggacgccctcgacgtctctcttctgagcgcatggattttaatggagattcgaagggcccgacggcggagggtctacgatactgggttcatcgaccctcggaaaatcaacaccgaaatgatcgacaagtacgagaaagacacagaggacaatctcgtccatctcctaacgcagcagcatttcaagacgtacatactactgccgtacaacagagaagtcactgtgtacgactcaatgaataaagaggagaagatttttgacaaggtcttcaaactaatagacagggcttgggatcggttccgttaattggtccgcgggacttggaaataaaaacttggacggaggtttcattttccacgtattcacatgagggataatcttccacacaaggattttatcacggctgttcaagaacagccgatgggattcttcaacgaagaagtccttaatcccgacggtgaattctactacgacgaatcgacaattcataacgtcggtccttcctcttctgacatagcgccggcgtcgaagtcg

SEQ ID NO: 69336 - DNA, 2655 bp, Oryza sativa
  Clone ID: PAT_MRT4530_70013C.1
atggcagaacagttccagaccttcaagggagatctgtaccagaaatacatcctgaaggggcagacaccgaacttcgacgtattcctgaagctatgggatcactgggacgagttcgttgcttacaagacaggtcaacaagggcaggcgatgatggaaagaaacaaagaaaatgccgctaagaagaagtaccatcaccacttggtgtcaggcggctatagcgtcgcgatgccgaagtgggaggagatggaggcaagcttgcttgagaagggtatcgaaccggccaccgctaaagggcctgatcgatcgaagttctggtactatgctcacggtggaatgctcaacccagttgatggctccttgactcccgagcatctaggacgaacacgagggaaaggcgtgattccctggaagatgggattcaaggaggacatccacacgtacaagagtcggatgaggagcaagagagataccgaggcgaagattgcagatcttgagtacagggtatcgagctacgagctcagcatgcaagaggaggtggcccggaaggtggatgaacgcatggcagcacatcggtcacacgatccccagccgtacatacctcctccaatggtcagcccatcaggcaatcatagcagctgcgcctcaatggggcaggtagtatcacatagcatggacgccatgcaaacccaggacgaaaccacctgccccgttgatgagatcacgcaacggacaccatgtgagctgcatattcccttcaagaacttatcaatcaaggtggcgttgggaatggccatcccaacggacatttcagggacttaccactgcaggccgattccagcaggatactcgagggttaaagttgagctggtggaagccgtgtacgaggacctcgagttggactacccaggaggagacggctcctccgcctcctcctgcaccatctcctccggctcctccgccacctcctcctgcaccatctcctccgcctcctccgcctcctccaccgttcaagaggagcttgacgcttatgtggcaggagaagtgaagaggcaactcaagtctcggagtcttgaaaagaagatacatattgacccgagcatgaagaatttcttcaagggaatgtccaccacaaacaaggaggccttaaagctatcagactatgaccgaacacttaggaaagcctattacaagaagtccaaaccagttcctcagcttggagaacaaccacaccaagtggtagagccgttggtgaccggcgaagactttggcataacggatttcatttcggacaccggtctaaccatcgctcagcctgagcagctgcagtccctaccgacacaaatgtacaaattccatgcacggtacatggaaatgagcgccaatggtagagagatgttcggagcgaggatcagaaaccccgacttcttgcaaggagaagatgttctatggatccatttcaaggatgtcttcgatctgtaccatcgggacgccctcgacgtctctcttcttagcgcatggattttaatggagattcaaagggcccgacagcgggggttttatgatactgggttcatcgtccctcggaaaatcaacaccgaaatgctcgacaagtacgagaaagacacagaggacaatctcgtccatctcctaacgcagcagcatttcaagacgttcatactattgccgtacaacacagaagtcactgtgtacgactcaatgaataaaaaggagaaggtttttgacaaggtcttccaactgatagacagcctcgccggcggctgcgttgcagataacgttgaaagctctagcatggagaactccagttccaaggctgccggagtggagcgccccaatcttaccggagaggagcgccccaatgtgccgcgtgcacgccgagcgccccaacgccggcgccgtcaaagctcgcgcacctttgcagtcctgcagcaggtgcgaatgtttcaggtggtggtggctctagttctgttttcactagagcccttcatgctgctcaagcaagaaagatgcatcagcggaagcagctacctggaaaacattccacggattggcatgtacaatgactccatgatagcggaattcattgagaaggatgtaattctcaagaaccggaatcctttccccgcgtatggaaagatgaagctgcgaaacaaacatgatgaaaaatacaatattggccatcatacgggtgcaatagaggctatccatgtggatcatacctacgatgccaggtctgacatcgagcccccaagctttaatctaggaataacacaagatatcgaagaagtaaacatggtggcatgtaccccaggtcatgacatatccaatgtggctgaagactctgacaaagaacaagaactcaactttttagcacgtaccccagatcagccaatctcaaagtcagtagatgcctctgacaaatccggagaagctggtgatgaccagtggaacccagaggaccatctcccctcattcaaagatgactccctgataccatatgtcgtacctagttgccacctggagtgcatgaagcttgcatttccagattggggcgaggatataccaaactgggtttctaagttcccttcggtcatcccagctttaaacaacaagttccagttcatgctcccaatttga

SEQ ID NO: 69337 - DNA, 4047 bp, Oryza sativa
  Clone ID: PAT_MRT4530_70014C.1
atggaagaagatgaagtggaagacgacaatattctggacattgctcagtacgctggatttgaaggaaatcaaacgggcgaggaggaaagggatgctgatggtaacaacgttgcggatgatcttggtcagatgttgcaggacgccaaggaggattgcgaatgtgaaaagggggcccataaattggacaagatgttagaggaccacagaacgtcgttgtacccaagtaacaaagctatgtgctttcatgaacgcaatttcgcagaagagatcggtattctcggtcctgtgtacctacacaacatgtttcctttcgagaggtacatgggcgttttgaagaagtatgttcgtaaccgtgcttgtctagaggcaagcatcgccaaggggtatggaacagaggtggtcattgaattctgcgtagaatttatcgaagaccttcgcccaatcggggtacctgaatcacgccatgaagggagactacagggaaaggggactctcggaaggaaagcaataatgacggtagacaacaatttattccgtaaagcccattttacggttctgcaacaatcttcattggtggctccctacatcgaggagcacttggctctagttcgcgccagaaacatcggtaagtccgatgcatggattacaaggcatcacattgatactttctccacgtggctgcgacaacatctcatgggtaatgagacgattaaccaacaactggccttcctggcgaggggaccatctagctcgatcgcgacattccagggatatgaaatcaatgggtacacattctacacgagggcccaagacatgaagagcacgaaccataacagtgttgttcgtatcgatgccatgggacacgatggtacaactggcacgtattacggtgccatcgacgacatatgggaacttgactatggacctctcaaggttggatactcggacgaaccttttgtccttgccaatgatgtaacccaagttttttacatcaaggacatgtctagcaaaagaaaaaagggcaaagggcctgacgagccgaagcgccacgtggttctcccaggaaaaagaaaaatcatcggagtagaggacaagactgacgaggattacgatcagtttgatgggcaaccccctttcacggtgacgattgaccctagcatcctcctatcaaatgaagacaccccttactcacgtagcgatcacaaagaaggaacaatagtgaggagaaaaaacacatatgcaatgaaattcaagacacagctgctattatctttagtcccgattcctaaccctaaccggatggctgatcgtgaagaggaacagatactatacgatacaatcgcagagggaagcagccagtactggaacgaagaagaggggaacgaggatccaaaccagtacttgaacgaggaggggaacgtggagagggatgcggaggggaacgaggaggggaacaatgaggaggaggctagtggaagtcatccctccgctggacagaagagggcacgcggacaacgaggtgccgcgaagaagatagaggaagcagccaagaattttgtacgccatagcagttgggttgtgagggacaacgtgcctgtcagcacggtgtactggcgcagaacaagggcacgcggggataatgacagctttgtcccggactcagagaaagagatgctgtggaccacaatgctcgagacgttcattctacccgcgagtacggagaacatagtgaaacagtggactctgaagaaaatggcagaacagttccagagcttcaagggagatctatacaagaaatacatcctgaagggactaacaccgaactttgacgtattcccaaagctaagggatcattgggacgagttcgttgtttacaagacagggcaacaagggcaagcgatgatggtcagaaataaagacaatgccgccaagaagaagtaccatcaccacttggggtcaggcggatatagcgtcgcaatgccgaagtgggaggagatggaggcaagtttgattgagaggggtatcgaaccggccaccgctaaatggccggatcgatcgaagttttggtactatgctcatggtggaacgcttaacccagttgacggctcccttgtcttcagcgatcagatacgcgaggctgccagtcgactaacggacgcagtggtagcctcttctcagggcacattccgacccgacagagagaaggatgagctgtcactcgccctacagactcccgagcatccaggactaacacgagggaaaggcgtgattccctggaagattggatttaaggaggacatccacacatacaggagtcagatgaggggcaagagagataccgaggcgaagattgcagatcttgagtacagggtatcgagctacgagctcagcatgcaagaggaggtggcaaggaaggtggatgaacgtatggccgcacatcggtcccaggaatcccagccgtacattcatcctgcaatggtggcgtcgggaatggccatcccaacggacccttccgggacttaccactgcaggccatactcgagggtcgaagttgagcttgtggaagccgcgtacgaggacctcgagttggactacccaggaggagacggtaagacgcatctacgagacacaagccacgccatcatactatggcgcaagcggtacatcatccttcctgggcgacaagcggcgtctcgtgcactatatcctccggctccgccatctcctcctccaccatctcctccggttcctccgccacgtcctcctgcaccatctcctccggctcctccgccacctcctgctgcaccatctcctccggctccttcgcctcctccgcctccaccgtgtccatctacacctcccaagataaggtctcgccacgctgcaccgcctgcccgcacaagggcaacgaagaaggcgaaagttggcgccaccaaaaacaaggagccaccgtacgattgcagtcaagaggagcttgatgcttatgtggtaggagaggtgaagaggcaactcaagcttcggagtcctgaaaagaagatacctattgacccgagagtgaagaacttcttcaagggaatgtccacaacaaacaaggaggcgttacagatatcggactatgaccgaacacttcagagagcctatcacaagaagtccaaaccagtcactcagcttggagaacaaccaaaccaagaggtcgagccgttggtgaccggtgaagattttggcataatggaattcatttcagacaccggtctaactgtggatcagttggttggaggcgcaccaatcccgaaggcggaagtggcatataagtttgaactcggtaaaccgcttgtcaaacctgaacagctgcagtccctaccgacacagatgtacaaattccatgaacggtacatggaaatgagcaccaagggtagagagatgttcggagcaaggatcagaaaccccgacttcttgcaaggagaagatgttctctggatccatttcaaggatctcttcgatctgtaccagttggatgccctcgacgtctctcttctgagcgcatggattttaatggagattcaaagggcccgacggcggagggtctacgatactgggttcatcgaccctcggaaaatcaacaccgaaatgatcgacaagtacgagaaagacacagaggacaatctcgtccatctcctaacgcagcagcatttcaagacatacatactactgccgtacaacacagaagtcactatgtacggctcaatgaataaagaggagaagatttttgacaaggtcttcaaactgatagacagggcttgggatcggttccgtcaattggtccgcgggacttggaaagaaaaacttggacggaggtttcattttccacgtattcacatgagggataatctcccacacaaggattttatcacggctgttcaaaaacaactgatgggattcatcaatgaagaagtccttaatcccgacggtgaattctactacgacggatcgacaattcataacgtcggtacttcctctcctgacataacaccggcgtcgaagtcgtag

SEQ ID NO: 69338 - DNA, 1295 bp, Oryza sativa
  Clone ID: PAT_MRT4530_70015C.1
atgggttacaaggtcttctcctcccgctcgccggctcctcctcgcaccaactccggcgagcgcggcctcgccgccggcagcggcggcggagggggtggcatggaccggtggaccggtgtcctcaacgtcccgctctcccgaggtggccctcccttccgcgtcgccgcctcgctcgtccttactccggccaaaaccctcgccgtcccatgcgccaacgcgattctcttcacgggcgaccgcgtccggggcagcggcgacccggcgatcgagcggctgtcggacgccgcctacctggctcggctcctcgccgggaagctcaccggggaggccaacgcgtgggtggtggatgccgcctgcttcgctggttcgtttgcagtttaccgagatctcgttccgtccgtggacgccgtgggcgaccccgagcggaatttcgcgctaacatttttttttgtcaacatacaatctatggttacgaaggccacaatgaagggttcatcaggcaatcaaagtcctactacatcactgttaaaatactgtcctccgaagactgtcatcctggggttcagtaagggtggagttgttgtcaaccagctcgtgacagaacttgcctgtttggcctcagaatcagcaaagatatcagatgatgtttcaggatcaagcccacctcttttaactcgcaatctccttgttcctatttcagctactgagtttttgtcaagtgcgtctgaattccattatgtggatgttggcctcaatcatgctggagcgtacattaccgatcatgcagtgattaaggagatagcaaattatcttatgcacactagtaagaatctctgttttgtccttcatggtactccgaggcagtggtctgatcctaaccgctcatggatccagatggagaaagaggtaatgctgcgcttgcttcaagatgaagctcaaaggtgtgaagggagacttgtgttatcccaaaagagatattttgatggcaaacctcgcagtctgctcatgcattttgaaattttggaagtaatggacataggctgactctatgtaaacggtctgtagcttttttactcccgtcagggatatgcatagaataccagaatgctgcatatatctgagggtcttggatactttcatccgtgctgacttcacggtatcccattccataagttgttttgtgcatgagaattcttgacagaataatcaacccccgttggattcctcatatcaaatgatgatctatgaaatgtctataagactgctttatccacctaaaaaaaaaaaaaaaaaaa

SEQ ID NO: 69339 - DNA, 281 bp, Oryza sativa
  Clone ID: PAT_MRT4530_70016C.1
ggtacccctgcggagcccggcccggggattcaagttaatctagtactacaacaacatgggatccataaatcgccccatagttttcttcacagtagcgctcggtcctcttgtgcaatggctgtctagcccagcatggtattaggccagagcactagacaatggcgcagttctcgtagtggaaagacaagagaaagcaggttcgataggttgtgagattttgagccaagacgagacgagacgacagagagctgtaacaactgagatctgcgtagtgaataatg

SEQ ID NO: 69340 - DNA, 2303 bp, Oryza sativa
  Clone ID: PAT_MRT4530_70017C.1
ctcaactccaaaccatttcctccccatcgccgccgccgccgcagctgaatcttcccgcgtgaagccttcaactcggctcggggatggattccgacgcggcaccgtcagtgacgccgggggcggtggcgttcgtcctggagaacgcgtcgccggacgcggccaccggcgtgccggtgccggagatcgtcctccaggtcgtcgacctcaagcccatcggcacccgcttcactttcttggcgagcgatggcaaggacaagataaagacgatgcttctcacccagctcgctccggaggtgcgctccggcaacatccagaatctcggcgtcatccgcgtcctcgactacacctgcaacaccatcggcgaaaagcaggaaaaggtcttgattatcacgaagctcgaggtcgtgttcaaggcgctggattccgagatcaagtgcgaggccgaaaagcaagaggagaagccggcgattctgttgagtcccaaggaggaatccgtggttctctccaagcccacgaacgcgccgccacttcctccggttgtgctgaagcccaagcaggaggtgaagtccgcgtcccagatcgtgaacgagcagcgcggcaatgctgctcctgcggcgcggttggccatgacgagaagagttcatcctttgatctccctgaacccctaccagggcaactggatcatcaaggtgcgtgtcacaagcaagggcaacctgaggacgtacaagaatgctcgtggtgaaggctgcgtcttcaatgtggagctcactgatgtggatggcacccagatccaggcaaccatgttcaacgaggctgccaagaagttctatccgatgtttgagctggggaaggtgtactacatctccaaaggatctctcagagtcgccaacaagcagttcaagactgtccataatgactacgagatgaccctgaatgagaatgctgttgttgaggaagctgagggcgaaacttttatcccacagattcagtacaactttgtcaagattgatcagctagggccatatgttggtggcagggagctagtagatgttattggggttgttcagagcgtatctcctactcttagtgttaggaggaagattgacaacgagacgattccaaagcgtgacatcgttgtagcggatgactcgagcaaaactgtaaccatatctctttggaatgatcttgccacaactactggtcaggagctcttggacatggtagactctgcgcctatcattgcgataaagagcctaaaagtatctgacttccaaggtttgtctctgtcaactgtggggagaagtacaattgtagtgaatcctgacttgcctgaggcagaacagctcagagcttggtatgactctgaaggcaagggtacttcaatggcatcaattggttcagatatgggcgcatcaagggttggtggcgcgagatccatgtacagtgatagagtttttctgtctcacatcacaagtgaccccaacttgggtcaggataagcctgtgttcttcagtctgaatgcctatattagccttatcaagcctgaccaaaccatgtggtaccgagcttgcaagacctgcaacaagaaggtgactgaggcaattggatcaggatactggtgtgaagggtgccagaagaatgatgctgagtgctcactgaggtacatcatggtcatcaaggtctccgaccctactggtgaggcctggctttctctgttcaatgatcaggcagagaggattgttggctgcagtgcagatgagcttgatcggattaggaaggaggagggtgatgacagttaccttctcaagctgaaggaagctacttgggttcctcacctgttccgcgtcagcgtaactcagaatgagtacatgaatgagaagaggcagaggatcactgtgaggagtgaagctccggtagaccacgcagctgaagccaagtacatgctcgaggagatagccaagctgacaggttgctagatgcaaaattatcggtgaagcttgaagagtccatgaaagcttagatgcagtgtttcggtgaagcttttgaagtgcctgtccatgaaagcttttgaggtgtaatagctttataaattatggtttctccactgcaattaggtgctagctagtattagccttttgtattataggtagatgcatgcttaacttgtttttgaggcaaccagaatgtgatgctgttatacagccgttttatcttcaaatgtgatggttgcctggacagattgtgaaattgataattggaatcagtaactggttgatgttaatttcctataaaaaaaaaaaaaa

SEQ ID NO: 69341 - DNA, 273 bp, Oryza sativa
  Clone ID: PAT_MRT4530_70018C.1
ttgaccgtacaagcaggtaagtatagggctcggctaggaattcgtttatgcttatatttaaaagctctcatctcacttgtgcagacaggttcgtcgggggttatgcaagcttcagaggtggggggtacgattgtggaagatcgcgtggaggcaggggttggagatgtgatgcaaggatgcggggaattgggtggaaggacagtcgttaatgtggagtcaggtttgacgggcgtgaggcaagaagtggagggaagtgggatctagattagaaga

SEQ ID NO: 69342 - DNA, 932 bp, Oryza sativa
  unsure (1)..(932): unsure at all n locations
  Clone ID: PAT_MRT4530_70019C.1
tccttttagcctaccaccaagacaaaaagnaagctctagtgaggttaatattaacctaactaaactttaatgagggttaatattaccctcacgcagctccccctcaagttaatataaaccctcactaaaccattactgacgcttaatattaaccatcactacatctttcttgacggttatgataaccttttttgaggcgtagtgtctaccatgtgctatgagccacaccatctcatagtcatatatagttctctcttatatcgctacctctttcattcnaccagacatcttaccgttgtcccctctatttgagtatcattcctccntccctctatttatatattatacttctacactacctatcaatcttctcatcaccccacacgacccacccccagttccctattagaccacattacacgacagaccacttatctgatgattcccacccgaaaagctatggtcatactcccctacataacacttttcaacccaccacttaatcaccaacatacaaacgactaagatcactatcatgtctagccccctttttccatttctcactacctttcccatgtaacttccatacaccctcctcactttctgccgccagtgattactgaaccctcccacgtgccacccgccctacacccgcagtatagcagaccccaccaccatcccgctcctttctgtcccgttccgtaaagcactgtactgccactattccgttcttatatggttgtgcagtctatagataacttcgataatctcaacgcataatcccgcaacatattcctatatgatccagctcgatttatttattacaatttcattacagctatttcaataactagatattatgtatatctctatacaacaaatcctacacttccagaccgatctcagatagtacccttatcactatgctctcc

SEQ ID NO: 69343 - DNA, 1758 bp, Oryza sativa
  Clone ID: PAT_MRT4530_7001C.1
cccacgcgtccgatctgcttcttcttccgctacgcttgtgggcacgatgagaagggcgaccattcttgtactgctcattgcactctcatctgttattgctccccttccattggaagctctcaatgtaagaggccatctactgaaatccaagacatttctgtctccggcattcttcctgcaccctggatcagtttcaaacaagttctactatgatgtccccttccctagaggccaccttgctctcaagagctttaatgctgaagtcgtagacgagaatggcgtccctgttccgctccatgatacttacctgcatcactgggttgtggaaccatactatgctttaaagaacagtgatagcgcagacgcgcaaaagctacccaaggggatcattgcaaggaactctggtgtgtgcaagaaaacattaggccagtactacggccttggttctgagactcgccatactgccacatgggtacctgatccttacggcatagagattggtaatccggagaagccccctgaaggatatgaggagaaatggttgatcaatgtgcatgccattgacacaaggggtgcgatcgacaagctaggatgcactgagtgcaagtgtgatctttacaacatgacgatcgacgagtatgggcgcaaactcccaaaggactacattggtggtttatattgctgctatgatgagacgcagtgcaaggttaaggaaggtttcaacggtgagctacggaagctgttcttgcggtacactgtgacgtggcttgactggagtgatgcggttgtgccagtcaagatttacatatttgatgttactgacacttctccgcctgatgaaaaatccggaactgcctgcaaggttgagtaccaagttgaggaatgcagtccagaaaaccgggccaagaatgagtgcattgatgttaaagtaaccaaagaagtaataccttgtggaggcgatatcgtgtttggtgtcgcgcaccagcattcaggtggaattggtgcctctttacacggccaggatggacgtctgctttgtgcatcgattccgagctatggcaagggggaagaggctggcaatgaagataactacatcgtcggcatgtcaacatgctacccgaagccgggatcagtcaaggtcagtgatggcgaggtgctgaccgtcgtctccaactacagcagtgaccgccagcacaccggcgtcatgggcctgctctacatccttgttgcagagcaagaacagccagctcccaagcctgctctgtgcttcagcttcccggttccatggtgcttaccgacatggctgacgagcaatctctgaatgttcaagttggacctgaagaagatgatgcatagatgtaagcaaataagttgcctgggtttttttgttgaactatggcagaccataggagtagtttgctgtgtcattttgatgaaccatcagtagtttctgatgatctgtggcactacggcactaatatatcaaactgggtcatatacaagggcattggcagacatctttctccaaataatagtattactctgaagaagctagtgaaaactgggaaccagatgtacaatctcttgtactgttgtactgttatatactggtgtatacagtatttatgtatatggtttttaggtaatggaatgaatagttatataaaaaaaaatgaatgcatgtaacatgattctgtaccatttttttatttgaaaaaaaaaaaaaaaacatcaaaatccacaaaaaaaaaaaaaaaa

SEQ ID NO: 69344 - DNA, 572 bp, Oryza sativa
  unsure (1)..(572): unsure at all n locations
  Clone ID: PAT_MRT4530_70020C.1
tttacgcgtgggtgattatgaagctgtagaaaggaggttttgcagtactaacattgtataggatattactaacattgtataggatataataccagggccaaacatttgggtggtttgtattaatgctcttctttttctagccaatcacttcattcagtttgacaatatgtatatcattttttgtccttaacattagaatggtaatgctttaatgcagccaacttttttacaaagtattttaagcataatttcaccaagattgccttaatgaaatgattgtcagacatagatgcacatgcttttttcttgcgttatgaaatgtcagataaatttatttcaagttactacttgcaaagttgtcaaatcttagtcgagcaaaagtcagcagtacacaatctgcacatatacggtaccgttcattttgagcaatgtctatacatgaaagtcctttcttagcagtcaattccatggtccctgcaagtgtacattctatttgacaatgccacgtttattattattntgcatgcttatgcangatattatcaagctgatacttcgcattttctagattt

SEQ ID NO: 69345 - DNA, 348 bp, Oryza sativa
  Clone ID: PAT_MRT4530_70021C.1
atggaatcatggaaggatgtagcggtgtggtatagagatgagctcaacgttgcacaagatgacgagcaaaagaaaaatagcaatcaacctccatcaccggcgcactccaccctatcctgtgcgggcagccacatggagcacaatagtgtcatttcctcatttgcttgttctatcaatgtcgccgacgtggagcagccgctggttgttgctattggccctggtgaacacctccttgctggttaaggtgttgcccagcgtctgacggcgagggtcgaagcagtgccttctcctcatctgccgccggccactgccatcaatcgccacggtgtcgtcgtcctcctcctccat

SEQ ID NO: 69346 - DNA, 225 bp, Oryza sativa
  Clone ID: PAT_MRT4530_70022C.1
atgccggatctggtgccgccgggccgcggggaggccagatccgccgccgccgcgtcgctaggaggccggatccgccgcggggacaaggccgccgccgccgcaggggacaaggctgccgccggtggagctactcctcgtccaggtctaccgcctcatcacctcccaagaggtgacgaaggcgctgtgggcgaggtagaacgagaagatgcggcggtgcgagcctag

SEQ ID NO: 69347 - DNA, 275 bp, Oryza sativa
  Clone ID: PAT_MRT4530_70023C.1
aaaaaagctgacagccgtggaaaaacaacaaaaaaaatggcgacaaagaaaggagagaaaagtgatggaagaacgaaagcacagccaagaccggcaggacacgaggcacagttctagagcctgacaaacgacacatgtatctacatagccgccttctcgataatgtgaagcttggcttgaagggcaccagaatatacgcatctcgaaccataagattcaaagggatggtatgcgtgggctccaagaattgagctgacgagagacttgcatgaatg

SEQ ID NO: 69348 - DNA, 294 bp, Oryza sativa
  Clone ID: PAT_MRT4530_70024C.1
atgccgtggcagcacgagcttaatcatttggccggcgagggtgtgcctccgcgcgtcgcggtcgccggcccgccacctacgccgccaccgtcgtcgccgccgcctatcccatcgcacgtgccgccgtcgctgacgccagagtacataccggagcttctgatcagcggcgagttcgtcgacgtggagctgggagctgggggatcgacccagcagaacgacggagcagctgggttctgcagcaaattgggtcgggcgatcatgcaggttcttctcagttgtggttgtggcctgtga

SEQ ID NO: 69349 - DNA, 596 bp, Oryza sativa
  Clone ID: PAT_MRT4530_70025C.1
aaaacaaaccccctaaaaaaaatttctggggggaaaaccatggggaaccccgtttgttcccaagggaaaattaattaagggggtatagttttaactttggcccttgatcccaacctggaactgggaccaccccctggctccagggcccccgggggcccagcaatttaacaatagctggggcccctagcaacagcagcaggggggcccctgttttgattggattggaccggattaaaaaacgtattttttgacaaacatgccctccttggcctcgggggcccccccgtcgttggggtacttgccgagctggcccagggagttggccttggggcggaggaaaaaggggttctgggccctctttaagttttccgggtgccccccccacattttgggggacgtgttttgcaacgcccttctttacaaaaacaatacgggccccgggttgggcccctgggtaattcggtttagggtttgggtgggccccccctccgagtggccccccaaaaaaaaaattattccgggggaccgggggggggggccctcttttggggagggcccctgggggggggaaaaaaatccctctgctaagggggggg

SEQ ID NO: 69350 - DNA, 150 bp, Oryza sativa
  Clone ID: PAT_MRT4530_70026C.1
atggaggtgagaccaatggttgctttgcgtgctgccctagttggtggggtagcagcatttgcgaagattggtgcggcgatgaaagctgcaggaggtgcgaaggcccacaggttctatgaagctgaccataacggtgtttataatggatga

SEQ ID NO: 69351 - DNA, 309 bp, Oryza sativa
  Clone ID: PAT_MRT4530_70027C.1
ggacaagaaaaggagtagaaataataaaaagaaaaggatcggtgcttacaattgagtgtgatacatacttaatgagttcaatgagttcaagatacgtaaggtcacacattttgagcaagttctagatgtagaaggccaactcaaatcagaccagcatacgtaaggtcctgagaacgttctcgatgaaatagcatatgtcgtctttggtgttcccatctggaatatccactacaaatgattcgaccaccaatgttccaagttggccatcgatgacctcagagtggatggttaggatggatgagtaattct

SEQ ID NO: 69352 - DNA, 162 bp, Oryza sativa
  Clone ID: PAT_MRT4530_70028C.1
acgcatgcgtacagttctattacgtgcaagacacggccgcgggtggaacaatatgagactgactgaagctatagatgcgcgtaataggcgagtactcaagacttcaattagccatttggcatgttatacaattcatctaataaaaccttgtgattctttcat

SEQ ID NO: 69353 - DNA, 3771 bp, Oryza sativa
  Clone ID: PAT_MRT4530_70029C.1
atggtgaaggactccaaaactccagtttacaatggatggcctaaacaacctggcaacgatatcgatgtgtacttcaagccgctggtagaggatcttcatacactatggacggaaggcgtgcagatgtgggatacgtacaaacaagaacacttcacatgtcgggctattttgttagggacaataacagactacccagcacttggaaacacgtcgggccaaatggtgaagggcatgaaagcatgtgtatggttcctcaggcgggatcacccacaccaccaaaataaaaaagcttttgatgggacggtggaaatagatggacgtccaatttttagaaccggaagtgagatcttggcggaggtgaagatccacatcgagcggcgtgctcggggtattgttgaacacacctggcaagatgaaggacactttgcaagcacggaaagatcttggaagacatggacatcaggaaagagctgcatcctcaagacagaggaaatggctgctactacctacctccggcatgctacactcttagtgctacagaaaaaacgactgctaccggtcgcaattagaggtatccttctagaaaagatccgagacccaatcatcaagttatgccagtttttcaaagcgataaaccaaaaggttatcgatccggcttcattgggcatgcttcaggaggacacgattctcaatctttgtcagctagatatgttgttccctctctctttcttcgatatcatggtgcatctgattgttcatcttgtggaacaagtaaagatcttaggtacagcatatctggatagcatgtgggctttcgagaggtttatgggtatcataaagaaatatgtcaggaacagatcgatacccgaaggcagcatcatcgagggttatgcaacagaggaggtggtcgaattctgtatagattacatggatctacaacctatcggtgttcccgtgccccgtcacgagggcaggatgcttggaaagggaatattaggtcataggagaattgtcgcccccaatcgacaaaccataagacatgcccattttgcagtgttacgacaatcagctttggtggctccgtacatggacatgcacttggatgttctccgtagagacaatcccaggaaaggcgcagcatggctcgcgaagatgcataaacttcaatttgggaaatggttgatggagtacctaacaactgcagacatcgatggtgcccatttttctttatctcggtggccatccaacacaatccacatgtaccagggctatgatatgaatgggtataccttttataccaagtcccaggacaacaagagtataaatcaaaacagtggtgtgcgcatcgacgcctacgatgatgagtcaatatgggagttagattacggagccctcaaagtccctctattccaatgcaagtgggtcaaaattccaagggggttgaagattgacaagcatggaacgatcatcgttgacctcaatgatgttggctacgaagatgaaccattcgtgctcgcaaaatccgttaagcagatattctatgtcaaggacccatcactcatgaagccacatcatgttgtactcgaagacaagcaaagtattgtcggaatggagatatcatcgacgaagatgactacgatcaacccgatgagccaccgacacccacaactgatgtcgagactgaaaacgaggcaagcgctaaagagaatgaccaaggcttcggcagcagtgaagaggggcagcggtgtgcggcggcaaggcggaggtggaggcagcaacgatggcccaatgccgagtaggtgtaaggtgggtgtagaggtgggtacggaacacaaagaatttgccagctccagatctgagggtgaacatcatgccagccctagcacgttcttaaacttaaatcaagagcattccgaaggcggagaggaagaatgctggcgaaagttgaagttgtcattcacctttccagaaggccaagaagagctagcaaagaagggagccctatcaaagatgggcacattatttagagagtggtggactgacttgaacgtggacttcgtccaatgcaaccgaaccccggattttgagaaacccatgtatcaaaagttggcagattattgggatgagtttgaaggctcaactatcggatcaggagagttggttgctctgggacctcatcagcaagagctaaaagaaaagatcactgaggccatttccctggcaagacagggtaaatttgtgccagtaagagagaaagatgagatcacagtggcactggggacgaaagagcaccctggacgcatgagaggcgttggttccgttccatggaaggaagggttcccggatgatacacacatgtatcgggcccgttcaagaagacccacgagagaagaggaggccggacgtatgagattagaggtggcctatcagagcaacattactcaggagattgcacgcaatgtggcacatccaatatgtgcagggcaaacaatacacggtgttccattgcctgcagaccactcaagggttgaagtggaagacgtgccaagccagtatagatgttatgtgctacaatttcctctagaggaaggggttgacactctgagcgctgctcttcacaacctgatcgtatggcccaaacgctacatcgttatcacaaacgatggggcaggggatccaagcgccgatgattccagcctttcaaacggacgaggtcattcttcgcctcgacagaggtcccctagtctacctcctcgtcagaagaccccaaatcaaccacaaccttcgcagaagtctccgagtacaggcccaattaggaaaaagaccccaacaccaagtgcgtcgcaaatgtctggttcatcaagcatggagcgactcccacattccaagtcgaaattagtgccaaatccgacaacttcgctaccgaaaaaggtgagcggtagcatcacttcgcttcttggccccaagaagcctgaggaacgaaagattccaattcctaagaaagtgatcgagcatttcatcaaatgcgcacagccaaggctacctccaaaacctatatcggacttccgtagaacacttgagaaaagtgaaatgcagtctcgatctagggagttgttccttgacaagaaagcgtctgatgaggctgctttctgtaagtcagtcgatttgaaaagcctagacgatattgataaccttgacaaggctgaggtggtactcagttccaacatggatgacccatggcgctgctcttatcaatgtagaagtcttgaccgtaagattgcatttctagatccagcggttgtgaacttcaacaatcagttgtccaaagaaaaagaaattgacgactatctcttcaatgccctcgttaagcaaaatggttatgaccatattctcctgccttacctatctcaccatcattggatcctcttcgtaatcaatatcgacgacagtaagatttgtgtatatgatagcttgaggaaagggacagacaattaccaaactattatgaatgcactaaatagggcatatgtgaagtaccgtaggtccaaaagaacgtatgggagatgtgcgatcgatgcaacatcattccggatctttgaaaatcaatatatttatagacaaccagcgcttaccaacctctgcgggatgtacgtcatgtggtacatgctatgttttgtagagtctgggcaccttcttccccgtaatgctgagaagttgggtcttgaaacaagcgaaatgctgccacacgtcttcacagctctcaccgactag

SEQ ID NO: 69354 - DNA, 1155 bp, Oryza sativa
  Clone ID: PAT_MRT4530_7002C.1
atggcgaagagtggtctcctccctctcaccatcctcctcctcgccgtcgccaccgccctccacggcgccgatcgtgtcacggccgtgccgtccttggagggcttggaagccgccggggagggcttggccgagcccatcaagaaggtcgtcggtggtgccgttgctaccggcgtcgaatctgtcggccggaagaggccggcgatgaaggatttcgccgccggcgtcaaggctggcagaaaattccacaagggcttcaaatccggcgccgccgcatgggcaatgcgttacctgggcgaccaattaccgccgtcatccctgtccctgcaggcatgggcggcctacagggacagggatgacggcagtaattggtcgcccagctcctttgaagcaatctgcaatgagtcggagatgattgcgcatttgcagtcattgttctggagcagcagcgatgctgatccttgttttggtagctcatcattttctctcatcagtagtgagggctacgacacaatgaccacagagtttgtgaatagcagcacaaatgtatgttttgattaccaagatgatagcttcgtttcagcagaggagactaccattggtaacaagagaaaagttcagatggatactgagaatgagctgatgacgaaccgcagcaaggaagttcgcaccaagatgtcggttgacatcagcacaatgttggaggaagcaattcagtatgtcaagtttctacacctgcaaatcaaggtagagggacttggtgctcaaggttctactactatgacatctagcttcgtcgacaacagcgtcaacaccaacctcaaccaaggagttcctacttcaacaatgctggtgtggactcaaatcggcgaaatcgtcttcccggtttacaccacggtgccgatcttagctggtccatcaatggccggaaacgagaacacagtggctacaacccagggcgattccatgtcgaaggatcctcccgccgaagcggagatcggaacgtcgacgacatccgagcccgagaaggatcctagtgcggccaagccttgtctttccgacaagaatcacgagtcgacgaggatgacttccgaggtgataaggtcctggtgtcctatccaccggcccagcacatcagggccgtcaacgcaatactga

SEQ ID NO: 69355 - DNA, 162 bp, Oryza sativa
  Clone ID: PAT_MRT4530_70030C.1
atgctagtatttgtgttgccggtcagaccggcggtgatcgagcggtcggaccggccagcccgcgaccggcggcactacggcagtcagaccggcgggagcacggtggtcagaccggtggcggcaacaggcgcggcgagcagcttcggcggtcagaccggttaa

SEQ ID NO: 69356 - DNA, 1368 bp, Oryza sativa
  Clone ID: PAT_MRT4530_70031C.1
atggcgacctcgccggagatagagcgaccggctgcggatttggaggacatgaacacgtacccactggatataatggatctagaatggataactatagcggatcgtgactctgtggagtatttcaggggagtaacggctctcgttgccacgtccaccagcacaaacttagtcgatgcaccagaatatatttggtgtccatgccatgattgtaagaaagacagacaacttccagctcagcgggtccattcacatatccttacaaggggttttatggacaatttccttagcgaggagaatcaaggtgagggaagtgctggcaactgtcatgggcatgatgcggatgtaggctacgaggaggaggaggaccaaacatgtgtcgatcacggtgaacctaatctagatcagatgttgcgcgacggggagagatttgacactgatgatagggaatatcacaagttcacaaccatggtgaaggactccaaaactccaatttacaatggattaatgcccggtatgcaagggagcggaagcacatgtgcatccacatcgagcggtgagacccctctattcaaaaagaagtctgtcttttgggacttgccatattgggaagacctggatattcgtcatgcgatcgatgtgatgcacgtgatgcacgtggagaagaacgtgtgccaaggcgtgctcggggtattgttgaacacacctggcaagatgaaagacacttcgcaagcacggaaagatctcaaagacatgggcatcaggaaagagctgcatcctcaggacagaggaaatgaccgctattacctatctccggcatgctacactcttagtgctgcagaaaaaacgagtatgttggaatgcatgtggggtgtcaaagtcccatccggttactgtgcgaacattaagagactggttagcatgaaagataagaggttggttggaatgaagtcacatgactgccatgttcttatgacgcaactgctaccggtcgcaattaggggtatccttctagaaaaggtccaagacccaatcatcaagttgtgccagttcttcaatgcgataaaccaaaaggttatcgatccggcttcattgggcaagcttcaggaggacgcgattctcaacttttgccagctggagatgttgttccctctttctttcttcgatatcatggtgcatctgattgttcatcttgtggaacaagtaaagatcttaggtccagcatatctgcatagcatgtgggctttcgagaggtttatgggcatcataaagaaatatgtcaggaatagatcaagacccgaaggcagcatcgtcgagggttattgtcacaccctgaagtttcccctttttcttgctttaaaaattggttaa

SEQ ID NO: 69357 - DNA, 882 bp, Oryza sativa
  unsure (1)..(882): unsure at all n locations
  Clone ID: PAT_MRT4530_70032C.1
catgaaggctagctccgtagcattgctcgccgccgtcatggcggtcgcggcggtggcctcgacggcggtggccaaggactacacggtcggcggctcctacggctgggacacctacgtcgactacgacaagtgggccgccggaaagacgttcatcgtcggcgacaccataaatcaacaatggcgtgcagcgttcaagtacgagccgtaccacaacgtggtggaggtgccggctgagacggactacgacggctgcgtctcgaccaaccccgtctccgtccactccggcggcaacaccaccttcgagctcgccgccgccggcacgcgctacttcatctgcagcatcccgcgccactgcctcaacggcaccatgcacgtcaaggtcaccaccgtcccttactccgcctcggccgccgccgccgccgccgcggacgccggcccttccccggcgccgctcccctcgcctcccgccgacgagcagcagcacaggtcgaactcggcgtcgtcgccggcggccggcccgagcagcagcgcggcgtccacgccgcggcatcggaagcagccggcggtggccgtggccgggctggccttggctgctctggtggccatggccgcctnaacgatataaaaagaaattaatatcgttttatatttcttattgattttaattactatttacatgtggcgtacgtaaatacacgggtttntacgtatatttatcgaggtgtggtgaaacttntcttgcaccagaggcgttttgttactcgttttgagggntgctgtgtattaattaattgttgtgtatacataagcccttntgtattttgcagttccatttattaaanagaagattcttgctgtttcattttgaaaaaaaaaaaaaaa

SEQ ID NO: 69358 - DNA, 741 bp, Oryza sativa
  Clone ID: PAT_MRT4530_70033C.1
ggttttatggacaacttccttggcgaggaggagcaaggggagggaagtgccggcaactgtcacgggcatgatgcagatgtcggctacaaggaggaggaccaaacatgtgtcgatcacggtgaaccaaatctagatcagatgctgcgcgacggggagagatttgacactgatgataaggaatatcacaagttcacaaccatggtgaaggactccaaaactccaatttacaatggatgtaaggcggagcacagcaagctccaagtggtcctatcgctgcttcacctgaaggcgagcaacggatggtccgataagagcttcactgagttgctagagctcttgaaagaaattcttcctacggacaatgtcttgccagaatcgacgtaccaagccaaaaaagttatatgcccccttggtcttgacatacagaaaattcacgcttgtctaaatgattgcattttgtatcgtggtgaatttgcatatttggagcaatgcccgggtaagtacatcatgatgccacttctgattcaagggcctacacaacctggcaacgatatcgatgtgtacttcaagccgctggtagaggatcttcatacactatggacggaaggcatgcggatgtgggatgcgtacaagcgagaacacttcatatgtcgggctattttgttagggaaaataacagactacccagcacttggaaacacgtcgggccaaacggtgaagggcatgaaagcgatgtgtaag

SEQ ID NO: 69359 - DNA, 687 bp, Oryza sativa
  Clone ID: PAT_MRT4530_70034C.1
atgcaccagaatatatttggtgtccatgccatgattgtaagaaagacagacaacttccagctcagcgggtccattcacatatccttacaaggggttttatggacaatttccttagcgaggagaatcaaggtgagggaagtgctggcaactgtcatgggcatgatgcggatatttggagtaatgcccggtatgcaagggagcggaagcacatgtgcatccacatcgagcggtgagacccctctattcaaaaagaagtctgtcttttgggacttgccatattgggaagacctggatattcgtcatgcgatcgatgtgatgcacgtgatgcacgtggagaagaacgtgtgccaaggcgtgctcggggtattgttgaacacacctggcaagatgaaagacacttcgcaagcacggaaagatctcaaagacatgggcatcaggaaagagctgcatcctcaggacagaggaaatgaccgctattacctatctccggcatgctacactcttagtgctgcagaaaaaacgagtatgttggaatgcatgtggggtgtcaaagtcccatccggttactgtgcgaacattaagagactggttagcatgaaagataagaggttggttggaatgaagtcacatgactgccatgttcttatgacgcaactgctaccggtcgcaattagggtatccttctag

SEQ ID NO: 69360 - DNA, 2779 bp, Oryza sativa
  Clone ID: PAT_MRT4530_70035C.1
atggcggcgccggcgccgaagcaggaggaactgcagccgcacgcggtgaaggaccagctgccggccatctcctactgcctcaccagccctcccccatggccggaggccatcctgctcggattccagcactacctcgtcatgctcggcaccacggtcatcatccccaccgcgctcgtcccccagatgggcggcggcaatgaggagaaggcgcgggtgatccagacgctgctgttcgtcgccggcatcaacacgctgatccagagcttcctcggcacgcgcctgcccgccgtcatcgggggctcctacaccttcgtcgcgcccaccatctccatcatcctcgccggccgctacaacggcattgccgatccccacgagaaattcgtgcgcatcatgcggggaacgcagggcgcactcatagtggcctccacgctccaaatcatcatggggttcagtgggctctggcggattgtcgtcaggctgctgagcccactgtccgcagcaccattggttgcgcttgttggatttgggctctatgagcttggattcccaagtgttgccaaatgtgtggagattggccttccacaaatcatactgctggtggctctttcccagtacatacctaagctggtgcctttgttggggactgcgttcgagcgtttcgccatcataatgtctgtggcccttgtctggctttacgccttcttcctgactgttggtggggcgtacaagaatgctgctccgaagacacaatttcactgtcgaactgatcgatctgggcttgtagggggtgctccatggataagtgtaccttacccattccagtggggagcaccaacgtttgatgctggtgaagcttttgcaatgatggcagcttcttttgttgctcttgtggagtctactggtgcattcattgctgtctcacggtacgccagtgcaacaccatgccctccttctgttatgagtcgcggcattggttggcagggggttggtattttgctgggtggcttatttggaacagctaatggatcatctgtatctgttgaaaatgctggtttgctaggtttgacacgtgttggcagcagacgtgtggtgcagatttctgctggatttatgattttcttctctattcttgggaaatttggagcggtatttgcttcaattccaggcccaataattgcagctatatactgtcttctctttgcatatgtcggtatggcaggagtagggttccttcagttttgcaacctgaacagcttccgaacaaaattcatcgtgggattctccgtgtttatgggtttgtcggttccacagtatttcaacgagtacacctctgttgcaggctatggcccattcaatgatatgatcaatgtggtattctcgtcaaaagcattcgtcggaggcgctgtagcatatttgttggacaataccctccagaggcatgacagcactgccaggaaggaccgggggcaccatttctgggacagattcaggtcgttcaggacagacccacgcagcgaggagttctactctctgcctttcaacctcaacaaaaaatccggaccatttcaactcgaaacagcgagctgcagcctgcaggtgcagggggagtcgcgtacacgacctcgtcaagggggcggcggcgaggggtggtggtggtcggccatggcgcaccgggtggacaacgagtacgactacctcttcaagatcgtgctcatcggcgactccggcgtcggcaagtccaacatcctctcgcgattcacccgcaacgagttctgcctcgagtccaagtccaccattggcgtcgagttcgccacccgcacgctccagatccataggtacagagctacagagatagaagggcagaccatcaaagctcagatatgggatactgctgggcaggagaggtaccgtgcaatcacaagtgcttactaccggggagctgtgggggcacttctagtctatgacataacaaagaagcagacgtttgaaaacatccagaggtggcttcgtgaacttcgtgatcatgcggactccaacattgtcattatgatggtaggcaacaaatcagaccttaaccacctgagatcagttccagaggaagatggtcaggcactagcagagaaggaaggtctatcattcctcgagacctcagctctggaagcccttaatgttgagaaggcatttcagactatccttaaagatattcatcaaatcatcagcaagaaggcacttgctgcccaagaggcagcaggcagtggacctcccactcaaggaaccaccatcaatgttactgattctgctgttaacacaaagagaggatgctgttcttcctaggtgcaaccgaagatttggtgatgctgcaaaaggaaattcccatggatcttacagcactaggtgttatgtaggtcgcttgactccttttggcctgtaattatggtggggttgtaatcacaatttaaatcgctagaaagaaatattccttttaaggtagataccatgtgtagttgcaaaattttggtagagactgttgctgggcaagactttctacagtttcatatctatatcatgttttctaccaaaaaaaaaaaaaaaaaagcggccgcttttttttttttttttttcgcacgataatggcatgcgggtatattgctcgaacgtgttattacatgtttgatgatggaggaacatgatacaaactttggtatatgaatgattgatgtatgctatatgctatgctacaactgttgtcaaagagtgatctgagaagactcccggccgg

SEQ ID NO: 69361 - DNA, 185 bp, Oryza sativa
  Clone ID: PAT_MRT4530_70036C.1
attcattataaataaattataaaactatcaatttaaataaacatttcaagacaacgaatatatcacgttttttgaaaaattataaataaatactacgttaaaggatataaataaatcccttaagacaacaaatttagatcattaccagaggtatgaacaccataatataagccaaacattccaca

SEQ ID NO: 69362 - DNA, 1539 bp, Oryza sativa
  Clone ID: PAT_MRT4530_70037C.1
atgggcatcaggaaagagctgcatcctcatgacagaggaaatggccgctactacctacctccggcatgctacactcttagtgctgcagaaaaaacgagtatgttggaatgcctgcggggtgtcaaagtcccatccggttactgtgcgaacattaagagactagttagcatgaaagaaaaaaggttggttggaatgaagtcacatgactgccatgttcttatgacgcagctgctaccagtcgcaatcaggggtatccttctagaaaaggtccaagacccaatcatcaagttgtgccagttcttcaatgcgataaaccaaaaggttatcgatccggcttcattgggcaagcttcaggaggacgcgattctcaacttttgccagctggagatgttgttccctctttctttcttcgatatcatggtgcatctgattgttcatcttgtggaacaagtaaagatcttaggtccagcatatctgcatagcatgtgggctttcgagaggtttatgggcatcataaagaaatatgtcaggaatagatcaagacccgaaggcagcatcgtcgagggttatgcaatagaggaggtggtcgaattctgtatagattacatggatctacaacctatcggtgttcctgtgcctcgtcatgagggtaggatgcttggaaagggaacattaggtcacaggagaattttcacccctgatcgacaaaccataagacacgcccattttgcagtgttacgacagtcagctttggtgtctccgtacgtgcacatgcacttggatgtactccgcagagacaatcccaggaaaggagcagcatggcttgcgaagatgcataaacttcaattcgggaaatggttgatggagtacctgacaactgcagacatcgatggtgcccttttttcattatctcgggggccatccaacacaatccacatgtaccagggctatgatatgaacgggtataccttttacaccaaggcccaggacaacaagagtacaaatcaaaacagtggcgtgcgcatcgacacctacgatgacggtggcaacaagcagacttattacggtttcatacagtcaatctgggagttagattatggagccctcaaagtccctctattccaatgcaaatgggtcaaaattccaaggggtttgaagattgacaagcatggaacgatcatcgttgacctgaatgatgttggctacgaagatgaaccattcgtgctcgcaaagtccgttaagtaaatattctatattaaggacccatcactcatgaggccatgtcatgttgtattaaaaggcaagcgaagtattgtcggaatggagaatatcattgacgaagatgactacgatcagcccgatgagccaccgctacccacaattgatatcgagacggaaaacgaggcaactgctgaagagaatgaccaagcgcggcacggtgcgacggcgaggtgaagagggtcaccggcaagtcgaaggtgaaggcgtcaacgacggcccgacgcagagggcatgcaagcttgagtattctatagtgtc

SEQ ID NO: 69363 - DNA, 679 bp, Oryza sativa
  Clone ID: PAT_MRT4530_70038C.1
atagatttagaatggataactacagcgagatcgtgactctgtggagtatttcaggggagtaacggctctcgttgctgcggccaccagcacaaactcagtcgatgcaccggaatatatttggtgtccatgccatgattgcaagaaagacaaacaacttccggctcaacgggtccattcacatctccttacaaggggttttatggaaaacttccttagcgaggaggagcaaggtgagagaagtgatggcaactgtcatgggcatgatgcggatgtcggctgcgaggaggaggaggaccaaacatgtgtcgatcagatgctgcgtgacggggagagatttgacactgatgatagggaatatcacaagttcacaactagggtgaaggactccaaaactccagtttacaatggatgtaagacggagcacagcaagctccaagtggtcctatcgctgcttcacctgaaggctagatatcttgaggacgagaaacccttaaaatcatatgcttaccccatgttggagaactctcctgagcgcggtgtcttcccggcgacgacagcctgcggcctcggtgccggtgaagtgaccgcgcgcgttgagggtgttggtggcgccgggcagcagtgcccttcctgcgcggtggacaagtgcaaggaggtgctgagcaggtgccacgactag

SEQ ID NO: 69364 - DNA, 1623 bp, Oryza sativa
  Clone ID: PAT_MRT4530_70039C.1
tcaggatgtgacatctttcatcttgccaggtgtgttcaacgataccccgagcacgccttcgcacacattcttctccacgtgcatcacatcaattgcatgacgaatatccaggtcttcccaatagggcaaatcccaagagacagacttctttttgaatagaggggtctcaccgctcgatgtggatgcacatgtgcttccgctccctttaccgaatacaactctgagatcctttacctccgccaagatctcacttccggttctgaaaattggacatccatccatttctaccgtcccatcaaaagcatttttatttcggtggtatgggtgatcctgcctgaggaacctccgatggcgcatgtacatggtcttccgacagtgattcagccacttgcctcctgtttgggccatgcaccttacacatgctttcatgcccttcaccgtttggcccgacgtgtttccaagtgctgggtagtctgttattttccctaacaaaatagcccgacatatgaagtgttctcgcttgtacgcatcccacatccgcatgccttccgtccatagtgtatgaagatcctctaccagcggcttgaagtacacatcgatatcgttgccaggttgtgtaggcccttgaatcagaagtggcatcatgatgtacttacccttcaaatagatatttccgatgtcgtgagaaaactctttttggtacttcctatctatctttctccactgagacccatcagctgggtgtcgtatcattccatcttttttacgctcttcgtggtgccaacgcatcagcttggcatgctttttgtttgcatacatacgttccaaacgggggatgattggaaaataccaaacgaccttcacctgcactcttttcttatttccaccctcatcatccccgtctccacacttatagcgggaagccttgcataccgggcattgctccaaatatgcaaattcaccacgatacaaaatgcaatcatttagacaagcgtgaattttctgtatgtcaagaccaagggggcatataacttttttggcttggtacgtcgattctggcaagacattgtccgtaggaagaatttctttcaagagctctagcaactcagtgaagctcttatcggaccatccgttgctcgccttcaggtgaagcagcgataggaccacttggagcttgctgtgctccgccttacatccattgtaaattggagttttggagtccttcaccatggttgtgaacttgtgatattccttatcatcagtgtcaaatctctccccgtcgcgcagcatctgatctagatttggttcaccgtgatcgacacatgtttggtcctcctcctcctcgtagccgacatctgcatcatgcccgtgacagttgccggcacttccctcaccttgctcctcctcgccaaggaagttgtccataaaaccccttgtaaggagatgtaaatggacccgcttagctggaagttgtctgtctttcttgcaatcatggcatggacaccaaatatattccggtgcatcgactgagtttgtgttggtggccgcggcaacgagagccgttactcccctgaaatactccacagagtcacgatccgctgtagttatccattctagatccat

SEQ ID NO: 69365 - DNA, 483 bp, Oryza sativa
  Clone ID: PAT_MRT4530_7003C.1
atgaagcggccagcggaggcggcgaggagagaagccggcggcgcgcgtcgtcgctcgtcgtggccagcagcagagggatgcggcagcgcgcggacgtcgtcgtggagggagccggcggcgcggacgtggcagatgagggagccggcggcgtgcggatctggagcggagggagccgttggcggcatcgcggtcatcgtcgtcgtcgaggagggagagtggagggagccatcggcggcgtcgcgggcgtcgtcgtcgtcgaggaggggggccgccggcggcgaggagggatgcggcggctcgcggacgtcgtcgtggagggcgccggcggcgcggacgtgggagacgagggagccgacggcgcgcggatctagagcggagggagccgtcagcggcgtcgaggaggggggccgccgacgccgccggcggcgaggagggatgcggcggcgcgtggacgtcgtcgtggagggcgctggcggcgcggac

SEQ ID NO: 69366 - DNA, 2689 bp, Oryza sativa
  Clone ID: PAT_MRT4530_70040C.1
atggctgatcgcgatgaggaacagatactatacgatacaatcgcagagggaagcagccagtactagaacgaaggagaggggaacgaggatccaaaccagtacttgaacgaggaagggaacgtggagaggaatgcggagggaaacgaggaggggaacgatgaggaggaggctagtggaagtcatccctccgttggatagaagagggcacacggacaacgaggtgccgcgaagaagatagaggaagcagccaagaattttgtacgccacagcggttgggttgtgagggacaacgtgcctgtcagcacagtgtactggcgcagaacaagggcatacggggataatgacagctttgtcccggactcagagaaagagatgctgtggaccacaatgctcgagacgttcacgctacccgcgggtacggagaacatagtgaaacagtggactctgaagaaaatggcagaacagttccagagcttcaagggatcattgggacgagttcgttgcttacaagacagggcaacaagggcaagcaatgatggccagaaacaaagacaatgccgccaagaagaagtaccatcaccacttggggtcaggcggatatagcgtcgcaatgccgaagtgggaggagatggaggcaagtttgattgagaggggtatcgaaccggccaccactaaatggccggatagatcgaagttttggtactatgctcatggtgaaacgcttaacctagttgatggctcccttgtcttcagcgatcagatacgcgaggctgccagtcgactaacgtacgcagtggtagcctcttctcagggcacattccgacccgacagagagaaggatgagctgtcactcgccctacagactcccgagcatccaggacaaacacgagggaaaggcgtgattccctggaagattggatttaaggaggacatccacacgtacaggagtcggatgaggagcaagagagatactgaggcgaagattgcagatcttgagtacagggtatcgagctacgagctcaacatgcaagaggaggtggcaaggaaggtggatgaacgtatggccgcacatcggtcccaggatccccagccgtacattcatcctgcaatggtggcatcgggaatggccatcccaacggacccttccgggacttaccactgcaggccgattccagcaggatactcgagggtcgaagttgagctggtggaagccgcgtacgaggacctcgagttggactacccaggaggagacggtgagacgcatctacgagacacaagccacaccatcatactatggcgcaagcggtacatcatccttcctgggcgacaagcggcgtctcgtgcaccatctcctacggctccgccatctcctcctgcaccatctcctccggttcctccgccacgtcctcctgcaccatctcctccggctattccgccacctcctgctgcaccatctcctccggctcctccgcctcctccgcctccaccgtgtccgcctgcacctcccaagacaaggtctcgccaagctccaccgcctgcccgcacaagggcaacgaagaaggcgaaagttgacgccaccaaaaacaaggagccaccgtacgattgcagtcaagaggagcttgatgctaatgtggcaggagaggtgaagaggcaactcaagcctcggagtcctaaaaagaagatacctattgacccgagcgtgaagaacttcttcaagggaatgtccacaacaaacaaggaggcattacagatatcggactatgaccgaacacttcagagagcctatcacaagaagtccaaaccagtccctcagtttggagaacaaccaaaccaagaggtcgagccgttggtgaccggcgaagattttggcataatggaattcatttcagacaccggtctaactgtggatcagttggttggaggcgcaccaatcccgaaggcggaagtggcatacaagtttgaactcggtaaaccgcttgtcaaacctgaacagctgtagtccctaccgacacagatgtacaaattccatgaacggtacatggaaatgagcgccaagggtagagagatgttcggagcgaggatcagaaaccccgacttcttgcaaggagaagatgttctctagatccatttcaaggatctcttcgatctgtaccagttggacaccctcgacgtctctcttctgagcgcatggattttaatggagattcaaagggcccgacggcggaggttctacgatactgggttcatcgaccctcggaaaatcaacaccgaaatgattgacaagtacaagaaagacacagaggacaatctcgtacatctcctaacgcagcagcatttcaagacgtacatactactgccgtacaacacagaagtcactgtgtacgactcaatgaataaagaggagaagatttttgacaaggtcttcaaactgatagacagggcttgggataggttccgtcaattggtccgcaggacttggaaagaaaaacttggatggaggtttcattttccacgtattcacatgagggataatctcccacacaaggattttatcacggctgttcaagaacaactgatgggattcatcaacgaagaagtccttaatcccgacggtgaattctactacgacggatcgacaattcataacgtcggtccttcctcttctgacataacgccggtgtcgaagtcg

SEQ ID NO: 69367 - DNA, 268 bp, Oryza sativa
  Clone ID: PAT_MRT4530_70041C.1
atggccggcaaagcccgcgcggcaagaggagcggcgaccggcggcccgcacggtgggaggggcggtggccggttgttatcgtgcggcgggggcgcggggtacttagggtgcgccaaaatcagtacagggtgtgagagtggggctaggtggatggcagacgcggggagaggtcagccagggggcgtagcagtacccaagggggagaggaaggagatgtggcgaggctggtcttgtggatctttggggggcggctggggtggggaggatg

SEQ ID NO: 69368 - DNA, 254 bp, Oryza sativa
  Clone ID: PAT_MRT4530_70042C.1
ttaccattcggggaagtgttacagctatccagcaatataattgagagaaaaccgaaagggtttgccattgcaaaggtacttgcttggatgaaggaaaagagaccgagcgtaaggaatgcatggatgatcaaagaagttgattggggaccaaaccaaaacctctccaagtccactgttacctcaccacgtcactattggttcatagaaggcaagagatgaagttctacacgttctggattcggattcggacctcc

SEQ ID NO: 69369 - DNA, 3444 bp, Oryza sativa
  Clone ID: PAT_MRT4530_70043C.1
tcatctgagtcgatcgcgatattccagggatatgagatcaatgggtacacattctacacaagagcccaagacatgaagagcacgaaccagaacagtgctattcgtatcaatgccatgggacacgatggtacaactggcacatattacggagccatcgaggagatataggaacttgactatggacctctcaaggtccctctgttccggtgccaatgggttaggttgactggtggaggcgtaacgattaatgacagtgggatgacaacggttgaccttaacaaggttggatactcggacgaaccttttgtccttgccaatgatgtaacgcaagttttttatgtgaaggacatgtctagcaaaggaaagaatggcaaagggcctgacgagccgaagcgccacgtggttctcccaggcaaaagaaaaatcgtcggagtagaggataagactgacgaggattacgatcagtttgatgggcaaccccctttcacggtgacggttgaccctagcatcctcctatcaaacgaagacaccccttacttacgtagcgatcacaaggaaggaacaatagtgaggagaaaagaagacgtcgtcgtcgtcgtccctcaaaccgaagtgatggctgatcgcgatgaggaacagatattgtacgatacaatcgcatcgggaagcagccagtactggaacgaagaagaggggaacgaggatccaaatcagtacttgaacgaggaggggaacgcggagagggatgcagaggggaacgaggaggggaacgtggagagggatgcggaggggaacgaggaggaggctagtggaaagaaagagatgctgtggaccacaatgctcgagacgttcacactccctgcgggtacagagaacatagtgaaacagtggactcttaagaaaatggcagaacagttccagacctgcaagggagatctgtaccggaaatacatcctgaaggggcagacacggaacttcgacgtattcccgaagctaagggatcactgggacgagtttgttgcttacaagacaggtcaacaagggcaggcgatgatggaaagaaacaaagaaaatgccgccaagaagaagtaccatcaccacttggggtcaggcggctatagcgtcgcgatgccgaagtgggaggagatggaggcaagcttgcttgagaggggtatcgatccggccaccgctaagtggcctgatcgatcgaagttctggtactatgctcacggtggaacgctcagcccagttgatggctccttggtcttcagcgatcagatacgcgaggctgtgaatcgactaacggacgcagtggaagcctcttctcaggacacgttccgacccgacagagagaaggacgagctatcactcgccctacagactcctgagcatccaggacgaacacgagggaaaggcgtgattccctggaagatgggattcaaggaggacatccacacgtataggagtcggatgaggagcaagagagataccgaggcgaagattgcagatcttgagtacagggtatcgagctacgagctcagcatgcaagaggaggtggcccggaaggtggatgaacgcatggcagcagatcggtcacacgatccccagccgtacatacctcctccaatggtcagcccatcaggcaatcgtagcagctgcgcctcaacggggcaggtagtatcacatagcatggacgccatgcaaacccaggacgaaaccacctgccccgttgatgagatcactcattggacaccatgtgagctgcatattcccttcaagaacttatcaatcaaggtggcgtcgggaatggccatcccaacggacatttcagggacttaccactgcaggccgattccagcagtatactcgagggtcgaagttgagctggtggaagccgtgtacgaggacctcgagttggactaccaaggaggagacggtgagacgcatctacgagacacaagccacgccattatactatggcgcaagcggtacatcatcctccctaggcgacaagcggagtctcgtgcaccatctcctccggctccgccgtctcctcctgcaccatctcctccggctcctccgcctcctccgcctcctcctcctccgtgtccgcctgcacctcccaagacaaggtctcgccaagctccacctcctgccagcacaagggcaacgaagaaggccaaagttgacaccaccaaaaacaaggagccgccgtacggttgcagtcaagaggagcttgacgcttatgtggcaggagaagtgaagaggcaactcaagcctcggagtcctgaaaagaagatacctattgacccgagcgtgaagaatttcttcaagggaatgtccaccgcaaacaaggaggccttaaagctatcggactatgaccgaacacttaggaaagcctattacaagaagtccaaaccagttcctcagcttggagaacaaccacaccaagtggtcgagccgttggtgactggcgaagactttggcataacggatttcatttcggacaccggtctaaccatggctcagttggttggacgcgcaccaatcccgaaggcggaagtggcatacaagtttgaactcggtaaaccgtttgtcagccctgagcagctgcagtccctaccgacacaaatgtacaaattctatgaacggtacatagaaatgagcgccaatggtagagagatgttcggcgcgaggatcagaaaccccgacttcttgcaaggagaagatgttctatggatccatttcaaggatgtcttcgatctgtaccatcgggacgccctcgacgtctctcttctgagcgcatggattttaatggagattcaaagggcccgacggcggagggtttacgatactgggttcatcgaccctcggaaaatcaacaccgaaatgctcgacaagtacgagaaagacacagaggacaatctcgtccatctcctaacgcagcagcattacaagacgttcatactattgccgtacaacacagaattctactgggtcctgttctttttcgacttggacgcatgcagagtcactgtatacgactcaatgaataaagaggagaaggtttttgacaaggtcttccaactgatagacagggcttgggatcggttccgtcaattgtgtgcaaagcaggacaagggaactaacttatgcggctactacatatgcgagttttcccactgcctatcaaaccaaatatacaccacacgagagctcgatcgtattcacatgagggaaaaactcccacacaaggattttatcatggctgttcaagaacaactgatggggttcatcaatgaagaagtccttaatcccgatggtgaattctactacggacgggattggaccaatttcggaaacgcgggtccttccttttttgaaggtgactcgatgtctcgggagagtatttgcggtgatggaccaggagtcggcttgggataa

SEQ ID NO: 69370 - DNA, 5577 bp, Oryza sativa
  Clone ID: PAT_MRT4530_70044C.1
atggctaataagactctccgcgagttcgctgctccctctgctgacaatgtggccattgggccgcaggtcaacataggggacgtggatttcgacttgaagtccagcctcatcacgattgcgcaggcaaacccgttctgtggtgagcctaatgaggggtccaatgctgatctgcaacagttcctggagatctgtagcacgtacaacatcaagggcgtcaatcccgacaccgtcaggctgcgactgtttccgttctcccttctcgggagagcgaagcagtggttctatgtgatgaggacatcaacaccaacgatacatccacacttccacaattacaacttcatgttgcttgttcatcttgttcttgctggttctcgattgcttgcaggaacaaataccctcgtagttgggctgatcgtgcatccgtcgagattcacgaccacctctggagttggggtaacgattgctaaggcgcaacatccccggatagttgtagtcggatcgccaacgtcactccatccaatcgacttatccctctcatcgaaagatcgagacaccctcgagcacatcaggtggtatcagagcccaagttgctcgtttttctttgactcattacacagcccacccatagctccaccggttcgactaacacttgacagggattcagctaccaaggcatcaatacaccttctccagaggttcgtccaagtccgacggttgccatcacctcctgtttggcatgatgagaattggttagtgagggaccgcacacaagggctcgaggaggatgtttgtatcaccaatgaaaagcttggtcatgttgaacgcacgcaaattgattccaacaccaagcttaccaccttggaagcttctgttgcgacggtgaacaccagtcttgatggtattgtgtggcgtcttgatgagatggcccgagcatcccaccatggtagtgagatggatgaccatgactacgttggtgattctgaggatgatgcggaccagcgacgacatcgcttcaatcgccgtggtgtggctcatcgtcggccacgccgtgaggtacgaaataatgatgattcatttggtaagattaaattcactattcctgcttttgatggtaagtatgaccctgatgcctatctttcatgggagttagtagtagatcaaaagtttgcttgccatgatgttcctgaggataagagggttagggctgccaccagtgaatttactgattttgcttctgtttggtggtgtgaataccgtcgtactcatataaatgctttgccacctacttgggatgatttgaaacaaattatgcgtgctagatttgtaccttcatattatgcacgtgacatgttaaataagctgcagcaattgaaacatggtggtactagtgtggaagaatattaccaagcgctgcaaatgggtagaactccatggacggctcggagtggcgctgcccccaccgatcgttcatcagtttcgacatcgacatctgcaccctccaacagcaacagcaacaaagcgtggccaacaccttctacggcccgctctcgtgcttcagaggttgcagaaaagcccaccaagagtgcctcctctgttgcttccacgggtagaacaagagatgttcagtgccaccgatgcaagggctttaggcacatgcaacgtgactgccctagcaagcatgttttggtagtcaaggctgatggtgagtactcgtctgctagtgatttcgatgaagatacacttacattgcttgtagctaacaacatagctagcgaggatgagaaacacatcggggctgatgtagcggaccaatatgagagccttattgtgcaacgtgtcttgagtgcacaaatgggcaaagcggagcagaaccagcggcataacctttttcagacgaagtgtgtcgtccacaagcgttcctgctgcacaatcatcgatggggccagttgtaggaatttggtgagtacggagatggtcacgaagctagctttgcagatgaaaccacatccccacccatactacattcagtggttcaacaacagtggccgcattaaggtaacacaattggtgagattaaattttgcaattggttcttactgtgattttgttgattgtgatgtcgtacctatgcatgcttgctctttgctgttgggtaggccttggcaatatgataaagacacattgcatcatggtagaaccaatcaatactcctttatgcataatggaaagaaaattgtgttgcatcctttgactcctgaagctgtttttgagaataatgttgctagagctgagaaagagaaaaatgttgagcatgctaaaagtgaaaatcagattgtagcaaaagaacaagtgcaccataatttgaaaggttctcaatctaaccgtcgcaaggatagtgtgattaaattgaatggtccttgtttgcttaccactaaatctgatattgtcaatttggacacaagtgatattgtttgctatgctttcatttgcaaggatgctttgttttcttttgaaaatattcctctctcttttcctcctgcggtcactaaccttttgcaggagtatgaggatgtgttccccaaggacgtgccaccggggctgccaccggtgcgtggaattgagcatcaaaacgacttgatcccaggagcatcgttacccaaccgtgcgccataccaaaccaaccctgaggaaaccaaggagattcagcgtcaggttcaggacttgcttgacaaagggaacgggattgaggttgatcaagctaaggttgaggcaattcagagttggccgattcctaaaacgatctcacaggaagcacatggaggtggtttgatggggcattttggtgccaagaagatggtggacatccttgctgaagttgttcgcttgcatggtgtgtcaaatacaattgtttctgatcgtgacactaaatttcttagccatttttggagaactttgtgggctaaattggggactaagcttttgttttctactatttgtcatccccaaactgatggacaaactgaagtggtgaatagaaccttgtctactatggttagggctgttttgaagaaaaatatcaagatgtgggaagaatgcttgcctcatattgaatttgcttataatcgttccttgcattctactacaaagatgtgcccatttcagattgtgtatggtttgttgcctcgtgctcccattgatttgatgcctttgccatcttctgaaaaaatgaattttgatgctaagcttttgttttctactacttgtcatccccaaactgatggacaaactgaactggtgaatagaaccttgtctactatggttagggctgtttcgaagaaaaatatcaagatgtgggaagaatgcttgcctcatattgaatttgcttataatcgttccttgcattctactacaaagatgtgcccatttcagattgtgtatggtttgttgcctcgtgctcccattgatttgatgcctttgccatcttctgaaaaaatgaattttgatgctaagcaacatgctgagttgatgttaaaactgcatgagacaactaaagaaaacatcgagcgcatgaatgctaagtataagtttgctggtgacaaaggtagaagggaattgaattttgaacctggagatttggtttggttgcatttgcgaaaagaacggtttcctgacttgagaaaatcaaaattgacgcctagagctgatggtcgatttaaagtgttagccaaaattaatgagaatgcatataagcttgatttgcttgcagattatggggttagtctcacaattaacgttgcagatttgaagccatatttgggcgcagaagatgaacttgagtcgaggacgattcaaatgcaagaaagggaggatgatgaggacatcaacaccaacggtacatccacgcttccacaagtacaacttcatggtcctattacccgcgatcatgcacgtcaactcaactatcaggaacaatggagattatcaaatggggagaggaatcgcacgggatggattcggactgcagcacagcacaaacttctgacggccgccacgacctcatgcgaactccgatttgggcgtgcaagaacaaataccctcgtgcttgggctgatcgtgcatccgtcgagattcacgactgcctctagagttcgtgtaacgattgttaaggcgcagcatccctggatagttgtagtcggatcgccaatgtcactccgtccaatcgacttatccctctcatcgaaagatcgggacatcctcgagcacatcactatgcaaaccgtgctgctgtcaatacctaggacaaatgctctacgacattcctctcaaaattcttcccgatgggcaaaaaccaatgcccttcgtggaaggattttaagtttccagcagacaagggatgagtctattccggaagcatgggaacgactgcaggaactcaccccgatgtcccacgatcacctggacgcggaagctggaggagctttcttctctaaaacggttcaaggagctgttgatctaatagagaagatggtctccaatatgggttggagcgaggaacgacaccagacccgtcagcgaggcatgcacaccgtcaaggagacggagttacttgctgccaagctggacctcctcatgaagcgattggacgaccacgagaaatggccacaaggtaccatcaaggccttggactctcacgtcacatgtgaggtctgtggcggcacgggtcattctgggaatgactgcccggaaacccgtgaggaggcgatatacatgggcaacaacaacaacgggtatcgtccacaaggaggtcatgggtggaaccaaccacgcccatattatcaaggaggtaacaacaacggtaatttttctaaccagccctccttgagggatctcatttttgcacaagctaaaaccaccgatgcactaagcagaaaacttgcggccaatgacaaggtcctagaaaacataaatgtcaagttagatggctttgcttctgcttttcaaaatcagctgagctttaataaaatgatagaaacccagctagctcagttggcatccttagtccctgcaaatgaaactgggaggatcccggggcaaccctactcctccattgaaaatgtcaaggcggtcatgacgaggggaggtaagtccactcgtgatccgccatatcctaaccatgcaggaactaatgggatatcaaaagaagtgccatctaatgattcggctgacaaggaagttccgctagaaaagacagtgccgcaagagtactgcgacacacggttgctgttgttccctcaacgaagtaggaaaccgtcagtggacgagcaattcgctcgttttgttgaagtaatccagaagatccacatcaacgtgccgttgttggacgccatgcaagtgccaacatacgcccattatctcaataatatactcaacaacaagagaccgctcccaacaatggaggtggtcaagccgacggaacaatgcagcaacgtaatactccacaagctcccgggaaagtatgatccacagtcagactatccgaaaatatcagatagtctaatgttggatcagactgtctga

SEQ ID NO: 69371 - DNA, 4701 bp, Oryza sativa
  Clone ID: PAT_MRT4530_70045C.1
tggaaaaaaaactctatattttgggagttaccctattgggaattcttggacgtccgccacgcaatcgacgtgatgcacctcactaagaatctttgcgtaaaccttcttctcttcctaggtatatatggaaagtcgaaagatacactggaagcacgtaatgatctgaagcatatggaacaacgcggtgaccttcacccggaaccaaaggagaaatgaagccattacttgagtccagccagctacactcttagcaaggcagagaaggaaagtatgtttgaatgcttggagagtatcaaggtaccgtctggatactccacgaatataaagcgaataataagcacgaaggagaagaagttcacaaatctaaagtctcatgactgtcacgtgctgatgacacagctgctaccagttgtaataaggggtatcctcccagacaatgtctgggcaacaataacaaagctatgtgctttcatgaacgcaatttcgcagaaggtcatcgatcctgatagattagaagccctgcagaatgatgcggtgcaatgtcttgtcagttttgagttgatatttccaccttcatttttcaatataatgatgcatctgctttgtcaccttgtcaaagagatcggtattctcggtcctgtgtacctacacaacatgtttcctttcaagaggtatatgggcgttctgaaaaagtatgttcgtaaccgtgctcgtccagaggcaagcatcgccaaggggtatggaacagaggaggttattgaattctacgtagaatttatcgaagaccttcgcccaatcagggtacctgaatcacgccatgaagggagactacggggaaaggggactctcggaaggaaagcaataatgacggtagacaacaatttattccgtaaagcccatttcacggttctgcaacaatcttcattggtggctccctacatcgaggaacacttggctctaattcgcgccagaaacatcagtaagtccgatgcatggattacaaggcatcacattgatactttctccacgtggctgcgacaacatctcatgggtaacaagacgattaaccaacaactggccttcctggcgagggaaccatctggcttgatcacgacattccagggatatgaaatcaatgggtacacattctacacgagggcccaagacatgaagagcacgaaccagaacagtgctgttcgtatcgatgccatgggacacgatggtacaactggcacgtattactgtgccatcgaggacatatgggaacttgactatggacctctcaaggtccctctgttccggtgccaatgggttaggttgactggtggaggcgtaacgaatgatgacagtgggatgacaacggttgaccttaacaaggttggatactcggacgaaccttttgtccttgccaatgatgtaacccaagttttttacgtcaaggacatgtctagcaaggaaaaaaggctaaagggcttgacgagccgaagcgccacgtgatattgccggtgcgccctcgtcttctccaccaacacttagacgtttttcaatcttggctcgatctccttcgccgccaccgtgcctagggcaaccctgcgccgacaccgccgtcgtctctcgccgtcgcttggcggtcctcgccgcctctgccgcagacgccgccaccgcatctcttgggtgttttttgtttgcacagatggctgatcgcgatgaggaacagatactatacgacacaatcgcagagggaagcagccaatactggaacgaaggagaggggaacgaggatccaaaccagtacttgaacgaggagaggaacgtggagagggatgcggaggggaacgaggaggggaacgatgaggaggaggctagtggaagtcttccctccgctggacagaagagggcacgcggacaacgaggtgccgcgaagaagatagagggtcagcacatcataactgaggtggaccaagaattttgtacgccacagcggttgggttgtgagggacaacgtgcctgtcagcatggtgtactggcacaaaacaagggcacacggggataatgacagctttgtcccggactcggagaaagagatgctgtggaccacaatgctcgagacgttcacactacccgcgggtacggagaacatagtgaaacagtggactctgtagaaaatagcataacagtttcagagcttcaagggagatctctacaagaaatacatcctgaagggactaacaccgaacttcgacgtattcccaaagctaagggatcattgggacgagttcgttgcttacaagacagggcaacaagggcaagcgatgatggccagaaacaaagacaatgccgccaagaagaagtaccatcaccacttggggtcaggcggatatagcgtcgcaatgccgaactgggaggagatggaggcaagtttgattgagaggggtatcaaaccggccaccgctaaatggccggatcgatcgaagttttggtactatgctcacggtggaacgcttaacccagttgatggctcccttgtcttcagcgatcagatacgcgaggctgccagtcgactaacggacgcagtggtagactcttctcagggcacattccgacccgacagaaagaaggatgagctgtcactcgccctatagactcccgagcatccagggcgaacatgagggaaaggcgtgattccctggaagattggatttaaggaggacatccacacgtacaggagtcggatgaggagcaagagagataccgaggcgaagattgcaaatcttgagtacagggtatcgagctacgagctcagcatgcaagaggaggtggcaaggaaggtggatgaacgtatggccgcacatcggtcccaggatccccagccgtacattcatcctgcaatggtcagcccatcaggcaatcgtagcagctgcgcctcaacggggcaggtcggatcacagagcatggacgccatgcaaacccaggacgaaaccacctgccccgttgatgagatcacgcagcggacaccatgtgagctgtatattcccttgaagaacttatcaatcaaggtggcgtcgggaatggccatcccaacggaccctttcgggacttaccactgcaggccgattccagcaggatactcgagggtcgaagttgagctggtggaagccgcgtacgaggatctcgagttggactacccaggaggagacggtgagacgcatctacgagacacaagccacgccatcatactatggcgcaagcggtacatcatccttcctgggctacaagcggcgtctcgtgcaccatctcctccggctccgccatcttctcctgcaccatctcctccggttcctccgccacgtcctcctgcaccatctcctccggctcctccgccacctcctactgcaccatctcctctggctcctccgcctccaccgtgtccgcctgcacctcccaagacaaggtctcgccaagctccaccgcctgcctgcacaagggcaacgaagaaggcgaaagttgacgccaccaaaaacaaggagccatcgtacgattgcagtcaagaggagcttgatgcttatgtggcaggagaggtgaagaggcaactcaagcctcggagtcctgaaaagaatatacctattgacccgagcgtgaagaacttcttcaagggaatgtccacaacaaacgaggcgttacagatatcggactatgaccaaacacttcagagagcctatcacaagaagtccaaaccagtccctcagcttggagaacaaccaaaccaagaggttgggccattggtgaccggcgaagattttggcataacggaattcatttcagacaccggtctaactgtggatcagttggttggaggcgcaccaatcccgaaggcggaagtggcatacaagtttgaactcggtaaaccgcttgtcaaacctgaacagctgcagtccctaccgacacagatgtacaaattccatgaacggtacatggaaatgagcgccaagggtagagagatgttcggagcgaggatcagaaaccccgacttcttgcaatgggaagatctctggatccatttcaaggatctcttcgatctgtaccagttggacgccctcgacatctctcttctgagggcatggattttaatggagattcaaagggcccgacggcggagggtctacgatactgggttcatcgacccttggaaaatcaacaccgaaatgatcgacaagtacgagaaagacacagaggacaatctcatccatctcctaacgcagtagcatttcaagacgtacatactactgccgtacaacacagaattccattgggtcctgttattcttcgacttggacgcatgcagagctatgtacgactcaatgaataaagaggagaagatttttgacaaggtcttcaaactgatagacatggcttgggatcggttccgtcaattggtccgcgggacttggaaagaaaaacttggacggaggtttcattttccacgtattcacatgagggataatctcccacacaaggattttatcacggctgttcaagaacaactgatgggattcatcaacgaagaagtccttaatcccgacggtgaattctactatgacggatcgacaattcataacgtcggtccttcctctttccgcggttttccatcacaccggcctccttccgcggtttgccacccacatgcgtcctatcgccgacgca

SEQ ID NO: 69372 - DNA, 376 bp, Oryza sativa
  Clone ID: PAT_MRT4530_70046C.1
aaaaaaaaaaaaaccccttttttttttttttatacccccaaagtttcccaaccccaaaaaaaaaattttggccttttttttaacctccccacccccttttttggtaaaacccttaccaaacccccccccgggggggaaatggctctggggccccccaatccccctggggaaaccccttttttataaggccccctaaaacccccaaaaatttggttttgtcccaattccccaaaaaagggaaagcccccaacccttggggattgtatttcttatccctattcccaaaaaaatataattccccgtaaataaaaatttttcccccccaccggaaagcttttaccaaatttggttttttttaaatgaaaacccccttttt

SEQ ID NO: 69373 - DNA, 228 bp, Oryza sativa
  Clone ID: PAT_MRT4530_70047C.1
actccaaagcaatgtgaatcagactaccaacctgaaagagattgtacaaaggaattcctcctctatgcaccacaaaagctgtgtataacgtttctactagttctcatcagtatctcacacatctaaggccgcattgcctttttgcatcgtgtcacatgacctgaaaaagctctcaacgagaaattcgtcgcggctgccggatgatcaccagttcaacaccaccaacac

SEQ ID NO: 69374 - DNA, 4080 bp, Oryza sativa
  Clone ID: PAT_MRT4530_70048C.1
atggaagaagatgaagtggaagacgacaatattccggacttagctcaatacgctggatttgaaggaaatcaaacgggcaaggaggaaagtgatgctgatggtaacagcgttgcggatgatcttggtcagatgttgcaggatgccaaggaggactgcgaaagtgaaaaggtggcccataaattggacaagatgttagaggaccacagaacgtcgttgtacctagaaaacaaagctatgtgctttcatgaacgcaatttcgtagaagagatcggtattctcgaccctgtgtacctacacaatatgtttcctttcgagaggtacatgggcgttctgaagaaatatgttcgtaaccgtgctcgtccagaggcaagcatcgccaaggggtatggaacagaggaggtcattgaattttgcgtagaatttattgaagaccttcgcccaatcggggtacctaaatcacgccatgaagggagactacggggaaaggggactctcggaaggaaagcaataatgacggtagacaacaatttattttgtaaagcccatttcacggttctgcaacaatcttcattggtggctccttacatcgaggagcacttggctctagttcgtgccagaaacatcggtaagtccgacgcatggattacacagtatcacattgatactttctccgcgtggctgcgacaacatctcatgggtaacgagacgattaaccaacaaccggccttcctggcgaggggaccatctagctcgatcgcgacattccagggatatgaaatcaatgggtacacattctacacgagagcccaagacatgaagagcacgagccagaacagtgctgttcgtatcgatgccatgggacacgatggtacaactggcacgtattacggtgccatcgaggacatatgggaacttgactatggacctctcaaggttggatactcggacgaaccttttgtccttgccaatgatgtaacgcaagttttttacgtcaaggacatgtctagcaaaggaagaaagggcaaagggcctgacgagccgaagcgccacgtggttctcccaggaaaaagaaaaatcatcggagtagagtacaagactgacgaggattacgatcagtttgatgggcaaccccctttcacggtgacgattgaccctagcatcctcctatcaaatgaagacaccctttactcgcgtagcgatcacaaggaaggaacaatagtgaggagaaaaaacacaaatataatgaaattcaaaattcagtgctattatctttagtcccggttcttaaccctaaccggatggctgatcgcgatgaggaacagatactgtacgatacaatcgcagagggaagctgccagtactggaacgaagaagaggggaacgaggatccaaaccagtacttgaacaaggaggggaacgtggagagggatgcagaggggaatgaggaggggaacgaggaggaggctagtggaagtcatccttccgctggacagaagagggcacgtggacaacgaggttccgcgaagaagatagacgaagcagccaagaattttgtacgccacagcagttgcgttgtgagggacaacgtgcctgccagcacggtgtactggcgcagaacaagggcacatggggataatgacaactttgtcccagaatcagagaaagagatgttgtggacaacaatgctcgagacgttcacgctacccgcgggtacggaaaacatagtgaaatagtggactctgaagaaaatggtagaacagttccagagcttcaagggagatctttacaagaaatacattttgaagggactaacaccgaacttcgacgtattcccaaaactaagagatcattgggacgagttcgttgcttacaagacagggcaacaagggcaagcgatgatggccagaaacaaagaaaatgccgccaagaagaagtaccatcaccacttggggtcaggcggatatagcgtcgcaatgccgaagtgggaggagatggaggcaagattgattgagaggggtatcgaaccggccaccgctaaatggccggatcgatcgaagttctggtactatgctcacggtggaacgcttaacccaattgatggctcccttgtctttagcgataagatacgcgaggctgccagtcgactaacggacgcagtggaagcctcttctcagggcacattccgacccgacagagagaaggacgagctgtcactcgccctacagtctcccgagcatctaggacgaacatgagggaaaggcgtgattccctggaagattggattcaaggaggacatccacacgtacaggagtcggcagaggagcaagagagataccgaggcgaagattgtagatcttgagtacagggtatcgagctacgagctcagcatgcaagaggaggtggcattctcgtagttttatgattttttgacttgtacattccacaagttgctgcttaggttgattactaatagataagctctcatcacgtgaaggtgacatccggaatggccatcccaacggacatttcagggacttaccactgcaggccgattccagcaggatactcgagggtcgaagttgagctggtggaggccacgtacgaggacctcgagttggactacccaggaggagacggtgagacgcatctacgagacacaaaccacgccattatactatggcgcaagcggtacaacatcctccctaggcgacaagcgacatctcgtgcaccatctcctccggctccgccatctcctcctgcatcatatcttccggttcctccgccacgtccccctgcaccatctcctccgtctcctccgccacctcctcctgcaccatctcctccggctcctcggctcctccgcctcctccacctccaccgtgtccgcctgcacttcccaagacaaggtctcgccaagctctaccgcctgcccgcacaagggcaacgaagaaggcgaaagttgacgccaccacaaacaaggagccgccgtacgattgcagtcaagaggagcttgatgcttatatggtaggagaagtgaagagacaactcaagcctcggagtcctgaaaagaagatacctattgacccgagcgtgaagaacttcttcaagggaatgtccatagcaaacaaggaggcctttaagatatcagactatgaccgaacacttcagaaagcctatcacaagaagtccaaaccagtccttcagcttggagaacaaacaaaccaagaggtcgagccgttggtgaccggagaaaattttggaataacggatttcatttcagataccggtctaactatggatcagctgattggagccgcaccaatcccgaaggcgaaagtggcatacaagtttgaactcggtaaaccgcttgtctcgcctgagtagctgcagtccctaccgacacagatgtacaaattccatgaatggtacatggaaatgagcgccaagggtagagagatgttcggagtgaggatcagaaaccccgacttcttgcaaggagaagatgttctctggctccatttcaaggatgtcttcgatctgtaccatctggacgccctcgacgtctctcttttgagcgcatggattttaatggagattcaaagggcccgacggcggggggtttacgatactgggttcatcgaccctcggaaaatcaacaccgaaatgatcgacaagtacgagaaagacacggaggacaatctcgtccatctcctaacgcagcaacatttcaagacgttcatactactgccgtacaacacagaagtcactgtgtacgactcaatgaataaagaggagaagatttttgacaaggtcttccaactgatagacagggcttgggatcggttccgtcaattggtccgcatgacttggaaagaaaaacttggacggaggtttcattttccgcatattgatatgaaggataatctcccatacaaggattttatcacggctgttcaagaacaactgatgggattcatcaacgaagaagtcctaaatcctgatggtgtattctactacgatggatcgacaattcataacgtcggtccttcctcttctgacataatgccggcgtcaaagtcg

SEQ ID NO: 69375 - DNA, 1116 bp, Oryza sativa
  Clone ID: PAT_MRT4530_70049C.1
atgcctctccccctcgctcctgcttctccgcatccaccagggcgtgaccacgcggatgtggcggcggaagggttcggctctctagcggcgttggtggcagcgggtggaggcggctcggatgcggcattggctttgaagttatgcaaggcggcggatgtgatgcacaaggcggtgggggcgccatcgaagatggatcggcaatggatgtacgctgaccggcggtacaaagagtttattgacggcgtgcattattttttgagagtggccgaagctaataggcataagggttttatttgttgtccatgcaataagtgtaagaatcagaaggagtattctgcatccaggactattcatttctacttgtttgaatcagggttcatgccaagctataattgttggacatcccacggagagcaaggtgttgaaatggaaaaagatgaagtggaagacgacaatattccggactttgctcaatacgttggatttgaaggaagtcaaacgggcgaggaggaaagagatgctgatggtaacgacgttgcggatgatcttggtcagatgttgcaggacgccaaggaggactgcgaaagtgaaaagggggcccataaattggacaagatggggcacaaaaagttggataccactctggagttcttgcaatggaaggcaaaaaatggtgttagtgacaaggcatttggcgatttattgaaactcgtcaagaacattcttccagaggaaaacaaattgcccgagacagcgtacgaggctaagaagatagtctgccctctaggactggaagttcagaagattcacgcatgtccgactgattgtatcctatatcgcggtgaggagtacgagaacctagaagcatgccctgtttgcaaagcactacgatacaagattagacgagacgatccaggagaagttgacgggcaactaacaaagaagaggattcctgctaatgtgatgtggaagtacataatgatgccgattattattcaaggccctaagcaacctggtaacgacatcgatgtgtacctaagaccactggtcgaagatcttaaactgttgtggaagaaggaaggtgtccccgtgtggaacgaggacaaacaggagtag

SEQ ID NO: 69376 - DNA, 1875 bp, Oryza sativa
  Clone ID: PAT_MRT4530_7004C.1
atgccatattccgttagcaccgtcattgtcgtcgagagagagaaagtgcaacaaccagtctactacgtcagcgaagctctccatgacgcaaagacaagatatccacagatccaaaagctgctttacgcggtaatcatgacatcaagaaagctgcgccactactttcaagcccacagagtcacagttgtctcctccttccctctcgccatcaagtcccaggtactcgccgacttcgtagctgattggactatgcctgataacaaatcagacaaccaaatcaacaacgaaacgtgtacaatggcgttccatggtgcactcaatagccaaggagtaggggcaggattcatcttgacatctccttccggagatcaattcaagcacacaatccacctcaacttcagggcgaccaatgacacagccgagtacgaaggactactcgccgggataagagctgcaaccacacttggggtcaagcgactgatcgtgaaaggggactccgagctagtcgcgaaccagacgagaaccactcgagcccggcacttttctggacacctgacaaagccatcagtgaaagaggttagctgcgaaattgacccagccgcccccgacatcagctcggaggccacagaggcagaacgcgccgttgctgatatcgagaacacagacgactggcgtaccccactgatcaaattcatcaacagcgaagagttgcccgaggatgacgcagaggctgagaaaataaccccagacacctcctccttgatatacatgaaggcacctgtgggtcacatgccaaccgccctcaaagatacatgcgatatggtccagcggtgtgaagcctatcaattccacagcaaacacacaaagctacctacacatgcgctccagaccatccctctcacttggccgttcttgtgctgggggctagatatactcgggccatttccacgaggacagggcggctacaggttcctattcgtggcgatcgacaaattcactaaatggatcgaagcggtgcccacgggggaaatcaaggccgacaacgccatcaaattcatcaaagggatattttgcagatacggactactgcatcgcatcatcaccgacaacggctcccagttcatcagcgccgatttccaggattactgcatcgggctgggagtcaagatatgcttcgcctcggtttctcgtcctcaaagcaacggacaagtcgagagggcaaacggcatagtactacaagggatcaagacccgtgtctacgacaggctcatgtcatatgacaagaaatgggtcgaagaactcccatcagtactatgggtcgtacgcaccacaccgacaatgtctaacaaggaaacacccttcttcctcgtgtacggctccgaggccatgctccccagcgagctacgacatcaaagtacacgagtacagaggtattcctatggggatcaggaggaacagcgaaacgacgatgtgaatctactcgaggaaaatcgcaaacaagttgccgtccgagtagccagttaccaacaggccctccgccccacgagaagcgcatccgagcacgcatgctttcgatcggcgactacgtcctccgacgggttcaaagccaagcagggcgaaacaagctctcacccaaatgggaaggaccctacacgatcagacaagtcctgtggccaggcgcattcaaaattgcagacggcgatggccgtgagttggcaaattcttggaacattgaccaactacgtaatttctttgtatgagtcaatatcatccatacctgtaagacaccttacagcatcaataaagcctattttcaggcgcatattacaatcacagtgttccaacccgatgatcccttacccagatgacacctag

SEQ ID NO: 69377 - DNA, 394 bp, Oryza sativa
  Clone ID: PAT_MRT4530_70050C.1
tactcaagcttgcatgcgcaagtgtcacactgcaggtccactccggaggatccccaacactgctttcccccaatgagacagctttccctcacacagcagacaagaaactacctatgggtaaccttcacacctatcatctagttactgccagtagtagtgccaagactcggaatcatactagttcaggttattctcataagaacaaatgcctgtatggtaggctcacataaatggcttatgaagtgaagtcctcaattgatagggcaacttaccaaactacaatagcacacagcttgacagtaggctcacacatataccatacccggtaatgatcacataggtacattaccaccgaacccagtcactcgagaagttcatattccgagaatatcta

SEQ ID NO: 69378 - DNA, 2322 bp, Oryza sativa
  Clone ID: PAT_MRT4530_70051C.1
atggctgatcgcgatgaggaacagatactatacgaaacaatcgcagagggaagcagccagtattggaacgaggagggtaacgtggagagggatgcagaggggaacgatgcggaggaggctaatggaagtcaaccctctgctggacagaagagggcacgcggacaacgaggtgccgcgaagaagatagagggtcggcacatcataactgaggtggacgaagacggccgacctagtgccccggcagaagcagccaggaattttgtacgccacagcggttgggttgtgagggacaacgtgcctgtcagcacgagcttcaagggagatctctacaagaaatacatcctgaagggactaacaccgaacttcgacgtattcccaaagctaagggatcattgggacgagttcgttgcttacaagacagggcaacaagggcaagagatgatggccagaaacaaggaaaatgccgccaagaagaagtaccatcaccacttggggtcaggcggatatagcgtcgcgaagccgaagtgggaggagatggaggctagcttgcttgaggggggtatcgaaccggccaccgctaaatggccggatcgatcgaagttctggtactatgctcacggtggaacgcttaacccagttgatggctcccttgtcttcagcgatcagatatgcgaggctgccagtcgactaacggacgcagtggtggcctcttctcagggcacattccgacccgacagagagaaggatgagctgagtcggatgaggagcaagagagataccgaggcgaagattgcagatcttgagtacagggtattgagctacgagctcagcatgcaagaggaggtggcaaggaaggtggatgaacgtatggccgcacatcggtcccaggatccccagccgtacattcatcctgtaatggtcagcacatcaggcaatcgtagcagctgcgcctcaacggggcaggtggcgtcgggaatggccatcccaacggacccttccgggacttaccactgcaggccgattccagcaggatactcgagggtcgaagttgagctggtggaagccgcgtacgaggacctcgagttggactacccaggaggggacggtgagacgcatctacgagacacaagccacgccatcatactatggcgcaagcgggaggtgaagaggcaactcaagcctcggagtactgaaaagaagatacctattgacccgagcgtgaagaacttcttcaagggaatgtccaaaacaaacaaggaggcgttacagatatcggactatgaccgaacacttcagagagcctatcacaagaagtccaaaccagtccctcagcttggagaacaaccaaaccaagaggtcgagccgttggtgaccggcgaagattttggcataacggatttcattgcagacactagtctatctgtggatcagttggttggaggcgcaccaatcccgaaggcggaagtggcatacaagtttgaactcggtaaaccgcttgtcaaacctgaacagctggagtccctaccgacacagatgtacaaattccatgaacggtacatggaaatgagctccaacagtagagagatgttcggggcgaggatcagaaaccccgacttcttgcaaggagacggggttactaatcgggactccaaacggtttctccaccaatcccgagctcacaactgcattacaaaaggaaaacggaagccaggacttggaccaatcaacacaggcacgacttgggaactaggccgaaaccctaaaactcatcgtagccgacttgctcctggaagaactcctcgtcagcaggatccacttcatcttcttcagcaactggggggagattatttatatagagcaaggcccgtggggatcagccacgtcgggagacctccaagctttcatgacaaggcatttcgaaagccgacacaggtttaccatatgccgacgagaggggtcccagaccaacaacaggttaggtcccagaccatactgtgccaggaagcccaggggtcctctccgacaccaccccggcgaatccacatgtctctcggcatcaaggctcccccgattagcaatttactcagccaggggcgtcccattccacccatgtggtcgtacttgtcttatgttcggatgaaatttccaaggaaacggtccttaagtgcaagagcgggaaaccgtacacccggctcaagatgttcaaaggtggcttgccttgctcgagatctggagcttgatcctcgaaatcctcgcactgcgggtcttcgggctccggaactacacgcgaaacggaacaactcaacaaacggcgaaaattaa

SEQ ID NO: 69379 - DNA, 117 bp, Oryza sativa
  Clone ID: PAT_MRT4530_70052C.1
atgggggtcgagcccgacagctacgccgtggggggagtcgagtccgacggtggctacaacgggccaacatcggttatctcagactctgacaattcatatagcaactttgaagcctag

SEQ ID NO: 69380 - DNA, 3324 bp, Oryza sativa
  Clone ID: PAT_MRT4530_70053C.1
atggctgatcgcgatgaggaacagatactgtacgacacaatcgcatcgggaagcagccagtattggaacgaagaagaggggaacgaggatccaaaccagtacttgaacgaggaggggaacgcggagagggatgcagaggggaacgaggaggggaacgtggagagggatgcggtggggaacgaggaggaggctagtggaagtcatccctccgctggacagaagagggcacgcggacaacgaggtgccgcgaagaagatagagggtcggcacatcataactgaggtggacgcagacgaccgacctagtgccccggcacaagcagccaagaattttgtacgccacagcggttgggttgtgagggataacgtgcctgtcagcaaggtgtactggcgcaaaacaagggcacgcgggggtgatgacagcttcgtcccggaatcagagaaagagatgctgtggaccacaatgctcaagacgttcactctccctgcggaacagttccagaccttcaagggagatctgtaccggaaatacatcctgaaggggcagacaccgaacttcgacgtattcccgaagctaagggatcactgggacgagttcgttgcttacaagacaggtcaacaagggcaggcgatgatggaaagaaacaaagaaaatgccgccaagaagaagtaccatcaccacttggggtcaggcggctatagcgtcgcgatgccgaagtgggaggagatggaggcaagcttgcttgagaggggtatcgaaccggccaccgctaagtggcctgatcgatcgaagttctggtactatgctcacggtggaacgctcaacctagttgatggctccttggtcttcagcgatcagatacgcgaggctgcgaatcgactaacggacgcagtggaagcctcttctcagggcacgttccgacccgacagagagaaggacgagctgtcactcgccctacagactcccgagcatccaggacgaacacgagggaaaggcgtgattccctggaagatgggattcaaggaggacatccacacgtataggagtcggatgaggagcaagagagataccgaggcgaagattgcagatattgagtacagggtatcgagctacgagctcagcatgcaagaggaggtggcccggaaggtggatgaatgcatgacagcacatcggtcacacgatccccagccgtacattcctcctccaatggtcagcccatcaggcaatcgtagcagctgcgcctcaacggggcaggtagtatcacatagcatggatgccatgcaaacccaggacgaaaccacctacctcgttgatgagatcacgcatcggacaccatgtgagctgcatattcccttcaagaacttatcaatcaaggtggcgtcgggaatggccatcccaacagacatttcagggacttaccactgcaggccgattccagcaggatactcgagggtcgaagttgagctggtggaagccgtgtacgaggacctcgagttggactatccaggaggagacggtgagacgcatctacgagacacaagccacgccattatactatggcgcaagcggtacatcatcctccttgggcgacaagcggcgtctcgtgcaccatctcctccggctccgccgtctcctcctgcaccatctcctctggctcctccgccacctcctcctgcaccatctcctctggctcctccgcctcctccgcctcctcctccaccgtgtctgcctgcacctcccaagacaaggtctcgccaagctccacctcctgccagcacaagggcaacgaagaaggccaaagttgagaccaccaaaaacaaggagccgccgtacggttgcactcaagaggagcttgacgcttatgtggcaggagaagtgaagaggcaactcaagcctcagagtcctgaaaagaagatacctattgacccgagcgtgaagaatttcttcaagggaatgtccaccgcaaacaaggaggccttaaagctatcggactatgaccgaacacttaggaaagcctattacaagaagtccaaaccagttcctcagcttggagaacaaccacaccaagtgatcggcgaagactttggcataacggatttcatttcggacaccggtctaaccatggctcagttggttggaggcgcaccaatcccgaaggcggaagtggcatacaagtttgaacttggtaaaccgcttgtcaggcctgagcagctaatggagattcaaagggcccgacggcggagggtttacgatactgggttcatcgaccctcggaaaatcaacaccgaaatgctcgacaagtacgaaaaagacacagaggacaatctcatccatctcctaacgcagcagcattacaagacgttcatactattgccgtacaacacagaagtcactatgtacgactcaatgaataaagaggagaaggtttttgacaaggtcttccaactgatagacagggcttgggatcggttccgtcaattggtccgcgaggcttggaaagaaaaacttggacgtaggtttcattttccatgtgcaaagcaagacaagggaactaacttatgcggctactacgtatgcgagtttgcccactgcctatcaaaccaaatatacaccacacgagagctcgatcgtattcacatgagggaaaaactcccacacaaggattttatcatggctgttcaagaacaactgatggggttcatcaacgaagaagtccttaatcccgatggtgaattctactacgacggatcgacaattcgtaacgtcggtccttcctcttctgacggaatggataaggccctgagtctatcctcccacgcccgtgcggcaacgacgtgcgccctaggtggtggtcgcggcggctgcgggcgcaggcgagcaggcgaggcggcggcggccgcggggaggcggaggcggcggctgcgggcgggcgaggcagaggcggccgcaggcacgcgcgggcgaggcggaggcggcggcagtggcgagggagcacgcggaggcggcagcggcggccgcgggcgaggcggaggcgttggcagtggcgagggagcgcgcggaggcggcagcgggcgaggcggaggcggctgcgggcgcgctcctatggctgcatccgggtgtcctcgtcctgtccctgctgctactcaccgtcagcggccgggcaatgctgcgccggcagcggcgccggatggccgcctcccagcggcggaggatgagcagctggcgctcgacgacgtcgcaggcatctacgagcttgccaggtgcttcgggtggattagtccattagttacccttagttaattaccctgaagatttatgatgtct

SEQ ID NO: 69381 - DNA, 4816 bp, Oryza sativa
  Clone ID: PAT_MRT4530_70054C.1
atggctaataagactctccgcgagttcgctgctccctctgctgacaatgtggccattgggccgcaggtcaacataggggacgtggatttcgacttgaagtccagcctcatcacgattgcgcaggcaaacccgttctgtggtgagcctaatgaggggtccaatgctgatctgcaacagttcctggagatctgtagcacgtacaacatcaagggcgtcaatcccgacaccgtcaggctgcgactgtttccgttctcccttctcgggagagcgaagcagtggttctatgtgatgaggacatcaacaccaacgatacatccacacttccacaattacaacttcatgttgcttgttcatcttgttcttgctggttctcgattgcttgcaggaacaaataccctcgtagttgggctgatcgtgcatccgtcgagattcacgaccacctctggagttggggtaacgattgctaaggcgcaacatccccggatagttgtagtcggatcgccaacgtcactccatccaatcgacttatccctctcatcgaaagatcgagacaccctcgagcacatcaggtggtatcagagcccaagttgctcgtttttctttgactcattacacagcccacccatagctccaccggttcgactaacacttgacagggattcagctaccaaggcatcaatacaccttctccagaggttcgtccaagtccgacggttgccatcacctcctgtttggcatgatgagaattggttagtgagggaccgcacacaagggctcgaggaggatgtttgtatcaccaatgaaaagcttggtcatgttgaacgcacgcaaattgattccaacaccaagcttaccaccttggaagcttctgttgcgacggtgaacaccagtcttgatggtattgtgtggcgtcttgatgagatggcccgagcatcccaccatggtagtgagatggatgaccatgactacgttggtgattctgaggatgatgcggaccagcgacgacatcgcttcaatcgccgtggtgtggctcatcgtcggccacgccgtgaggtacgaaataatgatgattcatttggtaagattaaattcactattcctgcttttgatggtaagtatgaccctgatgcctatctttcatgggagttagtagtagatcaaaagtttgcttgccatgatgttcctgaggataagagggttagggctgccaccagtgaatttactgattttgcttctgtttggtggtgtgaataccgtcgtactcatataaatgctttgccacctacttgggatgatttgaaacaaattatgcgtgctagatttgtaccttcatattatgcacgtgacatgttaaataagctgcagcaattgaaacatggtggtactagtgtggaagaatattaccaagcgctgcaaatgggtagaactccatggacggctcggagtggcgctgcccccaccgatcgttcatcagtttcgacatcgacatctgcaccctccaacagcaacagcaacaaagcgtggccaacaccttctacggcccgctctcgtgcttcagaggttgcagaaaagcccaccaagagtgcctcctctgttgcttccacgggtagaacaagagatgttcagtgccaccgatgcaagggctttaggcacatgcaacgtgactgccctagcaagcatgttttggtagtcaaggctgatggtgagtactcgtctgctagtgatttcgatgaagatacacttacattgcttgtagctaacaacatagctagcgaggatgagaaacacatcggggctgatgtagcggaccaatatgagagccttattgtgcaacgtgtcttgagtgcacaaatgggcaaagcggagcagaaccagcggcataacctttttcagacgaagtgtgtcgtccacaagcgttcctggtgcacaatcatcgatggggccaccgggactaaaaatctggggatactatacgatacaaacgcagagggaagcagccagtactggaacgaagaagaggggaacgaggatccaaaccagtacttgaacgaggaggggaacgtggagagcgatgcggaggggaacgaggagggaaacgatgaggaggagtctactggaagtcatccctctgctggacagaagagggcacacggacaacgaggtgccgcaaagaagatagagggtcggcacatcgtaactgaggtggacgaagacggccgacctagtgccctagcagaagcagccaagaattttgtacaccacagcagttgggttgtgagggacaacgtgcctgtcagcacggtgtactggcgcagaacaagggcacgcagggataatgacagctttgtcccggactcagaaaaagagatgctgtggaccacaatgctcgagacgttcacgctacccgcaggtacgaagaacatagtgaaacagtggactctgaagaaaatagcagaacagttccagagcttcaagggagatctctacaagaaatacatcttgaagggactaacaccgaacttcgacgtattccaaaagctaagggatcattgggacgagttcgttgcttacaagacagggcaacaagggcaagcgatgatggccagaaacaaagaaaatgccgccaagaagaagtaccatcaccacttggggtcaggcggatatagcgtcgcaatgccgaagtgggaggagatggaggcaagtttgattgagaggggtatcgaaccggccaccgctaaatggccggatcgatcgaagttctggtactatgctcacggtggaacgcttaagccagttgatggctcccttgtcttcagtgatcagatacgcgacgctgccagtcgactaacggacgcggtggaagcctcttctcagggcacattccgacccgacagagagaaggaagagctgtcactcgccctacagattcccgagcatccaggacgaacacgagggaaaggcgtgattccgtggaagattggatttaaggaggacatccacacgtataggagtcggatgaggagcaagagagataccgaggcgaagattgcagatcttgagtacagggtatcgagctacgagctcagcatgcaagagaagatggcaaggaaggtggcgtcgggaatggccatcccaacggacccttccgggacttaccactgcaggccgattccagcaggatactcgagggtcgaagttgagctggtagaagccgcgtacaaggacctcgagttggactacccaggaggagacggtgagacgcatctacgagacacaagacacgccattatactatggtgcaagcggtacatcatcctccctgggcgacaagcggcatctcatgcaccatctcctctggctccgccatctcctcctgcaccatctcctccggttcctccgccacgtcctcctgcaccatctcctccggctcctctgcctcctccgcctcctccacctccaccgtgtctgcctgcaccacccaagacaaggtctcgccaagctccaccgcctgcccgcacaagggcaacgaagaaggcgaaagttgatgccaccaaaaacaaggagccaccgtacgattgtagtcaagaggagcttgatgcttatgtggcaggagaagtgaagaggcaacttgagcctcggagtcctgaaaagaagatacctattgacccgagcgtgaagaactacttcaagggaatgtccgcaacaaacaaggatgccttaaagatatcggactatgaccgaacacttcagaaagcccatcacaagaagtccaaactagtccctcagcttggagaacaaccaaaccaagaggtcgagccgttggtgaccggcaaagattttggcataacggatttcatttcagacaccggtctaactgtggatcagctaattggaggcgcaccaatcccgaaggcggaagtggcatacaagtttgaactcggtaaaccgcttgtcacgcctaagcagctgtagtccctactgacactgatgtacaaattccatgaacggtacatggaaatgagcgccaagggtagagagatgtttggagcgaggatcagaaaccctgacttcttgcaaggagaagatgttctctggatccatttcaaggatctcttcgatctgtaccatctggacgccctcaacgtctctcttctgagcgcatggattttaatggagattcaaagggcccgacggcggagggtctacgttactgggttcatcgaccctcggaaaatcaacaccgaaatgatcgacaagtacgagaaagacatagaggacaatctcgtccatctcctaacgcagcagcatttcaagacgtacatactactgccgtacaacacagaattccattgggtcctgttattcttcgacttggacgcatgcagagtcactgtgtacgactcaatgaataaagaggagaagatttttgacaaggtcttccaactgatagacagggcttgggatcggttccgtcaattggtctgcaggacttggaaagaaaaacttggacggaggtttcattttccatgtgcaaagcaggaccagggaactaacttatgcggctactacgtatgcgagtatgcccgctgcctatcaaaccaaatatgcaccacacgagagctcgatcgtattcacatgagggataatctcccacacaaggattttatcacggctgttcaagaacaactgatgggattcatcaacgaagaagtccaaaatcccaatggtgaattctactacgacggatcgacaattcataatgtcggtccttcctcttctgacataacgccggcgtcgaaacttaggcttaggcaac

SEQ ID NO: 69382 - DNA, 4347 bp, Oryza sativa
  Clone ID: PAT_MRT4530_70055C.1
atgtcaatgagaggaagcaaccaggctattatcttgaatgctaagctcaaaaatcttagaaggggtcttaaagcttggagcaaaaggttatcaaatctcaacactcaaatttcaaatagtaatgaagttctgacaacccttgatgatctggaagaacaaagacctctagctctgcaggaatggaatttcagaataattctcaaagaacatattctcaagcttttgaattacaaaaatgagttctggaaaaaaagatgtaccatcagatgggtaaaatttggggatgagaacacaaagttttttcaggcctcagcaactgatagtcatagaaggaataaaatctcgcatctcagtttggatgatggaagtatagttactactcatgctgaaaaagaacagattttatatatggcctacaaaaacagaatgggaactcggggctcaatggacatgatcttaaatttgtctgatatggttcgtagaatggaaggcttggagtgtcttagtgagatcccatctacagaagaactggacaggatcattaaaaacatgcctactgatagggctcctggaccagatggtttcaatggcttatttttaaacaaatgttggagtatcataaaacaagacttctatgagttggcttttcagttctttaccaacaatgtctccctcgagaatttgaatcactccttcataacgttgatcccgaaaaagccaactccagaaacagcaaatgatttcaggccaattgcacttcagagttcagcacttaaattcattacaaaaatcttggcaaacagattgcaggaagtaattctgaaactcattcatgataaccaatatggtttcatcagaagcagaaccatacaagattgcttagcctggagctttgaatatattcatcagtgtcatcagtccagaaaagagatgataattttgaaaattgactttgaaaaagcttttgatttggtggaacatgaggcaattctccaaattcttcaggccaaaggattcaattctacctggctaatcccgttatttcaagctatcacatcggtgactgtaggaactggagattctgctctttttcggaaagataattggagcaatcacaatttggaaaatgaattccctgtcttgatttcttatggaaggaatgaagatgtcactgtacaaggatttctgtcagccacagatattggtcaaaactttcacttacctctgtccaaccaagcaattcaagaatggggtaatttaaacaacagattacaaagcttacagattgtcactgaatcagacaaatggtcatataggtacatgggcgttctgaagaagtatgtttgtaaccgtgctcgtccagaggcaagcatcgccaaggggtatggaaaagaggaggtcattgaattctgcgtagaatatattgaagaccttcgcccaatcagggtacctgaatcacgccatgaagggagactacggggaaaggggactcttggaaggaaagcaataatgacggtagacaacaatttattccgtaaagcacatttcacggttctgcaacaatcttcattagtggctccttacatcgaggagcacttggctctagttcgcaccagaaacatcggtaagtccgatgcatggattacacggcatcacattgatactttccccgcgtggctgcgacaacatctcatgggtaacgagacgattaaccaacaactggccttcctggcaaggggaccatctggctcgatcgcgacattccagagatatgagatcaatgcgtacacattctacacgagagcccaagacatgaagagcatgaaccagaacagtgttgttcatatcgatgccatgggacacgatggtacaactggcacgtattacggtgccatcaaggacatatgggaacttgactatggacctctcaaggtccctctgttccggtaccaatgggttaggttgactggtggaggcgtaacgattgatgacagtgggatgacaacggttgaccttaacaaggttggatactcagacgaaccttttgtccttgccaacgatgtaacgcaagttttttacgtgaaggacatgtctagcaaaagaaagaagggcaaaaggcctgacaagccgaagcgccacgtggttctcccaggcaaaagaaaaatcgtcggagtagaggataagactgacgaggattacgatcagtttgatgggcaaccccctttcacgataagagacttcgtcgtcgtccctcaagccgaagtggtagctaaccctcggaggaatttgcgcaggcaaatggttgatcgcgatgacgaacagatactataccatacaatcgcagagggaagcagccagtactggaacgaagaagaggggaacgaggatccaaaccagtacttgaacgaggaagggaacgtggagagggatgcggaggggaacgaggatgaggaggctagtggaagtcaaccctccgctagacagaagagggcacacggacaacgaggtgccgcgaagaagatagagggttggcacatcataactgaggtgtactggcgcagaacaagggcacgcggggattatgacagctttgtcccagaatcagagaaagagatgttgtggaccacaatgctcgagatgttcacgctccctgcgggtacggagaacatagtgaaacagtggactcttaagaaaatggcagaacagttccagagcttcaagggagatctctacaagaaatacatcctgaaggggctgacactgaacttcgacgtattcccaaagctaagggatcattgggacgagttcattgcttacaagacagggcaacaagggcaagcgatgatggacagaaacaaagaaaataccgccaagaagaagtaccatcaccacctggggtcaggcggctatagcgtcgcaatgccgaagtgggaggagatggaagcaagcattattgagaggggtatcgaacaggccaccgctaaatggccgtatcgatcgaagttctggtactatgctcacggtggaacgcttaaccccgttgatggctccctgatagagaaggacgagctgtcactcgccctgcagactcccgagcatccaggacaaacacgagggaaaggcgtggttccttggaagattggattcaaggaggacatccacacatacaggagtcggatgaggagcaagagagataccgaggcgaagattgcagatcttgagtacagggtatcgagctacgaggcaagaggaggtggcaaggaaggcaatcgtagcagctgcgcctcaacggggcaggtaggatcacagagcatggacgccatgcaaactcaggatgaaaccacctgccccgttgatgagatcacgcagcggacaccatgtgagctgcatattcccttcaagaacttatcaatcaaggtggcgttggaaatggccatcccaacggacccttcagggacttaccactgtaggccggttccagcaggatactcaagggtcgaagttgagctggtggaagccgcgtacgaggacctcgagttggactaccctggaggagacggtgagacgcatctacgagacacaagccacgccattatactatggcgcaagcggtacatcatcctccctaggcgacaagcggcgtctcgtgcaccatctcctccggctccgccatctcctccgccacctcctcctgcaccatctccttcggctcctccggctcctccacctccactgtgtccacctgcacctctcaagacaaggtctcgccaagctccaccgcctgcccgcacaagggcaacgaagaaggcgaaagttgacgccaccaaaaacaaggagtcgccgtacgattgcagtcaagaggagcttaatgcttatgtggcaggagaagtgaagaggcaactcaagcctcggagtcctgaaaagaagatacctgttgacccgagcgtgaagaacttattcaagaaaatgtccacaacaaacaaggagatgtacaaattccatgaacggtacatggaaatgagtgccaagggtagagagatgttcggagcgaggatcagaaactccgacttcttgcaaggagaagatgttctatggatccatttcaaggatgtcttcgaactataccctctggacaccctcgacgtctctcttctaagcgcattgattttaatggagattaaaagggctcgacggtggggggtttacgatactgggttcatcgaccctcggaaaatcaacgccgaaatgatcgacaagtacgagaaagacatagaggacaatctcgtccatctcctgacgcagcagcatttcaagacgttcatactactgccgtacaacacagagtga

SEQ ID NO: 69383 - DNA, 403 bp, Oryza sativa
  unsure (1)..(403): unsure at all n locations
  Clone ID: PAT_MRT4530_70056C.1
tttgggctgcangactcgttannagacntccngantgncgnacaanctggtaccncgntcnattcggttctctcntgtccncatntccagtgtctcctcagcaangacaccgnctccgctcctcccggtgaccaacccggcagccgcggggtcntcancggnacgncaccgccgtgggatctgacactncgatcnccaanccggggttccngcncttccagannaagatctccnactcggcgngngtctcgctgtcccaccggcnganntgnanggatctcgtnaaccgntaagngtcctcaccngcggactcntccttcnattttntctnccncntcnnccgcanccncccntntnncggnatcancttcggatnctnggtatncntncanncnngggcgtc

SEQ ID NO: 69384 - DNA, 696 bp, Oryza sativa
  Clone ID: PAT_MRT4530_70057C.1
atgggtacacttccacagctctcttgccctggtgctcatgcacagtatggtgtggtggaactggagcctcttccagtggacccttctaatgagactcttgcatcttcctatgtgcctcctcttactcaagtctatagtcgtcgccctcgtgttatggagccttatgttgatgcttctcctattgctcctccgagatacaatcttcgggatcgtaatttagttacgatttgtccagaggatcgctatggtcgctatgcttatgttgctactattctcgctgaacctagttctcatcaagatgttgatattcatcaagaatggcaacatgtgatggcagaagagcttgctgcacttgagcgtactgtcagtgcagctggtttctcggccagtgcttatgatcctgcactttttgtccatacttcgcctcgtggtcgtaccattctttttctctatgttgatgatatgattatcactggcgataatgctgattttattgctttggttaaggcacgtctcaatgctcaattttctgatgatcttctggatagggcttctcttactgaccaacgcacggttgacactcctatggaacttaatcttcatctttctgccactactgaggctgagttacgagctatagcccagcagatgttacttggttacattggttacttgaggatcttggtgtttctgtga

SEQ ID NO: 69385 - DNA, 300 bp, Oryza sativa
  Clone ID: PAT_MRT4530_70058C.1
atgatggttgtgacggttggaatggtcggaaataccctccaaccttcattgggagctaatccacaccgtccagccgcaatcctgcatcaaacgatgccaggggggtttggccgaaccccctggttcggccgaaccaggggccggcccaacctggcccaaattcggcaggtggcctcctccgttgttcttcttcgtagacttgtgaattttggcccaattcatcgtgtcaattctgagttcttgacccattcgtacataagtctggttcttgacatcgtccgattgatttatcgtctgagt

SEQ ID NO: 69386 - DNA, 507 bp, Oryza sativa
  Clone ID: PAT_MRT4530_70059C.1
atgggggagccctggaggaagcctgtgcagcaaggaacatggcttgccgcaggaggggccaggaggggtgccgtgatcctcggccgggaggggcacgggtgcgggtgcaggcacggtggatctgaccgtcgcagggccgcaggcggcggatccggcagcgggaggggcgcgagcgtggcttcctccagcctcaaggcggcggcggtgatggtgacgggggacggatccagtggcgcgatggttggagaccgggaaaagcaaggagagggcccggcctgtcagtggctcggatggtcttctccttcctccgtctccttcttcctcccgaccgagcgggagcagcaggggaaacacgacgcgcacggcaaggccggccgagggcgacccgacggcggccagggaagggtgcggcaaggctccggcgatctcccgccggctgccacggcgcaggacggcgcgggggcgagtggcacagcatggccaccatggctgggcacgtgtggctag

SEQ ID NO: 69387 - DNA, 213 bp, Oryza sativa
  Clone ID: PAT_MRT4530_7005C.1
atggcctacatccgtcatggccacagcaagtttgtgacaaggaaggatagtatcaaaatcatttatgcatttgttaggaaccttattatggatacaaggaatttgctccacattgctatatacaacatcaactacatcagagatctattcaccgagaagtacttcaatgataagtcagttccgggaataggtcacattatctatagcccctaa

SEQ ID NO: 69388 - DNA, 370 bp, Oryza sativa
  Clone ID: PAT_MRT4530_70060C.1
ttagagctcctcgcggaccgtcgccacacccgtcgtctggttaggctgggctggggcggtgatggagaacacgaaggcggccccgttggtgtcgtcctccccgttctccgtgttgtcgctcccggctgccgtggacccacgcccgacgttgcgagcacccccactactgcatccaggcctaagcgtcgcgccgagctgccgcacccgctctagcggcacgttggagtggactccagtgaagacgctcgctctcatggccaaggtcgtggtgatcgacgatgggtggtcccactccgtctctgccttccaaaagtgggctgtcctcgcggagaatctcgctggctcctactttgtcgccgccacgtcgtga

SEQ ID NO: 69389 - DNA, 580 bp, Oryza sativa
  Clone ID: PAT_MRT4530_70061C.1
aaatagatgctctttaattgatcacagcaacattgtaaggcctgacatagatttaggggcataaatgcaatgctatgtggatgcatatataatatattacatagttagtgacttttaattctattttcatgttgattaaacgatatggatatccaacgaactatggcaattgatcttctgtcagcttagtcattctggatgacagttagcctctatccgaacaatctgtcaacaaattactacgatgagaagaataatcacgaaatgactttttcatgtggtttaattcaaatcaagttcactgctgatttggttatctagcataaagtggcacaataaggacaatggattaggcagaatacacaaaagcgaatcaagtggatggcattctatgttgatcctgctttgcagacttattgatactgaaatgtttgtacttggtgatcatcctttagcacacacccctataatccctattttctttcaaaaatgtttgatttctgttcttttagctaggtgccgggaaattttatccctatgattaattcctttcctgttgtttcatgcactggccttttat

SEQ ID NO: 69390 - DNA, 499 bp, Oryza sativa
  Clone ID: PAT_MRT4530_70062C.1
gctcttgtttggcttcctccgtctcactcctactcctgggctgcccccattcttctctggatatttttctttttcatcttctttgagttggagggcttgattttaggggggactgctcgatcggcagggttaattccgatctctatatccttcccggacagagccgggatcaggtaccgattctgccactcacatccgagttcttcttcgttttgatctgtttcttttttactcgtatgtgcacccaaaagatagaagatttactaccctaggaagaactgtggtttagtgagcagttaattaggaatctaatccttggtcatgatgtagaacacggttacacgggtgtgctctgctactctgtagtagcagttctttcttagacttattaaaaggttcagtggcatgggttcgtcagcaacctttctttagagggttattaaacatgtattttgcttgtccttgggcatatgatttgaggacttttgtgatttctatc

SEQ ID NO: 69391 - DNA, 388 bp, Oryza sativa
  Clone ID: PAT_MRT4530_70063C.1
atggggagggcctcaggagcgaatctggcgccatcgagcctcgggagggtggatctgccgccgccatgccttgggagtggcgcagggaagagggcagcggtggtggctgctctcgacatcagtgacgcggggaagggggcggcggggagtggatccggcgcctcctcctccctccccaccagcggcggtggcgaagaggatggatggcagttcgaccacgacgataacctcgagtgcaacgacgctggcggcaggtttgcttgggccaacgtcggccggcggatatctgcgatgatgatatccagcttcagcaacttcctgtggcagatttgcatcggcggtggtaacggcgactcctgtggtaaccgcgggaggatccggcagtcct

SEQ ID NO: 69392 - DNA, 902 bp, Oryza sativa
  Clone ID: PAT_MRT4530_70064C.1
ggtctaccagtccaggtgcctcgtgtttcttgtgagttatttagcatggcggtaaagacttgcataggagatggacaatccaccttgtgttggatggatagatggctggaagggaaaactgttagtgagatagctcctaatttgactaagttgatagccaaaaatactgttaggcggtgtacggtggtacaagccttggacaacaaaaaatgggtaacagatattaacggaccattgatggttcaggttcttgtggagtttctttagatctgggacttggtcaaaggggtgatcttacaagttcgagtcccagatcaacatgtttggaagctctcaaactcatgaatttatacttctaaatctgcatatgaggccatctttgttgggacggtaaggtttgcaccttggagaagaatttggaagagttgggcgcctttggaattcaaattgtttatatggttggcaattaataatagttgttggacagcggaccggttggacaagtgaggacttcaacacccgcctacatgtccattatgtgatagctcaggaaactattaatcacatcctaatcacttttgtgttttctcgacaagtatggtgtttggtcctgaaacggcttggttactctagctttccaacccaggttactgctaggagtactaattggtggtcaataacggtaaggggtttacctactaatgagaagaaatggctaaactctttaatcattttggtagcttggtaaatttggaagcacatgaacaactgtgtgtttaatggcactaccccatgcttggccgatgtcctctgagccatcgctaatgagggcgctatttggtgcctagcaggagctgctaggctccgtgatctctttagggctgggctgttaatgcactagt

SEQ ID NO: 69393 - DNA, 870 bp, Oryza sativa
  Clone ID: PAT_MRT4530_70065C.1
atggccgcgggcggtggcgggcggcggctgcagcaggaaagcacggtggctccgaggcctacgacggaggcacggtggaggccagtgagagaggaggcacagggaggagagtcggggagccgtgacgctagctccccactgcttccgctgccgcggccggcattgccgtggatgaccagcctcgtcaacgtccgcgacgcgatatcggcgaagctcgtggcgcaatggctgagccgcaggtcctccagaccggaagtcgcaaccggacttgctcgacgaagcggcctccgagcgagacgccgaagcactggacaccgcagtgcacccaccggacgacgtggcggagggcatcccatgtccatcccgcgggcgacgttgacggacatccagaacctctcgagtgtcctggtgcggtggcttagccgatcggcatcggcctcatcgtcgttgccgccgctgctgccggcggtgatgcaagtgcgcttgctcggcggagcgtccatcattgtcttgtcgattagtctcggctgcgtcctcgcgtggtcgagggcggctcctcctcccgatgacggcagctgcagtggggaaatggccgtgccgagccttgagccttatggccatctaacgtttagcaaaatcgtatccggaggctttgtcggcacagtgtcccgcgctgtttgtcctcgtcatgcctgccccatcttgcccccaccagggtcatccccgccgttgctgaaccctgattcgatgatgtcttattgcgctgtcgccgattccgtgaagttcaggggccctaaactttcagtaaagcacggctatatgccctttgtcaaaaaaaaaattggcatcgaaaatattgaactcaaccag

SEQ ID NO: 69394 - DNA, 836 bp, Oryza sativa
  Clone ID: PAT_MRT4530_70066C.1
ccttcttcttccttgcagcagagcagaggtgcgagtgtgcgacggcggctggcccgagcctggacggctcagccatggcgaggcggcggcggggcggtgtaggccccacatcctttctttttctcttctttctctcctctctcgagcaggcgtggtggcagacttgcgtgaggcggccggcggcggagcagggggcggcggcgctggagagagggagagagacggccgacgcgatggcgagctcggcggcggagagtagcggcgcgcggcacggcagcgggggagagggggcgcgcgcaccgcccgtcctccatcgcgatggcgtgcagcacgttcttgtcctccagcgacgccggcgtgccgacgtcggaccacgaccaggccacgttcttcttgtcccggaagtccagcaggatgatgaaggaggtgtctgtccgtgggaacatggtcgctgccatgagcgtgctcgtgccgtcgagtcactggagcttgtcggcgtcgccgagtgcacagcccggcggctcgtagaagaagtcggcctgctcgccggtggtgcagtcccagacgccaatgccacctatagctgaagcgctgccgtgcgcgacgcagcagccgccgtcgggcgcggcgcggacagccgtcccgtcgcccgcggcgttccctgccatggacgccgccagatgcagctggtccccgtcgaacggcccccaccgtgcctcgcggaagaggtcgaggaggccgtaatagagcgaggtagagcgcctcgcgccccccggcaaaaccttcgcgttgctgtcgaagaagaacagagaaagagagattgacaagtgggccca

SEQ ID NO: 69395 - DNA, 877 bp, Oryza sativa
  unsure (1)..(877): unsure at all n locations
  Clone ID: PAT_MRT4530_70067C.1
ctcaanaactgctcgatgaaatgtttcttgagtactactaagtttgaatacatattgaattatctttttagtacttttacatgcggaaaccttcttccttgtttttgttattatattttaatggaaagtaatttatatttaacaaatatttcaatggctcatccatgtcaatcaactaaatcaataagaacatgcttagtttattcccattagggggttgtataaaaaatacaaaacaaaatagatgtttggtgattgtatttacttgatctggcttttggtgtgctcctaagcaagtctgtcaactttttttgcctgtggacatattgtaggggctcatccaagtatttgtctcttctatcgattggcatgtagtgatttagtgccttcctctggattgtgcacacaagaactgttgaatctgttccccctccactttagcttaagctccattagtgacgatgagcaacccataaccatggagatcatctatttcttctataaggtactcatgtgctgcacgtgaggtagggctaattgcagccttgggtactgccctacttgctagacaacacgatcgtagcattgtcaaggcactaggcatgctatggatcttcgatgccgatttcctcgtgccgagaagtaggaggatctataaaactacacgtatttttcgtcttgaggattaggatggtatatgtactctacatctgattgtgttagcactaccttccccgttgccggcttcgtcttacggaggcctttccgtgtaaatttggtttcccttcccttgcgccaggttagtcaaggttgtttagtgttgttaagattatcatgaatgcatactcatccttattataaacacccctcctcccat

SEQ ID NO: 69396 - DNA, 962 bp, Oryza sativa
  Clone ID: PAT_MRT4530_70068C.1
atgtccaagtttttattacaacctctgttgatcacagctgaatcatttcctcgttcaagtgttcttgttgtgccatgagggtgaaggcaaaatttgctacaggacactcaaagattgtggtctttgctgtgagacacccgaagatcgtgtatttgctcgtggacacggtaaaaaagtgcaacgcgaaggttttgccggggggcgcgaggcgctctacctcgctctattacggcctcctcgaccgcttccgcgaggcacggtgggggccgttcgacggggaccagctgcagctggcggcgtccatggcagggaacgccgcgggcgacgggacggctgtccgcgccgcgcccgacggcggctgctgcgtcgcgcacggcagcgctgtgcgcgtggtgcatcctgtcacaatgatcataagacctcagtcagctataggtggcatcggcgtctgggactgcaccaccggcgagcaggccgacttcttctacgagccgccgggctgtgcactcggcgacgccgacaagctccagtggctcgacggcacgagcacgctcatggcagcgaccatgttcccacggacagacacctccttcatcatcctgctggacttccgggacaagaagaacgtggcctggtcgtggtccgacgtcggcacgccggcgtcgctggaggacaagaacgtgctgcacgccatcgcgatggaggacgggcgcgccgccgccccctgctccgccgccggccgcctcacgcaagtctgccaccacgcctgctcgagagaggagagaaagaagagaaaaagaaaggatgtggggcctacaccgccccgccgccgcctcgccatggctgagccgtccaggctcgggccagccgccgtcgcacactcgcacctctgctctgctgcaaggaagaagaaggggaaaaaagatagagagagaggaagaacagtgtccagggtgagctag

SEQ ID NO: 69397 - DNA, 3276 bp, Oryza sativa
  Clone ID: PAT_MRT4530_70069C.1
atgaaggggaagcggggccgcgtgcggctcaacgtcggaggccgggtgttcgagacgatggcctccacgctcgccagcgccggccgggacaccatgctcggcgccatgatcgacgcctcctggaaccacggcggcggcggggacggcgacggcgagggtggcgcggacgagtacttcatcgaccgtgacccggagtgcttcgcggtgctgctcgacctgctccgcacgggggggctccacgtgccgccccacgtcgccgacggggtgctctgccgcgaggcgctctactacggtctcctcgaccgcgtccgcgccgcgcggtgggggccgttcgacggggaccggctgcggctggcggcgtccgtggccgggagcgccgcgggcgacgggacggccgtccgcgccgcgcccgacggcggctgctgcgtcgcgcacggcggcgccgtgcgcgtgtacaactgggtgatggaggagcgccgggccgtgcacctcgaccacgcgccggtcaacgacgcggcctacctcgacgaggccacgctcctcgtcgccgcgcgggagaggcccggcaccggcaggcgcgacggcggcgtggcggccttctccgcgctcaccggcgacctgcgccaccgcttccgcgtcgcgcacgatcgccacgtcaggtcctacacccccggggcgctcgccttcgacagccggtgcaaggtcttcgcgagctgcaagggccggttcaacgagtacggcatcggcgtctgggactgcaccaccggcgagcaggccgacttcttctacgagccgccgggctgcgcgctcggcgacgccgacaagctccagtggctcgacggcacgagcacgctcatggcggcgaccatgttgccaccacggacagacatgagacacctccttcatcatcctgctggacttccgggacaagaagaacgtggcctggtcgtggtccgacgtcggcacgccggcgttgctggaggacaagaacgtgctcgccatcgcgtcggccatctctctccctctctccagcgccgccgccccctgctcctctgccggccgcctcacggaagtctgccaccacgccacttttttacagtgtccacgagcaaatacacgatcttcgggtgtctcacagcaaagaccacaatctttgagtgtcctaatactccctccatcccaaaatataaatatttttggacttcggtacagtctctgagatgccactttgactaataatatcgcaagagccttggtgaaaccatcagctatttgatctttagttgagatgtactcaatctctagtagcttccttgctaccctttctctaacaaaatgataatcaacttctatatgctttgtgcttacatgaaccactagatttgatgacatatactttgctccaatattatcgcacaaaatcttggctgctgcaggggcttgtatctctgactcttttaacaaagtcttattcactgggaaagaaatatcaggtcttgtcagtgttaaatactgtaaagccccaacaacacttctatgttgtgtggcatcatttggtcctaatagacttccctcatttactgacaatttttcagaggtagataatggagtagtaactggtttacaatcattcattcctaccttgcgaatcacatatgttgcatacttttcttgacttaacagaatgccattagtcatcttctttacctcaataccaagaaaatagtggagctcacctaaatccttcagagcaaactcctttccaagatcctgtagcaaggctggaaccgcactaggcacataactggctacaataatgtcatcaacatgaataagcagaaacattgtaactcctcctttactatagaaaaatagagatgtatctgcctttgaggctttgaaacctaactcctgtaatttagtacttaaccttgagtaccatgctctaggagcctgtttcaacccatacaaagccttatctaacttgcaaacataattaggtaaggaggatttctcataccctggaggttgtctcatatatacctcttcttctaagactccatgaaggaaggcattttgtacatctagttgtcttagactccatcctctagatacaacaatagataggactgttctgatagtaacagctttaacaacaggactaaaagtgtcctcataatctatgccatacctttgcttgaagccttttgccaccaatcgacccttgtatctatccagtgttccatctgcttttctcttgatcttgtagacccacttgcagtcatttacatttctccctttcttttctttccagataccactgctcagccgagtgtgaggacgagtcggcgcagaggatgttggcggctcaatctccagtgcgtacgtctccccctgaggcatcaatttctcctgcgttttcttcattagattcattaggcatagggacaagaaatgtgatgggatataccaatcaccccagtcagtttgaacagctataattttgcgatcaaagagtctctcaaccaaattctgaaattcatggaacttatcaaaaactgcgccatttgccgcatgaatttgattgttccccttgtatctctctcgaaccgccagcttgtctagttcgccggtgatgtgatctgttgcgcccgtgtcaagataccagttggtatccactccataggcagcatgggtagcagcagcaacatgcctttcatcaggcacgtaggagtcatcgaaacaatgccagcattcagaggcaacgtgacccattttgtagcaaacttggcacacgggtctgttgtcgacgcgctgctgattgttgctgcccctgttctcatagttcaacaaaatagagtacaattctgcgacggtaacaggttctactcttgtcaccagtccagagatagcaggttcatattcatcatctttctgtgttgtgcagagagaaagcttgatgttgagagagcgtgctcgtgtctgagacatgaacatgctctctatggcgcgccatgcatcacgcgccgtcttggatgtggcgacctgggtgaggacgtcacacgacagagatgagaagaggaagccgaggacctgctggtccgtggcaaaccactcctggtacgctggatttgtgaccaccatcaccttgtcgcccttctcgcccttcttgcgctcgatctgcgcactccaaagcgcatggttctgttcccctagtttctcagagatttggaagccgaagagtggattggagacggcagaggaagagctggccat
